United States Patent Application Publication US 2011/0183924 A1 - sequence listing, part 84

SEQ ID NO: 288599 - DNA, 3040 bp, Homo sapiens
agcgggtcagtcccctcgaagcccggttgccgtggaagccgcgtggggcgccttcctcagctcttcagttgagggtaccgggggatcaagggctcgggggctcacttccaccttgaagccattccttttatttggagagggaaatacttcagctccgggaatgagcctgcagaaaacccggtgacgccgatgctgcggcatcttatgtacaaaataaagtctactggtcccatcactgtggccgagtacatgaaggaggtgttgactaatccagccaagggttattatgtgtaccgtgacatgctaggcgaaaaaggagatttcattacttcacctgaaataagtcaaatctttggggagctactaggtatatggttcattagtgaatggatggccactggaaaaagcacagctttccagctggtggaactgggcccaggtaggggaaccctcgtgggagatattttgagggtgttcactcaacttggatctgtgctgaaaaattgtgacatttcagtacatctggtagaggtaagccaaaaattaagtgagattcaagcattgacactgactaaagagaaggtcccgttagagcgaaatgctggatccccagtgtatatgaaaggtgtcactaagtctgggattccaatttcctggtaccgagatctgcacgatgttccaaaaggtaattacctttatgtggattaatgaaagaattttgatcacaaccctcacagtattgatgggactgtaactttttacagcaatataatagattgagttactgctgccaagtcccttatccatagagagtagcctacttttttctagaaaagagcatcttaatagaaaataaagttgcctgacattaagtagtagtttatttcatgaagctttgtaaaatcccaaacaaaatgtaaatctcctttgtacttttgagtatttccctatagctagggttgtaccgatgacggagcagcccaaggcagctggggctgatggaagcagtgttagtaggtgggtttagttcagttatagagtcttttaaaaaatccttacttgcctaaagacaagcaaggtgtgggggaaaatccctgtactagtcaggaatactgactagtattgactagtttgagtcttgactcaaagccaaagtgggggtacgatcttgggtaagggatctcaagccattcctgcctcagccttctcaggctgagaagcccgattttatgaaatcaaattcccttccagctaacaactctgacttctaatttctttcaagccttgtgatgaataaaagctttaactgctatttcaggtatttccattttctgaccccatttatgtgtaaaataagaatagtaataattgttctatgttctgcagtgtaagttttccatgaagaggtagataattctgtggtagtgatgattatggaggaagtaggcattttttttacagttaatattcaaaagaattaattcctgtgaaatgtggaaacattaattgttttcctctttttaaatagggtacagcttttatcttgcacatgaattttttgatgttcttcctgtgcataaatttcagaaaacaccacagggatggcgagaagtatttgttgacattgatccacaggtttctgataaactgaggtttgttttggcaccttctgccaccccagcagaagccttcatacaacatgacgaaacaagggatcatgttgaagtgtgtcctgatgctggtgttatcatcgaggaactttctcaacgcattgcattaactggaggtgctgcactggttgctgattatggtcatgatggaacaaagacagataccttcagagggttttgcgaccacaagcttcatgatgtcttaattgccccaggaacagcagatctaacagctgatgtggacttcagttatttgcgaagaatggcacagggaaaagtagcctctctgggcccaataaaacaacacacatttttaaaaaatatgggtattgatgtccggctgaaggttcttttagataaatcaaatgagccatcagtgaggcagcagttacttcaaggatatgatatgttaatgaatccaaagaagatgggagagagatttaacttttttgccttgctacctcatcagagacttcaaggtggaagatatcagaggaatgcacgtcagtcaaaaccctttgcatccgttgtagctgggtttagtgaacttgcttggcagtgatatttcagcttggacattttacccttcagtcggcccaagaaatcaaaataaaggaaacacatttcatatactgcaggtaacaaaagtcaaagtattttatcttttcacagcaagaacagtccatgttgtatataatacaaccaacattatagaacttttagggttgtgactggctttggtgcaaatgtgtgctcaagctaataagttattgtgaaactgagtttcctttaacttacaaagctagttgccatatttctattttattttaaaaagtaaacatgcggctgggcgtggtggctcatgcctgtaatcccagcactttgggaggctgaggtgggcatatcacctgaggtcagcagttaaagaccagcctgaccaaaatggagaaaccccatctctactaaaaatacaaaactagccgggtatggtggtacatgcctgtaatcccagctactcaggaggctgagacaggagaatcacttgaacctgggaggtggaggttgcggtgagctgagatcgtgccactgcactccagcctgggcaacaagagcaaaaatccctctcaaaaaaaaaaagtaaacatgggcactgattgttttaataaaaatgggaaacagactaaatggctattcacaggaaactgataagatatatgttatttttttaaatgagctagggcaatatgttttgacagaaaactctctaagatttagtaagtgaaaaaaagtaggatgcaagagtttttatagttgattccatttttgttgaaggagaaaaactaaataaatacgagtaatttcatagaaac

SEQ ID NO: 288600 - DNA, 1987 bp, Homo sapiens
  misc_feature (26)..(26): n is a, c, g, or t
tgtcttctcccggaaatggtctaagncccagctcctggcggagcgagctagcctgcgaatttcagcatgagtgtactgctgaggtcaggtttggggccgttgtgtgccgtggcgcgcgcagccattccttttatttggagagggaaatacttcagctccgggaatgagcctgcagaaaacccggtgacgccgatgctgcggcatcttatgtacaaaataaagtctactggtcccatcactgtggccgagtacatgaaggaggtgttgactaatccagccaagggttattatgtgtaccgtgacatgctaggcgaaaaaggagatttcattacttcacctgaaataagtcaaatctttggggagctactaggtatatggttcattagtgaatggatggccactggaaaaagcacagctttccagctggtggaactgggcccaggtaggggaaccctcgtgggagatattttgagggtgttcactcaacttggatctgtgctgaaaaattgtgacatttcagtacatctggtagagaaaacaccacagggatggcgagaagtatttgttgacattgatccacaggtttctgataaactgaggtttgttttggcaccttctgccaccccagcagaagccttcatacaacatgacgaaacaagggatcatgttgaagtgtgtcctgatgctggtgttatcatcgaggaactttctcaacgcattgcattaactggaggtgctgcactggttgctgattatggtcatgatggaacaaagacagataccttcagagggttttgcgaccacaagcttcatgatgtcttaattgccccaggaacagcagatctaacagctgatgtggacttcagttatttgcgaagaatggcacagggaaaagtagcctctctgggcccaataaaacaacacacatttttaaaaaatatgggtattgatgtccggctgaaggttcttttagataaatcaaatgagccatcagtgaggcagcagttacttcaaggatatgatatgttaatgaatccaaagaagatgggagagagatttaacttttttgccttgctacctcatcagagacttcaaggtggaagatatcagaggaatgcacgtcagtcaaaaccctttgcatccgttgtagctgggtttagtgaacttgcttggcagtgatatttcagcttggacattttacccttcagtcggcccaagaaatcaaaataaaggaaacacatttcatatactgcaggtaacaaaagtcaaagtattttatcttttcacagcaagaacagtccatgttgtatataatacaaccaacattatagaacttttagggttgtgactggctttggtgcaaatgtgtgctcaagctaataagttattgtgaaactgagtttcctttaacttacaaagctagttgccatatttctattttattttaaaaagtaaacatgcggctgggcgtggtggctcatgcctgtaatcccagcactttgggaggctgaggtgggcatatcacctgaggtcagcagttaaagaccagcctgaccaaaatggagaaaccccatctctactaaaaatacaaaactagccgggtatggtggtacatgcctgtaatcccagctactcaggaggctgagacaggagaatcacttgaacctgggaggtggaggttgcggtgagctgagatcgtgccactgcactccagcctgggcaacaagagcaaaaatccctctcaaaaaaaaaaagtaaacatgggcactgattgttttaataaaaatgggaaacagactaaatggctattcacaggaaactgataagatatatgttatttttttaaatgagctagggcaatatgttttgacagaaaactctctaagatttagtaagtgaaaaaaagtaggatgcaagagtttttatagttgattccatttttgttgaaggagaaaaactaaataaatacgagtaatttcatagaaac

SEQ ID NO: 288601 - DNA, 1988 bp, Homo sapiens
agcgggtcagtcccctcgaagcccggttgccgtggaagccgcgtggggcgccttcctcagctcttcagttgagggtaccgggggatcaagggctcgggggctcacttccaccttgaagccattccttttatttggagagggaaatacttcagctccgggaatgagcctgcagaaaacccggtgacgccgatgctgcggcatcttatgtacaaaataaagtctactggtcccatcactgtggccgagtacatgaaggaggtgttgactaatccagccaagggttattatgtgtaccgtgacatgctaggcgaaaaaggagatttcattacttcacctgaaataagtcaaatctttggggagctactaggtatatggttcattagtgaatggatggccactggaaaaagcacagctttccagctggtggaactgggcccaggtgttcactcaacttggatctgtgctgaaaaattgtgacatttcagtacatctggtagagccttgtgatgaataaaagctttaactgctatttcagaaaacaccacagggatggcgagaagtatttgttgacattgatccacaggtttctgataaactgaggtttgttttggcaccttctgccaccccagcagaagccttcatacaacatgacgaaacaagggatcatgttgaagtgtgtcctgatgctggtgttatcatcgaggaactttctcaacgcattgcattaactggaggtgctgcactggttgctgattatggtcatgatggaacaaagacagataccttcagagggttttgcgaccacaagcttcatgatgtcttaattgccccaggaacagcagatctaacagctgatgtggacttcagttatttgcgaagaatggcacagggaaaagtagcctctctgggcccaataaaacaacacacatttttaaaaaatatgggtattgatgtccggctgaaggttcttttagataaatcaaatgagccatcagtgaggcagcagttacttcaaggatatgatatgttaatgaatccaaagaagatgggagagagatttaacttttttgccttgctacctcatcagagacttcaaggtggaagatatcagaggaatgcacgtcagtcaaaaccctttgcatccgttgtagctgggtttagtgaacttgcttggcagtgatatttcagcttggacattttacccttcagtcggcccaagaaatcaaaataaaggaaacacatttcatatactgcaggtaacaaaagtcaaagtattttatcttttcacagcaagaacagtccatgttgtatataatacaaccaacattatagaacttttagggttgtgactggctttggtgcaaatgtgtgctcaagctaataagttattgtgaaactgagtttcctttaacttacaaagctagttgccatatttctattttattttaaaaagtaaacatgcggctgggcgtggtggctcatgcctgtaatcccagcactttgggaggctgaggtgggcatatcacctgaggtcagcagttaaagaccagcctgaccaaaatggagaaaccccatctctactaaaaatacaaaactagccgggtatggtggtacatgcctgtaatcccagctactcaggaggctgagacaggagaatcacttgaacctgggaggtggaggttgcggtgagctgagatcgtgccactgcactccagcctgggcaacaagagcaaaaatccctctcaaaaaaaaaaagtaaacatgggcactgattgttttaataaaaatgggaaacagactaaatggctattcacaggaaactgataagatatatgttatttttttaaatgagctagggcaatatgttttgacagaaaactctctaagatttagtaagtgaaaaaaagtaggatgcaagagtttttatagttgattccatttttgttgaaggagaaaaactaaataaatacgagtaatttcatagaaac

SEQ ID NO: 288602 - DNA, 1822 bp, Homo sapiens
  misc_feature (1784)..(1784): n is a, c, g, or t
  misc_feature (1816)..(1816): n is a, c, g, or t
agcgggtcagtcccctcgaagcccggttgccgtggaagccgcgtggggcgccttcctcagctcttcagttgagggtaccgggggatcaagggctcgggggctcacttccaccttgaagccattccttttatttggagagggaaatacttcagctccgggaatgagcctgcagaaaacccggtgacgccgatgctgcggcatcttatgtacaaaataaagtctactggtcccatcactgtggccgagtacatgaaggaggtgttgactaatccagccaagggttattatgtgtaccgtgacatgctaggcgaaaaaggagatttcattacttcacctgaaataagtcaaatctttggggagctactaggtatatggttcattagtgaatggatggccactggaaaaagcacagctttccagctggtggaactgggcccaggtaggggaaccctcgtgggagatattttgagggtgttcactcaacttggatctgtgctgaaaaattgtgacatttcagtacatctggtagaggtaagccaaaaattaagtgagattcaagcattgacactgactaaagagaaggtcccgttagagcgaaatgctggatccccagtgtatatgaaaggtgtcactaagtctgggattccaatttcctggtaccgagatctgcacgatgttccaaaaggtaattacctttatgtggattaatgaaagaattttgatcacaaccctcacagtattgatgggactgtaactttttacagcaatataatagattgagttactgctgccaagtcccttatccatagagagtagcctacttttttctagaaaagagcatcttaatagaaaataaagttgcctgacattaagtagtagtttatttcatgaagctttgtaaaatcccaaacaaaatgtaaatctcctttgtacttttgagtatttccctatagctagggttgtaccgatgacggagcagcccaaggcagctggggctgatggaagcagtgttagtaggtgggtttagttcagttatagagtcttttaaaaaatccttacttgcctaaagacaagcaaggtgtgggggaaaatccctgtactagtcaggaatactgactagtattgactagtttgagtcttgactcaaagccaaagtgggggtacgatcttgggtaagggatctcaagccattcctgcctcagccttctcaggctgagaagcccgattttatgaaatcaaattcccttccagctaacaactctgacttctaatttctttcaagccttgtgatgaataaaagctttaactgctatttcaggtatttccattttctgaccccatttatgtgtaaaataagaatagtaataattgttctatgttctgcagtgtaagttttccatgaagaggtagataattctgtggtagtgatgattatggaggaagtaggcattttttttacagttaatattcaaaagaattaattcctgtgaaatgtggaaacattaattgttttcctctttttaaatagggtacagcttttatcttgcacatgaattttttgatgttcttcctgtgcataaatttcagaaaacaccacagggatggcgagaagtatttgttgacattgatccacaggtttctgataaactgaggtttgttttggcaccttctgccaccccagcagaagccttcatacaacatgacgaaacaagggatcatgttgaagtgtgtcctgatgctggtgttatcatcgaggaactttctcaacgcattgcattctaatnataaagttcctgattagcacttcattatagtnctaata

SEQ ID NO: 288603 - DNA, 1884 bp, Homo sapiens
agcgggtcagtcccctcgaagcccggttgccgtggaagccgcgtggggcgccttcctcagctcttcagttgagggtaccgggggatcaagggctcgggggctcacttccaccttgaagccattccttttatttggagagggaaatacttcagctccgggaatgagcctgcagaaaacccggtgacgccgatgctgcggcatcttatgtacaaaataaagtctactggtcccatcactgtggccgagtacatgaaggaggtgttgactaatccagccaagggttattatgtgtaccgtgacatgctaggcgaaaaaggagatttcattacttcacctgaaataagtcaaatctttggggagctactaggtatatggttcattagtgaatggatggccactggaaaaagcacagctttccagctggtggaactgggcccaggtaggggaaccctcgtgggagatattttgagggtgttcactcaacttggatctgtgctgaaaaattgtgacatttcagtacatctggtagaggtaagccaaaaattaagtgagattcaagcattgacactgactaaagagaaggtcccgttagagcgaaatgctggatccccagtgtatatgaaaggtgtcactaagtctgggattccaatttcctggtaccgagatctgcacgatgttccaaaaggtaattacctttatgtggattaatgaaagaattttgatcacaaccctcacagtattgatgggactgtaactttttacagcaatataatagattgagttactgctgccaagtcccttatccatagagagtagcctacttttttctagaaaagagcatcttaatagaaaataaagttgcctgacattaagtagtagtttatttcatgaagctttgtaaaatcccaaacaaaatgtaaatctcctttgtacttttgagtatttccctatagctagggttgtaccgatgacggagcagcccaaggcagctggggctgatggaagcagtgttagtaggtgggtttagttcagttatagagtcttttaaaaaatccttacttgcctaaagacaagcaaggtgtgggggaaaatccctgtactagtcaggaatactgactagtattgactagtttgagtcttgactcaaagccaaagtgggggtacgatcttgggtaagggatctcaagccattcctgcctcagccttctcaggctgagaagcccgattttatgaaatcaaattcccttccagctaacaactctgacttctaatttctttcaagccttgtgatgaataaaagctttaactgctatttcaggtatttccattttctgaccccatttatgtgtaaaataagaatagtaataattgttctatgttctgcagtgtaagttttccatgaagaggtagataattctgtggtagtgatgattatggaggaagtaggcattttttttacagttaatattcaaaagaattaattcctgtgaaatgtggaaacattaattgttttcctctttttaaatagggtacagcttttatcttgcacatgaattttttgatgttcttcctgtgcataaatttcaggtattgaggggggaaaaaagtcatgtctataattgaatacaaaaggcattgtgttgccaatgtttatggtatttattcagtatacaaattttacttgttgaggttatttttaactattatttggaattttggtacacaaataattcaaaagcaaaaaatgaaatattaatgagaattgttagttctcctgggataattattaagaattcttaattcttctgatttgaagaagtaagggaatgaaaaatggtaagatggtaactggctgtggtgcaatgaaggatttacttaagcaaa

SEQ ID NO: 288604 - DNA, 932 bp, Homo sapiens
  misc_feature (26)..(26): n is a, c, g, or t
  misc_feature (796)..(796): n is a, c, g, or t
  misc_feature (870)..(870): n is a, c, g, or t
  misc_feature (886)..(886): n is a, c, g, or t
  misc_feature (905)..(905): n is a, c, g, or t
  misc_feature (910)..(910): n is a, c, g, or t
tgtcttctcccggaaatggtctaagncccagctcctggcggagcgagctagcctgcgaatttcagcatgagtgtactgctgaggtcaggtttggggccgttgtgtgccgtggcgcgcgcagccattccttttatttggagagggaaatacttcagctccgggaatgagcctgcagaaaacccggtgacgccgatgctgcggcatcttatgtacaaaataaagtctactggtcccatcactgtggccgagtacatgaaggaggtgttgactaatccagccaagggttattatgtgtaccgtgacatgctaggcgaaaaaggagatttcattacttcacctgaaataagtcaaatctttggggagctactaggtatatggttcattagtgaatggatggccactggaaaaagcacagctttccagctggtggaactgggcccaggtaggggaaccctcgtgggagatattttgagggtgttcactcaacttggatctgtgctgaaaaattgtgacatttcagtacatctggtagagaaaacaccacagggatggcgagaagtatttgttgacattgatccacaggtttctgataaactgaggtttgttttggcaccttctgccaccccagcagaagccttcatacaacatgaagaaagtagcagggatggatgtggagctgacagttgaagaaagaaacctcctatctgttgcatataagaatgtgattggagctagaagagcctcctggagaatatcagcagctggtgctgcaccagcaggaggtctgcccctccantgtgtgctccagtgaggagaagaagtgcaagcaaggaagaagaatcgaggagtctgatgatgacatgggtggcnttgactaaccttttanactgtcataagtgactttnaaaanaactaaaaatcaactaatacac

SEQ ID NO: 288605 - DNA, 2917 bp, Homo sapiens
cgcgggccagcggcctccggtccccaggtggcgctgtgggctcgcggaggcggccgcggcaccagggagcgtcgtctccctggtgcgcatgctcgcccccgctgcgggctagctgttgtgttttttttttttcccccgggcggcccggcggctgcgtactggctgtgggatgggaagtgaagccccagcgagcggctgcagcggggccgtgaggagcagccagcgggaggcggcggcgagtcggtgagcagctgggaagagcagaaccggggcggagcacctgcaggcgcgggcggcggccccaccatggcgattcgcaagaaaagcaccaagagccccccagtgctgagccacgaattcgtcctgcagaatcacgcggacatcgtctcctgtgtggcgatggtcttcctgctggggctcatgtttgagataacggcaaaagcttctatcatttttgttactcttcagtacaatgtcaccctcccagcaacagaagaacaagctactgaatcagtgtccctttattactatggcatcaaagatttggctactgttttcttctacatgctagtggcgataattattcatgccgtaattcaagagtatatgttggataaaattaacaggcgaatgcacttctccaaaacaaaacacagcaagtttaatgaatctggtcagcttagtgcgttctacctttttgcctgtgtttggggcacattcattctcatctctgaaaactacatctcagacccaactatcttatggagggcttatccccataacctgatgacatttcaaatgaagtttttctacatatcacagctggcttactggcttcatgcttttcctgaactctacttccagaaaaccaaaaaagaagatattcctcgtcagcttgtctacattggtctttacctcttccacattgctggagcttaccttttgaacttgaatcatctaggacttgttcttctggtgctacattattttgttgaatttcttttccacatttcccgcctgttttattttagcaatgaaaagtatcagaaaggattttctctgtgggcagttctttttgttttgggaagacttctgactttaattctttcagtactgactgttggttttggccttgcaagagcagaaaatcagaagctggatttcagtactggaaacttcaatgtgttagctgttagaatcgctgttctggcatccatttgcgttactcaggcatttatgatgtggaagttcattaattttcagcttcgaaggtggagggaacattctgcttttcaggcaccagctgtgaagaagaaaccaacagtaactaaaggcagatcttctaaaaaaggaacagaaaatggtgtgaatggaacattaacttcaaatgtagcagactctccccggaataaaaaagagaaatcttcataatgaattataaactaattgattaatgtccccaaagaaatctgctttctactatatctttcagcattagagatttttctgttcttgaaaatacagtctgtgctctttgatttttgctattgtacggtttcatgcatttttttaaagggcatttgaggggaggattattgctatgaatgaaaaaaatattttagcttagactaagctacctgccttcaaaatagtttagggaccaccaccatattttattttgtttttatttttgaacatttttctaatgatttggagagaaaactatttacaaaaattccacatatcagtgatacaatttcttgctgtcaccaattttttataatagcagagtggcctgttctaagaaggccatattttttaagttatctttcagggtaacatggaaatactataaagttggatgtcaaactttaatatgttttcagtgttctctaattttttggaatttttgtagactttacacctggaaaaaaagatttgtaaaatcaccggaacaattgtgtgctttattttataggtagtggttattagtattacatccccattttaaaaacaaaaacataataatggttacaacacgtggagttttactaacatacatattaaatcaaagtatattcttaaaagtacttgtgaagtaaaatctttcttgtgcattttcaatacttgtaaactggaaatcagaaaatatttactatgaacaggaaaatctgacatatagccctttttgatatgtttattaataatgattcttaatggggctcataataagtttaatatgcacagcatcttagaaaagtttaacctgcaaacacttttaaaacataatgcctacttgatttatatctataaaaagactgacaggtaattatatttggaaaacatttaatgcactaactttaaagaaattgaaaattcaggtggataaatagtcttacaaaagacaatgtgctttatgttatacctatagctttggtcccatctttaattgagaaacatttatctgtataaaacatatttttggataaatatatatatatatatttgtatcgctacagaaaggctctaaaaagcatttgaggaaaatatttggttcccttttctataatcatcctttaagattcttatagctacatttggtttattcatcatatttacagtatatatattgttcttttcagtgttcacatcttgttccccatttctcacttgtgtcaccagctgtttgtgccatttttagtgtaaaagttgcagacctattagatctgcagtttaagttgccatgctgctaggaaattgtcctttttctttctagctgttaacctacttcctggaaaaagtagtagctctctgtagcattatggagtttcagtggaaccaaatttttgccattaaaaactggcattatactgaactatacattgagaaatcaatcaaaataaaaatttttactttc

SEQ ID NO: 288606 - DNA, 424 bp, Homo sapiens
ggttgttgaagagttgtttaaaggtgcacagatattgtatggaatgatgacacaaaggtagttacttagtatatcctgatttccagtatttgtttacttttttttaaaaaaattatgctttaaaaggtactcttcattttcttgtgttgtacagatttcaaatgaagtttttctacatatcacagctggcttactggcttcatgcttttcctgaactctacttccagaaaaccaaaaaagtaagctgggattttgtagtgttaaaaaatgtcttgtcatttttttttttgaaaaatttttctaaaattaagtattttcttacatgtttgcccttcctccattcttcttacctcaactcttaccccatcattctcccaccaaccctctttccacaaagcctaaaatccttaagcatttcttgaaa

SEQ ID NO: 288607 - DNA, 293 bp, Homo sapiens
agccctttctttgttaaggaccatggtcatgtcactattaatcagaattcattcttgttattctctttaggaccttaggcaaatgcataaaatagatgaaaatatgtctttgacagtcccactgccgtaagaaaaaaaaagctgtgtacctttttttaatgtttctattctaatcttttcaacatctttgtaagcttgagacaactgattttaacataacttaatttggtactcgcttcttttcccttcttttcactcatactttctcctttttatgactccatcttctctat

SEQ ID NO: 288608 - DNA, 2801 bp, Homo sapiens
cgcgggccagcggcctccggtccccaggtggcgctgtgggctcgcggaggcggccgcggcaccagggagcgtcgtctccctggtgcgcatgctcgcccccgctgcgggctagctgttgtgttttttttttttcccccgggcggcccggcggctgcgtactggctgtgggatgggaagtgaagccccagcgagcggctgcagcggggccgtgaggagcagccagcgggaggcggcggcgagtcggtgagcagctgggaagagcagaaccggggcggagcacctgcaggcgcgggcggcggccccaccatggcgattcgcaagaaaagcaccaagagccccccagtgctgagccacgaattcgtcctgcagaatcacgcggacatcgtctcctgtgtggcgatggtcttcctgctggggctcatgtttgagataacggcaaaagcttctatcatttttgttactcttcagtacaatgtcaccctcccagcaacagaagaacaagctactgaatcagtgtccctttattactatggcatcaaagatttggctactgttttcttctacatgctagtggcgataattattcatgccgtaattcaagagtatatgttggataaaattaacaggcgaatgcacttctccaaaacaaaacacagcaagtttaatgaatctggtcagcttagtgcgttctacctttttgcctgtgtttggggcacattcattctcatctctgaaaactacatctcagacccaactatcttatggagggcttatccccataacctgatgacatttcaaatgaagtttttctacatatcacagctggcttactggcttcatgcttttcctgaactctacttccagaaaaccaaaaaagaagatattcctcgtcagcttgtctacattggtctttacctcttccacattgctggagcttaccttttgaacttgaatcatctaggacttgttcttctggtgctacattattttgttgaatttcttttccacatttcccgcctgttttattttagcaatgaaaagtatcagaaaggattttctctgtgggcagttctttttgttttgggaagacttctgactttaattctttcagtactgactgttggttttggccttgcaagagcagaaaatcagaagctggatttcagtactggaaacttcaatgtgttagctgttagaatcgctgttctggcatccatttgcgttactcaggcatttatgatgtggaagttcattaattttcagcttcgaaggtggagggaacattctgcttttcaggcaccagctgtgaagaagaaaccaacagtaactaaaggcagatcttctaaaaaaggaacagaaaatggtgtgaatggaacattaacttcaaatgtagcagactctccccggaataaaaaagagaaatcttcataatgaattataaactaattgattaatgtccccaaagaaatctgctttctactatatctttcagcattagagatttttctgttcttgaaaatacagtctgtgctctttgatttttgctattgtacggtttcatgcatttttttaaagggcatttgaggggaggattattgctatgaatgaaaaaaatattttagcttagactaagctacctgccttcaaaatagtttagggaccaccaccatattttattttgtttttatttttgaacatttttctaatgatttggagagaaaactatttacaaaaattccacatatcagtgatacaatttcttgctgtcaccaattttttataatagcagagtggcctgttctaagaaggccatattttttaagttatctttcagggtaacatggaaatactataaagttggatgtcaaactttaatatgttttcagtgttctctaattttttggaatttttgtagactttacacctggaaaaaaagatttgtaaaatcaccggaacaattgtgtgctttattttataggtagtggttattagtattacatccccattttaaaaacaaaaacataataatggttacaacacgtggagttttactaacatacatattaaatcaaagtatattcttaaaagtacttgtgaagtaaaatctttcttgtgcatttaatatgcacagcatcttagaaaagtttaacctgcaaacacttttaaaacataatgcctacttgatttatatctataaaaagactgacaggtaattatatttggaaaacatttaatgcactaactttaaagaaattgaaaattcaggtggataaatagtcttacaaaagacaatgtgctttatgttatacctatagctttggtcccatctttaattgagaaacatttatctgtataaaacatatttttggataaatatatatatatatatttgtatcgctacagaaaggctctaaaaagcatttgaggaaaatatttggttcccttttctataatcatcctttaagattcttatagctacatttggtttattcatcatatttacagtatatatattgttcttttcagtgttcacatcttgttccccatttctcacttgtgtcaccagctgtttgtgccatttttagtgtaaaagttgcagacctattagatctgcagtttaagttgccatgctgctaggaaattgtcctttttctttctagctgttaacctacttcctggaaaaagtagtagctctctgtagcattatggagtttcagtggaaccaaatttttgccattaaaaactggcattatactgaactatacattgagaaatcaatcaaaataaaaatttttactttc

SEQ ID NO: 288609 - DNA, 2652 bp, Homo sapiens
ggcgggtgggcggacttggggggactgccagcctcggccgcggtgagcgtcagccccgcgagggccggggaaggccgaggcccggcccccgggtctgaggagtgccggcctggagaccacaggccccgagtgacaggggagcccccggtagctccgagattgggataacggcaaaagcttctatcatttttgttactcttcagtacaatgtcaccctcccagcaacagaagaacaagctactgaatcagtgtccctttattactatggcatcaaagatttggctactgttttcttctacatgctagtggcgataattattcatgccgtaattcaagagtatatgttggataaaattaacaggcgaatgcacttctccaaaacaaaacacagcaagtttaatgaatctggtcagcttagtgcgttctacctttttgcctgtgtttggggcacattcattctcatctctgaaaactacatctcagacccaactatcttatggagggcttatccccataacctgatgacatttcaaatgaagtttttctacatatcacagctggcttactggcttcatgcttttcctgaactctacttccagaaaaccaaaaaagaagatattcctcgtcagcttgtctacattggtctttacctcttccacattgctggagcttaccttttgaacttgaatcatctaggacttgttcttctggtgctacattattttgttgaatttcttttccacatttcccgcctgttttattttagcaatgaaaagtatcagaaaggattttctctgtgggcagttctttttgttttgggaagacttctgactttaattctttcagtactgactgttggttttggccttgcaagagcagaaaatcagaagctggatttcagtactggaaacttcaatgtgttagctgttagaatcgctgttctggcatccatttgcgttactcaggcatttatgatgtggaagttcattaattttcagcttcgaaggtggagggaacattctgcttttcaggcaccagctgtgaagaagaaaccaacagtaactaaaggcagatcttctaaaaaaggaacagaaaatggtgtgaatggaacattaacttcaaatgtagcagactctccccggaataaaaaagagaaatcttcataatgaattataaactaattgattaatgtccccaaagaaatctgctttctactatatctttcagcattagagatttttctgttcttgaaaatacagtctgtgctctttgatttttgctattgtacggtttcatgcatttttttaaagggcatttgaggggaggattattgctatgaatgaaaaaaatattttagcttagactaagctacctgccttcaaaatagtttagggaccaccaccatattttattttgtttttatttttgaacatttttctaatgatttggagagaaaactatttacaaaaattccacatatcagtgatacaatttcttgctgtcaccaattttttataatagcagagtggcctgttctaagaaggccatattttttaagttatctttcagggtaacatggaaatactataaagttggatgtcaaactttaatatgttttcagtgttctctaattttttggaatttttgtagactttacacctggaaaaaaagatttgtaaaatcaccggaacaattgtgtgctttattttataggtagtggttattagtattacatccccattttaaaaacaaaaacataataatggttacaacacgtggagttttactaacatacatattaaatcaaagtatattcttaaaagtacttgtgaagtaaaatctttcttgtgcattttcaatacttgtaaactggaaatcagaaaatatttactatgaacaggaaaatctgacatatagccctttttgatatgtttattaataatgattcttaatggggctcataataagtttaatatgcacagcatcttagaaaagtttaacctgcaaacacttttaaaacataatgcctacttgatttatatctataaaaagactgacaggtaattatatttggaaaacatttaatgcactaactttaaagaaattgaaaattcaggtggataaatagtcttacaaaagacaatgtgctttatgttatacctatagctttggtcccatctttaattgagaaacatttatctgtataaaacatatttttggataaatatatatatatatatttgtatcgctacagaaaggctctaaaaagcatttgaggaaaatatttggttcccttttctataatcatcctttaagattcttatagctacatttggtttattcatcatatttacagtatatatattgttcttttcagtgttcacatcttgttccccatttctcacttgtgtcaccagctgtttgtgccatttttagtgtaaaagttgcagacctattagatctgcagtttaagttgccatgctgctaggaaattgtcctttttctttctagctgttaacctacttcctggaaaaagtagtagctctctgtagcattatggagtttcagtggaaccaaatttttgccattaaaaactggcattatactgaactatacattgagaaatcaatcaaaataaaaatttttactttc

SEQ ID NO: 288610 - DNA, 2236 bp, Homo sapiens
acatccatttctgtatgcaacttttgtatttttggagagagagtcagtcacacatacgctactccatcatagcttgaagaaggccattactattagccaggtgtggtggcacatgcctgtagtcccagctatttgggaggctgaggtccccgggagcatcactggtccccgggagttcaagactgcattgagccatgatcgtgccactacacagccttggtgacagagtgagaccctgtctcaaaaaacaacagtaacataaataaataaaaagaaggccataatacacgcctccacatagaaattatcctaaacaccaactttactatattgtaaacaaatatccccaaggacttcgctgtcaaatgtgaaaagtttctttatttctacagaaggtatttctcttgaatactatttttaaattcttgtgactttatagttttctgtgctgtcacttttttctgcttttaatagtagttttcttttaatttgctactttcagttcattgtgttaaaaatgttaccaggttttgtgattggttaaatactggtaagtaaatttcacctgagtgaattggattttacattttcttttctgaaggtatctttacatataaagattataacttgcatttatttataaaagagagtaacatggattcttttctttttgcagaaaatggtgtgaatggaacattaacttcaaatgtagcagactctccccggaataaaaaagagaaatcttcataatgaattataaactaattgattaatgtccccaaagaaatctgctttctactatatctttcagcattagagatttttctgttcttgaaaatacagtctgtgctctttgatttttgctattgtacggtttcatgcatttttttaaagggcatttgaggggaggattattgctatgaatgaaaaaaatattttagcttagactaagctacctgccttcaaaatagtttagggaccaccaccatattttattttgtttttatttttgaacatttttctaatgatttggagagaaaactatttacaaaaattccacatatcagtgatacaatttcttgctgtcaccaattttttataatagcagagtggcctgttctaagaaggccatattttttaagttatctttcagggtaacatggaaatactataaagttggatgtcaaactttaatatgttttcagtgttctctaattttttggaatttttgtagactttacacctggaaaaaaagatttgtaaaatcaccggaacaattgtgtgctttattttataggtagtggttattagtattacatccccattttaaaaacaaaaacataataatggttacaacacgtggagttttactaacatacatattaaatcaaagtatattcttaaaagtacttgtgaagtaaaatctttcttgtgcattttcaatacttgtaaactggaaatcagaaaatatttactatgaacaggaaaatctgacatatagccctttttgatatgtttattaataatgattcttaatggggctcataataagtttaatatgcacagcatcttagaaaagtttaacctgcaaacacttttaaaacataatgcctacttgatttatatctataaaaagactgacaggtaattatatttggaaaacatttaatgcactaactttaaagaaattgaaaattcaggtggataaatagtcttacaaaagacaatgtgctttatgttatacctatagctttggtcccatctttaattgagaaacatttatctgtataaaacatatttttggataaatatatatatatatatttgtatcgctacagaaaggctctaaaaagcatttgaggaaaatatttggttcccttttctataatcatcctttaagattcttatagctacatttggtttattcatcatatttacagtatatatattgttcttttcagtgttcacatcttgttccccatttctcacttgtgtcaccagctgtttgtgccatttttagtgtaaaagttgcagacctattagatctgcagtttaagttgccatgctgctaggaaattgtcctttttctttctagctgttaacctacttcctggaaaaagtagtagctctctgtagcattatggagtttcagtggaaccaaatttttgccattaaaaactggcattatactgaactatacattgagaaatcaatcaaaataaaaatttttactttc

SEQ ID NO: 288611 - DNA, 2182 bp, Homo sapiens
acatccatttctgtatgcaacttttgtatttttggagagagagtcagtcacacatacgctactccatcatagcttgaagaaggccattactattagccaggtgtggtggcacatgcctgtagtcccagctatttgggaggctgaggtccccgggagcatcactggtccccgggagttcaagactgcattgagccatgatcgtgccactacacagccttggtgacagagtgagaccctgtctcaaaaaacaacagtaacataaataaataaaaagaaggccataatacacgcctccacatagaaattatcctaaacaccaactttactatattgtaaacaaatatccccaaggacttcgctgtcaaatgtgaaaagtttctttatttctacagaaggtatttctcttgaatactatttttaaattcttgtgactttatagttttctgtgctgtcacttttttctgcttttaatagtagttttcttttaatttgctactttcagttcattgtgttaaaaatgttaccaggttttgtgattggttaaatactggtaagtaaatttcacctgagtgaattggattttacattttcttttctgaaggtatctttacatataaagattataacttgcatttatttataaaagagagtaacatggattcttttctttttgcagaaaatggtgtgaatggaacattaacttcaaatgtagcagactctccccggaataaaatctgctttctactatatctttcagcattagagatttttctgttcttgaaaatacagtctgtgctctttgatttttgctattgtacggtttcatgcatttttttaaagggcatttgaggggaggattattgctatgaatgaaaaaaatattttagcttagactaagctacctgccttcaaaatagtttagggaccaccaccatattttattttgtttttatttttgaacatttttctaatgatttggagagaaaactatttacaaaaattccacatatcagtgatacaatttcttgctgtcaccaattttttataatagcagagtggcctgttctaagaaggccatattttttaagttatctttcagggtaacatggaaatactataaagttggatgtcaaactttaatatgttttcagtgttctctaattttttggaatttttgtagactttacacctggaaaaaaagatttgtaaaatcaccggaacaattgtgtgctttattttataggtagtggttattagtattacatccccattttaaaaacaaaaacataataatggttacaacacgtggagttttactaacatacatattaaatcaaagtatattcttaaaagtacttgtgaagtaaaatctttcttgtgcattttcaatacttgtaaactggaaatcagaaaatatttactatgaacaggaaaatctgacatatagccctttttgatatgtttattaataatgattcttaatggggctcataataagtttaatatgcacagcatcttagaaaagtttaacctgcaaacacttttaaaacataatgcctacttgatttatatctataaaaagactgacaggtaattatatttggaaaacatttaatgcactaactttaaagaaattgaaaattcaggtggataaatagtcttacaaaagacaatgtgctttatgttatacctatagctttggtcccatctttaattgagaaacatttatctgtataaaacatatttttggataaatatatatatatatatttgtatcgctacagaaaggctctaaaaagcatttgaggaaaatatttggttcccttttctataatcatcctttaagattcttatagctacatttggtttattcatcatatttacagtatatatattgttcttttcagtgttcacatcttgttccccatttctcacttgtgtcaccagctgtttgtgccatttttagtgtaaaagttgcagacctattagatctgcagtttaagttgccatgctgctaggaaattgtcctttttctttctagctgttaacctacttcctggaaaaagtagtagctctctgtagcattatggagtttcagtggaaccaaatttttgccattaaaaactggcattatactgaactatacattgagaaatcaatcaaaataaaaatttttactttc

SEQ ID NO: 288612 - DNA, 2138 bp, Homo sapiens
  misc_feature (2137)..(2137): n is a, c, g, or t
cgcgggccagcggcctccggtccccaggtggcgctgtgggctcgcggaggcggccgcggcaccagggagcgtcgtctccctggtgcgcatgctcgcccccgctgcgggctagctgttgtgttttttttttttcccccgggcggcccggcggctgcgtactggctgtgggatgggaagtgaagccccagcgagcggctgcagcggggccgtgaggagcagccagcgggaggcggcggcgagtcggtgagcagctgggaagagcagaaccggggcggagcacctgcaggcgcgggcggcggccccaccatggcgattcgcaagaaaagcaccaagagccccccagtgctgagccacgaattcgtcctgcagaatcacgcggacatcgtctcctgtgtggcgatggtcttcctgctggggctcatgtttgagataacggcaaaagcttctatcatttttgttactcttcagtacaatgtcaccctcccagcaacagaagaacaagctactgaatcagtgtccctttattactatggcatcaaagatttggctactgttttcttctacatgctagtggcgataattattcatgccgtaattcaagagtatatgttggataaaattaacaggcgaatgcacttctccaaaacaaaacacagcaagtttaatgaatctggtcagcttagtgcgttctacctttttgcctgtgtttggggcacattcattctcatctctgaaaactacatctcagacccaactatcttatggagggcttatccccataacctgatgacatttcaaatgaagtttttctacatatcacagctggcttactggcttcatgcttttcctgaactctacttccagaaaaccaaaaaagaagatattcctcgtcagcttgtctacattggtctttacctcttccacattgctggagcttaccttttgaacttgaatcatctaggacttgttcttctggtgctacattattttgttgaatttcttttccacatttcccgcctgttttattttagcaatgaaaagtatcagaaaggattttctctgtgggcagttctttttgttttgggaagacttctgactttaattctttcagtactgactgttggttttggccttgcaagagcagaaaatcagaagctggatttcagtactggaaacttcaatgtgttagctgttagaatcgctgttctggcatccatttgcgttactcaggcatttatgatgtggaagttcattaattttcagcttcgaaggtggagggaacattctgcttttcaggcaccagctgtgaagaagaaaccaacagtaactaaaggcagatcttctaaaaaaggaacagaaaatggtgtgaatggaacattaacttcaaatgtagcagactctccccggaataaaaaagagaaatcttcataatgaattataaactaattgattaatgtccccaaagaaatctgctttctactatatctttcagcattagagatttttctgttcttgaaaatacagtctgtgctctttgatttttgctattgtacggtttcatgcatttttttaaagggcatttgaggggaggattattgctatgaatgaaaaaaatattttagcttagactaagctacctgccttcaaaatagtttagggaccaccaccatattttattttgtttttatttttgaacatttttctaatgatttggagagaaaactatttacaaaaattccacatatcagtgatacaatttcttgctgtcaccaattttttataatagcagagtggcctgttctaagaaggccatattttttaagttatctttcagggtaacatggaaatactataaagttggatgtcaaactttaatatgttttcagtgttctctaattttttggaatttttgtagactttacacctggaaaaaaagatttgtaaaatcaccggaacaattgtgtgctttattttataggtagtggttattagtattacatccccattttaaaaactatttggtcccgtggttctactacttaacagtttaagttggagaactgggttctgaggaagatagacaaagactggttaagtggaattgaagattcttgcatttcttgtttttttttcttcnt

SEQ ID NO: 288613 - DNA, 1950 bp, Homo sapiens
cgcgggccagcggcctccggtccccaggtggcgctgtgggctcgcggaggcggccgcggcaccagggagcgtcgtctccctggtgcgcatgctcgcccccgctgcgggctagctgttgtgttttttttttttcccccgggcggcccggcggctgcgtactggctgtgggatgggaagtgaagccccagcgagcggctgcagcggggccgtgaggagcagccagcgggaggcggcggcgagtcggtgagcagctgggaagagcagaaccggggcggagcacctgcaggcgcgggcggcggccccaccatggcgattcgcaagaaaagcaccaagagccccccagtgctgagccacgaattcgtcctgcagaatcacgcggacatcgtctcctgtgtggcgatggtcttcctgctggggctcatgtttgagataacggcaaaagcttctatcatttttgttactcttcagtacaatgtcaccctcccagcaacagaagaacaagctactgaatcagtgtccctttattactatggcatcaaagatttggctactgttttcttctacatgctagtggcgataattattcatgccgtaattcaagagtatatgttggataaaattaacaggcgaatgcacttctccaaaacaaaacacagcaagtttaatgaatctggtcagcttagtgcgttctacctttttgcctgtgtttggggcacattcattctcatctctgaaaactacatctcagacccaactatcttatggagggcttatccccataacctgatgacatttcaaatgaagtttttctacatatcacagctggcttactggcttcatgcttttcctgaactctacttccagaaaaccaaaaaagaagatattcctcgtcagcttgtctacattggtctttacctcttccacattgctggagcttaccttttgaacttgaatcatctaggacttgttcttctggtgctacattattttgttgaatttcttttccacatttcccgcctgttttattttagcaatgaaaagtatcagaaaggattttctctgtgggcagttctttttgttttgggaagacttctgactttaattctttcagtactgactgttggttttggccttgcaagagcagaaaatcagaagctggatttcagtactggaaacttcaatgtgttagctgttagaatcgctgttctggcatccatttgcgttactcaggcatttatgatgtggaagttcattaattttcagcttcgaaggtggagggaacattctgcttttcaggcaccagctgtgaagaagaaaccaacagtaactaaaggcagatcttctaaaaaaggaacagaaaatggtgtgaatggaacattaacttcaaatgtagcagactctccccggaataaaaaagagaaatcttcataatgaattataaactaattgattaatgtccccaaagaaatctgctttctactatatctttcagcattagagatttttctgttcttgaaaatacagtctgtgctcttaaaaaaaaaaaaaaaaaaaaaaaaaaaaaaaaaagggggggggggcaaaaaaattcccccggggggccccaagtttggggtccccgcgtgttcttgttgtgccaaccaggtggcccccatatgggggagccggtatataaaagcagagacgggggccgtggttaaacaaaccgtcgcggacgcggggaaacacgcgtcaacgccggggacaacctggtgggaaaaggaacccccttcacgctcggggggggggggacacaaggcgggccacaaacttcccatagagaaaattaaaagggcccaaaggggaaaacttaatactctaagggtgttcacgggggttacacaaccggccaaataacccggcgccgtgaaaactggcccacaggaggatattttgacaacatttttcccg

SEQ ID NO: 288614 - DNA, 452 bp, Homo sapiens
aaatggaacgaacactgaaaagaacaatatatatatatatttgtatcgctacagaaaggctctaaaaagcatttgaggaaaatatttggttcccttttctataatcatcctttaagattcttatagctacatttggtttattcatcatatttacagtatatatattgttcttttcagtgttcacatcttgttccccatttctcacttgtgtcaccagctgtttgtgccatttttagtgtaaaagttgcagacctattagatctgcagtttaagttgccatgctgctaggaaattgtcctttttctttctagctgttaacctacttcctggaaaaagtagtagctctctgtagcattatggagtttcagtggaaccaaatttttgccattaaaaactggcattatactgaactatacattgagaaatcaatcaaaataaaaatttttactttc

SEQ ID NO: 288615 - DNA, 610 bp, Homo sapiens
ggctcggggcgggtgggcggacttggggggactgccagcctcggccgcggtgagcgtcagccccgcgagggccggggaaggccgaggcccggcccccgggtctgaggagtgccggcctggagaccacaggccccgagtgacaggggagcccccggtagctccgagattggggtgagcgagaaaccggagtcaggcatctgctttcgacttgaagggcggtggccgccgggcaccggcgcagtggaggcgcgccagattgttttcatttttgtcttttaaactgatattattaccagttaacgaactttttgccctgacgctttaaagaaacaaggtctgatggataaatcgaggttctgaacagcggtgccaaggaatcgagtaattttgtttcttgaagtaggagaggatgggaatgtcaggagtgtgtaaattctcttcccacgtatctagtattttgatgacttatttaacagctgttgaatgtggatgataaactttgcaaggtgaacgagtaacatcctacgtttttcccctcgctccccaatacacacgctcattcctttgcttttttccctttttaatttttctctggagcctttatgtctca

SEQ ID NO: 288616 - DNA, 405 bp, Homo sapiens
tgctcacaggttaatttttatatcttctttcttaggaaaactacatctcagacccaactatcttatggagggcttatccccataacctgatgacgtaagtcatttttagcagccctttctttgttaaggaccatggtcatgtcactattaatcagaattcattcttgttattctctttaggaccttaggcaaatgcataaaatagatgaaaatatgtctttgacagtcccactgccgtaagaaaaaaaaagctgtgtacctttttttaatgtttctattctaatcttttcaacatctttgtaagcttgagacaactgattttaacataacttaatttggtactcgcttcttttcccttcttttcactcatactttctcctttttatgactccatcttctctatat

SEQ ID NO: 288617 - DNA, 2243 bp, Homo sapiens
tggcggcgtctgaggatccccttagtctgaccacccttcgcgtcgacccaccatctctgaaaactacatctcagacccaactatcttatggagggcttatccccataacctgatgacatttcaaatgaagtttttctacatatcacagctggcttactggcttcatgcttttcctgaactctacttccagaaaaccaaaaaagaagatattcctcgtcagcttgtctacattggtctttacctcttccacattgctggagcttaccttttgaacttgaatcatctaggacttgttcttctggtgctacattattttgttgaatttcttttccacatttcccgcctgttttattttagcaatgaaaagtatcagaaaggattttctctgtgggcagttctttttgttttgggaagacttctgactttaattctttcagtactgactgttggttttggccttgcaagagcagaaaatcagaagctggatttcagtactggaaacttcaatgtgttagctgttagaatcgctgttctggcatccatttgcgttactcaggcatttatgatgtggaagttcattaattttcagcttcgaaggtggagggaacattctgcttttcaggcaccagctgtgaagaagaaaccaacagtaactaaaggcagatcttctaaaaaaggaacagaaaatggtgtgaatggaacattaacttcaaatgtagcagactctccccggaataaaaaagagaaatcttcataatgaattataaactaattgattaatgtccccaaagaaatctgctttctactatatctttcagcattagagatttttctgttcttgaaaatacagtctgtgctctttgatttttgctattgtacggtttcatgcatttttttaaagggcatttgaggggaggattattgctatgaatgaaaaaaatattttagcttagactaagctacctgccttcaaaatagtttagggaccaccaccatattttattttgtttttatttttgaacatttttctaatgatttggagagaaaactatttacaaaaattccacatatcagtgatacaatttcttgctgtcaccaattttttataatagcagagtggcctgttctaagaaggccatattttttaagttatctttcagggtaacatggaaatactataaagttggatgtcaaactttaatatgttttcagtgttctctaattttttggaatttttgtagactttacacctggaaaaaaagatttgtaaaatcaccggaacaattgtgtgctttattttataggtagtggttattagtattacatccccattttaaaaacaaaaacataataatggttacaacacgtggagttttactaacatacatattaaatcaaagtatattcttaaaagtacttgtgaagtaaaatctttcttgtgcattttcaatacttgtaaactggaaatcagaaaatatttactatgaacaggaaaatctgacatatagccctttttgatatgtttattaataatgattcttaatggggctcataataagtttaatatgcacagcatcttagaaaagtttaacctgcaaacacttttaaaacataatgcctacttgatttatatctataaaaagactgacaggtaattatatttggaaaacatttaatgcactaactttaaagaaattgaaaattcaggtggataaatagtcttacaaaagacaatgtgctttatgttatacctatagctttggtcccatctttaattgagaaacatttatctgtataaaacatatttttggataaatatatatatatatatttgtatcgctacagaaaggctctaaaaagcatttgaggaaaatatttggttcccttttctataatcatcctttaagattcttatagctacatttggtttattcatcatatttacagtatatatattgttcttttcagtgttcacatcttgttccccatttctcacttgtgtcaccagctgtttgtgccatttttagtgtaaaagttgcagacctattagatctgcagtttaagttgccatgctgctaggaaattgtcctttttctttctagctgttaacctacttcctggaaaaagtagtagctctctgtagcattatggagtttcagtggaaccaaatttttgccattaaaaactggcattatactgaactatacattgagaaatcaatcaaaataaaaatttttactttc

SEQ ID NO: 288618 - DNA, 3151 bp, Homo sapiens
cgcgggccagcggcctccggtccccaggtggcgctgtgggctcgcggaggcggccgcggcaccagggagcgtcgtctccctggtgcgcatgctcgcccccgctgcgggctagctgttgtgttttttttttttcccccgggcggcccggcggctgcgtactggctgtgggatgggaagtgaagccccagcgagcggctgcagcggggccgtgaggagcagccagcgggaggcggcggcgagtcggtgagcagctgggaagagcagaaccggggcggagcacctgcaggcgcgggcggcggccccaccatggcgattcgcaagaaaagcaccaagagccccccagtgctgagccacgaattcgtcctgcagaatcacgcggacatcgtctcctgtgtggcgatggtcttcctgctggggctcatgtttgagataacggcaaaagcttctatcatttttgttactcttcagtacaatgtcaccctcccagcaacagaagaacaagctactgaatcagtgtccctttattactatggcatcaaagatttggctactgttttcttctacatgctagtggcgataattattcatgccgtaattcaagagtatatgttggataaaattaacaggcgaatgcacttctccaaaacaaaacacagcaagtttaatgaatctggtcagcttagtgcgttctacctttttgcctgtgtttggggcacattcattctcatctctgaaaactacatctcagacccaactatcttatggagggcttatccccataacctgatgacatttcaaatgaagtttttctacatatcacagctggcttactggcttcatgcttttcctgaactctacttccagaaaaccaaaaaagaagatattcctcgtcagcttgtctacattggtctttacctcttccacattgctggagcttaccttttgaacttgaatcatctaggacttgttcttctggtgctacattattttgttgaatttcttttccacatttcccgcctgttttattttagcaatgaaaagtatcagaaaggattttctctgtgggcagttctttttgttttgggaagacttctgactttaattctttcagtactgactgttggttttggccttgcaagagcagaaaatcagaagctggatttcagtactggaaacttcaatgtgttagctgttagaatcgctgttctggcatccatttgcgttactcaggcatttatgatgtggaagttcattaattttcagcttcgaaggtggagggaacattctgcttttcaggcaccagctgtgaagaagaaaccaacagtaactaaaggcagatcttctaaaaaaggaacagaaaatggtgtgaatggaacattaacttcaaatgtagcagactctccccggaataaaaaagagaaatcttcataatgaattataaactaattgattaatgtccccaaagaaatctgctttctactatatctttcagcattagagatttttctgttcttgaaaatacagtctgtgctctttgatttttgctattgtacggtttcatgcatttttttaaagggcatttgaggggaggattattgctatgaatgaaaaaaatattttagcttagactaagctacctgccttcaaaatagtttagggaccaccaccatattttattttgtttttatttttgaacatttttctaatgatttggagagaaaactatttacaaaaattccacatatcagtgatacaatttcttgctgtcaccaattttttataatagcagagtggcctgttctaagaaggccatattttttaagttatctttcagggtaacatggaaatactataaagttggatgtcaaactttaatatgttttcagtgttctctaattttttggaatttttgtagactttacacctggaaaaaaagatttgtaaaatcaccggaacaattgtgtgctttattttataggtagtggttattagtattacatccccattttaaaaacaaaaacataataatggttacaacacgtggagttttactaacatacatattaaatcaaagtatattcttaaaagtacttgtgaagtaaaatctttcttgtgcattttcaatacttgtaaactggaaatcagaaaatatttactatgaacaggaaaatctgacatatagccctttttgatatgtttattaataatgattcttaatggggctcataataagtttaatatgcacagcatcttagaaaagtttaacctgcaaacacttttaaaacataatgcctacttgatttatatctataaaaagactgacaggtaattatatttggaaaacatttaatgcactaactttaaagaaattgaaaattcaggtggataaatagtcttacaaaagacaatgtgctttatgttatacctatagctttggtcccatctttaattgagaaacatttatctgtataaaacatatttttggataaatatatatatatatatttgtatcgctacagaaaggctctaaaaagcatttgaggaaaatatttggttcccttttctataatcatcctttaagattcttatagctacatttggtttattcatcatatttacagtatatatattgttcttttcagtgttcacatcttgttccccatttctcacttgtgtcaccagctgtttgtgccatttttagtgtaaaagttgcagacctattagatctgcagtttaagttgccatgctgctaggaaattgtcctttttctttctagctgttaacctacttcctggaaaaagtagtagctctctgtagcattatggagtttcagtggaaccaaatttttgccattaaaaactggcattatactgaactatacattgagaaatcaatcaaaataaaaatttttactttcacaagttgtatcctggatgtttctgtcattgttggtgattaggctattttggtatataacctcattaaaatgtaccatatttaaaacacttcatagacattcagaataacccttttcaaaattgtgttctgcaaataaacagatttgttccacagaatattggtgaggactactggggggatagatggtcataaccaaataaatctgggaatcactggattaaactaacctaaa

SEQ ID NO: 288619 - DNA, 1824 bp, Homo sapiens
gatcgatcgagctcggtcctttgactgttggttttggccttgcaagagcagaaaatcagaagctggatttcagtactggaaacttcaatgtgttagctgttagaatcgctgttctggcatccatttgcgttactcaggcatttatgatgtggaagttcattaattttcagcttcgaaggtggagggaacattctgcttttcaggcaccagctgtgaagaagaaaccaacagtaactaaaggcagatcttctaaaaaaggaacagaaaatggtgtgaatggaacattaacttcaaatgtagcagactctccccggaataaaaaagagaaatcttcataatgaattataaactaattgattaatgtccccaaagaaatctgctttctactatatctttcagcattagagatttttctgttcttgaaaatacagtctgtgctctttgatttttgctattgtacggtttcatgcatttttttaaagggcatttgaggggaggattattgctatgaatgaaaaaaatattttagcttagactaagctacctgccttcaaaatagtttagggaccaccaccatattttattttgtttttatttttgaacatttttctaatgatttggagagaaaactatttacaaaaattccacatatcagtgatacaatttcttgctgtcaccaattttttataatagcagagtggcctgttctaagaaggccatattttttaagttatctttcagggtaacatggaaatactataaagttggatgtcaaactttaatatgttttcagtgttctctaattttttggaatttttgtagactttacacctggaaaaaaagatttgtaaaatcaccggaacaattgtgtgctttattttataggtagtggttattagtattacatccccattttaaaaacaaaaacataataatggttacaacacgtggagttttactaacatacatattaaatcaaagtatattcttaaaagtacttgtgaagtaaaatctttcttgtgcattttcaatacttgtaaactggaaatcagaaaatatttactatgaacaggaaaatctgacatatagccctttttgatatgtttattaataatgattcttaatggggctcataataagtttaatatgcacagcatcttagaaaagtttaacctgcaaacacttttaaaacataatgcctacttgatttatatctataaaaagactgacaggtaattatatttggaaaacatttaatgcactaactttaaagaaattgaaaattcaggtggataaatagtcttacaaaagacaatgtgctttatgttatacctatagctttggtcccatctttaattgagaaacatttatctgtataaaacatatttttggataaatatatatatatatatttgtatcgctacagaaaggctctaaaaagcatttgaggaaaatatttggttcccttttctataatcatcctttaagattcttatagctacatttggtttattcatcatatttacagtatatatattgttcttttcagtgttcacatcttgttccccatttctcacttgtgtcaccagctgtttgtgccatttttagtgtaaaagttgcagacctattagatctgcagtttaagttgccatgctgctaggaaattgtcctttttctttctagctgttaacctacttcctggaaaaagtagtagctctctgtagcattatggagtttcagtggaaccaaatttttgccattaaaaactggcattatactgaactatacattgagaaatcaatcaaaataaaaatttttactttc

SEQ ID NO: 288620 - DNA, 1061 bp, Homo sapiens
cgcgggccagcggcctccggtccccaggtggcgctgtgggctcgcggaggcggccgcggcaccagggagcgtcgtctccctggtgcgcatgctcgcccccgctgcgggctagctgttgtgttttttttttttcccccgggcggcccggcggctgcgtactggctgtgggatgggaagtgaagccccagcgagcggctgcagcggggccgtgaggagcagccagcgggaggcggcggcgagtcggtgagcagctgggaagagcagaaccggggcggagcacctgcaggcgcgggcggcggccccaccatggcgattcgcaagaaaagcaccaagagccccccagtgctgagccacgaattcgtcctgcagaatcacgcggacatcgtctcctgtgtggcgatggtcttcctgctggggctcatgtttgagataacggcaaaagcttctatcatttttgttactcttcagtacaatgtcaccctcccagcaacagaagaacaagctactgaatcagtgtccctttattactatggcatcaaagatttggctactgttttcttctacatgctagtggcgataattattcatgccgtaattcaagagtatatgttggataaaattaacaggcgaatgcacttctccaaaacaaaacacagcaagtttaatgaatctggtcagcttagtgcgttctacctttttgcctgtgtttggggcacattcattctcatctctgaaaactacatctcagacccaactatcttatggagggcttatccccataacctgatgacatttcaaatgaagtttttctacatatcacagctggcttactggcttcatgcttttcctgaactctacttccagaaaaccaaaaaagtaagctgggattttgtagtgttaaaaaatgtcttgtcatttttttttttgaaaaatttttctaaaattaagtattttcttacatgtttgcccttcctccattcttcttacctcaactcttaccccatcattctcccaccaaccctctttccacaaagcctaaaatccttaagcatttcttgaaa

SEQ ID NO: 288621 - DNA, 3891 bp, Homo sapiens
ggagaactccaccgggctatgcgaacagaatcctgcgaagaggatggcattccctgtggatatgctggaaaattgcagccatgaggaattggaaaattctgctgaagattacatgtcagatttaaggtgtggggaccctgaaaatccagagtgtttttctcttctcaatattacgattcctattagcctgtcaaatgtaggctttgtacctctttatggtggagatcagacccagaaaattcttgctctctttgcacctgaagattcactgacagctgtggcactttaccttgctgatcagtggtgggctattgatgatattgtgaaaacatctgttccttcaagagaggggcttaagcaggtgagcactcttggggagagagtggttctgtatgttctgaatcgaattatttatagaaaacaggaaatggagagaaatgagatcccattcctgtgtcatagcagtactgattatgctaagattctgtggaagaaaggagaggccattgggttttattcagttaagcctacaggaagcatatgtgcctcttttcttacccaaagttaccaattgccagttcttgatacaatgtttctaagaaagaaatacagaggtaaagattttgggcttcacatgctggaggactttgttgattcctttacagaagatgcgcttggcttgcggtatccactgtcttctctcatgtatacagcttgcaagcaatactttgagaagtatccaggagaccatgaactcctttgggaagttgaaggtgttggacactggtaccagcgaataccagtcaccagagcattacaaagagaagcacttaaaattctagcactttctcaaaatgaacctaaaagacctatgtctggagaatatggtcctgcatctgttccagaatacgaagcaagaactgaagacaatcagtctagtgagatgcagctaactattgattctctaaaagatgcctttgcaagcacttccgaaggtcatgataaaacatctgtttccactcatactcgaagtggtaatctaaagcggccaaagattggaaagcggtttcaggattctgaatttagcagttctcaaggtgaagatgaaaagacctcccagacttcacttacagcttcaataaacaaattggagtctactgcacgcccatcagagagctcagaagaattcctggaagaagaacctgaacagagagggattgaatttgaggatgaaagcagtgatagagatgcacggccagcactggaaacccagccacagcaagagaagcaagatggtgaaaaggaatctgaattagagcctatgaatggtgagataatggacgattctcttaagacctcacttataacagaagaggaagactccactagtgaagttttagatgaagaattaaaattgcagccttttaattccagtgaagactctacaaatcttgttccactggtggtagaatcttcaaaaccccctgaggtagatgcaccagataagaccccacgtatacctgactcagaaatgttgatggatgaaggcacatctgatgaaaaggggcacatggaagagaaattgtccctacttccaagaaagaaagcacatcttgggagttcagacaatgttgctactatgtcaaatgaagaacgatctgatggtggttttccaaactctgtgatagctgaattttccgaagaaccggtctctgagaatttgtctcctaatactacttcctcattggaagaccagggtgaggagggggtatctgagccccaggaaacatctactgctcttcctcagagttctttgatagaggttgaacttgaagacgtgccattttcacagaatgcaggacagaagaatcagtcagaggagcagtctgaagcatcttccgagcaactggatcagtttacacaatcggcagaaaaagctgtggatagcagctcagaggaaatagaagtggaagtgcctgtggtagacaggcggaatttaagaagaaaggccaaagggcataaaggacctgctaagaagaaagctaagctgacctgaaggaagaagaaagtggatgataaatcctcttctttgtaacatagttgttgtttttaaaatatggtaattaataaacagcatggggcacaggacaaaaatttccaaaatttcaatttgaacttacttactatgcagttttttgcttccctttagaacgtagaattcaccattgtttttaattttccaggctatttttggtaaatgcaattttttatttttattaaccatgtttcaattttgggaaaccagatcatattatattttctttatcaggtggtacatctgaccattatttcaaaaatataattaaaaagctgtgaaagtagtaggatttccattacttataaggatcacagaaatcttttatactaagggttttaatagtaaaacttggtgagggttctagaagttttaaatttcaaaactaatcaccaattttttaaaatgtaggcatgcctaaacaaaaataagtgtcaataaattagaaaaaatataacttcaagtaaatgagagcacaaaaacagaaacttacggtcaaaggttcatgaagatattttggttttggcctcttaatcctagatatagatgcagttttttcctttgacttcactatctatggaaaggtacacataaaatctgtttctgattcattctatcatctgatgttaacagtactgtcagggatttaactgtggcatgtggggactaattatttaaaatttcatttgaagtattagtttgctgtaattttttttgtctgcatatgtgcagacgcctagaagtttagactttcacctttaatcaggtaaaaatcacaactatactttggagacatggtttaatttggacttctggtcctgatcagatagataaattaagctggagattttacttttatcccaacccagttaacatctatatttcagaagtatgaggctccttcctaaggcatctccttaaatcttgccacctccctaattctacagtcttatttatattcccccacagctttcatctacttctgtaactcatggagtgattctccaatcaacagatcttcctgcctgccggcttatgcccttgatgtccatttttgggtaggtttggaggtgcaccccacaatgttagacctatatggcaggagtaaaactgcccccagtgttagacctatatggcaggggtaaactgcctttgggggagctgtggttacaagggcttcaatcatattggaggcttcaatcatcctttgatttgtactgagtactggttgcaagctggcctgttaagtatatattgtgttgccataacaaaggcctaggaaaatttgaagaaaaaaaacactgaactgttattttttgtaatttatttaaaaatggacaaaatggttattagaatccaaagataatctaaaaacagttctactctttggaaatattatgtgtactcaaatttgcacttaagttggagaatgttttgagaccatttaaattgttttaaaaatagcttgatcttgatccttatgcaaaagaaactaagactttgtgtcattatttgaggtagctaaggactgatgttgaaagtgtattcagtctatagtaagctgatgtcaggtcagtaaattttgtttggggatgttggtattttcgatcaagttaaaatcttaaagcagacaaaaatagtaaacgctcctatttgtgttagattttgaacaattgtattaccctatattttctttaattagtcaaaggtaagccagattatttcattctaaatgaaaattaaagcactttggccatttattttttcaacaaatgctaatactaagtaaaaaaaaa

SEQ ID NO: 288622 - DNA, 1049 bp, Homo sapiens
  misc_feature (899)..(899): n is a, c, g, or t
cgcgacgaggagccgggcgtccggggcgagcgggaggcagccgcactcgccctggcagccgcgagctgtgcggcctgggaccggccggaggtcgccagcgagcagccgccggctccattcattcgcgcggctccgcctcctttcccgggctcttccagcggctcccggggcgcgtctgagaggatggcattccctgtggatatgctggaaaattgcagccatgaggaattggaaaattctgctgaagattacatgtcagatttaaggtgtggggaccctgaaaatccagagtgtttttctcttctcaatattacgattcctattagcctgtcaaatgtaggctttgtacctctttatggtggagatcagacccagaaaattcttgctctctttgcacctgaagattcactgacagctgtggcactttaccttgctgatcagtggtgggctattgatgatattgtgaaaacatctgttccttcaagagaggggcttaagcaggaagcatatgtgcctcttttcttacccaaagttaccaattgccagttcttgatacaatgtttctaagaaagaaatacagaggtaaagattttgggcttcacatgctggaggactttgttgattcctttacagaagatgcgcttggcttgcggtatccactgtcttctctcatgtatacagcttgcaagcaatactttgagaagtatccaggagaccatgaactcctttgggaagttgaaggtgttggacactggtaccagcgaataccagtcaccagagcattacaaagagaagcacttaaaattctagcactttctcaaatgaactcaaagaccatgtctgggaatattggccctgccgtcttgtcccgaaatacgaaggcggaactggaggaacanccaggctagttgagaagcgggtacaaatgaggcttttaaagagcggtgtggcactctcgagggcggttaaacatcgttgtccctatcgcagggggccacgggccacaatggtatgacgtcggcgatgttatcgcccacgggagaaagccg

SEQ ID NO: 288623 - DNA, 2397 bp, Homo sapiens
agctcacagcaagtccaggctagaggtagaaacgtgagagccccacggctggggaagattgccatgggattggagatgagctccaaggacagccctggcagtctggatggaagagcttgggaagatgctcagaaaccacaaagtgcctggtgcggtgggaggaaaaccagagtgtatgctacaagcagccggcggcgccgccgagtgaggggacgcggcgcggtggggcggcgcggcccgaggaggcggcggaggaggggccgcccgcggcccccggctcactccggcactccgggccgctcggcccccatgcctgcccgaccgcgctgccggagccccaggtgaccagcgccatgtccagccaggtggtgggcattgagcctctctacatcaaggcagagccggccagccctgacagtccaaagggttcctcggagacagagaccgagcctcctgtggccctggcccctggtccagctcccactcgctgcctcccaggccacaaggaagaggaggatggggagggggctgggcctggcgagcagggcggtgggaagctggtgctcagctccctgcccaagcgcctctgcctggtctgtggggacgtggcctccggctaccactatggtgtggcatcctgtgaggcctgcaaagccttcttcaagaggaccatccaggggagcatcgagtacagctgtccggcctccaacgagtgtgagatcaccaagcggagacgcaaggcctgccaggcctgccgcttcaccaagtgcctgcgggtgggcatgctcaaggagggagtgcgcctggaccgcgtccggggtgggcggcagaagtacaagcggcggccggaggtggacccactgcccttcccgggccccttccctgctgggcccctggcagtcgctggaggcccccggaagacagcagccccagtgaatgcactggtgtctcatctgctggtggttgagcctgagaagctctatgccatgcctgaccccgcaggccctgatgggcacctcccagccgtggctaccctctgtgacctctttgaccgagagattgtggtcaccatcagctgggccaagagcatcccaggcttctcatcgctgtcgctgtctgaccagatgtcagtactgcagagcgtgtggatggaggtgctggtgctgggtgtggcccagcgctcactgccactgcaggatgagctggccttcgctgaggacttagtcctggatgaagagggggcacgggcagctggcctgggggaactgggggctgccctgctgcaactagtgcggcggctgcaggccctgcggctggagcgagaggagtatgttctactaaaggccttggcccttgccaattcagactctgtgcacatcgaagatgccgaggctgtggagcagctgcgagaagctctgcacgaggccctgctggagtatgaagccggccgggctggccccggagggggtgctgagcggcggcgggcgggcaggctgctgctcacgctaccgctcctccgccagacagcgggcaaagtgctggcccatttctatggggtgaagctggagggcaaggtgcccatgcacaagctgttcttggagatgctcgaggccatgatggactgaggcaaggggtgggactggtgggggttctggcaggacctgcctagcatggggtcagccccaagggctggggcggagctggggtctgggcagtgccacagcctgctggcagggccagggcaatgccatcagcccctgggaacaggccccacgccctctcctccccctcctagggggtgtcagaagctgggaacgtgtgtccaggctctgggcacagtgctgccccttgcaagccataacgtgcccccagagtgtagggggccttgcggaagccatagggggctgcacgggatgcgtgggaggcagaaacctatctcagggagggaaggggatggaggccagagtctcccagtgggtgatgcttttgctgctgcttaatcctaccccctcttcaaagcagagtgggacttggagagcaaaggcccatgcccccttcgctcctcctctcatcatttgcattgggcattagtgtccccccttgaagcaataactccaagcagactccagcccctggacccctggggtggccagggcttccccatcagctcccaacgagcctcctcagggggtaggagagcactgcctctatgccctgcagagcaataacactatatttatttttgggtttggccagggaggcgcagggacatggggcaagccagggcccagagcccttggctgtacagagactctattttaatgtatatttgctgcaaagagaaaccgcttttggttttaaacctttaatgagaaaaaaatatataataccgagctc

SEQ ID NO: 288624 - DNA, 2254 bp, Homo sapiens
gggagtaggaagcggccgcgatgtccttttgtgtcctacaagcagccggcggcgccgccgagtgaggggacgcggcgcggtggggcggcgcggcccgaggaggcggcggaggaggggccgcccgcggcccccggctcactccggcactccgggccgctcggcccccatgcctgcccgaccgcgctgccggagccccaggtgaccagcgccatgtccagccaggtggtgggcattgagcctctctacatcaaggcagagccggccagccctgacagtccaaagggttcctcggagacagagaccgagcctcctgtggccctggcccctggtccagctcccactcgctgcctcccaggccacaaggaagaggaggatggggagggggctgggcctggcgagcagggcggtgggaagctggtgctcagctccctgcccaagcgcctctgcctggtctgtggggacgtggcctccggctaccactatggtgtggcatcctgtgaggcctgcaaagccttcttcaagaggaccatccaggggagcatcgagtacagctgtccggcctccaacgagtgtgagatcaccaagcggagacgcaaggcctgccaggcctgccgcttcaccaagtgcctgcgggtgggcatgctcaaggagggagtgcgcctggaccgcgtccggggtgggcggcagaagtacaagcggcggccggaggtggacccactgcccttcccgggccccttccctgctgggcccctggcagtcgctggaggcccccggaagacagcagccccagtgaatgcactggtgtctcatctgctggtggttgagcctgagaagctctatgccatgcctgaccccgcaggccctgatgggcacctcccagccgtggctaccctctgtgacctctttgaccgagagattgtggtcaccatcagctgggccaagagcatcccaggcttctcatcgctgtcgctgtctgaccagatgtcagtactgcagagcgtgtggatggaggtgctggtgctgggtgtggcccagcgctcactgccactgcaggatgagctggccttcgctgaggacttagtcctggatgaagagggggcacgggcagctggcctgggggaactgggggctgccctgctgcaactagtgcggcggctgcaggccctgcggctggagcgagaggagtatgttctactaaaggccttggcccttgccaattcagactctgtgcacatcgaagatgccgaggctgtggagcagctgcgagaagctctgcacgaggccctgctggagtatgaagccggccgggctggccccggagggggtgctgagcggcggcgggcgggcaggctgctgctcacgctaccgctcctccgccagacagcgggcaaagtgctggcccatttctatggggtgaagctggagggcaaggtgcccatgcacaagctgttcttggagatgctcgaggccatgatggactgaggcaaggggtgggactggtgggggttctggcaggacctgcctagcatggggtcagccccaagggctggggcggagctggggtctgggcagtgccacagcctgctggcagggccagggcaatgccatcagcccctgggaacaggccccacgccctctcctccccctcctagggggtgtcagaagctgggaacgtgtgtccaggctctgggcacagtgctgccccttgcaagccataacgtgcccccagagtgtagggggccttgcggaagccatagggggctgcacgggatgcgtgggaggcagaaacctatctcagggagggaaggggatggaggccagagtctcccagtgggtgatgcttttgctgctgcttaatcctaccccctcttcaaagcagagtgggacttggagagcaaaggcccatgcccccttcgctcctcctctcatcatttgcattgggcattagtgtccccccttgaagcaataactccaagcagactccagcccctggacccctggggtggccagggcttccccatcagctcccaacgagcctcctcagggggtaggagagcactgcctctatgccctgcagagcaataacactatatttatttttgggtttggccagggaggcgcagggacatggggcaagccagggcccagagcccttggctgtacagagactctattttaatgtatatttgctgcaaagagaaaccgcttttggttttaaacctttaatgagaaaaaaatatataataccgagctc

SEQ ID NO: 288625 - DNA, 2158 bp, Homo sapiens
gctaggtagaggctgggtgttaatcggccgaggcggccgagggcggcgcccgccgtgtgcctgggaccggcatgctggggcaggagggcagccgcgtgtcaggtgaccagcgccatgtccagccaggtggtgggcattgagcctctctacatcaaggcagagccggccagccctgacagtccaaagggttcctcggagacagagaccgagcctcctgtggccctggcccctggtccagctcccactcgctgcctcccaggccacaaggaagaggaggatggggagggggctgggcctggcgagcagggcggtgggaagctggtgctcagctccctgcccaagcgcctctgcctggtctgtggggacgtggcctccggctaccactatggtgtggcatcctgtgaggcctgcaaagccttcttcaagaggaccatccaggggagcatcgagtacagctgtccggcctccaacgagtgtgagatcaccaagcggagacgcaaggcctgccaggcctgccgcttcaccaagtgcctgcgggtgggcatgctcaaggagggagtgcgcctggaccgcgtccggggtgggcggcagaagtacaagcggcggccggaggtggacccactgcccttcccgggccccttccctgctgggcccctggcagtcgctggaggcccccggaagacagcagccccagtgaatgcactggtgtctcatctgctggtggttgagcctgagaagctctatgccatgcctgaccccgcaggccctgatgggcacctcccagccgtggctaccctctgtgacctctttgaccgagagattgtggtcaccatcagctgggccaagagcatcccaggcttctcatcgctgtcgctgtctgaccagatgtcagtactgcagagcgtgtggatggaggtgctggtgctgggtgtggcccagcgctcactgccactgcaggatgagctggccttcgctgaggacttagtcctggatgaagagggggcacgggcagctggcctgggggaactgggggctgccctgctgcaactagtgcggcggctgcaggccctgcggctggagcgagaggagtatgttctactaaaggccttggcccttgccaattcagactctgtgcacatcgaagatgccgaggctgtggagcagctgcgagaagctctgcacgaggccctgctggagtatgaagccggccgggctggccccggagggggtgctgagcggcggcgggcgggcaggctgctgctcacgctaccgctcctccgccagacagcgggcaaagtgctggcccatttctatggggtgaagctggagggcaaggtgcccatgcacaagctgttcttggagatgctcgaggccatgatggactgaggcaaggggtgggactggtgggggttctggcaggacctgcctagcatggggtcagccccaagggctggggcggagctggggtctgggcagtgccacagcctgctggcagggccagggcaatgccatcagcccctgggaacaggccccacgccctctcctccccctcctagggggtgtcagaagctgggaacgtgtgtccaggctctgggcacagtgctgccccttgcaagccataacgtgcccccagagtgtagggggccttgcggaagccatagggggctgcacgggatgcgtgggaggcagaaacctatctcagggagggaaggggatggaggccagagtctcccagtgggtgatgcttttgctgctgcttaatcctaccccctcttcaaagcagagtgggacttggagagcaaaggcccatgcccccttcgctcctcctctcatcatttgcattgggcattagtgtccccccttgaagcaataactccaagcagactccagcccctggacccctggggtggccagggcttccccatcagctcccaacgagcctcctcagggggtaggagagcactgcctctatgccctgcagagcaataacactatatttatttttgggtttggccagggaggcgcagggacatggggcaagccagggcccagagcccttggctgtacagagactctattttaatgtatatttgctgcaaagagaaaccgcttttggttttaaacctttaatgagaaaaaaatatataataccgagctc

SEQ ID NO: 288626 - DNA, 2307 bp, Homo sapiens
ctggtactgccccggcggtacggatctggtagaggtctcccgcgggcggggagggggaggcgtagcaactttaggcaacttcccaaaggtgtgcgcaggttgggggcgggacgcggcgccccgggaggtggcggcctctgcgacagcgggagtataagagtggacctgcaggctggtcgcgaggaggtggagcggcgcccgccgtgtgcctgggaccggcatgctggggcaggagggcagccgcgtgtcaggtgaccagcgccatgtccagccaggtggtgggcattgagcctctctacatcaaggcagagccggccagccctgacagtccaaagggttcctcggagacagagaccgagcctcctgtggccctggcccctggtccagctcccactcgctgcctcccaggccacaaggaagaggaggatggggagggggctgggcctggcgagcagggcggtgggaagctggtgctcagctccctgcccaagcgcctctgcctggtctgtggggacgtggcctccggctaccactatggtgtggcatcctgtgaggcctgcaaagccttcttcaagaggaccatccaggggagcatcgagtacagctgtccggcctccaacgagtgtgagatcaccaagcggagacgcaaggcctgccaggcctgccgcttcaccaagtgcctgcgggtgggcatgctcaaggagggagtgcgcctggaccgcgtccggggtgggcggcagaagtacaagcggcggccggaggtggacccactgcccttcccgggccccttccctgctgggcccctggcagtcgctggaggcccccggaagacagcagccccagtgaatgcactggtgtctcatctgctggtggttgagcctgagaagctctatgccatgcctgaccccgcaggccctgatgggcacctcccagccgtggctaccctctgtgacctctttgaccgagagattgtggtcaccatcagctgggccaagagcatcccaggcttctcatcgctgtcgctgtctgaccagatgtcagtactgcagagcgtgtggatggaggtgctggtgctgggtgtggcccagcgctcactgccactgcaggatgagctggccttcgctgaggacttagtcctggatgaagagggggcacgggcagctggcctgggggaactgggggctgccctgctgcaactagtgcggcggctgcaggccctgcggctggagcgagaggagtatgttctactaaaggccttggcccttgccaattcagactctgtgcacatcgaagatgccgaggctgtggagcagctgcgagaagctctgcacgaggccctgctggagtatgaagccggccgggctggccccggagggggtgctgagcggcggcgggcgggcaggctgctgctcacgctaccgctcctccgccagacagcgggcaaagtgctggcccatttctatggggtgaagctggagggcaaggtgcccatgcacaagctgttcttggagatgctcgaggccatgatggactgaggcaaggggtgggactggtgggggttctggcaggacctgcctagcatggggtcagccccaagggctggggcggagctggggtctgggcagtgccacagcctgctggcagggccagggcaatgccatcagcccctgggaacaggccccacgccctctcctccccctcctagggggtgtcagaagctgggaacgtgtgtccaggctctgggcacagtgctgccccttgcaagccataacgtgcccccagagtgtagggggccttgcggaagccatagggggctgcacgggatgcgtgggaggcagaaacctatctcagggagggaaggggatggaggccagagtctcccagtgggtgatgcttttgctgctgcttaatcctaccccctcttcaaagcagagtgggacttggagagcaaaggcccatgcccccttcgctcctcctctcatcatttgcattgggcattagtgtccccccttgaagcaataactccaagcagactccagcccctggacccctggggtggccagggcttccccatcagctcccaacgagcctcctcagggggtaggagagcactgcctctatgccctgcagagcaataacactatatttatttttgggtttggccagggaggcgcagggacatggggcaagccagggcccagagcccttggctgtacagagactctattttaatgtatatttgctgcaaagagaaaccgcttttggttttaaacctttaatgagaaaaaaatatataataccgagctc

SEQ ID NO: 288627 - DNA, 2327 bp, Homo sapiens
gagaacttcctcctccttggctctccccacttacttcctgataacctggtagaggtctcccgcgggcggggagggggaggcgtagcaactttaggcaacttcccaaaggtgtgcgcaggttgggggcgggacgcggcgccccgggaggtggcggcctctgcgacagcgggagtataagagtggacctgcaggctggtcgcgaggaggtggagcggcgcccgccgtgtgcctgggaccggcatgctggggcaggagggcagccgcgtgtcaggtgaccagcgccatgtccagccaggtggtgggcattgagcctctctacatcaaggcagagccggccagccctgacagtccaaagggttcctcggagacagagaccgagcctcctgtggccctggcccctggtccagctcccactcgctgcctcccaggccacaaggaagaggaggatggggagggggctgggcctggcgagcagggcggtgggaagctggtgctcagctccctgcccaagcgcctctgcctggtctgtggggacgtggcctccggctaccactatggtgtggcatcctgtgaggcctgcaaagccttcttcaagaggaccatccaggggagcatcgagtacagctgtccggcctccaacgagtgtgagatcaccaagcggagacgcaaggcctgccaggcctgccgcttcaccaagtgcctgcgggtgggcatgctcaaggagggagtgcgcctggaccgcgtccggggtgggcggcagaagtacaagcggcggccggaggtggacccactgcccttcccgggccccttccctgctgggcccctggcagtcgctggaggcccccggaagacagcagccccagtgaatgcactggtgtctcatctgctggtggttgagcctgagaagctctatgccatgcctgaccccgcaggccctgatgggcacctcccagccgtggctaccctctgtgacctctttgaccgagagattgtggtcaccatcagctgggccaagagcatcccaggcttctcatcgctgtcgctgtctgaccagatgtcagtactgcagagcgtgtggatggaggtgctggtgctgggtgtggcccagcgctcactgccactgcaggatgagctggccttcgctgaggacttagtcctggatgaagagggggcacgggcagctggcctgggggaactgggggctgccctgctgcaactagtgcggcggctgcaggccctgcggctggagcgagaggagtatgttctactaaaggccttggcccttgccaattcagactctgtgcacatcgaagatgccgaggctgtggagcagctgcgagaagctctgcacgaggccctgctggagtatgaagccggccgggctggccccggagggggtgctgagcggcggcgggcgggcaggctgctgctcacgctaccgctcctccgccagacagcgggcaaagtgctggcccatttctatggggtgaagctggagggcaaggtgcccatgcacaagctgttcttggagatgctcgaggccatgatggactgaggcaaggggtgggactggtgggggttctggcaggacctgcctagcatggggtcagccccaagggctggggcggagctggggtctgggcagtgccacagcctgctggcagggccagggcaatgccatcagcccctgggaacaggccccacgccctctcctccccctcctagggggtgtcagaagctgggaacgtgtgtccaggctctgggcacagtgctgccccttgcaagccataacgtgcccccagagtgtagggggccttgcggaagccatagggggctgcacgggatgcgtgggaggcagaaacctatctcagggagggaaggggatggaggccagagtctcccagtgggtgatgcttttgctgctgcttaatcctaccccctcttcaaagcagagtgggacttggagagcaaaggcccatgcccccttcgctcctcctctcatcatttgcattgggcattagtgtccccccttgaagcaataactccaagcagactccagcccctggacccctggggtggccagggcttccccatcagctcccaacgagcctcctcagggggtaggagagcactgcctctatgccctgcagagcaataacactatatttatttttgggtttggccagggaggcgcagggacatggggcaagccagggcccagagcccttggctgtacagagactctattttaatgtatatttgctgcaaagagaaaccgcttttggttttaaacctttaatgagaaaaaaatatataataccgagctc

SEQ ID NO: 288628 - DNA, 1917 bp, Homo sapiens
gggagtaggaagcggccgcgatgtccttttgtgtcctacaagcagccggcggcgccgccgagtgaggggacgcggcgcggtggggcggcgcggcccgaggaggcggcggaggaggggccgcccgcggcccccggctcactccggcactccgggccgctcggcccccatgcctgcccgaccgcgctgccggagccccagggagcatcgagtacagctgtccggcctccaacgagtgtgagatcaccaagcggagacgcaaggcctgccaggcctgccgcttcaccaagtgcctgcgggtgggcatgctcaaggagggagtgcgcctggaccgcgtccggggtgggcggcagaagtacaagcggcggccggaggtggacccactgcccttcccgggccccttccctgctgggcccctggcagtcgctggaggcccccggaagacagcagccccagtgaatgcactggtgtctcatctgctggtggttgagcctgagaagctctatgccatgcctgaccccgcaggccctgatgggcacctcccagccgtggctaccctctgtgacctctttgaccgagagattgtggtcaccatcagctgggccaagagcatcccaggcttctcatcgctgtcgctgtctgaccagatgtcagtactgcagagcgtgtggatggaggtgctggtgctgggtgtggcccagcgctcactgccactgcaggatgagctggccttcgctgaggacttagtcctggatgaagagggggcacgggcagctggcctgggggaactgggggctgccctgctgcaactagtgcggcggctgcaggccctgcggctggagcgagaggagtatgttctactaaaggccttggcccttgccaattcagactctgtgcacatcgaagatgccgaggctgtggagcagctgcgagaagctctgcacgaggccctgctggagtatgaagccggccgggctggccccggagggggtgctgagcggcggcgggcgggcaggctgctgctcacgctaccgctcctccgccagacagcgggcaaagtgctggcccatttctatggggtgaagctggagggcaaggtgcccatgcacaagctgttcttggagatgctcgaggccatgatggactgaggcaaggggtgggactggtgggggttctggcaggacctgcctagcatggggtcagccccaagggctggggcggagctggggtctgggcagtgccacagcctgctggcagggccagggcaatgccatcagcccctgggaacaggccccacgccctctcctccccctcctagggggtgtcagaagctgggaacgtgtgtccaggctctgggcacagtgctgccccttgcaagccataacgtgcccccagagtgtagggggccttgcggaagccatagggggctgcacgggatgcgtgggaggcagaaacctatctcagggagggaaggggatggaggccagagtctcccagtgggtgatgcttttgctgctgcttaatcctaccccctcttcaaagcagagtgggacttggagagcaaaggcccatgcccccttcgctcctcctctcatcatttgcattgggcattagtgtccccccttgaagcaataactccaagcagactccagcccctggacccctggggtggccagggcttccccatcagctcccaacgagcctcctcagggggtaggagagcactgcctctatgccctgcagagcaataacactatatttatttttgggtttggccagggaggcgcagggacatggggcaagccagggcccagagcccttggctgtacagagactctattttaatgtatatttgctgcaaagagaaaccgcttttggttttaaacctttaatgagaaaaaaatatataataccgagctc

SEQ ID NO: 288629 - DNA, 2192 bp, Homo sapiens
ggaacctggggacctgccagccaagatactcggtgggaggaaaaccagagtgtatgctgtcctagaagcaaaagaagaaagtgtttcagtgtttctaggagcaggaagtgatcaacagccttagatcctccttttaggccaagtaacatgaggactaagaattgaccactggatttagcaatgcagaggtccttgtggcccttgatgtcggcagatgagggcagtgtggtccagagatgaggcttggggctgagatgcagccccgctgcctggtccagctcctccctcatccaggcagggctcccccgcccagcagccactcccctccctgcctgctcatggccccctgctctccctttcctccccatacccccagacctgtgcttgcccggggagagtcagggctctcctgtcagctgggtcccctcccagccccgggaggccgccactggagccctgcctcttcctggcagggagcatcgagtacagctgtccggcctccaacgagtgtgagatcaccaagcggagacgcaaggcctgccaggcctgccgcttcaccaagtgcctgcgggtgggcatgctcaaggagggagtgcgcctggaccgcgtccggggtgggcggcagaagtacaagcggcggccggaggtggacccactgcccttcccgggccccttccctgctgggcccctggcagtcgctggaggcccccggaagacagcagccccagtgaatgcactggtgtctcatctgctggtggttgagcctgagaagctctatgccatgcctgaccccgcaggccctgatgggcacctcccagccgtggctaccctctgtgacctctttgaccgagagattgtggtcaccatcagctgggccaagagcatcccaggcttctcatcgctgtcgctgtctgaccagatgtcagtactgcagagcgtgtggatggaggtgctggtgctgggtgtggcccagcgctcactgccactgcaggatgagctggccttcgctgaggacttagtcctggatgaagagggggcacgggcagctggcctgggggaactgggggctgccctgctgcaactagtgcggcggctgcaggccctgcggctggagcgagaggagtatgttctactaaaggccttggcccttgccaattcagactctgtgcacatcgaagatgccgaggctgtggagcagctgcgagaagctctgcacgaggccctgctggagtatgaagccggccgggctggccccggagggggtgctgagcggcggcgggcgggcaggctgctgctcacgctaccgctcctccgccagacagcgggcaaagtgctggcccatttctatggggtgaagctggagggcaaggtgcccatgcacaagctgttcttggagatgctcgaggccatgatggactgaggcaaggggtgggactggtgggggttctggcaggacctgcctagcatggggtcagccccaagggctggggcggagctggggtctgggcagtgccacagcctgctggcagggccagggcaatgccatcagcccctgggaacaggccccacgccctctcctccccctcctagggggtgtcagaagctgggaacgtgtgtccaggctctgggcacagtgctgccccttgcaagccataacgtgcccccagagtgtagggggccttgcggaagccatagggggctgcacgggatgcgtgggaggcagaaacctatctcagggagggaaggggatggaggccagagtctcccagtgggtgatgcttttgctgctgcttaatcctaccccctcttcaaagcagagtgggacttggagagcaaaggcccatgcccccttcgctcctcctctcatcatttgcattgggcattagtgtccccccttgaagcaataactccaagcagactccagcccctggacccctggggtggccagggcttccccatcagctcccaacgagcctcctcagggggtaggagagcactgcctctatgccctgcagagcaataacactatatttatttttgggtttggccagggaggcgcagggacatggggcaagccagggcccagagcccttggctgtacagagactctattttaatgtatatttgctgcaaagagaaaccgcttttggttttaaacctttaatgagaaaaaaatatataataccgagctc

SEQ ID NO: 288630 - DNA, 555 bp, Homo sapiens
gcatccggtccatccccagtggtgtaagacgggacgcggcgcggtggggcggcgcggcccgaggaggcggcggaggaggggccgcccgcggcccccggctcactccggcactccgggccgctcggcccccatgcctgcccgaccgcgctgccggagccccaggtccgggggcggatgggagcgctgccgcgggggtgggcgggcggggcgcgggggccatgtgcgagcgcggcagggaggcgggcggggcgggctgcatgcggggtccgactctggggccagtccgggccacggttgggacccagtcgagggtcggactggtcagggttcaggcgggatccggcgtccgagtcctggtgggccggcctggggcaggatctggctctggctgcgggtcctgactcgggtcagggttgggcctccgatccagcccgctccggggcagggttcaatcccgcatttgccgaagtccctggggctggccggggtggaagacggggagggctctatgtctgggaaggggctctgaagaccacgtgggggcgctcgaagggg

SEQ ID NO: 288631 - DNA, 321 bp, Homo sapiens
cgggctttccctgggagacagttagcgctcttccctggagggaagtcactggacagctgctactgaggaaggccacagggggagccactgtgggaagatgcttgacccctgaggcctgacagattcgagtgctcctgactcttgtcctctaattgtcacagcagccccagtgaatgcactggtgtctcatctgctggtggttgagcctgagaagctctatgccatgcctgaccccgcaggccctgatgggcacctcccagccgtggctaccctctgtgacctctttgaccgagagattgtggtcaccatcagctgggccaa

SEQ ID NO: 288632 - DNA, 2083 bp, Homo sapiens
gggagtaggaagcggccgcgatgtccttttgtgtcctacaagcagccggcggcgccgccgagtgaggggacgcggcgcggtggggcggcgcggcccgaggaggcggcggaggaggggccgcccgcggcccccggctcactccggcactccgggccgctcggcccccatgcctgcccgaccgcgctgccggagccccaggtgaccagcgccatgtccagccaggtggtgggcattgagcctctctacatcaaggcagagccggccagccctgacagtccaaagggttcctcggagacagagaccgagcctcctgtggccctggcccctggtccagctcccactcgctgcctcccaggccacaaggaagaggaggatggggagggggctgggcctggcgagcagggcggtgggaagctggtgctcagctccctgcccaagcgcctctgcctggtctgtggggacgtggcctccggctaccactatggtgtggcatcctgtgaggcctgcaaagccttcttcaagaggaccatccaggggagcatcgagtacagctgtccggcctccaacgagtgtgagatcaccaagcggagacgcaaggcctgccaggcctgccgcttcaccaagtgcctgcgggtgggcatgctcaaggagggagtgcgcctggaccgcgtccggggtgggcggcagaagtacaagcggcggccggaggtggacccactgcccttcccgggccccttccctgctgggcccctggcagtcgctggaggcccccggaagacaggcttctcatcgctgtcgctgtctgaccagatgtcagtactgcagagcgtgtggatggaggtgctggtgctgggtgtggcccagcgctcactgccactgcaggatgagctggccttcgctgaggacttagtcctggatgaagagggggcacgggcagctggcctgggggaactgggggctgccctgctgcaactagtgcggcggctgcaggccctgcggctggagcgagaggagtatgttctactaaaggccttggcccttgccaattcagactctgtgcacatcgaagatgccgaggctgtggagcagctgcgagaagctctgcacgaggccctgctggagtatgaagccggccgggctggccccggagggggtgctgagcggcggcgggcgggcaggctgctgctcacgctaccgctcctccgccagacagcgggcaaagtgctggcccatttctatggggtgaagctggagggcaaggtgcccatgcacaagctgttcttggagatgctcgaggccatgatggactgaggcaaggggtgggactggtgggggttctggcaggacctgcctagcatggggtcagccccaagggctggggcggagctggggtctgggcagtgccacagcctgctggcagggccagggcaatgccatcagcccctgggaacaggccccacgccctctcctccccctcctagggggtgtcagaagctgggaacgtgtgtccaggctctgggcacagtgctgccccttgcaagccataacgtgcccccagagtgtagggggccttgcggaagccatagggggctgcacgggatgcgtgggaggcagaaacctatctcagggagggaaggggatggaggccagagtctcccagtgggtgatgcttttgctgctgcttaatcctaccccctcttcaaagcagagtgggacttggagagcaaaggcccatgcccccttcgctcctcctctcatcatttgcattgggcattagtgtccccccttgaagcaataactccaagcagactccagcccctggacccctggggtggccagggcttccccatcagctcccaacgagcctcctcagggggtaggagagcactgcctctatgccctgcagagcaataacactatatttatttttgggtttggccagggaggcgcagggacatggggcaagccagggcccagagcccttggctgtacagagactctattttaatgtatatttgctgcaaagagaaaccgcttttggttttaaacctttaatgagaaaaaaatatataataccgagctc

SEQ ID NO: 288633 - DNA, 1823 bp, Homo sapiens
gggagtaggaagcggccgcgatgtccttttgtgtcctacaagcagccggcggcgccgccgagtgaggggacgcggcgcggtggggcggcgcggcccgaggaggcggcggaggaggggccgcccgcggcccccggctcactccggcactccgggccgctcggcccccatgcctgcccgaccgcgctgccggagccccaggtgaccagcgccatgtccagccaggtggtgggcattgagcctctctacatcaaggcagaagtacaagcggcggccggaggtggacccactgcccttcccgggccccttccctgctgggcccctggcagtcgctggaggcccccggaagacagcagccccagtgaatgcactggtgtctcatctgctggtggttgagcctgagaagctctatgccatgcctgaccccgcaggccctgatgggcacctcccagccgtggctaccctctgtgacctctttgaccgagagattgtggtcaccatcagctgggccaagagcatcccaggcttctcatcgctgtcgctgtctgaccagatgtcagtactgcagagcgtgtggatggaggtgctggtgctgggtgtggcccagcgctcactgccactgcaggatgagctggccttcgctgaggacttagtcctggatgaagagggggcacgggcagctggcctgggggaactgggggctgccctgctgcaactagtgcggcggctgcaggccctgcggctggagcgagaggagtatgttctactaaaggccttggcccttgccaattcagactctgtgcacatcgaagatgccgaggctgtggagcagctgcgagaagctctgcacgaggccctgctggagtatgaagccggccgggctggccccggagggggtgctgagcggcggcgggcgggcaggctgctgctcacgctaccgctcctccgccagacagcgggcaaagtgctggcccatttctatggggtgaagctggagggcaaggtgcccatgcacaagctgttcttggagatgctcgaggccatgatggactgaggcaaggggtgggactggtgggggttctggcaggacctgcctagcatggggtcagccccaagggctggggcggagctggggtctgggcagtgccacagcctgctggcagggccagggcaatgccatcagcccctgggaacaggccccacgccctctcctccccctcctagggggtgtcagaagctgggaacgtgtgtccaggctctgggcacagtgctgccccttgcaagccataacgtgcccccagagtgtagggggccttgcggaagccatagggggctgcacgggatgcgtgggaggcagaaacctatctcagggagggaaggggatggaggccagagtctcccagtgggtgatgcttttgctgctgcttaatcctaccccctcttcaaagcagagtgggacttggagagcaaaggcccatgcccccttcgctcctcctctcatcatttgcattgggcattagtgtccccccttgaagcaataactccaagcagactccagcccctggacccctggggtggccagggcttccccatcagctcccaacgagcctcctcagggggtaggagagcactgcctctatgccctgcagagcaataacactatatttatttttgggtttggccagggaggcgcagggacatggggcaagccagggcccagagcccttggctgtacagagactctattttaatgtatatttgctgcaaagagaaaccgcttttggttttaaacctttaatgagaaaaaaatatataataccgagctc

SEQ ID NO: 288634 - DNA, 1136 bp, Homo sapiens
ggcacgaggatcagaccatcagaaggatttgtataaagagtgactctcctatgaaggtaaaggccacccctcttcagttccagtgactgagatacatttttccaatcctgggggcaaatacagacacagcaagttccttcttccctttggaaatttggcagctgccttcaccagtgagcacaaagccacatttcaaaggaaactgacaaattatccccagctgccagaagaagaaatcctcactggacggcttcctgtttcctgtggttcattatctgattggctgcagggatgaaagtttttaagttcataggactgatgatcctcctcacctctgcgttttcagccggttcaggacaaagtccaatgactgtgctgtgctccatagactggttcatggtcacagtgcaccccttcatgctaaacaacgatgtgtgtgtacactttcatgaactacacttgggcctgggttgccccccaaaccatgttcagccacacgcctaccagttcacctaccgtgttactgaatgtggcatcagggccaaagctgtctctcaggacatggttatctacagcactgagatacactactcttctaagggcacgccatctaagtttgtgatcccagtgtcatgtgctgccccccaaaagtccccatggctcaccaagccctgctccatgagagtagccagcaagagcagggccacagcccagaaggatgagaaatgctacgaggtgttcagcttgtcacagtccagtcaaaggcccaactgcgattgtccaccttgtgtcttcagtgaagaagagcatacccaggtcccttgtcaccaagcaggggctcaggaggctcaacctctgcagccatctcactttcttgatatttctgaggattggtctcttcacacagatgatatgattgggtccatgtgatcctcaggtttggggtctcctgaagatgctatttctagaattagtatatagtgtacaaatgtctgacaaataagtgctcttgtgaccctcatgtgagcacttttgagaaagagaaacctatagcaacttcatgaattaagcctttttctatatttttatattcatgtgtaaacaaaaaataaaataaaattctgatcgcataaaaa

SEQ ID NO: 288635 - DNA, 767 bp, Homo sapiens
cacctctaggaggagggtgaagcttcttgtcttccagacattcccgaggaaaacttacacgaggagtctgtcaaggagtgccaccctttggacaaagaaaacgagactgacaacgaagtctgaaggagaaaggcaagtatctttctgctggactggccctcaagacttagcacaactgccttcaccagtgagcacaaagccacatttcaaaggaaactgacaaattatccccagctgccagaagaaggttagttttctgtgtgttcagtgtcccccttctctgataaccaacaggttaactttctaaagggaactgacaaaagcagaaattgtccttttacccaaatgagttgtgattgttgatttttttaaagatgtggatttgtaatattcctctccattcctactctaatttataccaggaaatagagtgtaagtgatcacaatggaacctctattgtttgcaagattcatattaatgcattctggttttttaagtgcttacaagatctaaattaatttttaaattagctagcatagtgtctttactcaatgagtagccatttaaaggctgaatgatgtcagccctggccatagagatttatgtgttgttatatttcatttgcatttttaaccatctttgtacatgtgttatgcctctagcacttatgctgtataacaggagagagtctaatgcctagcacagtacactacatatagtaggtgctcactaaatgccatttgaattgaaatgatccaaaagagtg

SEQ ID NO: 288636 - DNA, 1056 bp, Homo sapiens
  misc_feature (69)..(69): n is a, c, g, or t
ggccacgaaacaccactcccccttaataaaaaaaaaaaaaagccttttaggtggactgactctctcctnaacgccgaacagctgccttcaccagtgagcacaaagccacatttcaaaggaaactgacaaattatccccagctgccagaagaagaaatcctcactggacggcttcctgtttcctgtggttcattatctgattggctgcagggatgaaagtttttaagttcataggactgatgatcctcctcacctctgcgttttcagccggttcaggacaaagtccaatgactgtgctgtgctccatagactggttcatggtcacagtgcaccccttcatgctaaacaacgatgtgtgtgtacactttcatgaactacacttgggcctgggttgccccccaaaccatgttcagccacacgcctaccagttcacctaccgtgttactgaatgtggcatcagggccaaagctgtctctcaggacatggttatctacagcactgagatacactactcttctaagggcacgccatctaagtttgtgatcccagtgtcatgtgctgccccccaaaagtccccatggctcaccaagccctgctccatgagagtagccagcaagagcagggccacagcccagaaggatgagaaatgctacgaggtgttcagcttgtcacagtccagtcaaaggcccaactgcgattgtccaccttgtgtcttcagtgaagaagagcatacccaggtcccttgtcaccaagcaggggctcaggaggctcaacctctgcagccatctcactttcttgatatttctgaggattggtctcttcacacagatgatatgattgggtccatgtgatcctcaggtttggggtctcctgaagatgctatttctagaattagtatatagtgtacaaatgtctgacaaataagtgctcttgtgaccctcatgtgagcacttttgagaaagagaaacctatagcaacttcatgaattaagcctttttctatatttttatattcatgtgtaaacaaaaaataaaataaaattctgatcgcataaaaa

SEQ ID NO: 288637 - DNA, 1173 bp, Homo sapiens
ggcacgaggatcagaccatcagaaggatttgtataaagagtgactctcctatgaaggtaaaggccacccctcttcagttccagtgactgagatacatttttccaatcctgggggcaaatacagacacagcaagttccttcttccctttggaaatttggcagctgccttcaccagtgagcacaaagccacatttcaaaggaaactgacaaattatccccagctgccagaagaagaaatcctcactggacggcttcctgtttcctgtggttcattatctgattggctgcagggatgaaagtttttaagttcataggactgatgatcctcctcacctctgcgttttcagccggttcaggacaaagtccaatgactgtgctgtgctccatagactggttcatggtcacagtgcaccccttcatgctaaacaacgatgtgtgtgtacactttcatgaactacacttgggcctgggttgccccccaaaccatgttcagccacacgcctaccagttcacctaccgtgttactgaatgtggcatcagggccaaagctgtctctcaggacatggttatctacagcactgagatacactactcttctaagggcacgccatctaagtttgtgatcccagtgtcatgtgctgccccccaaaagtccccatggctcaccaagccctgctccatgagagtagccagcaagagcagggccacagcccagaaggatgagaaatgctacgaggtgttcagcttgtcacagtccagtcaaaggcccaactgcgattgtccaccttgtgtcttcagtgaagaagagcatacccaggtcccttgtcaccaagcaggggctcaggaggctcaacctctgcagccatctcactttcttgatatttctgaggattggtctcttcacacagatgatatgattgggtccatgtgatcctcaggtttggggtctcctgaagatgctatttctagaattagtatatagtgtacaaatgtctgacaaataagtgctcttgtgaccctcatgtgagcacttttgagaaagagaaacctatagcaacttcatgaattaagcctttttctatatttttatattcatgtgtaaacaaaaaataaaataatgcctgatgcggccggcccacaatcccacgcaatcgcgatcagcaccaagcgctcg

SEQ ID NO: 288638 - DNA, 1065 bp, Homo sapiens
cacctctaggaggagggtgaagcttcttgtcttccagacattcccgaggaaaacttacacgaggagtctgtcaaggagtgccaccctttgctgccttcaccagtgagcacaaagccacatttcaaaggaaactgacaaattatccccagctgccagaagaagaaatcctcactggacggcttcctgtttcctgtggttcattatctgattggctgcagggatgaaagtttttaagttcataggactgatgatcctcctcacctctgcgttttcagccggttcaggacaaagtccaatgactgtgctgtgctccatagactggttcatggtcacagtgcaccccttcatgctaaacaacgatgtgtgtgtacactttcatgaactacacttgggcctgggttgccccccaaaccatgttcagccacacgcctaccagttcacctaccgtgttactgaatgtggcatcagggccaaagctgtctctcaggacatggttatctacagcactgagatacactactcttctaagggcacgccatctaagtttgtgatcccagtgtcatgtgctgccccccaaaagtccccatggctcaccaagccctgctccatgagagtagccagcaagagcagggccacagcccagaaggatgagaaatgctacgaggtgttcagcttgtcacagtccagtcaaaggcccaactgcgattgtccaccttgtgtcttcagtgaagaagagcatacccaggtcccttgtcaccaagcaggggctcaggaggctcaacctctgcagccatctcactttcttgatatttctgaggattggtctcttcacacagatgatatgattgggtccatgtgatcctcaggtttggggtctcctgaagatgctatttctagaattagtatatagtgtacaaatgtctgacaaataagtgctcttgtgaccctcatgtgagcacttttgagaaagagaaacctatagcaacttcatgaattaagcctttttctatatttttatattcatgtgtaaacaaaaaataaaataaaattctgatcgcataaaaa

SEQ ID NO: 288639 - DNA, 1177 bp, Homo sapiens
gaggaaacagccctagctattcctgaggcccccattactgcctggtcaagggctttggggcacatactgcctgtgcgtccatcctcatgaactccaaatctccccgctactccacaggacaaagaaaacgagactgacaacgaagtctgaaggagaaaggcaagtatctttctgctggactggccctcaagacttagcacaactgccttcaccagtgagcacaaagccacatttcaaaggaaactgacaaattatccccagctgccagaagaagaaatcctcactggacggcttcctgtttcctgtggttcattatctgattggctgcagggatgaaagtttttaagttcataggactgatgatcctcctcacctctgcgttttcagccggttcaggacaaagtccaatgactgtgctgtgctccatagactggttcatggtcacagtgcaccccttcatgctaaacaacgatgtgtgtgtacactttcatgaactacacttgggcctgggttgccccccaaaccatgttcagccacacgcctaccagttcacctaccgtgttactgaatgtggcatcagggccaaagctgtctctcaggacatggttatctacagcactgagatacactactcttctaagggcacgccatctaagtttgtgatcccagtgtcatgtgctgccccccaaaagtccccatggctcaccaagccctgctccatgagagtagccagcaagagcagggccacagcccagaaggatgagaaatgctacgaggtgttcagcttgtcacagtccagtcaaaggcccaactgcgattgtccaccttgtgtcttcagtgaagaagagcatacccaggtcccttgtcaccaagcaggggctcaggaggctcaacctctgcagccatctcactttcttgatatttctgaggattggtctcttcacacagatgatatgattgggtccatgtgatcctcaggtttggggtctcctgaagatgctatttctagaattagtatatagtgtacaaatgtctgacaaataagtgctcttgtgaccctcatgtgagcacttttgagaaagagaaacctatagcaacttcatgaattaagcctttttctatatttttatattcatgtgtaaacaaaaaataaaataaaattctgatcgcataaaaa

SEQ ID NO: 288640 - DNA, 1064 bp, Homo sapiens
ggcacgaggatcagaccatcagaaggatttgtataaagagtgactctcctatgaaggtaaaggccacccctcttcagttccagtgactgagatacatttttccaatcctgggggcaaatacagacacagcaagttccttcttccctttggaaatttggcagaaatcctcactggacggcttcctgtttcctgtggttcattatctgattggctgcagggatgaaagtttttaagttcataggactgatgatcctcctcacctctgcgttttcagccggttcaggacaaagtccaatgactgtgctgtgctccatagactggttcatggtcacagtgcaccccttcatgctaaacaacgatgtgtgtgtacactttcatgaactacacttgggcctgggttgccccccaaaccatgttcagccacacgcctaccagttcacctaccgtgttactgaatgtggcatcagggccaaagctgtctctcaggacatggttatctacagcactgagatacactactcttctaagggcacgccatctaagtttgtgatcccagtgtcatgtgctgccccccaaaagtccccatggctcaccaagccctgctccatgagagtagccagcaagagcagggccacagcccagaaggatgagaaatgctacgaggtgttcagcttgtcacagtccagtcaaaggcccaactgcgattgtccaccttgtgtcttcagtgaagaagagcatacccaggtcccttgtcaccaagcaggggctcaggaggctcaacctctgcagccatctcactttcttgatatttctgaggattggtctcttcacacagatgatatgattgggtccatgtgatcctcaggtttggggtctcctgaagatgctatttctagaattagtatatagtgtacaaatgtctgacaaataagtgctcttgtgaccctcatgtgagcacttttgagaaagagaaacctatagcaacttcatgaattaagcctttttctatatttttatattcatgtgtaaacaaaaaataaaataaaattctgatcgcataaaaa

SEQ ID NO: 288641 - DNA, 927 bp, Homo sapiens
ctcttgtgtttttttgtgctctagaaatcctcactggacggcttcctgtttcctgtggttcattatctgattggctgcagggatgaaagtttttaagttcataggactgatgatcctcctcacctctgcgttttcagccggttcaggacaaagtccaatgactgtgctgtgctccatagactggttcatggtcacagtgcaccccttcatgctaaacaacgatgtgtgtgtacactttcatgaactacacttgggcctgggttgccccccaaaccatgttcagccacacgcctaccagttcacctaccgtgttactgaatgtggcatcagggccaaagctgtctctcaggacatggttatctacagcactgagatacactactcttctaagggcacgccatctaagtttgtgatcccagtgtcatgtgctgccccccaaaagtccccatggctcaccaagccctgctccatgagagtagccagcaagagcagggccacagcccagaaggatgagaaatgctacgaggtgttcagcttgtcacagtccagtcaaaggcccaactgcgattgtccaccttgtgtcttcagtgaagaagagcatacccaggtcccttgtcaccaagcaggggctcaggaggctcaacctctgcagccatctcactttcttgatatttctgaggattggtctcttcacacagatgatatgattgggtccatgtgatcctcaggtttggggtctcctgaagatgctatttctagaattagtatatagtgtacaaatgtctgacaaataagtgctcttgtgaccctcatgtgagcacttttgagaaagagaaacctatagcaacttcatgaattaagcctttttctatatttttatattcatgtgtaaacaaaaaataaaataaaattctgatcgcataaaaa

SEQ ID NO: 288642 - DNA, 1999 bp, Homo sapiens
caccaaagaggcgcaggaaggagagacaaacggcccgcccgccggctccacaaacagcccctcgctggtcctccagtcttccagcgagaagaaagaaagagcgtccccggaagccgccgaaactctggggtagagtggcacgcgctttttgcttttccgcgtcttcttcggtggcgatccgcgtcctagaaagggcggtgggctccacctcggcctagaaggccagcgggagccgtaggaagccgtcgcgggaagctcagccgaattggagttggagcccccggattgcgctgaccctgagctctcagactccccagtacaatgactcaagcagaaattaagctctgttctttgttgctgcaagagcattttggagagattgtagaaaaaattggagtccatctgataagaaccggcagccagccactaagagtaattgcccatgacacaggaacatcactggatcaggtgaagaaagccctgtgtgtcctcgtccaacataacctggtgagttatcaagtgcacaaacgtggtgtggtggagtatgaagcccagtgcagccgggtattgcgaatgcttagatatccccggtacatctatactaccaaaactctgtacagtgacactggagagctgattgttgaggagcttctgttgaacggcaaactgacaatgtcagctgttgtgaagaaagtggcagaccggctcacagagaccatggaggatggcaagaccatggactatgctgaagtatcaaacacatttgtgcgactggcagacacacactttgtacaacgctgcccttcggtacctaccactgagaattcagaccctgggccaccaccacctgcccccacacttgtcattaatgaaaaggacatgtacctggttcctaaactcagcttgatagggaaaggtaaaaggaggagatcatctgatgaagatgctgctggggagcccaaggccaagagaccaaaatatactacagataacaaggagcccattccagatgatgggatttattggcaggccaaccttgacagattccaccaacacttccgtgaccaagccattgtgagcgcagttgctaacaggatggaccagacaagcagcgagattgtgcgaaccatgctccgaatgagtgagattaccacttcctctagtgctcccttcacccagccattgtcttccaatgagatcttcagatccctacctgttggctataacatctctaagcaagttcttgatcagtatctcactctgctggcagatgatccactagagtttgttggaaagtctggcgacagtggtggaggaatgtatgtcatcaacctccataaggcattagcatccctagccacagccactctggagtccgtcgtacaggagagatttgggtctcgctgtgctagaatattccgtctagttttgcagaagaaacacatagagcagaagcaagtggaagactttgcaatgattcctgcaaaggaggcaaaggatatgctatataagatgctctcagaaaatttcatgtcactccaggaaattcccaaaacaccagaccatgccccatccaggaccttctatttatatactgtgaacatcctgtcagctgcccgaatgttgttgcacaggtgctacaagagcatagccaacttgatagaaaggaggcaatttgaaaccaaagagaataagcgtctactagaaaaatctcagagggtagaagccatcattgcatctatgcaggctactggtgcagaggaagcacagttacaagaaatagaggagatgatcacagctcctgaacgtcagcagctagagaccctgaaacgtaatgtcaacaagttggatgccagtgagatccaggtggacgaaaccatcttcctgctggagtcttacattgagtgcaccatgaagagacagtgatccagaagaagcatcttcctcagaagatctggggggatggaaagcaaaataaaggaggtgcctggatgcatta

SEQ ID NO: 288643 - DNA, 3194 bp, Homo sapiens
caccaaagaggcgcaggaaggagagacaaacggcccgcccgccggctccacaaacagcccctcgctggtcctccagtcttccagcgagaagaaagaaagagcgtccccggaagccgccgaaactctggggtagagtggcacgcgctttttgcttttccgcgtcttcttcggtggcgatccgcgtcctagaaagggcggtgggctccacctcggcctagaaggccagcgggagccgtaggaagccgtcgcgggaagctcagccgaattggagttggagcccccggattgcgctgaccctgagctctcagactccccagtacaatgactcaagcagaaattaagctctgttctttgttgctgcaagagcattttggagagattgtagaaaaaattggagtccatctgataagaaccggcagccagccactaagagtaattgcccatgacacaggaacatcactggatcaggtgaagaaagccctgtgtgtcctcgtccaacataacctggtgagttatcaagtgcacaaacgtggtgtggtggagtatgaagcccagtgcagccgggtattgcgaatgcttagatatccccggtacatctatactaccaaaactctgtacagtgacactggagagctgattgttgaggagcttctgttgaacggcaaactgacaatgtcagctgttgtgaagaaagtggcagaccggctcacagagaccatggaggatggcaagaccatggactatgctgaagtatcaaacacatttgtgcgactggcagacacacactttgtacaacgctgcccttcggtacctaccactgagaattcagaccctgggccaccaccacctgcccccacacttgtcattaatgaaaaggacatgtacctggttcctaaactcagcttgatagggaaaggtaaaaggaggagatcatctgatgaagatgctgctggggagcccaaggccaagagaccaaaatatactacagataacaaggagcccattccagatgatgggatttattggcaggccaaccttgacagattccaccaacacttccgtgaccaagccattgtgagcgcagttgctaacaggatggaccagacaagcagcgagattgtgcgaaccatgctccgaatgagtgagattaccacttcctctagtgctcccttcacccagccattgtcttccaatgagatcttcagatccctacctgttggctataacatctctaagcaagttcttgatcagtatctcactctgctggcagatgatccactagagtttgttggaaagtctggcgacagtggtggaggaatgtatgtcatcaacctccataaggcattagcatccctagccacagccactctggagtccgtcgtacaggagagatttgggtctcgctgtgctagaatattccgtctagttttgcagaagaaacacatagagcagaagcaagtggaagactttgcaatgattcctgcaaaggaggcaaaggatatgctatataagatgctctcagaaaatttcatgtcactccaggaaattcccaaaacaccagaccatgccccatccaggaccttctatttatatactgtgaacatcctgtcagctgcccgaatgttgttgcacaggtgctacaagagcatagccaacttgatagaaaggaggcaatttgaaaccaaagagaataagcgtctactagaaaaatctcagagggtagaagccatcattgcatctatgcaggctactggtgcagaggaagcacagttacaagaaatagaggagatgatcacagctcctgaacgtcagcagctagagaccctgaaacgtaatgtcaacaagttggatgccagtgagatccaggtggacgaaaccatcttcctgctggagtcttacattgagtgcaccatgaagagacagtgatccagaagaagcatcttcctcagaagatctggggggatggaaagcaaaataaaggaggtgcctggatgcattatttgcagtgggataagtcgcagagtcttcaactaaacccccctctctatcccctgcagcccaggatacacctgaaagaatttggcatatttagatccattgctgtagtctcccctcatcaaatcttggcagtgggaagaaccttaaatcaacaaggttaatcatctatcagatgcatctgttcccataaagaagttacccacacctatggttacctatatccctggcaataggaaacttcctaagaagttaattttattttcagatgtctatgcctgttctttattttgttgagataggtgatagatagatagatagatagataatttgttgttgttgagacaggatctcactctgtcactcaggctggggtgtaatagcgcaatcacagctccctacagccttgacctcctgagctcaagcagtccttccacctcagcctctggagtagctgggactacaggcatgcaccacacatacccagctattttttatttatttatttatttttttgtagagacagggcctccctgtgttgcccaggctgatgaactgtaatttttaacacacacagtgtagggaatgtgaaagactatcacagagtagaagaaaaaattattttcagggttagcaggtggattgtcccaagcagtcacactagaatctgtggactgaagccacatttgccagctccaggcttctaacacatctgaaactgtgtatgtagaacagctagctcaatgcctggcatatggtaagcacacagtaaattagcgccttcctcttctccatggttccttaaaactggcaacgctaaattctctctctcagtatcacggatataatttgtcccagcagctttaattcatttaaagcagttagatgttgttttataatatcttcagttttctctcaccaatgtgttttctaattgtttaaacacttgagtgtcaaacaattgccagccaccatactaaacacaacatacaaggatagataaataagacaccatctctgccctcaagccagtcaccatcatttactaagcacctgttttgtgctaagtactggggtaagccttggggatataaagattaataaattttgagcatacagtctagtaggaggagacaaataagtacataagtaccaggaagtattaggggtgctacagtagaagagtaaacactatgtac

SEQ ID NO: 288644 - DNA, 3187 bp, Homo sapiens
caccaaagaggcgcaggaaggagagacaaacggcccgcccgccggctccacaaacagcccctcgctggtcctccagtcttccagcgagaagaaagaaagagcgtccccggaagccgccgaaactctggggtagagtggcacgcgctttttgcttttccgcgtcttcttcggtggcgatccgcgtcctagaaagggcggtgggctccacctcggcctagaaggccagcgggagccgtaggaagccgtcgcgggaagctcagccgaattggagttggagcccccggattgcgctgaccctgagctctcagactccccagtacaatgactcaagcagaaattaagctctgttctttgttgctgcaagagcattttggagagattgtagaaaaaattggagtccatctgataagaaccggcagccagccactaagagtaattgcccatgacacaggaacatcactggatcaggtgaagaaagccctgtgtgtcctcgtccaacataacctggtgagttatcaagtgcacaaacgtggtgtggtggagtatgaagcccagtgcagccgggtattgcgaatgcttagatatccccggtacatctatactaccaaaactctgtacagtgacactggagagctgattgttgaggagcttctgttgaacggcaaactgacaatgtcagctgttgtgaagaaagtggcagaccggctcacagagaccatggaggatggcaagaccatggactatgctgaagtatcaaacacatttgtgcgactggcagacacacactttgtacaacgctgcccttcggtacctaccactgagaattcagaccctgggccaccaccacctgcccccacacttgtcattaatgaaaaggacatgtacctggttcctaaactcagcttgatagggaaaggtaaaaggaggagatcatctgatgaagatgctgctggggagcccaaggccaagagaccaaaatatactacagataacaaggagcccattccagatgatgggatttattggcaggccaaccttgacagattccaccaacacttccgtgaccaagccattgtgagcgcagttgctaacaggatggaccagacaagcagcgagattgtgcgaaccatgctccgaatgagtgagattaccacttcctctagtgctcccttcacccagccattgtcttccaatgagatcttcagatccctacctgttggctataacatctctaagcaagttcttgatcagtatctcactctgctggcagatgatccactagagtttgttggaaagtctggcgacagtggtggaggaatgtatgtcatcaacctccataaggcattagcatccctagccacagccactctggagtccgtcgtacaggagagatttgggtctcgctgtgctagaatattccgtctagttttgcagaagaaacacatagagcagaagcaagtggaagactttgcaatgattcctgcaaaggaggcaaaggatatgctatataagatgctctcagaaaatttcatgtcactccaggaaattcccaaaacaccagaccatgccccatccaggaccttctatttatatactgtgaacatcctgtcagctgcccgaatgttgttgcacaggtgctacaagagcatagccaacttgatagaaaggaggcaatttgaaaccaaagagaataagcgtctactagaaaaatctcagagggtagaagccatcattgcatctatgcaggctactggtgcagaggaagcacagttacaagaaatagaggagatgatcacagctcctgaacgtcagcagctagagaccctgaaacgtaatgtcaacaagttggatgccagtgagatccaggtggacgaaaccatcttcctgctggagtcttacattgagtgcaccatgaagagacagtgatccagaagaagcatcttcctcagaagatctggggggatggaaagcaaaataaaggaggtgcctggatgcattatttgcagtgggataagtcgcagagtcttcaactaaacccccctctctatcccctgcagcccaggatacacctgaaagaatttggcatatttagatccattgctgtagtctcccctcatcaaatcttggcagtgggaagaaccttaaatcaacaaggttaatcatctatcagatgcatctgttcccataaagaagttacccacacctatggttacctatatccctggcaataggaaacttcctaagaagttaattttattttcaaaaaaaaaaaaaaaaaaaaaaaaaaaaaaaaaaaaaaaaaaaaaaaacaaaaaacaaaacacaacaaaagaaaaaaaaaaaaccagagaagagggaagcacaaacagaaaaaaagagagggggggcggggcgaggcggaggtagggggcgcgggcgccccacgagggcaggagggagggcgagggaaggggggcaaacaagaaaagaaaaacgaggagggcaaaaagccagaagaggaagagacaccgccacaaaaaaacaaacgacgagcggcggggaggagaaaaacaaacagagaaaagacaaaacagagaggaagggagagaggaagaagagaaaaaacaaaagacagaacaaaaacatgaagaagagcggattcacaaagagcacacgcgaacacaaagaaatagaaacaaacacgacaccgaccacatcagagagagcgagaaaacaaacacacaaaaaacgacaaagccgaggccgacgaggagacgagacaaaccagaaacacaaccgaaaagcaaaaaagaaaacaaaaagagacacaacaaagacaagaaaaggagagaaagaagggagaacacgagagccacagagaaagggagagacgagaccaagggagaggagacaaggcagagggaagagacaagagagagagagggagaagaacgaggaggcgagacgaaaggagaggggagagaagagggccgacgcgagaggtaggaaaaagggaagaggaaggagggcaagcaggaagggaggagagaagagagcgcaagggatagaaacggacgaagagacagcgaggaggaaaagaagcgaagagagagagggcaagcgaggacggggggggaaagcaggggagagggaagaagcggggcagggacaggaccgacaagagaggagaggcagagaagaagagaga

SEQ ID NO: 288645 - DNA, 1909 bp, Homo sapiens
atctctctctctctctctctctctctctctctctctggggtagagtggcacgcgctttttgcttttccgcgtcttcttcggtggcgatccgcgtcctagaaagggcggtgggctccacctcggcctagaaggccagcgggagccgtaggaagccgtcgcgggaagctcagccgaattggagttggagcccccggattgcgctgaccctgagctctcagactccccagtacaatgactcaagcagaaattaagctctgttctttgttgctgcaagagcattttggagagattgtagaaaaaattggagtccatctgataagaaccggcagccagccactaagagtaattgcccatgacacaggaacatcactggatcaggtgaagaaagccctgtgtgtcctcgtccaacataacctggtgagttatcaagtgcacaaacgtggtgtggtggagtatgaagcccagtgcagccgggtattgcgaatgcttagatatccccggtacatctatactaccaaaactctgtacagtgacactggagagctgattgttgaggagcttctgttgaacggcaaactgacaatgtcagctgttgtgaagaaagtggcagaccggctcacagagaccatggaggatggcaagaccatggactatgctgaagtatcaaacacatttgtgcgactggcagacacacactttgtacaacgctgcccttcggtacctaccactgagaattcagaccctgggccaccaccacctgcccccacacttgtcattaatgaaaaggacatgtacctggttcctaaactcagcttgatagggaaaggtaaaaggaggagatcatctgatgaagatgctgctggggagcccaaggccaagagaccaaaatatactacagataacaaggagcccattccagatgatgggatttattggcaggccaaccttgacagattccaccaacacttccgtgaccaagccattgtgagcgcagttgctaacaggatggaccagacaagcagcgagattgtgcgaaccatgctccgaatgagtgagattaccacttcctctagtgctcccttcacccagccattgtcttccaatgagatcttcagatccctacctgttggctataacatctctaagcaagttcttgatcagtatctcactctgctggcagatgatccactagagtttgttggaaagtctggcgacagtggtggaggaatgtatgtcatcaacctccataaggcattagcatccctagccacagccactctggagtccgtcgtacaggagagatttgggtctcgctgtgctagaatattccgtctagttttgcagaagaaacacatagagcagaagcaagtggaagactttgcaatgattcctgcaaaggaggcaaaggatatgctatataagatgctctcagaaaatttcatgtcactccaggaaattcccaaaacaccagaccatgccccatccaggaccttctatttatatactgtgaacatcctgtcagctgcccgaatgttgttgcacaggtgctacaagagcatagccaacttgatagaaaggaggcaatttgaaaccaaagagaataagcgtctactagaaaaatctcagagggtagaagccatcattgcatctatgcaggctactggtgcagaggaagcacagttacaagaaatagaggagatgatcacagctcctgaacgtcagcagctagagaccctgaaacgtaatgtcaacaagttggatgccagtgagatccaggtggacgaaaccatcttcctgctggagtcttacattgagtgcaccatgaagagacagtgatccagaagaagcatcttcctcagaagatctggggggatggaaagcaaaataaaggaggtgcctggatgcatta

SEQ ID NO: 288646 - DNA, 1847 bp, Homo sapiens
gctggtacggcccggaatgtagggatccgcgtcctagaaagggcggtgggctccacctcggcctagaaggccagcgggagccgtaggaagccgtcgcgggaagctcagccgaattggagttggagcccccggattgcgctgaccctgagctctcagactccccagtacaatgactcaagcagaaattaagctctgttctttgttgctgcaagagcattttggagagattgtagaaaaaattggagtccatctgataagaaccggcagccagccactaagagtaattgcccatgacacaggaacatcactggatcaggtgaagaaagccctgtgtgtcctcgtccaacataacctggtgagttatcaagtgcacaaacgtggtgtggtggagtatgaagcccagtgcagccgggtattgcgaatgcttagatatccccggtacatctatactaccaaaactctgtacagtgacactggagagctgattgttgaggagcttctgttgaacggcaaactgacaatgtcagctgttgtgaagaaagtggcagaccggctcacagagaccatggaggatggcaagaccatggactatgctgaagtatcaaacacatttgtgcgactggcagacacacactttgtacaacgctgcccttcggtacctaccactgagaattcagaccctgggccaccaccacctgcccccacacttgtcattaatgaaaaggacatgtacctggttcctaaactcagcttgatagggaaaggtaaaaggaggagatcatctgatgaagatgctgctggggagcccaaggccaagagaccaaaatatactacagataacaaggagcccattccagatgatgggatttattggcaggccaaccttgacagattccaccaacacttccgtgaccaagccattgtgagcgcagttgctaacaggatggaccagacaagcagcgagattgtgcgaaccatgctccgaatgagtgagattaccacttcctctagtgctcccttcacccagccattgtcttccaatgagatcttcagatccctacctgttggctataacatctctaagcaagttcttgatcagtatctcactctgctggcagatgatccactagagtttgttggaaagtctggcgacagtggtggaggaatgtatgtcatcaacctccataaggcattagcatccctagccacagccactctggagtccgtcgtacaggagagatttgggtctcgctgtgctagaatattccgtctagttttgcagaagaaacacatagagcagaagcaagtggaagactttgcaatgattcctgcaaaggaggcaaaggatatgctatataagatgctctcagaaaatttcatgtcactccaggaaattcccaaaacaccagaccatgccccatccaggaccttctatttatatactgtgaacatcctgtcagctgcccgaatgttgttgcacaggtgctacaagagcatagccaacttgatagaaaggaggcaatttgaaaccaaagagaataagcgtctactagaaaaatctcagagggtagaagccatcattgcatctatgcaggctactggtgcagaggaagcacagttacaagaaatagaggagatgatcacagctcctgaacgtcagcagctagagaccctgaaacgtaatgtcaacaagttggatgccagtgagatccaggtggacgaaaccatcttcctgctggagtcttacattgagtgcaccatgaagagacagtgatccagaagaagcatcttcctcagaagatctggggggatggaaagcaaaataaaggaggtgcctggatgcatta

SEQ ID NO: 288647 - DNA, 2924 bp, Homo sapiens
caccaaagaggcgcaggaaggagagacaaacggcccgcccgccggctccacaaacagcccctcgctggtcctccagtcttccagcgagaagaaagaaagagcgtccccggaagccgccgaaactctggggtagagtggcacgcgctttttgcttttccgcgtcttcttcggtggcgatccgcgtcctagaaagggcggtgggctccacctcggcctagaaggccagcgggagccgtaggaagccgtcgcgggaagctcagccgaattggagttggagcccccggattgcgctgaccctgagctctcagactccccagtacaatgactcaagcagaaattaagctctgttctttgttgctgcaagagcattttggagagattgtagaaaaaattggagtccatctgataagaaccggcagccagccactaagagtaattgcccatgacacaggaacatcactggatcaggtgaagaaagccctgtgtgtcctcgtccaacataacctggtgagttatcaagtgcacaaacgtggtgtggtggagtatgaagcccagtgcagccgggtattgcgaatgcttagatatccccggtacatctatactaccaaaactctgtacagtgacactggagagctgattgttgaggagcttctgttgaacggcaaactgacaatgtcagctgttgtgaagaaagtggcagaccggctcacagagaccatggaggatggcaagaccatggactatgctgaagtatcaaacacatttgtgcgactggcagacacacactttgtacaacgctgcccttcggtacctaccactgagaattcagaccctgggccaccaccacctgcccccacacttgtcattaatgaaaaggacatgtacctggttcctaaactcagcttgatagggaaaggtaaaaggaggagatcatctgatgaagatgctgctggggagcccaaggccaagagaccaaaatatactacagataacaaggagcccattccagatgatgggatttattggcaggccaaccttgacagattccaccaacacttccgtgaccaagccattgtgagcgcagttgctaacaggatggaccagacaagcagcgagattgtgcgaaccatgctccgaatgagtgagattaccacttcctctagtgctcccttcacccagccattgtcttccaatgagatcttcagatccctacctgttggctataacatctctaagcaagttcttgatcagtatctcactctgctggcagatgatccactagagtttgttggaaagtctggcgacagtggtggaggaatgtatgtcatcaacctccataaggcattagcatccctagccacagccactctggagtccgtcgtacaggagagatttgggtctcgctgtgctagaatattccgtctagttttgcagaagaaacacatagagcagaagcaagtggaagactttgcaatgattcctgcaaaggaggcaaaggatatgctatataagatgctctcagaaaatttcatgtcactccaggaaattcccaaaacaccagaccatgccccatccaggaccttctatttatatactgtgaacatcctgtcagctgcccgaatgttgttgcacaggtgctacaagagcatagccaacttgatagaaaggaggcaatttgaaaccaaagagaataagcgtctactagaaaaatctcagagggtagaagccatcattgcatctatgcaggctactggtgcagaggaagcacagttacaagaaatagaggagatgatcacagctcctgaacgtcagcagctagagaccctgaaacgtaatgtcaacaagttggatgccagtgagatccaggtggacgaaaccatcttcctgctggagtcttacattgagtgcaccatgaagagacagtgatccagaagaagcatcttcctcagaagatctggggggatggaaagcaaaataaaggaggtgcctggatgcattaaaaaaaaaaaaaaaaaaaaaaaaaaaaaaaaaaaaaaaaaaaaaaaacaaaaaacaaaacacaacaaaagaaaaaaaaaaaaccagagaagagggaagcacaaacagaaaaaaagagagggggggcggggcgaggcggaggtagggggcgcgggcgccccacgagggcaggagggagggcgagggaaggggggcaaacaagaaaagaaaaacgaggagggcaaaaagccagaagaggaagagacaccgccacaaaaaaacaaacgacgagcggcggggaggagaaaaacaaacagagaaaagacaaaacagagaggaagggagagaggaagaagagaaaaaacaaaagacagaacaaaaacatgaagaagagcggattcacaaagagcacacgcgaacacaaagaaatagaaacaaacacgacaccgaccacatcagagagagcgagaaaacaaacacacaaaaaacgacaaagccgaggccgacgaggagacgagacaaaccagaaacacaaccgaaaagcaaaaaagaaaacaaaaagagacacaacaaagacaagaaaaggagagaaagaagggagaacacgagagccacagagaaagggagagacgagaccaagggagaggagacaaggcagagggaagagacaagagagagagagggagaagaacgaggaggcgagacgaaaggagaggggagagaagagggccgacgcgagaggtaggaaaaagggaagaggaaggagggcaagcaggaagggaggagagaagagagcgcaagggatagaaacggacgaagagacagcgaggaggaaaagaagcgaagagagagagggcaagcgaggacggggggggaaagcaggggagagggaagaagcggggcagggacaggaccgacaagagaggagaggcagagaagaagagaga

SEQ ID NO: 288648 - DNA, 3000 bp, Homo sapiens
caccaaagaggcgcaggaaggagagacaaacggcccgcccgccggctccacaaacagcccctcgctggtcctccagtcttccagcgagaagaaagaaagagcgtccccggaagccgccgaaactctggggtagagtggcacgcgctttttgcttttccgcgtcttcttcggtggcgatccgcgtcctagaaagggcggtgggctccacctcggcctagaaggccagcgggagccgtaggaagccgtcgcgggaagctcagccgaattggagttggagcccccggattgcgctgaccctgagctctcagactccccagtacaatgactcaagcagaaattaagctctgttctttgttgctgcaagagcattttggagagattgtagaaaaaattggagtccatctgataagaaccggcagccagccactaagagtaattgcccatgacacaggaacatcactggatcaggtgaagaaagccctgtgtgtcctcgtccaacataacctggtgagttatcaagtgcacaaacgtggtgtggtggagtatgaagcccagtgcagccgggtattgcgaatgcttagatatccccggtacatctatactaccaaaactctgtacagtgacactggagagctgattgttgaggagcttctgttgaacggcaaactgacaatgtcagctgttgtgaagaaagtggcagaccggctcacagagaccatggaggatggcaagaccatggactatgctgaagtatcaaacacatttgtgcgactggcagacacacactttgtacaacgctgcccttcggtacctaccactgagaattcagaccctgggccaccaccacctgcccccacacttgtcattaatgaaaaggacatgtacctggttcctaaactcagcttgatagggaaaggtaaaaggaggagatcatctgatgaagatgctgctggggagcccaaggccaagagaccaaaatatactacagataacaaggagcccattccagatgatgggatttattggcaggccaaccttgacagattccaccaacacttccgtgaccaagccattgtgagcgcagttgctaacaggatggaccagacaagcagcgagattgtgcgaaccatgctccgaatgagtgagattaccacttcctctagtgctcccttcacccagccattgtcttccaatgagatttgggtctcgctgtgctagaatattccgtctagttttgcagaagaaacacatagagcagaagcaagtggaagactttgcaatgattcctgcaaaggaggcaaaggatatgctatataagatgctctcagaaaatttcatgtcactccaggaaattcccaaaacaccagaccatgccccatccaggaccttctatttatatactgtgaacatcctgtcagctgcccgaatgttgttgcacaggtgctacaagagcatagccaacttgatagaaaggaggcaatttgaaaccaaagagaataagcgtctactagaaaaatctcagagggtagaagccatcattgcatctatgcaggctactggtgcagaggaagcacagttacaagaaatagaggagatgatcacagctcctgaacgtcagcagctagagaccctgaaacgtaatgtcaacaagttggatgccagtgagatccaggtggacgaaaccatcttcctgctggagtcttacattgagtgcaccatgaagagacagtgatccagaagaagcatcttcctcagaagatctggggggatggaaagcaaaataaaggaggtgcctggatgcattatttgcagtgggataagtcgcagagtcttcaactaaacccccctctctatcccctgcagcccaggatacacctgaaagaatttggcatatttagatccattgctgtagtctcccctcatcaaatcttggcagtgggaagaaccttaaatcaacaaggttaatcatctatcagatgcatctgttcccataaagaagttacccacacctatggttacctatatccctggcaataggaaacttcctaagaagttaattttattttcagatgtctatgcctgttctttattttgttgagataggtgatagatagatagatagatagataatttgttgttgttgagacaggatctcactctgtcactcaggctggggtgtaatagcgcaatcacagctccctacagccttgacctcctgagctcaagcagtccttccacctcagcctctggagtagctgggactacaggcatgcaccacacatacccagctattttttatttatttatttatttttttgtagagacagggcctccctgtgttgcccaggctgatgaactgtaatttttaacacacacagtgtagggaatgtgaaagactatcacagagtagaagaaaaaattattttcagggttagcaggtggattgtcccaagcagtcacactagaatctgtggactgaagccacatttgccagctccaggcttctaacacatctgaaactgtgtatgtagaacagctagctcaatgcctggcatatggtaagcacacagtaaattagcgccttcctcttctccatggttccttaaaactggcaacgctaaattctctctctcagtatcacggatataatttgtcccagcagctttaattcatttaaagcagttagatgttgttttataatatcttcagttttctctcaccaatgtgttttctaattgtttaaacacttgagtgtcaaacaattgccagccaccatactaaacacaacatacaaggatagataaataagacaccatctctgccctcaagccagtcaccatcatttactaagcacctgttttgtgctaagtactggggtaagccttggggatataaagattaataaattttgagcatacagtctagtaggaggagacaaataagtacataagtaccaggaagtattaggggtgctacagtagaagagtaaacactatgtac

SEQ ID NO: 288649 - DNA, 1886 bp, Homo sapiens
caccaaagaggcgcaggaaggagagacaaacggcccgcccgccggctccacaaacagcccctcgctggtcctccagtcttccagcgagaagaaagaaagagcgtccccggaagccgccgaaactctggggtagagtggcacgcgctttttgcttttccgcgtcttcttcggtggcgatccgcgtcctagaaagggcggtgggctccacctcggcctagaaggccagcgggagccgtaggaagccgtcgcgggaagctcagccgaattggagttggagcccccggattgcgctgaccctgagctctcagactccccagtacaatgactcaagcagaaattaagctctgttctttgttgctgcaagagcattttggagagattgtagaaaaaattggagtccatctgataagaaccggcagccagccactaagagtaattgcccatgacacaggaacatcactggatcaggtgaagaaagccctgtgtgtcctcgtccaacataacctggtgagttatcaagtgcacaaacgtggtgtggtggagtatgaagcccagtgcagccgggtattgcgaatgcttagatatccccggtacatctatactaccaaaactctgtacagtgacactggagagctgattgttgaggagcttctgttgaacggcaaactgacaatgtcagctgttgtgaagaaagtggcagaccggctcacagagaccatggaggatggcaagaccatggactatgctgaagtatcaaacacatttgtgcgactggcagacacacactttgtacaacgctgcccttcggtacctaccactgagaattcagaccctgggccaccaccacctgcccccacacttgtcattaatgaaaaggacatgtacctggttcctaaactcagcttgatagggaaaggtaaaaggaggagatcatctgatgaagatgctgctggggagcccaaggccaagagaccaaaatatactacagataacaaggagcccattccagatgatgggatttattggcaggccaaccttgacagattccaccaacacttccgtgaccaagccattgtgagcgcagttgctaacaggatggaccagacaagcagcgagattgtgcgaaccatgctccgaatgagtgagattaccacttcctctagtgctcccttcacccagccattgtcttccaatgagatcttcagatccctacctgttggctataacatctctaagcaagttcttgatcagtatctcactctgctggcagatgatccaatttgggtctcgctgtgctagaatattccgtctagttttgcagaagaaacacatagagcagaagcaagtggaagactttgcaatgattcctgcaaaggaggcaaaggatatgctatataagatgctctcagaaaatttcatgtcactccaggaaattcccaaaacaccagaccatgccccatccaggaccttctatttatatactgtgaacatcctgtcagctgcccgaatgttgttgcacaggtgctacaagagcatagccaacttgatagaaaggaggcaatttgaaaccaaagagaataagcgtctactagaaaaatctcagagggtagaagccatcattgcatctatgcaggctactggtgcagaggaagcacagttacaagaaatagaggagatgatcacagctcctgaacgtcagcagctagagaccctgaaacgtaatgtcaacaagttggatgccagtgagatccaggtggacgaaaccatcttcctgctggagtcttacattgagtgcaccatgaagagacagtgatccagaagaagcatcttcctcagaagatctggggggatggaaagcaaaataaaggaggtgcctggatgcatta

SEQ ID NO: 288650 - DNA, 1750 bp, Homo sapiens
gctgtctgaacgtggcggcactgactggaccaagagaccacgtccgaaacgggaacctgtgtaaaggaagtgtagagctaggagccaagcgccttggaagccctttccgaggatggcaaaggatctgggaatgcttctccaaagatatgtggatggacgaaatagctctcagactccccagtacaatgactcaagcagaaattaagctctgttctttgttgctgcaagagcattttggagagattgtagaaaaaattggagtccatctgataagaaccggcagccagccactaagagtaattgcccatgacacaggaacatcactggatcaggtgaagaaagccctgtgtgtcctcgtccaacataacctgtgacactggagagctgattgttgaggagcttctgttgaacggcaaactgacaatgtcagctgttgtgaagaaagtggcagaccggctcacagagaccatggaggatggcaagaccatggactatgctgaagtatcaaacacatttgtgcgactggcagacacacactttgtacaacgctgcccttcggtacctaccactgagaattcagaccctgggccaccaccacctgcccccacacttgtcattaatgaaaaggacatgtacctggttcctaaactcagcttgatagggaaaggtaaaaggaggagatcatctgatgaagatgctgctggggagcccaaggccaagagaccaaaatatactacagataacaaggagcccattccagatgatgggatttattggcaggccaaccttgacagattccaccaacacttccgtgaccaagccattgtgagcgcagttgctaacaggatggaccagacaagcagcgagattgtgcgaaccatgctccgaatgagtgagattaccacttcctctagtgctcccttcacccagccattgtcttccaatgagatcttcagatccctacctgttggctataacatctctaagcaagttcttgatcagtatctcactctgctggcagatgatccactagagtttgttggaaagtctggcgacagtggtggaggaatgtatgtcatcaacctccataaggcattagcatccctagccacagccactctggagtccgtcgtacaggagagatttgggtctcgctgtgctagaatattccgtctagttttgcagaagaaacacatagagcagaagcaagtggaagactttgcaatgattcctgcaaaggaggcaaaggatatgctatataagatgctctcagaaaatttcatgtcactccaggaaattcccaaaacaccagaccatgccccatccaggaccttctatttatatactgtgaacatcctgtcagctgcccgaatgttgttgcacaggtgctacaagagcatagccaacttgatagaaaggaggcaatttgaaaccaaagagaataagcgtctactagaaaaatctcagagggtagaagccatcattgcatctatgcaggctactggtgcagaggaagcacagttacaagaaatagaggagatgatcacagctcctgaacgtcagcagctagagaccctgaaacgtaatgtcaacaagttggatgccagtgagatccaggtggacgaaaccatcttcctgctggagtcttacattgagtgcaccatgaagagacagtgatccagaagaagcatcttcctcagaagatctggggggatggaaagcaaaataaaggaggtgcctggatgcatta

SEQ ID NO: 288651 - DNA, 1222 bp, Homo sapiens
agatttgggtctcgctgtgctagggatgctaatgccttatggaggttgatgacatacattccaccaccacctgcccccacacttgtcattaatgaaaaggacatgtacctggttcctaaactcagcttgatagggaaaggtaaaaggaggagatcatctgatgaagatgctgctggggagcccaaggccaagagaccaaaatatactacagataacaaggagcccattccagatgatgggatttattggcaggccaaccttgacagattccaccaacacttccgtgaccaagccattgtgagcgcagttgctaacaggatggaccagacaagcagcgagattgtgcgaaccatgctccgaatgagtgagattaccacttcctctagtgctcccttcacccagccattgtcttccaatgagatcttcagatccctacctgttggctataacatctctaagcaagttcttgatcagtatctcactctgctggcagatgatccactagagtttgttggaaagtctggcgacagtggtggaggaatgtatgtcatcaacctccataaggcattagcatccctagccacagccactctggagtccgtcgtacaggagagatttgggtctcgctgtgctagaatattccgtctagttttgcagaagaaacacatagagcagaagcaagtggaagactttgcaatgattcctgcaaaggaggcaaaggatatgctatataagatgctctcagaaaatttcatgtcactccaggaaattcccaaaacaccagaccatgccccatccaggaccttctatttatatactgtgaacatcctgtcagctgcccgaatgttgttgcacaggtgctacaagagcatagccaacttgatagaaaggaggcaatttgaaaccaaagagaataagcgtctactagaaaaatctcagagggtagaagccatcattgcatctatgcaggctactggtgcagaggaagcacagttacaagaaatagaggagatgatcacagctcctgaacgtcagcagctagagaccctgaaacgtaatgtcaacaagttggatgccagtgagatccaggtggacgaaaccatcttcctgctggagtcttacattgagtgcaccatgaagagacagtgatccagaagaagcatcttcctcagaagatctggggggatggaaagcaaaataaaggaggtgcctggatgcatta

SEQ ID NO: 288652 - DNA, 1243 bp, Homo sapiens
  misc_feature (1213)..(1213): n is a, c, g, or t
caccaaagaggcgcaggaaggagagacaaacggcccgcccgccggctccacaaacagcccctcgctggtcctccagtcttccagcgagaagaaagaaagagcgtccccggaagccgccgaaactctggggtagagtggcacgcgctttttgcttttccgcgtcttcttcggtggcgatccgcgtcctagaaagggcggtgggctccacctcggcctagaaggccagcgggagccgtaggaagccgtcgcgggaagctcagccgaattggagttggagcccccggattgcgctgaccctgagctctcagactccccagtacaatgactcaagcagaaattaagctctgttctttgttgctgcaagagcattttggagagattgtagaaaaaattggagtccatctgataagaaccggcagccagccactaagagtaattgcccatgacacaggaacatcactggatcaggtgaagaaagccctgtgtgtcctcgtccaacataacctggtgagttatcaagtgcacaaacgtggtgtggtggagtatgaagcccagtgcagccgggtattgcgaatgcttagatatccccggtacatctatactaccaaaactctgtacagtgacactggagagctgattgttgaggagcttctgttgaacggcaaactgacaatgtcagctgttgtgaagaaagtggcagaccggctcacagagaccatggaggatggcaagaccatggactatgctgaagtatcaaacacatttgtgcgactggcagacacacactttgtacaacgctgcccttcggtacctaccactgagaattcagaccctgggccaccaccacctgcccccacacttgtcattaatgaaaaggacatgtacctggttcctaaactcagcttgatagggaaaggtaaaaggaggagatcatctgatgaagatgctgctggggagcccaaggccaagagaccaaaatatactacagataacaaggagcccattccagatgatgggatttattggcaggccaaccttgacagattccaccaacacttccgtgaccaagccattgtgagcgcagttgctaacaggatggaccagacaagcagcgagattgtgcgaaccatgctccgaatgagtgagattaccacttcctctagtggatcatctgccagcagagtgagatactgatcaagactttattagagangttatagccaacaggtaggataagaagggc

SEQ ID NO: 288653 - DNA, 2130 bp, Homo sapiens
tctataagatctcgtgtcgccagccaacaggatggaccagacaagcagcgagattgtgcgaaccatgctccgaatgagtgagattaccacttcctctagtgctcccttcacccagccattgtcttccaatgagatcttcagatccctacctgttggctataacatctctaagcaagttcttgatcagtatctcactctgctggcagatgatccactagagtttgttggaaagtctggcgacagtggtggaggaatgtatgtcatcaacctccataaggcattagcatccctagccacagccactctggagtccgtcgtacaggagagatttgggtctcgctgtgctagaatattccgtctagttttgcagaagaaacacatagagcagaagcaagtggaagactttgcaatgattcctgcaaaggaggcaaaggatatgctatataagatgctctcagaaaatttcatgtcactccaggaaattcccaaaacaccagaccatgccccatccaggaccttctatttatatactgtgaacatcctgtcagctgcccgaatgttgttgcacaggtgctacaagagcatagccaacttgatagaaaggaggcaatttgaaaccaaagagaataagcgtctactagaaaaatctcagagggtagaagccatcattgcatctatgcaggctactggtgcagaggaagcacagttacaagaaatagaggagatgatcacagctcctgaacgtcagcagctagagaccctgaaacgtaatgtcaacaagttggatgccagtgagatccaggtggacgaaaccatcttcctgctggagtcttacattgagtgcaccatgaagagacagtgatccagaagaagcatcttcctcagaagatctggggggatggaaagcaaaataaaggaggtgcctggatgcattatttgcagtgggataagtcgcagagtcttcaactaaacccccctctctatcccctgcagcccaggatacacctgaaagaatttggcatatttagatccattgctgtagtctcccctcatcaaatcttggcagtgggaagaaccttaaatcaacaaggttaatcatctatcagatgcatctgttcccataaagaagttacccacacctatggttacctatatccctggcaataggaaacttcctaagaagttaattttattttcagatgtctatgcctgttctttattttgttgagataggtgatagatagatagatagatagataatttgttgttgttgagacaggatctcactctgtcactcaggctggggtgtaatagcgcaatcacagctccctacagccttgacctcctgagctcaagcagtccttccacctcagcctctggagtagctgggactacaggcatgcaccacacatacccagctattttttatttatttatttatttttttgtagagacagggcctccctgtgttgcccaggctgatgaactgtaatttttaacacacacagtgtagggaatgtgaaagactatcacagagtagaagaaaaaattattttcagggttagcaggtggattgtcccaagcagtcacactagaatctgtggactgaagccacatttgccagctccaggcttctaacacatctgaaactgtgtatgtagaacagctagctcaatgcctggcatatggtaagcacacagtaaattagcgccttcctcttctccatggttccttaaaactggcaacgctaaattctctctctcagtatcacggatataatttgtcccagcagctttaattcatttaaagcagttagatgttgttttataatatcttcagttttctctcaccaatgtgttttctaattgtttaaacacttgagtgtcaaacaattgccagccaccatactaaacacaacatacaaggatagataaataagacaccatctctgccctcaagccagtcaccatcatttactaagcacctgttttgtgctaagtactggggtaagccttggggatataaagattaataaattttgagcatacagtctagtaggaggagacaaataagtacataagtaccaggaagtattaggggtgctacagtagaagagtaaacactatgtac

SEQ ID NO: 288654 - DNA, 2126 bp, Homo sapiens
ctgcctcagcctcccaaagtgttcggattacaggccttagccactgtgcccggcctaaaacatctttatttcattaaagtcaagagttctaagttcccaaacccatctgaagtgtcctttgctccatagatcttcagatccctacctgttggctataacatctctaagcaagttcttgatcagtatctcactctgctggcagatgatccactagagtttgttggaaagtctggcgacagtggtggaggaatgtatgtcatcaacctccataaggcattagcatccctagccacagccactctggagtccgtcgtacaggagagatttgggtctcgctgtgctagaatattccgtctagttttgcagaagaaacacatagagcagaagcaagtggaagactttgcaatgattcctgcaaaggaggcaaaggatatgctatataagatgctctcagaaaatttcatgtcactccaggaaattcccaaaacaccagaccatgccccatccaggaccttctatttatatactgtgaacatcctgtcagctgcccgaatgttgttgcacaggtgctacaagagcatagccaacttgatagaaaggaggcaatttgaaaccaaagagaataagcgtctactagaaaaatctcagagggtagaagccatcattgcatctatgcaggctactggtgcagaggaagcacagttacaagaaatagaggagatgatcacagctcctgaacgtcagcagctagagaccctgaaacgtaatgtcaacaagttggatgccagtgagatccaggtggacgaaaccatcttcctgctggagtcttacattgagtgcaccatgaagagacagtgatccagaagaagcatcttcctcagaagatctggggggatggaaagcaaaataaaggaggtgcctggatgcattatttgcagtgggataagtcgcagagtcttcaactaaacccccctctctatcccctgcagcccaggatacacctgaaagaatttggcatatttagatccattgctgtagtctcccctcatcaaatcttggcagtgggaagaaccttaaatcaacaaggttaatcatctatcagatgcatctgttcccataaagaagttacccacacctatggttacctatatccctggcaataggaaacttcctaagaagttaattttattttcagatgtctatgcctgttctttattttgttgagataggtgatagatagatagatagatagataatttgttgttgttgagacaggatctcactctgtcactcaggctggggtgtaatagcgcaatcacagctccctacagccttgacctcctgagctcaagcagtccttccacctcagcctctggagtagctgggactacaggcatgcaccacacatacccagctattttttatttatttatttatttttttgtagagacagggcctccctgtgttgcccaggctgatgaactgtaatttttaacacacacagtgtagggaatgtgaaagactatcacagagtagaagaaaaaattattttcagggttagcaggtggattgtcccaagcagtcacactagaatctgtggactgaagccacatttgccagctccaggcttctaacacatctgaaactgtgtatgtagaacagctagctcaatgcctggcatatggtaagcacacagtaaattagcgccttcctcttctccatggttccttaaaactggcaacgctaaattctctctctcagtatcacggatataatttgtcccagcagctttaattcatttaaagcagttagatgttgttttataatatcttcagttttctctcaccaatgtgttttctaattgtttaaacacttgagtgtcaaacaattgccagccaccatactaaacacaacatacaaggatagataaataagacaccatctctgccctcaagccagtcaccatcatttactaagcacctgttttgtgctaagtactggggtaagccttggggatataaagattaataaattttgagcatacagtctagtaggaggagacaaataagtacataagtaccaggaagtattaggggtgctacagtagaagagtaaacactatgtac

SEQ ID NO: 288655 - DNA, 1922 bp, Homo sapiens
caggaattcaagaccagcctggaaaatatagtgagaccatgtctccaccacccccaaaagattaaaaaattagcggagcatggtggtgcatgcctgtagttccggctacttgggggactgaggtgggaggattgcttgagccggaggtggaagttgcagtgagctgatatcacgccaccgcactccatcctaggtaacagagcaagacccagtctcaaaataaataaataaaataaacacaggtactgaatgactaggaaacaggaaagtgaaattcccaaaacaccagaccatgccccatccaggaccttctatttatatactgtgaacatcctgtcagctgcccgaatgttgttgcacaggtgctacaagagcatagccaacttgatagaaaggaggcaatttgaaaccaaagagaataagcgtctactagaaaaatctcagagggtagaagccatcattgcatctatgcaggctactggtgcagaggaagcacagttacaagaaatagaggagatgatcacagctcctgaacgtcagcagctagagaccctgaaacgtaatgtcaacaagttggatgccagtgagatccaggtggacgaaaccatcttcctgctggagtcttacattgagtgcaccatgaagagacagtgatccagaagaagcatcttcctcagaagatctggggggatggaaagcaaaataaaggaggtgcctggatgcattatttgcagtgggataagtcgcagagtcttcaactaaacccccctctctatcccctgcagcccaggatacacctgaaagaatttggcatatttagatccattgctgtagtctcccctcatcaaatcttggcagtgggaagaaccttaaatcaacaaggttaatcatctatcagatgcatctgttcccataaagaagttacccacacctatggttacctatatccctggcaataggaaacttcctaagaagttaattttattttcagatgtctatgcctgttctttattttgttgagataggtgatagatagatagatagatagataatttgttgttgttgagacaggatctcactctgtcactcaggctggggtgtaatagcgcaatcacagctccctacagccttgacctcctgagctcaagcagtccttccacctcagcctctggagtagctgggactacaggcatgcaccacacatacccagctattttttatttatttatttatttttttgtagagacagggcctccctgtgttgcccaggctgatgaactgtaatttttaacacacacagtgtagggaatgtgaaagactatcacagagtagaagaaaaaattattttcagggttagcaggtggattgtcccaagcagtcacactagaatctgtggactgaagccacatttgccagctccaggcttctaacacatctgaaactgtgtatgtagaacagctagctcaatgcctggcatatggtaagcacacagtaaattagcgccttcctcttctccatggttccttaaaactggcaacgctaaattctctctctcagtatcacggatataatttgtcccagcagctttaattcatttaaagcagttagatgttgttttataatatcttcagttttctctcaccaatgtgttttctaattgtttaaacacttgagtgtcaaacaattgccagccaccatactaaacacaacatacaaggatagataaataagacaccatctctgccctcaagccagtcaccatcatttactaagcacctgttttgtgctaagtactggggtaagccttggggatataaagattaataaattttgagcatacagtctagtaggaggagacaaataagtacataagtaccaggaagtattaggggtgctacagtagaagagtaaacactatgtac

SEQ ID NO: 288656 - DNA, 2136 bp, Homo sapiens
gggtgaagaaagccctgtgtgtcctcgtccaacataacctggtgagttatcaagtgcacaaacgtggtgtggtggagtatgaagcccagtgcagccgggtattgcgaatgcttagatatccccggtacatctatactaccaaaactctgtacagtgacactggagagctgattgttgaggagcttctgttgaacggcaaactgacaatgtcagctgtgtgaagaaagtggcagaccggctcacagagaccatggtcttgccatcccggacgcgtgggcgcgctttttgcttttccgcgtcttcttcggtggcgatccgcgtcctagaaagggcggtgggctccacctcggcctagaaggccagcgggagccgtaggaagccgtcgcgggaagctcagccgaattggagttggagcccccggattgcgctgaccctgagctctcagactccccagtacaatgactcaagcagaaattaagctctgttctttgttgctgcaagagcattttggagagattgtagaaaaaattggagtccatctgataagaaccggcagccagccactaagagtaattgcccatgacacaggaacatcactggatcaggtgaagaaagccctgtgtgtcctcgtccaacataacctggtgagttatcaagtgcacaaacgtggtgtggtggagtatgaagcccagtgcagccgggtattgcgaatgcttagatatccccggtacatctatactaccaaaactctgtacagtgacactggagagctgattgttgaggagcttctgttgaacggcaaactgacaatgtcagctgttgtgaagaaagtggcagaccggctcacagagaccatggaggatggcaagaccatggactatgctgaagtatcaaacacatttgtgcgactggcagacacacactttgtacaacgctgcccttcggtacctaccactgagaattcagaccctgggccaccaccacctgcccccacacttgtcattaatgaaaaggacatgtacctggttcctaaactcagcttgatagggaaaggtaaaaggaggagatcatctgatgaagatgctgctggggagcccaaggccaagagaccaaaatatactacagataacaaggagcccattccagatgatgggatttattggcaggccaaccttgacagattccaccaacacttccgtgaccaagccattgtgagcgcagttgctaacaggatggaccagacaagcagcgagattgtgcgaaccatgctccgaatgagtgagattaccacttcctctagtgctcccttcacccagccattgtcttccaatgagatcttcagatccctacctgttggctataacatctctaagcaagttcttgatcagtatctcactctgctggcagatgatccactagagtttgttggaaagtctggcgacagtggtggaggaatgtatgtcatcaacctccataaggcattagcatccctagccacagccactctggagtccgtcgtacaggagagatttgggtctcgctgtgctagaatattccgtctagttttgcagaagaaacacatagagcagaagcaagtggaagactttgcaatgattcctgcaaaggaggcaaaggatatgctatataagatgctctcagaaaatttcatgtcactccaggaaattcccaaaacaccagaccatgccccatccaggaccttctatttatatactgtgaacatcctgtcagctgcccgaatgttgttgcacaggtgctacaagagcatagccaacttgatagaaaggaggcaatttgaaaccaaagagaataagcgtctactagaaaaatctcagagggtagaagccatcattgcatctatgcaggctactggtgcagaggaagcacagttacaagaaatagaggagatgatcacagctcctgaacgtcagcagctagagaccctgaaacgtaatgtcaacaagttggatgccagtgagatccaggtggacgaaaccatcttcctgctggagtcttacattgagtgcaccatgaagagacagtgatccagaagaagcatcttcctcagaagatctggggggatggaaagcaaaataaaggaggtgcctggatgcatta

SEQ ID NO: 288657 - DNA, 1697 bp, Homo sapiens
caccaaagaggcgcaggaaggagagacaaacggcccgcccgccggctccacaaacagcccctcgctggtcctccagtcttccagcgagaagaaagaaagagcgtccccggaagccgccgaaactctggggtagagtggcacgcgctttttgcttttccgcgtcttcttcggtggcgatccgcgtcctagaaagggcggtgggctccacctcggcctagaaggccagcgggagccgtaggaagccgtcgcgggaagctcagccgaattggagttggagcccccggattgcgctgaccctgagctctcagactccccagtacaatgactcaagcagaaattaagctctgttctttgttgctgcaagagcattttggagagattgtagaaaaaattggagtccatctgataagaaccggcagccagccactaagagtaattgcccatgacacaggaacatcactggatcaggtgaagaaagccctgtgtgtcctcgtccaacataacctggtgagttatcaagtgcacaaacgtggtgtggtggagtatgaagcccagtgcagccgggtattgcgaatgcttagatatccccggtacatctatactaccaaaactctgtacagtgacactggagagctgattgttgaggagcttctgttgaacggcaaactgacaatgtcagctgttgtgaagaaagtggcagaccggctcacagagaccatggaggatggcaagaccatggactatgctgaagtatcaaacacatttgtgcgactggcagacacacactttgtacaacgctgcccttcggtacctaccactgagaattcagaccctgggccaccaccacctgcccccacacttgtcattaatgaaaaggacatgtacctggttcctaaactcagcttgatagggaaaggtaaaaggaggagatcatctgatgaagatgctgctggggagcccaaggccaagagaccaaaatatactacagataacaaggagcccattccagatgatgggatttattggcaggccaaccttgacagattccaccaacacttccgtgaccaagccattgtgagcgcagttgctaacaggatggaccagacaagcagcgagattgtgcgaaccatgctccgaatgagtgagattaccacttcctctagtgctcccttcacccagccattgtcttccaatgagatcttcagatccctacctgttggctataacatctctaagcaagttcttgatcagtatctcactctgctggcagatgatccactagagtttgttggaaagtctggcgacagtggtggaggaatgtatgtcatcaacctccataaggcattagcatccctagccacagccactctggagtccgtcgtacaggagagatttgggtctcgctgtgctagaatattccgtctagttttgcagaagaaacacatagagcagaagcaagtggaagactttgcaatgattcctgcaaaggaggcaaaggatatgctatataagatgctctcagaaaatttcatgtcactccaggttggatgccagtgagatccaggtggacgaaaccatcttcctgctggagtcttacattgagtgcaccatgaagagacagtgatccagaagaagcatcttcctcagaagatctggggggatggaaagcaaaataaaggaggtgcctggatgcatta

SEQ ID NO: 288658 - DNA, 1886 bp, Homo sapiens
caccaaagaggcgcaggaaggagagacaaacggcccgcccgccggctccacaaacagcccctcgctggtcctccagtcttccagcgagaagaaagaaagagcgtccccggaagccgccgaaactctggggtagagtggcacgcgctttttgcttttccgcgtcttcttcggtggcgatccgcgtcctagaaagggcggtgggctccacctcggcctagaaggccagcgggagccgtaggaagccgtcgcgggaagctcagccgaattggagttggagcccccggattgcgctgaccctgagctctcagactccccagtacaatgactcaagcagaaattaagctctgttctttgttgctgcaagagcattttggagagattgtagaaaaaattggagtccatctgataagaaccggcagccagccactaagagtaattgcccatgacacaggaacatcactggatcaggtgaagaaagccctgtgtgtcctcgtccaacataacctgtgacactggagagctgattgttgaggagcttctgttgaacggcaaactgacaatgtcagctgttgtgaagaaagtggcagaccggctcacagagaccatggaggatggcaagaccatggactatgctgaagtatcaaacacatttgtgcgactggcagacacacactttgtacaacgctgcccttcggtacctaccactgagaattcagaccctgggccaccaccacctgcccccacacttgtcattaatgaaaaggacatgtacctggttcctaaactcagcttgatagggaaaggtaaaaggaggagatcatctgatgaagatgctgctggggagcccaaggccaagagaccaaaatatactacagataacaaggagcccattccagatgatgggatttattggcaggccaaccttgacagattccaccaacacttccgtgaccaagccattgtgagcgcagttgctaacaggatggaccagacaagcagcgagattgtgcgaaccatgctccgaatgagtgagattaccacttcctctagtgctcccttcacccagccattgtcttccaatgagatcttcagatccctacctgttggctataacatctctaagcaagttcttgatcagtatctcactctgctggcagatgatccactagagtttgttggaaagtctggcgacagtggtggaggaatgtatgtcatcaacctccataaggcattagcatccctagccacagccactctggagtccgtcgtacaggagagatttgggtctcgctgtgctagaatattccgtctagttttgcagaagaaacacatagagcagaagcaagtggaagactttgcaatgattcctgcaaaggaggcaaaggatatgctatataagatgctctcagaaaatttcatgtcactccaggaaattcccaaaacaccagaccatgccccatccaggaccttctatttatatactgtgaacatcctgtcagctgcccgaatgttgttgcacaggtgctacaagagcatagccaacttgatagaaaggaggcaatttgaaaccaaagagaataagcgtctactagaaaaatctcagagggtagaagccatcattgcatctatgcaggctactggtgcagaggaagcacagttacaagaaatagaggagatgatcacagctcctgaacgtcagcagctagagaccctgaaacgtaatgtcaacaagttggatgccagtgagatccaggtggacgaaaccatcttcctgctggagtcttacattgagtgcaccatgaagagacagtgatccagaagaagcatcttcctcagaagatctggggggatggaaagcaaaataaaggaggtgcctggatgcatta

SEQ ID NO: 288659 - DNA, 1869 bp, Homo sapiens
caccaaagaggcgcaggaaggagagacaaacggcccgcccgccggctccacaaacagcccctcgctggtcctccagtcttccagcgagaagaaagaaagagcgtccccggaagccgccgaaactctggggtagagtggcacgcgctttttgcttttccgcgtcttcttcggtggcgatccgcgtcctagaaagggcggtgggctccacctcggcctagaaggccagcgggagccgtaggaagccgtcgcgggaagctcagccgaattggagttggagcccccggattgcgctgaccctgagctctcagactccccagtacaatgactcaagcagaaattaagctctgttctttgttgctgcaagagcattttggagagattgtagaaaaaattggagtccatctgataagaaccggcagccagccactaagagtaattgcccatgacacaggaacatcactggatcaggtgaagaaagccctgtgtgtcctcgtccaacataacctggtgagttatcaagtgcacaaacgtggtgtggtggagtatgaagcccagtgcagccgggtattgcgaatgcttagatatccccggtacatctatactaccaaaactctgtacagtgacactggagagctgattgttgaggagcttctgttgaacggcaaactgacaatgtcagctgttgtgaagaaagtggcagaccggctcacagagaccatggaggatggcaagaccatggactatgctgaagtatcaaacacatttgtgcgactggcagacacacactttgtacaacgctgcccttcggtacctaccactgagaattcagaccctgggccaccaccacctgcccccacacttgtcattaatgaaaaggacatgtacctggttcctaaactcagcttgatagggaaaggtaaaaggaggagatcatctgatgaagatgctgctggggagcccaaggccaagagaccaaaatatactacagataacaaggagcccattccagatgatgggatttattggcaggccaaccttgacagattccaccaacacttccgtgaccaagccattgtgagcgcagttgctaacaggatggaccagacaagcagcgagattgtgcgaaccatgctccgaatgagtgagattaccacttcctctagtgctcccttcacccagccattgtcttccaatgagatcttcagatccctacctgttggctataacatctctaagcaagttcttgatcagtatctcactctgctggcagatgatccactagagtttgttggaaagtctggcgacagtggtggaggaatgtatgtcatcaacctccataaggcattagcatccctagccacagccactctggagtccgtcgtacaggagagatttgggtctcgctgtgctagaatattccgtctagttttgcagaagaaacacatagagcagaagcaagtggaagactttgcaatgattcctgcaaaggaggcaaaggatatgctatataagatgctctcagaaaatttcatgtcactccaggaaattcccaaaacaccagaccatgccccatccaggaccttctatttatatactgtgaacatcctgtcagctgcccgaatgttgttgcacaggtgctacaaggtaactcaatctggaccttctccccatttcctccatacggtcaagtacccctcatgtgcccacttcgccctgagctgctgaaatagaactatgtgcattccttgtctgtcttctctttcctcagagcatagccaacttgatagaaaggaggcaatttgaaaccaaagagaataagtaagtaacattttcagttgagttatttacatctttcaagatcaagggcct

SEQ ID NO: 288660 - DNA, 1607 bp, Homo sapiens
caccaaagaggcgcaggaaggagagacaaacggcccgcccgccggctccacaaacagcccctcgctggtcctccagtcttccagcgagaagaaagaaagagcgtccccggaagccgccgaaactctggggtagagtggcacgcgctttttgcttttccgcgtcttcttcggtggcgatccgcgtcctagaaagggcggtgggctccacctcggcctagaaggccagcgggagccgtaggaagccgtcgcgggaagctcagccgaattggagttggagcccccggattgcgctgaccctgagctctcagactccccagtacaatgactcaagcagaaattaagctctgttctttgttgctgcaagagcattttggagagattgtagaaaaaattggagtccatctgataagaaccggcagccagccactaagagtaattgcccatgacacaggaacatcactggatcaggtgaagaaagccctgtgtgtcctcgtccaacataacctggtgagttatcaagtgcacaaacgtggtgtggtggagtatgaagcccagtgcagccgggtattgcgaatgcttagatatccccggtacatctatactaccaaaactctgtacagtgacactggagagctgattgttgaggagcttctgttgaacggcaaactgacaatgtcagctgttgtgaagaaagtggcagaccggctcacagagaccatggaggatggcaagaccatggactatgctgaagtatcaaacacatttgtgcgactggcagacacacactttgtacaacgctgcccttcggtacctaccactgagaattcagaccctgggccaccaccacctgcccccacacttgtcattaatgaaaaggacatgtacctggttcctaaactcagcttgatagggaaaggtaaaaggaggagatcatctgatgaagatgctgctggggagcccaaggccaagagaccaaaatatactacagataacaaggagcccattccagatgatgggatttattggcaggccaaccttgacagattccaccaacacttccgtgaccaagccattgtgagcgcagttgctaacaggatggaccagacaagcagcgagattgtgcgaaccatgctccgaatgagtgagattaccacttcctctagtgctcccttcacccagccattgtcttccaatgagatcttcagatccctacctgttggctataacatctctaagcaagttcttgatcagtatctcactctgctggcagatgatccactagagtttgttggaaagtctggcgacagtggtggaggaatgtatgtcatcaacctccataaggcattagcatccctagccacagccactctggagtccgtcgtacaggagagatttgggtctcgctgtgctagaatattccgtctagttttgcagaagaaacacatagagcagaagcaagtggaagactttgcaatgattcctgcaaaggaggcaaaggatatgctatataagatgctctcagaaaatttcatgtcactccagaagttctctaatacaccagaccatgccccatccaggagtaagtagagcaacggcagtaagtagag

SEQ ID NO: 288661 - DNA, 1563 bp, Homo sapiens
caccaaagaggcgcaggaaggagagacaaacggcccgcccgccggctccacaaacagcccctcgctggtcctccagtcttccagcgagaagaaagaaagagcgtccccggaagccgccgaaactctggggtagagtggcacgcgctttttgcttttccgcgtcttcttcggtggcgatccgcgtcctagaaagggcggtgggctccacctcggcctagaaggccagcgggagccgtaggaagccgtcgcgggaagctcagccgaattggagttggagcccccggattgcgctgaccctgagctctcagactccccagtacaatgactcaagcagaaattaagctctgttctttgttgctgcaagagcattttggagagattgtagaaaaaattggagtccatctgataagaaccggcagccagccactaagagtaattgcccatgacacaggaacatcactggatcaggtgaagaaagccctgtgtgtcctcgtccaacataacctggtgagttatcaagtgcacaaacgtggtgtggtggagtatgaagcccagtgcagccgggtattgcgaatgcttagatatccccggtacatctatactaccaaaactctgtacagtgacactggagagctgattgttgaggagcttctgttgaacggcaaactgacaatgtcagctgttgtgaagaaagtggcagaccggctcacagagaccatggaggatggcaagaccatggactatgctgaagtatcaaacacatttgtgcgactggcagacacacactttgtacaacgctgcccttcggtacctaccactgagaattcagaccctgggccaccaccacctgcccccacacttgtcattaatgaaaaggacatgtacctggttcctaaactcagcttgatagggaaaggtaaaaggaggagatcatctgatgaagatgctgctggggagcccaaggccaagagaccaaaatatactacagataacaaggagcccattccagatgatgggatttattggcaggccaaccttgacagattccaccaacacttccgtgaccaagccattgtgagcgcagttgctaacaggatggaccagacaagcagcgagattgtgcgaaccatgctccgaatgagtgagattaccacttcctctagtgctcccttcacccagccattgtcttccaatgagatcttcagatccctacctgttggctataacatctctaagcaagttcttgatcagtatctcactctgctggcagatgatccactagagtttgttggaaagtctggcgacagtggtggaggaatgtatgtcatcaacctccataaggcattagcatccctagccacagccactctggagtccgtcgtacaggagagatttgggtctcgctgtgctagaatattccgtctagttttgcagaagaaacacatagagcagaagcaagtggaagactttgcaatgattcctgcaaaggaggcaaaggatatgctatataagatgctctcagaaaatttcatgtcactccaggtaaccaaccaagggcgtaat

SEQ ID NO: 288662 - DNA, 2064 bp, Homo sapiens
accaacacttcgtgacctagcatcagattgtgcgaaccatgctctctcgccattgtcctccaatgagatcttcagatccctacctgttggctataacatctctaagcaagttcttgatcagtatctcactctgctggcagatgatccactagagtttgttggaaagtctggcgacagtggtggaggaatgtatgtcatcaacctccataaggcattagcatccctagccacagccactctggagtccgtcgtacaggagagatttgggtctcgctgtgctagaatattccgtctagttttgcagaagaaacacatagagcagaagcaagtggaagactttgcaatgattcctgcaaaggaggcaaaggatatgctatataagatgctctcagaaaatttcatgtcactccaggaaattcccaaaacaccagaccatgccccatccaggaccttctatttatatactgtgaacatcctgtcagctgcccgaatgttgttgcacaggtgctacaagagcatagccaacttgatagaaaggaggcaatttgaaaccaaagagaataagcgtctactagaaaaatctcagagggtagaagccatcattgcatctatgcaggctactggtgcagaggaagcacagttacaagaaatagaggagatgatcacagctcctgaacgtcagcagctagagaccctgaaacgtaatgtcaacaagttggatgccagtgagatccaggtggacgaaaccatcttcctgctggagtcttacattgagtgcaccatgaagagacagtgatccagaagaagcatcttcctcagaagatctggggggatggaaagcaaaataaaggaggtgcctggatgcattatttgcagtgggataagtcgcagagtcttcaactaaacccccctctctatcccctgcagcccaggatacacctgaaagaatttggcatatttagatccattgctgtagtctcccctcatcaaatcttggcagtgggaagaaccttaaatcaacaaggttaatcatctatcagatgcatctgttcccataaagaagttacccacacctatggttacctatatccctggcaataggaaacttcctaagaagttaattttattttcagatgtctatgcctgttctttattttgttgagataggtgatagatagatagatagatagataatttgttgttgttgagacaggatctcactctgtcactcaggctggggtgtaatagcgcaatcacagctccctacagccttgacctcctgagctcaagcagtccttccacctcagcctctggagtagctgggactacaggcatgcaccacacatacccagctattttttatttatttatttatttttttgtagagacagggcctccctgtgttgcccaggctgatgaactgtaatttttaacacacacagtgtagggaatgtgaaagactatcacagagtagaagaaaaaattattttcagggttagcaggtggattgtcccaagcagtcacactagaatctgtggactgaagccacatttgccagctccaggcttctaacacatctgaaactgtgtatgtagaacagctagctcaatgcctggcatatggtaagcacacagtaaattagcgccttcctcttctccatggttccttaaaactggcaacgctaaattctctctctcagtatcacggatataatttgtcccagcagctttaattcatttaaagcagttagatgttgttttataatatcttcagttttctctcaccaatgtgttttctaattgtttaaacacttgagtgtcaaacaattgccagccaccatactaaacacaacatacaaggatagataaataagacaccatctctgccctcaagccagtcaccatcatttactaagcacctgttttgtgctaagtactggggtaagccttggggatataaagattaataaattttgagcatacagtctagtaggaggagacaaataagtacataagtaccaggaagtattaggggtgctacagtagaagagtaaacactatgtac

SEQ ID NO: 288663 - DNA, 1924 bp, Homo sapiens
ctatgcgtgcactgactctcttaactaccacgcgctaccgatcttcagatccctacctgttggctataacatctctaagcaagttcttgatcagtatctcactctgctggcagatgatccaatttgggtctcgctgtgctagaatattccgtctagttttgcagaagaaacacatagagcagaagcaagtggaagactttgcaatgattcctgcaaaggaggcaaaggatatgctatataagatgctctcagaaaatttcatgtcactccaggaaattcccaaaacaccagaccatgccccatccaggaccttctatttatatactgtgaacatcctgtcagctgcccgaatgttgttgcacaggtgctacaagagcatagccaacttgatagaaaggaggcaatttgaaaccaaagagaataagcgtctactagaaaaatctcagagggtagaagccatcattgcatctatgcaggctactggtgcagaggaagcacagttacaagaaatagaggagatgatcacagctcctgaacgtcagcagctagagaccctgaaacgtaatgtcaacaagttggatgccagtgagatccaggtggacgaaaccatcttcctgctggagtcttacattgagtgcaccatgaagagacagtgatccagaagaagcatcttcctcagaagatctggggggatggaaagcaaaataaaggaggtgcctggatgcattatttgcagtgggataagtcgcagagtcttcaactaaacccccctctctatcccctgcagcccaggatacacctgaaagaatttggcatatttagatccattgctgtagtctcccctcatcaaatcttggcagtgggaagaaccttaaatcaacaaggttaatcatctatcagatgcatctgttcccataaagaagttacccacacctatggttacctatatccctggcaataggaaacttcctaagaagttaattttattttcagatgtctatgcctgttctttattttgttgagataggtgatagatagatagatagatagataatttgttgttgttgagacaggatctcactctgtcactcaggctggggtgtaatagcgcaatcacagctccctacagccttgacctcctgagctcaagcagtccttccacctcagcctctggagtagctgggactacaggcatgcaccacacatacccagctattttttatttatttatttatttttttgtagagacagggcctccctgtgttgcccaggctgatgaactgtaatttttaacacacacagtgtagggaatgtgaaagactatcacagagtagaagaaaaaattattttcagggttagcaggtggattgtcccaagcagtcacactagaatctgtggactgaagccacatttgccagctccaggcttctaacacatctgaaactgtgtatgtagaacagctagctcaatgcctggcatatggtaagcacacagtaaattagcgccttcctcttctccatggttccttaaaactggcaacgctaaattctctctctcagtatcacggatataatttgtcccagcagctttaattcatttaaagcagttagatgttgttttataatatcttcagttttctctcaccaatgtgttttctaattgtttaaacacttgagtgtcaaacaattgccagccaccatactaaacacaacatacaaggatagataaataagacaccatctctgccctcaagccagtcaccatcatttactaagcacctgttttgtgctaagtactggggtaagccttggggatataaagattaataaattttgagcatacagtctagtaggaggagacaaataagtacataagtaccaggaagtattaggggtgctacagtagaagagtaaacactatgtac

SEQ ID NO: 288664 - DNA, 966 bp, Homo sapiens
caccaaagaggcgcaggaaggagagacaaacggcccgcccgccggctccacaaacagcccctcgctggtcctccagtcttccagcgagaagaaagaaagagcgtccccggaagccgccgaaactctggggtagagtggcacgcgctttttgcttttccgcgtcttcttcggtggcgatccgcgtcctagaaagggcggtgggctccacctcggcctagaaggccagcgggagccgtaggaagccgtcgcgggaagctcagccgaattggagttggagcccccggattgcgctgaccctgagctctcagactccccagtacaatgactcaagcagaaattaagctctgttctttgttgctgcaagagcattttggagagattgtagaaaaaattggagtccatctgataagaaccggcagccagccactaagagtaattgcccatgacacaggaacatcactggatcaggtgaagaaagccctgtgtgtcctcgtccaacataacctggtgagttatcaagtgcacaaacgtggtgtggtggagtatgaagcccagtgcagccgggtattgcgaatgcttagatatccccggtacatctatactaccaaaactctgtacagtgacactggagagctgattgttgaggagcttctgttgaacggcaaactgacaatgtcagctgttgtgaagaaagtggcagaccggctcacagagaccatggaggatggcagagaacccattggacctatgcttgaacgtattcaaaccacatttgtggcgactggcaaaacaacacacttttgtacaaacgcctgccctttcgggtaacctaaccactcgcagaaattcagacccctgagccaacaacaacctggcccccactcttgcattcactccacaggcactgttcctgcttcctaatcacctgacaggcgacaggtacacgccagattctcgttgagatcc

SEQ ID NO: 288665 - DNA, 729 bp, Homo sapiens
ggcacgaggctaaaaaagggtagttgtggttggctctgcctttgctgtctttacctgaatagaggtcaggcccgggtccaggggagcgtcccacggtcccttcagcagcagcatctctaggggaagtggccggctgcagggactgcacggtgaggcaatctgtgagcaggtctggatggagctctgtgctggaccgcaactaagaggacaaaacggaagagacatcgataaggagagccggtccttggaatattttcctgggaaggcatcatgctctatcagtgcaactcagcccacaaaaatttatcaagcagcaactacgggtcctctgaacgggccacaccacggttgagccattgtgacccctgcgacacacaggtccaggcctcctggagtcacaaagctttgagcaacaggagaaccactaaagaagaagaaacagctagctcctgccttaactgattaaccgaacttgcaacattccaccattgtgatatgttcctgccctaccctaaataatcaatcggccttgtgatatcctgccatgtgaactccctccacctcgtgactatgcaccttgtgacattcttcccctgcccgaaaagactgccccaactgtaaccttccactacctatcccaaacctataaaaccagttccactcccaccgcccttcgctgactcccttttcagactcagcccgctcgcaccggagtgaataaacagcctg

SEQ ID NO: 288666 - DNA, 576 bp, Homo sapiens
aaagaactattaaggattagagggacaatgttgtctctgatttaactcaagaacttgggagatcacagagataaacttctgaagggcatcagatcttcccagaaatcaagtgcggaagttcagcggaatgctgttggacacagtaggcacaatggatgaaaattagaaaggtcctctgaacgggccacaccacggttgagccattgtgacccctgcgacacacaggtccaggcctcctggagtcacaaagctttgagcaacaggagaaccactaaagaagaagaaacagctagctcctgccttaactgattaaccgaacttgcaacattccaccattgtgatatgttcctgccctaccctaaataatcaatcggccttgtgatatcctgccatgtgaactccctccacctcgtgactatgcaccttgtgacattcttcccctgcccgaaaagactgccccaactgtaaccttccactacctatcccaaacctataaaaccagttccactcccaccgcccttcgctgactcccttttcagactcagcccgctcgcaccggagtgaataaacagcctg

SEQ ID NO: 288667 - DNA, 210 bp, Homo sapiens
aaaaaaaaaaaaaagttatttgtagaataggcttcaacttggaaggtgtttcctagtgttgcttgtaggcaggtggacaggacccggagcccagtgtgtgtgtgttccgtgtcattgttccttctctgtcaccttgagtggtgtctgctcttctgtttcctctctcctgtgtggcagtaagcagtgtctgtgtttcaggtggcagaatcg

SEQ ID NO: 288668 - DNA, 272 bp, Homo sapiens
agcaccgggtgaagaagaccacgggggaggcgcctcgtagagccgtggatcgccagcggaggcaagggatggaagtatgatgtgatggatataattatgggacactgtgtgggcacacggcctcctgcttgttgcctcatcctcctgcttttcaagcttttggccactgtctcccaggggctgccagggactggacccctgggcttccacttcacacattccatttataatgctaccgtgtatgagaactcagcagcaaggacctacgtcaa

SEQ ID NO: 288669 - DNA, 870 bp, Homo sapiens
tgtattccaaatggtttaatttaacaagtcaacaccttatcattaagcacttgagatcttgatacatattcaagttacacatctaaaaggtttccactttgcaagcaaacatggtaatgcagagacctcctatttatgaaatcatgtaaaatggttcttcagacacctctatgtcccactgatgctcaagaatcaacatttttcaagggggtattcaagcaaatgacaaccatcttatacatgcagttaaacatttttgcttttccaatgatttgcaggtaaatatgtgtgtgaggctgatggattctggacgagctccaaaggagaaaaatcactcccagtctgtgagcctggtaatggatacatttatacaagagactggtaattgatggaaaggaggactgggtaggagacagtgaggagagctttagctgtggtaggcagaaatgtaacttcagcacttggctcttaggctgttattatttccaaatagtatgttctcattacccccttcccatatacagaggttgttaggtgctgactgcatcagtcatttgattctctttgaccttataactaggcaagcataaaaaattaaatgatttttaggccaggtgtggctcacgcctgtaatcccagcactttgggaggccgaggcaggtgggtcacctgaggccagcctgaccagcatggagaaaccccgtctctaataaaaatacaaaattagccgggtgtggtggtacatgcctgtaatcccagctactcgagcggctgaggcagaattgcttgaacccaggtggtggaggttgcggtgagcccagatcgcaccattatactctagcctgggcaacagtagtgaaattccatatc

SEQ ID NO: 288670 - DNA, 576 bp, Homo sapiens
cccatgcttctttcttagttgttgactgtggccctcctgatgatctacccagtggccgagtggagtacatcacaggtcctggagtgaccacctacaaagctgtgattcagtacagctgtgaagagaccttctacacaatgaaagtgaatgatggtaaatatgtgtgtgaggctgatggattctggacgagctccaaaggagaaaaatcactcccagtctgtgagcctgtttgtggactatcagcccgcacaacaggagggcgtatatatggagggcaaaaggcaaaacctggtgattttccttggcaagtcctgatattaggtggaaccacagcagcaggtgcacttttatatgacaactgggtcctaacagctgctcatgccgtctatgagcaaaaacatgatgcatctgccctggacattcgaatgggcaccctgaaaagactatcacctcattatacacaagcctggtctgaagctgtttttatacatgaaggttatactcatgatgctggctttgacaatgacatagcactgattaaattgaataacaaagttgtaatcaatagcaacatca

SEQ ID NO: 288671 - DNA, 716 bp, Homo sapiens
agcggggtttcccgccgcgccgttgccgccgctcctctccctcctcacctccccgcaagctgagggagccggctctggccttggccagcccagaaaggggctcccacagtgcagcggtgagctgaagggttcctcaagcgcggcagagtgggcgccaaggccgaggaggcgcccagagccagcgagggctgccagcaagcgtgtcacctctcaataggaactggtaccaagctacttacgaagaagtattcgtttaaacctgaacctgggggaaaaacaacatgaactgttcgtctatctatatcgtcattattttttacctcatggattgaaacaaattttaaaggaaaaaagaatgttaagaaagagcagcacttactatcagggaggcacctcacgagcattgtaaacactcaggctcgctgctttctgaaggacatgccaatcatgcacagcacttactagaaactgcaagactgcacaacatgatggtatttattccaggaacaggagccagtcctgggcacacacataaagggacttccttcactccccagaagaagagaaagcatgctgacacacatctgcccaagcaatcagaaggcagctaaagccgccacagtcttcactcaccaacagttagaccttttcaattgattttattgaagaaagtgagtgctgagcaccatgagttctcataaacaatccattttggc

SEQ ID NO: 288672 - DNA, 400 bp, Homo sapiens
tcccctagttagaagttcaatagcactagttagaagtttcaatagcatcttagaccttttacctaggaaattttctttttgcttgaagtacatcattaagaatttccagtgaaggcagattcttaaagtttttgttttccagaagagatcttggaaaatataaaaggttggcagttatttcttttagtacatgagatagtattacaccaatgctgttgagaagtctattgtgaggcaatgtgtcttctttctctggctgctattgagatttctactctagtcttttttaggggcagttttactcttatgtgactagaagtagatttcttctttttttttttaatactgcttgagattttattgggtttttgaatctgtggatagatatccttcaacagtt

SEQ ID NO: 288673 - DNA, 1157 bp, Homo sapiens
tctagagctgatgatacagtcaggtatttaccaacactcatgtatatatgtagagtttcaagaaataattgcttatccttaccagattcaacatattctaacgtttcacatattatttttatttcttaatatttttttaaagatggggttttactctgttgcccaggctgaaatgcagtggcgtgaccaggatttcgaccagaagtttgactgcagcctcgaactccttctaacaaacaatcctgctgccttagcctcccgagtagctaggactatgggcacatgccaccagatctggcatattttaaaatttttgtagacatagggtctcgccatgttgcccaggctgattctgaactcctgttctcaagcaatcctcctgcctggtcttcccaaactgttgggcttacaggtgtgagtcattgagcccagcttgtattcttttgatttaaaaaaaaaatatcctgaatgtgatccaccaaattaatttcaccatccactaataggtagcaacctgaatgaaaaatactgttataaactttacacaaaaccagagattataaacatttgcctccaaggagatgagagaggcaaaaggtacttgtttgctctgatgggccctgtttccttcagtgccaggaagagtggctctcagacctttcttctggcatccctcatgtatgcagtgttggttattattttcaaggccttggtaacaaaatgcccctagtgtgaccagtcagactgacagtccatatctgtaatatggtggtaagtttcctttgcatgtctttctttctagcatcttagaccttttacctaggaaattttctttttgcttgaagtacatcattaagaatttccagtgaaggcagattcttaaagtttttgttttccagaagagatcttggaaaatataaaaggttggcagttatttcttttagtacatgagatagtattacaccaatgctgttgagaagtctattgtgaggcaatgtgtcttctttctctggctgctattgagatttctactctagtcttttttaggggcagttttactcttatgtgactagaagtagatttcttctttttttttttaatactgcttgagattttattgggtttttgaatctgtggatagatatccttcaacagtt

SEQ ID NO: 288674 - DNA, 1064 bp, Homo sapiens
aatgggggctcagagcagtcaagaacatgccccaagttattcgtcagtgaggcagaaattgtggtgtccttgtgctgaaatgcagtggcgtgaccaggatttcgaccagaagtttgactgcagcctcgaactccttctaacaaacaatcctgctgccttagcctcccgagtagctaggactatgggcacatgccaccagatctggcatattttaaaatttttgtagacatagggtctcgccatgttgcccaggctgattctgaactcctgttctcaagcaatcctcctgcctggtcttcccaaactgttgggcttacaggtgtgagtcattgagcccagcttgtattcttttgatttaaaaaaaaaatatcctgaatgtgatccaccaaattaatttcaccatccactaataggtagcaacctgaatgaaaaatactgttataaactttacacaaaaccagagattataaacatttgcctccaaggagatgagagaggcaaaaggtacttgtttgctctgatgggccctgtttccttcagtgccaggaagagtggctctcagacctttcttctggcatccctcatgtatgcagtgttggttattattttcaaggccttggtaacaaaatgcccctagtgtgaccagtcagactgacagtccatatctgtaatatggtggtaagtttcctttgcatgtctttctttctagcatcttagaccttttacctaggaaattttctttttgcttgaagtacatcattaagaatttccagtgaaggcagattcttaaagtttttgttttccagaagagatcttggaaaatataaaaggttggcagttatttcttttagtacatgagatagtattacaccaatgctgttgagaagtctattgtgaggcaatgtgtcttctttctctggctgctattgagatttctactctagtcttttttaggggcagttttactcttatgtgactagaagtagatttcttctttttttttttaatactgcttgagattttattgggtttttgaatctgtggatagatatccttcaacagtt

SEQ ID NO: 288675 - DNA, 1242 bp, Homo sapiens
aatcttcacgagcgactctgccgccgcccaatcagcgccagatttgcgtcccgccaccaatccgcgctgagcagcggggcgggaccaaaggaaaggaccaagctcggttgaggcgcggcccagccgcagccgcagtcacagcctcagccgcagcggccgtgctacctaggtgatagcggagcggctgggtaggaagcaattgttctcaaacttcactagccccgtcggcgcggacgcttgtcgagaatgcagattcctgggtactgccagatacgaattgagcataccacaaaaaagttctcattttgtgtcctcccatcccattctcctcactaaccaaaggctaggaattatctgtgaatgtaggaccactggatttgcagtcttcatctgacactgtggagagtttctaggaatgaaacagatatatggccttgggtcccctttttttttctttttttttttttaatagagacgagcatctcactatgttgcctagggtagtcttgaactcctggcctcaagcaatccccacccgactccgcctctcgaagtgatgggattacaggcgtaaaccaccacgcctggccagaaggtgctttaacaccaaatctgaaaattgttcagaagagaaacattgagcatgaacaccatctgtgcgagtcatttacttattgcccctcacctctaaatctaccttctgtactcttcttccctgtaatgatggggctagttgtcctcaaactgtttctcagacttctttttaagcttgcttcctgttcagttctgccaataggggtcactagagagagactgggaggcagaaggagagaatatgcttcctgttttttctgttcttgttaatgttgcttacaggaccagcaatgcttcttcacctagagacacttctcccagcagtggcagtgccacttcagcttctttcagcactactggaatcagcctcagtgattccccctgtacccgctcagagattatccacagcagccagatggttctaccttccacaaagattgtggttgcaattctgggcttctaagttctggttacttcatatttttccttttgttcctccagccctagaggtggtagctgctttctgaagttattatttctagatgacttttggtttttcagcctttgtattttgcttttcagccctctaatgcctgtataaccaatttccctgtaataaataaatttcctccattgaaaaaaaaaaaa

SEQ ID NO: 288676 - DNA, 1826 bp, Homo sapiens
aatcttcacgagcgactctgccgccgcccaatcagcgccagatttgcgtcccgccaccaatccgcgctgagcagcggggcgggaccaaaggaaaggaccaagctcggttgaggcgcggcccagccgcagccgcagtcacagcctcagccgcagcggccgtgctacctaggtgatagcggagcggctgggtaggaagcaattgttctcaaacttcactagccccgtcggcgcggacgcttgtcgagaatgcagattcctgggtactgccagatacgcagatacggttggtgatcttgtagggctggagtggaagccatgaatctgcattttcatcatttctggccctctgcccgggctggggtgattcacggggattcgtagtggccccaaaggagcacgcagaacctcggctgctgtgcatttatcacctcttttgttcccggaggccgcaccccaggtccagtttacacagctgccaactccttttcttggttcccactggaatctaggaagaaaactcgccctttacttctccgccccacacccgacgacggagtgtctagaggtctggtcggccttggctgtgcggagggctaggcctgacgagcgggcgctgatgcggcgcagaccccgccggacctcttggtcggcccggggtaggctggggagccgcgggaacaggactggatagggaaagcggcaccgcagcgtccacgggcaagctgaaagtccgcttgatgtctttgcatcacagtggcgccctccccgcaggaacgcccggccgcctgcaccgaacgtttgcctgcagggaacggccaacccgccctgaaatactctttttgtgggctgcagctttcggaattgagcataccacaaaaaagttctcattttgtgtcctcccatcccattctcctcactaaccaaaggctaggaattatctgtgaatgtaggaccactggatttgcagtcttcatctgacactgtggagagtttctaggaatgaaacagatatatggccttgggtcccctttttttttctttttttttttttaatagagacgagcatctcactatgttgcctagggtagtcttgaactcctggcctcaagcaatccccacccgactccgcctctcgaagtgatgggattacaggcgtaaaccaccacgcctggccagaaggtgctttaacaccaaatctgaaaattgttcagaagagaaacattgagcatgaacaccatctgtgcgagtcatttacttattgcccctcacctctaaatctaccttctgtactcttcttccctgtaatgatggggctagttgtcctcaaactgtttctcagacttctttttaagcttgcttcctgttcagttctgccaataggggtcactagagagagactgggaggcagaaggagagaatatgcttcctgttttttctgttcttgttaatgttgcttacaggaccagcaatgcttcttcacctagagacacttctcccagcagtggcagtgccacttcagcttctttcagcactactggaatcagcctcagtgattccccctgtacccgctcagagattatccacagcagccagatggttctaccttccacaaagattgtggttgcaattctgggcttctaagttctggttacttcatatttttccttttgttcctccagccctagaggtggtagctgctttctgaagttattatttctagatgacttttggtttttcagcctttgtattttgcttttcagccctctaatgcctgtataaccaatttccctgtaataaataaatttcctccattgaaaaaaaaaaaa

SEQ ID NO: 288677 - DNA, 1550 bp, Homo sapiens
tttaaatttagaaataagtatttaatctttacaatgctgtttttagcatttaccaagatgaacacatgattttctccttcaatctgagtttatgtaattaattacattatacatttcccaatgttgaggcatcctgacgttcttagaataaatcctactgggtcatgatgaattgatttttaaaaatattataatgttagatttaattaggtaatacatatttataattttaaaattcatatttgtaattgagacttgccagagatttcttcttttgttttcatggtctattgtcctccagctttgacatcaggtttatgctaatctttaacagacacttagcctgccaacttgatgtaatccacagtaatgtctccctgtaagatttctgaagagattggtgtgaggtagatattattatcatcattttttttcagatgtggtaactgaggcacattgagaattatagtgtctaacgtttatgatataagtcagtgactagcaaactacttcttatttatgaaaatactacaattattcttttaatttctggggttgagaggagggcaaagaattattactcctgtgatcctctccagctactcaaactaatattgttgtttatttctgtttctctctgtttttactaggctaggaattatctgtgaatgtaggaccactggatttgcagtcttcatctgacactgtggagagtttctaggaatgaaacagatatatggccttgggtcccctttttttttctttttttttttttaatagagacgagcatctcactatgttgcctagggtagtcttgaactcctggcctcaagcaatccccacccgactccgcctctcgaagtgatgggattacaggcgtaaaccaccacgcctggccagaaggtgctttaacaccaaatctgaaaattgttcagaagagaaacattgagcatgaacaccatctgtgcgagtcatttacttattgcccctcacctctaaatctaccttctgtactcttcttccctgtaatgatggggctagttgtcctcaaactgtttctcagacttctttttaagcttgcttcctgttcagttctgccaataggggtcactagagagagactgggaggcagaaggagagaatatgcttcctgttttttctgttcttgttaatgttgcttacaggaccagcaatgcttcttcacctagagacacttctcccagcagtggcagtgccacttcagcttctttcagcactactggaatcagcctcagtgattccccctgtacccgctcagagattatccacagcagccagatggttctaccttccacaaagattgtggttgcaattctgggcttctaagttctggttacttcatatttttccttttgttcctccagccctagaggtggtagctgctttctgaagttattatttctagatgacttttggtttttcagcctttgtattttgcttttcagccctctaatgcctgtataaccaatttccctgtaataaataaatttcctccattgaaaaaaaaaaaa

SEQ ID NO: 288678 - DNA, 1188 bp, Homo sapiens
aatcttcacgagcgactctgccgccgcccaatcagcgccagatttgcgtcccgccaccaatccgcgctgagcagcggggcgggaccaaaggaaaggaccaagctcggttgaggcgcggcccagccgcagccgcagtcacagcctcagccgcagcggccgtgctacctaggtgatagcggagcggctgggtaggaagcaattgttctcaaacttcactagccccgtcggcgcggacgcttgtcgagaatgcagattcctgggtactgccagatacgaattgagcataccacaaaaaagttctcattttgtgtcctcccatcccattctcctcactaaccaaaggctaggaattatctgtgaatgtaggaccactggatttgcagtcttcatctgacactgtggagagtttctaggaatgaaacagatatatggccttgggtcccctttttttttctttttttttttttaatagagacgagcatctcactatgttgcctagggtagtcttgaactcctggcctcaagcaatccccacccgactccgcctctcgaagtgatgggattacaggcgtaaaccaccacgcctggccagaaggtgctttaacaccaaatctgaattattgcccctcacctctaaatctaccttctgtactcttcttccctgtaatgatggggctagttgtcctcaaactgtttctcagacttctttttaagcttgcttcctgttcagttctgccaataggggtcactagagagagactgggaggcagaaggagagaatatgcttcctgttttttctgttcttgttaatgttgcttacaggaccagcaatgcttcttcacctagagacacttctcccagcagtggcagtgccacttcagcttctttcagcactactggaatcagcctcagtgattccccctgtacccgctcagagattatccacagcagccagatggttctaccttccacaaagattgtggttgcaattctgggcttctaagttctggttacttcatatttttccttttgttcctccagccctagaggtggtagctgctttctgaagttattatttctagatgacttttggtttttcagcctttgtattttgcttttcagccctctaatgcctgtataaccaatttccctgtaataaataaatttcctccattgaaaaaaaaaaaa

SEQ ID NO: 288679 - DNA, 1160 bp, Homo sapiens
aatcttcacgagcgactctgccgccgcccaatcagcgccagatttgcgtcccgccaccaatccgcgctgagcagcggggcgggaccaaaggaaaggaccaagctcggttgaggcgcggcccagccgcagccgcagtcacagcctcagccgcagcggccgtgctacctaggtgatagcggagcggctgggtaggaagcaattgttctcaaacttcactagccccgtcggcgcggacgcttgtcgagaatgcagattcctgggtactgccagatacgaattgagcataccacaaaaaagttctcattttgtgtcctcccatcccattctcctcactaaccaaaggctaggaattatctgtgaatgtaggaccactggatttgcagtcttcatctgacactgtggagagtttctaggaatgaaacagatatatggccttgggtcccctttttttttctttttttttttttaatagagacgagcatctcactatgttgcctagggtagtcttgaactcctggcctcaagcaatccccacccgactccgcctctcgaagtgatgggattacaggcgtaaaccaccacgcctggccagaaggtgctttaacaccaaatctgaaaattgttcagaagagaaacattgagcatgaacaccatctgtgcgagtcatttacttattgcccctcacctctaaatctaccttctgtactcttcttccctgtaatgatggggctagttgtcctcaaactgtttctcagacttctttttaagcttgcttcctgttcagttgcttacaggaccagcaatgcttcttcacctagagacacttctcccagcagtggcagtgccacttcagcttctttcagcactactggaatcagcctcagtgattccccctgtacccgctcagagattatccacagcagccagatggttctaccttccacaaagattgtggttgcaattctgggcttctaagttctggttacttcatatttttccttttgttcctccagccctagaggtggtagctgctttctgaagttattatttctagatgacttttggtttttcagcctttgtattttgcttttcagccctctaatgcctgtataaccaatttccctgtaataaataaatttcctccattgaaaaaaaaaaaa

SEQ ID NO: 288680 - DNA, 1253 bp, Homo sapiens
aatcttcacgagcgactctgccgccgcccaatcagcgccagatttgcgtcccgccaccaatccgcgctgagcagcggggcgggaccaaaggaaaggaccaagctcggttgaggcgcggcccagccgcagccgcagtcacagcctcagccgcagcggccgtgctacctaggtgatagcggagcggctgggtaggaagcaattgttctcaaacttcactagccccgtcggcgcggacgcttgtcgagaatgcagattcctgggtactgccagatacgagatgaggtctcgtcatgttgcccagggtagtcttgaactcctgggctcaagtgatcctcctgcctcagcctcccaaagtgttaggattacagaattgagcataccacaaaaaagttctcattttgtgtcctcccatcccattctcctcactaaccaaaggctaggaattatctgtgaatgtaggaccactggatttgcagtcttcatctgacactgtggagagtttctaggaatgaaacagatatatggccttgggtcccctttttttttctttttttttttttaatagagacgagcatctcactatgttgcctagggtagtcttgaactcctggcctcaagcaatccccacccgactccgcctctcgaagtgatgggattacaggcgtaaaccaccacgcctggccagaaggtgctttaacaccaaatctgaaaattgttcagaagagaaacattgagcatgaacaccatctgtgcgagtcatttacttattgcccctcacctctaaatctaccttctgtactcttcttccctgtaatgatggggctagttgtcctcaaactgtttctcagacttctttttaagcttgcttcctgttcagttgcttacaggaccagcaatgcttcttcacctagagacacttctcccagcagtggcagtgccacttcagcttctttcagcactactggaatcagcctcagtgattccccctgtacccgctcagagattatccacagcagccagatggttctaccttccacaaagattgtggttgcaattctgggcttctaagttctggttacttcatatttttccttttgttcctccagccctagaggtggtagctgctttctgaagttattatttctagatgacttttggtttttcagcctttgtattttgcttttcagccctctaatgcctgtataaccaatttccctgtaataaataaatttcctccattgaaaaaaaaaaaa

SEQ ID NO: 288681 - DNA, 424 bp, Homo sapiens
gaaatactctttttgtgggctgcagctttcgggtattttaagccatggttctgtgcccttccttgttttcaaaaacaccacagccaaaggctgcgggttgtgtgctttcattttgtgttaagttctgtggtggagacctggagtctgtttttccaaataggcaccttgaaatagatacgcttcttaagcggggaaagtacgagtaggtcctattatttgcaatgttttagcctttccagactccgtacaaatgactaaatgaagattggatcgtattttcaggcactgcaccaatgatagaaaattctcaacttggggtcaaaagcaagggcagctttcgtttttcttaaatatgcttctgatcaaatatctaaagtgttgaaagaaacctaacccttaatagcacaatttacaggagtgcata

SEQ ID NO: 288682 - DNA, 247 bp, Homo sapiens
tgtggaggataagaacgctgacaataataatgagtacgataatatcagtgccttggatttatgcagtatcattacttcggggctttgcgtgcctcctatgtagtatgtagtctataacaaaaaactgtaattacaaacatttcacaagaaatcattcttattgtgatatttttattacttgcagaattgagcataccacaaaaaagttctcattttgtgtcctcccatcccattctcctcactaacc

SEQ ID NO: 288683 - DNA, 1939 bp, Homo sapiens
ttagacgtcaccacagttaataaaaactccctacagaacatcccataaaataaaggaataaatcatctaggaaataaagtcagcacaggtactgacagagaaacaccatggcgattgagactccgtgggactccgattttgcttgtaacaaagctttccaggtgtgagctgctcctctcccccatctgcccctcctcaaagaaacaacactaaaagaggtgaaagtaaatacacctgatacattcaggaaataagatttgccagataaggtcaaaggaagttagtacattaaacaaatggtggtaggagggaggatttggcccaactggctccaacctatctggtcaacacgtatgttgggtagaacagaggtggagaaaagcctagatcagggatgtatacgcttccttggggcagacgcagcctggccctgcggagcgatttcaagcctcgttcacgaacatggccaaggacactgccagcctcttcattcccctgtgtggatgctccaactccaaaagtggaaccacagggcaaatgaatgtcggcacgtgtcggtatggcagcctcgctcttcgacagctggtgtgggggttaccacctggggctagctggcctcatcttcgttagcactgagactggtctaccagttgcacagattcagatttgaaaatctcaggtgcaaatcccaagtggcgatggcatgtaaccacatcaaactcaacatctgcacctaactcccaccttctttctctgggaaatcttcctggacatgcccagatggactcaggagcccatcacctgtaaatccccacactgcagccctgccacttgcttgtctgcatgtgtgggtccgctggaccactttggtgtatctttgagccccttgagtgaaaaaatgctgcctggctggctccctgattagacatccaacataatgaggactaacaccaatacaaacacttaagagatgacatatcgccctagctggatctactacagggaagggaagagggtgctgggtccaggcaggctgagtgtctcatgtcttaatgcttctctgcccaatctatttccggctggatgtggagtctgaaggcctggcacccactctggctctgtgatttaccagctgtgagccttgggggagctgcttactctcttggtgattcttttctcatttctatgatggggtagaggataatgcctatgcttacaaagtggctgtgggaagtaaaccggatgggataagaatggcttgctgtggaccacaggcaccgcaggataaccattcctcagaactcctcgtactgctctagtgcttggaggtccgtgtattacctcagctattccaaccgcaccaaccacgggagccacgtgtctacgtctgacagataaagatgctgagtttagagtctgcaaggcttgacaaccacagatcagggacaggagctgaggtctcctgacctggagcccagggccacccggagctgcaagaaacctgcactcacaactgcctcctattttaaaatgctgagtcgatcccacaggtggcaaaccagttctgggcttcaatttacaagcagtcagaaaagctgggttgaaatcgccactgtccttctatgtggctgatgaggaaggatgacggtgcccaccgctccatctctccagctgaccccaagctggcactcacgggtgggcaggctcagacaggcccagctccaccaagtgcacttgaagccggaatgcaagacatccgatggtatacttactcgaacccgtccttttcacaacagccgcgggatccgctttctttggctgactgctcagagtcttcccttttcctgtgaccccattagacgccacggggggctttttacccttgagctgttgaaataaacatataagaacattaaaaataaacacaaagtcaaacaaa

SEQ ID NO: 288684 - DNA, 374 bp, Homo sapiens
tcaggtcctgcaagcccttgcttgccatggcttcgggggaccgcccaggaagccgtgtcagcggccggagcggcagctcagcaagtggtggaccaggccacagaggcggggcagaaagccatggaccagctggccaagaccacccaggaaaccatcgacaagactgctaaccaggcctctgacaccttctctgggattgggaaaaaattcggcctcctgaaatgacagcagggagacttgggtcggcctcctgaaatgacagcagggagacttgggtgaccccccttccaggcgccatctagcacagcctggccctgatctccgggcagccaccacctcctcggtctgccccctcattaaaattcacgttccca

SEQ ID NO: 288685 - DNA, 3194 bp, Homo sapiens
  misc_feature (500)..(500): n is a, c, g, or t
  misc_feature (1255)..(1255): n is a, c, g, or t
ttttttttttttagaaatggaatacacattcattagcatgcaaggggaaatcagagtgactgccccaccacgaaatggggtacagatgagcaatggggaagtgtgggtaatttcagggggctagtaaatgattttcaggggaattcagtgggcttgaagaacatacagtggcctgggacaaagtctgttgggctcacagagcagacaacggtttgcaaaatctgtccaggtatgtgagcaggcttcagtctttcttcctgtgacagcagttcagtcagagaaaactccgggaagggaccagtggtcattgttttcttctttggtgggtccagacttaaggcagatgaggaacttcagagaacaacttcactgtatgctttggaagagacaaagggttggggggcctgtgggagtctggtcggagagaccttaaggcttcttcagttcagaatgtcacaccactatatttcggggtattggtttctgagccccaacaatgngtaactgaaactgcagaaagcgaaatcacaaattagctgggggtggtggctcatgcctgtaatctcagctactcaggaagctgaggcagaactgcttgaacctggaaggcagaggttgcagtgagccaagatcccgccattgcactccagcctgggcaacaagagcaaaactctgtctccaaaaacaaaaaaagggaaaaaaaaaagtgacaccacagcaaactggggcgggggtgggggaaacggtaatgcggtaatgcgctccctccttctgcctctccttgtctgagaagccctggtgccctgcacgctctcacaaggtccactgctgagtcctgggcacccttcagccaatttaatcttcacacacacactttggggagacgctgtgatgtgatggggatgttgaggctcagagaagtgaggggcttgctctaagaatatctgaacccaagaggtttgactgtagtgcctgccgctagggccacgtggagctctctctaccaccatctgctgggggctggctgtctcttcccacagaggctgctcccttcctgtccagctcacagctcattgcccatggggcctggagcccagtggcaccaccagcctgtgataaactggaacactcgaaggcctgcctggctattgggcactaccggtgggatttcaggagggctggcagggctgtggccagccaggcagggcatggctgagatgggctccccagagtccccaaggcatccatatggccnctcccagggcaaggcctcgctctgggagaggaggggcggggggctgggaggactgttgctgccgctttgttttgcctgagacctgctccctcccccttcctccacctaatctcatcacctgcctcttccctttgcccagggttgacctcatctccattaatccatacgtttgtgtgtgtgtgtgtgtgtgtgtgtgtgtgtgtgtgtgtgtgtgtacaggtgcacttccaaacaactccctctaggggctgaccccgcagcactagaagcagggtatgtgccagcagaccaagcctgtgtggcaggggcttcccagcgctccagaataggggagacaccagcagaggtgcaagaaacagccccggacaggaagcggtagagagacccagaaaggcagggtgggtgtgcactggcctccaggtcctgaaggcctactctggagtgggagtatacccagctgggtggggcctgacctacaccccttgtgtgccaggggaatgtatcttgcaagctgttttgctgcacccaaggatgatcttctccactcaggcccaggtccctaagtcccctcctaacagccacaagtcatactctctagcgccttgcctgccccatctcaggaaaggtgacctgagaggcccaagcttattcctgccctccctgagccatgcttcctgcccaacttcctaaggcttcggtgacagacggcaatctccttgcctgggctgcacaggcacactgccctctcccccttggggttgcatggtctgcaagtgcacacacctgtatctcgccctctcaggggaaagatttaccaggccctctccggctgcatccactgggtctctggctacaggcagagagccagtcagcagtgcccctgcagctgtttggggctgggggctccgatgatgccagagccctagggtttacaggcacctaggcagattcgaggatccaagtccctgccacatgcgtttgggtgagaccgacctcactgcctcagtttcctcctatacactgatgctatcaacaaaaatacccacttcaggaggtggttgtaaagattatacaagagactgcagagcgttaggcagcacctggcacaagacaaatgctcagtaaaagaccactgctgtcattaaggtcaacaccagccctgagctcctgccctggagctgacccagcgctcacgcccaggatcagaaagggagggctggggctgatgagctgggaggtggtgtgcgcccttctcctgcctccagctcctctctggacccctgtcctggcacctcttcggtccctggttcggtctgcccctttcccaccgcggcccgtcttaggccaggatgtgctccctgccctgcggactctggagcagggcccggccactccccggagcctgtatgacgggaaccgccccgcgccctctcccctacgcggggcaggccagccctggggcgccttaaaaaccggagctggcgcttggcatcgccactctgggcaggatccaacgtcgctccagctgctcttgacgactccacagataccccgaagccatggcaagcaagggcttgcaggacctgaagcaacaggtggaggggaccgcccaggaagccgtgtcagcggccggagcggcagctcagcaagtggtggaccaggccacagaggcggggcagaaagccatggaccagctggccaagaccacccaggaaaccatcgacaagactgctaaccaggcctctgacaccttctctgggattgggaaaaaattcggcctcctgaaatgacagcagggagacttgggtcggcctcctgaaatgacagcagggagacttgggtgaccccccttccaggcgccatctagcacagcctggccctgatctccgggcagccaccacctcctcggtctgccccctcattaaaattcacgttccca

SEQ ID NO: 288686 - DNA, 1752 bp, Homo sapiens
ctggctcttgaggagccacccgcggcggggtcgtgcacttccaaacaactccctctaggggctgaccccgcagcactagaagcagggtatgtgccagcagaccaagcctgtgtggcaggggcttcccagcgctccagaataggggagacaccagcagaggtgcaagaaacagccccggacaggaagcggtagagagacccagaaaggcagggtgggtgtgcactggcctccaggtcctgaaggcctactctggagtgggagtatacccagctgggtggggcctgacctacaccccttgtgtgccaggggaatgtatcttgcaagctgttttgctgcacccaaggatgatcttctccactcaggcccaggtccctaagtcccctcctaacagccacaagtcatactctctagcgccttgcctgccccatctcaggaaaggtgacctgagaggcccaagcttattcctgccctccctgagccatgcttcctgcccaacttcctaaggcttcggtgacagacggcaatctccttgcctgggctgcacaggcacactgccctctcccccttggggttgcatggtctgcaagtgcacacacctgtatctcgccctctcaggggaaagatttaccaggccctctccggctgcatccactgggtctctggctacaggcagagagccagtcagcagtgcccctgcagctgtttggggctgggggctccgatgatgccagagccctagggtttacaggcacctaggcagattcgaggatccaagtccctgccacatgcgtttgggtgagaccgacctcactgcctcagtttcctcctatacactgatgctatcaacaaaaatacccacttcaggaggtggttgtaaagattatacaagagactgcagagcgttaggcagcacctggcacaagacaaatgctcagtaaaagaccactgctgtcattaaggtcaacaccagccctgagctcctgccctggagctgacccagcgctcacgcccaggatcagaaagggagggctggggctgatgagctgggaggtggtgtgcgcccttctcctgcctccagctcctctctggacccctgtcctggcacctcttcggtccctggttcggtctgcccctttcccaccgcggcccgtcttaggccaggatgtgctccctgccctgcggactctggagcagggcccggccactccccggagcctgtatgacgggaaccgccccgcgccctctcccctacgcggggcaggccagccctggggcgccttaaaaaccggagctggcgcttggcatcgccactctgggcaggatccaacgtcgctccagctgctcttgacgactccacagataccccgaagccatggcaagcaagggcttgcaggacctgaagcaacaggtggaggggaccgcccaggaagccgtgtcagcggccggagcggcagctcagcaagtggtggaccaggccacagaggcggggcagaaagccatggaccagctggccaagaccacccaggaaaccatcgacaagactgctaaccaggcctctgacaccttctctgggattgggaaaaaattcggcctcctgaaatgacagcagggagacttgggtcggcctcctgaaatgacagcagggagacttgggtgaccccccttccaggcgccatctagcacagcctggccctgatctccgggcagccaccacctcctcggtctgccccctcattaaaattcacgttccca

SEQ ID NO: 288687 - DNA, 4800 bp, Homo sapiens
  misc_feature (500)..(500): n is a, c, g, or t
  misc_feature (912)..(912): n is a, c, g, or t
ttttttttttttagaaatggaatacacattcattagcatgcaaggggaaatcagagtgactgccccaccacgaaatggggtacagatgagcaatggggaagtgtgggtaatttcagggggctagtaaatgattttcaggggaattcagtgggcttgaagaacatacagtggcctgggacaaagtctgttgggctcacagagcagacaacggtttgcaaaatctgtccaggtatgtgagcaggcttcagtctttcttcctgtgacagcagttcagtcagagaaaactccgggaagggaccagtggtcattgttttcttctttggtgggtccagacttaaggcagatgaggaacttcagagaacaacttcactgtatgctttggaagagacaaagggttggggggcctgtgggagtctggtcggagagaccttaaggcttcttcagttcagaatgtcacaccactatatttcggggtattggtttctgagccccaacaatgngtaactgaaactgcagaaagcgaaatcacaaattagctgggggtggtggctcatgcctgtaatctcagctactcaggaagctgaggcagaactgcttgaacctggaaggcagaggtttgactgtagtgcctgccgctagggccacgtggagctctctctaccaccatctgctgggggctggctgtctcttcccacagaggctgctcccttcctgtccagctcacagctcattgcccatggggcctggagcccagtggcaccaccagcctgtgataaactggaacactcgaaggcctgcctggctattgggcactaccggtgggatttcaggagggctggcagggctgtggccagccaggcagggcatggctgagatgggctccccagagtccccaaggcatccatatggccnctcccagggcaaggcctcgctctgggagaggaggggcggggggctgggaggactgttgctgccgctttgttttgcctgagacctgctccctcccccttcctccacctaatctcatcacctgcctcttccctttgcccagggttgacctcatctccattaatccatacgtttgtgtgtgtgtgtgtgtgtgtgtgtgtgtgtgtgtgtgtgtgtgtacaggtgcacttccaaacaactccctctaggggctgaccccgcagcactagaagcagggtatgtgccagcagaccaagcctgtgtggcaggggcttcccagcgctccagaataggggagacaccagcagaggtgcaagaaacagccccggacaggaagcggtagagagacccagaaaggcagggtgggtgtgcactggcctccaggtcctgaaggcctactctggagtgggagtatacccagctgggtggggcctgacctacaccccttgtgtgccaggggaatgtatcttgcaagctgttttgctgcacccaaggatgatcttctccactcaggcccaggtccctaagtcccctcctaacagccacaagtcatactctctagcgccttgcctgccccatctcaggaaaggtgacctgagaggcccaagcttattcctgccctccctgagccatgcttcctgcccaacttcctaaggcttcggtgacagacggcaatctccttgcctgggctgcacaggcacactgccctctcccccttggggttgcatggtctgcaagtgcacacacctgtatctcgccctctcaggggaaagatttaccaggccctctccggctgcatccactgggtctctggctacaggcagagagccagtcagcagtgcccctgcagctgtttggggctgggggctccgatgatgccagagccctagggtttacaggcacctaggcagattcgaggatccaagtccctgccacatgcgtttgggtgagaccgacctcactgcctcagtttcctcctatacactgatgctatcaacaaaaatacccacttcaggaggtggttgtaaagattatacaagagactgcagagcgttaggcagcacctggcacaagacaaatgctcagtaaaagaccactgctgtcattaaggtcaacaccagccctgagctcctgccctggagctgacccagcgctcacgcccaggatcagaaagggagggctggggctgatgagctgggaggtggtgtgcgcccttctcctgcctccagctcctctctggacccctgtcctggcacctcttcggtccctggttcggtctgcccctttcccaccgcggcccgtcttaggccaggatgtgctccctgccctgcggactctggagcagggcccggccactccccggagcctgtatgacgggaaccgccccgcgccctctcccctacgcggggcaggccagccctggggcgccttaaaaaccggagctggcgcttggcatcgccactctgggcaggatccaacgtcgctccagctgctcttgacgactccacagataccccgaagccatggcaagcaagggcttgcaggacctgaagcaacaggtggaggggaccgcccaggaagccggtgaggatagcgcgcgacctagggctcaggcaggggcacctgcgtggatgcgcaggcagaagcagcgggtcggcgcggtccgcaagttcctggaccggcagcttggctcggaaggctcggtcctccactgagacgcagggggcaggcagaacgcccaccccggcgagcagacagatggtgcccgcagggaggcagcggaacagaggctccggaggagccggagctgcgctgcgggcactgcgggagcccctccaaggaggccatgctggcgctgggcggcccgcccaggccctcaggagagggtgaaggtccaggacagggatcgggcgcggcccgccaccacttaaacccgcgcgcgccaccagaggctgccccagacctcaaagggctttgtttccatcccacccccatcgccgaaaagtaatcgtcgccttacctttaagtccccacctggcaaagaaggtccttagttcctccacctccagctctctcctccgtattctggaggtgacccagctgcggtgggggcgtgggagatgtcaggagaccactgggttggttcttcctgcacctagcccaggcttcgttaggactccagctccctgtcagtcctgcccatatcccagtcaggagacaatatccaaaccaaccccttacttcaccagtgctccaggggaggcccacagttcttcccttgagactgaaatgctaccaaggaagcctccgtgtcaggtcccttccttctgggcttcacttttccatctgagagctgggtgcaaaggatgggctgctttctgatgggttaatcgagacgaggttcccaggggcctctcagcacacttgcctgactaaccctttccggaggatgggatctgggtaaggcaggccctttcctgttcagcagcagggatgagttacagctctgtaggcgggagccacctgtcagcccccccggggctggtgactccattcccagcaggccgaaactctggtccagaggagatagtccggccttggaagttttgcctccttccttcatttgtctcctaatgtcttaagctgcctgtccacagaggcactggctttgcttgtgtgcccctccgggcaggccacaggagggaggaggcagtaaggacctggcaaaactgcaagccccagggctaagtgcatgaaaggtgggaattcaggcatctgggccaggcttctaggggagaagctgtaaaagggggcaagggtcttctgcgccatcaccagcattagccaacagtccagatgctagctgcagcctggccctgccctgccttccttcctctgtccaacattttctcagtagccctggagatggaaagggaagctcctcccccacagagaaggagctcagagttagaaataaacaaaaacatcccagaggcatggaaaggtctcctgcccctcgggctggggggccctgggccagggactttatctccatggcatccatcccttggacctgtaccaccgaatactctggaggacacagaggcatggcaatggtggggcacctgtagtcggtggtgcctcaacaggggctaaaagccacatctctctgttccagtgtcagcggccggagcggcagctcagcaagtggtggaccaggccacagaggcggggcagaaaggtctggtggggctggagggaggcgggcaaccccagcacacctcccactccccgccccatcccggctggggcccaggcacatcctctcctctgcagagccctctgtccacaatgccccaagcaggtcccccgggagacccaggccaggctaagcctacaggcactgtggttcccgggccctgcctgacctgccctctctcccgcccttccccagccatggaccagctggccaagaccacccaggaaaccatcgacaagactgctaaccaggcctctgacaccttctctgggattgggaaaaaattcggcctcctgaaatgacagcagggagacttgggtcggcctccctgtgtccacttcatgattcctcgcaagctgggcccagtcctctcatcccaagagcagagccaccgtagccggagtcctagcctcccaaattcggaaatccaatccaacggtctcaggaatgttttccatcccgccacgcgcctcccgaagctcccagaccggaggctcagcccccatctcggtaaaatacctgttttctgacaagactaggactcttacatagactgccatgaactacaagaagtatagcattgctcaaataac

SEQ ID NO: 288688 - DNA, 3423 bp, Homo sapiens
  misc_feature (500)..(500): n is a, c, g, or t
  misc_feature (1255)..(1255): n is a, c, g, or t
ttttttttttttagaaatggaatacacattcattagcatgcaaggggaaatcagagtgactgccccaccacgaaatggggtacagatgagcaatggggaagtgtgggtaatttcagggggctagtaaatgattttcaggggaattcagtgggcttgaagaacatacagtggcctgggacaaagtctgttgggctcacagagcagacaacggtttgcaaaatctgtccaggtatgtgagcaggcttcagtctttcttcctgtgacagcagttcagtcagagaaaactccgggaagggaccagtggtcattgttttcttctttggtgggtccagacttaaggcagatgaggaacttcagagaacaacttcactgtatgctttggaagagacaaagggttggggggcctgtgggagtctggtcggagagaccttaaggcttcttcagttcagaatgtcacaccactatatttcggggtattggtttctgagccccaacaatgngtaactgaaactgcagaaagcgaaatcacaaattagctgggggtggtggctcatgcctgtaatctcagctactcaggaagctgaggcagaactgcttgaacctggaaggcagaggttgcagtgagccaagatcccgccattgcactccagcctgggcaacaagagcaaaactctgtctccaaaaacaaaaaaagggaaaaaaaaaagtgacaccacagcaaactggggcgggggtgggggaaacggtaatgcggtaatgcgctccctccttctgcctctccttgtctgagaagccctggtgccctgcacgctctcacaaggtccactgctgagtcctgggcacccttcagccaatttaatcttcacacacacactttggggagacgctgtgatgtgatggggatgttgaggctcagagaagtgaggggcttgctctaagaatatctgaacccaagaggtttgactgtagtgcctgccgctagggccacgtggagctctctctaccaccatctgctgggggctggctgtctcttcccacagaggctgctcccttcctgtccagctcacagctcattgcccatggggcctggagcccagtggcaccaccagcctgtgataaactggaacactcgaaggcctgcctggctattgggcactaccggtgggatttcaggagggctggcagggctgtggccagccaggcagggcatggctgagatgggctccccagagtccccaaggcatccatatggccnctcccagggcaaggcctcgctctgggagaggaggggcggggggctgggaggactgttgctgccgctttgttttgcctgagacctgctccctcccccttcctccacctaatctcatcacctgcctcttccctttgcccagggttgacctcatctccattaatccatacgtttgtgtgtgtgtgtgtgtgtgtgtgtgtgtgtgtgtgtgtgtgtgtacaggtgcacttccaaacaactccctctaggggctgaccccgcagcactagaagcagggtatgtgccagcagaccaagcctgtgtggcaggggcttcccagcgctccagaataggggagacaccagcagaggtgcaagaaacagccccggacaggaagcggtagagagacccagaaaggcagggtgggtgtgcactggcctccaggtcctgaaggcctactctggagtgggagtatacccagctgggtggggcctgacctacaccccttgtgtgccaggggaatgtatcttgcaagctgttttgctgcacccaaggatgatcttctccactcaggcccaggtccctaagtcccctcctaacagccacaagtcatactctctagcgccttgcctgccccatctcaggaaaggtgacctgagaggcccaagcttattcctgccctccctgagccatgcttcctgcccaacttcctaaggcttcggtgacagacggcaatctccttgcctgggctgcacaggcacactgccctctcccccttggggttgcatggtctgcaagtgcacacacctgtatctcgccctctcaggggaaagatttaccaggccctctccggctgcatccactgggtctctggctacaggcagagagccagtcagcagtgcccctgcagctgtttggggctgggggctccgatgatgccagagccctagggtttacaggcacctaggcagattcgaggatccaagtccctgccacatgcgtttgggtgagaccgacctcactgcctcagtttcctcctatacactgatgctatcaacaaaaatacccacttcaggaggtggttgtaaagattatacaagagactgcagagcgttaggcagcacctggcacaagacaaatgctcagtaaaagaccactgctgtcattaaggtcaacaccagccctgagctcctgccctggagctgacccagcgctcacgcccaggatcagaaagggagggctggggctgatgagctgggaggtggtgtgcgcccttctcctgcctccagctcctctctggacccctgtcctggcacctcttcggtccctggttcggtctgcccctttcccaccgcggcccgtcttaggccaggatgtgctccctgccctgcggactctggagcagggcccggccactccccggagcctgtatgacgggaaccgccccgcgccctctcccctacgcggggcaggccagccctggggcgccttaaaaaccggagctggcgcttggcatcgccactctgggcaggatccaacgtcgctccagctgctcttgacgactccacagataccccgaagccatggcaagcaagggcttgcaggacctgaagcaacaggtggaggggaccgcccaggaagccgtgtcagcggccggagcggcagctcagcaagtggtggaccaggccacagaggcggggcagaaagccatggaccagctggccaagaccacccaggaaaccatcgacaagactgctaaccaggcctctgacaccttctctgggattgggaaaaaattcggcctcctgaaatgacagcagggagacttgggtcggcctcctgaaatgacagcagggagacttgggtgaccccccttccaggcgccatctagcacagcctggccctgatctccgggcagccaccacctcctcggtctgccccctcattaaaattcacgttcccaaaaaaaaaaaaaaaaaaaaaaaaaaaaaaaaaaaaaaaaaaaaaaacaaaaagaaaaatggtggcggggtttttttttggggggggggggagaaaaggggtgttttgagaggggggagtgtgtttaaaattgtttgtttctggagacaccatttttttttgaagggggggagaaagcgggggggccccctagagggggggggaaaatggaaacggaggggagcgggttt

SEQ ID NO: 288689 - DNA, 3461 bp, Homo sapiens
  misc_feature (500)..(500): n is a, c, g, or t
  misc_feature (1255)..(1255): n is a, c, g, or t
ttttttttttttagaaatggaatacacattcattagcatgcaaggggaaatcagagtgactgccccaccacgaaatggggtacagatgagcaatggggaagtgtgggtaatttcagggggctagtaaatgattttcaggggaattcagtgggcttgaagaacatacagtggcctgggacaaagtctgttgggctcacagagcagacaacggtttgcaaaatctgtccaggtatgtgagcaggcttcagtctttcttcctgtgacagcagttcagtcagagaaaactccgggaagggaccagtggtcattgttttcttctttggtgggtccagacttaaggcagatgaggaacttcagagaacaacttcactgtatgctttggaagagacaaagggttggggggcctgtgggagtctggtcggagagaccttaaggcttcttcagttcagaatgtcacaccactatatttcggggtattggtttctgagccccaacaatgngtaactgaaactgcagaaagcgaaatcacaaattagctgggggtggtggctcatgcctgtaatctcagctactcaggaagctgaggcagaactgcttgaacctggaaggcagaggttgcagtgagccaagatcccgccattgcactccagcctgggcaacaagagcaaaactctgtctccaaaaacaaaaaaagggaaaaaaaaaagtgacaccacagcaaactggggcgggggtgggggaaacggtaatgcggtaatgcgctccctccttctgcctctccttgtctgagaagccctggtgccctgcacgctctcacaaggtccactgctgagtcctgggcacccttcagccaatttaatcttcacacacacactttggggagacgctgtgatgtgatggggatgttgaggctcagagaagtgaggggcttgctctaagaatatctgaacccaagaggtttgactgtagtgcctgccgctagggccacgtggagctctctctaccaccatctgctgggggctggctgtctcttcccacagaggctgctcccttcctgtccagctcacagctcattgcccatggggcctggagcccagtggcaccaccagcctgtgataaactggaacactcgaaggcctgcctggctattgggcactaccggtgggatttcaggagggctggcagggctgtggccagccaggcagggcatggctgagatgggctccccagagtccccaaggcatccatatggccnctcccagggcaaggcctcgctctgggagaggaggggcggggggctgggaggactgttgctgccgctttgttttgcctgagacctgctccctcccccttcctccacctaatctcatcacctgcctcttccctttgcccagggttgacctcatctccattaatccatacgtttgtgtgtgtgtgtgtgtgtgtgtgtgtgtgtgtgtgtgtgtgtgtacaggtgcacttccaaacaactccctctaggggctgaccccgcagcactagaagcagggtatgtgccagcagaccaagcctgtgtggcaggggcttcccagcgctccagaataggggagacaccagcagaggtgcaagaaacagccccggacaggaagcggtagagagacccagaaaggcagggtgggtgtgcactggcctccaggtcctgaaggcctactctggagtgggagtatacccagctgggtggggcctgacctacaccccttgtgtgccaggggaatgtatcttgcaagctgttttgctgcacccaaggatgatcttctccactcaggcccaggtccctaagtcccctcctaacagccacaagtcatactctctagcgccttgcctgccccatctcaggaaaggtgacctgagaggcccaagcttattcctgccctccctgagccatgcttcctgcccaacttcctaaggcttcggtgacagacggcaatctccttgcctgggctgcacaggcacactgccctctcccccttggggttgcatggtctgcaagtgcacacacctgtatctcgccctctcaggggaaagatttaccaggccctctccggctgcatccactgggtctctggctacaggcagagagccagtcagcagtgcccctgcagctgtttggggctgggggctccgatgatgccagagccctagggtttacaggcacctaggcagattcgaggatccaagtccctgccacatgcgtttgggtgagaccgacctcactgcctcagtttcctcctatacactgatgctatcaacaaaaatacccacttcaggaggtggttgtaaagattatacaagagactgcagagcgttaggcagcacctggcacaagacaaatgctcagtaaaagaccactgctgtcattaaggtcaacaccagccctgagctcctgccctggagctgacccagcgctcacgcccaggatcagaaagggagggctggggctgatgagctgggaggtggtgtgcgcccttctcctgcctccagctcctctctggacccctgtcctggcacctcttcggtccctggttcggtctgcccctttcccaccgcggcccgtcttaggccaggatgtgctccctgccctgcggactctggagcagggcccggccactccccggagcctgtatgacgggaaccgccccgcgccctctcccctacgcggggcaggccagccctggggcgccttaaaaaccggagctggcgcttggcatcgccactctgggcaggatccaacgtcgctccagctgctcttgacgactccacagataccccgaagccatggcaagcaagggcttgcaggacctgaagcaacaggtggaggggaccgcccaggaagccgtgtcagcggccggagcggcagctcagcaagtggtggaccaggccacagaggcggggcagaaagccatggaccagctggccaagaccacccaggaaaccatcgacaagactgctaaccaggcctctgacaccttctctgggattgggaaaaaattcggcctcctgaaatgacagcagggagacttgggtcggcctcctgaaatgacagcagggagacttgggtgaccccccttccaggcgccatctagcacagcctggccctgatctccgggcagccaccacctcctcggtctgccccctcattaaaattcacgttcccaccctgtgtccacttcatgattcctcgcaagctgggcccagtcctctcatcccaagagcagagccaccgtagccggagtcctagcctcccaaattcggaaatccaatccaacggtctcaggaatgttttccatcccgccacgcgcctcccgaagctcccagaccggaggctcagcccccatctcggtaaaatacctgttttctgacaagactaggactcttacatagactgccatgaactacaagaagtatagcattgctcaaataac

SEQ ID NO: 288690 - DNA, 3497 bp, Homo sapiens
  misc_feature (500)..(500): n is a, c, g, or t
  misc_feature (1255)..(1255): n is a, c, g, or t
ttttttttttttagaaatggaatacacattcattagcatgcaaggggaaatcagagtgactgccccaccacgaaatggggtacagatgagcaatggggaagtgtgggtaatttcagggggctagtaaatgattttcaggggaattcagtgggcttgaagaacatacagtggcctgggacaaagtctgttgggctcacagagcagacaacggtttgcaaaatctgtccaggtatgtgagcaggcttcagtctttcttcctgtgacagcagttcagtcagagaaaactccgggaagggaccagtggtcattgttttcttctttggtgggtccagacttaaggcagatgaggaacttcagagaacaacttcactgtatgctttggaagagacaaagggttggggggcctgtgggagtctggtcggagagaccttaaggcttcttcagttcagaatgtcacaccactatatttcggggtattggtttctgagccccaacaatgngtaactgaaactgcagaaagcgaaatcacaaattagctgggggtggtggctcatgcctgtaatctcagctactcaggaagctgaggcagaactgcttgaacctggaaggcagaggttgcagtgagccaagatcccgccattgcactccagcctgggcaacaagagcaaaactctgtctccaaaaacaaaaaaagggaaaaaaaaaagtgacaccacagcaaactggggcgggggtgggggaaacggtaatgcggtaatgcgctccctccttctgcctctccttgtctgagaagccctggtgccctgcacgctctcacaaggtccactgctgagtcctgggcacccttcagccaatttaatcttcacacacacactttggggagacgctgtgatgtgatggggatgttgaggctcagagaagtgaggggcttgctctaagaatatctgaacccaagaggtttgactgtagtgcctgccgctagggccacgtggagctctctctaccaccatctgctgggggctggctgtctcttcccacagaggctgctcccttcctgtccagctcacagctcattgcccatggggcctggagcccagtggcaccaccagcctgtgataaactggaacactcgaaggcctgcctggctattgggcactaccggtgggatttcaggagggctggcagggctgtggccagccaggcagggcatggctgagatgggctccccagagtccccaaggcatccatatggccnctcccagggcaaggcctcgctctgggagaggaggggcggggggctgggaggactgttgctgccgctttgttttgcctgagacctgctccctcccccttcctccacctaatctcatcacctgcctcttccctttgcccagggttgacctcatctccattaatccatacgtttgtgtgtgtgtgtgtgtgtgtgtgtgtgtgtgtgtgtgtgtgtgtacaggtgcacttccaaacaactccctctaggggctgaccccgcagcactagaagcagggtatgtgccagcagaccaagcctgtgtggcaggggcttcccagcgctccagaataggggagacaccagcagaggtgcaagaaacagccccggacaggaagcggtagagagacccagaaaggcagggtgggtgtgcactggcctccaggtcctgaaggcctactctggagtgggagtatacccagctgggtggggcctgacctacaccccttgtgtgccaggggaatgtatcttgcaagctgttttgctgcacccaaggatgatcttctccactcaggcccaggtccctaagtcccctcctaacagccacaagtcatactctctagcgccttgcctgccccatctcaggaaaggtgacctgagaggcccaagcttattcctgccctccctgagccatgcttcctgcccaacttcctaaggcttcggtgacagacggcaatctccttgcctgggctgcacaggcacactgccctctcccccttggggttgcatggtctgcaagtgcacacacctgtatctcgccctctcaggggaaagatttaccaggccctctccggctgcatccactgggtctctggctacaggcagagagccagtcagcagtgcccctgcagctgtttggggctgggggctccgatgatgccagagccctagggtttacaggcacctaggcagattcgaggatccaagtccctgccacatgcgtttgggtgagaccgacctcactgcctcagtttcctcctatacactgatgctatcaacaaaaatacccacttcaggaggtggttgtaaagattatacaagagactgcagagcgttaggcagcacctggcacaagacaaatgctcagtaaaagaccactgctgtcattaaggtcaacaccagccctgagctcctgccctggagctgacccagcgctcacgcccaggatcagaaagggagggctggggctgatgagctgggaggtggtgtgcgcccttctcctgcctccagctcctctctggacccctgtcctggcacctcttcggtccctggttcggtctgcccctttcccaccgcggcccgtcttaggccaggatgtgctccctgccctgcggactctggagcagggcccggccactccccggagcctgtatgacgggaaccgccccgcgccctctcccctacgcggggcaggccagccctggggcgccttaaaaaccggagctggcgcttggcatcgccactctgggcaggatccaacgtcgctccagctgctcttgacgactccacagataccccgaagccatggcaagcaagggcttgcaggacctgaagcaacaggtggaggggaccgcccaggaagccgtgtcagcggccggagcggcagctcagcaagtggtggaccaggccacagaggcggggcagaaagccatggaccagctggccaagaccacccaggaaaccatcgacaagactgctaaccaggcctctgacaccttctctgggattgggaaaaaattcggcctcctgaaatgacagcagggagacttgggtcggcctcctgaaatgacagcagggagacttgggtgaccccccttccaggcgccatctagcacagcctggccctgatctccgggcagccaccacctcctcggtctgccccctcattaaaattcacgttcccaaaaaaaaaacatctaacactctcctccaacttttatcccctcataacacaaatctacttgccggcgtttacatggtcgtgcatggaaaccttggcgttacccacttactcgccttgaagaacatcccttttcgcagttgcgtataggcaatagcccgactgatgcccttccaacattgcgcacctgatggcaatggtacattgaacgcagtattttgtaaactcgcgtaacctttgttaactaaccctttttaccctttcgcgtacactcgcactcccttacattcaatcatcggcccgtccg

SEQ ID NO: 288691 - DNA, 3131 bp, Homo sapiens
  misc_feature (500)..(500): n is a, c, g, or t
  misc_feature (1255)..(1255): n is a, c, g, or t
ttttttttttttagaaatggaatacacattcattagcatgcaaggggaaatcagagtgactgccccaccacgaaatggggtacagatgagcaatggggaagtgtgggtaatttcagggggctagtaaatgattttcaggggaattcagtgggcttgaagaacatacagtggcctgggacaaagtctgttgggctcacagagcagacaacggtttgcaaaatctgtccaggtatgtgagcaggcttcagtctttcttcctgtgacagcagttcagtcagagaaaactccgggaagggaccagtggtcattgttttcttctttggtgggtccagacttaaggcagatgaggaacttcagagaacaacttcactgtatgctttggaagagacaaagggttggggggcctgtgggagtctggtcggagagaccttaaggcttcttcagttcagaatgtcacaccactatatttcggggtattggtttctgagccccaacaatgngtaactgaaactgcagaaagcgaaatcacaaattagctgggggtggtggctcatgcctgtaatctcagctactcaggaagctgaggcagaactgcttgaacctggaaggcagaggttgcagtgagccaagatcccgccattgcactccagcctgggcaacaagagcaaaactctgtctccaaaaacaaaaaaagggaaaaaaaaaagtgacaccacagcaaactggggcgggggtgggggaaacggtaatgcggtaatgcgctccctccttctgcctctccttgtctgagaagccctggtgccctgcacgctctcacaaggtccactgctgagtcctgggcacccttcagccaatttaatcttcacacacacactttggggagacgctgtgatgtgatggggatgttgaggctcagagaagtgaggggcttgctctaagaatatctgaacccaagaggtttgactgtagtgcctgccgctagggccacgtggagctctctctaccaccatctgctgggggctggctgtctcttcccacagaggctgctcccttcctgtccagctcacagctcattgcccatggggcctggagcccagtggcaccaccagcctgtgataaactggaacactcgaaggcctgcctggctattgggcactaccggtgggatttcaggagggctggcagggctgtggccagccaggcagggcatggctgagatgggctccccagagtccccaaggcatccatatggccnctcccagggcaaggcctcgctctgggagaggaggggcggggggctgggaggactgttgctgccgctttgttttgcctgagacctgctccctcccccttcctccacctaatctcatcacctgcctcttccctttgcccagggttgacctcatctccattaatccatacgtttgtgtgtgtgtgtgtgtgtgtgtgtgtgtgtgtgtgtgtgtgtgtacaggtgcacttccaaacaactccctctaggggctgaccccgcagcactagaagcagggtatgtgccagcagaccaagcctgtgtggcaggggcttcccagcgctccagaataggggagacaccagcagaggtgcaagaaacagccccggacaggaagcggtagagagacccagaaaggcagggtgggtgtgcactggcctccaggtcctgaaggcctactctggagtgggagtatacccagctgggtggggcctgacctacaccccttgtgtgccaggggaatgtatcttgcaagctgttttgctgcacccaaggatgatcttctccactcaggcccaggtccctaagtcccctcctaacagccacaagtcatactctctagcgccttgcctgccccatctcaggaaaggtgacctgagaggcccaagcttattcctgccctccctgagccatgcttcctgcccaacttcctaaggcttcggtgacagacggcaatctccttgcctgggctgcacaggcacactgccctctcccccttggggttgcatggtctgcaagtgcacacacctgtatctcgccctctcaggggaaagatttaccaggccctctccggctgcatccactgggtctctggctacaggcagagagccagtcagcagtgcccctgcagctgtttggggctgggggctccgatgatgccagagccctagggtttacaggcacctaggcagattcgaggatccaagtccctgccacatgcgtttgggtgagaccgacctcactgcctcagtttcctcctatacactgatgctatcaacaaaaatacccacttcaggaggtggttgtaaagattatacaagagactgcagagcgttaggcagcacctggcacaagacaaatgctcagtaaaagaccactgctgtcattaaggtcaacaccagccctgagctcctgccctggagctgacccagcgctcacgcccaggatcagaaagggagggctggggctgatgagctgggaggtggtgtgcgcccttctcctgcctccagctcctctctggacccctgtcctggcacctcttcggtccctggttcggtctgcccctttcccaccgcggcccgtcttaggccaggatgtgctccctgccctgcggactctggagcagggcccggccactccccggagcctgtatgacgggaaccgccccgcgccctctcccctacgcggggcaggccagccctggggcgccttaaaaaccggagctggcgcttggcatcgccactctgggcaggatccaacgtcgctccagctgctcttgacgactccacagataccccgaagccatggcaagcaagggcttgcaggacctgaagcaacaggtggaggggaccgcccaggaagccgccatggaccagctggccaagaccacccaggaaaccatcgacaagactgctaaccaggcctctgacaccttctctgggattgggaaaaaattcggcctcctgaaatgacagcagggagacttgggtcggcctcctgaaatgacagcagggagacttgggtgaccccccttccaggcgccatctagcacagcctggccctgatctccgggcagccaccacctcctcggtctgccccctcattaaaattcacgttccca

SEQ ID NO: 288692 - DNA, 3407 bp, Homo sapiens
  misc_feature (500)..(500): n is a, c, g, or t
  misc_feature (1255)..(1255): n is a, c, g, or t
ttttttttttttagaaatggaatacacattcattagcatgcaaggggaaatcagagtgactgccccaccacgaaatggggtacagatgagcaatggggaagtgtgggtaatttcagggggctagtaaatgattttcaggggaattcagtgggcttgaagaacatacagtggcctgggacaaagtctgttgggctcacagagcagacaacggtttgcaaaatctgtccaggtatgtgagcaggcttcagtctttcttcctgtgacagcagttcagtcagagaaaactccgggaagggaccagtggtcattgttttcttctttggtgggtccagacttaaggcagatgaggaacttcagagaacaacttcactgtatgctttggaagagacaaagggttggggggcctgtgggagtctggtcggagagaccttaaggcttcttcagttcagaatgtcacaccactatatttcggggtattggtttctgagccccaacaatgngtaactgaaactgcagaaagcgaaatcacaaattagctgggggtggtggctcatgcctgtaatctcagctactcaggaagctgaggcagaactgcttgaacctggaaggcagaggttgcagtgagccaagatcccgccattgcactccagcctgggcaacaagagcaaaactctgtctccaaaaacaaaaaaagggaaaaaaaaaagtgacaccacagcaaactggggcgggggtgggggaaacggtaatgcggtaatgcgctccctccttctgcctctccttgtctgagaagccctggtgccctgcacgctctcacaaggtccactgctgagtcctgggcacccttcagccaatttaatcttcacacacacactttggggagacgctgtgatgtgatggggatgttgaggctcagagaagtgaggggcttgctctaagaatatctgaacccaagaggtttgactgtagtgcctgccgctagggccacgtggagctctctctaccaccatctgctgggggctggctgtctcttcccacagaggctgctcccttcctgtccagctcacagctcattgcccatggggcctggagcccagtggcaccaccagcctgtgataaactggaacactcgaaggcctgcctggctattgggcactaccggtgggatttcaggagggctggcagggctgtggccagccaggcagggcatggctgagatgggctccccagagtccccaaggcatccatatggccnctcccagggcaaggcctcgctctgggagaggaggggcggggggctgggaggactgttgctgccgctttgttttgcctgagacctgctccctcccccttcctccacctaatctcatcacctgcctcttccctttgcccagggttgacctcatctccattaatccatacgtttgtgtgtgtgtgtgtgtgtgtgtgtgtgtgtgtgtgtgtgtgtgtacaggtgcacttccaaacaactccctctaggggctgaccccgcagcactagaagcagggtatgtgccagcagaccaagcctgtgtggcaggggcttcccagcgctccagaataggggagacaccagcagaggtgcaagaaacagccccggacaggaagcggtagagagacccagaaaggcagggtgggtgtgcactggcctccaggtcctgaaggcctactctggagtgggagtatacccagctgggtggggcctgacctacaccccttgtgtgccaggggaatgtatcttgcaagctgttttgctgcacccaaggatgatcttctccactcaggcccaggtccctaagtcccctcctaacagccacaagtcatactctctagcgccttgcctgccccatctcaggaaaggtgacctgagaggcccaagcttattcctgccctccctgagccatgcttcctgcccaacttcctaaggcttcggtgacagacggcaatctccttgcctgggctgcacaggcacactgccctctcccccttggggttgcatggtctgcaagtgcacacacctgtatctcgccctctcaggggaaagatttaccaggccctctccggctgcatccactgggtctctggctacaggcagagagccagtcagcagtgcccctgcagctgtttggggctgggggctccgatgatgccagagccctagggtttacaggcacctaggcagattcgaggatccaagtccctgccacatgcgtttgggtgagaccgacctcactgcctcagtttcctcctatacactgatgctatcaacaaaaatacccacttcaggaggtggttgtaaagattatacaagagactgcagagcgttaggcagcacctggcacaagacaaatgctcagtaaaagaccactgctgtcattaaggtcaacaccagccctgagctcctgccctggagctgacccagcgctcacgcccaggatcagaaagggagggctggggctgatgagctgggaggtggtgtgcgcccttctcctgcctccagctcctctctggacccctgtcctggcacctcttcggtccctggttcggtctgcccctttcccaccgcggcccgtcttaggccaggatgtgctccctgccctgcggactctggagcagggcccggccactccccggagcctgtatgacgggaaccgccccgcgccctctcccctacgcggggcaggccagccctggggcgccttaaaaaccggagctggcgcttggcatcgccactctgggcaggatccaacgtcgctccagctgctcttgacgactccacagataccccgaagccatggcaagcaagggcttgcaggacctgaagcaacaggtggaggggaccgcccaggaagccgtgtcagcggccggagcggcagctcagcaagtggtggaccaggccacagaggcggggcagaaaggtctggtggggctggagggaggcgggcaaccccagcacacctcccactccccgccccatcccggctggggcccaggcacatcctctcctctgcagagccctctgtccacaatgccccaagcaggtcccccgggagacccaggccaggctaagcctacaggcactgtggttcccgggccctgcctgacctgccctctctcccgcccttccccagccatggaccagctggccaagaccacccaggaaaccatcgacaagactgctaaccaggcctctgacaccttctctgggattgggaaaaaattcggcctcctgaaatgacagcagggagacttgggtcggcctcctgaaatgacagcagggagacttgggtgaccccccttccaggcgccatctagcacagcctggccctgatctccgggcagccaccacctcctcggtctgccccctcattaaaattcacgttccca

SEQ ID NO: 288693 - DNA, 3360 bp, Homo sapiens
  misc_feature (500)..(500): n is a, c, g, or t
  misc_feature (1255)..(1255): n is a, c, g, or t
ttttttttttttagaaatggaatacacattcattagcatgcaaggggaaatcagagtgactgccccaccacgaaatggggtacagatgagcaatggggaagtgtgggtaatttcagggggctagtaaatgattttcaggggaattcagtgggcttgaagaacatacagtggcctgggacaaagtctgttgggctcacagagcagacaacggtttgcaaaatctgtccaggtatgtgagcaggcttcagtctttcttcctgtgacagcagttcagtcagagaaaactccgggaagggaccagtggtcattgttttcttctttggtgggtccagacttaaggcagatgaggaacttcagagaacaacttcactgtatgctttggaagagacaaagggttggggggcctgtgggagtctggtcggagagaccttaaggcttcttcagttcagaatgtcacaccactatatttcggggtattggtttctgagccccaacaatgngtaactgaaactgcagaaagcgaaatcacaaattagctgggggtggtggctcatgcctgtaatctcagctactcaggaagctgaggcagaactgcttgaacctggaaggcagaggttgcagtgagccaagatcccgccattgcactccagcctgggcaacaagagcaaaactctgtctccaaaaacaaaaaaagggaaaaaaaaaagtgacaccacagcaaactggggcgggggtgggggaaacggtaatgcggtaatgcgctccctccttctgcctctccttgtctgagaagccctggtgccctgcacgctctcacaaggtccactgctgagtcctgggcacccttcagccaatttaatcttcacacacacactttggggagacgctgtgatgtgatggggatgttgaggctcagagaagtgaggggcttgctctaagaatatctgaacccaagaggtttgactgtagtgcctgccgctagggccacgtggagctctctctaccaccatctgctgggggctggctgtctcttcccacagaggctgctcccttcctgtccagctcacagctcattgcccatggggcctggagcccagtggcaccaccagcctgtgataaactggaacactcgaaggcctgcctggctattgggcactaccggtgggatttcaggagggctggcagggctgtggccagccaggcagggcatggctgagatgggctccccagagtccccaaggcatccatatggccnctcccagggcaaggcctcgctctgggagaggaggggcggggggctgggaggactgttgctgccgctttgttttgcctgagacctgctccctcccccttcctccacctaatctcatcacctgcctcttccctttgcccagggttgacctcatctccattaatccatacgtttgtgtgtgtgtgtgtgtgtgtgtgtgtgtgtgtgtgtgtgtgtgtacaggtgcacttccaaacaactccctctaggggctgaccccgcagcactagaagcagggtatgtgccagcagaccaagcctgtgtggcaggggcttcccagcgctccagaataggggagacaccagcagaggtgcaagaaacagccccggacaggaagcggtagagagacccagaaaggcagggtgggtgtgcactggcctccaggtcctgaaggcctactctggagtgggagtatacccagctgggtggggcctgacctacaccccttgtgtgccaggggaatgtatcttgcaagctgttttgctgcacccaaggatgatcttctccactcaggcccaggtccctaagtcccctcctaacagccacaagtcatactctctagcgccttgcctgccccatctcaggaaaggtgacctgagaggcccaagcttattcctgccctccctgagccatgcttcctgcccaacttcctaaggcttcggtgacagacggcaatctccttgcctgggctgcacaggcacactgccctctcccccttggggttgcatggtctgcaagtgcacacacctgtatctcgccctctcaggggaaagatttaccaggccctctccggctgcatccactgggtctctggctacaggcagagagccagtcagcagtgcccctgcagctgtttggggctgggggctccgatgatgccagagccctagggtttacaggcacctaggcagattcgaggatccaagtccctgccacatgcgtttgggtgagaccgacctcactgcctcagtttcctcctatacactgatgctatcaacaaaaatacccacttcaggaggtggttgtaaagattatacaagagactgcagagcgttaggcagcacctggcacaagacaaatgctcagtaaaagaccactgctgtcattaaggtcaacaccagccctgagctcctgccctggagctgacccagcgctcacgcccaggatcagaaagggagggctggggctgatgagctgggaggtggtgtgcgcccttctcctgcctccagctcctctctggacccctgtcctggcacctcttcggtccctggttcggtctgcccctttcccaccgcggcccgtcttaggccaggatgtgctccctgccctgcggactctggagcagggcccggccactccccggagcctgtatgacgggaaccgccccgcgccctctcccctacgcggggcaggccagccctggggcgccttaaaaaccggagctggcgcttggcatcgccactctgggcaggatccaacgtcgctccagctgctcttgacgactccacagataccccgaagccatggcaagcaagggcttgcaggacctgaagcaacaggtggaggggaccgcccaggaagccgccatggaccagctggccaagaccacccaggaaaccatcgacaagactgctaaccaggcctctgacaccttctctgggattgggaaaaaattcggcctcctgaaatgacagcagggagacttgggtcggcctcctgaaatgacagcagggagacttgggtgaccccccttccaggcgccatctagcacagcctggccctgatctccgggcagccaccacctcctcggtctgccccctcattaaaattcacgttcccaaaaaaaaaaaaaaaaaaaaaaaaaaaaaaaaaaaaaaaaaaaaaaacaaaaagaaaaatggtggcggggtttttttttggggggggggggagaaaaggggtgttttgagaggggggagtgtgtttaaaattgtttgtttctggagacaccatttttttttgaagggggggagaaagcgggggggccccctagagggggggggaaaatggaaacggaggggagcgggttt

SEQ ID NO: 288694 - DNA, 668 bp, Homo sapiens
cgcagggggtggtgggcccatggaccccgatcagcagcatgttggagcctaggaggcaaaaggtggttactccacccggatgcatcaggacaggcacaggaagaagaggaaatatgagagccaaaggaaaggaagcagaggcacagtgaagtcagataattcatctggagtcacacagctggggaccagcagaactgggatttaaacataaagtctgtccaacttggagctaaagcacttacctgagagaagatggaaggaaaaaaatccacaagcagaagtctctcaccactgcctctagctataacctgtatctgacaccacaaaacatctctgggcgtggcggtcttcccccaccccctcaaatatgtccagctcagttcctgtgagtttaatgcatgttaaacgcagcactgcttgttcttcaaggcagttaaggaaggaggcccttctggtataccccgagcacactggggttcctggaccatttcattaggaaaattgctcagcggctccaaagaatctggagctccctggtctatctcccagcctctcaagccgcctccagcagggtcccgccccaaattctccacattcccctactccaaaatctacagaatggaccatttaaagcttgagccaagagatacagcaaactcacccattaa

SEQ ID NO: 288695 - DNA, 855 bp, Homo sapiens
tggtagagatggagttttactatgtcacccaggctggtctcaaactcttggcctcaaacaatctttctgccttggccttccaaagtgctttgattacaggcatgagccaccgcacccatttggccctaatgcaatattttgaccaaccaaaaatcagttcatcttgactgtgagggcccaaaagggcagggaagacgaggtgggaaaagagaaagcaggggttatgggacaagagctactacttggctgttacctcctctacagctccaaacaagcctattaggtgggtcctgttattaatcctgttttacaggaaaggaagcagaggcacagtgaagtcagataattcatctggagtcacacagctggggaccagcagaactgggatttaaacataaagtctgtccaacttggagctaaagcacttacctgagagaagatggaaggaaaaaaatccacaagcagaagtctctcaccactgcctctagctataacctgtatctgacaccacaaaacatctctgggcgtggcggtcttcccccaccccctcaaatatgtccagctcagttcctgtgagtttaatgcatgttaaacgcagcactgcttgttcttcaaggcagttaaggaaggaggcccttctggtataccccgagcacactggggttcctggaccatttcattaggaaaattgctcagcggctccaaagaatctggagctccctggtctatctcccagcctctcaagccgcctccagcagggtcccgccccaaattctccacattcccctactccaaaatctacagaatggaccatttaaagcttgagccaagagatacagcaaactcacccattaa

SEQ ID NO: 288696 - DNA, 2824 bp, Homo sapiens
ctcccggcctggtggctgcttgattatgtcaccagactctttcagcatgtacgtcccatgggacttcttcccttcctcctcagcccccgatcctggctcctcctcggcctcagccctctcctagctctcccctaagcttcttgagtctccttgctgaccagcagtggccacttctccagctctgaccccagtaccaactgtcccctagacggggaccccagctacagaattcccacctgcccaaaaccaaacgcagcatcttcccatcctcccagacctgtgcttcctagcgcgtcccccatcagtggggcaccagcgctggggtgctgccttcacccttcccctgtgtggctcccacatcctagtgtgaccggatcccacgtccgagctctactcacctcccaaacccagccagcttcctcacccctgttgccctgccttcttcaaaggttgtggttgctaattggtgtccctacctccgcctcatcccccttccctcctgcatcctgcagccggggcgctttctccgcccccctccgagttcctccattgtcaggcactgctgccttcctgcctcccaaggcctcccacagtccagttcctctctcctggttcctccccatctgcctgttgttctccctgttacggcacacgtgccctttactgattacaacctcggtatgtgtcatcctctgcctttactgccatttcccattcccctcccttcctggagaactcttagtcatccatcaaaacccagcgcactttcacctcctctctgaagctgtctctgactcttaggcaggcgtgcacgtcttcctctttacttgcactcatgtgtttgaaatggttcagccctctactgcaggaccagtccatgagctcccaagaagggcagggatgtgtttaagtcatccttgtgtttctcacgtctcacacagggcagggtgcagaggaaaacatgccgcatgggagtgtagaggagatgagaccatctcatgagggactcatgcccgaagtgtgtgcatcatccgttcacaaagtgccttcacacccctcgtgcagagcagtgtgcccagcccaccgccaggagagggacgcccagcgcgtcgtggtttgctgggtcctgcactgctgtcccaccttgctcccttccacagctggtcagcttgcaggtctgccggcttctctccacgaggcctctccagccccagtttgtctgtcagaagcgcagagacccccagcctcactccccaggcctctgcatgggcttgttcctgctccagaacacctttccctcccgctgcccagcctcgcctccacatcacagagcgcctgactcctgtgcccccagggcacatcacagatcgcccacacgtttgtctgttgagtgcagcgacaagtcaccagactaagtttgagtcggtggcgggaattggcttatgtccccaaagtggctgtacctgccgatgatccaaacgtacctactgtgccccgagcccatgagccccttttgtcctcgaagggccatgagaagtaccctctgccgcccctcatgcacagctgagggagaggaagtgagcgccactgcttgtgacgcagccgggactccagccccaggctgtggctctgcagcccctgctcctttctgcggcatgtgggtggacagtggtggagagtcactggctggggctcggggacgctgctcacagccttacagatcctcctgttcgtgtgtccacagtgctcttaccactgtctccttccgggttcccagggctgctgtgggaacacttttgggatgctaccaccttggcccccatgcctgggcgccctccatctcgtcacctgctggaaaggaaaaacagaccttttccctgttcatggcaggccatggcccgggcacctgcctgagctctctggcagtaggagctaagggtggcactagacagcctgtccgtccgccatggcttcctttagggtccctgtggagggcagggcagggttgccagataaaatacagagtgcctatttaaactgggatttcagataaacaagtaattttttttattataagtatgacccatgcaacttttgaacatacttatactcaggaagtattgattgtccacctgaaattcagattgaatgaggcgtcctgtatttttatttgctaaacctggcaacctgagggaggaaagaaggacacctccagcctcccgggccttgagggagtaaagctcaggaggtgagtgagtctcttgactcttgacttctctggtgcaagacctcaggtccgtgggggcagaaaaacttgattgtggtgacacctagtgaccagcctgggaaatttcaggaatcaagggagaggaacggggaagaaacgaggcagggcaggggctccaggtgaggagccagcaggcaggggagagggagcgggccagccttacagagcaccccctgcagcttgagggatctgagctggagcccatcacctctgttactgcccttgaacactcttacaaaagaaagttttaagctgggcgtggtggctcacacctgtaatcccagcactttgggaggccgaggtgggaggatcgcttgagcccaggagtttgaaaccagcctgggcaacatggtgaaacctcatctctacaaaaaatacaaaaattagtcaggtgtggtagcgcacacctgtagtcacagctactccagaggctgaggcaggaggattgcttgagccctggagttcaaggctgcagtgagctgtgatttgattacacccctgcactccagcctgggcggcagagtgagactctgtctc

SEQ ID NO: 288697 - DNA, 491 bp, Homo sapiens
tgacctcgtgatccgccaccttgacctcccaacgtgctgggattacaggtgtgagccaccgcccccagcgataaaacattcttattgactttcgagtggcaaaataataaagatcatgccttccttcctctttactgtgttacaaattgtataatgaacatatattattaattatgtggggcaatgtatataactggcttaagtttataaaataacgtaccagcatccggtgcatttggctttattacactgcagggccatccaaagcaagagcctctagacctctgggtggtgaacaaatctcaactggggtttcgtgcctacctggacgacatctgctcgtcaatgtgtagttaacatcctgacagacccttctgccgctggatatgtgaggggcacagcacagggctctggaagtccctgctgactgctcgaagcctttctccctgctaaaacctctgaccaaatgcttaataatatctgctgtaggc

SEQ ID NO: 288698 - DNA, 367 bp, Homo sapiens
tctccaggcaattcatccaggctgtcccctgcaagctgctcagcccaccagatctgctttggggagcgcattaaacatggttatgcaatgattgggtggcggatgccatagacatctggccctatgacaagggccatccaaagcaagagcctctagacctctgggtggtgaacaaatctcaactggggtttcgtgcctacctggacgacatctgctcgtcaatgtgtagttaacatcctgacagacccttctgccgctggatatgtgaggggcacagcacagggctctggaagtccctgctgactgctcgaagcctttctccctgctaaaacctctgaccaaatgcttaataatatctgctgtaggc

SEQ ID NO: 288699 - DNA, 1919 bp, Homo sapiens
  misc_feature (2)..(2): n is a, c, g, or t
  misc_feature (207)..(207): n is a, c, g, or t
  misc_feature (558)..(558): n is a, c, g, or t
  misc_feature (660)..(660): n is a, c, g, or t
anacagtactgtgctgctttttcaaccatggagaggtcacccgtgtgatgtggacacaacctctccgtgaaagtttttcctatccattccttgtacttcagatgtatattttaactttgattctcagggactgtattattcctatttcaagactattgtggaaacaccctcatttttgaatggagtatggatgattatgaatgatanactgactgaatacccccttgttattaatacattaaaaagattcaatctttaccctgaggtaattttggccagctggtactggatttataccaaaataatggacttcattgcaattcaaaccaagatatgtcggacggttaccagaggagaaggactcagtcctactgaaagctgtgaaggattgggagatcttgcttgcttctatgttgctgtaatttttattttaaatggactaatgatggcattattcttcatatatggcacatatttaagtggcagccgattaggaggcctggttacagtgttgtgcttctttttcagtcatggagagtgtacctgtgtaatgtgganaccacctctccgcgaaagcttctcatatccatttcttgttcttcagatgttgcttgtgactcatattctcagggctacaaaactttatagaggaagtttgantgcactctgcatttccaatttatttttcatgcttccttggcagtttgctcagtttgtacttcttactcagattgcatcattatttgcagtgtatgttgtcgggtacattgatatatgtaaattatggaagatcatttatatacacatgatttctcttgcactttgttttgttgtgatgtttgggaactcaatgttattattatgctgcttctttggtaattatttggggtattctggcaatgaaaccacatttcctgaaaataaatgtatctgaacttagtttatgggttattcaaggatgtttttggttatttggaactgtcatacttaaatacttgacatctaaaatttttggtattgcagatgacatggagtttcactcttgttgcccaggctggagtgcaatggtgtgatcttggctcaccgcaaccttcctctcccaggttcaagcgattctcctgcctcagcctcccgagtagctaggattacagtgaccgcccacccgcacctgctgaacagcaaggtccacggagtaggaactgaacgtgtcagggactatgtgtggcactgtatggcaagtctccaagactgggaagcaccgctttacatagtcctcatggattccaaagcatgagttgggctgcttttgaatagtgggagacgggagtttaccccgatcacagaaaccataccaactgaaagacaaatcagcatcttgctggacgacccctcacagagctcctagatccttgaagtgtgaacttcagcagctgagagagatggggtctcactatgttgcccaggctggtcttgaactcctggactcaagcaatcctctcacctcagcctcccaaagtgctgggattacagattttataaatattgttgatctttttgaaaaaccaactgttggcttcattttctttattgtgtaatactaccttagaggacagcagttcctaatacctacttttattatgagtctctgccatttataaagaactgtggacagcacagggaatgggggaagaaaactctggtgcagcttgaatcttggtagcaaaacagtgacttcatcagaaaattttgtcactctctattagatataatggagtttgaccatttggaatttggaatttttcaaatgaatatgacaaaaatttaaaaaactcttgtattactatgtgataacacagatctttacaactttatgtttgttttatcaattacatattaaagatagaaaatggaatgtgttg

SEQ ID NO: 288700 - DNA, 2177 bp, Homo sapiens
  misc_feature (2)..(2): n is a, c, g, or t
  misc_feature (207)..(207): n is a, c, g, or t
  misc_feature (558)..(558): n is a, c, g, or t
  misc_feature (660)..(660): n is a, c, g, or t
anacagtactgtgctgctttttcaaccatggagaggtcacccgtgtgatgtggacacaacctctccgtgaaagtttttcctatccattccttgtacttcagatgtatattttaactttgattctcagggactgtattattcctatttcaagactattgtggaaacaccctcatttttgaatggagtatggatgattatgaatgatanactgactgaatacccccttgttattaatacattaaaaagattcaatctttaccctgaggtaattttggccagctggtactggatttataccaaaataatggacttcattgcaattcaaaccaagatatgtcggacggttaccagaggagaaggactcagtcctactgaaagctgtgaaggattgggagatcttgcttgcttctatgttgctgtaatttttattttaaatggactaatgatggcattattcttcatatatggcacatatttaagtggcagccgattaggaggcctggttacagtgttgtgcttctttttcagtcatggagagtgtacctgtgtaatgtgganaccacctctccgcgaaagcttctcatatccatttcttgttcttcagatgttgcttgtgactcatattctcagggctacaaaactttatagaggaagtttgantgcactctgcatttccaatttatttttcatgcttccttggcagtttgctcagtttgtacttcttactcagattgcatcattatttgcagtgtatgttgtcgggtacattgatatatgtaaattatggaagatcatttatatacacatgatttctcttgcactttgttttgttgtgatgtttgggaactcaatgttattattatgctgcttctttggtaattatttggggtattctggcaatgaaaccacatttcctgaaaataaatgtatctgaacttagtttatgggttattcaaggatgtttttggttatttggaactgtcatacttaaatacttgacatctaaaatttttggtattgcagatgacatggagtttcactcttgttgcccaggctggagtgcaatggtgtgatcttggctcaccgcaaccttcctctcccaggttcaagcgattctcctgcctcagcctcccgagtagctaggattacagtgaccgcccacccgcacctgctgaacagcaaggtccacggagtaggaactgaacgtgtcagggactatgtgtggcactgtatggcaagtctccaagactgggaagcaccgctttacatagtcctcatggattccaaagcatgagttgggctgcttttgaatagtgggagacgggagtttaccccgatcacagaaaccataccaactgaaagacaaatcagcatcttgctggacgacccctcacagagctcctagatccttgaagtgtgaacttcagcagctgagagagatggggtctcactatgttgcccaggctggtcttgaactcctggactcaagcaatcctctcacctcagcctcccaaagtgctgggattacaggtatgagccactgcattcggcccaatttctttaatagataatagggctattcatattttctttttgcaactgtgttggtaatgcgaatctttaaaaaaatttgtatatttcatttatgttgttaaactggttagcataaagttgttcacaatattcccctattttctgttcttttaatttctgtaagagctacagtaatgtccctctttcatccctaatgttggtaatttgtatcttctttctttttatctttaccagattttataaatattgttgatctttttgaaaaaccaactgttggcttcattttctttattgtgtaatactaccttagaggacagcagttcctaatacctacttttattatgagtctctgccatttataaagaactgtggacagcacagggaatgggggaagaaaactctggtgcagcttgaatcttggtagcaaaacagtgacttcatcagaaaattttgtcactctctattagatataatggagtttgaccatttggaatttggaatttttcaaatgaatatgacaaaaatttaaaaaactcttgtattactatgtgataacacagatctttacaactttatgtttgttttatcaattacatattaaagatagaaaatggaatgtgttg

SEQ ID NO: 288701 - DNA, 1583 bp, Homo sapiens
  misc_feature (2)..(2): n is a, c, g, or t
  misc_feature (207)..(207): n is a, c, g, or t
  misc_feature (558)..(558): n is a, c, g, or t
  misc_feature (660)..(660): n is a, c, g, or t
  misc_feature (1056)..(1056): n is a, c, g, or t
  misc_feature (1117)..(1117): n is a, c, g, or t
  misc_feature (1124)..(1124): n is a, c, g, or t
  misc_feature (1126)..(1126): n is a, c, g, or t
anacagtactgtgctgctttttcaaccatggagaggtcacccgtgtgatgtggacacaacctctccgtgaaagtttttcctatccattccttgtacttcagatgtatattttaactttgattctcagggactgtattattcctatttcaagactattgtggaaacaccctcatttttgaatggagtatggatgattatgaatgatanactgactgaatacccccttgttattaatacattaaaaagattcaatctttaccctgaggtaattttggccagctggtactggatttataccaaaataatggacttcattgcaattcaaaccaagatatgtcggacggttaccagaggagaaggactcagtcctactgaaagctgtgaaggattgggagatcttgcttgcttctatgttgctgtaatttttattttaaatggactaatgatggcattattcttcatatatggcacatatttaagtggcagccgattaggaggcctggttacagtgttgtgcttctttttcagtcatggagagtgtacctgtgtaatgtgganaccacctctccgcgaaagcttctcatatccatttcttgttcttcagatgttgcttgtgactcatattctcagggctacaaaactttatagaggaagtttgantgcactctgcatttccaatttatttttcatgcttccttggcagtttgctcagtttgtacttcttactcagattgcatcattatttgcagtgtatgttgtcgggtacattgatatatgtaaattatggaagatcatttatatacacatgatttctcttgcactttgttttgttgtgatgtttgggaactcaatgttattattatgctgcttctttggtaattatttggggtattctggcaatgaaaccacatttcctgaaaataaatgtatctgaacttagtttatgggttattcaaggatgtttttggttatttggaactgtcatacttaaatacttgacatctaaaatttttggtattgcagatgacgctcatattggcaacttactaacatcanaattctttagttataaggattttgatactttattgtatacctgtgcagcggagtttgactntatggananagagactccactgagatacacaaagacattattgcttccagttgttcttgtagtgtttgttgctattgttagaaagattattagtgatatgtggggtgtcttagctaaacaacagacacatgtaagaaaacaccagtttgatcatggagagctggtttaccatgcattgcaattgttagcatatacagcccttggtatattaattatgagactaaaactcttcttgacaccacacatgtgtgttatggcatcactgatctgctcaagacagctatttggatggctcttttgcaaagtacatcctgttgctattgtgtttgctatattagcagcaatgtcaatacaaggttcagcaaatctgcaaacccagtggaatattgtaggggagttcagcaatttgccccaagaagaacttatagaatggatcaaatatagtaataaacacagaatgcgccag

SEQ ID NO: 288702 - DNA, 947 bp, Homo sapiens
  misc_feature (2)..(2): n is a, c, g, or t
  misc_feature (207)..(207): n is a, c, g, or t
  misc_feature (558)..(558): n is a, c, g, or t
  misc_feature (660)..(660): n is a, c, g, or t
anacagtactgtgctgctttttcaaccatggagaggtcacccgtgtgatgtggacacaacctctccgtgaaagtttttcctatccattccttgtacttcagatgtatattttaactttgattctcagggactgtattattcctatttcaagactattgtggaaacaccctcatttttgaatggagtatggatgattatgaatgatanactgactgaatacccccttgttattaatacattaaaaagattcaatctttaccctgaggtaattttggccagctggtactggatttataccaaaataatggacttcattgcaattcaaaccaagatatgtcggacggttaccagaggagaaggactcagtcctactgaaagctgtgaaggattgggagatcttgcttgcttctatgttgctgtaatttttattttaaatggactaatgatggcattattcttcatatatggcacatatttaagtggcagccgattaggaggcctggttacagtgttgtgcttctttttcagtcatggagagtgtacctgtgtaatgtgganaccacctctccgcgaaagcttctcatatccatttcttgttcttcagatgttgcttgtgactcatattctcagggctacaaaactttatagaggaagtttgantgcactctgcatttccaatttatttttcatgcttccttggcagtttgctcagtttgtacttcttactcagattgcatcattatttgcagtgtatgttgtcgggtacattgatatatgtaaattatggaagatcatttatatacacatgatttctcttgcactttgttttgttgtgatgtttgggaactcaatgttattattatgctgcttctttggtaattatttgggtaaatattccttacttatttggctgtttttgaaattaatggtttaacaatttcttcttc

SEQ ID NO: 288703 - DNA, 642 bp, Homo sapiens
ccccacctccccccacccccgaacctcacggccaccctgggaaggaggcttgacttgtgacatccacccctcttcacggctgaggaactttggccccgagcgaggaagcgaccggcccacggccacacgcccggagtggggggcagcatcttctactatgtgcatctacattggatggcagtggagcaacacagattgttttctgacaaaaatcagccaagtactaggagaggcaggactttagaagtggaggagatggagaaggaagcttaggttactatggagtgtgcaaaaaggtcctgtggatttagataccaccacacacaaatgctgttgttggaaggtacctgcccagataaggactgcatttcctctagcatccagatgggaccaaatgactgctggccaatagaagtgagtggaaaggactgactccagttccaggttgggcctccaactgctctgggcacgtcgatggaacagaacaccacctccaccccaataccaccaattcaactttacatgaattataagcgagaaataacttggactgtgttaagtcattgagtttctggggtttaactgttattatagttaagaatgactttaactaatatagtcaatgacatctaaaaggagtta

SEQ ID NO: 288704 - DNA, 457 bp, Homo sapiens
ccccacctccccccacccccgaacctcacggccaccctgggaaggaggcttgacttgtgacatccacccctcttcacggctgaggaactttggccccgagcgaggaagcgaccggcccacggccacacgcccggagtggggggcagcatcttctactatgtgcatctacattggatggcagtggagcaacacagattgttttctgacaaaaatcagccaagtactagaagtgagtggaaaggactgactccagttccaggttgggcctccaactgctctgggcacgtcgatggaacagaacaccacctccaccccaataccaccaattcaactttacatgaattataagcgagaaataacttggactgtgttaagtcattgagtttctggggtttaactgttattatagttaagaatgactttaactaatatagtcaatgacatctaaaaggagtta

SEQ ID NO: 288705 - DNA, 392 bp, Homo sapiens
ttattcctttacagtctcatctcccctaacctccttcataaactccacacaaactctagacatcctgatctgttatgtaagtattctaggttcttttgtgcttcagcatatgttctacctaggatgcccttctctcctttatccatgtgaatgattcctactcttccttcccagcttagatcaaacagtcagttctaaggagaaccttctctactccacttttctctcccttctctaacaacagtatccccatcccacccccattcaggagtttctttcttcatattcacattattccttgtatttactgcatggcattttaatatctgccaagagcaagggctgtgaagtcagactgcctgggtgtaaatctgggcccagaatttactatg

SEQ ID NO: 288706 - DNA, 2876 bp, Homo sapiens
  misc_feature (2876)..(2876): n is a, c, g, or t
cctgcggcgggctttagggagtggtccctggctgtggatagatctgctgatgagtccaggccccggtccattctcctcgcgctgcaaggatgctcctgggatttcggagaggccgcaggagtcatttcaaacagggtctcgctctgtcgcccaggctagagtgcagtggtgcgatcatagctcactgcatcctcgaactcctgggctcaagcgatcttcccaccccagcctcccgaggagctgagactacaggcgcgcgccactactcccggctaattgttcaatatttttgtggaaacagggatcttgctatgttcctatggtggtcttgagctccttagcctcctaaagtgttggtatcacaggcgtgagccactgtgcccggcgttaacaatcttctgccccagggtcggccacagttggacaggagcaccctgcctcccctgtagcattcgtccccgtgcccggagttaactcctggacgacgtacacctgctgcactgctggatatagccattcttcatttttccctcctccacccaccatgtacaccccatcagcaagtcccatccgatatacccactacatacatctgccagctgttcccatctccacccacaccccggcctccagcatctgtctggactgctgcggcagatcctcactggtttctctgcttccactctcgcccttcccctaggtccattctccacgtagcagccaaggggattcttatatttatttattatttaatttagttttagagacagggtcttgtcctgatgcccaggctggagtacagtggcatgatcatagctcactgtggcttcaacctcttgggctcaagtgatcctcctgcctcaggctcctgagtagctgggactacaggtgtgcaccaccacacctaggtattttttatttattttattttttgcctcacactctgccaagtctcaatgcctggctaattttaaaaattattttgtagaggccacgtgaggtggctctcacctgtaatccagcactttgggaggctgaggcaggcggatcatttgaggtcaggagttcaagattagcctggccaacatggtgaaaacccatctctactaaaaatacaaaaattagcgggcgtggtggtgggcacctgtaatcccagctacacgggaggttgaggtgggataatcgcttaaacccgagaggcagaggttgcagtgagccaagattgtgccactgcactccagcctgggcgacaaagctagactctgcctcaaaaaaacataattttttttttttggtagagatggggtctgggtatgctgcccaggctggtcttaaaccttggctcaagcaatcctctcaccttggcctccagagtgttgggattacaggtgtgagccactgcatctggcttgagtttttatttaaagccccaaacattaatgagtccctgctgtgtgctgatacccacaactgacagcttatggccacacggtctgtaggatagacaagcccataaataattctgtacacaatggtaaaacaagaactgctgttgatgtgtgtaccagaagggcagtgacgtcagcctggagagttggcctgggcctggcagggagtaaggaaagaattctgggtgcagaagacagcaaataccaaggcctaaaaaagaatgaattatttgctgtttgggaaatggaagcccacgctgagtgctgaagcacagggactctgcgcaggaagaggaggggaagcaagaaatgaatttgggtccttgtgatggcagtggctgctgccatcacgctgtgtggctagggctgcacacttcatggagccggtggaagccccgtccctcatgagttgggactggagccgcaaaccgctgctgcagacccaggccttctgctctatggagcaggcaggagccccaccctcttgggcagggctacagccacccaaactgcagctgtggatccgagcctctctgctcctgggggagccgggaacaggcagaatttgcccttccagatgcagctgcagccgcgcaggcaggagccagggacaagtgggagccctgcctcttccaagttggcggggtgggagctcccaggtgcagctgtggctgcccccccaggcacaggacgagggcatctctgtagcctgcaccatcggccatcccaggaaggacagcccccttcaccctccatccctgcaggctcaggggtgtctgcttccactgcctggcctctctccactccagcaactgctctgatcttggaggggagtcggagccaagacctgcagccatgaatggcagcaggaggaagggggtggggtccccagtaaggccccaccctcaggccagggagggcctgaattctgggggctgggctgccagtccctctgaccagagtggaaactcgtggagccttttctgggcctgccaatggcccaatcagcacacacttcttccccgctgaggtccataaaaaccctgggctcagccagagcagcgcagagaatagccagaggatgaagatggtagagacgaggggacaggatgaccagctgcagagagcagtaccctctctgctgatagctggagacggtggggtgaccagctacagagaggagtaccttctccgctgaaagctacagagaccacctgccagcagagaggagctacactctgctgcgagcttcagagacctgcagagacattggaatgacttgcctgcggagaggagccactctctccagggcctcctctctgttgagagctgaatgattgagctcatgggacaatctgtctccagagaggagctacccactcctctgagctcttctaacactaaataaaactcctcttcacccttcan

SEQ ID NO: 288707 - DNA, 506 bp, Homo sapiens
ctgtgcgtgagctctgggggccttttcttgtttggtcaaaaaaaacaaggtgctgctgctgttcatgccctctaagttgtacaaaccttttctgccctctcccctagcccttctctatcctcctgagcaagtactttattctcttttgtttagttgttacttttgtttgtttgttttgagacagggtctcactctgttacccaggatcgcttgagcctgggaggttgaggctgcagtgagctatgatcatgccactgcactccagcctgggcaaccaggtgagaccctgcctcaaaaataatacaataaaaagtaaaagcagccctggggaaatggagacagtggacaaagcaggctggggcaccaggtgtgcatgtgggtgtgagtctgtcatgagagctgtcctgaatgcccttaacgccactgaactgtatgctggaaaacagtgacaacagtggattttgttatatagacaattaaaaaagaaataacacccaggcctgctt

SEQ ID NO: 288708 - DNA, 506 bp, Homo sapiens
ccaggatgccaaggagggcggggcaggcaaggcagagaggcacctgggtgcttgtgagattccaggaaaggacagaaacattggggtgcttctgggaggaactggcacgccccggcccttgcagagtggacaaggtttcaggagctacagaagggtggagagggcccccaggagcacagcaggcactcagagcagcaggagggggatcgcttgagcctgggaggttgaggctgcagtgagctatgatcatgccactgcactccagcctgggcaaccaggtgagaccctgcctcaaaaataatacaataaaaagtaaaagcagccctggggaaatggagacagtggacaaagcaggctggggcaccaggtgtgcatgtgggtgtgagtctgtcatgagagctgtcctgaatgcccttaacgccactgaactgtatgctggaaaacagtgacaacagtggattttgttatatagacaattaaaaaagaaataacacccaggcctgctt

SEQ ID NO: 288709 - DNA, 2744 bp, Homo sapiens
cctgcggcgggctttagggagtggtccctggctgtggatagatctgctgatgagtccaggccccggtccattctcctcgcgctgcaaggatgctcctgggatttcggagaggccgcaggagtcatttcaaacacatcatccatggccttttacctgcagccagcgttgctccgaaggcagctgtgccacgcacacctcctccccgcagccccaacccatctccagagagaccaagatctgctctggcagcagccattctggcgacaacattgactgggcggacggttgctattcctcagcctcgccagaggtcccggtctgagagtgatgtgagcagtgttgaacaggacagcttcatcgagccctatgccaccacctcacagctgaggcctcgaccaaattggcagagtgagatgggaagaagatcttctttgccatcctttgaaacactggactatggggacgaagaggacattgaaactcagctgtcatccagcggcaaggaattgggggatgtcagtgcccgggaggacagaggaggccacagtgatgacctgtacgctgtgccacacagaaatcaggtgccattgttacatgaggtgaacagtgaagacgatgaaaatatttctcatcaagatgggtttccaggctcccctcctgcaccacagcggacacaacaaaaagatggtaaacaccctgttctgaatttaaaggatgaaaaacctccattatgtgagaaacctccaccctccccagatataactggtagagcacgtcaaagatatacagaaataaccagagaaaagtttgaggcattaaaagaagaaaatatggacctaaacaatatgaatcaaagccttacccttgaactaaacacaatgaaacaagcaatgaaagaactacagttaaaacttaagggaatggaaaaagagaagagaaagctcaaagaggctgagaaggcgtcgtcacaggaagttgctgcacctgaattactttatctgcgaaaacaagctcaagaactggtggatgaaaatgatggattgaaaatgactgtccatcgtttgaatgtagaactcagtcgatatcagacaaaattcaggcatttgtccaaggaagagagcttaaatattgaaggcctcccatccaagggccctataccaccctggttgttggatataaagtacctgtcaccattgttgctggcttatgaagatatgatgaaagagaaggacgagctcaatgccaccctcaaggaggaaatgagaatgtttaggatgcgagtccaagaagtggtgaaagaaaatgaagaattgcaccaagagttaaataagagtagtgctgttaccagtgaggaatggcgtcagcttcagactcaagcaaaactggttttagaggaaaacaagttgttgctggagcagttggagattcagcaaaggaaagccaaggacagccaccaggagcgcctccaagaagtttctaagctgactaaacaactaatgctcctggaggcaaaaacccacggccaggaaaaggagctggcggagaacagggaacagctggagattttacgtgccaaatgccaagaactcaaaacacactcggatggcaaaatcgcagtggaagttcataaatcaattgtgaatgaattaaaaagccaattacagaaggaagaagagaaagaaagggctgagatggaggagttgatggagaagctgacagtcctgcaagcgcagaagaagagcctgctgttagagaagaacagtttgacagagcaaaacaaagcactggaagccgaacttgaacgagcacagaaaatcaataggaaatctcaaaagaaaattgaggtcctcaaaaagcaggtggaaaaagccatggggaacgaaatgtctgctcatcagtacctggcaaaccttgttggcctggcagaaaatataacccaggaacgtgacagtcttatgtgtttggcaaaatgtttagaaagtgagaaggatggagtgcttaataaagtcataaaaagcaacattcgcctgggaaagttagaggaaaaagtcaagggctacaagaagcaggcagcactgaagctgggggacatcagtcaccgtctgctggagcagcaggaggacttcgccggcaagacagcccagtaccggcaggagatgcggcacctgcaccaggtgctgaaggacaagcaggaggtgctggaccaggcgctgcagcagaacagagaaatggaaggtgaacttgaagttatttgggaatctaccttcagggaaaaccgaagaatccgagaacttctccaggacacactcacgaggacaggcgtgcaggacaaccccagagctctggttgcccccagcctcaatggcgtctctcaggcagacctgctggacggctgcgatgtctgctcctatgacctgaagtctcatgcccccacctgctagaatctgcgggagcccgtggtgtagcctcctctggcctgaaaggtctgcctcacacaggccttccctgcagggcagcccatggtggcagccggaggtgcgtaagcccactgaacgctgcagggcagggaagaaataaatggtctcatagtttaatccattgataacattttgctttattttttaatttttttttttttttagagctagggtctcactctgttgcccatgctggagtacagtggtgcaatcatagctcacggcagcctcaaacatgtttgagatccttctgcttcagcctcctga

SEQ ID NO: 288710 - DNA, 799 bp, Homo sapiens
ccaggatgccaaggagggcggggcaggcaaggcagagaggcacctgggtgcttgtgagattccaggaaaggacagaaacattggggtgcttctgggaggaactggcacgccccggcccttgcagagtggacaaggtttcaggagctacagaagggtggagagggcccccaggagcacagcaggcactcagagcagcaggagggggtttggtcagagcttgggtgggaaatgaggccggactgcacagaggagaactgggtctgctgggaggggctcctccttccccatgctgcaagtgtctggtctgagcagggaacccttctctttcttggtcctggtgaggtttcatacggcattggaagattcctggtcaagcagctgtagaacatgacccaggcacgcgagtgagccttgctggctttgccattatttaaaagcagccctgggcatggtgatggcgcctatggtttcagctactcaggaggctgaggtgggaggatcgcttgagcctgggaggttgaggctgcagtgagctatgatcatgccactgcactccagcctgggcaaccaggtgagaccctgcctcaaaaataatacaataaaaagtaaaagcagccctggggaaatggagacagtggacaaagcaggctggggcaccaggtgtgcatgtgggtgtgagtctgtcatgagagctgtcctgaatgcccttaacgccactgaactgtatgctggaaaacagtgacaacagtggattttgttatatagacaattaaaaaagaaataacacccaggcctgctt

SEQ ID NO: 288711 - DNA, 961 bp, Homo sapiens
  misc_feature (961)..(961): n is a, c, g, or t
cctgcggcgggctttagggagtggtccctggctgtggatagatctgctgatgagtccaggccccggtccattctcctcgcgctgcaaggatgctcctgggatttcggagaggccgcaggagtcatttcaaacagggtctcgctctgtcgcccaggctagagtgcagtggtgcgatcatagctcactgcatcctcgaactcctgggctcaagcgatcttcccaccccagcctcccgaggagctgagactacaggcgcgcgccactactcccggctaattgttcaatatttttgtggaaacagggatcttgctatgttcctatggtggtcttgagctccttagcctcctaaagtgttggtatcacaggcgtgagccactgtgcccggcgttaacaatcttctgccccagggtcggccacagttggacaggagcaccctgcctcccctgtagcattcgtccccgtgcccggagttaactcctggacgacgtacacctgctgcactgctggatatagccattcttcatttttccctcctccacccaccatgtacaccccatcagcaagtccataaaaaccctgggctcagccagagcagcgcagagaatagccagaggatgaagatggtagagacgaggggacaggatgaccagctgcagagagcagtaccctctctgctgatagctggagacggtggggtgaccagctacagagaggagtaccttctccgctgaaagctacagagaccacctgccagcagagaggagctacactctgctgcgagcttcagagacctgcagagacattggaatgacttgcctgcggagaggagccactctctccagggcctcctctctgttgagagctgaatgattgagctcatgggacaatctgtctccagagaggagctacccactcctctgagctcttctaacactaaataaaactcctcttcacccttcan

SEQ ID NO: 288712 - DNA, 586 bp, Homo sapiens
ggggatgtcagtgcccgggaggacagaggaggccacagtgatgacctgtacgctgtgccacacagaaatcaggtgttttctatgttcccagttttcttcttgacattcaccctgatgttaacttttggtaaattagtgcattgctaaggatttcttctctctattctgcatttgatagcatttgctttggggcttatttttttaaacgtgtccagcctcatttctatctggttagattaaaacataaacttctttcctttatcttgcaaaaacaaagattaacatcttcatattgttaatgtggagttccattcacagcttagcaatctcgttcttttctttgaccttggaagctaaatttcctatcacttttatggtatcattttgcacactgcagcctttctttaaattcatgcctgacggggaagatcgtcatgcgtgtctcaatgggagctgacgtgctttgagtgtttactgtgagcgctcccgtttctaactcctgtgtgcatttatcttagctgacccccactgactcgctgaggaattcccttcattgccctgtcacacatcagggcactgcacacag

SEQ ID NO: 288713 - DNA, 2852 bp, Homo sapiens
cctgcggcgggctttagggagtggtccctggctgtggatagatctgctgatgagtccaggccccggtccattctcctcgcgctgcaaggatgctcctgggatttcggagaggccgcaggagtcatttcaaacacatcatccatggccttttacctgcagccagcgttgctccgaaggcagctgtgccacgcacacctcctccccgcagccccaacccatctccagagagaccaagatctgctctggcagcagccattctggcgacaacattgactgggcggacggttgctattcctcagcctcgccagaggtcccggtctgagagtgatgtgagcagtgttgaacaggacagcttcatcgagccctatgccaccacctcacagctgaggcctcgaccaaattggcagagtgagatgggaagaagatcttctttgccatcctttgaaacactggactatggggacgaagaggacattgaaactcagctgtcatccagcggcaaggaattgggggatgtcagtgcccgggaggacagaggaggccacagtgatgacctgtacgctgtgccacacagaaatcaggtgccattgttacatgaggtgaacagtgaagacgatgaaaatatttctcatcaagatgggtttccaggctcccctcctgcaccacagcggacacaacaaaaagatggtaaacaccctgttctgaatttaaaggatgaaaaacctccattatgtgagaaacctccaccctccccaggtcccacattgttacaagatctttggggtgtcgcttttctggtcggaaatgtctgtggtgccagtgtgcctttgcctgagttcttgtcctgcgtccagaaagaatgagatataactggtagagcacgtcaaagatatacagaaataaccagagaaaagtttgaggcattaaaagaagaaaatatggacctaaacaatatgaatcaaagccttacccttgaactaaacacaatgaaacaagcaatgaaagaactacagttaaaacttaagggaatggaaaaagagaagagaaagctcaaagaggctgagaaggcgtcgtcacaggaagttgctgcacctgaattactttatctgcgaaaacaagctcaagaactggtggatgaaaatgatggattgaaaatgactgtccatcgtttgaatgtagaactcagtcgatatcagacaaaattcaggcatttgtccaaggaagagagcttaaatattgaaggcctcccatccaagggccctataccaccctggttgttggatataaagtacctgtcaccattgttgctggcttatgaagatatgatgaaagagaaggacgagctcaatgccaccctcaaggaggaaatgagaatgtttaggatgcgagtccaagaagtggtgaaagaaaatgaagaattgcaccaagagttaaataagagtagtgctgttaccagtgaggaatggcgtcagcttcagactcaagcaaaactggttttagaggaaaacaagttgttgctggagcagttggagattcagcaaaggaaagccaaggacagccaccaggagcgcctccaagaagtttctaagctgactaaacaactaatgctcctggaggcaaaaacccacggccaggaaaaggagctggcggagaacagggaacagctggagattttacgtgccaaatgccaagaactcaaaacacactcggatggcaaaatcgcagtggaagttcataaatcaattgtgaatgaattaaaaagccaattacagaaggaagaagagaaagaaagggctgagatggaggagttgatggagaagctgacagtcctgcaagcgcagaagaagagcctgctgttagagaagaacagtttgacagagcaaaacaaagcactggaagccgaacttgaacgagcacagaaaatcaataggaaatctcaaaagaaaattgaggtcctcaaaaagcaggtggaaaaagccatggggaacgaaatgtctgctcatcagtacctggcaaaccttgttggcctggcagaaaatataacccaggaacgtgacagtcttatgtgtttggcaaaatgtttagaaagtgagaaggatggagtgcttaataaagtcataaaaagcaacattcgcctgggaaagttagaggaaaaagtcaagggctacaagaagcaggcagcactgaagctgggggacatcagtcaccgtctgctggagcagcaggaggacttcgccggcaagacagcccagtaccggcaggagatgcggcacctgcaccaggtgctgaaggacaagcaggaggtgctggaccaggcgctgcagcagaacagagaaatggaaggtgaacttgaagttatttgggaatctaccttcagggaaaaccgaagaatccgagaacttctccaggacacactcacgaggacaggcgtgcaggacaaccccagagctctggttgcccccagcctcaatggcgtctctcaggcagacctgctggacggctgcgatgtctgctcctatgacctgaagtctcatgcccccacctgctagaatctgcgggagcccgtggtgtagcctcctctggcctgaaaggtctgcctcacacaggccttccctgcagggcagcccatggtggcagccggaggtgcgtaagcccactgaacgctgcagggcagggaagaaataaatggtctcatagtttaatccattgataacattttgctttattttttaatttttttttttttttagagctagggtctcactctgttgcccatgctggagtacagtggtgcaatcatagctcacggcagcctcaaacatgtttgagatccttctgcttcagcctcctga

SEQ ID NO: 288714 - DNA, 1330 bp, Homo sapiens
cctgcggcgggctttagggagtggtccctggctgtggatagatctgctgatgagtccaggccccggtccattctcctcgcgctgcaaggatgctcctgggatttcggagaggccgcaggagtcatttcaaacacatcatccatggccttttacctgcagccagcgttgctccgaaggcagctgtgccacgcacacctcctccccgcagccccaacccatctccagagagaccaagatctgctctggcagcagccattctggcgacaacattgactgggcggacggttgctattcctcagcctcgccagaggtcccggtctgagagtgatgtgagcagtgttgaacaggacagcttcatcgagccctatgccaccacctcacagctgaggcctcgaccaaattggcagagtgagatgggaagaagatcttctttgccatcctttgaaacactggactatggggacgaagaggacattgaaactcagctgtcatccagcggcaaggaattgggggatgtcagtgcccgggaggacagaggaggccacagtgatgacctgtacgctgtgccacacagaaatcaggtgccattgttacatgaggtgaacagtgaagacgatgaaaatatttctcatcaagatgggtttccaggctcccctcctgcaccacagcggacacaacaaaaagatggtaaacaccctgttctgaatttaaaggatgaaaaacctccattatgtgagaaacctccaccctccccagatataactggtagagcacgtcaaagatatacagaaataaccagagaaaagtttgaggcattaaaagaagaaaatatggacctaaacaatatgaatcaaagccttacccttgaactaaacacaatgaaacaagcaatgaaagaactacagttaaaacttaagggaatggaaaaagagaagagaaagctcaaagaggctgagaaggcgtcgtcacaggaagttgctgcacctgaattactttatctgcgaaaacaagctcaagaactggtggatgaaaatgatggattgaaaatgactgtccatcgtttgaatgtagaactcagtcgatatcagacaaaattcaggcatttgtccaaggaagaggtaacgtttccgattgtgaaaatcagcttttcagatttttaagcctttactgttgaattgatttccaatcttgagaggttcttatttattataatttgatgtaagaaaagctctgtccaaggcacaatgtttctaaggaccattctgtttcttgcctccttcccttccttcttccccgtaataaaggcaataaagactgttaaacattggga

SEQ ID NO: 288715 - DNA, 915 bp, Homo sapiens
cctgcggcgggctttagggagtggtccctggctgtggatagatctgctgatgagtccaggccccggtccattctcctcgcgctgcaaggatgctcctgggatttcggagaggccgcaggagtcatttcaaacacatcatccatggccttttacctgcagccagcgttgctccgaaggcagctgtgccacgcacacctcctccccgcagccccaacccatctccagagagaccaagatctgctctggcagcagccattctggcgacaacattgactgggcggacggttgctattcctcagcctcgccagaggtcccggtctgagagtgatgtgagcagtgttgaacaggacagcttcatcgagccctatgccaccacctcacagctgaggcctcgaccaaattggcagagtgagatgggaagaagatcttctttgccatcctttgaaacactggactatggggacgaagaggacattgaaactcagctgtcatccagcggcaaggaattgggggatgtcagtgcccgggaggacagaggaggccacagtgatgacctgtacgctgtgccacacagaaatcaggtgccattgttacatgaggtgaacagtgaagacgatgaaaatatttctcatcaagatgggtttccaggctcccctcctgcaccacagcggacacaacaaaaagcaggtgagaccctgcctcaaaaataatacaataaaaagtaaaagcagccctggggaaatggagacagtggacaaagcaggctggggcaccaggtgtgcatgtgggtgtgagtctgtcatgagagctgtcctgaatgcccttaacgccactgaactgtatgctggaaaacagtgacaacagtggattttgttatatagacaattaaaaaagaaataacacccaggcctgctt

SEQ ID NO: 288716 - DNA, 2271 bp, Homo sapiens
tgcggcagcaatatgagctaggtccggatcctgttagacaccggcgggcgcgagccgttgcaggtacctgggggtggttaagttggtgacatggctcagaagtttatttctttaaatttttaagttttttttctttttagtcttcagaaaggcaacagtagtcttttaacgtcactgttaaaagtgtaagactcttttactccctgagagtcccctttccctttcttgcgtcctttcctctttattctttttttttttttttttttttttactgagacggagtctcactctgtcgcccaggctggagtgcagtggcgcgatctcggctcactgcaaactccgcctcccgggttcaccctttctctttattcttatcccggtcagactcgccccctcctccaagacatctctctgttttattttatttgattttagttctctttgggtgatcgctccttccctcttcaacggatccctccccgcctccatcctcgttctgtgggagagaccagccttctggtgctgcagtcaggaatggagcttgacagcgctctggaagccccatcgcaggaagactctaatttgtccgaggagttgtctcactccgcctttggacaggccttctccaagattttacactgtcttgcccgcccggaggcacgacgaggcaacgtaaaagatgcagttcttaaagacctcggtgatctaatagaagccacaggatttgataggttatttgaggggactggtgcacggctccgcggaatgccggagacactggggcaggtagcaaaagccctggagaagtatgcagccccctccaaggaggaggaaggtggaggtgatgggcactccgaagcggccgagaaagcagcccaagttgggttactgtttcttaaactgttagggaaagttgagactgctaagaattccctggtcggccctgcatggcagacgggcctgcatcacttggcaggacccgtttatatttttgccatcacacacagcttggagcaaccatggaccactccgagatctcgggaagttgctagggaggtgctcacctcactgcttcaagttactgaatgcggttctgtggcaggattcctacatggagaaaatgaagatgagaaagggagactttcggtgatactagggcttctcaaacccgacttgtataaggaatcctggaagaataaccctgccatcaaacatgttttctcatggactctgcaacaggtcactcggccctggctgagccagcatctggaaagggtacttcccgcatcattggtcatttcagatgactatcagactgagaacaaaatcctgggtgtacactgtctccatcacattgtgcttaatgtgccagctgctgatttgctccagtataacagagcccaggtcctataccatgccatttccaaccacctgtacacaccagagcaccacctcattcaggctgtgctcctgtgtctgctggatttattccccatcctggagaaaaccctgcactggaaaggagatggagctcgacccaccacccattgtgatgaggtcctgcggctgatcctgacccacatggagccagagcaccgccttcttttacgcaggacctacgcaagaaacctgccggctttcgtgaacaggttggggatcctaactgtccggcacttaaagaggctggagagagtcatcattggttatctggaggtttatgatggacctgaggaggaagctagactgaagatattggaaaccctaaaacttctcatgcaacatacttggcccagagtttcctgcagacttgtggtcttactgaaggccctcttgaaactgatttgtgatgtagcaagggatccaaaccttacacctgagtctgttaagagcgccctgctacaggaggccacagactgcctgattctcctggaccgctgttctcaaggacgggtaaagggtctcctggccaaaattccccaaagctgtgaagacagaaaagtggtgaactatatcagaaaagtgcagcaggtttctgaaggcgcaccctacaatggaacttaagacttgtattactttcccaagaggaaaggattttcttcccatcccaatttgtatgaatggagttatttaagaaaaaaagatatttttacacgaaactttgtaagtgaaagctgctttttccttccttctttccttttacctccataagaatagggaaagtagaacaagaaaaaattgaactccttccatttctaaataaagtttgggaga

SEQ ID NO: 288717 - DNA, 2142 bp, Homo sapiens
tgcggcagcaatatgagctaggtccggatcctgttagacaccggcgggcgcgagccgttgcagttctctttgggtgatcgctccttccctcttcaacggatccctccccgcctccatcctcgttctgtgggagagaccagccttctggtgctgcagtcaggaatggagcttgacagcgctctggaagccccatcgcaggaagactctaatttgtccgaggagttgtctcactccgcctttggacaggccttctccaagattttacactgtcttgcccgcccggaggcacgacgaggcaacgtaaaagatgcagttcttaaagacctcggtgatctaatagaagccacaggatttgataggttatttgaggggactggtgcacggctccgcggaatgccggagacactggggcaggtagcaaaagccctggagaagtatgcagccccctccaaggaggaggaaggtggaggtgatgggcactccgaagcggccgagaaagcagcccaagttgggttactgtttcttaaactgttagggaaagttgagactgctaagaattccctggtcggccctgcatggcagacgggcctgcatcacttggcaggacccgtttatatttttgccatcacacacagcttggagcaaccatggaccactccgagatctcgggaagttgctagggaggtgctcacctcactgcttcaagttactgaatgcggttctgtggcaggattcctacatggagaaaatgaagatgagaaagggagactttcggtgatactagggcttctcaaacccgacttgtataaggaatcctggaagaataaccctgccatcaaacatgttttctcatggactctgcaacaggtcactcggccctggctgagccagcatctggaaagggtacttcccgcatcattggtcatttcagatgactatcagactgagaacaaaatcctgggtgtacactgtctccatcacattgtgcttaatgtgccagctgctgatttgctccagtataacagagcccaggtcctataccatgccatttccaaccacctgtacacaccagagcaccacctcattcaggctgtgctcctgtgtctgctggatttattccccatcctggagaaaaccctgcactggaaaggagatggagctcgacccaccacccattgtgatgaggtcctgcggctgatcctgacccacatggagccagagcaccgccttcttttacgcaggacctacgcaagaaacctgccggctttcgtgaacaggttggggatcctaactgtccggcacttaaagaggctggagagagtcatcattggttatctggaggtttatgatggacctgaggaggaagctagactgaagatattggaaaccctaaaacttctcatgcaacatacttggcccagagtttcctgcagacttgtggtcttactgaaggccctcttgaaactgatttgtgatgtagcaagggatccaaaccttacacctgagtctgttaagagcgccctgctacaggaggccacagactgcctgattctcctggaccgctgttctcaaggacgggtaaagggtctcctggccaaaattccccaaagctgtgaagacagaaaagtggtgaactatatcagaaaagtgcagcaggtttctgaaggcgcaccctacaatggaacttaagacttgtattactttcccaagaggaaaggattttcttcccatcccaatttgtatgaatggagttatttaagaaaaaaagatatttttacacgaaactttgtaagtgaaagctgctttttccttccttctttccttttacctccataagaatagggaaagtagaacaagaaaaaattgaactccttccatttctaaataaagtttgggagaaaaaaggacaccaagtaatgtagcatttaaaatttagaaatatttacatccgtcatctcatcccagattcaagaactcatctgttaagtttctcgggcacaagctgttacttcaacacatatgctataaaaacactcttgttcacaacttagctttcttcactcactccagatttcttgccccactgacgtggcataaataataaaaacacaaatattgtgttcagtacaacacaaaagagca

SEQ ID NO: 288718 - DNA, 2049 bp, Homo sapiens
tgcggcagcaatatgagctaggtccggatcctgttagacaccggcgggcgcgagccgttgcagttctctttgggtgatcgctccttccctcttcaacggatccctccccgcctccatcctcgttctgtgggagagaccagccttctggtgctgcagtcaggaatggagcttgacagcgctctggaagccccatcgcaggaagactctaatttgtccgaggagttgtctcactccgcctttggacaggccttctccaagattttacactgtcttgcccgcccggaggcacgacgaggcaacgtaaaagatgcagttcttaaagacctcggtgatctaatagaagccacaggatttgataggttatttgaggggactggtgcacggctccgcggaatgccggagacactggggcaggtagcaaaagccctggagaagtatgcagccccctccaaggaggaggaaggtggaggtgatgggcactccgaagcggccgagaaagcagcccaagttgggttactgtttcttaaactgttagggaaagttgagactgctaagaattccctggtcggccctgcatggcagacgggcctgcatcacttggcaggacccgtttatatttttgccatcacacacagcttggagcaaccatggaccactccgagatctcgggaagttgctagggaggtgctcacctcactgcttcaagttactgaatgcggttctgtggcaggattcctacatggagaaaatgaagatgagaaagggagactttcggtgatactagggcttctcaaacccgacttgtataaggaatcctggaagaataaccctgccatcaaacatgttttctcatggactctgcaacaggtcactcggccctggctgagccagcatctggaaagggtacttcccgcatcattggtcatttcagatgactatcagactgagaacaaaatcctgggtgtacactgtctccatcacattgtgcttaatgtggctgtgctcctgtgtctgctggatttattccccatcctggagaaaaccctgcactggaaaggagatggagctcgacccaccacccattgtgatgaggtcctgcggctgatcctgacccacatggagccagagcaccgccttcttttacgcaggacctacgcaagaaacctgccggctttcgtgaacaggttggggatcctaactgtccggcacttaaagaggctggagagagtcatcattggttatctggaggtttatgatggacctgaggaggaagctagactgaagatattggaaaccctaaaacttctcatgcaacatacttggcccagagtttcctgcagacttgtggtcttactgaaggccctcttgaaactgatttgtgatgtagcaagggatccaaaccttacacctgagtctgttaagagcgccctgctacaggaggccacagactgcctgattctcctggaccgctgttctcaaggacgggtaaagggtctcctggccaaaattccccaaagctgtgaagacagaaaagtggtgaactatatcagaaaagtgcagcaggtttctgaaggcgcaccctacaatggaacttaagacttgtattactttcccaagaggaaaggattttcttcccatcccaatttgtatgaatggagttatttaagaaaaaaagatatttttacacgaaactttgtaagtgaaagctgctttttccttccttctttccttttacctccataagaatagggaaagtagaacaagaaaaaattgaactccttccatttctaaataaagtttgggagaaaaaaggacaccaagtaatgtagcatttaaaatttagaaatatttacatccgtcatctcatcccagattcaagaactcatctgttaagtttctcgggcacaagctgttacttcaacacatatgctataaaaacactcttgttcacaacttagctttcttcactcactccagatttcttgccccactgacgtggcataaataataaaaacacaaatattgtgttcagtacaacacaaaagagca

SEQ ID NO: 288719 - DNA, 1721 bp, Homo sapiens
tgcggcagcaatatgagctaggtccggatcctgttagacaccggcgggcgcgagccgttgcagttctctttgggtgatcgctccttccctcttcaacggatccctccccgcctccatcctcgttctgtgggagagaccagccttctggtgctgcagtcaggaatggagcttgacagcgctctggaagccccatcgcaggaagactctaatttgtccgaggagttgtctcactccgcctttggacaggccttctccaagattttacactgtcttgcccgcccggaggcacgacgaggcaacgtaaaagatgcagttcttaaagacctcggtgatctaatagaagccacaggatttgataggttatttgaggggactggtgcacggctccgcggaatgccggagacactggggcaggtagcaaaagccctggagaagtatgcagccccctccaaggaggaggaaggtggaggtgatgggcactccgaagcggccgagaaagcagcccaagttgggttactgtttcttaaactgttagggaaagttgagactgctaagaattccctggtcggccctgcatggcagacgggcctgcatcacttggcaggacccgtttatatttttgccatcacacacagcttggagcaaccatggaccactccgagatctcgggaagttgctagggaggtgctcacctcactgcttcaagttactgaatgcggttctgtggcaggattcctacatggagaaaatgaagatgagaaagggagactttcggtgatactagggcttctcaaacccgacttgtataaggaatcctggaagaataaccctgccatcaaacatgttttctcatggactctgcaacaggtcactcggccctggctgagccagcatctggaaagggtacttcccgcatcattggtcatttcagatgactatcagactgagaacaaaatcctgggtgtacactgtctccatcacattgtgcttaatgtggctgtgctcctgtgtctgctggatttattccccatcctggagaaaaccctgcactggaaaggagatggagctcgacccaccacccattgtgatgaggtcctgcggctgatcctgacccacatggagccagagcaccgccttcttttacgcaggacctacgcaagaaacctgccggctttcgtgaacaggttggggatcctaactgtccggcacttaaagaggctggagagagtcatcattggttatctggaggtttatgatggacctgaggaggaagctagactgaagatattggaaaccctaaaacttctcatgcaacatacttggcccagagtttcctgcagacttgtggtcttactgaaggccctcttgaaactgatttgtgatgtagcaagggatccaaaccttacacctgagtctgttaagagcgccctgctacaggaggccacagactgcctgattctcctggaccgctgttctcaaggacgggtaaagggtctcctggccaaaattccccaaagctgtgaagacagaaaagtggtgaactatatcagaaaagtgcagcaggtttctgaaggcgcaccctacaatggaacttaagacttgtattactttcccaagaggaaaggattttcttcccatcccaattggctgagtgggtaattagaacgagatattcaccacacttgtagatcgcatatctacacttgcgcccatcattgggg

SEQ ID NO: 288720 - DNA, 473 bp, Homo sapiens
aactaatacctattctgcttagtgacctgtccctaagtgtcatccattctttcctcctttgaatatgataccaaggaagaagaatcaagcaaaaggggaaagtaattaaaaaaaaaaaaatatcaaagcctgtttggtttcatgtttcagggtctcctggccaaaattccccaaagctgtgaagacagaaaagtggtgaactatatcagaaaagtgcagcaggtttctgaaggcgcaccctacaatggaacttaagacttgtattactttcccaagaggaaaggattttcttcccatcccaatttgtatgaatggagttatttaagaaaaaaagatatttttacacgaaactttgtaagtgaaagctgctttttccttccttctttccttttacctccataagaatagggaaagtagaacaagaaaaaattgaactccttccatttctaaataaagtttgggagaaaaaagga

SEQ ID NO: 288721 - DNA, 2373 bp, Homo sapiens
tgcggcagcaatatgagctaggtccggatcctgttagacaccggcgggcgcgagccgttgcagttctctttgggtgatcgctccttccctcttcaacggatccctccccgcctccatcctcgttctgtgggagagaccagccttctggtgctgcagtcaggaatggagcttgacagcgctctggaagccccatcgcaggaagactctaatttgtccgaggagttgtctcactccgcctttggacaggccttctccaagattttacactgtcttgcccgcccggaggcacgacgaggcaacgtaaaagatgcagttcttaaagacctcggtgatctaatagaagccacaggatttgataggttatttgaggggactggtgcacggctccgcggaatgccggagacactggggcaggtagcaaaagccctggagaagtatgcagccccctccaaggaggaggaaggtggaggtgatgggcactccgaagcggccgagaaagcagcccaagttgggttactgtttcttaaactgttagggaaagttgagactgctaagaattccctggtcggccctgcatggcagacgggcctgcatcacttggcaggacccgtttatatttttgccatcacacacagcttggagcaaccatggaccactccgagatctcgggaagttgctagggaggtgctcacctcactgcttcaagttactgaatgcggttctgtggcaggattcctacatggagaaaatgaagatgagaaagggagactttcggtgatactagggcttctcaaacccgacttgtataaggaatcctggaagaataaccctgccatcaaacatgttttctcatggactctgcaacaggtcactcggccctggctgagccagcatctggaaagggtacttcccgcatcattggtcatttcagatgactatcagactgagaacaaaatcctgggtgtacactgtctccatcacattgtgcttaatgtgccagctgctgatttgctccagtataacagagcccaggtcctataccatgccatttccaaccacctgtacacaccagagcaccacctcattcaggctgtgctcctgtgtctgctggatttattccccatcctggagaaaaccctgcactggaaaggagatggagctcgacccaccacccattgtgatgaggtcctgcggctgatcctgacccacatggagccagagcaccgccttcttttacgcaggacctacgcaagaaacctgccggctttcgtgaacaggttggggatcctaactgtccggcacttaaagaggctggagagagtcatcattggttatctggaggtttatgatggacctgaggaggaagctagactgaagatattggaaaccctaaaacttctcatgcaacatacttggcccagagtttcctgcagacttgtggtcttactgaaggccctcttgaaactgatttgtgatgtagcaagggatccaaaccttacacctgagtctgttaagagcgccctgctacaggaggccacagactgcctgattctcctggaccgctgttctcaaggacgggtaaagggtctcctggccaaaattccccaaagctgtgaagacagaaaagtggtgaactatatcagaaaagtgcagcaggtttctgaaggcgcaccctacaatggaacttaagacttgtattactttcccaagaggaaaggattttcttcccatcccaatttgtatgaatggagttatttaagaaaaaaagatatttttacacgaaaaaaaaaaaaaaaaaaaaaaacaaaaaaaaaaggggggcgcgcggcgcccaaaaaataccccccggggggcgcccaaggtttcacgcgcgtgtccccaggttttcctgtggtcacaaggggcgcccctaaaggggggccgatattaaaacgctaggcgcatctgggcgcagctgtgtttaaacacatcgtccgtgagctgcggagaagacacgtcgtctcacttgggagagaccttgggtgagaaggagacccccttactttcgcgggcgcgtgggcagacccataattgggggacaaatttcctctcaaaggaggatgtaaacggtctccaaaggcggagaactatcatagacactttttcatagcgcgctaacacgcggcgtgttcaaaacaccaagaccgcggccaaatagtgccatctgccgcgcttgtgaaacaaagtttcggggcgctcaacgcggggagcatagtacatctctcgtcgcacacacatttttttatcccccgcggggagcccgtcgtgtcttaattataccgggcacgcatataacaaccatcacagcccacatccaccagccactcaccatcc

SEQ ID NO: 288722 - DNA, 1979 bp, Homo sapiens
tgcggcagcaatatgagctaggtccggatcctgttagacaccggcgggcgcgagccgttgcagttctctttgggtgatcgctccttccctcttcaacggatccctccccgcctccatcctcgttctgtgggagagaccagccttctggtgctgcagtcaggaatggagcttgacagcgctctggaagccccatcgcaggaagactctaatttgtccgaggagttgtctcactccgcctttggacaggccttctccaagattttacactgtcttgcccgcccggaggcacgacgaggcaacgtaaaagatgcagttcttaaagacctcggtgatctaatagaagccacaggatttgataggttatttgaggggactggtgcacggctccgcggaatgccggagacactggggcaggtagcaaaagccctggagaagtatgcagccccctccaaggaggaggaaggtggaggtgatgggcactccgaagcggccgagaaagcagcccaagttgggttactgtttcttaaactgttagggaaagttgagactgctaagaattccctggtcggccctgcatggcagacgggcctgcatcacttggcaggacccgtttatatttttgccatcacacacagcttggagcaaccatggaccactccgagatctcgggaagttgctagggaggtgctcacctcactgcttcaagttactgaatgcggttctgtggcaggattcctacatggagaaaatgaagatgagaaagggagactttcggtgatactagggcttctcaaacccgacttgtataaggaatcctggaagaataaccctgccatcaaacatgttttctcatggactctgcaacaggtcactcggccctggctgagccagcatctggaaagggtacttcccgcatcattggtcatttcagatgactatcagactgagaacaaaatcctgggtgtacactgtctccatcacattgtgcttaatgtgccagctgctgatttgctccagtataacagagcccaggtcctataccatgccatttccaaccacctgtacacaccagagcaccacctcattcaggctgtgctcctgtgtctgctggatttattccccatcctggagaaaaccctgcactggaaaggagatggagctcgacccaccacccattgtgatgaggtcctgcggctgatcctgacccacatggagccagagcaccgccttcttttacgcaggacctacgcaagaaacctgccggctttcgtgaacaggttggggatcctaactgtccggcacttaaagaggctggagagagtcatcattggttatctggaggtttatgatggacctgaggaggaagctagactgaagatattggaaaccctaaaacttctcatgcaacatacttggcccagggtctcctggccaaaattccccaaagctgtgaagacagaaaagtggtgaactatatcagaaaagtgcagcaggtttctgaaggcgcaccctacaatggaacttaagacttgtattactttcccaagaggaaaggattttcttcccatcccaatttgtatgaatggagttatttaagaaaaaaagatatttttacacgaaactttgtaagtgaaagctgctttttccttccttctttccttttacctccataagaatagggaaagtagaacaagaaaaaattgaactccttccatttctaaataaagtttgggagaaaaaaggacaccaagtaatgtagcatttaaaatttagaaatatttacatccgtcatctcatcccagattcaagaactcatctgttaagtttctcgggcacaagctgttacttcaacacatatgctataaaaacactcttgttcacaacttagctttcttcactcactccagatttcttgccccactgacgtggcataaataataaaaacacaaatattgtgttcagtacaacacaaaagagca

SEQ ID NO: 288723 - DNA, 974 bp, Homo sapiens
  misc_feature (844)..(845): n is a, c, g, or t
tgcggcagcaatatgagctaggtccggatcctgttagacaccggcgggcgcgagccgttgcaggtacctgggggtggttaagttggtgacatggctcagaagtttatttctttaaatttttaagttttttttctttttagtcttcagaaaggcaacagtagtcttttaacgtcactgttaaaagtgtaagactcttttactccctgagagtcccctttccctttcttgcgtcctttcctctttattctttttttttttttttttttttttactgagacggagtctcactctgtcgcccaggctggagtgcagtggcgcgatctcggctcactgcaaactccgcctcccgggttcaccctttctctttattcttatcccggtcagactcgccccctcctccaagacatctctctgttttattttatttgattttagttctctttgggtgatcgctccttccctcttcaacggatccctccccgcctccatcctcgttctgtgggagagaccagccttctggtgctgcagtcaggaatggagcttgacagcgctctggaagccccatcgcaggaagactctaatttgtccgaggagttgtctcactccgcctttggacaggccttctccaagattttacactgtcttgcccgcccggaggcacgacgaggcaacgtaaaagatgcagttcttaaagacctcggtgatctaatagaagccacaggatttgataggttatttgaggggactggtgcacggctccgcggaatgccggagacactggggcaggtagcaaaagccctggagaagtatgcagccccctccaaggaggaggaagggttgggtnntcccccattttggctttcccccaaaaatgggggaggccgcggggggcctcctccctttaggggatcctgaaaaaagggtgggttttaaaccgagggggataaaagtgtttcgtggggccaacacctagt

SEQ ID NO: 288724 - DNA, 420 bp, Homo sapiens
tacccataggataaggtccctgacacaatgatgatggaaccatgatcctatcttgcctctgtcacagtcatgtttcccacctgccacctgtgccaattcaggtcacaggcaattcccaaatcacggtttgtttagtgtcactgccattgcttatgctcactgtacctagaatgcctccttgtccccactgttttaagttaaattctctgaatccttataaagcccagctcaaatatactcccaccacaattttcttctgtcttaccagctacaagttcattttatttcctctgaaattctatggaatttgttaccttataacatttattacatattttctttttttttttaattttccgagtgaacatcattaacacaatattttcgtttttcttttcttcctttcctttttatattctt

SEQ ID NO: 288725 - DNA, 696 bp, Homo sapiens
gaacattacatcttaacgtttagctcttagaatctgaccttttcctcaagtttgggaggcatcttattcactataatttccaagtattcacattgtctccttctgaaacgaagggaagtgttttaactgtgcaccacaaatcacaatgtaagatgccacctgctgtccatcactctgcagagccagccacttccaacatgaacatactaatttattcatttatcaataccacaaagctcgctctctgagccagtcactcttgcctcgaccgagctgctagcagctctggggaaggcaggaccaaatggcaatggagaacgggctgcggcttctcacagggtggggcgggcctggtgcaccctccccgagagcactggagaagggggtgcagtttctcacagggtgggcaggcctggtgcaccctcccccagagcactggagaagggggctgcagtttctcaaggcgggggcaggcctggtgcaccctccctgagagcacgggagaagggggccacggcttctcacagggtggggcgggcctggtgtaccctccccgaaagcactggagaagggggccacggcttctcacagggtggggtggccctggtgcaccctccccaaaagcactggagaaggggccatggcttctcacagggtggggcgggctggagagcactggagaagggggcggcggct

SEQ ID NO: 288726 - DNA, 713 bp, Homo sapiens
gaacctaaagtgtaaggaagaatgggagaaaggtgagtgaaatcagtagaaattattgatatcatctcacattcctttgttgattcacacagacgctggaacactcaggtacatgggcctcacacccatgcacataccctccatcaccaaacacatatatgtctacatacgtacacaggaacacgggattacacaagtggataacacctacctcctacccaagacacaacagagatttaaaaataataatggagacatgctgactggcatgctgattggcatgtgtcctgcatgtctgtgtgctggacttgggacagagtatggcaatactaaccagacacctaaaatctattcttgcgacctcaagcatgtatctccttgtagcaaattcgtgcagtttcatgtttgtgtagcttttactgacttcattttaattgtttttctctgccagcggtctctttgttagtatccatgattgaaggcatattgcttcagttctcaaagcatggccagaagatgtcatcaaggtaagttatcacgtttttcccctatggcaaatttgttttctttgctgtcccataaaatagtttaaaacatactgacaattctcatgataataggtagcattcattagcttttctagtgaatatcacctaatttatatctctttgaattttacatagtgggttattaaaggcaattgtaaaaaaaaa

SEQ ID NO: 288727 - DNA, 893 bp, Homo sapiens
tcattcggagaccctggaaccttccacctagtggctatgccctcttctggtgcttcaaagccatataatggattctctggatctggctaacagcggtctctttgttagtatccatgattgaaggcatattgcttcagttctcaaagcatggccagaagatgtcatcaaggtataataaaaagaaaatactgaggttctcaaaaaaatggactgcagtataagagtattataaaaaccacccatgaatatatttgaaatcctagatgaaatggatcaattcctagaaaaatacaaacacaagaataaatagaagatttaagcaaaacaataaaactaaagaaatggaaatggtggtcaaaaaccttaccactcacagatgttcatacaaaacccagatggttttacagataaagacaaagataaactggtggttctcaaccaaatgccaatcttaaaaaggcttcaccctgaagttacatacctcaacaagtccctgcagtattctgacaaagatgacacatccataatgcactctggctgctgatggaattagcatatttagggtagaggtaagaagtatggcagctccgaaaaccctgaaatagaaaagatgagaacactgtttaaatgattcagcatcttatatatacatatctaaatttctcaggagaagtgaaacatttaaagtaataaaaaaatcgccaataattttaaggtagattgttttttctaatatatgttctggacttaacaggctagccattgtgaatatatacatgggccatctagaaattctatatttgatgcttcaaaaaataaaaggtagtaggcgcgcctacgctttctttgtttattcgtttggtgttacgtctctggtggtcgaattactgtgc

SEQ ID NO: 288728 - DNA, 646 bp, Homo sapiens
gcagtgatacaatcacagcttactgtaaactcaaactcctgggctcatatgatcctcccatctcagcctcctgagtagcaaggaccacagtcaatcttttgtcaagtaaggaaccacatctctagctgggtgtggtagctcacacctataatcccagcactttggaaggctgaaggaggaagattgcttgaagccaggagtttgagaccagcctgagcaacaaagcaagaccccagctccacattttttttttttaaattagccaggcatggtggtgtatgcctgcagtcccagctacttgggaggctggggcaagaggatcacttgaacccaggagagttcgaggctgcagtgagccataatagcaccactgtgcactccaccctgagtgacagagcaaaatgctgtcaaaaaaagaagaaaaaaaaaagaaactacatctcctgggactgctgcaaaaaatacatatggattgattctattaagtcaatactaacagagactccgagtcagatattagagttttacagttaaataaatctaaccaatccttactgaggctagaatccttttaggcaaaaaatgtaacagaatacatccatggaaaaagatagtgtgtaaaaataaaattcatctgtaaaggaaa

SEQ ID NO: 288729 - DNA, 227 bp, Homo sapiens
tgcagaggtctcatcaaacgcctggtctgcctgcaccatgcagcctggaagcccctgacccatcgccagctcctaccgtcacccgtgaggtccaatatggtgtcgtcctcccctcgatcgtcagaaaccatcgctctgtaaattcccttgtcctttttggacaactggaaagaaggatgagcgatggtggtgtcagcatgggctccagaaggagagatggataccaa

SEQ ID NO: 288730 - DNA, 438 bp, Homo sapiens
agtcgctgcgtttggtcagttgcaccttctgggtcactggtagccgcgggagccgggtggggcctaggcgatgatccggcattaaggagctgggatcatcctccgtctcaggtggtttggggaaagtgtaggggcaaccaaagatcatcggcttgactaggccctttgccctgaacctcatgaagaaatgataggaggcagacatatgtgcctaaaaagagcgttgagctcagagaagagcaactcggagttttgggggtgtgctttgatttgtgtacatcaatggcagaatcatccagcgaatcagatcacttccgctgtcgtgaccgattgagtccatgggctgccagatcaacgcacaggggaactcgaagtcttcctacagtagaagttaccgagaaggtcaacactataacaagtactttacaggttagttta

SEQ ID NO: 288731 - DNA, 2095 bp, Homo sapiens
gaacggaagtcgcttgtgtatgaacgcagcggcggacctgtgaggggatccgacttgccggcagaacttacgctgcgggaccccgggcactgttgctgctgcgggagactgtgggctgtttagtgccatgcaccctttacagtgtgtcctccaagtgcagaggtctctggggtggggaccattggcctctgtgtcttggctgtcgctgaggatgtgcagggcacacagcagtctctctagtaccatgtgtcccagtccagagaggcaggaggatggagctcggaaggatttcagctccaggctggctgctggaccgacttttcaacattttttaaaaagtgcctcagctcctcaggagaagctgtcttcagaagtggaagacccacctccctatctcatgatggatgaacttcttggaaggcagagaaaagtctacctcgagacctatggctgccagatgaatgtgaatgacacagagatagcctggtccatcttacagaagagtggctacctgcggaccagtaacctccaagaggcagatgtgattctccttgtcacgtgctctatcagggagaaggctgagcagaccatctggaaccgtttacatcagcttaaagccttgaagacaaggcggccccgctcccgggttcctctgaggattggaattctaggctgcatggctgagaggttgaaggaggagattctcaacagagagaaaatggtagatattttggctggtcctgatgcctaccgggaccttccccggctgctggctgttgctgagtcgggccagcaagctgccaacgtgctgctctctctggacgagacctatgctgatgtcatgccagtccagacaagcgccagtgccacgtctgcctttgtgtcaatcatgcgaggctgtgacaacatgtgtagctactgcattgttcctttcacccggggcagggagaggagtcggcctattgcctccattctagaggaagtgaagaagctttctgagcaggggctgaaagaagtgacacttcttggtcagaatgttaatagttttcgggacaattcggaggtccagttcaacagtgcagtgcctaccaatctcagtcgtggctttaccaccaactataaaaccaagcaaggaggacttcgttttgctcatcttctggatcaggtctccagagtagatcctgaaatgaggatccgttttacctctccccaccccaaggattttcctgatgaggttctgcagctgattcatgagagagataacatctgtaaacagatccacctgccagcccagagtggaagcagccgtgtgttggaggccatgcggaggggatattcaagagaagcttatgtggagttagttcaccatattagagaatctattccaggtgtgagcctcagcagcgatttcattgctggcttttgtggtgagacggaggaagatcacgtccagacagtctctttgctccgggaagttcagtacaacatgggcttcctctttgcctacagcatgagacagaagacacgggcatatcataggctgaaggatgatgtcccggaagaggtaaaattaaggcgtttggaggaactcatcactatcttccgagaagaagcaacaaaagccaatcagacctctgtgggctgtacccagttggtgctagtggaagggctcagtaaacgctctgccactgacctgtgtggcaggaatgatggaaaccttaaggtgatcttccctgatgcagagatggaggatgtcaataaccctgggctcagggtcagagcccagcctggggactatgtgctggtgaagatcacctcagccagttctcagacacttaggggacatgttctctgcaggaccactctgagggactcttctgcatattgctgacctgagaggatggcctcagagctgacttgggcaatcctccccaacaggaaggggagacattgcctgccactgaggaaacaggtcatgaaggtggagataagctgcaaggggcgaagcaactttatgtcagtggaaaacgtgtctctttaaagctgctatgtgaacagcttttacagtcattaaatttacctaaactaaggttaa

SEQ ID NO: 288732 - DNA, 2137 bp, Homo sapiens
gaacggaagtcgcttgtgtatgaacgcagcggcggacctgtgaggggatccgacttgccggcagaacttacgctgcgggaccccgggcactgttgctgctgcgggagactgtgggctgtttagtgccatgcaccctttacagtgtgtcctccaagtgcagaggtctctggggtggggaccattggcctctgtgtcttggctgtcgctgaggatgtgcagggcacacagcagtctctctagtaccatgtgtcccagtccagagaggcaggaggatggagctcggaaggatttcagctccaggctggctgctggaccgacttttcaacattttttaaaaagtgcctcagctcctcaggagaagctgtcttcagaagtggaagacccacctccctatctcatgatggatgaacttcttggaaggcagagaaaagtctacctcgagacctatggctgccagatgaatgtgaatgacacagagatagcctggtccatcttacagaagagtggctacctgcggaccagtaacctccaagaggcagatgtgattctccttgtcacgtgctctatcagggagaaggctgagcagaccatctggaaccgtttacatcagcttaaagccttgaagacaaggcggccccgctcccgggttcctctgaggattggaattctaggctgcatggctgagaggttgaaggaggagattctcaacagagagaaaatggtagatattttggctggtcctgatgcctaccgggaccttccccggctgctggctgttgctgagtcgggccagcaagctgccaacgtgctgctctctctggacgagacctatgctgatgtcatgccagtccagacaagcgccagtgccacgtctgcctttgtgtcaatcatgcgaggctgtgacaacatgtgtagctactgcattgttcctttcacccggggcagggagaggagtcggcctattgcctccattctagaggaagtgaagaagctttctgagcaggtgttcctcccacctcggcctcccaaagtgttgggattacaggggctgaaagaagtgacacttcttggtcagaatgttaatagttttcgggacaattcggaggtccagttcaacagtgcagtgcctaccaatctcagtcgtggctttaccaccaactataaaaccaagcaaggaggacttcgttttgctcatcttctggatcaggtctccagagtagatcctgaaatgaggatccgttttacctctccccaccccaaggattttcctgatgaggttctgcagctgattcatgagagagataacatctgtaaacagatccacctgccagcccagagtggaagcagccgtgtgttggaggccatgcggaggggatattcaagagaagcttatgtggagttagttcaccatattagagaatctattccaggtgtgagcctcagcagcgatttcattgctggcttttgtggtgagacggaggaagatcacgtccagacagtctctttgctccgggaagttcagtacaacatgggcttcctctttgcctacagcatgagacagaagacacgggcatatcataggctgaaggatgatgtcccggaagaggtaaaattaaggcgtttggaggaactcatcactatcttccgagaagaagcaacaaaagccaatcagacctctgtgggctgtacccagttggtgctagtggaagggctcagtaaacgctctgccactgacctgtgtggcaggaatgatggaaaccttaaggtgatcttccctgatgcagagatggaggatgtcaataaccctgggctcagggtcagagcccagcctggggactatgtgctggtgaagatcacctcagccagttctcagacacttaggggacatgttctctgcaggaccactctgagggactcttctgcatattgctgacctgagaggatggcctcagagctgacttgggcaatcctccccaacaggaaggggagacattgcctgccactgaggaaacaggtcatgaaggtggagataagctgcaaggggcgaagcaactttatgtcagtggaaaacgtgtctctttaaagctgctatgtgaacagcttttacagtcattaaatttacctaaactaaggttaa

SEQ ID NO: 288733 - DNA, 1864 bp, Homo sapiens
gaacggaagtcgcttgtgtatgaacgcagcggcggacctgtgaggggatccgacttgccggcagaacttacgctgcgggaccccgggcactgttgctgctgcgggagactgtgggctgtttagtgccatgcaccctttacagtgtgtcctccaagtgcagaggtctctggggtggggaccattggcctctgtgtcttggctgtcgctgaggatgtgcagggcacacagcagtctctctagtaccatgtgtcccagtccagagaggcaggaggatggagctcggaaggatttcagctccaggctggctgctggaccgacttttcaacattttttaaaaagtgcctcagctcctcaggagaagctgtcttcagaagtggaagacccacctccctatctcatgatggatgaacttcttggaaggcagagaaaagtctacctcgagacctatggctgccagatgaatgtgaatgacacagagatagcctggtccatcttacagaagagtggctacctgcggaccagtaacctccaagaggcagatgtgattctccttgtcacgtgctctatcagggagaaggctgagcagaccatctggaaccgtttacatcagcttaaagccttgaagacaaggcggccccgctcccgggttcctctgaggattggaattctaggctgcatggctgagaggttgaaggaggagattctcaacagagagaaaatggtagatattttggctggtcctgatgcctaccgggaccttccccggctgctggctgttgctgagtcgggccagcaagctgccaacgtgctgctctctctggacgagacctatgctgatgtcatgccagtccagacaagcgccagtgccacgtctgcctttgtgtcaatcatgcgaggctgtgacaacatgtgtagctactgcattgttcctttcacccggggcagggagaggagtcggcctattgcctccattctagaggaagtgaagaagctttctgagcaggttctgcagctgattcatgagagagataacatctgtaaacagatccacctgccagcccagagtggaagcagccgtgtgttggaggccatgcggaggggatattcaagagaagcttatgtggagttagttcaccatattagagaatctattccaggtgtgagcctcagcagcgatttcattgctggcttttgtggtgagacggaggaagatcacgtccagacagtctctttgctccgggaagttcagtacaacatgggcttcctctttgcctacagcatgagacagaagacacgggcatatcataggctgaaggatgatgtcccggaagaggtaaaattaaggcgtttggaggaactcatcactatcttccgagaagaagcaacaaaagccaatcagacctctgtgggctgtacccagttggtgctagtggaagggctcagtaaacgctctgccactgacctgtgtggcaggaatgatggaaaccttaaggtgatcttccctgatgcagagatggaggatgtcaataaccctgggctcagggtcagagcccagcctggggactatgtgctggtgaagatcacctcagccagttctcagacacttaggggacatgttctctgcaggaccactctgagggactcttctgcatattgctgacctgagaggatggcctcagagctgacttgggcaatcctccccaacaggaaggggagacattgcctgccactgaggaaacaggtcatgaaggtggagataagctgcaaggggcgaagcaactttatgtcagtggaaaacgtgtctctttaaagctgctatgtgaacagcttttacagtcattaaatttacctaaactaaggttaa

SEQ ID NO: 288734 - DNA, 1947 bp, Homo sapiens
gaacggaagtcgcttgtgtatgaacgcagcggcggacctgtgaggggatccgacttgccggcagaacttacgctgcgggaccccgggcactgttgctgctgcgggagtccagagaggcaggaggatggagctcggaaggatttcagctccaggctggctgctggaccgacttttcaacattttttaaaaagtgcctcagctcctcaggagaagctgtcttcagaagtggaagacccacctccctatctcatgatggatgaacttcttggaaggcagagaaaagtctacctcgagacctatggctgccagatgaatgtgaatgacacagagatagcctggtccatcttacagaagagtggctacctgcggaccagtaacctccaagaggcagatgtgattctccttgtcacgtgctctatcagggagaaggctgagcagaccatctggaaccgtttacatcagcttaaagccttgaagacaaggcggccccgctcccgggttcctctgaggattggaattctaggctgcatggctgagaggttgaaggaggagattctcaacagagagaaaatggtagatattttggctggtcctgatgcctaccgggaccttccccggctgctggctgttgctgagtcgggccagcaagctgccaacgtgctgctctctctggacgagacctatgctgatgtcatgccagtccagacaagcgccagtgccacgtctgcctttgtgtcaatcatgcgaggctgtgacaacatgtgtagctactgcattgttcctttcacccggggcagggagaggagtcggcctattgcctccattctagaggaagtgaagaagctttctgagcaggggctgaaagaagtgacacttcttggtcagaatgttaatagttttcgggacaattcggaggtccagttcaacagtgcagtgcctaccaatctcagtcgtggctttaccaccaactataaaaccaagcaaggaggacttcgttttgctcatcttctggatcaggtctccagagtagatcctgaaatgaggatccgttttacctctccccaccccaaggattttcctgatgaggttctgcagctgattcatgagagagataacatctgtaaacagatccacctgccagcccagagtggaagcagccgtgtgttggaggccatgcggaggggatattcaagagaagcttatgtggagttagttcaccatattagagaatctattccaggtgtgagcctcagcagcgatttcattgctggcttttgtggtgagacggaggaagatcacgtccagacagtctctttgctccgggaagttcagtacaacatgggcttcctctttgcctacagcatgagacagaagacacgggcatatcataggctgaaggatgatgtcccggaagaggtaaaattaaggcgtttggaggaactcatcactatcttccgagaagaagcaacaaaagccaatcagacctctgtgggctgtacccagttggtgctagtggaagggctcagtaaacgctctgccactgacctgtgtggcaggaatgatggaaaccttaaggtgatcttccctgatgcagagatggaggatgtcaataaccctgggctcagggtcagagcccagcctggggactatgtgctggtgaagatcacctcagccagttctcagacacttaggggacatgttctctgcaggaccactctgagggactcttctgcatattgctgacctgagaggatggcctcagagctgacttgggcaatcctccccaacaggaaggggagacattgcctgccactgaggaaacaggtcatgaaggtggagataagctgcaaggggcgaagcaactttatgtcagtggaaaacgtgtctctttaaagctgctatgtgaacagcttttacagtcattaaatttacctaaactaaggttaa

SEQ ID NO: 288735 - DNA, 823 bp, Homo sapiens
tgtctgagacaaatagaatggggcttgaacaaaagttagggaataggtgattttgtgtgtctggtttaattagcctcttaattatgtgaaaattgaccttggaggatacatagtaagagcggtattgctttctgtaaggttctttggtgagattgtgattacctataatgtgttctgtttcatcaggttctgcagctgattcatgagagagataacatctgtaaacagatccacctgccagcccagagtggaagcagccgtgtgttggaggccatgcggagggggtcaggcttgcttggagagggggcatccctcacttttccatgtttccttaatgaccaaacagtgtccttgttgccaagaacctagcatagtgtgtggcacaaagtagctgctcagtaaatatttattgtatgactaagccactgggcactggagtttgcttctgctcacttcataagcaaaggctaaggactggtcacccattttcactgtttagtttaaaaagcataaatatttactgagcagccactgtgtgacagtaagtatttattgtatgactaagccacagggcactggagcttgcttcgctaactccataacataggctaaggactgggtcatccattttcactgtttagtatgtttttttttaattaagcacctatggtgtggcacactctgagattttaattttttaatgttaacattaaggttttgttacatcttggaatttaaatgtcgctctatgtgttcactttctttgagaataataagtattacacagatgagactgaagggagaatctgtcccaaggcaagct

SEQ ID NO: 288736 - DNA, 856 bp, Homo sapiens
tgcctcctttgatctctctaggggagaaggctgagcagaccatctggaaccgtttacatcagcttaaagccttgaagacaaggcggccccgctcccgggttcctctgaggattggaattctaggtcaatcatgcgaggctgtgacaacatgtgtagctactgcattgttcctttcacccggggcagggagaggagtcggcctattgcctccattctagaggaagtgaagaagctttctgagcaggggctgaaagaagtgacacttcttggtcagaatgttaatagttttcgggacaattcggaggtccagttcaacagtgcagtgcctaccaatctcagtcgtggctttaccaccaactataaaaccaagcaaggaggacttcgttttgctcatcttctggatcaggtctccagagtagatcctgaaatgaggatccgttttacctctccccaccccaaggattttcctgatgaggttctgcagctgattcatgagagagataacatctgtaaacagatccacctgccagcccagagtggaagcagccgtgtgttggaggccatgcggaggggatattcaagagaagcttatgtggagttagttcaccatattagagaatctattccaggtgtgagcctcagcagcgatttcattgctggcttttgtggtgagacggaggaagatcacgtccagacagtctctttgctccgggaagttcagtacaacatgggcttcctctttgcctacagcatgagacagaagacccgggcttcatagggtgaggatgtgtccgagaggaattagggttggggaccttatatttcggaaaaggaaagcattaacccggggtgccct

SEQ ID NO: 288737 - DNA, 2296 bp, Homo sapiens
  misc_feature (2102)..(2102): n is a, c, g, or t
gaacggaagtcgcttgtgtatgaacgcagcggcggacctgtgaggggatccgacttgccggcagaacttacgctgcgggaccccgggcactgttgctgctgcgggagactgtgggctgtttagtgccatgcaccctttacagtgtgtcctccaagtgcagaggtctctggggtggggaccattggcctctgtgtcttggctgtcgctgaggatgtgcagggcacacagcagtctctctagtaccatgtgtcccagtccagagaggcaggaggatggagctcggaaggatttcagctccaggctggctgctggaccgacttttcaacattttttaaaaagtgcctcagctcctcaggagaagctgtcttcagaagtggaagacccacctccctatctcatgatggatgaacttcttggaaggcagagaaaagtctacctcgagacctatggctgccagatgaatgtgaatgacacagagatagcctggtccatcttacagaagagtggctacctgcggaccagtaacctccaagaggcagatgtgattctccttgtcacgtgctctatcagggagaaggctgagcagaccatctggaaccgtttacatcagcttaaagccttgaagacaaggcggccccgctcccgggttcctctgaggattggaattctaggctgcatggctgagaggttgaaggaggagattctcaacagagagaaaatggtagatattttggctggtcctgatgcctaccgggaccttccccggctgctggctgttgctgagtcgggccagcaagctgccaacgtgctgctctctctggacgagacctatgctgatgtcatgccagtccagacaagcgccagtgccacgtctgcctttgtgtcaatcatgcgaggctgtgacaacatgtgtagctactgcattgttcctttcacccggggcagggagaggagtcggcctattgcctccattctagaggaagtgaagaagctttctgagcaggggctgaaagaagtgacacttcttggtcagaatgttaatagttttcgggacaattcggaggtccagttcaacagtgcagtgcctaccaatctcagtcgtggctttaccaccaactataaaaccaagcaaggaggacttcgttttgctcatcttctggatcaggtctccagagtagatcctgaaatgaggatccgttttacctctccccaccccaaggattttcctgatgaggttctgcagctgattcatgagagagataacatctgtaaacagatccacctgccagcccagagtggaagcagccgtgtgttggaggccatgcggaggggatattcaagagaagcttatgtggagttagttcaccatattagagaatctattccaggtgtgagcctcagcagcgatttcattgctggcttttgtggtgagacggaggaagatcacgtccagacagtctctttgctccgggaagttcagtacaacatgggcttcctctttgcctacagcatgagacagaagacacgggcatatcataggctgaaggatgatgtcccggaagaggtaaaattaaggcgtttggaggaactcatcactatcttccgagaagaagcaacaaaagccaatcagacctctgtgggctgtacccagttggtgctagtggaagggctcagtaaacgctctgccactgacctgtgtggcaggaatgatggaaaccttaaggtgatcttccctgatgcagagatggaggatgtcaataaccctgggctcagggtcagagcccagcctggggactatgtgctggtgaagatcacctcagccagttctcagacacttaggggacatgttctctgcaggaccactctgagggactcttctgcatattgctgacctgagaggatggcctcagagctgacttgggcaatcctccccaacaggaaggggagacattgcctgccactgaggaaacaggtcatgaaggtggagataagctgcaaggggcgaagcaactttatgtcagtggaaaacgtgtctctttaaagctgctatgtgaacagcttttacagtcattaaatttacctaaactaaggttaaaaaaaanaaacaaaaacacaaaacaaacaaacacaaaaaaaaaaaacaacacaaacaaaaacaaaaaaaaaagaagacgagagagagacacaggagagcaacaagccgaaaaagaaaaataaataaaatacaacaaaaaaccaacaaaacacaaaaacaaaaaactaacacaaaaaaaaaacagaataaaccaataaacac

SEQ ID NO: 288738 - DNA, 1974 bp, Homo sapiens
gaacggaagtcgcttgtgtatgaacgcagcggcggacctgtgaggggatccgacttgccggcagaacttacgctgcgggaccccgggcactgttgctgctgcgggagactgtgggctgtttagtgccatgcaccctttacagtgtgtcctccaagtgcagaggtctctggggtggggaccattggcctctgtgtcttggctgtcgctgaggatgtgcagggcacacagcagtctctctagtaccatgtgtcccagtccagagaggcaggaggatggagctcggaaggatttcagctccaggctggctgctggaccgacttttcaacattttttaaaaagtgcctcagctcctcaggagaagctgtcttcagaagtggaagacccacctccctatctcatgatggatgaacttcttggaaggcagagaaaagtctacctcgagacctatggctgccagatgaatgtgaatgacacagagatagcctggtccatcttacagaagagtggctacctgcggaccagtaacctccaagaggcagatgtgattctccttgtcacgtgctctatcagggagaaggctgagcagaccatctggaaccgtttacatcagcttaaagccttgaagacaaggcggccccgctcccgggttcctctgaggattggaattctaggctgcatggctgagaggttgaaggaggagattctcaacagagagaaaatggtagatattttggctggtcctgatgcctaccgggaccttccccggctgctggctgttgctgagtcgggccagcaagctgccaacgtgctgctctctctggacgagacctatgctgatgtcatgccagtccagacaagcgccagtgccacgtctgcctttgtgggctgaaagaagtgacacttcttggtcagaatgttaatagttttcgggacaattcggaggtccagttcaacagtgcagtgcctaccaatctcagtcgtggctttaccaccaactataaaaccaagcaaggaggacttcgttttgctcatcttctggatcaggtctccagagtagatcctgaaatgaggatccgttttacctctccccaccccaaggattttcctgatgaggttctgcagctgattcatgagagagataacatctgtaaacagatccacctgccagcccagagtggaagcagccgtgtgttggaggccatgcggaggggatattcaagagaagcttatgtggagttagttcaccatattagagaatctattccaggtgtgagcctcagcagcgatttcattgctggcttttgtggtgagacggaggaagatcacgtccagacagtctctttgctccgggaagttcagtacaacatgggcttcctctttgcctacagcatgagacagaagacacgggcatatcataggctgaaggatgatgtcccggaagaggtaaaattaaggcgtttggaggaactcatcactatcttccgagaagaagcaacaaaagccaatcagacctctgtgggctgtacccagttggtgctagtggaagggctcagtaaacgctctgccactgacctgtgtggcaggaatgatggaaaccttaaggtgatcttccctgatgcagagatggaggatgtcaataaccctgggctcagggtcagagcccagcctggggactatgtgctggtgaagatcacctcagccagttctcagacacttaggggacatgttctctgcaggaccactctgagggactcttctgcatattgctgacctgagaggatggcctcagagctgacttgggcaatcctccccaacaggaaggggagacattgcctgccactgaggaaacaggtcatgaaggtggagataagctgcaaggggcgaagcaactttatgtcagtggaaaacgtgtctctttaaagctgctatgtgaacagcttttacagtcattaaatttacctaaactaaggttaa

SEQ ID NO: 288739 - DNA, 2041 bp, Homo sapiens
gaacggaagtcgcttgtgtatgaacgcagcggcggacctgtgaggggatccgacttgccggcagaacttacgctgcgggaccccgggcactgttgctgctgcgggagactgtgggctgtttagtgccatgcaccctttacagtgtgtcctccaagtgcagaggtctctggggtggggaccattggcctctgtgtcttggctgtcgctgaggatgtgcagggcacacagcagtctctctagtaccatgtgtcccagtccagagaggcaggaggatggagctcggaaggatttcagctccaggctggctgctggaccgacttttcaacattttttaaaaagtgcctcagctcctcaggagaagctgtcttcagaagtggaagacccacctccctatctcatgatggatgaacttcttggaaggcagagaaaagtctacctcgagacctatggctgccagatgaatgtgaatgacacagagatagcctggtccatcttacagaagagtggctacctgcggaccagtaacctccaagaggcagatgtgattctccttgtcacgtgctctatcagggagaaggctgagcagaccatctggaaccgtttacatcagcttaaagccttgaagacaaggcggccccgctcccgggttcctctgaggattggaattctaggctgcatggctgagaggttgaaggaggagattctcaacagagagaaaatggtagatattttggctggtcctgatgcctaccgggaccttccccggctgctggctgttgctgagtcgggccagcaagctgccaacgtgctgctctctctggacgagacctatgctgatgtcatgccagtccagacaagcgccagtgccacgtctgcctttgtgtcaatcatgcgaggctgtgacaacatgtgtagctactgcattgttcctttcacccggggcagggagaggagtcggcctattgcctccattctagaggaagtgaagaagctttctgagcaggggctgaaagaagtgacacttcttggtcagaatgttaatagttttcgggacaattcggaggtccagttcaacagtgcagtgcctaccaatctcagtcgtggctttaccaccaactatgtagatcctgaaatgaggatccgttttacctctccccaccccaaggattttcctgatgaggttctgcagctgattcatgagagagataacatctgtaaacagatccacctgccagcccagagtggaagcagccgtgtgttggaggccatgcggaggggatattcaagagaagcttatgtggagttagttcaccatattagagaatctattccaggtgtgagcctcagcagcgatttcattgctggcttttgtggtgagacggaggaagatcacgtccagacagtctctttgctccgggaagttcagtacaacatgggcttcctctttgcctacagcatgagacagaagacacgggcatatcataggctgaaggatgatgtcccggaagaggtaaaattaaggcgtttggaggaactcatcactatcttccgagaagaagcaacaaaagccaatcagacctctgtgggctgtacccagttggtgctagtggaagggctcagtaaacgctctgccactgacctgtgtggcaggaatgatggaaaccttaaggtgatcttccctgatgcagagatggaggatgtcaataaccctgggctcagggtcagagcccagcctggggactatgtgctggtgaagatcacctcagccagttctcagacacttaggggacatgttctctgcaggaccactctgagggactcttctgcatattgctgacctgagaggatggcctcagagctgacttgggcaatcctccccaacaggaaggggagacattgcctgccactgaggaaacaggtcatgaaggtggagataagctgcaaggggcgaagcaactttatgtcagtggaaaacgtgtctctttaaagctgctatgtgaacagcttttacagtcattaaatttacctaaactaaggttaa

SEQ ID NO: 288740 - DNA, 1645 bp, Homo sapiens
gaacggaagtcgcttgtgtatgaacgcagcggcggacctgtgaggggatccgacttgccggcagaacttacgctgcgggaccccgggcactgttgctgctgcgggagactgtgggctgtttagtgccatgcaccctttacagtgtgtcctccaagtgcagaggtctctggggtggggaccattggcctctgtgtcttggctgtcgctgaggatgtgcagggcacacagcagtctctctagtaccatgtgtcccagtccagagaggcaggaggatggagctcggaaggatttcagctccaggctggctgctggaccgacttttcaacattttttaaaaagtgcctcagctcctcaggagaagctgtcttcagaagtggaagacccacctccctatctcatgatggatgaacttcttggaaggcagagaaaagtctacctcgagacctatggctgccagatgaatgtgaatgacacagagatagcctggtccatcttacagaagagtggctacctgcggaccagtaacctccaagaggcagatgtgattctccttgtcacgtgctctatcagggagaaggctgagcagaccatctggaaccgtttacatcagcttaaagccttgaagacaaggcggccccgctcccgggttcctctgaggattggaattctaggctgcatggctgagaggttgaaggaggagattctcaacagagagaaaatggtagatattttggctggtcctgatgcctaccgggaccttccccggctgctggctgttgctgagtcgggccagcaagctgccaacgtgctgctctctctggacgagacctatgctgatgtcatgccagtccagacaagcgccagtgccacgtctgcctttgtatattcaagagaagcttatgtggagttagttcaccatattagagaatctattccaggtgtgagcctcagcagcgatttcattgctggcttttgtggtgagacggaggaagatcacgtccagacagtctctttgctccgggaagttcagtacaacatgggcttcctctttgcctacagcatgagacagaagacacgggcatatcataggctgaaggatgatgtcccggaagaggtaaaattaaggcgtttggaggaactcatcactatcttccgagaagaagcaacaaaagccaatcagacctctgtgggctgtacccagttggtgctagtggaagggctcagtaaacgctctgccactgacctgtgtggcaggaatgatggaaaccttaaggtgatcttccctgatgcagagatggaggatgtcaataaccctgggctcagggtcagagcccagcctggggactatgtgctggtgaagatcacctcagccagttctcagacacttaggggacatgttctctgcaggaccactctgagggactcttctgcatattgctgacctgagaggatggcctcagagctgacttgggcaatcctccccaacaggaaggggagacattgcctgccactgaggaaacaggtcatgaaggtggagataagctgcaaggggcgaagcaactttatgtcagtggaaaacgtgtctctttaaagctgctatgtgaacagcttttacagtcattaaatttacctaaactaaggttaa

SEQ ID NO: 288741 - DNA, 1991 bp, Homo sapiens
gaacggaagtcgcttgtgtatgaacgcagcggcggacctgtgaggggatccgacttgccggcagaacttacgctgcgggaccccgggcactgttgctgctgcgggagactgtgggctgtttagtgccatgcaccctttacagtgtgtcctccaagtgcagaggtctctggggtggggaccattggcctctgtgtcttggctgtcgctgaggatgtgcagggcacacagcagtctctctagtaccatgtgtcccagtccagagaggcaggaggatggagctcggaaggatttcagctccaggctggctgctggaccgacttttcaacattttttaaaaagtgcctcagctcctcaggagaagctgtcttcagaagtggaagacccacctccctatctcatgatggatgaacttcttggaaggcagagaaaaggcagatgtgattctccttgtcacgtgctctatcagggagaaggctgagcagaccatctggaaccgtttacatcagcttaaagccttgaagacaaggcggccccgctcccgggttcctctgaggattggaattctaggctgcatggctgagaggttgaaggaggagattctcaacagagagaaaatggtagatattttggctggtcctgatgcctaccgggaccttccccggctgctggctgttgctgagtcgggccagcaagctgccaacgtgctgctctctctggacgagacctatgctgatgtcatgccagtccagacaagcgccagtgccacgtctgcctttgtgtcaatcatgcgaggctgtgacaacatgtgtagctactgcattgttcctttcacccggggcagggagaggagtcggcctattgcctccattctagaggaagtgaagaagctttctgagcaggggctgaaagaagtgacacttcttggtcagaatgttaatagttttcgggacaattcggaggtccagttcaacagtgcagtgcctaccaatctcagtcgtggctttaccaccaactataaaaccaagcaaggaggacttcgttttgctcatcttctggatcaggtctccagagtagatcctgaaatgaggatccgttttacctctccccaccccaaggattttcctgatgaggttctgcagctgattcatgagagagataacatctgtaaacagatccacctgccagcccagagtggaagcagccgtgtgttggaggccatgcggaggggatattcaagagaagcttatgtggagttagttcaccatattagagaatctattccaggtgtgagcctcagcagcgatttcattgctggcttttgtggtgagacggaggaagatcacgtccagacagtctctttgctccgggaagttcagtacaacatgggcttcctctttgcctacagcatgagacagaagacacgggcatatcataggctgaaggatgatgtcccggaagaggtaaaattaaggcgtttggaggaactcatcactatcttccgagaagaagcaacaaaagccaatcagacctctgtgggctgtacccagttggtgctagtggaagggctcagtaaacgctctgccactgacctgtgtggcaggaatgatggaaaccttaaggtgatcttccctgatgcagagatggaggatgtcaataaccctgggctcagggtcagagcccagcctggggactatgtgctggtgaagatcacctcagccagttctcagacacttaggggacatgttctctgcaggaccactctgagggactcttctgcatattgctgacctgagaggatggcctcagagctgacttgggcaatcctccccaacaggaaggggagacattgcctgccactgaggaaacaggtcatgaaggtggagataagctgcaaggggcgaagcaactttatgtcagtggaaaacgtgtctctttaaagctgctatgtgaacagcttttacagtcattaaatttacctaaactaaggttaa

SEQ ID NO: 288742 - DNA, 1667 bp, Homo sapiens
gaacggaagtcgcttgtgtatgaacgcagcggcggacctgtgaggggatccgacttgccggcagaacttacgctgcgggaccccgggcactgttgctgctgcgggaggcagatgtgattctccttgtcacgtgctctatcagggagaaggctgagcagaccatctggaaccgtttacatcagcttaaagccttgaagacaaggcggccccgctcccgggttcctctgaggattggaattctaggctgcatggctgagaggttgaaggaggagattctcaacagagagaaaatggtagatattttggctggtcctgatgcctaccgggaccttccccggctgctggctgttgctgagtcgggccagcaagctgccaacgtgctgctctctctggacgagacctatgctgatgtcatgccagtccagacaagcgccagtgccacgtctgcctttgtgtcaatcatgcgaggctgtgacaacatgtgtagctactgcattgttcctttcacccggggcagggagaggagtcggcctattgcctccattctagaggaagtgaagaagctttctgagcaggggctgaaagaagtgacacttcttggtcagaatgttaatagttttcgggacaattcggaggtccagttcaacagtgcagtgcctaccaatctcagtcgtggctttaccaccaactataaaaccaagcaaggaggacttcgttttgctcatcttctggatcaggtctccagagtagatcctgaaatgaggatccgttttacctctccccaccccaaggattttcctgatgaggttctgcagctgattcatgagagagataacatctgtaaacagatccacctgccagcccagagtggaagcagccgtgtgttggaggccatgcggaggggatattcaagagaagcttatgtggagttagttcaccatattagagaatctattccaggtgtgagcctcagcagcgatttcattgctggcttttgtggtgagacggaggaagatcacgtccagacagtctctttgctccgggaagttcagtacaacatgggcttcctctttgcctacagcatgagacagaagacacgggcatatcataggctgaaggatgatgtcccggaagaggtaaaattaaggcgtttggaggaactcatcactatcttccgagaagaagcaacaaaagccaatcagacctctgtgggctgtacccagttggtgctagtggaagggctcagtaaacgctctgccactgacctgtgtggcaggaatgatggaaaccttaaggtgatcttccctgatgcagagatggaggatgtcaataaccctgggctcagggtcagagcccagcctggggactatgtgctggtgaagatcacctcagccagttctcagacacttaggggacatgttctctgcaggaccactctgagggactcttctgcatattgctgacctgagaggatggcctcagagctgacttgggcaatcctccccaacaggaaggggagacattgcctgccactgaggaaacaggtcatgaaggtggagataagctgcaaggggcgaagcaactttatgtcagtggaaaacgtgtctctttaaagctgctatgtgaacagcttttacagtcattaaatttacctaaactaaggttaa

SEQ ID NO: 288743 - DNA, 1199 bp, Homo sapiens
gaacggaagtcgcttgtgtatgaacgcagcggcggacctgtgaggggatccgacttgccggcagaacttacgctgcgggaccccgggcactgttgctgctgcgggaggggctgaaagaagtgacacttcttggtcagaatgttaatagttttcgggacaattcggaggtccagttcaacagtgcagtgcctaccaatctcagtcgtggctttaccaccaactataaaaccaagcaaggaggacttcgttttgctcatcttctggatcaggtctccagagtagatcctgaaatgaggatccgttttacctctccccaccccaaggattttcctgatgaggttctgcagctgattcatgagagagataacatctgtaaacagatccacctgccagcccagagtggaagcagccgtgtgttggaggccatgcggaggggatattcaagagaagcttatgtggagttagttcaccatattagagaatctattccaggtgtgagcctcagcagcgatttcattgctggcttttgtggtgagacggaggaagatcacgtccagacagtctctttgctccgggaagttcagtacaacatgggcttcctctttgcctacagcatgagacagaagacacgggcatatcataggctgaaggatgatgtcccggaagaggtaaaattaaggcgtttggaggaactcatcactatcttccgagaagaagcaacaaaagccaatcagacctctgtgggctgtacccagttggtgctagtggaagggctcagtaaacgctctgccactgacctgtgtggcaggaatgatggaaaccttaaggtgatcttccctgatgcagagatggaggatgtcaataaccctgggctcagggtcagagcccagcctggggactatgtgctggtgaagatcacctcagccagttctcagacacttaggggacatgttctctgcaggaccactctgagggactcttctgcatattgctgacctgagaggatggcctcagagctgacttgggcaatcctccccaacaggaaggggagacattgcctgccactgaggaaacaggtcatgaaggtggagataagctgcaaggggcgaagcaactttatgtcagtggaaaacgtgtctctttaaagctgctatgtgaacagcttttacagtcattaaatttacctaaactaaggttaa

SEQ ID NO: 288744 - DNA, 1632 bp, Homo sapiens
gaacggaagtcgcttgtgtatgaacgcagcggcggacctgtgaggggatccgacttgccggcagaacttacgctgcgggaccccgggcactgttgctgctgcgggagggagaaggctgagcagaccatctggaaccgtttacatcagcttaaagccttgaagacaaggcggccccgctcccgggttcctctgaggattggaattctaggctgcatggctgagaggttgaaggaggagattctcaacagagagaaaatggtagatattttggctggtcctgatgcctaccgggaccttccccggctgctggctgttgctgagtcgggccagcaagctgccaacgtgctgctctctctggacgagacctatgctgatgtcatgccagtccagacaagcgccagtgccacgtctgcctttgtgtcaatcatgcgaggctgtgacaacatgtgtagctactgcattgttcctttcacccggggcagggagaggagtcggcctattgcctccattctagaggaagtgaagaagctttctgagcaggggctgaaagaagtgacacttcttggtcagaatgttaatagttttcgggacaattcggaggtccagttcaacagtgcagtgcctaccaatctcagtcgtggctttaccaccaactataaaaccaagcaaggaggacttcgttttgctcatcttctggatcaggtctccagagtagatcctgaaatgaggatccgttttacctctccccaccccaaggattttcctgatgaggttctgcagctgattcatgagagagataacatctgtaaacagatccacctgccagcccagagtggaagcagccgtgtgttggaggccatgcggaggggatattcaagagaagcttatgtggagttagttcaccatattagagaatctattccaggtgtgagcctcagcagcgatttcattgctggcttttgtggtgagacggaggaagatcacgtccagacagtctctttgctccgggaagttcagtacaacatgggcttcctctttgcctacagcatgagacagaagacacgggcatatcataggctgaaggatgatgtcccggaagaggtaaaattaaggcgtttggaggaactcatcactatcttccgagaagaagcaacaaaagccaatcagacctctgtgggctgtacccagttggtgctagtggaagggctcagtaaacgctctgccactgacctgtgtggcaggaatgatggaaaccttaaggtgatcttccctgatgcagagatggaggatgtcaataaccctgggctcagggtcagagcccagcctggggactatgtgctggtgaagatcacctcagccagttctcagacacttaggggacatgttctctgcaggaccactctgagggactcttctgcatattgctgacctgagaggatggcctcagagctgacttgggcaatcctccccaacaggaaggggagacattgcctgccactgaggaaacaggtcatgaaggtggagataagctgcaaggggcgaagcaactttatgtcagtggaaaacgtgtctctttaaagctgctatgtgaacagcttttacagtcattaaatttacctaaactaaggttaa

SEQ ID NO: 288745 - DNA, 1531 bp, Homo sapiens
ttcctctcctcccacctccctatctcatgatggatgaacttcttggaaggcagagaaaagtctacctcgagacctatggctgccagatgtatgtgaatcagcacagagataagctggcacatctgaaggtagactgtagaggatcgcatcagtctcctcccagaggcagatctgattccactcctaacctgctacatcaggtgggaggctgcacaagggagaaggctgagcagaccatctggaaccgtttacatcagcttaaagccttgaagacaaggcggccccgctcccgggttcctctgaggattggaattctaggtcaatcatgcgaggctgtgacaacatgtgtagctactgcattgttcctttcacccggggcagggagaggagtcggcctattgcctccattctagaggaagtgaagaagctttctgagcaggggctgaaagaagtgacacttcttggtcagaatgttaatagttttcgggacaattcggaggtccagttcaacagtgcagtgcctaccaatctcagtcgtggctttaccaccaactataaaaccaagcaaggaggacttcgttttgctcatcttctggatcaggtctccagagtagatcctgaaatgaggatccgttttacctctccccaccccaaggattttcctgatgaggttctgcagctgattcatgagagagataacatctgtaaacagatccacctgccagcccagagtggaagcagccgtgtgttggaggccatgcggaggggatattcaagagaagcttatgtggagttagttcaccatattagagaatctattccaggtgtgagcctcagcagcgatttcattgctggcttttgtggtgagacggaggaagatcacgtccagacagtctctttgctccgggaagttcagtacaacatgggcttcctctttgcctacagcatgagacagaagacacgggcatatcataggctgaaggatgatgtcccggaagaggtaaaattaaggcgtttggaggaactcatcactatcttccgagaagaagcaacaaaagccaatcagacctctgtgggctgtacccagttggtgctagtggaagggctcagtaaacgctctgccactgacctgtgtggcaggaatgatggaaaccttaaggtgatcttccctgatgcagagatggaggatgtcaataaccctgggctcagggtcagagcccagcctggggactatgtgctggtgaagatcacctcagccagttctcagacacttaggggacatgttctctgcaggaccactctgagggactcttctgcatattgctgacctgagaggatggcctcagagctgacttgggcaatcctccccaacaggaaggggagacattgcctgccactgaggaaacaggtcatgaaggtggagataagctgcaaggggcgaagcaactttatgtcagtggaaaacgtgtctctttaaagctgctatgtgaacagcttttacagtcattaaatttacctaaactaaggttaa

SEQ ID NO: 288746 - DNA, 2165 bp, Homo sapiens
gaacggaagtcgcttgtgtatgaacgcagcggcggacctgtgaggggatccgacttgccggcagaacttacgctgcgggaccccgggcactgttgctgctgcgggagactgtgggctgtttagtgccatgcaccctttacagtgtgtcctccaagtgcagaggtctctggggtggggaccattggcctctgtgtcttggctgtcgctgaggatgtgcagggcacacagcagtctctctagtaccatgtgtcccagtccagagaggcaggaggatggagctcggaaggatttcagctccaggctggctgctggaccgacttttcaacattttttaaaaagtgcctcagctcctcaggagaagctgtcttcagaagtggaagacccacctccctatctcatgatggatgaacttcttggaaggcagagaaaagtctacctcgagacctatggctgccagatgaatgtgaatgacacagagatagcctggtccatcttacagaagagtggctacctgcggaccagtaacctccaagaggcagatgtgattctccttgtcacgtgctctatcagggagaaggctgagcagaccatctggaaccgtttacatcagcttaaagccttgaagacaaggcggccccgctcccgggttcctctgaggattggaattctaggctgcatggctgagaggttgaaggaggagattctcaacagagagaaaatggtagatattttggctggtcctgatgcctaccgggaccttccccggctgctggctgttgctgagtcgggccagcaagctgccaacgtgctgctctctctggacgagacctatgctgatgtcatgccagtccagacaagcgccagtgccacgtctgcctttgtgtcaatcatgcgaggctgtgacaacatgtgtagctactgcattgttcctttcacccggggcagggagaggagtcggcctattgcctccattctagaggaagtgaagaagctttctgagcaggggctgaaagaagtgacacttcttggtcagaatgttaatagttttcgggacaattcggaggtccagttcaacagtgcagtgcctaccaatctcagtcgtggctttaccaccaactataaaaccaagcaaggaggacttcgttttgctcatcttctggatcaggtctccagagtagatcctgaaatgaggatccgttttacctctccccaccccaaggattttcctgatgaggttctgcagctgattcatgagagagataacatctgtaaacagatccacctgccagcccagagtggaagcagccgtgtgttggaggccatgcggaggggatattcaagagaagcttatgtggagttagttcaccatattagagaatctattccaggtgtgagcctcagcagcgatttcattgctggcttttgtggtgagacggaggaagatcacgtccagacagtctctttgctccgggaagttcagtacaacatgggcttcctctttgcctacagcatgagacagaagacacgggcatatcataggctgaaggatgatgtcccggaagaggtaaaattaaggcgtttggaggaactcatcactatcttccgagaagaagcaacaaaagccaatcagacctctgtgggctgtacccagttggtgctagtggaagggctcagtaaacgctctgccactgacctgtgtggcaggaatgatggaaaccttaaggtgatcttccctgatgcagagatggaggatgtcaataaccctgggctcagggtcagagcccagcctggggactatgtgctggtgaaggtgaggagtccttttgggcttttggcttgcactgtgaaatgagtgttggtttggatatttgtggtaataaagttttttcctagagacacattttagtaaaataaaaatcccctctcaaccagtacaatggaagggcactttggattggattttagactgctccttactaatgccttcttattcttcttacctattctcctgccctggaagcgttctttgtgggaatttggtgagtttggagtatgcagtggcatgtagtttctcgctgcagagaggccaggaggtggagtgatttcgagtgagtagagagtgttccctgttggagatcaacattttctttgtgatctctgacggc

SEQ ID NO: 288747 - DNA, 1954 bp, Homo sapiens
gaacggaagtcgcttgtgtatgaacgcagcggcggacctgtgaggggatccgacttgccggcagaacttacgctgcgggaccccgggcactgttgctgctgcgggagactgtgggctgtttagtgccatgcaccctttacagtgtgtcctccaagtgcagaggtctctggggtggggaccattggcctctgtgtcttggctgtcgctgaggatgtgcagggcacacagcagtctctctagtaccatgtgtcccagtccagagaggcaggaggatggagctcggaaggatttcagctccaggctggctgctggaccgacttttcaacattttttaaaaagtgcctcagctcctcaggagaagctgtcttcagaagtggaagacccacctccctatctcatgatggatgaacttcttggaaggcagagaaaagtctacctcgagacctatggctgccagatgaatgtgaatgacacagagatagcctggtccatcttacagaagagtggctacctgcggaccagtaacctccaagaggcagatgtgattctccttgtcacgtgctctatcagggagaaggctgagcagaccatctggaaccgtttacatcagcttaaagccttgaagacaaggcggccccgctcccgggttcctctgaggattggaattctaggctgcatggctgagaggttgaaggaggagattctcaacagagagaaaatggtagatattttggctggtcctgatgcctaccgggaccttccccggctgctggctgttgctgagtcgggccagcaagctgccaacgtgctgctctctctggacgagacctatgctgatgtcatgccagtccagacaagcgccagtgccacgtctgcctttgtgtcaatcatgcgaggctgtgacaacatgtgtagctactgcattgttcctttcacccggggcagggagaggagtcggcctattgcctccattctagaggaagtgaagaagctttctgagcaggggctgaaagaagtgacacttcttggtcagaatgttaatagttttcgggacaattcggaggtccagttcaacagtgcagtgcctaccaatctcagtcgtggctttaccaccaactataaaaccaagcaaggaggacttcgttttgctcatcttctggatcaggtctccagagtagatcctgaaatgaggatccgttttacctctccccaccccaaggattttcctgatgaggttctgcagctgattcatgagagagataacatctgtaaacagatccacctgccagcccagagtggaagcagccgtgtgttggaggccatgcggaggggatattcaagagaagcttatgtggagttagttcaccatattagagaatctattccaggtgtgagcctcagcagcgatttcattgctggcttttgtggtgagacggaggaagatcacgtccagacagtctctttgctccgggaagttcagtacaacatgggcttcctctttgcctacagcatgagacagaagacacgggcatatcataggctgaaggatgatgtcccggaagaggtaaaattaaggcgtttggaggaactcatcactatcttccgagaagaagcaacaaaagccaatcagacctctgtgggctgtacccagttggtgctagtggaagggatcacctcagccagttctcagacacttaggggacatgttctctgcaggaccactctgagggactcttctgcatattgctgacctgagaggatggcctcagagctgacttgggcaatcctccccaacaggaaggggagacattgcctgccactgaggaaacaggtcatgaaggtggagataagctgcaaggggcgaagcaactttatgtcagtggaaaacgtgtctctttaaagctgctatgtgaacagcttttacagtcattaaatttacctaaactaaggttaa

SEQ ID NO: 288748 - DNA, 1871 bp, Homo sapiens
gaacggaagtcgcttgtgtatgaacgcagcggcggacctgtgaggggatccgacttgccggcagaacttacgctgcgggaccccgggcactgttgctgctgcgggagactgtgggctgtttagtgccatgcaccctttacagtgtgtcctccaagtgcagaggtctctggggtggggaccattggcctctgtgtcttggctgtcgctgaggatgtgcagggcacacagcagtctctctagtaccatgtgtcccagtccagagaggcaggaggatggagctcggaaggatttcagctccaggctggctgctggaccgacttttcaacattttttaaaaagtgcctcagctcctcaggagaagctgtcttcagaagtggaagacccacctccctatctcatgatggatgaacttcttggaaggcagagaaaagtctacctcgagacctatggctgccagatgaatgtgaatgacacagagatagcctggtccatcttacagaagagtggctacctgcggaccagtaacctccaagaggcagatgtgattctccttgtcacgtgctctatcagggagaaggctgagcagaccatctggaaccgtttacatcagcttaaagccttgaagacaaggcggccccgctcccgggttcctctgaggattggaattctaggctgcatggctgagaggttgaaggaggagattctcaacagagagaaaatggtagatattttggctggtcctgatgcctaccgggaccttccccggctgctggctgttgctgagtcgggccagcaagctgccaacgtgctgctctctctggacgagacctatgctgatgtcatgccagtccagacaagcgccagtgccacgtctgcctttgtgtcaatcatgcgaggctgtgacaacatgtgtagctactgcattgttcctttcacccggggcagggagaggagtcggcctattgcctccattctagaggaagtgaagaagctttctgagcaggggctgaaagaagtgacacttcttggtcagaatgttaatagttttcgggacaattcggaggtccagttcaacagtgcagtgcctaccaatctcagtcgtggctttaccaccaactataaaaccaagcaaggaggacttcgttttgctcatcttctggatcaggtctccagagtagatcctgaaatgaggatccgttttacctctccccaccccaaggattttcctgatgaggttctgcagctgattcatgagagagataacatctgtaaacagatccacctgccagcccagagtggaagcagccgtgtgttggaggccatgcggagggggtcaggcttgcttggagagggggcatccctcacttttccatgtttccttaatgaccaaacagtgtccttgttgccaagaacctagcatagtgtgtggcacaaagtagctgctcagtaaatatttattgtatgactaagccactgggcactggagtttgcttctgctcacttcataagcaaaggctaaggactggtcacccattttcactgtttagtttaaaaagcataaatatttactgagcagccactgtgtgacagtaagtatttattgtatgactaagccacagggcactggagcttgcttcgctaactccataacataggctaaggactgggtcatccattttcactgtttagtatgtttttttttaattaagcacctatggtgtggcacactctgagattttaattttttaatgttaacattaaggttttgttacatcttggaatttaaatgtcgctctatgtgttcactttctttgagaataataagtattacacagatgagactgaagggagaatctgtcccaaggcaagct

SEQ ID NO: 288749 - DNA, 1479 bp, Homo sapiens
gaacggaagtcgcttgtgtatgaacgcagcggcggacctgtgaggggatccgacttgccggcagaacttacgctgcgggaccccgggcactgttgctgctgcgggagactgtgggctgtttagtgccatgcaccctttacagtgtgtcctccaagtgcagaggtctctggggtggggaccattggcctctgtgtcttggctgtcgctgaggatgtgcagggcacacagcagtctctctagtaccatgtgtcccagtccagagaggcaggaggatggagctcggaaggatttcagctccaggctggctgctggaccgacttttcaacattttttaaaaagtgcctcagctcctcaggagaagctgtcttcagaagtggaagacccacctccctatctcatgatggatgaacttcttggaaggcagagaaaagtctacctcgagacctatggctgccagatgaatgtgaatgacacagagatagcctggtccatcttacagaagagtggctacctgcggaccagtaacctccaagaggcagatgtgattctccttgtcacgtgctctatcagggagaaggctgagcagaccatctggaaccgtttacatcagcttaaagccttgaagacaaggcggccccgctcccgggttcctctgaggattggaattctaggctgcatggctgagaggttgaaggaggagattctcaacagagagaaaatggtagatattttggctggtcctgatgcctaccgggaccttccccggctgctggctgttgctgagtcgggccagcaagctgccaacgtgctgctctctctggacgagacctatgctgatgtcatgccagtccagacaagcgccagtgccacgtctgcctttgtgtcaatcatgcgaggctgtgacaacatgtgtagctactgcattgttcctttcacccggggcagggagaggagtcggcctattgcctccattctagaggaagtgaagaagctttctgagcaggggctgaaagaagtgacacttcttggtcagaatgttaatagttttcgggacaattcggaggtccagttcaacagtgcagtgcctaccaatctcagtcgtggctttaccaccaactataaaaccaagcaaggaggacttcgttttgctcatcttctggatcaggtctccagagtagatcctgaaatgaggatccgttttacctctccccaccccaaggattttcctgatgagtctgcaggaccactctgagggactcttctgcatattgctgacctgagaggatggcctcagagctgacttgggcaatcctccccaacaggaaggggagacattgcctgccactgaggaaacaggtcatgaaggtggagataagctgcaaggggcgaagcaactttatgtcagtggaaaacgtgtctctttaaagctgctatgtgaacagcttttacagtcattaaatttacctaaactaaggttaa

SEQ ID NO: 288750 - DNA, 1635 bp, Homo sapiens
gaacggaagtcgcttgtgtatgaacgcagcggcggacctgtgaggggatccgacttgccggcagaacttacgctgcgggaccccgggcactgttgctgctgcgggagactgtgggctgtttagtgccatgcaccctttacagtgtgtcctccaagtgcagaggtctctggggtggggaccattggcctctgtgtcttggctgtcgctgaggatgtgcagggcacacagcagtctctctagtaccatgtgtcccagtccagagaggcaggaggatggagctcggaaggatttcagctccaggctggctgctggaccgacttttcaacattttttaaaaagtgcctcagctcctcaggagaagctgtcttcagaagtggaagacccacctccctatctcatgatggatgaacttcttggaaggcagagaaaagtctacctcgagacctatggctgccagatgaatgtgaatgacacagagatagcctggtccatcttacagaagagtggctacctgcggaccagtaacctccaagaggcagatgtgattctccttgtcacgtgctctatcagggagaaggctgagcagaccatctggaaccgtttacatcagcttaaagccttgaagacaaggcggccccgctcccgggttcctctgaggattggaattctaggctgcatggctgagaggttgaaggaggagattctcaacagagagaaaatggtagatattttggctggtcctgatgcctaccgggaccttccccggctgctggctgttgctgagtcgggccagcaagctgccaacgtgctgctctctctggacgagacctatgctgatgtcatgccagtccagacaagcgccagtgccacgtctgcctttgtgtcaatcatgcgaggctgtgacaacatgtgtagctactgcattgttcctttcacccggggcagggagaggagtcggcctattgcctccattctagaggaagtgaagaagctttctgagcaggggctgaaagaagtgacacttcttggtcagaatgttaatagttttcgggacaattcggaggtccagttcaacagtgcagtgcctaccaatctcagtcgtggctttaccaccaactataaaaccaagcaaggaggacttcgttttgctcatcttctggatcaggtctccagagtagatcctgaaatgaggatccgttttacctctccccaccccaaggattttcctgatgaggtgagcgtcaggttagctgtgacaaactgatattagtagtgtcttgagcaggccaaaggctggacccagtagggatgcagcagagacctggagtcctgcttagggatcctgtggggtattgctgcatcaccctccagatctgctggtcctttgaagatttgaagtccaccagtggctgggcacggggcttacaccaataatctcaacacttggagacgctgaggcaggtggattacttgagctcaggagttggaaaccagcctgggcaacatggcgaaaccccgtctctactgcaaatacaaaaaaattagctgggtggggtgggatacgactgtagttctggctacttgggagactgaggtggcatacgactgtagttccagctacttgggagactgagg

SEQ ID NO: 288751 - DNA, 1003 bp, Homo sapiens
gaacggaagtcgcttgtgtatgaacgcagcggcggacctgtgaggggatccgacttgccggcagaacttacgctgcgggaccccgggcactgttgctgctgcgggaggcagatgtgattctccttgtcacgtgctctatcaggttctgcagctgattcatgagagagataacatctgtaaacagatccacctgccagcccagagtggaagcagccgtgtgttggaggccatgcggaggggatattcaagagaagcttatgtggagttagttcaccatattagagaatctattccaggtgtgagcctcagcagcgatttcattgctggcttttgtggtgagacggaggaagatcacgtccagacagtctctttgctccgggaagttcagtacaacatgggcttcctctttgcctacagcatgagacagaagacacgggcatatcataggctgaaggatgatgtcccggaagaggtaaaattaaggcgtttggaggaactcatcactatcttccgagaagaagcaacaaaagccaatcagacctctgtgggctgtacccagttggtgctagtggaagggctcagtaaacgctctgccactgacctgtgtggcaggaatgatggaaaccttaaggtgatcttccctgatgcagagatggaggatgtcaataaccctgggctcagggtcagagcccagcctggggactatgtgctggtgaagatcacctcagccagttctcagacacttaggggacatgttctctgcaggaccactctgagggactcttctgcatattgctgacctgagaggatggcctcagagctgacttgggcaatcctccccaacaggaaggggagacattgcctgccactgaggaaacaggtcatgaaggtggagataagctgcaaggggcgaagcaactttatgtcagtggaaaacgtgtctctttaaagctgctatgtgaacagcttttacagtcattaaatttacctaaactaaggttaa

SEQ ID NO: 288752 - DNA, 870 bp, Homo sapiens
gaacggaagtcgcttgtgtatgaacgcagcggcggacctgtgaggggatccgacttgccggcagaacttacgctgcgggaccccgggcactgttgctgctgcgggagatattcaagagaagcttatgtggagttagttcaccatattagagaatctattccaggtgtgagcctcagcagcgatttcattgctggcttttgtggtgagacggaggaagatcacgtccagacagtctctttgctccgggaagttcagtacaacatgggcttcctctttgcctacagcatgagacagaagacacgggcatatcataggctgaaggatgatgtcccggaagaggtaaaattaaggcgtttggaggaactcatcactatcttccgagaagaagcaacaaaagccaatcagacctctgtgggctgtacccagttggtgctagtggaagggctcagtaaacgctctgccactgacctgtgtggcaggaatgatggaaaccttaaggtgatcttccctgatgcagagatggaggatgtcaataaccctgggctcagggtcagagcccagcctggggactatgtgctggtgaagatcacctcagccagttctcagacacttaggggacatgttctctgcaggaccactctgagggactcttctgcatattgctgacctgagaggatggcctcagagctgacttgggcaatcctccccaacaggaaggggagacattgcctgccactgaggaaacaggtcatgaaggtggagataagctgcaaggggcgaagcaactttatgtcagtggaaaacgtgtctctttaaagctgctatgtgaacagcttttacagtcattaaatttacctaaactaaggttaa

SEQ ID NO: 288753 - DNA, 1047 bp, Homo sapiens
tgtctgagacaaatagaatggggcttgaacaaaagttagggaataggtgattttgtgtgtctggtttaattagcctcttaattatgtgaaaattgaccttggaggatacatagtaagagcggtattgctttctgtaaggttctttggtgagattgtgattacctataatgtgttctgtttcatcaggttctgcagctgattcatgagagagataacatctgtaaacagatccacctgccagcccagagtggaagcagccgtgtgttggaggccatgcggaggggatattcaagagaagcttatgtggagttagttcaccatattagagaatctattccaggtgtgagcctcagcagcgatttcattgctggcttttgtggtgagacggaggaagatcacgtccagacagtctctttgctccgggaagttcagtacaacatgggcttcctctttgcctacagcatgagacagaagacacgggcatatcataggctgaaggatgatgtcccggaagaggtaaaattaaggcgtttggaggaactcatcactatcttccgagaagaagcaacaaaagccaatcagacctctgtgggctgtacccagttggtgctagtggaagggctcagtaaacgctctgccactgacctgtgtggcaggaatgatggaaaccttaaggtgatcttccctgatgcagagatggaggatgtcaataaccctgggctcagggtcagagcccagcctggggactatgtgctggtgaagatcacctcagccagttctcagacacttaggggacatgttctctgcaggaccactctgagggactcttctgcatattgctgacctgagaggatggcctcagagctgacttgggcaatcctccccaacaggaaggggagacattgcctgccactgaggaaacaggtcatgaaggtggagataagctgcaaggggcgaagcaactttatgtcagtggaaaacgtgtctctttaaagctgctatgtgaacagcttttacagtcattaaatttacctaaactaaggttaa

SEQ ID NO: 288754 - DNA, 1036 bp, Homo sapiens
gaacggaagtcgcttgtgtatgaacgcagcggcggacctgtgaggggatccgacttgccggcagaacttacgctgcgggaccccgggcactgttgctgctgcgggagggagaaggctgagcagaccatctggaaccgtttacatcagcttaaagccttgaagacaaggcggccccgctcccgggttcctctgaggattggaattctaggtcaatcatgcgaggctgtgacaacatgtgtagctactgcattgttcctttcacccggggcagggagaggagtcggcctattgcctccattctagaggaagtgaagaagctttctgagcaggtgtgagcctcagcagcgatttcattgctggcttttgtggtgagacggaggaagatcacgtccagacagtctctttgctccgggaagttcagtacaacatgggcttcctctttgcctacagcatgagacagaagacacgggcatatcataggctgaaggatgatgtcccggaagaggtaaaattaaggcgtttggaggaactcatcactatcttccgagaagaagcaacaaaagccaatcagacctctgtgggctgtacccagttggtgctagtggaagggctcagtaaacgctctgccactgacctgtgtggcaggaatgatggaaaccttaaggtgatcttccctgatgcagagatggaggatgtcaataaccctgggctcagggtcagagcccagcctggggactatgtgctggtgaagatcacctcagccagttctcagacacttaggggacatgttctctgcaggaccactctgagggactcttctgcatattgctgacctgagaggatggcctcagagctgacttgggcaatcctccccaacaggaaggggagacattgcctgccactgaggaaacaggtcatgaaggtggagataagctgcaaggggcgaagcaactttatgtcagtggaaaacgtgtctctttaaagctgctatgtgaacagcttttacagtcattaaatttacctaaactaaggttaa

SEQ ID NO: 288755 - DNA, 592 bp, Homo sapiens
aagccacggcgcgtgtgcgtggggggcaagcgccggcgtgatgacatcagtgtggacagcttggacttcaccaagaagatcctgcacacggcctggcacccggctgagaacatcattgccatcgccgccaccaacaacctgtacccagttggtgctagtggaagggctcagtaaacgctctgccactgacctgtgtggcaggaatgatggaaaccttaaggtgatcttccctgatgcagagatggaggatgtcaataaccctgggctcagggtcagagcccagcctggggactatgtgctggtgaagatcacctcagccagttctcagacacttaggggacatgttctctgcaggaccactctgagggactcttctgcatattgctgacctgagaggatggcctcagagctgacttgggcaatcctccccaacaggaaggggagacattgcctgccactgaggaaacaggtcatgaaggtggagataagctgcaaggggcgaagcaactttatgtcagtggaaaacgtgtctctttaaagctgctatgtgaacagcttttacagtcattaaatttacctaaactaaggttaa

SEQ ID NO: 288756 - DNA, 538 bp, Homo sapiens
tgtcttggacagtgaagggagctggcgttggtaatcacgctgcaactaggaatccctgacctcgccgaaccctcaactcactgccggctccgagtttcataaattgccgcggaacaacctcgtcgcactcttgcgcacgcgcaccagctgtggaaggaaccccctaggagcccccgcgacccggatcggtgaggtagaccaggcctttgccagccccgtccctttctgcaggccccgcccacgccgcacacttggaactctggccctgtgaatggactcacgtggcaatggatgcagcaatattcagtttccagaatcagcagctccggcagcagtgtcctgtgctgatggtgttggcagggagatggatacagggtatgtcagtatgattttcagaaatttagctccctactgtcacccgacaaccagaactctgaagacagtgaagattctatctccagatatggatccaactgttgctcaagatgtgggatctaactttattgctgtctgttacttaataaaatttacaaaagga

SEQ ID NO: 288757 - DNA, 426 bp, Homo sapiens
tgtcttggacagtgaagggagctggcgttggtaatcacgctgcaactaggaatccctgacctcgccgaaccctcaactcactgccggctccgagtttcataaattgccgcggaacaacctcgtcgcactcttgcgcacgcgcaccagctgtggaaggaaccccctaggagcccccgcgacccggatcggtgaggtagaccaggcctttgccagccccgtccctttctgcaggccccgcccacgccgcacacttggaactctggccctgtgaatggactcacggtgagcttctagtggcttaaagaaatgagcgtcatacttccggcgctgcctcatcccgtccggggaaactagtccaaatcgcctttctgttccccacaccccatttgtctggaatcaaaaaacaatgacaatttcgacaagaca

SEQ ID NO: 288758 - DNA, 1086 bp, Homo sapiens
agtcccgggagcccggcctcgtgcgccgcgctttgagcctctaggccatgaaactgcctcaccaagcactatgcaattgagtgcccaccagaagacacccctccagtcaacccacagaccccagaaagagtacccagaggagcctgagcacactccaccctatctgttctctgaaattcaatcaaatgagtcactctacttctctggaagcagaaagaggctggaagtttttctccaggtaagttcctccatgtagaaacatgaagaatagggataaggggcttcagcctggatggaatctcacactgaacctggcaaagctaggtgagggaagaggtttcaactggataagagtttgagttttgatatcttaatggactggactttttatgagtaaaataatccgctctttttaatgtctgaaagaaaagaaaaagctgtaaactacgtctgagaattgacacagttaagcttctaggggcagtcatgagaaaaaacactgttcctatctgcttacatactactgcatccagcttattcattaagccagatacagaaggctctgaggattttggcctcaacaactgggtatatggtggtggtcatttactaaaatagaggtgtcttttatttatttagtgacaggatctcagtctgtcacccaggtgggaatgcactgggtgacaaagtgagactccatctcaaaaaaataaataaataaaaataaaagtaaaaatagacaaaggaaaaacatgaaaatccgaacaaaaattctgcttgagtgctgggactttggtacctaagctgttagtcctcttccgatgttctttaattcaaccaacactgatcaagcatttgctctgtgcctggcaccgtttttaatgctgagagtacaacagtgaacaaaaacacaatccctgtccccacatagctgacatgccaggggagagaccaatgccacagaaaacaaacacatcaaacacacagaatggtgatttagtgcggcagatgggcagggagagcagggagcgctggtgggggccctgctgagggcggcagccaagcctcgcctggcctcagggaggt

SEQ ID NO: 288759 - DNA, 2543 bp, Homo sapiens
agtcccgggagcccggcctcgtgcgccgcgctttgagcctctaggccatgaaactgcctcaccaagcactatgcaattgagtgcccaccagaagacacccctccagtcaacccacagaccccagaaagagtacccagaggagcctgagcacactccaccctatctgttctctgaaattcaatcaaatgagtcactctacttctctggaagcagaaagaggctggaagtttttctccagcagcagactgctcgacaaacactgcgccaagagctcctcagcagaagctcctcgcatcagatcctctgtgctgggaatcctcccctcttgagcacactctgtgctcctcttccagttacggtgcatgtgaagcaatggtatgggaaaattgtttgcagaaggatgaaaaggctttattgccaaactcttaaggtattttgttaataaaatcattttcataatggaaaagactcagaaaattcccctcgcatgacatataacatccaacaaggggctgaaccaagaaaaaatactgcagctgctgctaatggcaacactgagcaagcacctggcctgtgccaggcactgtcctgtgcagtctgtgtttgcactcattttatcctcaagagccagatgagcatctccaccagacagcacctgcagaggcttgggcagtttattttaccgtctctgagtaaaatagggataataagtaacagtacccatacacaggtggcagagacgctagggaacttgcccaaggtcacagagcttccaagtggaggagcagggacacatatgctcacaatgatggcactaaggcacatgttgcctggatggagaccagcccacagatgagagttccaggacagagggaacatggatggatcaagtgaagtgacagaacatttggaaaactctaccgagatatatacggccccccagtaaaattaaagagataaagagaactacattaagtgagacaataaggcaactctacttcttgcaggaaaaaaataattgtggttatagaacactactggttctgaggtgaatagcagtcacagagccatcaaaatatgaccccactcactgaagtaatacaaagtgctagtgtagctatcccgggaagacgtggaaggccgagcaaggaccatggcacaagaggccacgctgtacctagtatggtatgcagtggccaagaggacccccctgattccacctagtgttcatgcccacgtgtgatctcctgccccgtgagctgggcctagccactcacttctgacagacagaagccaacaaaagcaacaggatgtcacttctaagtttaggttataaacacactcagacttccatctaggctcacctcttgctcactctgatgaaagccagctgccatgctgtcagctggggagaggcccatgtggcaggaactgaggaagtctttggccacagcctgcaaggaagtgaatcctgacacaagctcactagagtgagctgggaagtagatacccttcagtcaagctttcagatgaggccacaatcctagccaacattttcatttccacccatgagaaaccttgagccagaagacccaagctaagctacacctggattcctgacccacagataccatgataacagacattattttaagctgctatgttaggagtaattagttatttaggaataaggtaactaatacatttatattaatgggaagtcagcagagaacatttaaatggataaactgagaaatggctgtgtaagtgtgtgatctggaaacaggagaaaaatgcagccctgaagaaaggagttaagagaggaaggaggagctactatgtctcattttaaatcacgtgggtggcattatttgacttctttttaagtacacggaagtgttactttcttaaatgaaaatgaaggtaacagcagcagtaaactaatttccagtagatgaaatgtgactttgtaatcccaggaaaagggaagaatttgcaccaagaagttactgttacctcagaatggcaagagcatggatggctcttatcatcatctttatacttcttttacatttcctcattttttaaaagttttgtgtacatattacatttaggaaatccaatatatagtattaaaacagaaaaagtaaagaagcaggctgggcttggtgcccactactcaatttgactggcttaaaaaaataattttttaaacgacatgtacggacagacataatacttgcttctgagcctcccagtctttcaaaaccacattagggaataagcagtatttgcatggttccagtgatatctgggagtaagtgaaagtaatgaaaacacagaagtaaacacaaagtaattatagttcacctttatacacacgttaacagaaatcatctgatcccctttgctgctaagtgagttgaaaagcgaaagcgtctgaatcccaccagcatcgctggatgtgtcatccactgagccttcatctcccatgaacttgacttttaaccaatttgctagaattctacagatttaaaaaaaac

SEQ ID NO: 288760 - DNA, 819 bp, Homo sapiens
acctccctggttcaagcgattctcctgcctcagcctcccgagtagctgggactacaggtgcatgccaccatacctgggttaattttttgtgtttccagtagagacaagatttcaccacgttagccaggatggtctcgatttcctgacctcgtgatccgcccaccacggcctcccaaagtgctaggagattgagactgcagaaggaaaccctgtctctaaaaacaaggtccagctaaaatcagggtccagctccaccacaagcgcagctccaggggctgttgagttttgcctctaccattccaagtagtctctgctccagaccaagtcccaccatctggcagtcatgtcagtccaaccacagtcatatcagggcacttccagtcattgagtgccccttgaggaggctggaggagaggccaatgacatttgcacttgagactccagagtctagatttataaccactatgttacggctgccagtgtggctgcaaggacacttctttcattcattcatttacaatagatgtagcatctgctgtgtgccagatgccattctaggttctagggaaacaaggcagagcccctgttttccaaggcatccacattctaggaaagactgctaccagcctggcgtggtggctcatgcctgtaatcccagtactttgggaggccgaggtgggcggatcacttgatgtcaggagttcaagaccagccaacatagtgaaaccccgtttctactaaaagtacaaaaatcagctgggcatggtgcacgtgcctgtagtcccagctactcaggaagctaaggcaggagaatcgctt

SEQ ID NO: 288761 - DNA, 788 bp, Homo sapiens
acctccctggttcaagcgattctcctgcctcagcctcccgagtagctgggactacaggtgcatgccaccatacctgggttaattttttgtgtttccagtagagacaagatttcaccacgttagccaggatggtctcgatttcctgacctcgtgatccgcccaccacggcctcccaaagtgctaggagattgagactgcagaaggaaaccctgtctctaaaaacaaggtccagctaaaatcagggtccagctccaccacaagcgcagctccaggggctgttgagttttgcctctaccattccaagtagtctctgctccagaccaagtcccaccatctggcagtcatgtcagtccaaccacagtcatatcagggcacttccagtcattgagtgccccttgaggaggctggaggagaggccaatgacatttgcacttgagactccagagtctagatttataaccactatgttacggctgccagtgtggctgcaaggacacttctttcattcattcatttacaatagatgtagcatctgctgtgtgccagatgccattctaggttctagggaaacaaggcagagcccctgttttccaaggcatccacattctaggaaagactgctaccagcctggcgtggtggctcatgcctgtaatcccagtactttgggaggccgaggcgggcggatcacgaggtcaggagatcgagaccatcctggctaagacggtgaaaccgtctctactaaaaatacaaaaaaattagccgggcgtggtggcggatgcctgtagtcc

SEQ ID NO: 288762 - DNA, 694 bp, Homo sapiens
tcccattgttgcagccctccagtagtcctatcagctttaatcaggctagaacacttcatcatgcaagtggtagcagataattaataatttctctgagtattaacttacatctcaaagtttttcttcccaggaaattacctttccacacagtctgagagtctggaagtcaagttggatgcgggagcatcgtgcccccctatagcatacagcagtccattccaggtcgtcactcctacgccacctctcctttttgacatctgtgcacacagtgtccacttattagtatgaggatcaaaacattctactgatttgagacaagaacttccatcacgaccaccaactgcataaagtctgcaaaaagaatatatgaaatgataaataagacatgtgccattatgcttagaacaaagaggctcttcttatgttgttatctcattgaatttaaggtgccatcagttataaaacacactgtcaatgtgtgtgtcattaaaaaagtatgctatgtttgaaatgacacatgtaagtatcatatatcactctgtatatacatgaaaaggaaaacaaactgcacatgaaggcagtgacaactgtttcatcactgccatctctttgacaagtcaccattggttgtaatatgcatggaaattcagaggtgttaaaatatgtcttagaatagacaaaatatggtgtataa

SEQ ID NO: 288763 - DNA, 1195 bp, Homo sapiens
tttgaatgaggaagctctcttcatttatttcatatgaggatgaagaagaggattatgtgatcacaggaatgttgcatgcgggataatccaaagctggttatctccaggccctcactctgccaagagatctctctggaagaagcagccagttcacagatgccctggatccctccgtgcccaatcataaaaaagtcatgaccgtccctatcttgccaatctgccaggactccaaggggaaaaagcggataagtatccttcaggagacagagaaaaagatatcatcagctccttggctaataccacatcttgcaagacccctgccaggtactcccactgtgggtactcaggacagcctgcctcagtccaccaggcattttgcaaacctgctcatcccaataatgattttccccaacccccagcagggcagtgggacactcaggtgtgggatgtagccgcacatcatgacccagctaggacagacacacaatacagtagcctcggtgtgtgtgccgtacactctatcatctccatcagtttgtgtactgaggggtaccctgcctcctaattgcaggctccctaagggcacagtacctcagccacctgttttctcaaaggctgagcacaggtgaccccccaccccaccaaccccgccactaatgtctgggccataagtgaacatgcccctctcagaggtaacagcaagtttccagtgaggaaaaccagaacttgggacagcctggttggggcgggcgggagtatgaacagcctgtcttctcatcataaaattggcataatggagattatctacctcatggggatagcatgtcttgtctgagcaaagggagagtggatagggattgtaaggatcaaatgggatcatgagtgtaaagtacctgtagaggacctagcacatggtaagtgtataacacttgttgttagagtaacagttttccctgagtatccgtgggagatttgttctagaatccccagaggaaaccagaatctacatttgctcaagtcccttacataaaatggtgtaatatttgcatgtaacctacacacatcctctcatatactttaaataatctctgggttacttataatacctaatataatgtacgtactatgtaaatagttgtattgtttagggaataatgacaaggaataaagtctatacgtattttcagtatagatg

SEQ ID NO: 288764 - DNA, 1572 bp, Homo sapiens
gatcccggtgccagggaccctgcccagttccaggcgtcgccctgacccagaaacgactgggcgccgccgtcctggaaaggccccagcgcacggacatctgaggagctgtttccgttcctctgcccgccatgccgttcctggagctggacacgaatttgcccgccaaccgagtgcccgcggggctgagagaaacgactctgcgccgccgctgcctccatcctgggcaaacctgcggaccgcgtgaacgtgacggtacggccgggcctggccatggcgctgagcgggtccaccgagccctgcgcgcagctgtccatctcctccatcggcgtagtgggcaccgccgaggacaaccgcagccacagcgcccacttctttgagtttctcaccaaggagctagccctgggccaggaccggttccctacggtcttatccaccagccctgctgcccatggtggccccagatgcccaggagagataatagaaggccctcactctgccaagagatctctctggaagaagcagccagttcacagatgccctggatccctccgtgcccaatcataaaaaagtcatgaccgtccctatcttgccaatctgccaggactccaaggggaaaaagcggataagtatccttcaggagacagagaaaaagatatcatcagctccttggctaataccacatcttgcaagacccctgccaggtactcccactgtgggtactcaggacagcctgcctcagtccaccaggcattttgcaaacctgctcatcccaataatgattttccccaacccccagcagggcagtgggacactcaggtgtgggatgtagccgcacatcatgacccagctaggacagacacacaatacagtagcctcggtgtgtgtgccgtacactctatcatctccatcagtttgtgtactgaggggtaccctgcctcctaattgcaggctccctaagggcacagtacctcagccacctgttttctcaaaggctgagcacaggtgaccccccaccccaccaaccccgccactaatgtctgggccataagtgaacatgcccctctcagaggtaacagcaagtttccagtgaggaaaaccagaacttgggacagcctggttggggcgggcgggagtatgaacagcctgtcttctcatcataaaattggcataatggagattatctacctcatggggatagcatgtcttgtctgagcaaagggagagtggatagggattgtaaggatcaaatgggatcatgagtgtaaagtacctgtagaggacctagcacatggtaagtgtataacacttgttgttagagtaacagttttccctgagtatccgtgggagatttgttctagaatccccagaggaaaccagaatctacatttgctcaagtcccttacataaaatggtgtaatatttgcatgtaacctacacacatcctctcatatactttaaataatctctgggttacttataatacctaatataatgtacgtactatgtaaatagttgtattgtttagggaataatgacaaggaataaagtctatacgtattttcagtatagatg

SEQ ID NO: 288765 - DNA, 667 bp, Homo sapiens
gatcccggtgccagggaccctgcccagttccaggcgtcgccctgacccagaaacgactgggcgccgccgtcctggaaaggccccagcgcacggacatctgaggagctgtttccgttcctctgcccgccatgccgttcctggagctggacacgaatttgcccgccaaccgagtgcccgcggggctgagagaaacgactctgcgccgccgctgcctccatcctgggcaaacctgcggaccgcgtgaacgtgacggtacggccgggcctggccatggcgctgagcgggtccaccgagccctgcgcgcagctgtccatctcctccatcggcgtagtgggcaccgccgaggacaaccgcagccacagcgcccacttctttgagtttctcaccaaggagctagccctgggccaggaccggatacttatccgctttttccccttggagtcctggcagattggcaagatagggacggtcatgacttttctatgattgggcacggagggatccagggcatctgtgaactaggctgcttcttccagagagatctcttggcagagtgagggcctggagataaccagctattggattatcccgcatgcaacattcctgtgatcacataatcctcttcttcatcctcatatgaaataacatgaaggagagcttcctcatt

SEQ ID NO: 288766 - DNA, 626 bp, Homo sapiens
gatcccggtgccagggaccctgcccagttccaggcgtcgccctgacccagaaacgactgggcgccgccgtcctggaaaggccccagcgcacggacatctgaggagctgtttccgttcctctgcccgccatgccgttcctggagctggacacgaatttgcccgccaaccgagtgcccgcggggctgagagaaacgactctgcgccgccgctgcctccatcctgggcaaacctgcggaccgcgtgaacgtgacggtacggccgggcctggccatggcgctgagcgggtccaccgagccctgcgcgcagctgtccatctcctccatcggcgtagtgggcaccgccgaggacaaccgcagccacagcgcccacttctttgagtttctcaccaaggagctagccctgggccaggaccggtgcgtaggggtagtaggggatccatgtgggactgccgcagactggagccactgatcctgcctcagggggaaaaacccatttcttgccctgcccagtaaggacacatcagggtctggagctttggggccccctgaccccttaggttcctgctgttaggaccatcttcaaagtgcgagcaggattgaatgaatttctggctctgctcctcagtg

SEQ ID NO: 288767 - DNA, 551 bp, Homo sapiens
  misc_feature (37)..(37): n is a, c, g, or t
  misc_feature (51)..(51): n is a, c, g, or t
gggagtgcccgtctggcccgaggtttggttttaaaangacgactcgggttnacaaacgcgcttctggcaaaaccgaccaagagtgatgtctctctgtgagtttaaagctggccaggagcaggtaaaataaagcattctgagtggatgtgcactgcatggagttggctgtcagctggcaggggtgatgcacatggaggaggtggggagcctgttcagaccctcggaccctgtacctgttcgctcatggtgttgatcccatcgggccccagcagagacactgcctgcttcaccaggtctgttcgtccacagttcagcatccggaaacccaggtcctgcttaaacttggcttcgatggccaccgcatccagctttcgagatgcacaaaagcagtcgtcggccctaaggaagggaagagacatcatgcgggtacagcggcttcccagaggggcacaggagcaaactccgcaggaagcaccctgggacattgcatttgcttttcatgtaaattgcctgttcctaggctccaattaaaatgatggcctccggatgtc

SEQ ID NO: 288768 - DNA, 332 bp, Homo sapiens
caactgtctcttggaccgttcggatacagatgggaatgtatcccagtcctctgccattgacctcaggaaacgctgcagccagctggaaggacattcaggtacccgggtaggctcctccctgcgacagaccttcagcttcctctcgggcatgaccggaaaggccaagacccgggaaaaggaggagatgaaggaagccaaggatgcccgctataccaatgggcacctcttcaccaccatttcagtttcaggcatgaccatgtgctatgcctgtaacaagagcatcacagccaaggaagccctcatctgcccaacctgcaatgtgactatccact

SEQ ID NO: 288769 - DNA, 603 bp, Homo sapiens
agtgacccacccacctcggcctctcaaagtgctcagattacaagcgtgagccaccgcacctggcctggaaacatctattttctaagaaaccgtatgatacaggacaccactggactaagagttagatagctggttctaatactcgttctgttactaacaagttttgtgaattttagatacctctcatcttttgatacttcattaatctgtatcattaagagctcacattggattatctctgacgttcctgccagttctaaaattccattattggccaggtaatcccaatactttgggaggctgaggtgggaggatcctttgagccaaggactttgagactagcctaagcaacacagagagatccctgtgtctacaaaaaaaataattttttaaattagctgggaatggtggcctgtgcctgcagtcctagctacccaggaggctgaggcgagaggattgctagagcccaagaattcaaggctcttcaagcacggagctatcagtgcaccactgcattccaccctgggtgacagaatgagacgctgtctctaaaaaataaaaaataaaaataaaatcccaccatttcactacacatactataat

SEQ ID NO: 288770 - DNA, 683 bp, Homo sapiens
taaaaaacaaaaatggattgccaacctcccctaccatagagtgtctaactcagaagcatgaactggcgtggcatatgcctgttgcctatgtatagtttctcagtataaagcttttctgaattgtcagattctgtggacatttggaggctaggaggtaagattccaaaaccagcatgtcaaccaaagccaataataaggcctctcaaatacctaccacatatctgaagagaaacttttaacagttttcactatatatttaaaacaaaaagtcagaagagtaaaaaagtcccattttaaactgtatatataccatcttaattcttgtgttggactatagtaaataacaaattcaggccaggtaatcccaatactttgggaggctgaggtgggaggatcctttgagccaaggactttgagactagcctaagcaacacagagagatccctgtgtctacaaaaaaaataattttttaaattagctgggaatggtggcctgtgcctgcagtcctagctacccaggaggctgaggcgagaggattgctagagcccaagaattcaaggctcttcaagcacggagctatcagtgcaccactgcattccaccctgggtgacagaatgagacgctgtctctaaaaaataaaaaataaaaataaaatcccaccatttcactacacatactataat

SEQ ID NO: 288771 - DNA, 454 bp, Homo sapiens
taaaaaacaaaaatggattgccaacctcccctaccatagagtgtctaactcagaagcatgaactggcgtggcatatgcctgttgcctatgtatagtttctcagtataaagcttttctgaattgtcagattctgtggacatttggaggctaggaggtaagattccaaaaccagcatgtcaaccaaagccaataataaggcctctcaaatacctaccacatatctgaagagaaacttttaacagttttcactatatatttaaaacaaaaagtcagaagagtaaaaaagtcccattttaaactgtatatataccatcttaattcttgtgttggactatagtaaataacaaattcaggccaggtgcagtggctcacgcctgtaatcccagcactttgggaggccgaggcgggcagatcacgaggtcaggagatcaagaccatcctggcgaacacggtg

SEQ ID NO: 288772 - DNA, 405 bp, Homo sapiens
cggtgcggaggctgcgggccccgggcaggcgcgaggaggcggcgaaggcgcagggaaggggcccggcccgcgggaaggaaccgcagcgacagccgccaggagcccgggacggagccggggacggagcagcaggaaccagaccggtcacttccaaaggcccctcagaacgaccaacagctgaaacccgcggggcggactccgtgttgaaccgcggacagcggcaaccacagcagcgacacggacctgtgcttccaccaagaacagattccgcagcggacagcagtcacttgcagtggtagtatttatcccacacaaacacccagctaatgccttcacccggtccaggaactctgtagtgttctaaagtaaaatcaataaaacatacatttgtgtttcatcaacaga

SEQ ID NO: 288773 - DNA, 513 bp, Homo sapiens
gcggccgctggctcatcgattgcaaggtcctgccgcccaaccaccgggtggtgtggccctcggccgtggtcttcgacctggcgcaggcgctgcgcgacggggtccttctgtgccagctgctgcacaacctctcccccggctccatcgacctcaaggacatcaacttccggccgcagatgtcccagtttctgtgtttgaagaacatacgcaccttcctgaaagtctgccacgataaatttggattaaggaacagcgagctgtttgacccctttgacctcttcgatgtgcgagactttggaaaggtcatctccgcggtgtcgaggctctccctgcacagcatcgcgcagaacaaagggatcaggccttttccctcagaggagaccacagagaatgacgatgacgtctaccgcagcctggaggagctggccgacgagcatgacctgggggaggacatctacgactgcgtcccgtgtgaggatggaggggacgacatctacgaggacatcatcaagg

SEQ ID NO: 288774 - DNA, 523 bp, Homo sapiens
gcggccgctggctcatcgattgcaaggtcctgccgcccaaccaccgggtggtgtggccctcggccgtggtcttcgacctggcgcaggcgctgcgcgacggggtccttctgtgccagctgctgcacaacctctcccccggctccatcgacctcaaggacatcaacttccggccgcagatgtcccagtttctgtgtttgaagaacatacgcaccttcctgaaagtctgccacgataaatttggattaaggaacagcgagctgtttgacccctttgacctcttcgatgtgcgagactttggaaaggtcatctccgcggtgtcgaggctctccctgcacagcatcgcgcagaacaaagggatcaggtgagctctccggagtgcgctgccaaggccgggtcctttcatctccatcgacaccagcgtgccttgtcacagatactggggttggaagcagatgccctctgcctgtgtctttatcatgcatttgcagcgtgttgtcgcgtaacccgttggcggctgcaggaa

SEQ ID NO: 288775 - DNA, 441 bp, Homo sapiens
accatcacggacacgtcgatggccctcaggaagctgtgatgcaccttgatcaggtcctccaggttaatgaagacagctgccatgtccgccgggctcagcactagccgcagggggctcatgtagttcttctcaatgtcctccagggtgcggtagtacttggcctcggtctcctggatctccacgagctgtttgacccctttgacctcttcgatgtgcgagactttggaaaggtcatctccgcggtgtcgaggctctccctgcacagcatcgcgcagaacaaagggatcaggccttttccctcagaggagaccacagagaatgacgatgacgtctaccgcagcctggaggagctggccgacgagcatgacctgggggaggacatctacgactgcgtcccgtgtgaggatggaggggacgacatctacgaggacatcatcaagg

SEQ ID NO: 288776 - DNA, 2263 bp, Homo sapiens
acaggcgggcactctctgcgggtcccgcggctcccgcggcttccggcccactcagcgcctccagaggcctcaggtgagggtcaccccccgcagcttggggtcactcccctgagcccccggatcttcccatgggtcctttggaggcctgggttttggagtttgtccttcgttaagtgccgcccgccgggcgcggctgctccaggaccacagacgagtctcgctctgttgcccaggatggagtgcagtggcgcgatctcggctcgctgcaagctccgcctcagcctccggagtagctgggactacaggagcccgccaccacgcccagctaatttttttgtatttttagtagagacggggtttcaccgtgttagccaggatggtctcgatctcctgaccttgtgatccgcctgcctcggcctcccaaagtgctgggattacaggcatttcgctggggatgctacttgatctctcttcagcctcagtttcctcacctggacagtggagctgaacccaccccccactatctgaccctgctctctgggctgtcttttgggaacccgccctgctgaggcctgctccccaccctccatggctgtcagccccccaggagaagaatgtctgccatatggaggctgctggcagcaaagggagatgaacaagccaaggttgcccggcctgcatgccggcccagggctgctgctgtgtcttgccatcaaccctcccctgacacccaggatgcctgcctcacccagaagcactcctacgtcaggcctctgagggggagcgcttcatgccactgttatcaaaagaagaaaccatcgaagcagaaaggccaatgccacactagacagccaggagcccagcagaacaagtggccccctaaggcactttggggaccacaccccgccactgaccccagcacagtctggttcccagggcttcaggatcctcctggggacctctcagcatgattgacacaggcagacgggacctgaaggggctgctggtccttctgaaaatgttcaccaggtagtgtgagtgtggggaagccatgaacaatgtgtgggactctaccctgcacctgctcagagcctcagcccttcagagccactactaatgatttgctgtgggtggggtcaccctgatacttctctgaggtggctttttcttgcagtttttctgagtaactgacaggaatccttgactgcatgccgcctaaactagggtgtgcacagccctcgttctgtgcaaagagggtgcaaagcagcagagtgtctgtgacccatttgccacctaatgttactacaagatttgcaagaaccggtcacttatcagtaaccatttttatttaaaaagataaaatagagctttgcaggaaagtgctgcaggctcccacgttgccgggcagacgacaacctgggcgcctcgcccagctcctccccacagccattggcatccactgtcaggtttcaatgttcttggacctcagggccttcgtcctctccaatctaaatgcagagagacatttgacatggactctctcaggtgttttgcaaaatgcaacacattctcattgactctggtcactctgctgtgcactacatgtcaaaacctcttcctcctccctgagactttggtcctttaactgacaacccccctcccattccctccctctgccactctctgacccctggtcaccatcgatctacttgctacttctatggggtcaacttgtttagatcaacacttctgggacctcacgtggaattggtctctctgaggtagtggagatgctaagtagtgggatttcctcattccacattgtaccccatgaatgaatacaagcatgatttgccaattgaagcaatacaataaagacagaagaaatgtaaaatgcaggaattgtggcttgaccaccacaacgacttgatttttgtcttcagccatgcaactatgttggggcgatcttattcctccttttctttggtagagacaggcaaaaatattttaatagtatgcaaaggcatctatctcctggcaaccctgcggcagccccagcttcttgccgagcaggctgacgtcacagcctcaggcttctcagcttggacttctcagcttggacgatgctggcttcctgggatggtttttggtgtatcagggacgtttctaagacttcaccagttgctggtgctctgggtgaaaggggagacaatagggtcatgctgggggcttcactaaaacttcctggcttccccgatctggc

SEQ ID NO: 288777 - DNA, 1951 bp, Homo sapiens
gaggtagagccagagacccgtaagcggagccgaacccctatgagcttgcccagtagggagctcaggatccccaagattggacaggcaaataagcttagtgatagtcccaccagtcttcccgagagtcacgatttcgctggggatgctacttgatctctcttcagcctcagtttcctcacctggacagtggagctgaacccaccccccactatctgaccctgctctctgggctgtcttttgggaacccgccctgctgaggcctgctccccaccctccatggctgtcagccccccaggagaagaatgtctgccatatggaggctgctggcagcaaagggagatgaacaagccaaggttgcccggcctgcatgccggcccagggctgctgctgtgtcttgccatcaaccctcccctgacacccaggatgcctgcctcacccagaagcactcctacgtcaggcctctgagggggagcgcttcatgccactgttatcaaaagaagaaaccatcgaagcagaaaggccaatgccacactagacagccaggagcccagcagaacaagtggccccctaaggcactttggggaccacaccccgccactgaccccagcacagtctggttcccagggcttcaggatcctcctggggacctctcagcatgattgacacaggcagacgggacctgaaggggctgctggtccttctgaaaatgttcaccaggtagtgtgagtgtggggaagccatgaacaatgtgtgggactctaccctgcacctgctcagagcctcagcccttcagagccactactaatgatttgctgtgggtggggtcaccctgatacttctctgaggtggctttttcttgcagtttttctgagtaactgacaggaatccttgactgcatgccgcctaaactagggtgtgcacagccctcgttctgtgcaaagagggtgcaaagcagcagagtgtctgtgacccatttgccacctaatgttactacaagatttgcaagaaccggtcacttatcagtaaccatttttatttaaaaagataaaatagagctttgcaggaaagtgctgcaggctcccacgttgccgggcagacgacaacctgggcgcctcgcccagctcctccccacagccattggcatccactgtcaggtttcaatgttcttggacctcagggccttcgtcctctccaatctaaatgcagagagacatttgacatggactctctcaggtgttttgcaaaatgcaacacattctcattgactctggtcactctgctgtgcactacatgtcaaaacctcttcctcctccctgagactttggtcctttaactgacaacccccctcccattccctccctctgccactctctgacccctggtcaccatcgatctacttgctacttctatggggtcaacttgtttagatcaacacttctgggacctcacgtggaattggtctctctgaggtagtggagatgctaagtagtgggatttcctcattccacattgtaccccatgaatgaatacaagcatgatttgccaattgaagcaatacaataaagacagaagaaatgtaaaatgcaggaattgtggcttgaccaccacaacgacttgatttttgtcttcagccatgcaactatgttggggcgatcttattcctccttttctttggtagagacaggcaaaaatattttaatagtatgcaaaggcatctatctcctggcaaccctgcggcagccccagcttcttgccgagcaggctgacgtcacagcctcaggcttctcagcttggacttctcagcttggacgatgctggcttcctgggatggtttttggtgtatcagggacgtttctaagacttcaccagttgctggtgctctgggtgaaaggggagacaatagggtcatgctgggggcttcactaaaacttcctggcttccccgatctggc

SEQ ID NO: 288778 - DNA, 1917 bp, Homo sapiens
caccctctcctgagcctgcttcttgcttcctggtcctgttctttattggggaaggagaatcttatctgactgggggaactccaggactgaccctggccaccatcagtagtgggtagggtaaccaaatgttcaaggttgccacactcagatgccggccatgcacaagggtggggccttctggacctacctcaagctcattaggaacccacaaggaagctccttgatgggtgctgatgggcatctgcacccacagattcactgccagacaaggacaaaccgggttcctgggaagctggaacctaccttatgaaagcccccattcccaccaccccctccatccctcagggctgctgctgtgtcttgccatcaaccctcccctgacacccaggatgcctgcctcacccagaagcactcctacgtcaggcctctgagggggagcgcttcatgccactgttatcaaaagaagaaaccatcgaagcagaaaggccaatgccacactagacagccaggagcccagcagaacaagtggccccctaaggcactttggggaccacaccccgccactgaccccagcacagtctggttcccagggcttcaggatcctcctggggacctctcagcatgattgacacaggcagacgggacctgaaggggctgctggtccttctgaaaatgttcaccaggtagtgtgagtgtggggaagccatgaacaatgtgtgggactctaccctgcacctgctcagagcctcagcccttcagagccactactaatgatttgctgtgggtggggtcaccctgatacttctctgaggtggctttttcttgcagtttttctgagtaactgacaggaatccttgactgcatgccgcctaaactagggtgtgcacagccctcgttctgtgcaaagagggtgcaaagcagcagagtgtctgtgacccatttgccacctaatgttactacaagatttgcaagaaccggtcacttatcagtaaccatttttatttaaaaagataaaatagagctttgcaggaaagtgctgcaggctcccacgttgccgggcagacgacaacctgggcgcctcgcccagctcctccccacagccattggcatccactgtcaggtttcaatgttcttggacctcagggccttcgtcctctccaatctaaatgcagagagacatttgacatggactctctcaggtgttttgcaaaatgcaacacattctcattgactctggtcactctgctgtgcactacatgtcaaaacctcttcctcctccctgagactttggtcctttaactgacaacccccctcccattccctccctctgccactctctgacccctggtcaccatcgatctacttgctacttctatggggtcaacttgtttagatcaacacttctgggacctcacgtggaattggtctctctgaggtagtggagatgctaagtagtgggatttcctcattccacattgtaccccatgaatgaatacaagcatgatttgccaattgaagcaatacaataaagacagaagaaatgtaaaatgcaggaattgtggcttgaccaccacaacgacttgatttttgtcttcagccatgcaactatgttggggcgatcttattcctccttttctttggtagagacaggcaaaaatattttaatagtatgcaaaggcatctatctcctggcaaccctgcggcagccccagcttcttgccgagcaggctgacgtcacagcctcaggcttctcagcttggacttctcagcttggacgatgctggcttcctgggatggtttttggtgtatcagggacgtttctaagacttcaccagttgctggtgctctgggtgaaaggggagacaatagggtcatgctgggggcttcactaaaacttcctggcttccccgatctggc

SEQ ID NO: 288779 - DNA, 2490 bp, Homo sapiens
  misc_feature (339)..(339): n is a, c, g, or t
aaaagcgctagggttgcaagtggcaccagagacgtgcccttgtcccggggtccatttgagggtgagcgtgttggtgccgagctgtttttttgttttgttttgttttgttttgtttttgagaccgaatctcgttctgtcgcccaggctggaatgcagtggtgtgatcttggctcactgcaacctccaccttccgggttcaagtgaatctcctgcctcagcctcctgagtagctgggattactggcacccaccaccacgaccagctaatttttgtatttttagtagagacgggttttcaccatgttggccaggatggtctcaatctcctgacctcaggcgntctgccttcctcagcttcccaaagtgctgggattacaggtgtgagccaccgcacccggccagtgctgagctgttttgacaacttggaccccgggtcctctgtgggtaggaaaatcagctccctctttgctcctctggggcagctgcacctcgggccagctttctgcctgtctgcctgccggcactgctgggtcgctgtacccaaacgcacagccggtgccccgtgctagaaggtcttcagtttccagaagaaccaaagcatctttggacctacctagggaaggacctgcctgtgacctttgccctgtcctggagggtccagctttgggctgaatggcagcacccacgctgggccgtctggtgctgacccacctgctggtggccctttttggcatgggctcctgggctgctgtgaacgggatctgggtggagctgcctgtggtggtaaaagaccttccagagggtgagtgggagggaggtacagggaagcgtggggcaggtatgcccagaaaggtggcctgtggcagctctttgtcccttagccactgtgctcctgacatggcatcattccttccctgcaggttggagcctcccctcatacctctctgtggttgtggcgctgggaaacctgggtctgctggtggtgaccctgtggaggcggctggccccgggcaagggcgagcaggtccccatccaggtggtacaggtgctgagtgtagtgggcacagccctgctggcccctctgtggcaccacgtggccccagtggcagggcagctccactctgtggccttcctaactctggccttggtgttggcaatggcctgttgtacctctaatgtcactttcctgcccttcctgagccacctgccacctcctttcttacggtctttcttcctgggtcagggtctcagtgccctactcccctgtgtgctggccctagtgcaaggtgtgggccgcctcgagtgcccaccagcgcccaccaatggcacctctgggcctcccctcgacttccctgagcgttttcctgccagcaccttcttctgggcactgactgcccttctggtcacttcagctgccgccttccggggtctcctgttgctgttgccatcactaccctctgtaaccacagggggctcagggcctgaacttcaactgggatccccaggagcagaggaggaagagaaggaggaagaagaggctttgccattgcaggagccaccgagccaggcagcaggcaccatccctggcccagaccctgaggcccatcagctgttctcagcccatggtgccttcctgctgggcctgatggccttcaccagtgccgtgaccaatggcgtgctgccttctgtgcagagcttttcctgtttgccctatgggcgcctggcctaccacctggctgtggtgctgggcagtgccgccaacccccttgcctgcttcctggccatgggcgtgctgtgcaggtccctggcagggctggttggtctttctctgctgggcatgctctttggggcctacctgatggcactggcaatcctgagcccctgcccacccctggtgggcaccactgcaggggtggtccttgtggtgctgtcgtgggtgctgtgtctgtgtgtgttctcatatgtgaaggtggctgcaagctccctgctgcatggtgggggtcggccggcattgctggcagctggtgtggccatccaagtgggctccctgcttggtgccggtgccatgttccctcccaccagcatctaccacgtgtttcaaagcagaaaggactgtgtagacccctgtggcccctgagcctgggcaggtggggacccaactccaccccacctgtcttcatcgtgaggctgccacagtgcctgactacttgtggcccaggcaggcttcccccaacacaggaacgctcatggacacctgcacactccacagaagacgttggcatgtgaggccagggtgggcaccaaagaccaggcccagagccaggggacaggttggggctgtgggcttggacccagggcctgagacctttgtgggatttgtgcaataaagtgtttttatttaaaaccaaaaacaaaaacaaaagcctaatgaaaaccttataagaaatatataatgaaatcaggaaactggattaaataatttttcatacat

SEQ ID NO: 288780 - DNA, 2372 bp, Homo sapiens
  misc_feature (339)..(339): n is a, c, g, or t
aaaagcgctagggttgcaagtggcaccagagacgtgcccttgtcccggggtccatttgagggtgagcgtgttggtgccgagctgtttttttgttttgttttgttttgttttgtttttgagaccgaatctcgttctgtcgcccaggctggaatgcagtggtgtgatcttggctcactgcaacctccaccttccgggttcaagtgaatctcctgcctcagcctcctgagtagctgggattactggcacccaccaccacgaccagctaatttttgtatttttagtagagacgggttttcaccatgttggccaggatggtctcaatctcctgacctcaggcgntctgccttcctcagcttcccaaagtgctgggattacaggtgtgagccaccgcacccggccagtgctgagctgttttgacaacttggaccccgggtcctctgtgggtaggaaaatcagctccctctttgctcctctggggcagctgcacctcgggccagctttctgcctgtctgcctgccggcactgctgggtcgctgtacccaaacgcacagccggtgccccgtgctagaaggtcttcagtttccagaagaaccaaagcatctttggacctacctagggaaggacctgcctgtgacctttgccctgtcctggagggtccagctttgggctgaatggcagcacccacgctgggccgtctggtgctgacccacctgctggtggccctttttggcatgggctcctgggctgctgtgaacgggatctgggtggagctgcctgtggtggtaaaagaccttccagagggttggagcctcccctcatacctctctgtggttgtggcgctgggaaacctgggtctgctggtggtgaccctgtggaggcggctggccccgggcaagggcgagcaggtccccatccaggtggtacaggtgctgagtgtagtgggcacagccctgctggcccctctgtggcaccacgtggccccagtggcagggcagctccactctgtggccttcctaactctggccttggtgttggcaatggcctgttgtacctctaatgtcactttcctgcccttcctgagccacctgccacctcctttcttacggtctttcttcctgggtcagggtctcagtgccctactcccctgtgtgctggccctagtgcaaggtgtgggccgcctcgagtgcccaccagcgcccaccaatggcacctctgggcctcccctcgacttccctgagcgttttcctgccagcaccttcttctgggcactgactgcccttctggtcacttcagctgccgccttccggggtctcctgttgctgttgccatcactaccctctgtaaccacagggggctcagggcctgaacttcaactgggatccccaggagcagaggaggaagagaaggaggaagaagaggctttgccattgcaggagccaccgagccaggcagcaggcaccatccctggcccagaccctgaggcccatcagctgttctcagcccatggtgccttcctgctgggcctgatggccttcaccagtgccgtgaccaatggcgtgctgccttctgtgcagagcttttcctgtttgccctatgggcgcctggcctaccacctggctgtggtgctgggcagtgccgccaacccccttgcctgcttcctggccatgggcgtgctgtgcaggtccctggcagggctggttggtctttctctgctgggcatgctctttggggcctacctgatggcactggcaatcctgagcccctgcccacccctggtgggcaccactgcaggggtggtccttgtggtgctgtcgtgggtgctgtgtctgtgtgtgttctcatatgtgaaggtggctgcaagctccctgctgcatggtgggggtcggccggcattgctggcagctggtgtggccatccaagtgggctccctgcttggtgccggtgccatgttccctcccaccagcatctaccacgtgtttcaaagcagaaaggactgtgtagacccctgtggcccctgagcctgggcaggtggggacccaactccaccccacctgtcttcatcgtgaggctgccacagtgcctgactacttgtggcccaggcaggcttcccccaacacaggaacgctcatggacacctgcacactccacagaagacgttggcatgtgaggccagggtgggcaccaaagaccaggcccagagccaggggacaggttggggctgtgggcttggacccagggcctgagacctttgtgggatttgtgcaataaagtgtttttatttaaaaccaaaaacaaaaacaaaagcctaatgaaaaccttataagaaatatataatgaaatcaggaaactggattaaataatttttcatacat

SEQ ID NO: 288781 - DNA, 2406 bp, Homo sapiens
  misc_feature (339)..(339): n is a, c, g, or t
aaaagcgctagggttgcaagtggcaccagagacgtgcccttgtcccggggtccatttgagggtgagcgtgttggtgccgagctgtttttttgttttgttttgttttgttttgtttttgagaccgaatctcgttctgtcgcccaggctggaatgcagtggtgtgatcttggctcactgcaacctccaccttccgggttcaagtgaatctcctgcctcagcctcctgagtagctgggattactggcacccaccaccacgaccagctaatttttgtatttttagtagagacgggttttcaccatgttggccaggatggtctcaatctcctgacctcaggcgntctgccttcctcagcttcccaaagtgctgggattacaggtgtgagccaccgcacccggccagtgctgagctgttttgacaacttggaccccgggtcctctgtgggtaggaaaatcagctccctctttgctcctctggggcagctgcacctcgggccagctttctgcctgtctgcctgccggcactgctgggtcgctgtacccaaacgcacagccggtgccccgtgcctattacctgccagcctgtctgtttccctccagctagaaggtcttcagtttccagaagaaccaaagcatctttggacctacctagggaaggacctgcctgtgacctttgccctgtcctggagggtccagctttgggctgaatggcagcacccacgctgggccgtctggtgctgacccacctgctggtggccctttttggcatgggctcctgggctgctgtgaacgggatctgggtggagctgcctgtggtggtaaaagaccttccagagggttggagcctcccctcatacctctctgtggttgtggcgctgggaaacctgggtctgctggtggtgaccctgtggaggcggctggccccgggcaagggcgagcaggtccccatccaggtggtacaggtgctgagtgtagtgggcacagccctgctggcccctctgtggcaccacgtggccccagtggcagggcagctccactctgtggccttcctaactctggccttggtgttggcaatggcctgttgtacctctaatgtcactttcctgcccttcctgagccacctgccacctcctttcttacggtctttcttcctgggtcagggtctcagtgccctactcccctgtgtgctggccctagtgcaaggtgtgggccgcctcgagtgcccaccagcgcccaccaatggcacctctgggcctcccctcgacttccctgagcgttttcctgccagcaccttcttctgggcactgactgcccttctggtcacttcagctgccgccttccggggtctcctgttgctgttgccatcactaccctctgtaaccacagggggctcagggcctgaacttcaactgggatccccaggagcagaggaggaagagaaggaggaagaagaggctttgccattgcaggagccaccgagccaggcagcaggcaccatccctggcccagaccctgaggcccatcagctgttctcagcccatggtgccttcctgctgggcctgatggccttcaccagtgccgtgaccaatggcgtgctgccttctgtgcagagcttttcctgtttgccctatgggcgcctggcctaccacctggctgtggtgctgggcagtgccgccaacccccttgcctgcttcctggccatgggcgtgctgtgcaggtccctggcagggctggttggtctttctctgctgggcatgctctttggggcctacctgatggcactggcaatcctgagcccctgcccacccctggtgggcaccactgcaggggtggtccttgtggtgctgtcgtgggtgctgtgtctgtgtgtgttctcatatgtgaaggtggctgcaagctccctgctgcatggtgggggtcggccggcattgctggcagctggtgtggccatccaagtgggctccctgcttggtgccggtgccatgttccctcccaccagcatctaccacgtgtttcaaagcagaaaggactgtgtagacccctgtggcccctgagcctgggcaggtggggacccaactccaccccacctgtcttcatcgtgaggctgccacagtgcctgactacttgtggcccaggcaggcttcccccaacacaggaacgctcatggacacctgcacactccacagaagacgttggcatgtgaggccagggtgggcaccaaagaccaggcccagagccaggggacaggttggggctgtgggcttggacccagggcctgagacctttgtgggatttgtgcaataaagtgtttttatttaaaaccaaaaacaaaaacaaaagcctaatgaaaaccttataagaaatatataatgaaatcaggaaactggattaaataatttttcatacat

SEQ ID NO: 288782 - DNA, 435 bp, Homo sapiens
tccggccgcccccgcccgctcgggtcccgccgcccctccggccccgctgggctcccaggccgcggcagcacgggcgggacacggaccgagggaccagccggcggaaagtttcctccgagatcaaataaacggagtcttggagagattgaattgactttaccaaaaccgtcaggatttgaatctgctgctctctgatcctaaagcctgagctagaaaccaccgctccccctcctaggaggccccttccaggcaaagctgcttctcttccccagacccatgctggactggaagggaggggactgtccacccctccttccagggcccaggcttgaatgtgtcccctggccgagctctggtctagtcacgcagggttaatgattgttggactccagctttgagccagggcccggccagcagtctcgcagaccccagcgt

SEQ ID NO: 288783 - DNA, 401 bp, Homo sapiens
gcgtccgactggagctcagccgcgcttgtccggtgctaggtcatcctgccaaacacccgaggccccaaagatggtgcaaagtgaacttcagctacagcccagagcaggcggacgagctgaagctgcaagctggggagatcgtggaaatgataaaggaggccttggtaacccagacatgccttcagtcagcccgggtccccagcggcctcccaagaccacagaggataagggctggtgggaaggagagtgtcaaggacgaagaggagtttttccagacaactttgtactcccaccacccccaattaaggatgctcaacctttacttcttttcggcatagatcaagaagctggtcccacggaaagtggtatctcgggaatcaggtgagtgcccggggagcctg

SEQ ID NO: 288784 - DNA, 1922 bp, Homo sapiens
gggcgtatctgagtgactagagcccaacagcccgtcgttcacggctccaactgggagctggctatggacacctccagaatactgcagaagctccaccaccctgaggtctacagggtcctgtttgactaccagcctgaggccccagacgagttggcgctgcggaggggggacgtggtaaaagtactcagcaagaccacagaggataagggctggtgggaaggagagtgtcaaggacgaagaggagtttttccagacaactttgtactcccaccacccccaatcaagaagctggtcccacggaaagtggtatctcgggaatcagctcctattaaggaaccaaaaaagttgatgcccaaaacatccctccccacagtcaagaagctagcaacagccaccactgggcccagcaaagccaagacatctcggacacccagcagggacagtcagaagctcacctcccgagactcaggccccaatggtggcttccaaagtgggggttcgtatcaccctggccgaaagcgatccaaaacccagactccccagcaacgctctgtgtccagtcaggaggaagagcacagcagcccggtaaaggccccctctgtgaagagaacccccatgccggacaagactgccaccccagagaggcccccagctccagagaacgcccccagctccaagaagatcccggctcctgacaaagtcccctccccagagaagaccctcactctaggggacaaggcctctatcccagggaactccacctcggggaagatcccagctcctgacaaagtccccaccccagagaagatggtgactccggaggacaaggcttctatcccagagaactccatcatcccagaggagaccctgactgtggacaaaccctccactccagagagggtcttttcagtggaagagtcccctgccctagaagccccacctatggataaagtccctaatccaaagatggcccctctgggggatgaggcccccactctagaaaaggtcttgaccccagagctttctgaagaagaggtgtccaccagagatgacattcaattccatcacttctcttcggaggaagccctgcagaaggtcaagtactttgtagccaaagaggatccatcatcccaggaggaggcccacacgccagaggcacccccaccccagcctccttcctcagagaggtgcctgggagagatgaaatgtaccctagttagaggggacagctccccacgccaggctgagttgaagtctgggccagcatccaggcctgcccttgagaagccccacccccacgaagaggctacaacccttccagaggaggcaccttccaatgacgagaggacccctgaagaggaggcgccccccaacgagcagaggcctctgagagaggaggtgctccccaaagagggagtggcttccaaagaggaggtgaccctgaaagaggaattgccccctaaagaggaagtggctccaaaagaggaggtgccccccatagaaagagcctttgcccaaaaaacacgtcctatcaagccgcctccagactcccaagagacgctcgcgctcccctcgctggtcccgcaaaactacacggaaaacaagaatgaaggagttgatgtaacgtcgctgaggggcgaggtggagtctctaaggagggcgctggagctgatggaggtgcagctggagaggaagctgaccgacatctgggaggagctgaagagcgagaaggagcagcgccggcggctggaggtccaggtgatgcaggggacccagaagtcccagaccccgcgcgtcatccacacgcagacgcagacctactgagggtgggcctgggaagggaccgcggcctgacctggctggggccacccacgtccttgcacacgactttgggaaacgcgagaaagtaaactctgcctagc

SEQ ID NO: 288785 - DNA, 2783 bp, Homo sapiens
ggctctggagggcgccccggaaaccatggaagtcctcgtcctggccggataccgcgcgcagaaggaggacgagctgagtctggcgcccggggacgtggtccggcaggtgcgctgggtgcccgcgcggggctggcttcgcggagagtttgggggccgctatggcctcttccccgagcgcctggtgcaggagatcccagagaccctgcggggctccggagaggcgcggaggccgcgctgtgcgcgccgccgaggtcatcctgccaaacacccgaggccccaaagatggtgcaaagtgaacttcagctacagcccagagcaggcggacgagctgaagctgcaagctggggagatcgtggaaatgataaaggagatgaggacggctggtggctggggaagaagaacgggcagctgggagccttcccatccaactttgtggaattgctggacagtgggcccccaagccttggtaacccagacatgccttcagtcagcccgggtccccagcggcctcccaagctgagcagcctggcctatgacagccctccagactacctgcagacagccaccctgaggtctacagggtcctgtttgactaccagcctgaggccccagacgagttggcgctgcggaggggggacgtggtaaaagtactcagcaagaccacagaggataagggctggtgggaaggagagtgtcaaggacgaagaggagtttttccagacaactttgtactcccaccacccccaatcaagaagctggtcccacggaaagtggtatctcgggaatcagctcctattaaggaaccaaaaaagttgatgcccaaaacatccctccccacagtcaagaagctagcaacagccaccactgggcccagcaaagccaagacatctcggacacccagcagggacagtcagaagctcacctcccgagactcaggccccaatggtggcttccaaagtgggggttcgtatcaccctggccgaaagcgatccaaaacccagactccccagcaacgctctgtgtccagtcaggaggaagagcacagcagcccggtaaaggccccctctgtgaagagaacccccatgccggacaagactgccaccccagagaggcccccagctccagagaacgcccccagctccaagaagatcccggctcctgacaaagtcccctccccagagaagaccctcactctaggggacaaggcctctatcccagggaactccacctcggggaagatcccagctcctgacaaagtccccaccccagagaagatggtgactccggaggacaaggcttctatcccagagaactccatcatcccagaggagaccctgactgtggacaaaccctccactccagagagggtcttttcagtggaagagtcccctgccctagaagccccacctatggataaagtccctaatccaaagatggcccctctgggggatgaggcccccactctagaaaaggtcttgaccccagagctttctgaagaagaggtgtccaccagagatgacattcaattccatcacttctcttcggaggaagccctgcagaaggtcaagtactttgtagccaaagaggatccatcatcccaggaggaggcccacacgccagaggcacccccaccccagcctccttcctcagagaggtgcctgggagagatgaaatgtaccctagttagaggggacagctccccacgccaggctgagttgaagtctgggccagcatccaggcctgcccttgagaagccccacccccacgaagaggctacaacccttccagaggaggcaccttccaatgacgagaggacccctgaagaggaggcgccccccaacgagcagaggcctctgagagaggaggtgctccccaaagagggagtggcttccaaagaggaggtgaccctgaaagaggaattgccccctaaagaggaagtggctccaaaagaggaggtgccccccatagaaagagcctttgcccaaaaaacacgtcctatcaagccgcctccagactcccaagagacgctcgcgctcccctcgctggtcccgcaaaactacacggaaaacaagaatgaaggagttgatgtaacgtcgctgaggggcgaggtggagtctctaaggagggcgctggagctgatggaggtgcagctggagaggaagctgaccgacatctgggaggagctgaagagcgagaaggagcagcgccggcggctggaggtccaggtgatgcaggggacccagaagtcccagaccccgcgcgtcatccacacgcagacgcagacctactgagggtgggcctgggaagggaccgcggcctgacctggctggggccacccacgtccttgcacacgactttgggaaacgcgagaaagtaaactctgcctagcacggcgccacgccggtctggtcgctgggggcggggcctgcgcgggggcagggcctgggcctccgcattcctgacggtccctcccaggcacatctggccaacatgtggctcccattaccgttcccaaggcctgcgcgcggctatttttatccaccggatggtgaggggcgggggagggtgtctccttcggactccagccgcgcactggagaaatggcgggcaggaggggcccaggcggggtcgggctcttgacgcccggcctagattccggaatccagctgtgcgccggggaggagccgggcgggccttctcgccagctcggacccctcccagctggcctccctgtccgctcagagggactcctgccctctcgcttgaacgcacctcggcgcaga

SEQ ID NO: 288786 - DNA, 1835 bp, Homo sapiens
ggctctggagggcgccccggaaaccatggaagtcctcgtcctggccggataccgcgcgcagaaggaggacgagctgagtctggcgcccggggacgtggtccggcaggtgcgctgggtgcccgcgcggggctggcttcgcggagagtttgggggccgctatggcctcttccccgagcgcctggtgcaggagatcccagagaccctgcggggctccggagaggcgcggaggccgcgctgtgcgcgccgccgaggtcatcctgccaaacacccgaggccccaaagatggtgcaaagtgaacttcagctacagcccagagcaggcggacgagctgaagctgcaagctggggagatcgtggaaatgataaaggagatgaggacggctggtggctggggaagaagaacgggcagctgggagccttcccatccaactttgtggaattgctggacagtgggcccccaagccttggtaacccagacatgccttcagtcagcccgggtccccagcggcctcccaagctgagcagcctggcctatgacagccctccagactacctgcagacagccaccctgaggtctacagggtcctgtttgactaccagcctgaggccccagacgagttggcgctgcggaggggggacgtggtaaaagtactcagcaagaccacagaggataagggctggtgggaaggagagtgtcaaggacgaagaggagtttttccagacaactttgtactcccaccacccccaatcaagaagctggtcccacggaaagtggtatctcgggaatcagctcctattaaggaaccaaaaaagttgatgcccaaaacatccctccccacagtcaagaagctagcaacagccaccactgggcccagcaaagccaagacatctcggacacccagcagggacagtcagaagctcacctcccgagactcaggccccaatggtggcttccaaagtgggggttcgtatcaccctggccgaaagcgatccaaaacccagactccccagcaacgctctgtgtccagtcaggaggaagagcacagcagcccggtaaaggccccctctgtgaagagaacccccatgccggacaagactgccaccccagagaggcccccagctccagagaacgcccccagctccaagaagatcccggctcctgacaaagtcccctccccagagaagaccctcactctaggggacaaggcctctatcccagggaactccacctcggggaagatcccagctcctgacaaagtccccaccccagagaagatggtgactccggaggacaaggcttctatcccagagaactccatcatcccagaggagaccctgactgtggacaaaccctccactccagagagggtcttttcagtggaagagtcccctgccctagaagccccacctatggataaagtccctaatccaaagatggcccctctgggggatgaggcccccactctagaaaaggtcttgaccccagagctttctgaagaagaggtgtccaccagagatgacattcaattccatcacttctcttcggaggaagccctgcagaaggtcaagtactttgtagccaaagaggatccatcatcccaggaggaggcccacacgccagaggcacccccaccccagcgccactaacagcaacaacagagaggctggagctctgcctgcgtgcggcccaagggctaaaccttggacaggttctttcacttactccgcctgacaaccctgcgacgtgataccattatccccacttcgcagatcaaataaacggagtcttggagagattgaggtgaatttggctaacctgtaaaaaataaaaaaaaa

SEQ ID NO: 288787 - DNA, 617 bp, Homo sapiens
ggctctggagggcgccccggaaaccatggaagtcctcgtcctggccggataccgcgcgcagaaggaggacgagctgagtctggcgcccggggacgtggtccggcaggtgcgctgggtgcccgcgcggggctggcttcgcggagagtttgggggccgctatggcctcttccccgagcgcctggtgcaggagatcccagagaccctgcggggctccggagaggcgcggaggccgcgctgtgcgcgccgccgaggtcatcctgccaaacacccgaggccccaaagatggtgcaaagtgaacttcagctacagcccagagcaggcggacgagctgaagctgcaagctggggagatcgtggaaatgataaaggaggccttggtaacccagacatgccttcagtcagcccgggtccccagcggcctcccaagctgagcagcctggcctatgacagccctccagactacctgcagacagaccacagaggataagggctggtgggaaggagagtgtcaaggacgaagaggagtttttccagacaactttgtactcccaccacccccacagttccagcgacactcctgcctcagcctccctgtgcctctggagatcctctagatca

SEQ ID NO: 288788 - DNA, 233 bp, Homo sapiens
atgaggacggctggtggctggggaagaagaacgggcagctgggagccttcccatccaactttgtggaattgctggacagtgggcccccaagtgagacctcgactctgtgaccctgtgactcgcaatctccaatgaccctcccagtggcatgagcctgtgattcacatatcctgaccctgtgacccctctgaccctctcccatgacctaacctgtgaattagcaccctccctaa

SEQ ID NO: 288789 - DNA, 2389 bp, Homo sapiens
ggctctggagggcgccccggaaaccatggaagtcctcgtcctggccggataccgcgcgcagaaggaggacgagctgagtctggcgcccggggacgtggtccggcaggtgcgctgggtgcccgcgcggggctggcttcgcggagagtttgggggccgctatggcctcttccccgagcgcctggtgcaggagatcccagagaccctgcggggctccggagaggcgcggaggccgcgctgtgcgcgccgccgaggtcatcctgccaaacacccgaggccccaaagatggtgcaaagtgaacttcagctacagcccagagcaggcggacgagctgaagctgcaagctggggagatcgtggaaatgataaaggagatgaggacggctggtggctggggaagaagaacgggcagctgggagccttcccatccaactttgtggaattgctggacagtgggcccccaagccttggtaacccagacatgccttcagtcagcccgggtccccagcggcctcccaagctgagcagcctggcctatgacagccctccagactacctgcagacagccaccctgaggtctacagggtcctgtttgactaccagcctgaggccccagacgagttggcgctgcggaggggggacgtggtaaaagtactcagcaagaccacagaggataagggctggtgggaaggagagtgtcaaggacgaagaggagtttttccagacaactttgtactcccaccacccccaatcaagaagctggtcccacggaaagtggtatctcgggaatcagctcctattaaggaaccaaaaaagttgatgcccaaaacatccctccccacagtcaagaagctagcaacagccaccactgggcccagcaaagccaagacatctcggacacccagcagggacagtcagaagctcacctcccgagactcaggccccaatggtggcttccaaagtgggggttcgtatcaccctggccgaaagcgatccaaaacccagactccccagcaacgctctgtgtccagtcaggaggaagagcacagcagcccggtaaaggccccctctgtgaagagaacccccatgccggacaagactgccaccccagagaggcccccagctccagagaacgcccccagctccaagaagatcccggctcctgacaaagtcccctccccagagaagaccctcactctaggggacaaggcctctatcccagggaactccacctcggggaagatcccagctcctgacaaagtccccaccccagagaagatggtgactccggaggacaaggcttctatcccagagaactccatcatcccagaggagaccctgactgtggacaaaccctccactccagagagggtcttttcagtggaagagtcccctgccctagaagccccacctatggataaagtccctaatccaaagatggcccctctgggggatgaggcccccactctagaaaaggtcttgaccccagagctttctgaagaagaggtgtccaccagagatgacattcaattccatcacttctcttcggaggaagccctgcagaaggtcaagtactttgtagccaaagaggatccatcatcccaggaggaggcccacacgccagaggcacccccaccccagcctccttcctcagagaggtgcctgggagagatgaaatgtaccctagttagaggggacagctccccacgccaggctgagttgaagtctgggccagcatccaggcctgcccttgagaagccccacccccacgaagaggctacaacccttccagaggaggcaccttccaatgacgagaggacccctgaagaggaggcgccccccaacgagcagaggcctctgagagaggaggtgctccccaaagagggagtggcttccaaagaggaggtgaccctgaaagaggaattgccccctaaagaggaagtggctccaaaagaggaggtgccccccatagaaagagcctttgcccaaaaaacacgtcctatcaagccgcctccagactcccaagagacgctcgcgctcccctcgctggtcccgcaaaactacacggaaaacaagaatgaaggagttgatgtaacgtcgctgaggggcgaggtggagtctctaaggagggcgctggagctgatggaggtgcagctggagaggaagctgaccgacatctgggaggagctgaagagcgagaaggagcagcgccggcggctggaggtccaggtgatgcaggggacccagaagtcccagaccccgcgcgtcatccacacgcagacgcagacctactgagggtgggcctgggaagggaccgcggcctgacctggctggggccacccacgtccttgcacacgactttgggaaacgcgagaaagtaaactctgcctagc

SEQ ID NO: 288790 - DNA, 1435 bp, Homo sapiens
tgtgcacgggtgaagtctcccaggccaaggggaaccagactcaacctcagctgagacttcacctcccatcacggcaggaggaagagcacagcagcccggtaaaggccccctctgtgaagagaacccccatgccggacaagactgccaccccagagaggcccccagctccagagaacgcccccagctccaagaagatcccggctcctgacaaagtcccctccccagagaagaccctcactctaggggacaaggcctctatcccagggaactccacctcggggaagatcccagctcctgacaaagtccccaccccagagaagatggtgactccggaggacaaggcttctatcccagagaactccatcatcccagaggagaccctgactgtggacaaaccctccactccagagagggtcttttcagtggaagagtcccctgccctagaagccccacctatggataaagtccctaatccaaagatggcccctctgggggatgaggcccccactctagaaaaggtcttgaccccagagctttctgaagaagaggtgtccaccagagatgacattcaattccatcacttctcttcggaggaagccctgcagaaggtcaagtactttgtagccaaagaggatccatcatcccaggaggaggcccacacgccagaggcacccccaccccagcctccttcctcagagaggtgcctgggagagatgaaatgtaccctagttagaggggacagctccccacgccaggctgagttgaagtctgggccagcatccaggcctgcccttgagaagccccacccccacgaagaggctacaacccttccagaggaggcaccttccaatgacgagaggacccctgaagaggaggcgccccccaacgagcagaggcctctgagagaggaggtgctccccaaagagggagtggcttccaaagaggaggtgaccctgaaagaggaattgccccctaaagaggaagtggctccaaaagaggaggtgccccccatagaaagagcctttgcccaaaaaacacgtcctatcaagccgcctccagactcccaagagacgctcgcgctcccctcgctggtcccgcaaaactacacggaaaacaagaatgaaggagttgatgtaacgtcgctgaggggcgaggtggagtctctaaggagggcgctggagctgatggaggtgcagctggagaggaagctgaccgacatctgggaggagctgaagagcgagaaggagcagcgccggcggctggaggtccaggtgatgcaggggacccagaagtcccagaccccgcgcgtcatccacacgcagacgcagacctactgagggtgggcctgggaagggaccgcggcctgacctggctggggccacccacgtccttgcacacgactttgggaaacgcgagaaagtaaactctgcctagc

SEQ ID NO: 288791 - DNA, 1755 bp, Homo sapiens
ggctctggagggcgccccggaaaccatggaagtcctcgtcctggccggataccgcgcgcagaaggaggacgagctgagtctggcgcccggggacgtggtccggcaggtgcgctgggtgcccgcgcggggctggcttcgcggagagtttgggggccgctatggcctcttccccgagcgcctggtgcaggagatcccagagaccctgcggggctccggagaggcgcggaggccgcgctgtgcgcgccgccgaggtcatcctgccaaacacccgaggccccaaagatggtgcaaagtgaacttcagctacagcccagagcaggcggacgagctgaagctgcaagctggggagatcgtggaaatgataaaggagatgaggacggctggtggctggggaagaagaacgggcagctgggagccttcccatccaactttgtggaattgctggacagtgggcccccaagccttggtaacccagacatgccttcagtcagcccgggtccccagcggcctcccaagctgagcagcctggcctatgacagccctccagactacctgcagacagccaccctgaggtctacagggtcctgtttgactaccagcctgaggccccagacgagttggcgctgcggaggggggacgtggtaaaagtactcagcaagaccacagaggataagggctggtgggaaggagagtgtcaaggacgaagaggagtttttccagacaactttgtactcccaccacccccaatcaagaagctggtcccacggaaagtggtatctcgggaatcagctcctattaaggaaccaaaaaagttgatgcccaaaacatccctccccacagtcaagaagctagcaacagccaccactgggcccagcaaagccaagacatctcggacacccagcagggacagtcagaagctcacctcccgagactcaggccccaatggtggcttccaaagtgggggttcgtatcaccctggccgaaagcgatccaaaacccagactccccagcaacgctctgtgtccagtcaggaggaagagcacagcagcccggtaaaggccccctctgtgaagagaacccccatgccggacaagactgccaccccagagaggcccccagctccagagaacgcccccagctccaagaagatcccggctcctgacaaagtcccctccccagagaagaccctcactctaggggacaaggcctctatcccagggaactccacctcggggaagatcccagctcctgacaaagtccccaccccagagaagatggtgactccggaggacaaggcttctatcccagagaactccatcatcccagaggagaccctgactgtggacaaaccctccactccagagagggtcttttcagtggaagagtcccctgccctagaagccccacctatggataaagtccctaatccaaagatggcccctctgggggatgaggcccccactctagaaaaggtcttgaccccagagctttctgaagaagaggtgtccaccagagatgacattcaattccatcacttctcttcggaggaagccctgcagaaggtcaagtactttgtagccaaagaggatccatcatcccaggaggaggcccacacgccagaggcacccccaccccagccatcttctctggggtggggactttgtcaggagctgggatcttcccgagtggagttcctggatgagcttgtccccacagagagagcgtcgggatcctctagatcacctcagcacacta

SEQ ID NO: 288792 - DNA, 428 bp, Homo sapiens
ctccagtgcggggaggactggaggacagggatggggtggctgtgcggagggacagaggtgggaagagactgagggtcagagtaggcttgggtccctgaggttctgctctcttaggccccaatggtggcttccaaagtgggggttcgtatcaccctggccgaaagcgatccaaaacccagactccccagcaacgctctgtgtccagtcaggtgaggggcgggagacatgggagagtggggatgctgggcagaggctggttcccagctgtggtgtgcacgggtgaagtctcccaggccaaggggaaccagactcaacctcagctgagacttcacctcccatcacggcaggaggaagagcacagcagcccggtaaaggccccctctgtgaagagaacccccatgccggacaagactgccaccccagagagg

SEQ ID NO: 288793 - DNA, 762 bp, Homo sapiens
ggagggcaacacagatgtcccaggggctggaagcctcaggctgctctgggcttatgtggctcagctgggggctcggcttgtcctggagggggcagccctggggttgcagtaccacctgtatgggttccagatgcccagctcctttgcatgtcgccgagaaccttgccttggtagtataacctgcaatctgtcccgcccctctgagaagaccattttcctaaagaccatgtttggagtcagcggtttctgtctcttgtttacttttttggagcttgtgcttctgggtttggggagatggtggaggacctggaagcacaaatcttcctcttctaaatacttcctaacttcagagagcaccagaagacacaagaaagcaaccgatagcctcccagtggtggaaaccaaagagcaatttcaagaagcagttccaggaagaagcttagcccaggaaaaacaaagaccagttggacccagagatgcctgagttggagatgaactttggccaactttcctcatcaccatacttaaaatcctgtccaaggaggagcttattcaccattttctatacatgtgacatatgtagcagcataaccgacaactgggactgcgctgccttgactccacctctacatacaatgactcagctaaccagactaataaaagccatgtttgcaccattgctcagggaggcattgctttggggaattattcccagtgtcctccttacttatcgcaagtaataaaatccccctgggaaatcct

SEQ ID NO: 288794 - DNA, 811 bp, Homo sapiens
agccctagtgttgaagaacatgttacaccagcacacgccgccgtcgccagcagcaggaagttgttgatttgcagcatattcacactttctgatgcagtcagagctcactgcttctcagaacagatccactcagaaggaactccagtttctgatgtttattttactttttcttccccccaaacaaggcacaaaaggggaaaatgaaagggacacaagaaaaaagaatcaagggtcttactgaccccatcacacacctcctctaatgtcatggctggaaggaaataagaagcccttcctcgggagaatgccagaggcccttgattgaagtcaaggacataagggatgacctcctcccagtccccagccctcaccttcgccttgcgtttgctgtcatccatgatcatcttccagtccgagccgttgttgctgtacccgatcttgaacttcctcatgaacaccttgttctctcggtgcttcccaccctgaatgatgatgcccctcacgatcttctcctcccccaggtctatttggagccactcattgatgtaggaatgaggtgcgggtggaagtgcccagccagagcgactggttaccaggcggatgttttcaggcatccagtttctgtccccttggttggatgatgtgatctgggagtcagaaataagtccagacaccatacccaacattccagagcaaggataatctgggaagtgaaatgaaacagataatgtaaaatgatttcctgggcgactccatgctaagaaataaaatacaacatatggaataaagacatgattttgtacccaatcat

SEQ ID NO: 288795 - DNA, 1041 bp, Homo sapiens
agccctagtgttgaagaacatgttacaccagcacacgccgccgtcgccagcagcaggaagttgttgatttgcagcatattcacactttctgatgcagtcagagctcactgcttctcagaacagatccactcagaaggaactccagtttctgatgtttattttactttttcttccccccaaacaaggcacaaaaggggaaaatgaaagggacacaagaaaaaaggtagctgcacagagagataaatataacactgaaaatattttagaaaccacaagttaaggaagggagagatgggagagagattcagatatttctgatggcacccagccctgccagtggcccgctgctctagtggtagccggtggcctgtcggggacacggaggtttccttggagccttcacatctggagggagtgggagctggcagcacagcctggcttctttgctgcctgcaatgcctctggcttgagtcactatattaagccatgttcccacacttgcttagagtgggagtgagggtaatattcccttcaataagctaaaatctgtttttcacaagaggagtaggtcctggccaaagcagggatggaaaggctaagaccaaaaggccaattgtattggtgtgagaaataccatcgctgaatataattcccacactgaacacagaacttaaactgctagttgtctgtaggttggtccatatttgaatcctaaaccagcttctgggccacccagcacactccagggtatcctttccaagttgctgttgcatgttcgcaaataaatttagccatcactctaagtaaggtggatgttggaatggaatgtttttgtgttgagatttccttttcttttcactggattatcaagagcctactgcatcttaaaaggtttcaacgcataaagaaatatacttaagcattattcacaatagctaaaggtgacagcaattcaagtgtccatcagtggctgaatggataaacaaagtgtggtataaacacacaatgaatattatccagcctttcgaaggatggaaattc

SEQ ID NO: 288796 - DNA, 2321 bp, Homo sapiens
aggcagatgctaagagaagggactggaagagaaaacagggtccctattttgagcagccgttgcagtggaaggtcacggaggactgccaagtgcagctgacgtgcaaggtgaccaacaccaagaaggagactcgctttcagtggttcttccagagggcagagatgccagatggtcagtatgacccagagacgggaacgggacttctctgcattgaagagttgtccaaaaaggacaagggaatttacagagcgatggtttctgacgatcgaggggaggacgacaccatattggacctcacgggtgacgccctggatgccatcttcaccgagttgggcaggattggtgccctctctgcaactccactgaaaatccaggggaccgaggaagggatccggatcttcagcaaggtcaagtactacaacgtggagtacatgaaaaccacctggttccacaaagacaaacgtctggagagtggtgatcggataaggacgggcaccaccctggatgagatctggcttcacatcctggaccccaaagactcagacaagggcaaatacactctggaaatagctgcagggaaggaagtccggcagctctcaacagatctctcagggcaagcttttgaggatgcaatggctgaacaccagagactgaaaaccttggccatcatcgagaagaatcgtgccaaagtggtgagaggtctgccggatgtggccactatcatggaagataagaccctgtgcttgacttgcatcgtctcaggagaccccacccctgaaatctcttggctgaagaatgaccagcctgtcaccttccttgaccgataccgcatggaagtgagggggacagaggtcaccatcaccattgagaaggtcaacagtgaagacagcggccgctacggcgtcttcgtcaagaacaagtatggctccgagacgggccaggtcaccatcagtgtgttcaagcacggggacgagcccaaggagctgaagagcatgtgacagcgtgtgtccaggcacagtctgagtctagtctgcatggaccagtagggacaacctgtaccagggtcacagcctggcacaggctacaggggtggggcagaaggaaaggggacaagatagaacccaggatgtgagggtgggggtggagcggatgcaccaaagtggagaagcaaagatctttctggggtcctgagtggcttccaggagagcgggatgaaccctggacctggagtaggagacccggatgcactggggctatctaacagtactggcatctgataggtagaggtcaggtacgctgctaaacactgcagctcccaccacatagaattatccgaccccagatgtcaaaagtgccaagggccatgagccctgccataaactgatacatcgcacccctcttttaggatcccatagtttcaattcatgtaagttcaacagacacctgaagtctagcatgtgggaggctgaggatggagctgggaacacaaaggcagctgataagcaggttctgcttgcaaagaggcctcagtccagtgggagaaacagacctgggcgcaaacaactccaggacaaggcaggacatgataaagattataaagcaggtccaaggaaagtgccgccagtggtccaaggagggagacagagggtcgtcccaacagggggaggtagggctttgaaaacaccttcatccaggctgggcgaggtggctcacgcctgtaatcccagtagtttgggaggccaaggcgggcagatcacctgaggtcaggagttttagaccagcctggccaacatgacgaaacccggtctctactaaaaatacaaaaattagccaggcgtggtggcaggtgcctgtaatcccggctattcagaaggccgaggtgggagaatccgttgaacctgggaggcggaggttgtgatgagccaagattgagccaaaaaaaaattagcagaattggtgttgggccctgaaaaattagtccgattttgtggtggtaatgggagaaggacatcccaggagcagggtctggtgggaggaaagggaaggaggaggctaaggctgcccaggaggccttggataccaggcttggagctggtaacctccagggcttccagcacggggcctctgcctggtgtgacagataccggctggcctcacttgatggatctcagtactgagctgggcatttctctgccccccaacttttttctttttaaaaataagatggggagtgttcataaaattatagatgtttgttgtaaaattttggaaaaccctggaaattatagagaaaataaacataatctatactcccaaaacca

SEQ ID NO: 288797 - DNA, 473 bp, Homo sapiens
aggtccctcccccaacactggggattacaattcaacatgagatttgagtgggagtacagagccaaaccagatcacccctcttcctgcaccaggcatccttgaaagggggccataatgataatgaagcccagcatttcacaatatttaccctgcgccaggtactgttctggcatttttcatatgtgaggaaagggaaggaggaggctaaggctgcccaggaggccttggataccaggcttggagctggtaacctccagggcttccagcacggggcctctgcctggtgtgacagataccggctggcctcacttgatggatctcagtactgagctgggcatttctctgccccccaacttttttctttttaaaaataagatggggagtgttcataaaattatagatgtttgttgtaaaattttggaaaaccctggaaattatagagaaaataaacataatctatactcccaaaacca

SEQ ID NO: 288798 - DNA, 633 bp, Homo sapiens
tgatgcctaaatggcctcagggaagattcatccttctcctctgtctccccagccctctctgcaactccactgaaaatccaggggaccgaggaagggatccggatcttcagcaaggtcaagtactacaacgtggagtacatgaaaaccacctggttccacaagtaagtccgccttgccccagaaccccagccaggctggaaaggattcagcacctgacccatgggggcctccctcccttctccctgcctggtcctccaagcagagtttctggtcccccaagcagagcctggtcccaggggttagcagagacagagtctcttcctggtcttgctgtccacagaaggagttgaggatagagattagcagtgggaggagtagaaaggctttgccgagatccccagggaaggtgggaaccttggcgggacaacatttttctggaaactctatggccacagcaggatcagtctctgggcagcagctgggaactgggggagaaagggatgcagggacaaagaagagccaagtggtcaggtgggtcaggggacccttgtgggcctctgcagacttagcaaacttggtcagccaggcttaggggaaacatgcaggaaaagggtctgtggggctggccactaa

SEQ ID NO: 288799 - DNA, 993 bp, Homo sapiens
caggccttgagtgtactgcctccctatgcagagtatctgcaggtggtgaactatggcatcggaggacactatgagcctcactttgaccatgctacgtcaccaagcagccccctctacagaatgaagtcaggaaaccgagttgcaacatttatgatctatctgagctcggtggaagctggaggagccacagccttcatctatgccaacctcagcgtgcctgtggttaggaatgcagcactgttttggtggaacctgcacaggagtggtgaaggggacagtgacacacttcatgctggctgtcctgtcctggtgggagataagtgggtggccaacaagtggatacatgagtatggacaggaattccgcagaccctgcagctccagccctgaagactgaactgttggcagagagaagctggtggagtcctgtggctttccagagaagccaggagccaaaagctggggtaggagaggagaaagcagagcagcctcctggaagaaggccttgtcagctttgtctgtgcctcgcaaatcagaggcaagggagaggttgttaccaggggacactgagaatgtacatttgatctgccccagccacggaagtcagagtaggatgcacagtacaaaggaggggggagtggaggcctgagagggaagtttctggagttcagatactctctgttgggaacaggacatctcaacagtctcaggttcgatcagtgggtcttttggcactttgaaccttgaccacagggaccaagaagtggcaatgaggacacctgcaggaggggctagcctgactcccagaactttaagactttctccccactgccttctgctgcagcccaagcagggagtgtccccctcccagaagcatatcccagatgagtggtacattatataaggattttttttaagttgaaaacaactttcttttctttttgtatgatggttttttaacacagtcattaaaaatgtttataaatcaaaaaaa

SEQ ID NO: 288800 - DNA, 553 bp, Homo sapiens
gggctgggccctcttgtttcagaatgcagcactgttttggtggaacctgcacaggagtggtgaaggggacagtgacacacttcatgctggctgtcctgtcctggtgggagataagtgggtggccaacaagtggatacatgagtatggacaggaattccgcagaccctgcagctccagccctgaagactgaactgttggcagagagaagctggtggagtcctgtggctttccagagaagccaggagccaaaagctgggtcttgaaatgcaaataaggaaccacttcacacttcctaggatggatacaattaaaaaacagaaaataagtgtcactacggatgtgaagaaactggaactctcatgcgttgctggtgggaatgtgaaatggtgcagccactgtggaaaacagattggtgatttctcagaaagataaacatagaactgtcatctgacccagttattccactcccaggtatgtatctgaaagaatggaatgatagctgtacacccatggtcatagcagctttattcacaatcgtcaaaaggtggaagca

SEQ ID NO: 288801 - DNA, 287 bp, Homo sapiens
ggaattgtcagcgggctcaccctgaatgaatggttttatcctgctgccactgtgatggatacaattaaaaaacagaaaataagtgtcactacggatgtgaagaaactggaactctcatgcgttgctggtgggaatgtgaaatggtgcagccactgtggaaaacagattggtgatttctcagaaagataaacatagaactgtcatctgacccagttattccactcccagattaagaagactaaagctgaggcaagtcagataacttgcccagagtcaaaaaattactg

SEQ ID NO: 288802 - DNA, 910 bp, Homo sapiens
caggccttgagtgtactgcctccctatgcagagtatctgcaggtggtgaactatggcatcggaggacactatgagcctcactttgaccatgctacgtcaccaagcagccccctctacagaatgaagtcaggaaaccgagttgcaacatttatgatctatctgagctcggtggaagctggaggagccacagccttcatctatgccaacctcagcgtgcctgtggttaggaatgcagcactgttttggtggaacctgcacaggagtggtgaaggggacagtgacacacttcatgctggctgtcctgtcctggtgggagataagtgggtggccaacaagtggatacatgagtatggacaggaattccgcagaccctgcagctccagccctgaagactgaactgttggcagagagaagctggtggagtcctgtggctttccagagaagccaggagccaaaagctggggtaggagaggagaaagcagagcagcctcctggaagaaggccttgtcagctttgtctgtgcctcgcaaatcagagtacaaaggaggggggagtggaggcctgagagggaagtttctggagttcagatactctctgttgggaacaggacatctcaacagtctcaggttcgatcagtgggtcttttggcactttgaaccttgaccacagggaccaagaagtggcaatgaggacacctgcaggaggggctagcctgactcccagaactttaagactttctccccactgccttctgctgcagcccaagcagggagtgtccccctcccagaagcatatcccagatgagtggtacattatataaggattttttttaagttgaaaacaactttcttttctttttgtatgatggttttttaacacagtcattaaaaatgtttataaatcaaaaaaa

SEQ ID NO: 288803 - DNA, 404 bp, Homo sapiens
gggatcacggcaggaagggggcaacgtggatggacacctgcaccctgtgtgggggtataaatcaccctacagggcgctcgtcacctggccagccagagccctaggacccagccgcccctgctcctcactcactgtggcccccagccccactgtttcacaacaccccagctcgttcgtgccctgaggagagggaccatccgtccccacacccggtccacagcaccgcacccgactcagccccagcatcgaccagaagtccccggccctcagaccggccgcccagagacagtgggagtgaggaggccacacaccgtccaggttgaatcactgcgttttactgagtgcacaggtccacctggcgtccgaactcgtccccgtggcagcagggatccccagaaccttcc

SEQ ID NO: 288804 - DNA, 1234 bp, Homo sapiens
agcggaagcccttcatagcggccggccgcttattcctgtgcgagtaaggagcgcccaggccaaccctccggctgcagtctgaggggcgggggagaggtacctgtttgggctccgtgggcacgggcggcggcgggggcaccgcctgcacgggtccggccggcatgactgcgacgctcagggctgccagtccgcctcggtgtcggtgagcggtgccgcctcaagacagcctccccgctcggtcagtacgacgagctcgcaagatggcggcggccgagcgagttgcggccgcgaaggtacgactggcgcacttccgggaccgtcccctcgccgtgacgcgcttcccgcccctccccacgggcaccgcggcgtccgacgccgttgccaaggcagcggcctgagcgcccggctagggcttttcggggatcccggtggccgcaggcgcaccgggggcagttccgggagccgaccagacacgaaggctgaagccgcgacgccgaagacagggtctgaagagctactcagagccaaccctgcactggagacaggaagccgggcacctggatgagcctctgacccagagccctggagcccataggctcgtctgagaactagacacactcagtcactccagctccacgggcagacacctgcacagaggatctgtgaggatggcgcacctgctgggcagccaggcctgcatggagagcctgcgcacagacctcaccgacctgcagggtgccatcgtagaacgtcttctcccgcgccgggcctgtgcgcttcccctcctggaagttccctgaccgcatggcctgtgacctcgacatggtggccctgctggagcactatgaccatgttccgggtgaccccgagttcacgcagctgtcccatgccgtgctgctggagctggtcatcgacaggctcctgctgctgcttcaaagctgtatgagctacttggagaaccttggctcagagcagatgatgccccctgcacaggctgcggggccctgcatgtccgtggggctcacggtgcggcgcttctgggacagcctgctgaggctgggcacgctccaccagcagccactcccccagaaaggggcaaaccaaagggagactcccacctccaagcccaccaccaagggcgagccagccaggagccctgaatatctgactaccaagttaatcaagccctcctccccagtgctaggcttgccccagacctgccaagagccagaga

SEQ ID NO: 288805 - DNA, 578 bp, Homo sapiens
ctgtcccatgccgtgctgctggagctggtcatcgacaggtgagggccttgaccaagcctggtcatctcaggatgccagcacctgcccctgaaaccagtggcagctacggaagcccctccagaggcaggggtgatgttggaacaacagtcaccattgagtacctgtcggggccacatcagctcaggactttcaaagtggtcttaccttttatcatgtgtcttgtgttgtgtgctgtgctatcctgtgttaggctctcctagcctgtccacctcaggcagttgatttccattccatcggtctctgtggcaccacagctgtgaccacggtctctcagcctctcccagctgcctcctcagggtttctatgttggggaccccatagttgcttctcagagtttccattccgggctctctttcctgttgtcctgtgggttgtgctgttccctctgcatatcacaaggccggacacgggatgtggttttccaaatcctgacccgctgggaagagccttgctgattctcctgcagcctcatcacttctaagctatcattaaagttaacatggttggccgggcatggt

SEQ ID NO: 288806 - DNA, 1057 bp, Homo sapiens
aagtaagcttttgttatttattacttttgcttttaatataattttttaattgtaagcttacatagtttaatttttaataaaggctgtgtttagcaccagctcacaaatactctaaaaatttaacaattggctcttaagagttgatacaagccggctgctacatgctattgttgtctgggatttttccaggagaaaatactttgtaaatgacaaagaactcgggattattactgcatccaagacatcaaaatggcaaatcttattgatttgattctgttttgaaaatattcaatagaaatactattgtaatttgtctgattaaaagataaattatgtgatttggattctgtcttacaaaattgctttccttgaaattttataaggtaaaatcactatattatgaatgatcaaaatttaatatgtgaagtttcaatgcacactgtatttttaggttatattattttgcaaagtaagaaattcccccatgtatttttatgtgtgaatataatggatgtttgtgttaagcacttagaaaagttttttgagacattctcccattatggctgcaggatttgcttaatgacgctgatacgtgccggaaaaagatgcaggccgcctccactctcatcgatgggctgagtggagaaaaaatccggtggacccagcaaagtaaagaattcaaagctcagattaataggtgggaatctgggtcttcttcataatcactctttctttgtgacattagagaacataaagtccatttccatgtgttcatctctgaatcccatcatctatgacagtgcgtgcaacttaaatcatgcactctcaggtgaaatactatagagggtgaagaagattttgtgaaatattttacatctcagctgtggttcagcactgtgggttttcagtatgagagtgcttttgatattgtttggatttgccagagccgtctccactccagttctctatgcttcacctcaatgattttgaaagtgtggatcaatggtttgttgtggatcaatggtttgttgtaaatgcaaggctgtcttctgctggt

SEQ ID NO: 288807 - DNA, 14030 bp, Homo sapiens
tcttcccggaggtcctccagataccgccggagtatgagtggccttcccaatctacaggaaacattaaaagagagacaggcaagatttagagaggcaagggaaagccgaagactgaaaattgacccttcatacaaatatatatttgaaattctagcagaaaatcttggcctggacatagtaactgttgaagaattaattttggattgcccatctaatgtggtcgaactattgctggagcaactaaaggggcaaaaatgatgaaattgtatatagacaatgcagccccggataaactaaaaggactgtgcatattttttgttcgttgccgtaatgatgttgctataaatgttaaaactattcaagaggaagcgctctttactgttctggatgcgtcgaaaggactcttaaatggaattagggatatgttggcaaatatatttctaccagctgttcttgcaacaaacaactggggtgctttaaaccagtccaagcagggagaatctgaaaaacatattttcactgaaaccatcaacagatatctttcatttttagatggtgctagaataagtattgagggaacagtgaagttaaagacaatagacaatgttaatttttccaaactgcacacctttgaagaagtaactgctgcagccagcaactcagaaactgttcatcagctggaggaagtgctgatggtatggtacaaacagatcgaacaggtacttattgagagtgagcagatgagaaaagaagctggtgattcaggtccactcactgaattggaacactggaaacgcatgtcagccaagttcaactatatcattgagcagattaaagggccaagttgtaaggctgtcataaatgtgctaaatgttgcacactccaaactgctaaagaattggcgtgatttggatgcaagaatcactgatacagcaaatgaatccaaagataatgtcagatatttgtatactttggaaaaagtgtgtcaacctctctataaccatgacctagtttccatggcacatggaatacaaaatttgattaatgccatcagaatgattcacggtgtgtcaaggtattataatacctcagagagaatgacctcattgtttatcaaggtaacaaatcaaatggtaacagcatgtaaagcatatattactgatggaggattaaaccatgtatgggatcaggaaacgccagttgtactaaagaaaattcaggactgcatttttctattcaaggaatatcaggcatcttttcataaaacaaggaaactgatttcagaatcctcaggggaaaaatcttttgaggtttcagaaatgtatatatttggaaaatttgaagctttttgcaaaagactggagaagattacagaaatgataactgttgtgcaaacatattcaaccttgagtaattctaccatagaaggaatagatattatggcaataaaattcagaaatatataccaaggggttaagaaaaagcaatatgacattctggatccaagaaggacagaatttgacacagatttcttagatttcatgacaaaaatcaatggtttagaggtacaaatacaggcatttatgaacagtagttttgggaaaatcttatcttctcagcaggctcttcagctacttcaaaggtttcagaagctgaacattccctgtctgggattagaaataaaccacacaatagagcgtattcttcagtactatgtggctgaacttgatgctactaagaagctttatcattctcagaaagatgacccccctcttgctcgcaacatgccccctatagcaggaaaaatactctgggtgaggcagctctatcgccggataagtgagcccatcaattatttctttaaaaactcagacattttatcaagtccggacggtaaagctgtcatccgtcagtataacaagatctcctatgtgctggtggaattcgaggtggtctatcacacagcctgggtcagagagatttcacagttgcattacgctttacaagccacgctttttgtgcgacatccagaaacagggaagttgctggttaatttcgatcccaaaattttggaagttgttcgggaaactaagtgtatgataaaaatgaagttggatgtaccagaacaggcaaagagattgctaaaattggaaagtaaattgaaagcagacaaactgtatttgcagggtcttctgcaatattatgatgagttatgtcaggaagtgccttctgtgtttgtcaatctgatgaccccaaaaatgaaaaaggtggaatctgtgttgaggcaaggactcacagtgttaacatggtcgtctttaacactggaaagcttctttcaagaagtcgaattagttttggatatgttcaatcaacttttaaagaagatcagtgacttgtgtgaaatgcatattgatacagttctgaaggagatagccaaaactgtgttgatttctctgcctgaaagtggtgctaccaaagtagaagatatgttgaccctcaatgagacatacacaaaagaatgggctgacattctaaaccacaaaagtaagcatgtggaagaagctgtcagagaacttatatcaatatttgagcagatttatgaagtgaaatacactgggaaagtaggaaaacagtcagaacagcggaaacacgttgtttttggaagtgaaacagaagagggtgaaaacaatgactatgaagctaatattgtgaatgagtttgatactcatgataaagaagatgaatttaaaaaggagtgtaaagaggtctttgcttttttctctcatcaattactagacagtcttcaaaaagctacacggttatctctggacacaatgaaaagaagaatatttgttgcaagcctttatgggcgaaagcagtcagaagatattatttcgtttataaaaagtgaagtacatcttgcaattcctaatgtggtgatgattcctagtttggatgacattcaacaagccattaaccgtatgatccagttaaccctggaggtcagcagaggagtggctcactgggggcaacagcaaatccgtcccatcaagtctgtcattcccagccccaccactactgacgtgacccatcaaaacacaggaaaactgctgaagaaggaagaaagatcttttgaagaagctattcctgcgaggaagctgaagaatttttacccgggggtagcggagcacaaggatatttctaagttggtcctgctcctttcttcctctgtaaattccctaagaaaggcagctcatgaggccctgcaggactttcagaagtacaagactctctggacagaggaccgcgatgtgaaagtgaaggaatttttggctaacaacccctctctgactgaaatcagatcagaaattctacactatgctacttttgaacaggagattgatgagttgaagcctattattgttgtaggagcacttgaattacatacagagccgatgaaattggccttatccatcgaggccaaggcatggaagatgttactctgtcgatatctgaatgaagaatacaaaaagaaaatgtcatacatgatagcatttattaatgaatacttgaaaaagttatctagacctattcgtgatttagatgatgtcagatttgcaatggaagccttgtcttgcatacgtgataatgaaattcaaatggacatgactttgggaccaattgaagaagcctatgctattttaaacagatttgaagttgaagtaaccaaagaagaatcagaagcagttgataccttaagatattctttcaacaaattgcagagcaaagctgtttcagtacaagaggacctagttcaagtgcagccaaagtttaaaagcaatctacttgagtctgtgaaagtttttcgtgaggacgtgataaactttgcagaagcatatgaattggaaggacctatggttccaaatataccaccccaagaagctagcaacaggctacagatatttcaggccagtttcgatgatctgtggaggaaatttgttacgtattcatctggtgaacaactttttggattgcctgtgactgattatgaggttttacacaaaaccagaaaagaactcaacttgctgcagaagctgtatggattgtatgacaccgtaatgagcagtattagtggttattatgaaatactttggggagatgtagatattgaaaaaattaatgcagaactgctggaatttcaaaacagatgtcgtaaacttccaaaaggacttaaagattggcaagcttttttggatctcaaaaagagaattgatgatttcagtgagtcatgtcctctactggaaatgatgaccaataaggccatgaaacagagacactgggatagaatctccgagttaactggaaccccatttgatgtggaatctgattctttttgccttagaaatatcatggaagcaccactccttaaacataaggatgatattgaggatatttgcatatctgccattaaggagaaggatatcgaagccaagctgactcaggtgattgagaattggaccaaccaaaatctgagttttgcagcatttaagggaaaaggagagctcctgctcaaaggaaccgaatcgggagaaattatcactttgatggaggatagtttaatggtcttagggtctttactcagcaacagatacaatgctccatttaaaaaaaatatccagaattgggtgtataaattgtccacttcctcagatataattgaagagtggctcgtagtacagaacctttgggtttatcttgaagccgtctttgtaggtggagatattgccaaacagctgcctcaggaagcaaaacgttttcagaatattgacaagtcttggataaaaataatgcagcgagctcatgagaatcccaatgtgattaattgctgtgttggagatgaaaccatgggacaacttttacctcatttacatgagcagttggaagtatgtcagaagtcactcacagggtatttggagaagaaacgattactgtttccaagattcttctttgtatctgatccagttctcctggaaattcttggacaagccagtgattcccacaccatacagccacatctccctgcagtatctgacaacatcaatgaggtgacatttcatacaaaagactatgatcgcatcatggccgtcatatcaagagaaggagaaaaaattgttttggataattctgttatggccaaaggtcctgtggagatttggctactggatttgttaaaaatgcagatgtcatcattacataatataattagatccgctttctatcaaatcagtgattcaggatttcaactcttaccattcctcagccactttccagcacaggttggacttctgggaattcagatgttgtggacacacgattcagaagaggctttacgtaatgcaaaagatgacaggaaaatcatgcaagtgaccaatcagaaatttttggatattctaaatactctcattagtcagacaacacatgatctaagcaagtttgatagagtgaagttcgagactctaattaccatccatgtgcatcagagagatatttttgatgacttggtaaaaatgcatatcaaatcacctactgactttgaatggctaaaacagagtagattttattttaaggaagatttggatcaaactgtggtgtctattacagatgttgattttatttaccaaaatgaatttctgggatgtactgatcgtcttgttatcactccattaacagatagatgctatatcacgttagctcaggccttgggcatgaacatgggaggtgctcccgcaggacctgctggcactggcaaaacagaaaccacaaaagacatgggaaggtgtttgggaaaatatgtggtcgtgttcaattgctcagatcaaatggatttcagaggcctaggaaggattttcaaaggtcttgcacagtcgggttcctggggctgttttgatgagtttaacagaattgaattgcctgtattatcagtggcagcacaacaaatttatattgttttgacagcaagaaaagaaagaaagaaacagttcattttttctgatggtgattgtgttgatttaaatccagaatttggaatcttcttaacgatgaaccctggatatgctgggcgccaggaactaccagaaaacctaaaaatccagtttagaactgttgctatgatggttcctgatagacaggttcattatgactttggattgagaaatattctgtctgtattgaggactcttggatctcaaaaaagagccagaccagaagatagtgaattaagcattgtcatgagaggactaagagatatgaacctttccaaactggttgatgaagatgaacccctgttcctcagcttaatcaatgacctgttcccaggactgcaactggatagtaatacttatgcagaactgcaaaacgcagtagcccatcaggttcagatagagggtttgattaaccatccaccctggaacctgaaactcgtgcagttatatgagacgtctttggtacggcatggcttgatgactcttgggcccagtggttctggaaagacaaccgttatcacgattctaatgaaggcgcaaacagaatgcggaaggcctcatagagaaatgcgaatgaatccaaaagccattactgcacctcagatgtttggcagactggacactgctaccaatgactggacagatgggattttttctactctgtggagaaaaacattaaaagctaaaaaaggtgaaaacattttcctcattttagatggtcctgtggatgccatctggattgagaacttaaattccgttttggatgacaataaaactctgacgttagctaatggagatcgcattcccatggcccctagttgtaagcttctgtttgaagtccacaatatcgagaacgcctctcctgccacggtttctaggatgggcatggtctatatcagcagctctgctctcagctggaggccaatcttacaggcatggttgaagaaacgcactgcacaggaagctgctgtattcctgacactgtatgagaaagtctttgaagatacatacacatatatgaaactaaatctcaatcccaaaatgcagctcttggagtgcaactatattgtgcaatctctcaatcttctggaagggttaattccctccaaagaagaaggcggtgtttcctgtgtcgaacatcttcataaattatttgtgtttggcctaatgtggagtttaggagcccttctggaattagaaagcagagaaaagcttgaagccttcttacggcagcatgaaagcaagttggacttaccagaaatacctaaaggctcaaatcaaaccatgtatgagttttatgttactgattatggtgattgggagcactggaataagaaacttcagccttattattatccaactgacagtattccggaatattcatcaattttggttccaaatgttgacaatattagaacaaattttttgatagacaccattgcaaaacaacataaagctgttttgctcacaggagagcagggaactgcaaaaactgtcatggttaaggcctatttgaaaaaatatgatcctgaagtacagctatccaaaagtctaaacttttcatctgccacagaaccaatgatgtttcagagaacaattgaaagctatgtggataagcgaattggaagcacatatgggccaccaggagggagaaaaatgactgtatttattgatgatattaatatgcctgtgattaatgagtggggagatcagataactaatgagattgtgcgacagatgatggaaatggaaggaatgtacagcttggacaagcctggagacttcactactattgttgatgtgcagctcatagcagcaatgatccaccctggaggtggtcgaaatgatattccacaacgtttaaaaagacaatttactgtgtttaattgtacattgccttcaaatgcttcaatagacaaaatttttggaattattggatgtggatactttgatccttgtagaagtttcaagcctcaaatatgtgagatgattgtgaatttagtctcagtgggtagagtgctgtggcaatggactaaggtgaagatgctgccaactccttctaaatttcattacatcttcaatcttcgagatctttccagaatttggcaaggaatgttgaccataaaagctgaggagtgcgcttcaatccctactctcctgtcccttttcaaacacgagtgcagcagagtaattgcagacagatttataactcctgaagatgagcagtggtttaatgcacatcttactcgtgcagttgaagaaaatattggctctgatgcagcgtcgtgtattcttcctgaaccatactttgtggattttcttcgtgagatgccagaaccaactggtgatgaacctgaagactctgtgtttgaagtacccaaaatatatgaattgatgccatcctttgactttctggctgaaaaactccagttttaccagagacagttcaatgaaatcattagaggaacatctcttgatctggtgttttttaaagatgcaatgactcatcttattaagatttcacgaataattcgaacgtcgtgtggaaatgcattgctggtgggtgttggtggttccggaaaacaaagtctttcaagattggcctcttttattgctggctatcaaatattccagataacattaaccaggtcttacaatgtgactaatctaacagatgatttaaaagctttgtacaaagttgctggtgctgatggaaaaggcatcactttcatctttactgacagtgaaataaaagatgaggcatttctagaataccttaacaacttgctatcttcaggggagatctccaacttgtttgcacgagatgagatggatgaaatcacccaaggtctgatttcagtgatgaagagggagctacctcgccatcctcctacctttgataatttgtatgaatacttcatttcaagatcaaggaagaacttacatgttgttctctgcttttctccagttggtgagaagttccgtgcccgttctttgaaatttcctggcttgatatcaggttgcactatggactggttcagccgctggccaagggaggctctgattgctgtggcctcctacttcctttcagactataatattgtctgctctagtgaaattaaaagacaagttgtagaaacaatgggcctgtttcatgacatggtttcagagagctgtgaaagttatttccaaagataccgccgaagagcacatgtgactcccaaatcttacctctcatttataaatggttataaaaacatttatgctgaaaaggtgaagttcattaatgaacaggctgaacgtatgaatattggtcttgataaactaatggaggcaagtgaatctgttgctaaactctctcaggatcttgcagtcaaggagaaggagttggcagtggcttccataaaagcagacgaagtattagcagaagtcacagtaagcgctcaggcttcagccaaaattaaaaatgaagtacaggaggtaaaggacaaagcccaaaaaattgtggatgaaattgatagtgaaaaagtgaaagctgaaagcaagcttgaggcagctaaacctgcactggaagaagcagaagcagccctgaatactatcaagccaaatgatattgccacagtcaggaaacttgcaaaaccaccacatcttattatgagaatcatggactgtgttctgttactatttcaaaagaaaattgaccctgttactatggatccagaaaaatcttgctgtaagccatcatggggagagtcattaaagttgatgagtgcaacaggattcctgtggagccttcagcagttccctaaggacactataaatgaagagactgttgagttactacagccatattttaatatggatgattatacttttgaaagtgccaaaaaagtctgtgggaatgtggctggtctcctgtcttggacacttgctatggcaatattttatggcatcaatagagaagtgttgcctctgaaggccaacctggccaagcaggaaggccggttagcagttgctaatgctgagttagggaaggcacaagccctgctggatgagaagcaagctgagctggataaagtacaggcaaaatttgatgcagcaatgaatgagaaaatggatttgcttaatgacgctgatacgtgccggaaaaagatgcaggccgcctccactctcatcgatgggctgagtggagaaaaaatccggtggacccagcaaagtaaagaattcaaagctcagattaatagacttgtaggtgatattctgctgtgcacgggattcctttcctaccttggtcctttcaatcagatatttaggaactatttgcttaaagatcaatgggaaatggagttgagagcacggaaaattcctttcacagaaaacctgaatcttatttcaatgttggtggatcctccaactattggtgagtgggggctacagggattaccaggagatgatctctcaattcagaatggcattattgtgacaaaggccaccagatacccactcctcatagacccacaaactcaaggcaaaacttggattaaatcaaaggaaaaagaaaatgatttacaggtgacatctctgaaccataaatattttcgcacacacttggaggacagcctttccttgggccgaccccttctcattgaggacattcatgaagagctggatccagccttggataatgtattagaaaagaattttattaaatctggcaccactttcaaggtgaaagtcggtgataaggaatgtgatatcatggatacatttaaactttacattactacgaagttaccaaatcctgcctttaccccagagattaatgctaaaacgtcagtcattgatttcactgttacaatgaaaggacttgagaatcagttactaaggagagtcattctaacagagaaacaggagttagaggctgagagggttaaacttttggaggatgttacttttaataagcggaagatgaaagaacttgaagataacctcctctataaattaagtgctacaaaaggctcattggtagatgacgaatctctcattggtgtacttcgaactaccaagcagacagcagctgaggtaagtgaaaagttgcatgtggctgcagaaactgagatcaagatcaacgcggctcaggaggagttccggcccgcagccacccgcggaagcatcctctacttcctcatcacagagatgagcatggtcaacatcatgtatcagacgtcattggcccagttcttgaagttatttgaccagtccatggccagatctgaaaagtcaccactacctcaaaagagaattacaaatattatcgagtacctgacatatgaagtttttacatactctgtcagaggcctatacgaaaaccacaaattcctgtttgtactcctcatgaccttaaagattgaccttcagagagggacagttaagcacagagagtttcaagctctcattaaagggggagcagctctggacctgaaagcctgtcctcccaaaccctatcgctggatccttgacatgacttggctgaatcttgtggagctgagtaaacttccacaatttgcagaaattatgaaccagatatctcgtaatgagaaggggtggaaaagctggtttgataaagatgctccagaggaggaaattatccctgatggatataatgattcactagatacctgccataaacttttacttatcaggtcttggtgcccagaccgtactgtttttcaagcaagaaagtatattgcagattctttggaggagaagtacacagaaccagttatcttaaatctggagaaaacttgggaagaaagtgatacccggacacctctgatatgcttcctgtccatgggatctgaccccaccaatcaaattgatgcattggccaagaaactgaaactggaatgtagaactatctcaatggggcaaggacaagaagtacatgctcgaaagctgattcagatgtcaatgcagcagggtggttgggtattactacaaaattgccaccttggcctggaattcatggaagaattactagagacgctaattaccactgaagccagtgatgattctttccgagtatggataactacggagccccatgatcgatttccaattacattgcttcagacctctctcaaattcactaatgagccaccccaaggtgtacgcgcaggtttgaaaagaacatttgctggaattaatcaagaccttctggacatcagtaatttacccatgtggaagccgatgctttacacagtagcatttttacactccactgtgcaggagcgacgaaaatttggccccttaggatggaatattccctacgaattcaattctgctgacttttcagccagtgttcagtttattcagaatcaccttgatgaatgcgatattaagaaaggtgtatcatggaatacggttcggtacatgatcggagaagtacaatatggagacagagtgacagatgactttgacaaacgtctacttaattgctttgccagagtctggttcagtgagaagatgtttgaaccgtcattctgcttttatactggatataaaatccccttatgcaaaaccttagaccagtattttgaatacatccagtcactgccatccctagataaccctgaagtctttgggcttcaccctaatgctgatatcacgtatcagagtaacactgcttctgctgttcttgaaacaattaccaacattcaacccaaagagagtggaggtggtgtgggagagacccgggaggctattgtttatagattatctgaagatatgctgagtaaactccctcctgattacattcctcatgaggtgaaatctcgtttgataaagatgggccatcttaattcaatgaacatatttcttagacaagaaattgacagaatgcaaagagtcatttcagtactccgcagtagcctgagtgatctaaaattggccattgaaggaacaatcattatgagtgagaatctgagagatgctctggacaacatgtatgatgctcgtatacctcagctctggaaaagagtgtcttgggattcgtccacactgggcttctggttcactgaacttttggaaagaaatgctcagttttctacgtggatatttgaagggaggcctaatgtgttttggatgactggtttctttaatccccaaggcttcctcacagcaatgaggcaagaagtgacccgtgcccacaaaggctgggcactggacactgtgaccatccacaatgaagttctgagacagaccaaggaggagatcacgtcaccccctggggaaggtgtgtatatttatgggctctacatggatggagcagcctgggacagacggaatgggaagctcatggaatccacccccaaggtactcttcacgcagttacccgtgctccacatctttgccattaactccacggcacccaaggaccccaagctgtatgtgtgtcctatttacaagaaacccaggcgaactgatttgaccttcatcactgtggtatatttacgaacagtgttgtccccggatcactggatcctgagaggagtggcccttttgtgtgacatcaagtaagttcatttccatctgctcagggcaccagaacccacatagacagcctgtgctattgagggactcagtgatgtgtgtgtcttttctccccagtaattccttaattactctttctacattaaaaagttgatgttctaaaattgctagtgcgtgtgtgttttcctcacatatcaatattcaaaaagataactctaaatgaatgttttttattctgggaaatcatatttcactataattactttttaaagataaaaccctgtttggatgttagaacactttggaagctctgaattttaaaaatttgaaagtgttgatatgtgacatcctaaaaagagcctagtagttgtaaacttttccctcaagtaggtaccaatttcccttgaataaaatctagccatgtctatgtctgtgcta

SEQ ID NO: 288808 - DNA, 10645 bp, Homo sapiens
tcttcccggaggtcctccagataccgccggagtatgagtggccttcccaatctacaggaaacattaaaagagagacaggcaagatttagagaggcaagggaaagccgaagactgaaaattgacccttcatacaaatatatatttgaaattctagcagaaaatcttggcctggacatagtaactgttgaagaattaattttggattgcccatctaatgtggtcgaactattgctggagcaactaaaggggcaaaaatgatgaaattgtatatagacaatgcagccccggataaactaaaaggactgtgcatattttttgttcgttgccgtaatgatgttgctataaatgttaaaactattcaagaggaagcgctctttactgttctggatgcgtcgaaaggactcttaaatggaattagggatatgttggcaaatatatttctaccagctgttcttgcaacaaacaactggggtgctttaaaccagtccaagcagggagaatctgaaaaacatattttcactgaaaccatcaacagatatctttcatttttagatggtgctagaataagtattgagggaacagtgaagttaaagacaatagacaatgttaatttttccaaactgcacacctttgaagaagtaactgctgcagccagcaactcagaaactgttcatcagctggaggaagtgctgatggtatggtacaaacagatcgaacaggtacttattgagagtgagcagatgagaaaagaagctggtgattcaggtccactcactgaattggaacactggaaacgcatgtcagccaagttcaactatatcattgagcagattaaagggccaagttgtaaggctgtcataaatgtgctaaatgttgcacactccaaactgctaaagaattggcgtgatttggatgcaagaatcactgatacagcaaatgaatccaaagataatgtcagatatttgtatactttggaaaaagtgtgtcaacctctctataaccatgacctagtttccatggcacatggaatacaaaatttgattaatgccatcagaatgattcacggtgtgtcaaggtattataatacctcagagagaatgacctcattgtttatcaaggtaacaaatcaaatggtaacagcatgtaaagcatatattactgatggaggattaaaccatgtatgggatcaggaaacgccagttgtactaaagaaaattcaggactgcatttttctattcaaggaatatcaggcatcttttcataaaacaaggaaactgatttcagaatcctcaggggaaaaatcttttgaggtttcagaaatgtatatatttggaaaatttgaagctttttgcaaaagactggagaagattacagaaatgataactgttgtgcaaacatattcaaccttgagtaattctaccatagaaggaatagatattatggcaataaaattcagaaatatataccaaggggttaagaaaaagcaatatgacattctggatccaagaaggacagaatttgacacagatttcttagatttcatgacaaaaatcaatggtttagaggtacaaatacaggcatttatgaacagtagttttgggaaaatcttatcttctcagcaggctcttcagctacttcaaaggtttcagaagctgaacattccctgtctgggattagaaataaaccacacaatagagcgtattcttcagtactatgtggctgaacttgatgctactaagaagctttatcattctcagaaagatgacccccctcttgctcgcaacatgccccctatagcaggaaaaatactctgggtgaggcagctctatcgccggataagtgagcccatcaattatttctttaaaaactcagacattttatcaagtccggacggtaaagctgtcatccgtcagtataacaagatctcctatgtgctggtggaattcgaggtggtctatcacacagcctgggtcagagagatttcacagttgcattacgctttacaagccacgctttttgtgcgacatccagaaacagggaagttgctggttaatttcgatcccaaaattttggaagttgttcgggaaactaagtgtatgataaaaatgaagttggatgtaccagaacaggcaaagagattgctaaaattggaaagtaaattgaaagcagacaaactgtatttgcagggtcttctgcaatattatgatgagttatgtcaggaagtgccttctgtgtttgtcaatctgatgaccccaaaaatgaaaaaggtggaatctgtgttgaggcaaggactcacagtgttaacatggtcgtctttaacactggaaagcttctttcaagaagtcgaattagttttggatatgttcaatcaacttttaaagaagatcagtgacttgtgtgaaatgcatattgatacagttctgaaggagatagccaaaactgtgttgatttctctgcctgaaagtggtgctaccaaagtagaagatatgttgaccctcaatgagacatacacaaaagaatgggctgacattctaaaccacaaaagtaagcatgtggaagaagctgtcagagaacttatatcaatatttgagcagatttatgaagtgaaatacactgggaaagtaggaaaacagtcagaacagcggaaacacgttgtttttggaagtgaaacagaagagggtgaaaacaatgactatgaagctaatattgtgaatgagtttgatactcatgataaagaagatgaatttaaaaaggagtgtaaagaggtctttgcttttttctctcatcaattactagacagtcttcaaaaagctacacggttatctctggacacaatgaaaagaagaatatttgttgcaagcctttatgggcgaaagcagtcagaagatattatttcgtttataaaaagtgaagtacatcttgcaattcctaatgtggtgatgattcctagtttggatgacattcaacaagccattaaccgtatgatccagttaaccctggaggtcagcagaggagtggctcactgggggcaacagcaaatccgtcccatcaagtctgtcattcccagccccaccactactgacgtgacccatcaaaacacaggaaaactgctgaagaaggaagaaagatcttttgaagaagctattcctgcgaggaagctgaagaatttttacccgggggtagcggagcacaaggatatttctaagttggtcctgctcctttcttcctctgtaaattccctaagaaaggcagctcatgaggccctgcaggactttcagaagtacaagactctctggacagaggaccgcgatgtgaaagtgaaggaatttttggctaacaacccctctctgactgaaatcagatcagaaattctacactatgctacttttgaacaggagattgatgagttgaagcctattattgttgtaggagcacttgaattacatacagagccgatgaaattggccttatccatcgaggccaaggcatggaagatgttactctgtcgatatctgaatgaagaatacaaaaagaaaatgtcatacatgatagcatttattaatgaatacttgaaaaagttatctagacctattcgtgatttagatgatgtcagatttgcaatggaagccttgtcttgcatacgtgataatgaaattcaaatggacatgactttgggaccaattgaagaagcctatgctattttaaacagatttgaagttgaagtaaccaaagaagaatcagaagcagttgataccttaagatattctttcaacaaattgcagagcaaagctgtttcagtacaagaggacctagttcaagtgcagccaaagtttaaaagcaatctacttgagtctgtgaaagtttttcgtgaggacgtgataaactttgcagaagcatatgaattggaaggacctatggttccaaatataccaccccaagaagctagcaacaggctacagatatttcaggccagtttcgatgatctgtggaggaaatttgttacgtattcatctggtgaacaactttttggattgcctgtgactgattatgaggttttacacaaaaccagaaaagaactcaacttgctgcagaagctgtatggattgtatgacaccgtaatgagcagtattagtggttattatgaaatactttggggagatgtagatattgaaaaaattaatgcagaactgctggaatttcaaaacagatgtcgtaaacttccaaaaggacttaaagattggcaagcttttttggatctcaaaaagagaattgatgatttcagtgagtcatgtcctctactggaaatgatgaccaataaggccatgaaacagagacactgggatagaatctccgagttaactggaaccccatttgatgtggaatctgattctttttgccttagaaatatcatggaagcaccactccttaaacataaggatgatattgaggatatttgcatatctgccattaaggagaaggatatcgaagccaagctgactcaggtgattgagaattggaccaaccaaaatctgagttttgcagcatttaagggaaaaggagagctcctgctcaaaggaaccgaatcgggagaaattatcactttgatggaggatagtttaatggtcttagggtctttactcagcaacagatacaatgctccatttaaaaaaaatatccagaattgggtgtataaattgtccacttcctcagatataattgaagagtggctcgtagtacagaacctttgggtttatcttgaagccgtctttgtaggtggagatattgccaaacagctgcctcaggaagcaaaacgttttcagaatattgacaagtcttggataaaaataatgcagcgagctcatgagaatcccaatgtgattaattgctgtgttggagatgaaaccatgggacaacttttacctcatttacatgagcagttggaagtatgtcagaagtcactcacagggtatttggagaagaaacgattactgtttccaagattcttctttgtatctgatccagttctcctggaaattcttggacaagccagtgattcccacaccatacagccacatctccctgcagtatctgacaacatcaatgaggtgacatttcatacaaaagactatgatcgcatcatggccgtcatatcaagagaaggagaaaaaattgttttggataattctgttatggccaaaggtcctgtggagatttggctactggatttgttaaaaatgcagatgtcatcattacataatataattagatccgctttctatcaaatcagtgattcaggatttcaactcttaccattcctcagccactttccagcacaggttggacttctgggaattcagatgttgtggacacacgattcagaagaggctttacgtaatgcaaaagatgacaggaaaatcatgcaagtgaccaatcagaaatttttggatattctaaatactctcattagtcagacaacacatgatctaagcaagtttgatagagtgaagttcgagactctaattaccatccatgtgcatcagagagatatttttgatgacttggtaaaaatgcatatcaaatcacctactgactttgaatggctaaaacagagtagattttattttaaggaagatttggatcaaactgtggtgtctattacagatgttgattttatttaccaaaatgaatttctgggatgtactgatcgtcttgttatcactccattaacagatagatgctatatcacgttagctcaggccttgggcatgaacatgggaggtgctcccgcaggacctgctggcactggcaaaacagaaaccacaaaagacatgggaaggtgtttgggaaaatatgtggtcgtgttcaattgctcagatcaaatggatttcagaggcctaggaaggattttcaaaggtcttgcacagtcgggttcctggggctgttttgatgagtttaacagaattgaattgcctgtattatcagtggcagcacaacaaatttatattgttttgacagcaagaaaagaaagaaagaaacagttcattttttctgatggtgattgtgttgatttaaatccagaatttggaatcttcttaacgatgaaccctggatatgctgggcgccaggaactaccagaaaacctaaaaatccagtttagaactgttgctatgatggttcctgatagacaggttcattatgactttggattgagaaatattctgtctgtattgaggactcttggatctcaaaaaagagccagaccagaagatagtgaattaagcattgtcatgagaggactaagagatatgaacctttccaaactggttgatgaagatgaacccctgttcctcagcttaatcaatgacctgttcccaggactgcaactggatagtaatacttatgcagaactgcaaaacgcagtagcccatcaggttcagatagagggtttgattaaccatccaccctggaacctgaaactcgtgcagttatatgagacgtctttggtacggcatggcttgatgactcttgggcccagtggttctggaaagacaaccgttatcacgattctaatgaaggcgcaaacagaatgcggaaggcctcatagagaaatgcgaatgaatccaaaagccattactgcacctcagatgtttggcagactggacactgctaccaatgactggacagatgggattttttctactctgtggagaaaaacattaaaagctaaaaaaggtgaaaacattttcctcattttagatggtcctgtggatgccatctggattgagaacttaaattccgttttggatgacaataaaactctgacgttagctaatggagatcgcattcccatggcccctagttgtaagcttctgtttgaagtccacaatatcgagaacgcctctcctgccacggtttctaggatgggcatggtctatatcagcagctctgctctcagctggaggccaatcttacaggcatggttgaagaaacgcactgcacaggaagctgctgtattcctgacactgtatgagaaagtctttgaagatacatacacatatatgaaactaaatctcaatcccaaaatgcagctcttggagtgcaactatattgtgcaatctctcaatcttctggaagggttaattccctccaaagaagaaggcggtgtttcctgtgtcgaacatcttcataaattatttgtgtttggcctaatgtggagtttaggagcccttctggaattagaaagcagagaaaagcttgaagccttcttacggcagcatgaaagcaagttggacttaccagaaatacctaaaggctcaaatcaaaccatgtatgagttttatgttactgattatggtgattgggagcactggaataagaaacttcagccttattattatccaactgacagtattccggaatattcatcaattttggttccaaatgttgacaatattagaacaaattttttgatagacaccattgcaaaacaacataaagctgttttgctcacaggagagcagggaactgcaaaaactgtcatggttaaggcctatttgaaaaaatatgatcctgaagtacagctatccaaaagtctaaacttttcatctgccacagaaccaatgatgtttcagagaacaattgaaagctatgtggataagcgaattggaagcacatatgggccaccaggagggagaaaaatgactgtatttattgatgatattaatatgcctgtgattaatgagtggggagatcagataactaatgagattgtgcgacagatgatggaaatggaaggaatgtacagcttggacaagcctggagacttcactactattgttgatgtgcagctcatagcagcaatgatccaccctggaggtggtcgaaatgatattccacaacgtttaaaaagacaatttactgtgtttaattgtacattgccttcaaatgcttcaatagacaaaatttttggaattattggatgtggatactttgatccttgtagaagtttcaagcctcaaatatgtgagatgattgtgaatttagtctcagtgggtagagtgctgtggcaatggactaaggtgaagatgctgccaactccttctaaatttcattacatcttcaatcttcgagatctttccagaatttggcaaggaatgttgaccataaaagctgaggagtgcgcttcaatccctactctcctgtcccttttcaaacacgagtgcagcagagtaattgcagacagatttataactcctgaagatgagcagtggtttaatgcacatcttactcgtgcagttgaagaaaatattggctctgatgcagcgtcgtgtattcttcctgaaccatactttgtggattttcttcgtgagatgccagaaccaactggtgatgaacctgaagactctgtgtttgaagtacccaaaatatatgaattgatgccatcctttgactttctggctgaaaaactccagttttaccagagacagttcaatgaaatcattagaggaacatctcttgatctggtgttttttaaagatgcaatgactcatcttattaagatttcacgaataattcgaacgtcgtgtggaaatgcattgctggtgggtgttggtggttccggaaaacaaagtctttcaagattggcctcttttattgctggctatcaaatattccagataacattaaccaggtcttacaatgtgactaatctaacagatgatttaaaagctttgtacaaagttgctggtgctgatggaaaaggcatcactttcatctttactgacagtgaaataaaagatgaggcatttctagaataccttaacaacttgctatcttcaggggagatctccaacttgtttgcacgagatgagatggatgaaatcacccaaggtctgatttcagtgatgaagagggagctacctcgccatcctcctacctttgataatttgtatgaatacttcatttcaagatcaaggaagaacttacatgttgttctctgcttttctccagttggtgagaagttccgtgcccgttctttgaaatttcctggcttgatatcaggttgcactatggactggttcagccgctggccaagggaggctctgattgctgtggcctcctacttcctttcagactataatattgtctgctctagtgaaattaaaagacaagttgtagaaacaatgggcctgtttcatgacatggtttcagagagctgtgaaagttatttccaaagataccgccgaagagcacatgtgactcccaaatcttacctctcatttataaatggttataaaaacatttatgctgaaaaggtgaagttcattaatgaacaggctgaacgtatgaatattggtcttgataaactaatggaggcaagtgaatctgttgctaaactctctcaggatcttgcagtcaaggagaaggagttggcagtggcttccataaaagcagacgaagtattagcagaagtcacagtaagcgctcaggcttcagccaaaattaaaaatgaagtacaggaggtaaaggacaaagcccaaaaaattgtggatgaaattgatagtgaaaaagtgaaagctgaaagcaagcttgaggcagctaaacctgcactggaagaagcagaagcagccctgaatactatcaagccaaatgatattgccacagtcaggaaacttgcaaaaccaccacatcttattatgagaatcatggactgtgttctgttactatttcaaaagaaaattgaccctgttactatggatccagaaaaatcttgctgtaagccatcatggggagagtcattaaagttgatgagtgcaacaggattcctgtggagccttcagcagttccctaaggacactataaatgaagagactgttgagttactacagccatattttaatatggatgattatacttttgaaagtgccaaaaaagtctgtgggaatgtggctggtctcctgtcttggacacttgctatggcaatattttatggcatcaatagagaagtgttgcctctgaaggccaacctggccaagcaggaaggccggttagcagttgctaatgctgagttagggaaggcacaagccctgctggatgagaagcaagctgagctggataaagtacaggcaaaatttgatgcagcaatgaatgagaaaatggatttgcttaatgacgctgatacgtgccggaaaaagatgcaggccgcctccactctcatcgatgggctgagtggagaaaaaatccggtggacccagcaaagtaaagaattcaaagctcagattaataggtgggaatctgggtcttcttcataatcactctttctttgtgacattagagaacataaagtccatttccatgtgttcatctctgaatcccatcatctatgacagtgcgtgcaacttaaatcatgcactctcaggtgaaatactatagagggtgaagaagattttgtgaaatattttacatctcagctgtggttcagcactgtgggttttcagtatgagagtgcttttgatattgtttggatttgccagagccgtctccactccagttctctatgcttcacctcaatgattttgaaagtgtggatcaatggtttgttgtggatcaatggtttgttgtaaatgcaaggctgtcttctgctggt

SEQ ID NO: 288809 - DNA, 7285 bp, Homo sapiens
tcttcccggaggtcctccagataccgccggagtatgagtggccttcccaatctacaggaaacattaaaagagagacaggcaagatttagagaggcaagggaaagccgaagactgaaaattgacccttcatacaaatatatatttgaaattctagcagaaaatcttggcctggacatagtaactgttgaagaattaattttggattgcccatctaatgtggtcgaactattgctggagcaactaaaggggcaaaaatgatgaaattgtatatagacaatgcagccccggataaactaaaaggactgtgcatattttttgttcgttgccgtaatgatgttgctataaatgttaaaactattcaagaggaagcgctctttactgttctggatgcgtcgaaaggactcttaaatggaattagggatatgttggcaaatatatttctaccagctgttcttgcaacaaacaactggggtgctttaaaccagtccaagcagggagaatctgaaaaacatattttcactgaaaccatcaacagatatctttcatttttagatggtgctagaataagtattgagggaacagtgaagttaaagacaatagacaatgttaatttttccaaactgcacacctttgaagaagtaactgctgcagccagcaactcagaaactgttcatcagctggaggaagtgctgatggtatggtacaaacagatcgaacaggtacttattgagagtgagcagatgagaaaagaagctggtgattcaggtccactcactgaattggaacactggaaacgcatgtcagccaagttcaactatatcattgagcagattaaagggccaagttgtaaggctgtcataaatgtgctaaatgttgcacactccaaactgctaaagaattggcgtgatttggatgcaagaatcactgatacagcaaatgaatccaaagataatgtcagatatttgtatactttggaaaaagtgtgtcaacctctctataaccatgacctagtttccatggcacatggaatacaaaatttgattaatgccatcagaatgattcacggtgtgtcaaggtattataatacctcagagagaatgacctcattgtttatcaaggtaacaaatcaaatggtaacagcatgtaaagcatatattactgatggaggattaaaccatgtatgggatcaggaaacgccagttgtactaaagaaaattcaggactgcatttttctattcaaggaatatcaggcatcttttcataaaacaaggaaactgatttcagaatcctcaggggaaaaatcttttgaggtttcagaaatgtatatatttggaaaatttgaagctttttgcaaaagactggagaagattacagaaatgataactgttgtgcaaacatattcaaccttgagtaattctaccatagaaggaatagatattatggcaataaaattcagaaatatataccaaggggttaagaaaaagcaatatgacattctggatccaagaaggacagaatttgacacagatttcttagatttcatgacaaaaatcaatggtttagaggtacaaatacaggcatttatgaacagtagttttgggaaaatcttatcttctcagcaggctcttcagctacttcaaaggtttcagaagctgaacattccctgtctgggattagaaataaaccacacaatagagcgtattcttcagtactatgtggctgaacttgatgctactaagaagctttatcattctcagaaagatgacccccctcttgctcgcaacatgccccctatagcaggaaaaatactctgggtgaggcagctctatcgccggataagtgagcccatcaattatttctttaaaaactcagacattttatcaagtccggacggtaaagctgtcatccgtcagtataacaagatctcctatgtgctggtggaattcgaggtggtctatcacacagcctgggtcagagagatttcacagttgcattacgctttacaagccacgctttttgtgcgacatccagaaacagggaagttgctggttaatttcgatcccaaaattttggaagttgttcgggaaactaagtgtatgataaaaatgaagttggatgtaccagaacaggcaaagagattgctaaaattggaaagtaaattgaaagcagacaaactgtatttgcagggtcttctgcaatattatgatgagttatgtcaggaagtgccttctgtgtttgtcaatctgatgaccccaaaaatgaaaaaggtggaatctgtgttgaggcaaggactcacagtgttaacatggtcgtctttaacactggaaagcttctttcaagaagtcgaattagttttggatatgttcaatcaacttttaaagaagatcagtgacttgtgtgaaatgcatattgatacagttctgaaggagatagccaaaactgtgttgatttctctgcctgaaagtggtgctaccaaagtagaagatatgttgaccctcaatgagacatacacaaaagaatgggctgacattctaaaccacaaaagtaagcatgtggaagaagctgtcagagaacttatatcaatatttgagcagatttatgaagtgaaatacactgggaaagtaggaaaacagtcagaacagcggaaacacgttgtttttggaagtgaaacagaagagggtgaaaacaatgactatgaagctaatattgtgaatgagtttgatactcatgataaagaagatgaatttaaaaaggagtgtaaagaggtctttgcttttttctctcatcaattactagacagtcttcaaaaagctacacggttatctctggacacaatgaaaagaagaatatttgttgcaagcctttatgggcgaaagcagtcagaagatattatttcgtttataaaaagtgaagtacatcttgcaattcctaatgtggtgatgattcctagtttggatgacattcaacaagccattaaccgtatgatccagttaaccctggaggtcagcagaggagtggctcactgggggcaacagcaaatccgtcccatcaagtctgtcattcccagccccaccactactgacgtgacccatcaaaacacaggaaaactgctgaagaaggaagaaagatcttttgaagaagctattcctgcgaggaagctgaagaatttttacccgggggtagcggagcacaaggatatttctaagttggtcctgctcctttcttcctctgtaaattccctaagaaaggcagctcatgaggccctgcaggactttcagaagtacaagactctctggacagaggaccgcgatgtgaaagtgaaggaatttttggctaacaacccctctctgactgaaatcagatcagaaattctacactatgctacttttgaacaggagattgatgagttgaagcctattattgttgtaggagcacttgaattacatacagagccgatgaaattggccttatccatcgaggccaaggcatggaagatgttactctgtcgatatctgaatgaagaatacaaaaagaaaatgtcatacatgatagcatttattaatgaatacttgaaaaagttatctagacctattcgtgatttagatgatgtcagatttgcaatggaagccttgtcttgcatacgtgataatgaaattcaaatggacatgactttgggaccaattgaagaagcctatgctattttaaacagatttgaagttgaagtaaccaaagaagaatcagaagcagttgataccttaagatattctttcaacaaattgcagagcaaagctgtttcagtacaagaggacctagttcaagtgcagccaaagtttaaaagcaatctacttgagtctgtgaaagtttttcgtgaggacgtgataaactttgcagaagcatatgaattggaaggacctatggttccaaatataccaccccaagaagctagcaacaggctacagatatttcaggccagtttcgatgatctgtggaggaaatttgttacgtattcatctggtgaacaactttttggattgcctgtgactgattatgaggttttacacaaaaccagaaaagaactcaacttgctgcagaagctgtatggattgtatgacaccgtaatgagcagtattagtggttattatgaaatactttggggagatgtagatattgaaaaaattaatgcagaactgctggaatttcaaaacagatgtcgtaaacttccaaaaggacttaaagattggcaagcttttttggatctcaaaaagagaattgatgatttcagtgagtcatgtcctctactggaaatgatgaccaataaggccatgaaacagagacactgggatagaatctccgagttaactggaaccccatttgatgtggaatctgattctttttgccttagaaatatcatggaagcaccactccttaaacataaggatgatattgaggatatttgcatatctgccattaaggagaaggatatcgaagccaagctgactcaggtgattgagaattggaccaaccaaaatctgagttttgcagcatttaagggaaaaggagagctcctgctcaaaggaaccgaatcgggagaaattatcactttgatggaggatagtttaatggtcttagggtctttactcagcaacagatacaatgctccatttaaaaaaaatatccagaattgggtgtataaattgtccacttcctcagatataattgaagagtggctcgtagtacagaacctttgggtttatcttgaagccgtctttgtaggtggagatattgccaaacagctgcctcaggaagcaaaacgttttcagaatattgacaagtcttggataaaaataatgcagcgagctcatgagaatcccaatgtgattaattgctgtgttggagatgaaaccatgggacaacttttacctcatttacatgagcagttggaagtatgtcagaagtcactcacagggtatttggagaagaaacgattactgtttccaagattcttctttgtatctgatccagttctcctggaaattcttggacaagccagtgattcccacaccatacagccacatctccctgcagtatctgacaacatcaatgaggtgacatttcatacaaaagactatgatcgcatcatggccgtcatatcaagagaaggagaaaaaattgttttggataattctgttatggccaaaggtcctgtggagatttggctactggatttgttaaaaatgcagatgtcatcattacataatataattagatccgctttctatcaaatcagtgattcaggatttcaactcttaccattcctcagccactttccagcacaggttggacttctgggaattcagatgttgtggacacacgattcagaagaggctttacgtaatgcaaaagatgacaggaaaatcatgcaagtgaccaatcagaaatttttggatattctaaatactctcattagtcagacaacacatgatctaagcaagtttgatagagtgaagttcgagactctaattaccatccatgtgcatcagagagatatttttgatgacttggtaaaaatgcatatcaaatcacctactgactttgaatggctaaaacagagtagattttattttaaggaagatttggatcaaactgtggtgtctattacagatgttgattttatttaccaaaatgaatttctgggatgtactgatcgtcttgttatcactccattaacagatagatgctatatcacgttagctcaggccttgggcatgaacatgggaggtgctcccgcaggacctgctggcactggcaaaacagaaaccacaaaagacatgggaaggtgtttgggaaaatatgtggtcgtgttcaattgctcagatcaaatggatttcagaggcctaggaaggattttcaaaggtcttgcacagtcgggttcctggggctgttttgatgagtttaacagaattgaattgcctgtattatcagtggcagcacaacaaatttatattgttttgacagcaagaaaagaaagaaagaaacagttcattttttctgatggtgattgtgttgatttaaatccagaatttggaatcttcttaacgatgaaccctggatatgctgggcgccaggaactaccagaaaacctaaaaatccagtttagaactgttgctatgatggttcctgatagacaggttcattatgactttggattgagaaatattctgtctgtattgaggactcttggatctcaaaaaagagccagaccagaagatagtgaattaagcattgtcatgagaggactaagagatatgaacctttccaaactggttgatgaagatgaacccctgttcctcagcttaatcaatgacctgttcccaggactgcaactggatagtaatacttatgcagaactgcaaaacgcagtagcccatcaggttcagatagagggtttgattaaccatccaccctggaacctgaaactcgtgcagttatatgagacgtctttggtacggcatggcttgatgactcttgggcccagtggttctggaaagacaaccgttatcacgattctaatgaaggcgcaaacagaatgcggaaggcctcatagagaaatgcgaatgaatccaaaagccattactgcacctcagatgtttggcagactggacactgctaccaatgactggacagatgggattttttctactctgtggagaaaaacattaaaagctaaaaaaggtgaaaacattttcctcattttagatggtcctgtggatgccatctggattgagaacttaaattccgttttggatgacaataaaactctgacgttagctaatggagatcgcattcccatggcccctagttgtaagcttctgtttgaagtccacaatatcgagaacgcctctcctgccacggtttctaggatgggcatggtctatatcagcagctctgctctcagctggaggccaatcttacaggcatggttgaagaaacgcactgcacaggaagctgctgtattcctgacactgtatgagaaagtctttgaagatacatacacatatatgaaactaaatctcaatcccaaaatgcagctcttggagtgcaactatattgtgcaagtaagatttttttttgtacatttactacttcgattttgatttttttttcactcagttgcagtttacagccatctgaaatagaaagttcagacagtccataaaaatcatttgatgatgtggctgtaaaagctctgataattttgatttctattaaagatcttcttaatgat

SEQ ID NO: 288810 - DNA, 405 bp, Homo sapiens
taaaaactctgttaaaatggaaataaggtggcccctctcctttcttgtagcagttttcatttagatgctcatcaattttatttcttttgttttctctcacatacaggtctggttcagtgagaagatgtttgaaccgtcattctgcttttatactggatataaaatccccttatgcaaaaccttagaccagtattttgaatacatccagtcactgccatccctagataaccctgaagtctttgggcttcaccctaatgctgatatcacgtaagtccctggcattttttaatttgaaggggtcatttgtaactcagtctggcaaagatggtgcatttcattttctctcctaatctctctcctttccccctttttttattttactgtgaaaaatagtgtcgcttcctg

SEQ ID NO: 288811 - DNA, 446 bp, Homo sapiens
ggaactgcaaaaactgtcatggttaaggcctatttgaaaaaatatgatcctgaagtacagctatccaaaagtctaaacttttcatctgccacagaaccaatgatgtttcaggtgaaatccatcatttgctgtaatattataaacataatacattttaaattagtggttacaataaaatgtgtacgcatataaaatgtgaaaatattatatattcaaaagaaatcatgctgcacttggcattcagctgtttagctttcctaaggctaaggttgaaggcaaatccaaatagcatactttgacctaatattgagactgcagctgaactttggagcatatctactgtaatgtaaatgaaggataaaactccaatgccttatttttaaaaatttaacaacatatattttaataattatatgtatacttattaaatgcgtaagtaaattata

SEQ ID NO: 288812 - DNA, 14138 bp, Homo sapiens
tcttcccggaggtcctccagataccgccggagtatgagtggccttcccaatctacaggaaacattaaaagagagacaggcaagatttagagaggcaagggaaagccgaagactgaaaattgacccttcatacaaatatatatttgaaattctagcagaaaatcttggcctggacatagtaactgttgaagaattaattttggattgcccatctaatgtggtcgaactattgctggagcaactaaaggggcaaaaatgatgaaattgtatatagacaatgcagccccggataaactaaaaggactgtgcatattttttgttcgttgccgtaatgatgttgctataaatgttaaaactattcaagaggaagcgctctttactgttctggatgcgtcgaaaggactcttaaatggaattagggatatgttggcaaatatatttctaccagctgttcttgcaacaaacaactggggtgctttaaaccagtccaagcagggagaatctgaaaaacatattttcactgaaaccatcaacagatatctttcatttttagatggtgctagaataagtattgagggaacagtgaagttaaagacaatagacaatgttaatttttccaaactgcacacctttgaagaagtaactgctgcagccagcaactcagaaactgttcatcagctggaggaagtgctgatggtatggtacaaacagatcgaacaggtacttattgagagtgagcagatgagaaaagaagctggtgattcaggtccactcactgaattggaacactggaaacgcatgtcagccaagttcaactatatcattgagcagattaaagggccaagttgtaaggctgtcataaatgtgctaaatgttgcacactccaaactgctaaagaattggcgtgatttggatgcaagaatcactgatacagcaaatgaatccaaagataatgtcagatatttgtatactttggaaaaagtgtgtcaacctctctataaccatgacctagtttccatggcacatggaatacaaaatttgattaatgccatcagaatgattcacggtgtgtcaaggtattataatacctcagagagaatgacctcattgtttatcaaggtaacaaatcaaatggtaacagcatgtaaagcatatattactgatggaggattaaaccatgtatgggatcaggaaacgccagttgtactaaagaaaattcaggactgcatttttctattcaaggaatatcaggcatcttttcataaaacaaggaaactgatttcagaatcctcaggggaaaaatcttttgaggtttcagaaatgtatatatttggaaaatttgaagctttttgcaaaagactggagaagattacagaaatgataactgttgtgcaaacatattcaaccttgagtaattctaccatagaaggaatagatattatggcaataaaattcagaaatatataccaaggggttaagaaaaagcaatatgacattctggatccaagaaggacagaatttgacacagatttcttagatttcatgacaaaaatcaatggtttagaggtacaaatacaggcatttatgaacagtagttttgggaaaatcttatcttctcagcaggctcttcagctacttcaaaggtttcagaagctgaacattccctgtctgggattagaaataaaccacacaatagagcgtattcttcagtactatgtggctgaacttgatgctactaagaagctttatcattctcagaaagatgacccccctcttgctcgcaacatgccccctatagcaggaaaaatactctgggtgaggcagctctatcgccggataagtgagcccatcaattatttctttaaaaactcagacattttatcaagtccggacggtaaagctgtcatccgtcagtataacaagatctcctatgtgctggtggaattcgaggtggtctatcacacagcctgggtcagagagatttcacagttgcattacgctttacaagccacgctttttgtgcgacatccagaaacagggaagttgctggttaatttcgatcccaaaattttggaagttgttcgggaaactaagtgtatgataaaaatgaagttggatgtaccagaacaggcaaagagattgctaaaattggaaagtaaattgaaagcagacaaactgtatttgcagggtcttctgcaatattatgatgagttatgtcaggaagtgccttctgtgtttgtcaatctgatgaccccaaaaatgaaaaaggtggaatctgtgttgaggcaaggactcacagtgttaacatggtcgtctttaacactggaaagcttctttcaagaagtcgaattagttttggatatgttcaatcaacttttaaagaagatcagtgacttgtgtgaaatgcatattgatacagttctgaaggagatagccaaaactgtgttgatttctctgcctgaaagtggtgctaccaaagtagaagatatgttgaccctcaatgagacatacacaaaagaatgggctgacattctaaaccacaaaagtaagcatgtggaagaagctgtcagagaacttatatcaatatttgagcagatttatgaagtgaaatacactgggaaagtaggaaaacagtcagaacagcggaaacacgttgtttttggaagtgaaacagaagagggtgaaaacaatgactatgaagctaatattgtgaatgagtttgatactcatgataaagaagatgaatttaaaaaggagtgtaaagaggtctttgcttttttctctcatcaattactagacagtcttcaaaaagctacacggttatctctggacacaatgaaaagaagaatatttgttgcaagcctttatgggcgaaagcagtcagaagatattatttcgtttataaaaagtgaagtacatcttgcaattcctaatgtggtgatgattcctagtttggatgacattcaacaagccattaaccgtatgatccagttaaccctggaggtcagcagaggagtggctcactgggggcaacagcaaatccgtcccatcaagtctgtcattcccagccccaccactactgacgtgacccatcaaaacacaggaaaactgctgaagaaggaagaaagatcttttgaagaagctattcctgcgaggaagctgaagaatttttacccgggggtagcggagcacaaggatatttctaagttggtcctgctcctttcttcctctgtaaattccctaagaaaggcagctcatgaggccctgcaggactttcagaagtacaagactctctggacagaggaccgcgatgtgaaagtgaaggaatttttggctaacaacccctctctgactgaaatcagatcagaaattctacactatgctacttttgaacaggagattgatgagttgaagcctattattgttgtaggagcacttgaattacatacagagccgatgaaattggccttatccatcgaggccaaggcatggaagatgttactctgtcgatatctgaatgaagaatacaaaaagaaaatgtcatacatgatagcatttattaatgaatacttgaaaaagttatctagacctattcgtgatttagatgatgtcagatttgcaatggaagccttgtcttgcatacgtgataatgaaattcaaatggacatgactttgggaccaattgaagaagcctatgctattttaaacagatttgaagttgaagtaaccaaagaagaatcagaagcagttgataccttaagatattctttcaacaaattgcagagcaaagctgtttcagtacaagaggacctagttcaagtgcagccaaagtttaaaagcaatctacttgagtctgtgaaagtttttcgtgaggacgtgataaactttgcagaagcatatgaattggaaggacctatggttccaaatataccaccccaagaagctagcaacaggctacagatatttcaggccagtttcgatgatctgtggaggaaatttgttacgtattcatctggtgaacaactttttggattgcctgtgactgattatgaggttttacacaaaaccagaaaagaactcaacttgctgcagaagctgtatggattgtatgacaccgtaatgagcagtattagtggttattatgaaatactttggggagatgtagatattgaaaaaattaatgcagaactgctggaatttcaaaacagatgtcgtaaacttccaaaaggacttaaagattggcaagcttttttggatctcaaaaagagaattgatgatttcagtgagtcatgtcctctactggaaatgatgaccaataaggccatgaaacagagacactgggatagaatctccgagttaactggaaccccatttgatgtggaatctgattctttttgccttagaaatatcatggaagcaccactccttaaacataaggatgatattgaggatatttgcatatctgccattaaggagaaggatatcgaagccaagctgactcaggtgattgagaattggaccaaccaaaatctgagttttgcagcatttaagggaaaaggagagctcctgctcaaaggaaccgaatcgggagaaattatcactttgatggaggatagtttaatggtcttagggtctttactcagcaacagatacaatgctccatttaaaaaaaatatccagaattgggtgtataaattgtccacttcctcagatataattgaagagtggctcgtagtacagaacctttgggtttatcttgaagccgtctttgtaggtggagatattgccaaacagctgcctcaggaagcaaaacgttttcagaatattgacaagtcttggataaaaataatgcagcgagctcatgagaatcccaatgtgattaattgctgtgttggagatgaaaccatgggacaacttttacctcatttacatgagcagttggaagtatgtcagaagtcactcacagggtatttggagaagaaacgattactgtttccaagattcttctttgtatctgatccagttctcctggaaattcttggacaagccagtgattcccacaccatacagccacatctccctgcagtatctgacaacatcaatgaggtgacatttcatacaaaagactatgatcgcatcatggccgtcatatcaagagaaggagaaaaaattgttttggataattctgttatggccaaaggtcctgtggagatttggctactggatttgttaaaaatgcagatgtcatcattacataatataattagatccgctttctatcaaatcagtgattcaggatttcaactcttaccattcctcagccactttccagcacaggttggacttctgggaattcagatgttgtggacacacgattcagaagaggctttacgtaatgcaaaagatgacaggaaaatcatgcaagtgaccaatcagaaatttttggatattctaaatactctcattagtcagacaacacatgatctaagcaagtttgatagagtgaagttcgagactctaattaccatccatgtgcatcagagagatatttttgatgacttggtaaaaatgcatatcaaatcacctactgactttgaatggctaaaacagagtagattttattttaaggaagatttggatcaaactgtggtgtctattacagatgttgattttatttaccaaaatgaatttctgggatgtactgatcgtcttgttatcactccattaacagatagatgctatatcacgttagctcaggccttgggcatgaacatgggaggtgctcccgcaggacctgctggcactggcaaaacagaaaccacaaaagacatgggaaggtgtttgggaaaatatgtggtcgtgttcaattgctcagatcaaatggatttcagaggcctaggaaggattttcaaaggtcttgcacagtcgggttcctggggctgttttgatgagtttaacagaattgaattgcctgtattatcagtggcagcacaacaaatttatattgttttgacagcaagaaaagaaagaaagaaacagttcattttttctgatggtgattgtgttgatttaaatccagaatttggaatcttcttaacgatgaaccctggatatgctgggcgccaggaactaccagaaaacctaaaaatccagtttagaactgttgctatgatggttcctgatagacagatcattatgagagttaaacttgcaagctgtggttttcttgaaaatgttatcttggctcaaaaattttacgttctttacaaactctgtgaagagcaacttactaaacaggttcattatgactttggattgagaaatattctgtctgtattgaggactcttggatctcaaaaaagagccagaccagaagatagtgaattaagcattgtcatgagaggactaagagatatgaacctttccaaactggttgatgaagatgaacccctgttcctcagcttaatcaatgacctgttcccaggactgcaactggatagtaatacttatgcagaactgcaaaacgcagtagcccatcaggttcagatagagggtttgattaaccatccaccctggaacctgaaactcgtgcagttatatgagacgtctttggtacggcatggcttgatgactcttgggcccagtggttctggaaagacaaccgttatcacgattctaatgaaggcgcaaacagaatgcggaaggcctcatagagaaatgcgaatgaatccaaaagccattactgcacctcagatgtttggcagactggacactgctaccaatgactggacagatgggattttttctactctgtggagaaaaacattaaaagctaaaaaaggtgaaaacattttcctcattttagatggtcctgtggatgccatctggattgagaacttaaattccgttttggatgacaataaaactctgacgttagctaatggagatcgcattcccatggcccctagttgtaagcttctgtttgaagtccacaatatcgagaacgcctctcctgccacggtttctaggatgggcatggtctatatcagcagctctgctctcagctggaggccaatcttacaggcatggttgaagaaacgcactgcacaggaagctgctgtattcctgacactgtatgagaaagtctttgaagatacatacacatatatgaaactaaatctcaatcccaaaatgcagctcttggagtgcaactatattgtgcaatctctcaatcttctggaagggttaattccctccaaagaagaaggcggtgtttcctgtgtcgaacatcttcataaattatttgtgtttggcctaatgtggagtttaggagcccttctggaattagaaagcagagaaaagcttgaagccttcttacggcagcatgaaagcaagttggacttaccagaaatacctaaaggctcaaatcaaaccatgtatgagttttatgttactgattatggtgattgggagcactggaataagaaacttcagccttattattatccaactgacagtattccggaatattcatcaattttggttccaaatgttgacaatattagaacaaattttttgatagacaccattgcaaaacaacataaagctgttttgctcacaggagagcagggaactgcaaaaactgtcatggttaaggcctatttgaaaaaatatgatcctgaagtacagctatccaaaagtctaaacttttcatctgccacagaaccaatgatgtttcagagaacaattgaaagctatgtggataagcgaattggaagcacatatgggccaccaggagggagaaaaatgactgtatttattgatgatattaatatgcctgtgattaatgagtggggagatcagataactaatgagattgtgcgacagatgatggaaatggaaggaatgtacagcttggacaagcctggagacttcactactattgttgatgtgcagctcatagcagcaatgatccaccctggaggtggtcgaaatgatattccacaacgtttaaaaagacaatttactgtgtttaattgtacattgccttcaaatgcttcaatagacaaaatttttggaattattggatgtggatactttgatccttgtagaagtttcaagcctcaaatatgtgagatgattgtgaatttagtctcagtgggtagagtgctgtggcaatggactaaggtgaagatgctgccaactccttctaaatttcattacatcttcaatcttcgagatctttccagaatttggcaaggaatgttgaccataaaagctgaggagtgcgcttcaatccctactctcctgtcccttttcaaacacgagtgcagcagagtaattgcagacagatttataactcctgaagatgagcagtggtttaatgcacatcttactcgtgcagttgaagaaaatattggctctgatgcagcgtcgtgtattcttcctgaaccatactttgtggattttcttcgtgagatgccagaaccaactggtgatgaacctgaagactctgtgtttgaagtacccaaaatatatgaattgatgccatcctttgactttctggctgaaaaactccagttttaccagagacagttcaatgaaatcattagaggaacatctcttgatctggtgttttttaaagatgcaatgactcatcttattaagatttcacgaataattcgaacgtcgtgtggaaatgcattgctggtgggtgttggtggttccggaaaacaaagtctttcaagattggcctcttttattgctggctatcaaatattccagataacattaaccaggtcttacaatgtgactaatctaacagatgatttaaaagctttgtacaaagttgctggtgctgatggaaaaggcatcactttcatctttactgacagtgaaataaaagatgaggcatttctagaataccttaacaacttgctatcttcaggggagatctccaacttgtttgcacgagatgagatggatgaaatcacccaaggtctgatttcagtgatgaagagggagctacctcgccatcctcctacctttgataatttgtatgaatacttcatttcaagatcaaggaagaacttacatgttgttctctgcttttctccagttggtgagaagttccgtgcccgttctttgaaatttcctggcttgatatcaggttgcactatggactggttcagccgctggccaagggaggctctgattgctgtggcctcctacttcctttcagactataatattgtctgctctagtgaaattaaaagacaagttgtagaaacaatgggcctgtttcatgacatggtttcagagagctgtgaaagttatttccaaagataccgccgaagagcacatgtgactcccaaatcttacctctcatttataaatggttataaaaacatttatgctgaaaaggtgaagttcattaatgaacaggctgaacgtatgaatattggtcttgataaactaatggaggcaagtgaatctgttgctaaactctctcaggatcttgcagtcaaggagaaggagttggcagtggcttccataaaagcagacgaagtattagcagaagtcacagtaagcgctcaggcttcagccaaaattaaaaatgaagtacaggaggtaaaggacaaagcccaaaaaattgtggatgaaattgatagtgaaaaagtgaaagctgaaagcaagcttgaggcagctaaacctgcactggaagaagcagaagcagccctgaatactatcaagccaaatgatattgccacagtcaggaaacttgcaaaaccaccacatcttattatgagaatcatggactgtgttctgttactatttcaaaagaaaattgaccctgttactatggatccagaaaaatcttgctgtaagccatcatggggagagtcattaaagttgatgagtgcaacaggattcctgtggagccttcagcagttccctaaggacactataaatgaagagactgttgagttactacagccatattttaatatggatgattatacttttgaaagtgccaaaaaagtctgtgggaatgtggctggtctcctgtcttggacacttgctatggcaatattttatggcatcaatagagaagtgttgcctctgaaggccaacctggccaagcaggaaggccggttagcagttgctaatgctgagttagggaaggcacaagccctgctggatgagaagcaagctgagctggataaagtacaggcaaaatttgatgcagcaatgaatgagaaaatggatttgcttaatgacgctgatacgtgccggaaaaagatgcaggccgcctccactctcatcgatgggctgagtggagaaaaaatccggtggacccagcaaagtaaagaattcaaagctcagattaatagacttgtaggtgatattctgctgtgcacgggattcctttcctaccttggtcctttcaatcagatatttaggaactatttgcttaaagatcaatgggaaatggagttgagagcacggaaaattcctttcacagaaaacctgaatcttatttcaatgttggtggatcctccaactattggtgagtgggggctacagggattaccaggagatgatctctcaattcagaatggcattattgtgacaaaggccaccagatacccactcctcatagacccacaaactcaaggcaaaacttggattaaatcaaaggaaaaagaaaatgatttacaggtgacatctctgaaccataaatattttcgcacacacttggaggacagcctttccttgggccgaccccttctcattgaggacattcatgaagagctggatccagccttggataatgtattagaaaagaattttattaaatctggcaccactttcaaggtgaaagtcggtgataaggaatgtgatatcatggatacatttaaactttacattactacgaagttaccaaatcctgcctttaccccagagattaatgctaaaacgtcagtcattgatttcactgttacaatgaaaggacttgagaatcagttactaaggagagtcattctaacagagaaacaggagttagaggctgagagggttaaacttttggaggatgttacttttaataagcggaagatgaaagaacttgaagataacctcctctataaattaagtgctacaaaaggctcattggtagatgacgaatctctcattggtgtacttcgaactaccaagcagacagcagctgaggtaagtgaaaagttgcatgtggctgcagaaactgagatcaagatcaacgcggctcaggaggagttccggcccgcagccacccgcggaagcatcctctacttcctcatcacagagatgagcatggtcaacatcatgtatcagacgtcattggcccagttcttgaagttatttgaccagtccatggccagatctgaaaagtcaccactacctcaaaagagaattacaaatattatcgagtacctgacatatgaagtttttacatactctgtcagaggcctatacgaaaaccacaaattcctgtttgtactcctcatgaccttaaagattgaccttcagagagggacagttaagcacagagagtttcaagctctcattaaagggggagcagctctggacctgaaagcctgtcctcccaaaccctatcgctggatccttgacatgacttggctgaatcttgtggagctgagtaaacttccacaatttgcagaaattatgaaccagatatctcgtaatgagaaggggtggaaaagctggtttgataaagatgctccagaggaggaaattatccctgatggatataatgattcactagatacctgccataaacttttacttatcaggtcttggtgcccagaccgtactgtttttcaagcaagaaagtatattgcagattctttggaggagaagtacacagaaccagttatcttaaatctggagaaaacttgggaagaaagtgatacccggacacctctgatatgcttcctgtccatgggatctgaccccaccaatcaaattgatgcattggccaagaaactgaaactggaatgtagaactatctcaatggggcaaggacaagaagtacatgctcgaaagctgattcagatgtcaatgcagcagggtggttgggtattactacaaaattgccaccttggcctggaattcatggaagaattactagagacgctaattaccactgaagccagtgatgattctttccgagtatggataactacggagccccatgatcgatttccaattacattgcttcagacctctctcaaattcactaatgagccaccccaaggtgtacgcgcaggtttgaaaagaacatttgctggaattaatcaagaccttctggacatcagtaatttacccatgtggaagccgatgctttacacagtagcatttttacactccactgtgcaggagcgacgaaaatttggccccttaggatggaatattccctacgaattcaattctgctgacttttcagccagtgttcagtttattcagaatcaccttgatgaatgcgatattaagaaaggtgtatcatggaatacggttcggtacatgatcggagaagtacaatatggagacagagtgacagatgactttgacaaacgtctacttaattgctttgccagagtctggttcagtgagaagatgtttgaaccgtcattctgcttttatactggatataaaatccccttatgcaaaaccttagaccagtattttgaatacatccagtcactgccatccctagataaccctgaagtctttgggcttcaccctaatgctgatatcacgtatcagagtaacactgcttctgctgttcttgaaacaattaccaacattcaacccaaagagagtggaggtggtgtgggagagacccgggaggctattgtttatagattatctgaagatatgctgagtaaactccctcctgattacattcctcatgaggtgaaatctcgtttgataaagatgggccatcttaattcaatgaacatatttcttagacaagaaattgacagaatgcaaagagtcatttcagtactccgcagtagcctgagtgatctaaaattggccattgaaggaacaatcattatgagtgagaatctgagagatgctctggacaacatgtatgatgctcgtatacctcagctctggaaaagagtgtcttgggattcgtccacactgggcttctggttcactgaacttttggaaagaaatgctcagttttctacgtggatatttgaagggaggcctaatgtgttttggatgactggtttctttaatccccaaggcttcctcacagcaatgaggcaagaagtgacccgtgcccacaaaggctgggcactggacactgtgaccatccacaatgaagttctgagacagaccaaggaggagatcacgtcaccccctggggaaggtgtgtatatttatgggctctacatggatggagcagcctgggacagacggaatgggaagctcatggaatccacccccaaggtactcttcacgcagttacccgtgctccacatctttgccattaactccacggcacccaaggaccccaagctgtatgtgtgtcctatttacaagaaacccaggcgaactgatttgaccttcatcactgtggtatatttacgaacagtgttgtccccggatcactggatcctgagaggagtggcccttttgtgtgacatcaagtaagttcatttccatctgctcagggcaccagaacccacatagacagcctgtgctattgagggactcagtgatgtgtgtgtcttttctccccagtaattccttaattactctttctacattaaaaagttgatgttctaaaattgctagtgcgtgtgtgttttcctcacatatcaatattcaaaaagataactctaaatgaatgttttttattctgggaaatcatatttcactataattactttttaaagataaaaccctgtttggatgttagaacactttggaagctctgaattttaaaaatttgaaagtgttgatatgtgacatcctaaaaagagcctagtagttgtaaacttttccctcaagtaggtaccaatttcccttgaataaaatctagccatgtctatgtctgtgcta

SEQ ID NO: 288813 - DNA, 4442 bp, Homo sapiens
aagtaagcttttgttatttattacttttgcttttaatataattttttaattgtaagcttacatagtttaatttttaataaaggctgtgtttagcaccagctcacaaatactctaaaaatttaacaattggctcttaagagttgatacaagccggctgctacatgctattgttgtctgggatttttccaggagaaaatactttgtaaatgacaaagaactcgggattattactgcatccaagacatcaaaatggcaaatcttattgatttgattctgttttgaaaatattcaatagaaatactattgtaatttgtctgattaaaagataaattatgtgatttggattctgtcttacaaaattgctttccttgaaattttataaggtaaaatcactatattatgaatgatcaaaatttaatatgtgaagtttcaatgcacactgtatttttaggttatattattttgcaaagtaagaaattcccccatgtatttttatgtgtgaatataatggatgtttgtgttaagcacttagaaaagttttttgagacattctcccattatggctgcaggatttgcttaatgacgctgatacgtgccggaaaaagatgcaggccgcctccactctcatcgatgggctgagtggagaaaaaatccggtggacccagcaaagtaaagaattcaaagctcagattaatagacttgtaggtgatattctgctgtgcacgggattcctttcctaccttggtcctttcaatcagatatttaggaactatttgcttaaagatcaatgggaaatggagttgagagcacggaaaattcctttcacagaaaacctgaatcttatttcaatgttggtggatcctccaactattggtgagtgggggctacagggattaccaggagatgatctctcaattcagaatggcattattgtgacaaaggccaccagatacccactcctcatagacccacaaactcaaggcaaaacttggattaaatcaaaggaaaaagaaaatgatttacaggtgacatctctgaaccataaatattttcgcacacacttggaggacagcctttccttgggccgaccccttctcattgaggacattcatgaagagctggatccagccttggataatgtattagaaaagaattttattaaatctggcaccactttcaaggtgaaagtcggtgataaggaatgtgatatcatggatacatttaaactttacattactacgaagttaccaaatcctgcctttaccccagagattaatgctaaaacgtcagtcattgatttcactgttacaatgaaaggacttgagaatcagttactaaggagagtcattctaacagagaaacaggagttagaggctgagagggttaaacttttggaggatgttacttttaataagcggaagatgaaagaacttgaagataacctcctctataaattaagtgctacaaaaggctcattggtagatgacgaatctctcattggtgtacttcgaactaccaagcagacagcagctgaggtaagtgaaaagttgcatgtggctgcagaaactgagatcaagatcaacgcggctcaggaggagttccggcccgcagccacccgcggaagcatcctctacttcctcatcacagagatgagcatggtcaacatcatgtatcagacgtcattggcccagttcttgaagttatttgaccagtccatggccagatctgaaaagtcaccactacctcaaaagagaattacaaatattatcgagtacctgacatatgaagtttttacatactctgtcagaggcctatacgaaaaccacaaattcctgtttgtactcctcatgaccttaaagattgaccttcagagagggacagttaagcacagagagtttcaagctctcattaaagggggagcagctctggacctgaaagcctgtcctcccaaaccctatcgctggatccttgacatgacttggctgaatcttgtggagctgagtaaacttccacaatttgcagaaattatgaaccagatatctcgtaatgagaaggggtggaaaagctggtttgataaagatgctccagaggaggaaattatccctgatggatataatgattcactagatacctgccataaacttttacttatcaggtcttggtgcccagaccgtactgtttttcaagcaagaaagtatattgcagattctttggaggagaagtacacagaaccagttatcttaaatctggagaaaacttgggaagaaagtgatacccggacacctctgatatgcttcctgtccatgggatctgaccccaccaatcaaattgatgcattggccaagaaactgaaactggaatgtagaactatctcaatggggcaaggacaagaagtacatgctcgaaagctgattcagatgtcaatgcagcagggtggttgggtattactacaaaattgccaccttggcctggaattcatggaagaattactagagacgctaattaccactgaagccagtgatgattctttccgagtatggataactacggagccccatgatcgatttccaattacattgcttcagacctctctcaaattcactaatgagccaccccaaggtgtacgcgcaggtttgaaaagaacatttgctggaattaatcaagaccttctggacatcagtaatttacccatgtggaagccgatgctttacacagtagcatttttacactccactgtgcaggagcgacgaaaatttggccccttaggatggaatattccctacgaattcaattctgctgacttttcagccagtgttcagtttattcagaatcaccttgatgaatgcgatattaagaaaggtgtatcatggaatacggttcggtacatgatcggagaagtacaatatggagacagagtgacagatgactttgacaaacgtctacttaattgctttgccagagtctggttcagtgagaagatgtttgaaccgtcattctgcttttatactggatataaaatccccttatgcaaaaccttagaccagtattttgaatacatccagtcactgccatccctagataaccctgaagtctttgggcttcaccctaatgctgatatcacgtatcagagtaacactgcttctgctgttcttgaaacaattaccaacattcaacccaaagagagtggaggtggtgtgggagagacccgggaggctattgtttatagattatctgaagatatgctgagtaaactccctcctgattacattcctcatgaggtgaaatctcgtttgataaagatgggccatcttaattcaatgaacatatttcttagacaagaaattgacagaatgcaaagagtcatttcagtactccgcagtagcctgagtgatctaaaattggccattgaaggaacaatcattatgagtgagaatctgagagatgctctggacaacatgtatgatgctcgtatacctcagctctggaaaagagtgtcttgggattcgtccacactgggcttctggttcactgaacttttggaaagaaatgctcagttttctacgtggatatttgaagggaggcctaatgtgttttggatgactggtttctttaatccccaaggcttcctcacagcaatgaggcaagaagtgacccgtgcccacaaaggctgggcactggacactgtgaccatccacaatgaagttctgagacagaccaaggaggagatcacgtcaccccctggggaaggtgtgtatatttatgggctctacatggatggagcagcctgggacagacggaatgggaagctcatggaatccacccccaaggtactcttcacgcagttacccgtgctccacatctttgccattaactccacggcacccaaggaccccaagctgtatgtgtgtcctatttacaagaaacccaggcgaactgatttgaccttcatcactgtggtatatttacgaacagtgttgtccccggatcactggatcctgagaggagtggcccttttgtgtgacatcaagtaagttcatttccatctgctcagggcaccagaacccacatagacagcctgtgctattgagggactcagtgatgtgtgtgtcttttctccccagtaattccttaattactctttctacattaaaaagttgatgttctaaaattgctagtgcgtgtgtgttttcctcacatatcaatattcaaaaagataactctaaatgaatgttttttattctgggaaatcatatttcactataattactttttaaagataaaaccctgtttggatgttagaacactttggaagctctgaattttaaaaatttgaaagtgttgatatgtgacatcctaaaaagagcctagtagttgtaaacttttccctcaagtaggtaccaatttcccttgaataaaatctagccatgtctatgtctgtgcta

SEQ ID NO: 288814 - DNA, 1225 bp, Homo sapiens
attttaaagacttaaagtttaatttttattattaaaagggtatgattatttttactaaaattaataaaaagattaactgttactaaattaaagctccttcaaaaacataaatgtattctttagagagttaaaaaaagtagcaataaaatacatttttaatttagttaagcttacttaactaatgatcaaatagattaagttgtataaaattttacaaactttatatttttgcatacacttatcttcctggcatttttgaaataaaaaaaatacaagtgcatagggcagaggaggcgattcagttacttctgctatgttattaaatctctggtaaccactatacaatacaatacaatacaatacaatacaatacaatacaatacaatacaatacatgtagactcagcatccaaactttattttaccttcaagttctacctgataaagtggtggaataaagatggtattttccataactgtttaataataatcacatgttttatacccattgctttgaagaagaaaccttaagcaactagaaatgtcaatctaaaaggcagaaaagctggaaaaatctcatgaagactagaagatttacactcataagatcatgtaaatttatttggatatgctgaaaaaagagggggtataaaatctaaagtttggtaaatctttgctttacagggcttcaagttatagatttttcttttttccttttctcttcccctttctctctctttctcttttttatttttgccatttcttctcaggagcccctgcaatttcaaaccttggaattgaattggatttgaggaggaaaacccatattcagctttaattcaaatgaattttactactttagacaaagactaatttggatcatgattattggcctgtgtcccacccattattcacatatagaatgggttgcattatcctctccttggaaatatctttcaaagtgggtaatgagaaaactacttagaagactgtgctgaaggaaatgatggcatgaacaactctagataatttttgtttatttggatataacgtgaatgggcccataccataaactcctattaagctgaatcaccaaaaaaaaatttgatatgaaagtcatacattgaaaaaattcactcttaccactgatttgattgatactgagcctgtaaatatttatttatatgatgtttggcactttattttataaaactaccctttactta

SEQ ID NO: 288815 - DNA, 564 bp, Homo sapiens
ataccttctgctatggtttgaatgtcctttcgaaaactcatgttaaaaattatgattttttttttttgagacggagtcttactctgttgtccaggctggaatgcagtggtgcaatctcagctcactgcaacctccatctcctgggttcaagcgattctcctgcctcagcctcctgagtagctaggactacaggcatgcaccaccatgcctggctaatttttccacacccagccaaaatttacgattattattattgttttggaagcagggtcttactctgtagtccaggctacagtgcattgatacaatagctcactgcagccttgaacttctaggctcaagtgatccttctaccttggcctcccaaagtactgggattacaggagtgagccaccatgcctggccacatgttgaaatttaattgccactgtgacggtaataggtgattaggccatgagggctctgccctcatgaatggattcatgttgttataggggaagttggtttgttattcacaagaggggctgttaaaaaagtgagtctgggctaggtatggtggctcat

SEQ ID NO: 288816 - DNA, 335 bp, Homo sapiens
agcaactctccccacttgaacccctcaagccaactgtgtgaagtcccaacacacagttggcactacaggtgtgtgccactgtgcaggcttgcacctagtgaagactgtctaggggagaatgattacacaatttaaaaaaagtctattcaaatattttaacacttcttttcaggtagttatagctgatccaaagcagcgatgcagctggacatggtgattaggccatgagggctctgccctcatgaatggattcatgttgttataggggaagttggtttgttattcacaagaggggctgttaaaaaagtgagtctgggctaggtatggtggctcat

SEQ ID NO: 288817 - DNA, 881 bp, Homo sapiens
tctggggttgcgaaccgcccccgagcctggtacaggctgggattgtagtcctgcagccttgtggccgaagggctgggactggccatgagattacatgtcctagcatgctcagccaggcgcgcgcagctctgccccttcctccagtgatgcgcacagtccctgatccctgtgcacgctgggattgtagtcctgcagccctgcgatcacttgcaggtaacaagaaatttcagcttccggcatgatgggcgaaggcccccaccttcagcctcgctcctccatgccttcagagctgttccgccatgcagacggggagcctgcctgttctttaacctctcctacctgatgggagaggacaagctaccaggacagcttgtctcaccaagaaattgtgataccgcatcccccaacgtgctggcttcctgacttccaaagttgcggcaaggtaagaagaactacagaggaagaacctaatgcagacgtttcccaggagactttaactgaagtatcagcaaactgaaagctaggacgcttcagacataccagtgggcctaacctttttcacaaggagctctggcctggccaacaagaatcacctttggtgcttcagtgcagtgtcaccatcacctgtttgaaatgcagccagatggagtctcattctgtcacccaagctggagtgcagtggcgcggtcttggctaacagcaacctccgcctcccaggttcaagcaattctcctgcctcagcctctcgagtagctggtattacaggcacgcaccaccacgcccagagtttcactcttgttgcccaggctggagtgcaatggctcgatcttggctcaccacaagctccaactccaggattcaagcggttctcctgtctcagc

SEQ ID NO: 288818 - DNA, 448 bp, Homo sapiens
gctcagaggtgatttttattttccattcaggccaagtaaatccaatcagccattagctcagtgaagatttgtcaaatccaagccacacaccaaatcacgttatgctaaatgtgaaaatgtcctcattactgggcaccaaggtgttttaaattcagagtctaatcaaaacagctcatggggttctgtccatccagctaggacgcttcagacataccagtgggcctaacctttttcacaaggagctctggcctggccaacaagaatcacctttggtgcttcagtgcagtgtcaccatcacctgtttgaaatgcagccaggtaacatgtaccattttatttgctttcagtatcacagtctatcttctaataagaaacctaggtttatttctatgtaaagtgtaaaagaaatttaaactcatagaagcagagagtacaataatgaaaaaaaa

SEQ ID NO: 288819 - DNA, 864 bp, Homo sapiens
ctcagatgatccgcctgccttggccctccaaagtgctggaattataggcatgagccaccgtgcctggcctgttccatgcattaaaaaaaaataaaaaaattaaaaaaaatcagtgagaacaagaagaaatgtaaatgctgggcttttcatataaatccagggaattatgggacagttagtacccacctcccagggtattataaggataaattcatgtcatcttcccagctccgtagcgtgcttctgagcacacagagcatgctccataaacattgcattaacgcatgtgtgcatgttgttttccaaatgcagacttactcagacatgagctgccttctccagcctctgtaaagtttaaaggaccagcagagtgtgccatgttttaggatagtgattggtggtttttattttggactgaaagcatttatgttgtgagaagagtataggtttaaggaactgtgtgctgtggcactttgtctagttgagtgctgctataagtgatctagggcaagtagggtcagcattagctgtgaatgaagccaatccatggacccctttcaaacctgcagaattggccaggcatggtgctcatggggttctgtccatccagctaggacgcttcagacataccagtgggcctaacctttttcacaaggagctctggcctggccaacaagaatcacctttggtgcttcagtgcagtgtcaccatcacctgtttgaaatgcagccaggtaacatgtaccattttatttgctttcagtatcacagtctatcttctaataagaaacctaggtttatttctatgtaaagtgtaaaagaaatttaaactcatagaagcagagagtacaataatgaaaaaaaa

SEQ ID NO: 288820 - DNA, 234 bp, Homo sapiens
gcttcagacataccagtgggcctaacctttttcacaaggagctctggcctggccaacaagaatcacctttggtgcttcagtgcagtgtcaccatcacctgtttgaaatgcagccaggtaacatgtaccattttatttgctttcagtatcacagtctatcttctaataagaaacctaggcctctggctgggtgtggtggcttacacctgtaacccagcactttgagaggctgagg

SEQ ID NO: 288821 - DNA, 347 bp, Homo sapiens
tcaggtgagtttctcctgtgcctgcctgggcgccagctgatctgagatgccgcagtgagtattgggggctctgagggtttcgcctccagggtgactctacccgtgccagccctcctcctgcccaccccagggctggtcagtgcaggtgcctgtcctggtgccagagctcagcccagaggcagggtccaggaatgggctgtgaggggtggcgaacttgcccctcccctcccccaggtgctgtccctcagctccattgttcttgggagtgaaagtccaatagaattttttttttaagtgagcatgtatatttattgtagaaaaatcgggaaatacaaaagtaaactata

SEQ ID NO: 288822 - DNA, 618 bp, Homo sapiens
tggcaacgggacgccgctcctgggtggcgagcaggcgcgtgtgtaggggagttagaaatggagtcaatatatcttcaaaagcaccttggggcctgtttaactcaaggtcttgcagaagtggcaagagttcgcccagtggatccgatagaatatttagcattgtggatttacaagtataaggaaaatgtgaccatggaacaactgagacaaaaggaaatggccaagctggagcgtgaaagagaattagctctgatggagcaggaaatgatggagaggctcaaagcagaggagctcttacttcagcagcaacagctggcattgcagctagagttggaaatgcaagaaaaggagaggcagagaatacaagaactacagagagctcaagaacaattaggcaaggagatgagaatgaatatggaaaatctagttaggaatgaagatattctacattcagaggaagcaacactagactcaggcaaaacactagctgaaatcagcgatcgttatggagcacctaacttgagcagagtggaagaacttgatgaaccaatgttttctgatattgcattaaacattgatcaagatttgtaggaccaaccaacctaagagcaataaatg

SEQ ID NO: 288823 - DNA, 1075 bp, Homo sapiens
tggcaacgggacgccgctcctgggtggcgagcaggcgcgtgtgtaggggtgagcgcaccggaaaggcccgaactgtttttgggatttgttcccctagcttcgctgggtccggcgggcagaggcggttctgaccgttgggccttgggcgtcgagcaggactcacctgaggcggagagaggccgcttcgcgcctggggctcccgaaagcggccagctgtcctcctgctccccctgagcggggagcgctgcgtctcctgcgggctgcgggagacccttccagactcccgggtgggaaaaccacactgagcgccccgggaggttgccagatacaatactgtatctggcacccctgcccgggtgcccccgcccagttggctggctggctggctagctgtctcccaggtgtgggctggagtgcaatggcacaatctcagctcactgcaacctctgcctcccgggttcaagtgattctcctgcctcagccttccaagtagctgggattacaggagttagaaatggagtcaatatatcttcaaaagcaccttggggcctgtttaactcaaggtcttgcagaagtggcaagagttcgcccagtggatccgatagaatatttagcattgtggatttacaagtataaggaaaatgtgaccatggaacaactgagacaaaaggaaatggccaagctggagcgtgaaagagaattagctctgatggagcaggaaatgatggagaggctcaaagcagaggagctcttacttcagcagcaacagctggcattgcagctagagttggaaatgcaagaaaaggagaggcagagaatacaagaactacagagagctcaagaacaattaggcaaggagatgagaatgaatatggaaaatctagttaggaatgaagatattctacattcagaggaagcaacactagactcaggcaaaacactagctgaaatcagcgatcgttatggagcacctaacttgagcagagtggaagaacttgatgaaccaatgttttctgatattgcattaaacattgatcaagatttgtaggaccaaccaacctaagagcaataaatg

SEQ ID NO: 288824 - DNA, 977 bp, Homo sapiens
tggcaacgggacgccgctcctgggtggcgagcaggcgcgtgtgtaggggtgagcgcaccggaaaggcccgaactgtttttgggatttgttcccctagcttcgctgggtccggcgggcagaggcggttctgaccgttgggccttgggcgtcgagcaggactcacctgaggcggagagaggccgcttcgcgcctggggctcccgaaagcggccagctgtcctcctgctccccctgagcggggagcgctgcgtctcctgcgggctgcgggagacccttccagactcccgggtgggaaaaccacactgagcgccccgggaggttgccagatacaatactgtatctggcacccctgcccgggtgcccccgcccagttggctggctggctggctagctgtctcccaggtgtgggagttagaaatggagtcaatatatcttcaaaagcaccttggggcctgtttaactcaaggtcttgcagaagtggcaagagttcgcccagtggatccgatagaatatttagcattgtggatttacaagtataaggaaaatgtgaccatggaacaactgagacaaaaggaaatggccaagctggagcgtgaaagagaattagctctgatggagcaggaaatgatggagaggctcaaagcagaggagctcttacttcagcagcaacagctggcattgcagctagagttggaaatgcaagaaaaggagaggcagagaatacaagaactacagagagctcaagaacaattaggcaaggagatgagaatgaatatggaaaatctagttaggaatgaagatattctacattcagaggaagcaacactagactcaggcaaaacactagctgaaatcagcgatcgttatggagcacctaacttgagcagagtggaagaacttgatgaaccaatgttttctgatattgcattaaacattgatcaagatttgtaggaccaaccaacctaagagcaataaatg

SEQ ID NO: 288825 - DNA, 741 bp, Homo sapiens
tggcaacgggacgccgctcctgggtggcgagcaggcgcgtgtgtagggacgaagtttcactcttgttgcccaggctggagtgcaatggcacaatctcagctcactgcaacctctgcctcccgggttcaagtgattctcctgcctcagccttccaagtagctgggattacaggagttagaaatggagtcaatatatcttcaaaagcaccttggggcctgtttaactcaaggtcttgcagaagtggcaagagttcgcccagtggatccgatagaatatttagcattgtggatttacaagtataaggaaaatgtgaccatggaacaactgagacaaaaggaaatggccaagctggagcgtgaaagagaattagctctgatggagcaggaaatgatggagaggctcaaagcagaggagctcttacttcagcagcaacagctggcattgcagctagagttggaaatgcaagaaaaggagaggcagagaatacaagaactacagagagctcaagaacaattaggcaaggagatgagaatgaatatggaaaatctagttaggaatgaagatattctacattcagaggaagcaacactagactcaggcaaaacactagctgaaatcagcgatcgttatggagcacctaacttgagcagagtggaagaacttgatgaaccaatgttttctgatattgcattaaacattgatcaagatttgtaggaccaaccaacctaagagcaataaatg

SEQ ID NO: 288826 - DNA, 406 bp, Homo sapiens
gagagtgcagtgtgtgaaggcctgggggctcagggaggaaccattagcaattctaacattgaagggatggccacaggaagaggagcctacaagaaggatgagaatgcatagtaagagaagtagaagaaaggatggaacaataactactttgagaacataatttatggttatattcaatttgagtatcatttgaaatcatctgaaactcccaaaaagtttcattcatgtagtcacatagaagttacctaaagtttatttctttggcttgtgccttttcacagttctaattgtattaaggaatatttactttttgttttgcttttagattgcattaaacattgatcaagatttgtaggaccaaccaacctaagagcaataaatgtttttgtttgtttcaaatttcaaa

SEQ ID NO: 288827 - DNA, 450 bp, Homo sapiens
gcaccggaaaggcccgaactgtttttgggatttgttcccctagcttcgctgggtccggcgggcagaggcggttctgaccgttgggccttgggcgtcgagcaggactcacctgaggcggagagaggccgcttcgcgcctggggctcccgaaagcggccagctgtcctcctgctccccctgagcggggagcgctgcgtctcctgcgggctgcgggagacccttccagactcccgggtgggaaaaccacactgagcgccccgggaggttgccagatacaatactgtatctggcacccctgcccgggtgcccccgcccagttggctggctggctggctagctgtctcccaggtgtgggtaaggaatctccttccatctctgtggcaccttcttcacgctggaggcagctgtttctgtgggaaagggctttcttatgttgagccaagatgcctat

SEQ ID NO: 288828 - DNA, 698 bp, Homo sapiens
gtggcgagtcctttattttaatgccaaacttcaacttcctaagttttctcttccatccctgtctgtgaagaatccggggagtgtgtgagtgcaaatactagttttacctgcctgcggctgccactgcaacgcttccctctgggctaatcaactgaagctgagggagtgaaaaaagaacaaagaaatctgtgactgcttgtgatcaattagtaaacttaattttttagattaaaatgaaataatacatgcaaagcccttggcacagtgccttgcacataatacatttcggggttaagttgtgctagctattctgttattgattgtcttgccctttgttctctggaaggttggatcttgccatttggggatggccaatgggaaggctgagcaagacatcagagggtgggaggaaaggaggtatatttattttccttactccttctctgctgggcttctattttgtcactagctgcattcctttttatgaccacaactccagtctaatggccaccctcccataactagagttcataatcaaactaacactgccacctcctcaggcctaggaatggtcatggtttttcttctcaccttgcttcaggttcttttttccctactgttgcttgcgctagatgctccaccctcttttcttgttcctttaaggcctctctaaactgtcactttatgaaactgtcttc

SEQ ID NO: 288829 - DNA, 1133 bp, Homo sapiens
acggagatgcccgttcgctcgggatcaggaacggtgagctcctgggaccgcaatgccctgagaacgcagccgggtgctgagcctccggagtccggtagctgaatgaaatacgcagggatcaccagccggacccaaatcttgcgtccctgccagcatcctggagtcctaagaggcagggattggagcggacaggatctcagaactctggtcccgggcgcacaacggcggagtcgctgttcctggtgctgaaacgctcagtcctggaagaacgtggccgcctgcccgcctggtaccgcgccgcggccgctgcggggaactgtccagtgctgaaaacggatgcggcccggcccgcagagctcagacccaagcctgccgcacccagcggagctcgaaccgagctcctggaagcgctgacgcagagcgcagggagagccggagcggcgagctccaagcctggcatggacctgcagagacccgattcctaccagggaggagctggccctgacttcaacgaccacgtcctgcataagaccatcctggtgggtgacagtggtgtgggaaagacgtctctgctggttcagttcgatcagggcaagttcatccccggctccttctcggccactgtgggcatcggattcacgaacaaggtggtgactgtggatgggcgtgagagtgaagctgcgatcttgggacaccgctgggcaggaacggtccgaaggcgtccccatgcttattacagagatgctcagcctgcttctgctggttgacatcaccaacaaatcttctttcgaccaacatcaggggctggctcactgagaatcatgagtattgcccgagggacgtggtgaaccaatgcatggctaagggaaccaggcgggggaattagagcagcggaaaggagtagataccgatccgaaagaaagcgggaagaccctgtggccacggaggatccggggtgccctcccaggagacacgaacgcgcaaaagaggggggaatgtggggggaaccctcatgggacaccacgacggagaaggagataacggccgcgcaacaagagcgagaagccacagacagatacacagagaattattaggcacaagaagaaagacaccacacatggacacagtagacc

SEQ ID NO: 288830 - DNA, 791 bp, Homo sapiens
acggagatgcccgttcgctcgggatcaggaacggtgagctcctgggaccgcaatgccctgagaacgcagccgggtgctgagcctccggagtccggtagctgaatgaaatacgcagggatcaccagccggacccaaatcttgcgtccctgccagcatcctggagtcctaagaggcagggattggagcggacaggatctcagaactctggtcccgggcgcacaacggcggagtcgctgttcctggtgctgaaacgctcagtcctggaagaacgtggccgcctgcccgcctggtaccgcgccgcggccgctgcggggaactgtccagtgctgaaaacggatgcggcccggcccgcagagctcagacccaagcctgccgcacccagcggagctcgaaccgagctcctggaagcgctgacgcagagcgcagggagagccggagcggcgagctccaagcctggcatggacctgcagagacccgattcctaccagggaggagctggccctgacttcaacgaccacgtcctgcataaggtaaacatctcctgtattcctcaacctaacgttggaagaggcgccagcaccaggagttttctccactcccctgactttgctttgggacttaatgagaaactagcttgtatctgtgagtctggggagccctttctgtctgatcctgtttcctgctcaaaacagagatgcgtgagctcttggggaagggctgccgccagaggctcagatggtcagaagcttcattcattcacttacatcatctgtgttcctttttcaccccct

SEQ ID NO: 288831 - DNA, 1898 bp, Homo sapiens
  misc_feature (1766)..(1766): n is a, c, g, or t
  misc_feature (1896)..(1896): n is a, c, g, or t
  misc_feature (1898)..(1898): n is a, c, g, or t
tgcagaaagggacggggctggcaaaggcctggtctacctcaccgatccaggtcgcgggggctcctagggggttccttccacagctggtgcgcgtgcgcaggagtgcgtcgaggttgttccgcggcaatttatgaaactcggagccggcagtgagttgagggttcggcgaggtcagggattcctagttgcagcgtgattaccaacgccagctcccttcactgtccaagacagcgattccgcggctcctctgagaactggcgctttgttcatcatttgccacttaagctacttgcagtcacgtcacaccttggatctctatcatcaaaactattccacctcggaaatcttacctaaatgcagcatgccatcctgaacgtctctccctgtcctagctctgtaactgtttacattgctcaggtacctgaatattggctttgtgtctaaagtttctggaactttcctccttaccgtgaaataacttggcttaaatcacactgcatatagtacacaggtgcttagctcaagcctgagaattactgcaatctagtaaggcggatttgaactactgtgggagttctatttaggaagatgcagcctctgagcaagttgatggctatctcaaaacctcgaaacctgtctctacgtgaacaaagagaggttctgagagcagatatgtcttggcagcaggaaaccaaccccgtcgtggagacacatgactctgaggcatctcgtcaaaagttcagacatttccagtatttgaaagtgtctgggccccatgaagccctgagccaactctgggagctctgtcttcaatggctgagaccagagattcatacaaagaagcagattatagaactgttggtgctggaacaattcctggcaatcctgcctgaagaagtcaggacttgggtgaatttacaacatccaaacaacagtaaagatatggtgaccctcatagaagatgtgattgaaatgcttgaagatgaagatatgccctgcaaggactctgccctgcagatggggagcatcaaggagaaaatgaaagctggctcacgaacaggcaaaccacaggaaccagtgacattcaaagatgtggttgtggaattcagcaaggaagagtgggggcaactggactctgctgtaaagaacctgtacaggaatgtgatgctggaaaactttaggaacctgaattcattgcgtaaagcacatctactttccaaaccatttgagagccttaagttggagagtaagaaaaaaagatggataatggagaaagaaataccaaggaagactatttttgacatgaagagtatttctggagaagaatcatcccatggagtgattatgacaaggcttaccgaaagtggtcacccttcttcagatgcctggaaagatggagtttccctcttgttgcccaggctggagtataatgatgcagtctcggctcactgcaacctccacctctgggttcaagtgattctcctgcctcagcctcctgagtagctgggattagaggcacccaccaccatgcctagctaattttttgtgtttctagtagaaatggggtttcaccatgttggccaggctggtcttgaactcctgacctcaagtgatccgcccacctcagcctcctaaagtgctgggatgacaggcgtgagccaccacgcccagctgtcccttaacatttgaaatgtgtatatcacctcatttagctattctgtttctagaaacttatttttacaaagaaaattcacaaatgcacacgnaaatgtatgcatgaagatacttgtcacagcgttggttgtaataatatggaattaggtcaaatatttatcagtaaaagactaagtcatattgtgcatatactgaaatatgtgataaacctaaatttactgncn

SEQ ID NO: 288832 - DNA, 1821 bp, Homo sapiens
tgcagaaagggacggggctggcaaaggcctggtctacctcaccgatccaggtcgcgggggctcctagggggttccttccacagctggtgcgcgtgcgcaggagtgcgtcgaggttgttccgcggcaatttatgaaactcggagccggcagtgagttgagggttcggcgaggtcagggattcctagttgcagcgtgattaccaacgccagctcccttcactgtccaagacagcgattccgcggctcctctgagaactggcgctttgttcatcatttgccacttaagctacttgcagtcacgtcacaccttggatctctatcatcaaaactattccacctcggaaatcttacctaaatgcagcatgccatcctgaacgtctctccctgtcctagctctgtaactgtttacattgctcaggtacctgaatattggctttgtgtctaaagtttctggaactttcctccttaccgtgaaataacttggcttaaatcacactgcatatagtacacaggtgcttagctcaagcctgagaattactgcaatctagtaaggcggatttgaactactgtgggagttctatttaggaagatgcagcctctgagcaagttgatggctatctcaaaacctcgaaacctgtctctacgtgaacaaagagaggttctgagagcagatatgtcttggcagcaggaaaccaaccccgtcgtggagacacatgactctgaggcatctcgtcaaaagttcagacatttccagtatttgaaagtgtctgggccccatgaagccctgagccaactctgggagctctgtcttcaatggctgagaccagagattcatacaaagaagcagattatagaactgttggtgctggaacaattcctggcaatcctgcctgaagaagtcaggacttgggtgaatttacaacatccaaacaacagtaaagatatggtgaccctcatagaagatgtgattgaaatgcttgaagatgaagatatgccctgcaaggactctgccctgcagatggggagcatcaaggagaaaatgaaagctggctcacgaacaggcaaaccacaggaaccagtgacattcaaagatgtggttgtggaattcagcaaggaagagtgggggcaactggactctgctgtaaagaacctgtacaggaatgtgatgctggaaaactttaggaacctgaattcattgcgtaaagcacatctactttccaaaccatttgagagccttaagttggagagtaagaaaaaaagatggataatggagaaagaaataccaaggaagactatttttgacatgaagagtatttctggagaagaatcatcccatggagtgattatgacaaggcttaccgaaagtggtcacccttcttcagatgcctggaaagggagaacacactgaaggaagcagaatgaggggcactaagcactgcaggagaagatggggatggcagactcagcctgaccaaagaaatcaatcacatcttgaatttctcttctgtgtggactctttgatgattgtgaagactagagatctggctgaagctcttaccacatgcattacagctataaggtacctcccctatgtgaactctctgatgaaagtgaactccggagctctgatgaaagttaccgtcaacttcatcacatccgtacagcttcttacctatgtggtttcttggatgtctatacaagtctgatctctgagagaagcatgctttacagatggagcattgacagaggttttctccaggttgatttctcttgtggaaaacacaccgtgagttccaataataaattcctttacatttattac

SEQ ID NO: 288833 - DNA, 3454 bp, Homo sapiens
tgcagaaagggacggggctggcaaaggcctggtctacctcaccgatccaggtcgcgggggctcctagggggttccttccacagctggtgcgcgtgcgcaggagtgcgtcgaggttgttccgcggcaatttatgaaactcggagccggcagtgagttgagggttcggcgaggtcagggattcctagttgcagcgtgattaccaacgccagctcccttcactgtccaagacagcgattccgcggctcctctgagaactggcgctttgttcatcatttgccacttaagctacttgcagtcacgtcacaccttggatctctatcatcaaaactattccacctcggaaatcttacctaaatgcagcatgccatcctgaacgtctctccctgtcctagctctgtaactgtttacattgctcaggtacctgaatattggctttgtgtctaaagtttctggaactttcctccttaccgtgaaataacttggcttaaatcacactgcatatagtacacaggtgcttagctcaagcctgagaattactgcaatctagtaaggcggatttgaactactgtgggagttctatttaggaagatgcagcctctgagcaagttgatggctatctcaaaacctcgaaacctgtctctacgtgaacaaagagaggttctgagagcagatatgtcttggcagcaggaaaccaaccccgtcgtggagacacatgactctgaggcatctcgtcaaaagttcagacatttccagtatttgaaagtgtctgggccccatgaagccctgagccaactctgggagctctgtcttcaatggctgagaccagagattcatacaaagaagcagattatagaactgttggtgctggaacaattcctggcaatcctgcctgaagaagtcaggacttgggtgaatttacaacatccaaacaacagtaaagatatggtgaccctcatagaagatgtgattgaaatgcttgaagatgaagatatgccctgcaaggactctgccctgcagatggggagcatcaaggagaaaatgaaagctggctcacgaacaggcaaaccacaggaaccagtgacattcaaagatgtggttgtggaattcagcaaggaagagtgggggcaactggactctgctgtaaagaacctgtacaggaatgtgatgctggaaaactttaggaacctgaattcattgcgtaaagcacatctactttccaaaccatttgagagccttaagttggagagtaagaaaaaaagatggataatggagaaagaaataccaaggaagactatttttgacatgaagagtatttctggagaagaatcatcccatggagtgattatgacaaggcttaccgaaagtggtcacccttcttcagatgcctggaaaggtgagaattggttatataggaaccagaaaaaatgggacataaatttgccacaagaggctttcattcctgagacaatttacactgaggaggaagattttgaatgtagtgaaaataagaaaagctttgatattaattcagttagctcaatttgtgctatacaactgggaattccttcaagaaaggggtctccaaaatgtgataagtttaaaacttacttcaaatttaatttagactcagtaggtaagcaacattcagaatatgaatatgggaatgacttgagtttgagtacagatattcgacaccaaaaaagtcatactacaatgaattcctatgaatgttatcaatgtgggaaagccttctgccgaagttcatcccttattcgacatcagatcattcacacaggagagaaaccctataaatgcagtgaatgtgggagattcttcaaccgacgtacaaaccttactaagcatcaaaaacttcatgctgaagcaaaggcctgcacaagcaataaatgtggaaaggccttcagtaaaagtgaagacagtaataatccaacactccattttggaaacaatttctatcaatgtgttaactgtggaaaatccttcaaccggagctcctctcttattcgacaccaaatgattcacacgggagagaaaccattcaaatgtaaggaatgtagtaaagccttcaacaggagttcaaaccttgttaaacatcaaaaactgcatactcgagataagtcctgaaaaaagaaaaaatgaaagattaccttcagtcagaatgcagaactcatttaacatcatgaatttatgctggataaaatctcatgaataataatgtaagaaaacatttgtcagatatccctcttaaatgatatcacagaatttaattgttggatagaaaaatcattggatagaaaatctgtttgaaggaatttcctggttttcagatgaagccataaggctttggagttaaaccacagtatcaccatacaagtatttgtttatcattattttgatatccattaccctcacctctccctagttcataaataggtctatagcatactaatatccacctgatttattgacgaagtagacattagcaaagccaaacaatactcttggagttgatatttaataaaactcagcccttttaagaaggtcacaagaaatcattagctcatgcgaatataagagaatacttctaaggacagaaatctctgaatcaatggctaagacaacagtaacagccatttactccactcctgacaataccctttgttgtcttgctgttgaatggagactagagttgggaaagggttatcaactgcaatgggagaagtatgtattgctgttaatctatatgtattcttaaaatctgcatttgtttatagcaggtccttgaaaaatgtttttgttttgttataatgttataattgttatgatgttgatgagaaaaatatcgattcccagccagggacactgtgtggagttcgcacactctccctatgtctccgggtgctccagtttcaaaccccaaagatgtatacattaggttaattgacatatctaaattatctcagtctgagtttgtgaggaagtgtgccctgcagtggaatggctcctaatcagggtttgttcccaccattgccctgagctgctaggatgcgctctgtccacccatggccctgtactggaataacagggtaaataattatcttatctgtttttattaatccgtcttaaatgtgtatatagctcagatttattttaatgtctgatattggaagcgtttggggtctttagaagtttgatgatgttgtgaccagacatttgccttaggaacttaactcttgtttgtatccattagtctatggtaaaattggttttgttatacatcatttcacttaaagttgcagttcctaagaacctattgatgatgttcagtgcagacttactgtacctttgggaatttaggctggagagacgtccatagccttaggtatatcatttataccagacattatgaagttattaaagtctcctatactctgta

SEQ ID NO: 288834 - DNA, 3280 bp, Homo sapiens
tgcagaaagggacggggctggcaaaggcctggtctacctcaccgatccaggtcgcgggggctcctagggggttccttccacagctggtgcgcgtgcgcaggagtgcgtcgaggttgttccgcggcaatttatgaaactcggagccggcagtgagttgagggttcggcgaggtcagggattcctagttgcagcgtgattaccaacgccagctcccttcactgtccaagacagcgattccgcggctcctctgagaactggcgctttgttcatcatttgccacttaagctacttgcagtcacgtcacaccttggatctctatcatcaaaactattccacctcggaaatcttacctaaatgcagcatgccatcctgaacgtctctccctgtcctagctctgtaactgtttacattgctcaggtacctgaatattggctttgtgtctaaagtttctggaactttcctccttaccgtgaaataacttggcttaaatcacactgcatatagtacacaggtgcttagctcaagcctgagaattactgcaatctagtaaggcggatttgaactactgtgggagttctatttaggaagatgcagcctctgagcaagttgatggctatctcaaaacctcgaaacctgtctctacgtgaacaaagagaggttctgagagcagatatgtcttggcagcaggaaaccaaccccgtcgtggagacacatgactctgaggcatctcgtcaaaagttcagacatttccagtatttgaaagtgtctgggccccatgaagccctgagccaactctgggagctctgtcttcaatggctgagaccagagattcatacaaagaagcagattatagaactgttggtgctggaacaattcctggcaatcctgcctgaagaagtcaggacttgggtgaatttacaacatccaaacaacagtaaagatatggtgaccctcatagaagatgtgattgaaatgcttgaagatgaagatatgccctgcaaggactctgccctgcagatggggagcatcaaggagaaaatgaaagctggctcacgaacaggcaaaccacaggaaccagtgacattcaaagatgtggttgtggaattcagcaaggaagagtgggggcaactggactctgctgtaaagaacctgtacaggaatgtgatgctggaaaactttaggaacctgaattcattgcgtaaagcacatctactttccaaaccatttgagagccttaagttggagagtaagaaaaaaagatggataatggagaaagaaataccaaggaagactatttttgacatgaagagtatttctggagaagaatcatcccatggagtgattatgacaaggcttaccgaaagtggtcacccttcttcagatgcctggaaagatcattcacacaggagagaaaccctataaatgcagtgaatgtgggagattcttcaaccgacgtacaaaccttactaagcatcaaaaacttcatgctgaagcaaaggcctgcacaagcaataaatgtggaaaggccttcagtaaaagtgaagacagtaataatccaacactccattttggaaacaatttctatcaatgtgttaactgtggaaaatccttcaaccggagctcctctcttattcgacaccaaatgattcacacgggagagaaaccattcaaatgtaaggaatgtagtaaagccttcaacaggagttcaaaccttgttaaacatcaaaaactgcatactcgagataagtcctgaaaaaagaaaaaatgaaagattaccttcagtcagaatgcagaactcatttaacatcatgaatttatgctggataaaatctcatgaataataatgtaagaaaacatttgtcagatatccctcttaaatgatatcacagaatttaattgttggatagaaaaatcattggatagaaaatctgtttgaaggaatttcctggttttcagatgaagccataaggctttggagttaaaccacagtatcaccatacaagtatttgtttatcattattttgatatccattaccctcacctctccctagttcataaataggtctatagcatactaatatccacctgatttattgacgaagtagacattagcaaagccaaacaatactcttggagttgatatttaataaaactcagcccttttaagaaggtcacaagaaatcattagctcatgcgaatataagagaatacttctaaggacagaaatctctgaatcaatggctaagacaacagtaacagccatttactccactcctgacaataccctttgttgtcttgctgttgaatggagactagagttgggaaagggttatcaactgcaatgggagaagtatgtattgctgttaatctatatgtattcttaaaatctgcatttgtttatagcaggtccttgaaaaatgtttttgttttgttataatgttataattgttatgatgttgatgagaaaaatatcgattcccagccagggacactgtgtggagttcgcacactctccctatgtctccgggtgctccagtttcaaaccccaaagatgtatacattaggttaattgacatatctaaattatctcagtctgagtttgtgaggaagtgtgccctgcagtggaatggctcctaatcagggtttgttcccaccattgccctgagctgctaggatgcgctctgtccacccatggccctgtactggaataacagggtaaataattatcttatctgtttttattaatccgtcttaaatgtgtatatagctcagatttattttaatgtctgatattggaagcgtttggggtctttagaagtttgatgatgttgtgaccagacatttgccttaggaacttaactcttgtttgtatccattagtctatggtaaaattggttttgttatacatcatttcacttaaagttgcagttcctaagaacctattgatgatgttcagtgcagacttactgtacctttgggaatttaggctggagagacgtccatagccttaggtatatcatttataccagacattatgaagttattaaagtctcctatactctgtacaccagaactgtgtcttctgtaaactacctcaggatcccatctggttcttgagccaagaagtatgacttaatctgccccaaaaaattcacactggagacattcccaattaatgatgatggtagctttttgtgaaggttcataccttattcaaaggcagaaaaggtatactggagtgaactcctatgattaaataatgtcaaaatctaaatttgtt

SEQ ID NO: 288835 - DNA, 1669 bp, Homo sapiens
tgcagaaagggacggggctggcaaaggcctggtctacctcaccgatccaggtcgcgggggctcctagggggttccttccacagctggtgcgcgtgcgcaggagtgcgtcgaggttgttccgcggcaatttatgaaactcggagccggcagtgagttgagggttcggcgaggtcagggattcctagttgcagcgtgattaccaacgccagctcccttcactgtccaagacagcgattccgcggctcctctgagaactggcgctttgttcatcatttgccacttaagctacttgcagtcacgtcacaccttggatctctatcatcaaaactattccacctcggaaatcttacctaaatgcagcatgccatcctgaacgtctctccctgtcctagctctgtaactgtttacattgctcaggtacctgaatattggctttgtgtctaaagtttctggaactttcctccttaccgtgaaataacttggcttaaatcacactgcatatagtacacaggtgcttagctcaagcctgagaattactgcaatctagtaaggcggatttgaactactgtgggagttctatttaggaagatgcagcctctgagcaagttgatggctatctcaaaacctcgaaacctgtctctacgtgaacaaagagaggttctgagagcagatatgtcttggcagcaggaaaccaaccccgtcgtggagacacatgactctgaggcatctcgtcaaaagttcagacatttccagtatttgaaagtgtctgggccccatgaagccctgagccaactctgggagctctgtcttcaatggctgagaccagagattcatacaaagaagcagattatagaactgttggtgctggaacaattcctggcaatcctgcctgaagaagtcaggacttgggtgaatttacaacatccaaacaacagtaaagatatggtgaccctcatagaagatgtgattgaaatgcttgaagatgaagatatgccctgcaaggactctgccctgcagatggggagcatcaaggagaaaatgaaagctggctcacgaacaggcaaaccacaggaaccagtgacattcaaagatgtggttgtggaattcagcaaggaagagtgggggcaactggactctgctgtaaagaacctgtacaggaatgtgatgctggaaaactttaggaacctgaattcattgcgtaaagcacatctactttccaaaccatttgagagccttaagttggagagtaagaaaaaaagatggataatggagaaagaaataccaaggaagactatttttgacatgaagagtatttctggagaagaatcatcccatggagtgattatgacaaggcttaccgaaagtggtcacccttcttcagatgcctggaaagggagaacacactgaaggaagcagaatgaggggcactaagcactgcaggagaagatggggatggcagactcagcctgaccaaagaaatcaatcacatcttggtaaagtaagccactctcatttgtgtctggattagagtaggatgaacatcagaaaagggctctgtgatcagcctcctttactaggctttaatgtaactgattttccctttattatctcctaaactcctaatttagaacagcatataataaagcctttttgtgcagctttctatcca

SEQ ID NO: 288836 - DNA, 4176 bp, Homo sapiens
ctccagcctcctggagaagatgacgtccagcgacaaggacttcaggttcatggccaccagcgacctgatgtcggagttgcagaaggactccatccagctggacgaggacagcgagcgcaaggtggtgaagatgctgctccggctcctggaggacaagaacggtgaggtgcagaacctggctgtcaagtggctgggtgtcccgctgggcgccttccacgccagcctcctgcactgtctgctgccacagctgagcagcccgcgcctggcggtgcgcaagcgggcggtcggagcgcttggccacctggcggccgcctgcagcaccgacctcttcgtcgagctcgctgaccacctactggaccggctgcccggcccgcgggtgcccaccagcccgactgccatccgcaccctgatccaatgtttgggcagcgtcggccgccaggccggccaccgcctcggggctcacctggaccgcctggtgcccctggtggaggatttctgcaacctggatgatgatgagctccgggagtcctgcctccaggcttttgaggccttcttgaggaagtgccccaaggaaatgggtcctcacgtgcccaacgtgaccagcctctgcctccaatacataaaacacgaccccaactacaactacgacagtgatgaggatgaggagcagatggagacagaggatagtgaattcagtgagcaagagagtgaagacgagtacagcgatgacgatgacatgagctggaaggtgcgccgggcagctgccaagtgcatcgcagccttgatcagctcgcggcctgacctgctgcccgatttccactgcaccctggcacctgtgctcatccgccgcttcaaagaacgcgaggagaacgtcaaggctgacgtcttcactgcttacatcgtgctgctgcggcaaacacggcccccgaagggatggctggaggccatggaggaacccacccagaccggcagcaacctccatatgctacgtggacaggtgccccttgtggtcaaggccctgcagcggcagcttaaagatcggagcgtcagagcccgccagggatgcttcagcctcctcaccgagctggcgggtgtcctcccaggcagcctggccgagcatatgcctgtgctggtatcaggcatcatcttctcgctggccgaccgctccagctcctccaccatccggatggatgccctggccttcttgcaggggctgctgggcaccgaaccagctgaggccttccacccacacttgcctatcctcctgccacctgtgatggcctgtgtggctgactctttctacaagattgcagccgaggccctggtggtgctgcaggagctggtgcgggccctgtggccgctgcacaggcctcggatgctggatcctgagccatatgttggagagatgtctgctgtcaccctggcgcgacttcgtgccactgacctggaccaggaggtgaaggagcgggccatttcctgcatgggccaccttgtaggccacctgggtgaccggcttggggatgacctggagcccacgttactgctcctcctggaccgcctgcggaatgagatcacccggctgcccgccatcaaggcgcttacgctggtggccgtatccccactacagcttgacctacagcccatcctggccgaggcactgcacattctggcctcattcctgcggaagaaccagcgggctttgcgactggccacactggcagccctggacgccctggcccagagccagggcctcagcctcccaccgtctgccgtgcaggccgtgctggctgagctgcctgccctggtcaacgagagcgacatgcatgtggcccagctggctgtggacttccttgccacagtgacccaggcccagccagcctctttggtggaggtcagtggccctgtgctctcagagctgctgcggctgctgcgttcgcccctgttgccagccggggttctggcagctgctgaaggcttcctgcaggccctggtagggacccgtcccccgtgtgtggactatgccaaactcatcagcctgctcactgcgcctgtttatgagcaggctgtggatggtgggcctggcctgcacaagcaggtgttccactcattggcccggtgtgtggcagccctctcagctgcctgtccccaagaggcggcaagcacagccagtcgcctggtctgcgatgccaggtcgccccactccagcacgggggtcaaggtcctggcattcttgtcgctggctgaggtgggtcaggtggctgggccaggccaccagcgggagctgaaggcggtgctcctggaagctttggggtcacccagtgaggatgtgagggctgcagcctcgtatgcactgggccgtgtgggtgctggcagcctgcccgacttcctgcccttcctgctggagcagatcgaggctgagccccgacgacagtacctgctgctgcactcactcagggaggccctgggggccgcccagcctgacagcctgaagccctacgccgaggacatctgggccttgctgttccagcgctgcgagggtgctgaggagggcacccggggggtggtggccgagtgcattgggaagctggtccttgtgaacccttcgttccttctgccccgcttgcggaagcagcttgctgcaggtcggccacacacccggagcaccgtcatcacagcggtcaagttccttatctcggaccagccccatcccattgaccccctcctgaagagcttcatcgctgtgcacaacaagccctcgctagtccgggacctgctggatgacatcctgcccctcctctaccaggagacaaagatccggcgggacctcatccgagaggtggagatggggccctttaaacatacagtggacgatgggctggacgtgcggaaggcggcctttgaatgcatgtattcactgcttgagagctgcctgggccagctggatatctgtgagttcctgaaccatgtggaggacgggctgaaggaccactacgacatccggatgctgaccttcatcatggttgcccggctggccaccctgtgtcctgcacctgtcctgcagagggtggaccgactcattgagccactaagggccacctgcactgccaaggtcaaagctggttctgtgaagcaggagtttgaaaagcaagatgaactgaagcgctctgcaatgagggcagtggctgccctgctgaccatccccgaggtggggaaaagccccatcatggccgacttctcttcccaaatcagatccaaccctgaacttgctgccctctttgaaagcatccagaaggattccgcttcagcccccagcacagactcaatggagctcagctagtcccctcagcaccaaggtgggccctcgcttaagagaaaggagcccacccaagtccgaggcctccccatcccaccatcgcaggtctctacttttgcccttccaccatctcactgggggccctgtcgctcctggtcagggcttacagtgccttctccagggacccaactcaaaggcccccagcccaagctgtgaggctgccaacagttgggccccttccttaactcaggacagtcatccaaagaaatagggtgaggaagttttccagtgacttcacactgtacccctccatagtctgtctggttccttcagagggtgtctctgcctcacaaactagtagtatttagaaataggctgtgctgtcagctgtaaaagatcaggaggcagcagacaccactctggtttcttcactgcattcagcaatgcctgaagttagtgctcaggccgggcatctcaaaagaaaagatacttgagttattcacattttaaaattcaaaacggttcatttttaagtggcagtgatgaatcagaaatttggaagatgatacgggtttcttttttccagggaggaggaatgggttgggtagggaactggacaggcttggacctcatgtttcatttctaatttcaaaatacttattagcaaattgggcaacaatgggcatcttccatgccaccacccaggcataaccagttggtttgtttccttctgaggaaggtttcaaatgtgtctagtgttcagtattgaggacaaagaaatacaagtggcaggcccaagtattttctgtgatatcccaggttaataaagattagattctaagttacttctttcctctaaacga

SEQ ID NO: 288837 - DNA, 583 bp, Homo sapiens
atccagtggccccaagctacatgtttgcactcccacctggccacactcagccagagctgccccagcagcccccttcactcatccccagcatctgcctgactggtgggcatctgagcttgagaacgactccctccctggtgcttttctgatcctccttgggtcatccaagtgtagttggcaaagaaagtgtcaccatttgaggaaacagacccagagagggagagactctggcaggacttcacggtggtctgaacttgggcttcaggtttcagttgtggggcctctgctctttcccagggctggctgctgctcttgctcctgcaccatttcactaagaaccatctccttcctctgggcagatgctgaccttcatcatggttgcccggctggccaccctgtgtcctgcacctgtcctgcagagggtggaccgactcattgagccactaagggccacctgcactgccaaggtaagtccctggcccagccctagcccaggccctggagcacctatggagtccagttacccttactgagcacttcctgcagtgcaggtgatgttgtgaaagtgcttcatttaatcatt

SEQ ID NO: 288838 - DNA, 4939 bp, Homo sapiens
gcagacagaggtgctgtgatggggtgcactccgggagccagcagcaggtgtgtggggaggaaggtgatggattcaagctggggcatgttgaacttgaggctcctgggaggcactcactcaaccacacactccatgagggcagctcccaggatcagtctgtcttgttcaccctggcttccagcacagtccctgtcacttagcaggtgaacaggcaaacaaatgaaacctaggagagggggttgggtaggacatagaaataagggagggtaaggtcagcgtgtttctgtaaagtgagaaagaaaaggtctcaagatgtttacaggacagaaaatgcacgggcctcgtttgaaggtgtggatagaagctgctgaggcaggcaggagctgtgctgtgtgcgcagaaaccattgtctggtgttgcctcttgtcttgagcccagagctcagcatctccaaaggcactagggagccatggaaggagttaagcagaggagtgaccaggtgagaagtagactttatactgctctggtctcagcgaggaggatggacagaaggggatggtattgaggcaaggcctagacttccaagaaatagggacagccttactagatcctctatgctttcccctatcaggtctttctccctaggctgggagcacaggctttgcactgctgagaagtccctttctctctccgctttctctcatgtaacaaaagtaattaaaataattcctcctcacagttgcagggcacctcttttgcaagggccattgagttgccataatcctgggaaggaggccgggagagaatggggagaggggcggagcctggcccaggttgcccgcggagtgcgatcggcctgatgccccctcgtgctccccaggctgggtgtcccgctgggcgccttccacgccagcctcctgcactgtctgctgccacagctgagcagcccgcgcctggcggtgcgcaagcgggcggtcggagcgcttggccacctggcggccgcctgcagcaccgacctcttcgtcgagctcgctgaccacctactggaccggctgcccggcccgcgggtgcccaccagcccgactgccatccgcaccctgatccaatgtttgggcagcgtcggccgccaggccggccaccgcctcggggctcacctggaccgcctggtgcccctggtggaggatttctgcaacctggatgatgatgagctccgggagtcctgcctccaggcttttgaggccttcttgaggaagtgccccaaggaaatgggtcctcacgtgcccaacgtgaccagcctctgcctccaatacataaaacacgaccccaactacaactacgacagtgatgaggatgaggagcagatggagacagaggatagtgaattcagtgagcaagagagtgaagacgagtacagcgatgacgatgacatgagctggaaggtgcgccgggcagctgccaagtgcatcgcagccttgatcagctcgcggcctgacctgctgcccgatttccactgcaccctggcacctgtgctcatccgccgcttcaaagaacgcgaggagaacgtcaaggctgacgtcttcactgcttacatcgtgctgctgcggcaaacacggcccccgaagggatggctggaggccatggaggaacccacccagaccggcagcaacctccatatgctacgtggacaggtgccccttgtggtcaaggccctgcagcggcagcttaaagatcggagcgtcagagcccgccagggatgcttcagcctcctcaccgagctggcgggtgtcctcccaggcagcctggccgagcatatgcctgtgctggtatcaggcatcatcttctcgctggccgaccgctccagctcctccaccatccggatggatgccctggccttcttgcaggggctgctgggcaccgaaccagctgaggccttccacccacacttgcctatcctcctgccacctgtgatggcctgtgtggctgactctttctacaagattgcagccgaggccctggtggtgctgcaggagctggtgcgggccctgtggccgctgcacaggcctcggatgctggatcctgagccatatgttggagagatgtctgctgtcaccctggcgcgacttcgtgccactgacctggaccaggaggtgaaggagcgggccatttcctgcatgggccaccttgtaggccacctgggtgaccggcttggggatgacctggagcccacgttactgctcctcctggaccgcctgcggaatgagatcacccggctgcccgccatcaaggcgcttacgctggtggccgtatccccactacagcttgacctacagcccatcctggccgaggcactgcacattctggcctcattcctgcggaagaaccagcgggctttgcgactggccacactggcagccctggacgccctggcccagagccagggcctcagcctcccaccgtctgccgtgcaggccgtgctggctgagctgcctgccctggtcaacgagagcgacatgcatgtggcccagctggctgtggacttccttgccacagtgacccaggcccagccagcctctttggtggaggtcagtggccctgtgctctcagagctgctgcggctgctgcgttcgcccctgttgccagccggggttctggcagctgctgaaggcttcctgcaggccctggtagggacccgtcccccgtgtgtggactatgccaaactcatcagcctgctcactgcgcctgtttatgagcaggctgtggatggtgggcctggcctgcacaagcaggtgttccactcattggcccggtgtgtggcagccctctcagctgcctgtccccaagaggcggcaagcacagccagtcgcctggtctgcgatgccaggtcgccccactccagcacgggggtcaaggtcctggcattcttgtcgctggctgaggtgggtcaggtggctgggccaggccaccagcgggagctgaaggcggtgctcctggaagctttggggtcacccagtgaggatgtgagggctgcagcctcgtatgcactgggccgtgtgggtgctggcagcctgcccgacttcctgcccttcctgctggagcagatcgaggctgagccccgacgacagtacctgctgctgcactcactcagggaggccctgggggccgcccagcctgacagcctgaagccctacgccgaggacatctgggccttgctgttccagcgctgcgagggtgctgaggagggcacccggggggtggtggccgagtgcattgggaagctggtccttgtgaacccttcgttccttctgccccgcttgcggaagcagcttgctgcaggtcggccacacacccggagcaccgtcatcacagcggtcaagttccttatctcggaccagccccatcccattgaccccctcctgaagagcttcatcggagagttcatggagagcctgcaggacccagacctgaacgtgcgccgtgcgactctggctttcttcaactcagctgtgcacaacaagccctcgctagtccgggacctgctggatgacatcctgcccctcctctaccaggagacaaagatccggcgggacctcatccgagaggtggagatggggccctttaaacatacagtggacgatgggctggacgtgcggaaggcggcctttgaatgcatgtattcactgcttgagagctgcctgggccagctggatatctgtgagttcctgaaccatgtggaggacgggctgaaggaccactacgacatccggatgctgaccttcatcatggttgcccggctggccaccctgtgtcctgcacctgtcctgcagagggtggaccgactcattgagccactaagggccacctgcactgccaaggtcaaagctggttctgtgaagcaggagtttgaaaagcaagatgaactgaagcgctctgcaatgagggcagtggctgccctgctgaccatccccgaggtggggaaaagccccatcatggccgacttctcttcccaaatcagatccaaccctgaacttgctgccctctttgaaagcatccagaaggattccgcttcagcccccagcacagactcaatggagctcagctagtcccctcagcaccaaggtgggccctcgcttaagagaaaggagcccacccaagtccgaggcctccccatcccaccatcgcaggtctctacttttgcccttccaccatctcactgggggccctgtcgctcctggtcagggcttacagtgccttctccagggacccaactcaaaggcccccagcccaagctgtgaggctgccaacagttgggccccttccttaactcaggacagtcatccaaagaaatagggtgaggaagttttccagtgacttcacactgtacccctccatagtctgtctggttccttcagagggtgtctctgcctcacaaactagtagtatttagaaataggctgtgctgtcagctgtaaaagatcaggaggcagcagacaccactctggtttcttcactgcattcagcaatgcctgaagttagtgctcaggccgggcatctcaaaagaaaagatacttgagttattcacattttaaaattcaaaacggttcatttttaagtggcagtgatgaatcagaaatttggaagatgatacgggtttcttttttccagggaggaggaatgggttgggtagggaactggacaggcttggacctcatgtttcatttctaatttcaaaatacttattagcaaattgggcaacaatgggcatcttccatgccaccacccaggcataaccagttggtttgtttccttctgaggaaggtttcaaatgtgtctagtgttcagtattgaggacaaagaaatacaagtggcaggcccaagtattttctgtgatatcccaggttaataaagattagattctaagttacttctttcctctaaacga

SEQ ID NO: 288839 - DNA, 4511 bp, Homo sapiens
cgatgttggcatagccagagagtatctctttctggccaaacaggggctcccctgatgatctgaggccttttcctcagcacgtgtggccgcaggagcatgaggggacataaaggggcagcctgactcaggctgaaccttgtgcccttggattcaccttcccactccctgctcagcctgggtcctctggtggccaaagtgaaggagtaccaggtggagaccattgtggacaccctgtgcaccaacatgcggtcagacaaggagcagctgcgagacattgccggcattggcctcaagaccgtcctctcggagctccctcctgcagccacaggctccgggctggccaccaacgtgtgccggaagatcacaggccagctcaccagtgccattgcccagcaggaggatgtggctgtgcagctggaagccctggacatcctctctgacatgctgagcaggctgggtgtcccgctgggcgccttccacgccagcctcctgcactgtctgctgccacagctgagcagcccgcgcctggcggtgcgcaagcgggcggtcggagcgcttggccacctggcggccgcctgcagcaccgacctcttcgtcgagctcgctgaccacctactggaccggctgcccggcccgcgggtgcccaccagcccgactgccatccgcaccctgatccaatgtttgggcagcgtcggccgccaggccggccaccgcctcggggctcacctggaccgcctggtgcccctggtggaggatttctgcaacctggatgatgatgagctccgggagtcctgcctccaggcttttgaggccttcttgaggaagtgccccaaggaaatgggtcctcacgtgcccaacgtgaccagcctctgcctccaatacataaaacacgaccccaactacaactacgacagtgatgaggatgaggagcagatggagacagaggatagtgaattcagtgagcaagagagtgaagacgagtacagcgatgacgatgacatgagctggaaggtgcgccgggcagctgccaagtgcatcgcagccttgatcagctcgcggcctgacctgctgcccgatttccactgcaccctggcacctgtgctcatccgccgcttcaaagaacgcgaggagaacgtcaaggctgacgtcttcactgcttacatcgtgctgctgcggcaaacacggcccccgaagggatggctggaggccatggaggaacccacccagaccggcagcaacctccatatgctacgtggacaggtgccccttgtggtcaaggccctgcagcggcagcttaaagatcggagcgtcagagcccgccagggatgcttcagcctcctcaccgagctggcgggtgtcctcccaggcagcctggccgagcatatgcctgtgctggtatcaggcatcatcttctcgctggccgaccgctccagctcctccaccatccggatggatgccctggccttcttgcaggggctgctgggcaccgaaccagctgaggccttccacccacacttgcctatcctcctgccacctgtgatggcctgtgtggctgactctttctacaagattgcagccgaggccctggtggtgctgcaggagctggtgcgggccctgtggccgctgcacaggcctcggatgctggatcctgagccatatgttggagagatgtctgctgtcaccctggcgcgacttcgtgccactgacctggaccaggaggtgaaggagcgggccatttcctgcatgggccaccttgtaggccacctgggtgaccggcttggggatgacctggagcccacgttactgctcctcctggaccgcctgcggaatgagatcacccggctgcccgccatcaaggcgcttacgctggtggccgtatccccactacagcttgacctacagcccatcctggccgaggcactgcacattctggcctcattcctgcggaagaaccagcgggctttgcgactggccacactggcagccctggacgccctggcccagagccagggcctcagcctcccaccgtctgccgtgcaggccgtgctggctgagctgcctgccctggtcaacgagagcgacatgcatgtggcccagctggctgtggacttccttgccacagtgacccaggcccagccagcctctttggtggaggtcagtggccctgtgctctcagagctgctgcggctgctgcgttcgcccctgttgccagccggggttctggcagctgctgaaggcttcctgcaggccctggtagggacccgtcccccgtgtgtggactatgccaaactcatcagcctgctcactgcgcctgtttatgagcaggctgtggatggtgggcctggcctgcacaagcaggtgttccactcattggcccggtgtgtggcagccctctcagctgcctgtccccaagaggcggcaagcacagccagtcgcctggtctgcgatgccaggtcgccccactccagcacgggggtcaaggtcctggcattcttgtcgctggctgaggtgggtcaggtggctgggccaggccaccagcgggagctgaaggcggtgctcctggaagctttggggtcacccagtgaggatgtgagggctgcagcctcgtatgcactgggccgtgtgggtgctggcagcctgcccgacttcctgcccttcctgctggagcagatcgaggctgagccccgacgacagtacctgctgctgcactcactcagggaggccctgggggccgcccagcctgacagcctgaagccctacgccgaggacatctgggccttgctgttccagcgctgcgagggtgctgaggagggcacccggggggtggtggccgagtgcattgggaagctggtccttgtgaacccttcgttccttctgccccgcttgcggaagcagcttgctgcaggtcggccacacacccggagcaccgtcatcacagcggtcaagttccttatctcggaccagccccatcccattgaccccctcctgaagagcttcatcggagagttcatggagagcctgcaggacccagacctgaacgtgcgccgtgcgactctggctttcttcaactcagctgtgcacaacaagccctcgctagtccgggacctgctggatgacatcctgcccctcctctaccaggagacaaagatccggcgggacctcatccgagaggtggagatggggccctttaaacatacagtggacgatgggctggacgtgcggaaggcggcctttgaatgcatgtattcactgcttgagagctgcctgggccagctggatatctgtgagttcctgaaccatgtggaggacgggctgaaggaccactacgacatccggatgctgaccttcatcatggttgcccggctggccaccctgtgtcctgcacctgtcctgcagagggtggaccgactcattgagccactaagggccacctgcactgccaaggtcaaagctggttctgtgaagcaggagtttgaaaagcaagatgaactgaagcgctctgcaatgagggcagtggctgccctgctgaccatccccgaggtggggaaaagccccatcatggccgacttctcttcccaaatcagatccaaccctgaacttgctgccctctttgaaagcatccagaaggattccgcttcagcccccagcacagactcaatggagctcagctagtcccctcagcaccaaggtgggccctcgcttaagagaaaggagcccacccaagtccgaggcctccccatcccaccatcgcaggtctctacttttgcccttccaccatctcactgggggccctgtcgctcctggtcagggcttacagtgccttctccagggacccaactcaaaggcccccagcccaagctgtgaggctgccaacagttgggccccttccttaactcaggacagtcatccaaagaaatagggtgaggaagttttccagtgacttcacactgtacccctccatagtctgtctggttccttcagagggtgtctctgcctcacaaactagtagtatttagaaataggctgtgctgtcagctgtaaaagatcaggaggcagcagacaccactctggtttcttcactgcattcagcaatgcctgaagttagtgctcaggccgggcatctcaaaagaaaagatacttgagttattcacattttaaaattcaaaacggttcatttttaagtggcagtgatgaatcagaaatttggaagatgatacgggtttcttttttccagggaggaggaatgggttgggtagggaactggacaggcttggacctcatgtttcatttctaatttcaaaatacttattagcaaattgggcaacaatgggcatcttccatgccaccacccaggcataaccagttggtttgtttccttctgaggaaggtttcaaatgtgtctagtgttcagtattgaggacaaagaaatacaagtggcaggcccaagtattttctgtgatatcccaggttaataaagattagattctaagttacttctttcctctaaacga

SEQ ID NO: 288840 - DNA, 4804 bp, Homo sapiens
gcagacagaggtgctgtgatggggtgcactccgggagccagcagcaggtgtgtggggaggaaggtgatggattcaagctggggcatgttgaacttgaggctcctgggaggcactcactcaaccacacactccatgagggcagctcccaggatcagtctgtcttgttcaccctggcttccagcacagtccctgtcacttagcaggtgaacaggcaaacaaatgaaacctaggagagggggttgggtaggacatagaaataagggagggtaaggtcagcgtgtttctgtaaagtgagaaagaaaaggtctcaagatgtttacaggacagaaaatgcacgggcctcgtttgaaggtgtggatagaagctgctgaggcaggcaggagctgtgctgtgtgcgcagaaaccattgtctggtgttgcctcttgtcttgagcccagagctcagcatctccaaaggcactagggagccatggaaggagttaagcagaggagtgaccaggtgagaagtagactttatactgctctggtctcagcgaggaggatggacagaaggggatggtattgaggcaaggcctagacttccaagaaatagggacagccttactagatcctctatgctttcccctatcaggtctttctccctaggctgggagcacaggctttgcactgctgagaagtccctttctctctccgctttctctcatgtaacaaaagtaattaaaataattcctcctcacagttgcagggcacctcttttgcaagggccattgagttgccataatcctgggaaggaggccgggagagaatggggagaggggcggagcctggcccaggttgcccgcggagtgcgatcggcctgatgccccctcgtgctccccaggctgggtgtcccgctgggcgccttccacgccagcctcctgcactgtctgctgccacagctgagcagcccgcgcctggcggtgcgcaagcgggcggtcggagcgcttggccacctggcggccgcctgcagcaccgacctcttcgtcgagctcgctgaccacctactggaccggctgcccggcccgcgggtgcccaccagcccgactgccatccgcaccctgatccaatgtttgggcagcgtcggccgccaggccggccaccgcctcggggctcacctggaccgcctggtgcccctggtggaggatttctgcaacctggatgatgatgagctccgggagtcctgcctccaggcttttgaggccttcttgaggaagtgccccaaggaaatgggtcctcacgtgcccaacgtgaccagcctctgcctccaatacataaaacacgaccccaactacaactacgacagtgatgaggatgaggagcagatggagacagaggatagtgaattcagtgagcaagagagtgaagacgagtacagcgatgacgatgacatgagctggaaggtgcgccgggcagctgccaagtgcatcgcagccttgatcagctcgcggcctgacctgctgcccgatttccactgcaccctggcacctgtgctcatccgccgcttcaaagaacgcgaggagaacgtcaaggctgacgtcttcactgcttacatcgtgctgctgcggcaaacacggcccccgaagggatggctggaggccatggaggaacccacccagaccggcagcaacctccatatgctacgtggacaggtgccccttgtggtcaaggccctgcagcggcagcttaaagatcggagcgtcagagcccgccagggatgcttcagcctcctcaccgagctggcgggtgtcctcccaggcagcctggccgagcatatgcctgtgctggtatcaggcatcatcttctcgctggccgaccgctccagctcctccaccatccggatggatgccctggccttcttgcaggggctgctgggcaccgaaccagctgaggccttccacccacacttgcctatcctcctgccacctgtgatggcctgtgtggctgactctttctacaagattgcagccgaggccctggtggtgctgcaggagctggtgcgggccctgtggccgctgcacaggcctcggatgctggatcctgagccatatgttggagagatgtctgctgtcaccctggcgcgacttcgtgccactgacctggaccaggaggtgaaggagcgggccatttcctgcatgggccaccttgtaggccacctgggtgaccggcttggggatgacctggagcccacgttactgctcctcctggaccgcctgcggaatgagatcacccggctgcccgccatcaaggcgcttacgctggtggccgtatccccactacagcttgacctacagcccatcctggccgaggcactgcacattctggcctcattcctgcggaagaaccagcgggctttgcgactggccacactggcagccctggacgccctggcccagagccagggcctcagcctcccaccgtctgccgtgcaggccgtgctggctgagctgcctgccctggtcaacgagagcgacatgcatgtggcccagctggctgtggacttccttgccacagtgacccaggcccagccagcctctttggtggaggtcagtggccctgtgctctcagagctgctgcggctgctgcgttcgcccctgttgccagccggggttctggcagctgctgaaggcttcctgcaggccctggtagggacccgtcccccgtgtgtggactatgccaaactcatcagcctgctcactgcgcctgtttatgagcaggctgtggatggtgggcctggcctgcacaagcaggtgttccactcattggcccggtgtgtggcagccctctcagctgcctgtccccaagaggcggcaagcacagccagtcgcctggtctgcgatgccaggtcgccccactccagcacgggggtcaaggtcctggcattcttgtcgctggctgaggtgggtcaggtggctgggccaggccaccagcgggagctgaaggcggtgctcctggaagctttggggtcacccagtgaggatgtgagggctgcagcctcgtatgcactgggccgtgtgggtgctggcagcctgcccgacttcctgcccttcctgctggagcagatcgaggctgagccccgacgacagtacctgctgctgcactcactcagggaggccctgggggccgcccagcctgacagcctgaagccctacgccgaggacatctgggccttgctgttccagcgctgcgagggtgctgaggagggcacccggggggtggtggccgagtgcattgggaagctggtccttgtgaacccttcgttccttctgccccgcttgcggaagcagcttgctgcaggtcggccacacacccggagcaccgtcatcacagcggtcaagttccttatctcggaccagccccatcccattgaccccctcctgaagagcttcatcggagagttcatggagagcctgcaggacccagacctgaacgtgcgccgtgcgactctggctttcttcaactcagctgtgcacaacaagccctcgctagtccgggacctgctggatgacatcctgcccctcctctaccaggagacaaagatccggcgggacctcatccgagaggtggagatggggccctttaaacatacagtggacgatgggctggacgtgcggaaggcggcctttgaatgcatgtattcactgcttgagagctgcctgggccagctggatatctgtgagttcctgaaccatgtggaggacgggctgaaggaccactacgacatccggatgctgaccttcatcatggttgcccggctggccaccctgtgtcctgcacctgtcctgcagagggtggaccgactcattgagccactaagggccacctgcactgccaaggtcaaagctggttctgtgaagcaggagtttgaaaagcaagatgaactgaagcgctctgcaatgagggcagtggctgccctgctgaccatccccgaggtggggaaaagccccatcatggccgacttctcttcccaaatcagatccaaccctgaacttgctgccctctttgaaagcatccagaaggattccgcttcagcccccagcacagactcaatggagctcagctagtcccctcagcaccaaggtgggccctcgcttaagagaaaggagcccacccaagtccgaggcctccccatcccaccatcgcaggtctctacttttgcccttccaccatctcactgggggccctgtcgctcctggtcagggcttacagtgccttctccagggacccaactcaaaggcccccagcccaagctgtgaggctgccaacagttgggccccttccttaactcaggacagtcatccaaagaaatagggtgaggaagttttccagtgacttcacactgtacccctccatagtctgtctggttccttcagagggtgtctctgcctcacaaactagtagtatttagaaataggctgtgctgtcagctgtaaaagatcaggaggcagcagacaccactctggtttcttcactgcattcagcaatgcctgaagttagtgctcaggccgggcatctcaaaagaaaagatacttgagttattcacattttaaaattcaaaatacttattagcaaattgggcaacaatgggcatcttccatgccaccacccaggcataaccagttggtttgtttccttctgaggaaggtttcaaatgtgtctagtgttcagtattgaggacaaagaaatacaagtggcaggcccaagtattttctgtgatatcccaggttaataaagattagattctaagttacttctttcctctaaacga

SEQ ID NO: 288841 - DNA, 4255 bp, Homo sapiens
gcagacagaggtgctgtgatggggtgcactccgggagccagcagcaggtgtgtggggaggaaggtgatggattcaagctggggcatgttgaacttgaggctcctgggaggcactcactcaaccacacactccatgagggcagctcccaggatcagtctgtcttgttcaccctggcttccagcacagtccctgtcacttagcaggtgaacaggcaaacaaatgaaacctaggagagggggttgggtaggacatagaaataagggagggtaaggtcagcgtgtttctgtaaagtgagaaagaaaaggtctcaagatgtttacaggacagaaaatgcacgggcctcgtttgaaggtgtggatagaagctgctgaggcaggcaggagctgtgctgtgtgcgcagaaaccattgtctggtgttgcctcttgtcttgagcccagagctcagcatctccaaaggcactagggagccatggaaggagttaagcagaggagtgaccaggtgagaagtagactttatactgctctggtctcagcgaggaggatggacagaaggggatggtattgaggcaaggcctagacttccaagaaatagggacagccttactagatcctctatgctttcccctatcaggtctttctccctaggctgggagcacaggctttgcactgctgagaagtccctttctctctccgctttctctcatgtaacaaaagtaattaaaataattcctcctcacagttgcagggcacctcttttgcaagggccattgagttgccataatcctgggaaggaggccgggagagaatggggagaggggcggagcctggcccaggttgcccgcggagtgcgatcggcctgatgccccctcgtgctccccaggctgggtgtcccgctgggcgccttccacgccagcctcctgcactgtctgctgccacagctgagcagcccgcgcctggcggtgcgcaagcgggcggtcggagcgcttggccacctggcggccgcctgcagcaccgacctcttcgtcgagctcgctgaccacctactggaccggctgcccggcccgcgggtgcccaccagcccgactgccatccgcaccctgatccaatgtttgggcagcgtcggccgccaggccggccaccgcctcggggctcacctggaccgcctggtgcccctggtggaggatttctgcaacctggatgatgatgagctccgggagtcctgcctccaggcttttgaggccttcttgaggaagtgccccaaggaaatgggtcctcacgtgcccaacgtgaccagcctctgcctccaatacataaaacacgaccccaactacaactacgacagtgatgaggatgaggagcagatggagacagaggatagtgaattcagtgagcaagagagtgaagacgagtacagcgatgacgatgacatgagctggaaggtgcgccgggcagctgccaagtgcatcgcagccttgatcagctcgcggcctgacctgctgcccgatttccactgcaccctggcacctgtgctcatccgccgcttcaaagaacgcgaggagaacgtcaaggctgacgtcttcactgcttacatcgtgctgctgcggcaaacacggcccccgaagggatggctggaggccatggaggaacccacccagaccggcagcaacctccatatgctacgtggacaggtgccccttgtggtcaaggccctgcagcggcagcttaaagatcggagcgtcagagcccgccagggatgcttcagcctcctcaccgagctggcgggtgtcctcccaggcagcctggccgagcatatgcctgtgctggtatcaggcatcatcttctcgctggccgaccgctccagctcctccaccatccggatggatgccctggccttcttgcaggggctgctgggcaccgaaccagctgaggccttccacccacacttgcctatcctcctgccacctgtgatggcctgtgtggctgactctttctacaagattgcagccgaggccctggtggtgctgcaggagctggtgcgggccctgtggccgctgcacaggcctcggatgctggatcctgagccatatgttggagagatgtctgctgtcaccctggcgcgacttcgtgccactgacctggaccaggaggtgaaggagcgggccatttcctgcatgggccaccttgtaggccacctgggtgaccggcttggggatgacctggagcccacgttactgctcctcctggaccgcctgcggaatgagatcacccggctgcccgccatcaaggcgcttacgctggtggccgtatccccactacagcttgacctacagcccatcctggccgaggcactgcacattctggcctcattcctgcggaagaaccagcgggctttgcgactggccacactggcagccctggacgccctggcccagagccagggcctcagcctcccaccgtctgccgtgcaggccgtgctggctgagctgcctgccctggtcaacgagagcgacatgcatgtggcccagctggctgtggacttccttgccacagtgacccaggcccagccagcctctttggtggaggtcagtggccctgtgctctcagagctgctgcggctgctgcgttcgcccctgttgccagccggggttctggcagctgctgaaggcttcctgcaggccctggtagggacccgtcccccgtgtgtggactatgccaaactcatcagcctgctcactgcgcctgtttatgagcaggctgtggatggtgggcctggcctgcacaagcaggtgttccactcattggcccggtgtgtggcagccctctcagctgcctgtccccaagaggcggcaagcacagccagtcgcctggtctgcgatgccaggtcgccccactccagcacgggggtcaaggtcctggcattcttgtcgctggctgaggtgggtcaggtggctgggccaggccaccagcgggagctgaaggcggtgctcctggaagctttggggtcacccagtgaggatgtgagggctgcagcctcgtatgcactgggccgtgtgggtgctggcagcctgcccgacttcctgcccttcctgctggagcagatcgaggctgagccccgacgacagtacctgctgctgcactcactcagggaggccctgggggccgcccagcctgacagcctgaagccctacgccgaggacatctgggccttgctgttccagcgctgcgagggtgctgaggagggcacccggggggtggtggccgagtgcattgggaagctggtccttgtgaacccttcgttccttctgccccgcttgcggaagcagcttgctgcaggtcggccacacacccggagcaccgtcatcacagcggtcaagttccttatctcggaccagccccatcccattgaccccctcctgaagagcttcatcggagagttcatggagagcctgcaggacccagacctgaacgtgcgccgtgcgactctggctttcttcaactcagctgtgcacaacaagccctcgctagtccgggacctgctggatgacatcctgcccctcctctaccaggagacaaagatccggcgggacctcatccgagaggtggagatggggccctttaaacatacagtggacgatgggctggacgtgcggaaggcggcctttgaatgcatgtattcactgcttgagagctgcctgggccagctggatatctgtgagttcctgaaccatgtggaggacgggctgaaggaccactacgacatccggatgctgaccttcatcatggttgcccggctggccaccctgtgtcctgcacctgtcctgcagagggtggaccgactcattgagccactaagggccacctgcactgccaaggaaccaaacgccaacagtgtggcctggaacacccagtgtgaggacatgcatgctctgcttctcgggaggaggctacctcaacatcaaagccagcaccttccctatgcaccggcagaagctgcagggctttgtggtcggctacaatggctccaagatcttctgcctccatgtcttctccatttctgccgtggaggtgccgcagattggagaggacgaaggccctgaggtccaagaacattgaaacctgacagtggatgccaacagctgtggggaggagcctggtgagacgcccatgctgccacgtgcccagcaacgttggagcctgcagcgcttttcccctgccctgctctattttatcttttttaataaagatggctcctgat

SEQ ID NO: 288842 - DNA, 1490 bp, Homo sapiens
gcagacagaggtgctgtgatggggtgcactccgggagccagcagcaggtgtgtggggaggaaggtgatggattcaagctggggcatgttgaacttgaggctcctgggaggcactcactcaaccacacactccatgagggcagctcccaggatcagtctgtcttgttcaccctggcttccagcacagtccctgtcacttagcaggtgaacaggcaaacaaatgaaacctaggagagggggttgggtaggacatagaaataagggagggtaaggtcagcgtgtttctgtaaagtgagaaagaaaaggtctcaagatgtttacaggacagaaaatgcacgggcctcgtttgaaggtgtggatagaagctgctgaggcaggcaggagctgtgctgtgtgcgcagaaaccattgtctggtgttgcctcttgtcttgagcccagagctcagcatctccaaaggcactagggagccatggaaggagttaagcagaggagtgaccaggtgagaagtagactttatactgctctggtctcagcgaggaggatggacagaaggggatggtattgaggcaaggcctagacttccaagaaatagggacagccttactagatcctctatgctttcccctatcaggtctttctccctaggctgggagcacaggctttgcactgctgagaagtccctttctctctccgctttctctcatgtaacaaaagtaattaaaataattcctcctcacagttgcagggcacctcttttgcaagggccattgagttgccataatcctgggaaggaggccgggagagaatggggagaggggcggagcctggcccaggttgcccgcggagtgcgatcggcctgatgccccctcgtgctccccaggctgggtgtcccgctgggcgccttccacgccagcctcctgcactgtctgctgccacagctgagcagcccgcgcctggcggtgcgcaagcgggcggtcggagcgcttggccacctggcggccgcctgcagcaccgacctcttcgtcgagctcgctgaccacctactggaccggctgcccggcccgcgggtgcccaccagcccgactgccatccgcaccctgatccaatgtttgggcagcgtcggccgccaggccggccaccgcctcggtaagggggcagggggcggggcctgggctggcatggtgggcggagcttagggtgagccaatgactcggtaaaggggcggagcttgggccgcagtgcagccagggcctaagggtgggccgtctgccttggtagggaggatggggcggggcctgggctgatgtggtgggtggggcctggggcgggcggctgaagcccctgaaacgcagaggttggggccggatagggcttgagaggcgcagggcgggccctgagctcgacaaacccccaggcctgagcccctgctgagtgcagacggttcagagaagggggttggttcaatcacttatgagacgtggaggctggct

SEQ ID NO: 288843 - DNA, 460 bp, Homo sapiens
tttcaagataatgctgaggcaccacattttaaattctaaagacagtcccatagcataggttctgttacgactcccattttacagatgaggacattgaggctctccaaggtcccacagtaaattggtagagctggaatggaagccacatcagctcaagcccacattcttatctggcctttgaagggttgtttgtgcctggcacaaagtagatgctcaccacacccagcttacccccattcagccagttctgcacgtgcacagtaaccagatggccggggtggtgagggaggtgactttgtgctttggctgtgcatcccccacgcccctcatgttcttctgccaggagagttcatggagagcctgcaggacccagacctgaacgtgcgccgtgcgactctggctttcttcaactcagctgtgcacaacaagccctcgctagtccgggacctgctggatgaca

SEQ ID NO: 288844 - DNA, 565 bp, Homo sapiens
ctctatctaaaccccagttttctcatctctataatggggaaataatccctgtctcaaaaggtcgtcatgaagctaaaataagattatgggtttgacatgcttagccccatccgtagcactcagtagatgcccattaaaaggtagggaatgttccccatagggtatctataaatgctgatcatcaaaaagtgaagcacagtgcccagctctctctcctccctgtcccttctcccccgagccacagacctgtcctgggagatgagggttccacgtgtgtcttgttcctgccccagagagtgaagacgagtacagcgatgacgatgacatgagctggaaggtgcgccgggcagctgccaagtgcatcgcagccttgatcagctcgcggcctgacctgctgcccgatttccactgcaccctggcacctgtgctcatccgccgcttcaaagaacgcgaggagaacgtcaaggctgacgtcttcactgcttacatcgtgctgctgcggcaaacacggcccccgaagggatggctggaggccatggaggaacccacccagaccggcagcaac

SEQ ID NO: 288845 - DNA, 453 bp, Homo sapiens
cagaggttttcctagtttaaataagaaaaaagaagcttttatgtaagttaaatcattacttcagtatcactccaggtgcagcctttagatgctttatacatttttaaaagtcatctatcactctatattagaaagaatgcagggcaagtatatcttaagcctcatctgaatgctctgacacaaagtccccatgttatgttaagcagtttactaactctttttgggcttcatcagaacattcaaagaatggactatagcatctctcaagcctcctattttagaaattgtaatataagaatatgcatatgttcacactgaattaaaatagttattagataacaattatgattatacttttagggatcattcttttcacatccgtaaaagttaacataatgaggcaatattattatccagttttaaagtcttgcgcgaagtgacagtttgaaggtg

SEQ ID NO: 288846 - DNA, 983 bp, Homo sapiens
gaaggaagaacgttgcttgggcaaaaggagcatattctcaggagacggggcccctgcctgccacaccaagcattaggccaccaggaagacccccatctgcaagcaagcctagccttccagggagaaagaggcccctgcagctccttcatcatgaactggcacatgatcatctctgggcttattgtggtagtgcttaaagttgttggaatgaccttatttctactttatttcccacagatttttaacaaaagtaacgatggtttcaccaccaccaggagctatggaacagtctcacagatttttgggagcagttccccaagtcccaacggcttcattaccacaaggagctatggaacagtctgccccaaagactgggaattttatcaagcaagatgttttttcttatccacttctgaatcatcttggaatgaaagcagggacttttgcaaaggaaaaggatccacattggcaattgtcaacacgccagagaaactgaagtttcttcaggacataactgatgctgagaagtattttattggcttaatttaccatcgtgaagagaaaaggtggcgttggatcaacaactctgtgttcaatggcaatgttaccaatcagaatcagaatttcaactgtgcgaccattggcctaacaaagacatttgatgctgcatcatgtgacatcagctaccgcaggatctgtgagaagaatgccaaatgatcacagttccctgtgacaagaactatacttgcaactctttttgaatccatacaggtcgtctggccaatgattcttttacttacctatctgtctaccagtagcggtccttgcccatttgggaaactgagcttctttcttctgcactgggggactggatgctagccatctccaggagacaggatcagttttacggaaacaactcagttagtatagagatgaggtccgcttctgtagtaccttccttcaaataaagaaatttggtacct

SEQ ID NO: 288847 - DNA, 755 bp, Homo sapiens
gaaggaagaacgttgcttgggcaaaaggagcatattctcaggagacggggcccctgcctgccacaccaagcattaggccaccaggaagacccccatctgcaagcaagcctagccttccagggagaaagaggcccctgcagctccttcatcatgaactggcacatgatcatctctgggcttattgtggtagtgcttaaagttgttggaatgaccttatttctactttatttcccacagatttttaacaaaagtaacgatggtttcaccaccaccaggagctatggaacagtctgccccaaagactgggaattttatcaagcaagatgttttttcttatccacttctgaatcatcttggaatgaaagcagggacttttgcaaaggaaaaggatccacattggcaattgtcaacacgccagagaaactgaagtttcttcaggacataactgatgctgagaagtattttattggcttaatttaccatcgtgaagagaaaaggtggcgttggatcaacaactctgtgttcaatggcaagtacgtgaacatgccacagtttcctggggatcttggtttgcttcaaaagaccaaacctgagattgctgggttcaccctggaatagctcaaacgctgacacttgactctgttctgctcttctcctttcttccaacccatctattccctgagacacattttaataaatgttttcttatgaaagagatcaaactttcataaggagaaagaagagtattcatatag

SEQ ID NO: 288848 - DNA, 847 bp, Homo sapiens
tgtcagcaattcaagactatctttcctaccctctgcagtgcctctttcagctatccaggtactgagtgttcatctgattttttgttctcatgtatgtatatgtgcttttttgtgtgtagatagttgtcaaatttggtgttcctgtagggggatgactaatggaaactttattcagccactgcgctcttctccttattctccttatattattgtcaaggaaccagactagactgggtggaatttcttcctggatggagaataatttttaccaatataattgttaaaacaaagcaaaaatatgtatcactgtttcatgacttagttgcaggattcataacccaaaccagtaaactcgtactctcctttcttggacctcttcagtctgccccaaagactgggaattttatcaagcaagatgttttttcttatccacttctgaatcatcttggaatgaaagcagggacttttgcaaaggaaaaggatccacattggcaattgtcaacacgccagagaaactgaagtttcttcaggacataactgatgctgagaagtattttattggcttaatttaccatcgtgaagagaaaaggtggcgttggatcaacaactctgtgttcaatggcaagtacgtgaacatgccacagtttcctggggatcttggtttgcttcaaaagaccaaacctgagattgctgggttcaccctggaatagctcaaacgctgacacttgactctgttctgctcttctcctttcttccaacccatctattccctgagacacattttaataaatgttttcttatgaaagagatcaaactttcataaggagaaagaagagtattcatatag

SEQ ID NO: 288849 - DNA, 678 bp, Homo sapiens
gaaggaagaacgttgcttgggcaaaaggagcatattctcaggagacggggcccctgcctgccacaccaagcattaggccaccaggaagacccccatctgcaagcaagcctagccttccagggagaaagagtcccacagatttttaacaaaagtaacgatggtttcaccaccaccaggagctatggaacagaagtttcttcaggacataactgatgctgagaagtattttattggcttaatttaccatcgtgaagagaaaaggtggcgttggatcaacaactctgtgttcaatggcaatgttaccaatcagaatcagaatttcaactgtgcgaccattggcctaacaaagacatttgatgctgcatcatgtgacatcagctaccgcaggatctgtgagaagaatgccaaatgatcacagttccctgtgacaagaactatacttgcaactctttttgaatccatacaggtcgtctggccaatgattcttttacttacctatctgtctaccagtagcggtccttgcccatttgggaaactgagcttctttcttctgcactgggggactggatgctagccatctccaggagacaggatcagttttacggaaacaactcagttagtatagagatgaggtccgcttctgtagtaccttccttcaaataaagaaatttggtacct

SEQ ID NO: 288850 - DNA, 695 bp, Homo sapiens
gaaggaagaacgttgcttgggcaaaaggagcatattctcaggagacggggcccctgcctgccacaccaagcattaggccaccaggaagacccccatctgcaagcaagcctagccttccagggagaaagaggcccctgcagctccttcatcatgaactggcacatgatcatctctgggcttattgtggtagtgcttaaagttgttggaatgaccttatttctactttatttctgccccaaagactgggaattttatcaagcaagatgttttttcttatccacttctgaatcatcttggaatgaaagcagggacttttgcaaaggaaaaggatccacattggcaattgtcaacacgccagagaaactgaagtttcttcaggacataactgatgctgagaagtattttattggcttaatttaccatcgtgaagagaaaaggtggcgttggatcaacaactctgtgttcaatggcaagtacgtgaacatgccacagtttcctggggatcttggtttgcttcaaaagaccaaacctgagattgctgggttcaccctggaatagctcaaacgctgacacttgactctgttctgctcttctcctttcttccaacccatctattccctgagacacattttaataaatgttttcttatgaaagagatcaaactttcataaggagaaagaagagtattcatatag

SEQ ID NO: 288851 - DNA, 993 bp, Homo sapiens
ccccaggcccagctgagtttgccactttctaaatgaggctgtgtgctatgcagtattaagagtttccatccctttgatttttcactgggaaaatctagaaattgtgagctctggggatgaggtgaacttggcatggagctccgccagcccctacaggaggcacgcagatgccagactcggcttcccgtgcctgtgcagacacaaagctgtggttcacggggagctgcttttcacgcgtttgcgccttcaaacgtggagagtgttgttagctcggatttattcattctcgaacaaatatctattaaacatcccccaagctgaggaaactgagattcaaggagttgggagacctcacccacagtcacgtggatcctaactggctgagatgagttttgggctcctgctgggctgttgggacccagaggtcggcgacaaggtcacccaggtctcaggtcggtccctgtacctttatctcatccccctcctctgcattcctgaaacccttcccaggacagctcccctgcccaccccgcccttgacctcaccttttccatgagggactccacagcatggcgggtcacccagcagcggcccccggacacctctccctcctggatgatgtcccctctctggctccaggcctcatactcctcctggctcaagtactctacaggtgacattggacggggccatcatagaccagctgtgtgggggtctgggggagtcccatggtaaacacccctgtccccgtgaaccctgccagcactgggagaagctcttcttaggatgtccactttacaaacctgaccctgcacaccccgctctgtgccctgcacctccatcctgaactatctggacacagcaggtgagtgcctcctgccaccctgccagcaccgagcccctcttccagcccaccccagtggggtccaggcccctccctggagcctcaccttgcgggtcacggtgcactgctgagtcatgtcctggatgagg

SEQ ID NO: 288852 - DNA, 304 bp, Homo sapiens
gttcatgccattctcctgtctcagcctcccgagtagctgggactacaggcgcccaccaccacgcctggctaattttttctgtttttagtagagacagggtttcaccgtgttagccaggatggtcttgatctcctgacctcaggtgatctgcccgcctcggcctcccaaagtgctgggattgtgcctcctgccaccctgccagcaccgagcccctcttccagcccaccccagtggggtccaggcccctccctggagcctcaccttgcgggtcacggtgcactgctgagtcatgtcctggatgagg

SEQ ID NO: 288853 - DNA, 450 bp, Homo sapiens
gtgttggggacggagccgtggatacacccatactcaacaggcagagggaatagatattcgacgggggaccggggtgtcaacagatgtatccgagttcatgcgtggcagggagctggcggcgggacccgtccctccagctggctctccaaccccaagcctgcattacgaccacggcaaaatgccagaagcccagagaagcggggtttttgaagcggatcgtttgttcagcccgagtgcgtggggcaggaacacacctggaggtcattaaagagaagtcttcacggggcactcaaggcacactgcaaaacaactttttatttaaaaggccaataatgagaataatgagttgcacaagaatgaaaaccttatcccttccaaaagatcggcctatacattatgtataaagttagaataattttaaatacaaaatgccaaagaccagcgggtcca

SEQ ID NO: 288854 - DNA, 738 bp, Homo sapiens
gtcagtctcccagtttttcataatgaaaagttgtttcccctgtgtgacctcttcaatattctcctatattcatgacctcctcagattgtcacccaccagcatatgctctgaggcagtttagagcttacatttccatgtataaaaggcgattcattctctcagcaaacttgcagtccttgatgtgccagacatcagtgatgcagagataaagtaagacacagggcctctgcctgctaagcccacccagcttacatccaggagagtcaggtacttatgtacataattctcagagaatgtgcatgaggcgtgggcctgaattggtagcaaggaaaaaacagaggatggaacagggtctggttgggtagaggagaaagcagaattcccggagaggagtgcaggggtgtagctggagacagtgtacttgagaggacatgatgaaagcgtggaggtaccagcttggttgtgtggccaggtgaggggaacaggccagcagggtgaggtcagagattcttgtcaccttcttctgagagctgtgagaacccgttgttgaagattaggcagagaagtgatctggtcacattttcttttaagaatggcatgtagggcaggaatcttgagaggtgggtgctgcagccatccaggtgaaattcaaagggaataagcgtgagtttgttagcaattggtgtgaagagaggggataaaatttgagccatatacagaaagaggtattaatagact

SEQ ID NO: 288855 - DNA, 399 bp, Homo sapiens
ggcttcccaggcctggccagcaagagcacaaacagggagccatggaggactgttgttgccgaatacagacggggtttcaccgtgttagccaggatggtcttgatctcctgacctcgtgatccacccgcctcagcctcccaaagtgttgggattacaggtgtgagccaccgcacccggctacctgtctcctcattcttaaaagatgtaaacccctcccaacactggaagaggaaacagagaccagtgcgctgtgcagtctcacttaactagaatgcacaactcctgcttttatcaccattctgggaaatccccgctgcatttcatggccagggcagcacttcatagttggaaaaggatggtgtggacttgccgcagaggccctagagaaggccatcctgt

SEQ ID NO: 288856 - DNA, 1337 bp, Homo sapiens
ggcttcccaggcctggccagcaagagcacaaacagggagccatggaggactgttgttgccgaatacagacggggtttcaccgtgttagccaggatggtcttgatctcctgacctcgtgatccacccgcctcagcctcccaaagtgttgggattacaggtgtgagccaccgcacccggctacctgtctcctcattcttaaaaggtaaagtttcgatgtagctggaaggggtgtgaggggcattgtcaagtcgctcctgtaaagctgccaaaactccaggattctgcatcacctgatccgtgagcttttccgtcttacttgcatttttagcagcttccacgaaatctgaaggaaccccatctgaaaaactgttatctgccatctgaatgtttttatccccttgtctggtaaaccaagtcccgtgagtaactaggctaaggcactcaggccagtcctcggggagcacacgccgcccatctggctcgcaccgcacagctcccaacagctgagatgcaatgccaaggactttcttccccatcagacatgccctcgtccacacgaaacttacaatcaaaaccccagttagcccagcctgaccccacagatgctcacgatgaccatcgccctacggaaaaactcaaattcctaaacatctaataaagaggtcctggacgtctccaccttaaaaacgggaagcctgaatgctcctccgggtgcgccgcggccctccgggtacgcggggctggctgggctagcgggagatttgagctgccagcccccactcgccgccctctacgcctcctccgctgggccgccggcgaggaagccgcccgcagcgcagaacaaagcgacttgaccttcagggcagtgggcggcagggcaggggcgcaccgggtgctgggaggggccgctccaggccccaagccccaggcccgccgcggcggcgctgcccaccctgacgaggacgtctactttttcttgaaaaatgtctttcctttcccaaaagtgactctgctttgtctgaaaataatataactttaatggctttaagttattgtttgaaagggttcagaaaagacaataaatgggagacttagaatggctcaccagttaaaatccaagtttcatatatttcttgtatttgctaatttcccttatctgtttcagctgcttgttcagaaaaatttcattcatagactcaccttatcccagccctagagactcatattctctatttgccctggaatcctgttcactatttacaattatattattctgaataatagtatttactattttcgtctcttttatattttaataaaccactttcaagtcactg

SEQ ID NO: 288857 - DNA, 801 bp, Homo sapiens
acagaatcctgcaatatgtccttggaaggtctctgctgaaaatttcaatgcctcctgcaaaaagaaggaagagaaagaaaaggagaaaacagaggcagaggatctttccctagaagagattctgtgaaacgctccctcttatggaaacacacataaagtctctctcttgcctgtctcccgttgaagatcaaccagttctcctgccaggtttgaggacccgggctcaggccccggcaggtatccgggatggtccctctccctaacccgggcaaggagcatcggtgaccgctgcaagccctcggcagcatcccagcttggcagcccctccccctggcctccccaacccggcgccctggggaggatggggcacttacaggcggcggctgagaccctccaccgagcgcccgcaggagggcaccgcgtagctcagcaggaacaccgcgacgctccactgctgaaccagtctccgctgcatcgtctccgctcgcgctcgggacctgcaacagaagggaatgggacccgagtgtcagtctggactctccatctccccgcactactccgctccccctttttagcccgctctcaaaaagcctcttcaacatcaagggcatctcccaagttgaaaagaaaaaaaatttctctggagcctctcagcacttacttatttagcaaccggctactccaactgtgctttctccaaaccacacagccagaaagagcaaaaagggaaaaaagaaacaaatcagaggcgcttcctctgaaataatagcgaaaataaaatggttttatatatgcaaaaat

SEQ ID NO: 288858 - DNA, 276 bp, Homo sapiens
ggtacccattacgaaaaatggcaaaggatagtggcagaaattagcaaagtttggggtgatacaagctccagctcccttctctctgagtttagggcagaaggggaggggcatttaagtgactctgaagaggaaatagtggttttttgttctcacaaacaaggtctccaccctgtccctgccttttttcttaccttgccctgaacgcctagagtttctttaagaacaggagagccctggaccactgaggtcctaggagactaactggcaggttggccc

SEQ ID NO: 288859 - DNA, 1561 bp, Homo sapiens
  misc_feature (983)..(983): n is a, c, g, or t
  misc_feature (985)..(986): n is a, c, g, or t
  misc_feature (988)..(988): n is a, c, g, or t
  misc_feature (1007)..(1008): n is a, c, g, or t
gctgcgtgcgcgtctcctccagacagcaaggggaacccgaggccgccggcgcccggaccatgtcgtctccggggccgtcgcagccgccggccgaggacccgccctggcccgcgcgcctcctgcgtgcgcctctggggctgctgcggctggaccccagcgggggcgcgctgctgctatgcggcctcgtagcgctgctgggctggagctggctgcggaggcgccgggcgcggggcatcccgcccgggcccacgccctggcctctggtgggcaacttcggtcacgtgctgctgcctcccttcctccggcggcggagctggctgagcagcaggaccagggccgcagggattgatccctcggtcataggcccgcaggtgctcctggctcacctagcccgcgtgtacggcagcatcttcagcttctttatcggccactacctggtggtggtcctcagcgacttccacagcgtgcgcgaggcgctggtgcagcaggccgaggtcttcagcgaccgcccgcgggtgccgctcatctccatcgtgaccaaggagaaggaactttttcaagagtgaagaataaaaagggaggatgtgaatttatttcaagatgatcatcaaaggatgaaggaacagatgaggtgtgagtggacttcccagatcaagaaatggacagcattatcagcctgaagaaaagaggccactgtgactacagtcaagatgctcagctcagcaagacttgaggacagctcaaaccatctttggctactgtgcccagtagcaaaggagtaaatgtgatactgtccagaaacaagatgtgtaggccataagagaaaagaaattatgttaggaattagaggccaataacattattgaatatttattattttttgaaagaactttgctgctgaagttggtgagaatagcagagaagggtatgtttcataacgcaaagagaggctagaaatagttgacttaatacatttgctgaananntncagaatgtaggaattttannttttatgtttaaatttttcaaaatttcatgattagacaaggtggtcttcttcttaagcccataaaaactacagtaaactagataggccataaagatgctgtgtccatcattctgattgattcttttcctaagcacaaaaagaaaagaaaattacaaaatcagagctaaggctaccaaaggagcgtttcactcttaagtgtgctgatatggtttgaaggtgtccccaaatgtttatgtattagaaacttaatccctaatgcaacagtgtcaagagatgggaacttaaaagatgactaggtcatgagggctctgccttcatcaatggattagtgctgttatcaccagagtgggttagttattgtgggagtgggtttctgagaagaaggatgagtttggccccctttctctctctctctctttcatcctctcttacccttctgccttccaccatgggatgatgcagcatgaaggcccttgccagatgccagtgctatcctcttggacttcccagccttcagaactgtaagaaataaatctctgttctttataaatt

SEQ ID NO: 288860 - DNA, 341 bp, Homo sapiens
cggcacgaggcgatggagcgaaaagtgaggaaactgaagtcccgggagagacagtggcaaggtcaagtagcaaagtgcactcagccctcccagcaaggagtctgccactcgcgcttgaaggacgtgtttgaagagctgctttcccagtgggatgctgccttaaagtcttgattccctggcactctttcctattactacattttatcggtgctgtttgtgttatgcaacggtagcatcgtgtctccggaagataaaaaaggtctcgatacaaacatccataaccttccacccactccgtcaggaacaacccaatcaaaataaagtcatgagaatttagaaag

SEQ ID NO: 288861 - DNA, 388 bp, Homo sapiens
ccccttggctgcaggaattcggcacgaggacctcaccgctgcggggcgatggagcgaaaagtaggaaggaggtgaggaaactgaagtcccgggagagacagtggcaaggtcaagtagcaaagtgcactcagccctcccagcaaggagtctgccactcgcgcttgaaggacgtgtttgaagagctgctttcccagtgggatgctgccttaaagtcttgattccctggcactctttcctattactacattttatcggtgctgtttgtgttatgcaacggtagcatcgtgtctccggaagataaaaaaggtctcgatacaaacatccataaccttccacccactccgtcaggaacaacccaatcaaaataaagtcatgagaatttagaaag

SEQ ID NO: 288862 - DNA, 386 bp, Homo sapiens
gagccgttaaagcctggggctgcgggagaagttgagggattttcgtttataacaactctaccattttgcaggtgaggaaactgaagtcccgggagagacagtggcaaggtcaagtagcaaagtgcactcagccctcccagcaaggagtctgccactcgcgcttgaaggacgtgtttgaagagctgctttcccagtgggatgctgccttaaagtcttgattccctggcactctttcctattactacattttatcggtgctgtttgtgttatgcaacggtagcatcgtgtctccggaagataaaaaaggtctcgatacaaacatccataaccttccacccactccgtcaggaacaacccaatcaaaataaagtcatgagaatttagaa

SEQ ID NO: 288863 - DNA, 533 bp, Homo sapiens
tctggaactcggagatgagcacgtccttgtcggtggtgcccaggcagctgaacttctgcatcagctccgggtccaggtctacgtccatgccctccatggcggggaccggacacccgcttccccgcctcttcacaaccaagccgccgccgcgccgccgggcccggggacctggaggggggccgctgctagctagcttcgcgaccccgctcctttgaggtgaggaaactgaagtcccgggagagacagtggcaaggtcaagtagcaaagtgcactcagccctcccagcaaggagtctgccactcgcgcttgaaggacgtgtttgaagagctgctttcccagtgggatgctgccttaaagtcttgattccctggcactctttcctattactacattttatcggtgctgtttgtgttatgcaacggtagcatcgtgtctccggaagataaaaaaggtctcgatacaaacatccataaccttccacccactccgtcaggaacaacccaatcaaaataaagtcatgagaatttagaaag

SEQ ID NO: 288864 - DNA, 5367 bp, Homo sapiens
  misc_feature (942)..(942): n is a, c, g, or t
gcgcagacgccccagccccccaccgcccccaaaggggcgagcgacgccaagctctgcgctctctacaaagaggccgagctgcgcctgaagggcagcagcaacaccacggagtgtgttcccgtgcccacctccgagcacgtggccgagatcgtgggcaggcaaggctgcaagattaaggccttgagggccaagaccaacacctacatcaagacaccggtgaggggcgaggaaccagtgttcatggtgacagggcgacgggaggacgtggccacagcccggcgggaaatcatctcagcagcggagcacttctccatgatccgtgcctcccgcaacaagtcaggcgccgcctttggtgtggctcctgctctgcccggccagccgtgaccgcgaccccgtgttcgagatcacgggtgccccaggcaacgtggagcgtgcgcgcgaggagatcgagacgcacatcgcggtgcgcactggcaagatcctcgagtacaacaatgaaaacgacttcctggcggggagccccgacgcagcaatcgatagccgctactccgacgcctggcgggtgcaccagcccggctgcaagcccctctccaccttccggcagaacagcctgggctgcatcggcgagtgcggagtggactctggctttgaggccccacgcctgggtgagcagggcggggactttggctacggcgggtacctctttccgggctatggcgtgggcaagcaggatgtgtactacggcgtggccgagactagccccccgctgtgggcgggccaggagaacgccacgcccacctccgtgctcttctcctcctcctcctcctcctcctcttccgccaaggcccgcgctgggcccccgggcgcacaccgctcccctgccacttccgcgggacccgagctggccggactcccgaggcgccccccgggagagccgctccngggcttctctaaacttggtgggggcggcctgcggagccccgcagccggcgggcgggattgcatggtctgctttgagagcgaagtgactgccgcccttgtgccctgcggacacaacctgttctgcatggagtgtgcagtacgcatctgcgagaggacggacccagagtgtcccgtctgccacatcacagccacgcaagccatccgaatattctcctaagccccgtgccccatgcctccggggcccactccactgggcccaccctggacctgttttccactaaagccttttggaaagcggtgatttgaggggcaaggtgcttagagatactcgctcgctggggaaggggggagggaggcagtggtggctggagggtgcgccactttcagagcctctggtcaccctgtcctggaaagattgggagggggccagactgaaaattttactagagttacaactctgatacctcaacacacccttaaatctggaagcagctaagagaaacttttgttttgccagaggtggccactaaggcattctgacgccctctgcccacctcccccgctgtgtgtcactccaccccttcttccgaggagggggtgggtaaaagggagagggagaattaccacctgtatctagaggtgctctttgcaatccctaagccctctggtcctgacctccgactcccagctctgtcttgttccttgtctttgtctttcttcccttccccctgcccctgcccctaccagcccagctttggggacaccatccttctggggagaagtagggggaggaatatttggatggtccctccattcctcttcaggcatctggaggccctctcccccactcctccaaagaaacatctcaaattattgatggaatgtatccccattctcagtgaaaatgtgaggaggggactaatactggggtaaagggtcaaacccccaccttcatcactatgggcattatatttagggagtagttcttgggctggattttctggttgtggaagtgggggcgccagagtagtgtgtctgctatttaaaggagcaggaaagggcgtgaggcaggaggagagactggtggagggaagagctgctcctcccatgcagtgcccgactccctgcacccctctcaacctgacctgaacctttattgaatccttattagcttgaatccttattagcttgaatcctccatgcaaatcatggagtctgtgtcccacctgatgtggttgaggagaagccaggtcttcaaagaggggtcagcctggggcaaagcaggactggggggaggtgggcagcagggcctattctgagaatcacatattgttacaggccttgcaccccctttgctgcttccctcctgctcatttggggctgccaccagctctccaccctcctggttccgctggccgggccaagagaggatggagggatgggagtcccaggagatccttgtaaatagtggggtgggactgttctgagtgatcacccgagcacttaaagctccagagtcccattcttcctggatggagcaggtggaggtgcagaggggatttcctcctctccttcctcctgtcgagaattaacacctctccacagccttcccctccagaacaccagccagggaggggtggggaaggaggtcacagccaagaaaactgccctgtgacgacttccctccttcccgcctatgtgagccatcctgagatgtctgtacaatagaaaccaaaccaaatgggcaccctcggttgccggggggcaggtggggaggggggtgggaagaagggatgtctgtctgtcgtccccctccccctctccactctttacccacaaaggcagaagactgttacactagggggctcagcaaattcaatcccacccttaccaattgagccaaacctagaaacaaacacaaaacacgaatagtgagagacaaaatagaggagagaaagagagcatgagagggagcgagacaggcgaccaacacagaggagagaaaacaaaaatagcaaaaaaaaaaaaaaaaagcagttctttataatttaatattctattttaataaaggcgtttattaccatataaatgtagcaaagaacctgggctaatatgaaaaaaaaagactttttattaggtaatttattatatgaaaaggatattttattttatgataaagtgatccttaaaaaaataaaaaaactttagaaggtttagaatatatgtagggagagaagaagaaaaaaatacatttgtattcagagttaaatcttaaaaaaaaaaagtgtttttaatatatgtttgggtttacgttgcttttttcccccactttttttttggggaggaatgtcatttgcttttcttgggggagcatcccgggggtgaatggtggagagaggagctgggggaacccggtccctcctgggacccttccagtagattggatttcactccatggactcctcctcccctctccccctccccctcaggggagccggcagagccaaacaaagaaagggattaacaagaaaggaagaagctgtaggactaaggactgaggatcctggggtgtcccccaccactttcccctgccctgtcgcaggggcaagtgaggagggggaatccagaattaaggcctagcaggcctataggaaccctcagagatgtgtgagatttaagagatctagatttttttttaaccaaaaacaagagagaaagagaagaaaaagagaaaccgaggggtttaaaagaaaagaatactacaaaataataattattaataataataattcaaatttatttcatataatcctagagagagaaagaaacaattactagttacttagtagacaatattaagatagcttaaagtttagtagcattgagggcccctgggtccagtagaatgtataaaagttgtaaggaaaagataaatagaggagggaagtggctgagtccaccctgagttgcccaatcttcagataccagggttggatcaggttgctagtttaagattgggagcttccagtctgctggggttgattctgagaatccttggatttttaaattgtaggacaaagaaatgaggggttcatttcccagggtcttggaaaggatgcacactgatcatctcaataagacaggggctgggttgggggcagcagaggaggccaagcacattcacctgcacccctagtacctgggcagcccatactccaatgtggtatgtcccctcctggggctcccagctcaaaccctcccatgcctgcttcccccaggcctaactgaggaagtccttcttgaagtgtgacctcggtccacttctctacagattgatttaagagcctgggaagtcattccacaaacagacacacatgcacacacgcttctcaccttcagagcttcaagagcactgaggcgatcagtcccctacccctgttcccatccagctttccacttagctttgacctccatggcagcagtagcagtaacaatctcagtaattgttctttaaagctgactcgttcttcacctacttgcaaagtgctttcttgtctcataaaagttagattccaagaaggacttcccacggagtggagtggaaacactgtccttgaaggcctgggagaaaggcatccccatgggcacagaggctggggaaaggcacagggactttgggtgaccctaaccctgaccctctgctccagttcacctccatctatatgtgttcaggtaggggtcatctactgtaccctggcctgggaacacattgccctccccacacaaaactggagggcttggcttctgcgtgtgagaaatcaacatttttaaagcacttgccttctaccaaccccagcttgcaatcactgggccttcccctcctatccaaggggttggaggggccccttggctctccttttggcaggaggagcctgcttcattacaccaatgactctgccatccccctccctggccctagaccccaaacacatctccctctacccaatttactcttctcgccccacctagggacagattccccctgctctttttgtcctagaaaccccgctagtttgggatggtagcgtctggggtggggagggcttccccttccccactcgagggtgcgggtggggaagggggggtgggtggagacagccctggggcagggaggatggtctctccactgtagaaagtagagtaggattgtggtcagacttaatttgaggcatctagtgaagacacgtacaaatccaccaaggaaaaagatttcaaaagcaaaataaaagcgggaaataaaacagacccaagaataatcaagtcaaagtgatgttgcacaaaatgcagagaaaccaagaagggggagggttaatgtattaaatgtgctattaagaacttaattttattaaaagtactattacttaa

SEQ ID NO: 288865 - DNA, 327 bp, Homo sapiens
aagtatgcagtactgatttatcagtataaatcgaaagagcttagatctgtaataaaatccaaattggggaagggcaaactttaaaacagcagccagtagagaagggtggggaagggagacttaatttgaggcatctagtgaagacacgtacaaatccaccaaggaaaaagatttcaaaagcaaaataaaagcgggaaataaaacagacccaagaataatcaagtcaaagtgatgttgcacaaaatgcagagaaaccaagaagggggagggttaatgtattaaatgtgctattaagaacttaattttattaaaagtactattacttaa

SEQ ID NO: 288866 - DNA, 5480 bp, Homo sapiens
  misc_feature (1055)..(1055): n is a, c, g, or t
gcgcagacgccccagccccccaccgcccccaaaggggcgagcgacgccaagctctgcgctctctacaaagaggccgagctgcgcctgaagggcagcagcaacaccacggagtgtgttcccgtgcccacctccgagcacgtggccgagatcgtgggcaggcaaggctgcaagattaaggccttgagggccaagaccaacacctacatcaagacaccggtgaggggcgaggaaccagtgttcatggtgacagggcgacgggaggacgtggccacagcccggcgggaaatcatctcagcagcggagcacttctccatgatccgtgcctcccgcaacaagtcaggcgccgcctttggtgtggctcctgctctgcccggccaggtgaccatccgtgtgcgggtgccctaccgcgtggtggggctggtggtgggccccaaaggggcaaccatcaagcgcatccagcagcaaaccaacacatacattatcacaccaagccgtgaccgcgaccccgtgttcgagatcacgggtgccccaggcaacgtggagcgtgcgcgcgaggagatcgagacgcacatcgcggtgcgcactggcaagatcctcgagtacaacaatgaaaacgacttcctggcggggagccccgacgcagcaatcgatagccgctactccgacgcctggcgggtgcaccagcccggctgcaagcccctctccaccttccggcagaacagcctgggctgcatcggcgagtgcggagtggactctggctttgaggccccacgcctgggtgagcagggcggggactttggctacggcgggtacctctttccgggctatggcgtgggcaagcaggatgtgtactacggcgtggccgagactagccccccgctgtgggcgggccaggagaacgccacgcccacctccgtgctcttctcctcctcctcctcctcctcctcttccgccaaggcccgcgctgggcccccgggcgcacaccgctcccctgccacttccgcgggacccgagctggccggactcccgaggcgccccccgggagagccgctccngggcttctctaaacttggtgggggcggcctgcggagccccgcagccggcgggcgggattgcatggtctgctttgagagcgaagtgactgccgcccttgtgccctgcggacacaacctgttctgcatggagtgtgcagtacgcatctgcgagaggacggacccagagtgtcccgtctgccacatcacagccacgcaagccatccgaatattctcctaagccccgtgccccatgcctccggggcccactccactgggcccaccctggacctgttttccactaaagccttttggaaagcggtgatttgaggggcaaggtgcttagagatactcgctcgctggggaaggggggagggaggcagtggtggctggagggtgcgccactttcagagcctctggtcaccctgtcctggaaagattgggagggggccagactgaaaattttactagagttacaactctgatacctcaacacacccttaaatctggaagcagctaagagaaacttttgttttgccagaggtggccactaaggcattctgacgccctctgcccacctcccccgctgtgtgtcactccaccccttcttccgaggagggggtgggtaaaagggagagggagaattaccacctgtatctagaggtgctctttgcaatccctaagccctctggtcctgacctccgactcccagctctgtcttgttccttgtctttgtctttcttcccttccccctgcccctgcccctaccagcccagctttggggacaccatccttctggggagaagtagggggaggaatatttggatggtccctccattcctcttcaggcatctggaggccctctcccccactcctccaaagaaacatctcaaattattgatggaatgtatccccattctcagtgaaaatgtgaggaggggactaatactggggtaaagggtcaaacccccaccttcatcactatgggcattatatttagggagtagttcttgggctggattttctggttgtggaagtgggggcgccagagtagtgtgtctgctatttaaaggagcaggaaagggcgtgaggcaggaggagagactggtggagggaagagctgctcctcccatgcagtgcccgactccctgcacccctctcaacctgacctgaacctttattgaatccttattagcttgaatccttattagcttgaatcctccatgcaaatcatggagtctgtgtcccacctgatgtggttgaggagaagccaggtcttcaaagaggggtcagcctggggcaaagcaggactggggggaggtgggcagcagggcctattctgagaatcacatattgttacaggccttgcaccccctttgctgcttccctcctgctcatttggggctgccaccagctctccaccctcctggttccgctggccgggccaagagaggatggagggatgggagtcccaggagatccttgtaaatagtggggtgggactgttctgagtgatcacccgagcacttaaagctccagagtcccattcttcctggatggagcaggtggaggtgcagaggggatttcctcctctccttcctcctgtcgagaattaacacctctccacagccttcccctccagaacaccagccagggaggggtggggaaggaggtcacagccaagaaaactgccctgtgacgacttccctccttcccgcctatgtgagccatcctgagatgtctgtacaatagaaaccaaaccaaatgggcaccctcggttgccggggggcaggtggggaggggggtgggaagaagggatgtctgtctgtcgtccccctccccctctccactctttacccacaaaggcagaagactgttacactagggggctcagcaaattcaatcccacccttaccaattgagccaaacctagaaacaaacacaaaacacgaatagtgagagacaaaatagaggagagaaagagagcatgagagggagcgagacaggcgaccaacacagaggagagaaaacaaaaatagcaaaaaaaaaaaaaaaaagcagttctttataatttaatattctattttaataaaggcgtttattaccatataaatgtagcaaagaacctgggctaatatgaaaaaaaaagactttttattaggtaatttattatatgaaaaggatattttattttatgataaagtgatccttaaaaaaataaaaaaactttagaaggtttagaatatatgtagggagagaagaagaaaaaaatacatttgtattcagagttaaatcttaaaaaaaaaaagtgtttttaatatatgtttgggtttacgttgcttttttcccccactttttttttggggaggaatgtcatttgcttttcttgggggagcatcccgggggtgaatggtggagagaggagctgggggaacccggtccctcctgggacccttccagtagattggatttcactccatggactcctcctcccctctccccctccccctcaggggagccggcagagccaaacaaagaaagggattaacaagaaaggaagaagctgtaggactaaggactgaggatcctggggtgtcccccaccactttcccctgccctgtcgcaggggcaagtgaggagggggaatccagaattaaggcctagcaggcctataggaaccctcagagatgtgtgagatttaagagatctagatttttttttaaccaaaaacaagagagaaagagaagaaaaagagaaaccgaggggtttaaaagaaaagaatactacaaaataataattattaataataataattcaaatttatttcatataatcctagagagagaaagaaacaattactagttacttagtagacaatattaagatagcttaaagtttagtagcattgagggcccctgggtccagtagaatgtataaaagttgtaaggaaaagataaatagaggagggaagtggctgagtccaccctgagttgcccaatcttcagataccagggttggatcaggttgctagtttaagattgggagcttccagtctgctggggttgattctgagaatccttggatttttaaattgtaggacaaagaaatgaggggttcatttcccagggtcttggaaaggatgcacactgatcatctcaataagacaggggctgggttgggggcagcagaggaggccaagcacattcacctgcacccctagtacctgggcagcccatactccaatgtggtatgtcccctcctggggctcccagctcaaaccctcccatgcctgcttcccccaggcctaactgaggaagtccttcttgaagtgtgacctcggtccacttctctacagattgatttaagagcctgggaagtcattccacaaacagacacacatgcacacacgcttctcaccttcagagcttcaagagcactgaggcgatcagtcccctacccctgttcccatccagctttccacttagctttgacctccatggcagcagtagcagtaacaatctcagtaattgttctttaaagctgactcgttcttcacctacttgcaaagtgctttcttgtctcataaaagttagattccaagaaggacttcccacggagtggagtggaaacactgtccttgaaggcctgggagaaaggcatccccatgggcacagaggctggggaaaggcacagggactttgggtgaccctaaccctgaccctctgctccagttcacctccatctatatgtgttcaggtaggggtcatctactgtaccctggcctgggaacacattgccctccccacacaaaactggagggcttggcttctgcgtgtgagaaatcaacatttttaaagcacttgccttctaccaaccccagcttgcaatcactgggccttcccctcctatccaaggggttggaggggccccttggctctccttttggcaggaggagcctgcttcattacaccaatgactctgccatccccctccctggccctagaccccaaacacatctccctctacccaatttactcttctcgccccacctagggacagattccccctgctctttttgtcctagaaaccccgctagtttgggatggtagcgtctggggtggggagggcttccccttccccactcgagggtgcgggtggggaagggggggtgggtggagacagccctggggcagggaggatggtctctccactgtagaaagtagagtaggattgtggtcagacttaatttgaggcatctagtgaagacacgtacaaatccaccaaggaaaaagatttcaaaagcaaaataaaagcgggaaataaaacagacccaagaataatcaagtcaaagtgatgttgcacaaaatgcagagaaaccaagaagggggagggttaatgtattaaatgtgctattaagaacttaattttattaaaagtactattacttaa

SEQ ID NO: 288867 - DNA, 5833 bp, Homo sapiens
  misc_feature (1055)..(1055): n is a, c, g, or t
gcgcagacgccccagccccccaccgcccccaaaggggcgagcgacgccaagctctgcgctctctacaaagaggccgagctgcgcctgaagggcagcagcaacaccacggagtgtgttcccgtgcccacctccgagcacgtggccgagatcgtgggcaggcaaggctgcaagattaaggccttgagggccaagaccaacacctacatcaagacaccggtgaggggcgaggaaccagtgttcatggtgacagggcgacgggaggacgtggccacagcccggcgggaaatcatctcagcagcggagcacttctccatgatccgtgcctcccgcaacaagtcaggcgccgcctttggtgtggctcctgctctgcccggccaggtgaccatccgtgtgcgggtgccctaccgcgtggtggggctggtggtgggccccaaaggggcaaccatcaagcgcatccagcagcaaaccaacacatacattatcacaccaagccgtgaccgcgaccccgtgttcgagatcacgggtgccccaggcaacgtggagcgtgcgcgcgaggagatcgagacgcacatcgcggtgcgcactggcaagatcctcgagtacaacaatgaaaacgacttcctggcggggagccccgacgcagcaatcgatagccgctactccgacgcctggcgggtgcaccagcccggctgcaagcccctctccaccttccggcagaacagcctgggctgcatcggcgagtgcggagtggactctggctttgaggccccacgcctgggtgagcagggcggggactttggctacggcgggtacctctttccgggctatggcgtgggcaagcaggatgtgtactacggcgtggccgagactagccccccgctgtgggcgggccaggagaacgccacgcccacctccgtgctcttctcctcctcctcctcctcctcctcttccgccaaggcccgcgctgggcccccgggcgcacaccgctcccctgccacttccgcgggacccgagctggccggactcccgaggcgccccccgggagagccgctccngggcttctctaaacttggtgggggcggcctgcggagccccgcagccggcgggcgggattgcatggtctgctttgagagcgaagtgactgccgcccttgtgccctgcggacacaacctgttctgcatggagtgtgcagtacgcatctgcgagaggacggacccagagtgtcccgtctgccacatcacagccacgcaagccatccgaatattctcctaagccccgtgccccatgcctccggggcccactccactgggcccaccctggacctgttttccactaaagccttttggaaagcggtgatttgaggggcaaggtgcttagagatactcgctcgctggggaaggggggagggaggcagtggtggctggagggtgcgccactttcagagcctctggtcaccctgtcctggaaagattgggagggggccagactgaaaattttactagagttacaactctgatacctcaacacacccttaaatctggaagcagctaagagaaacttttgttttgccagaggtggccactaaggcattctgacgccctctgcccacctcccccgctgtgtgtcactccaccccttcttccgaggagggggtgggtaaaagggagagggagaattaccacctgtatctagaggtgctctttgcaatccctaagccctctggtcctgacctccgacctcctaacatgaccctttacctcccaccccacccccatatcctgtttgggaaactgtcaccagtttccagcagtgtaagggagttggagtcctatcagaagttgcatagatcttctaggggttggggagagaagcatgtcaatcgtttctgtggctgaaaggctcagaagccatctgtccccacaaagctgggctagaggaatctggagaggagtcctcctctctgcccctgtcccctgcagtgtttcccttcactctctccgcctatcttcccttcctttgggatcttccctttcctcaactctttcctttccctccagctctttgctttgctttcttttggtggctgtcactcccagctctgtcttgttccttgtctttgtctttcttcccttccccctgcccctgcccctaccagcccagctttggggacaccatccttctggggagaagtagggggaggaatatttggatggtccctccattcctcttcaggcatctggaggccctctcccccactcctccaaagaaacatctcaaattattgatggaatgtatccccattctcagtgaaaatgtgaggaggggactaatactggggtaaagggtcaaacccccaccttcatcactatgggcattatatttagggagtagttcttgggctggattttctggttgtggaagtgggggcgccagagtagtgtgtctgctatttaaaggagcaggaaagggcgtgaggcaggaggagagactggtggagggaagagctgctcctcccatgcagtgcccgactccctgcacccctctcaacctgacctgaacctttattgaatccttattagcttgaatccttattagcttgaatcctccatgcaaatcatggagtctgtgtcccacctgatgtggttgaggagaagccaggtcttcaaagaggggtcagcctggggcaaagcaggactggggggaggtgggcagcagggcctattctgagaatcacatattgttacaggccttgcaccccctttgctgcttccctcctgctcatttggggctgccaccagctctccaccctcctggttccgctggccgggccaagagaggatggagggatgggagtcccaggagatccttgtaaatagtggggtgggactgttctgagtgatcacccgagcacttaaagctccagagtcccattcttcctggatggagcaggtggaggtgcagaggggatttcctcctctccttcctcctgtcgagaattaacacctctccacagccttcccctccagaacaccagccagggaggggtggggaaggaggtcacagccaagaaaactgccctgtgacgacttccctccttcccgcctatgtgagccatcctgagatgtctgtacaatagaaaccaaaccaaatgggcaccctcggttgccggggggcaggtggggaggggggtgggaagaagggatgtctgtctgtcgtccccctccccctctccactctttacccacaaaggcagaagactgttacactagggggctcagcaaattcaatcccacccttaccaattgagccaaacctagaaacaaacacaaaacacgaatagtgagagacaaaatagaggagagaaagagagcatgagagggagcgagacaggcgaccaacacagaggagagaaaacaaaaatagcaaaaaaaaaaaaaaaaagcagttctttataatttaatattctattttaataaaggcgtttattaccatataaatgtagcaaagaacctgggctaatatgaaaaaaaaagactttttattaggtaatttattatatgaaaaggatattttattttatgataaagtgatccttaaaaaaataaaaaaactttagaaggtttagaatatatgtagggagagaagaagaaaaaaatacatttgtattcagagttaaatcttaaaaaaaaaaagtgtttttaatatatgtttgggtttacgttgcttttttcccccactttttttttggggaggaatgtcatttgcttttcttgggggagcatcccgggggtgaatggtggagagaggagctgggggaacccggtccctcctgggacccttccagtagattggatttcactccatggactcctcctcccctctccccctccccctcaggggagccggcagagccaaacaaagaaagggattaacaagaaaggaagaagctgtaggactaaggactgaggatcctggggtgtcccccaccactttcccctgccctgtcgcaggggcaagtgaggagggggaatccagaattaaggcctagcaggcctataggaaccctcagagatgtgtgagatttaagagatctagatttttttttaaccaaaaacaagagagaaagagaagaaaaagagaaaccgaggggtttaaaagaaaagaatactacaaaataataattattaataataataattcaaatttatttcatataatcctagagagagaaagaaacaattactagttacttagtagacaatattaagatagcttaaagtttagtagcattgagggcccctgggtccagtagaatgtataaaagttgtaaggaaaagataaatagaggagggaagtggctgagtccaccctgagttgcccaatcttcagataccagggttggatcaggttgctagtttaagattgggagcttccagtctgctggggttgattctgagaatccttggatttttaaattgtaggacaaagaaatgaggggttcatttcccagggtcttggaaaggatgcacactgatcatctcaataagacaggggctgggttgggggcagcagaggaggccaagcacattcacctgcacccctagtacctgggcagcccatactccaatgtggtatgtcccctcctggggctcccagctcaaaccctcccatgcctgcttcccccaggcctaactgaggaagtccttcttgaagtgtgacctcggtccacttctctacagattgatttaagagcctgggaagtcattccacaaacagacacacatgcacacacgcttctcaccttcagagcttcaagagcactgaggcgatcagtcccctacccctgttcccatccagctttccacttagctttgacctccatggcagcagtagcagtaacaatctcagtaattgttctttaaagctgactcgttcttcacctacttgcaaagtgctttcttgtctcataaaagttagattccaagaaggacttcccacggagtggagtggaaacactgtccttgaaggcctgggagaaaggcatccccatgggcacagaggctggggaaaggcacagggactttgggtgaccctaaccctgaccctctgctccagttcacctccatctatatgtgttcaggtaggggtcatctactgtaccctggcctgggaacacattgccctccccacacaaaactggagggcttggcttctgcgtgtgagaaatcaacatttttaaagcacttgccttctaccaaccccagcttgcaatcactgggccttcccctcctatccaaggggttggaggggccccttggctctccttttggcaggaggagcctgcttcattacaccaatgactctgccatccccctccctggccctagaccccaaacacatctccctctacccaatttactcttctcgccccacctagggacagattccccctgctctttttgtcctagaaaccccgctagtttgggatggtagcgtctggggtggggagggcttccccttccccactcgagggtgcgggtggggaagggggggtgggtggagacagccctggggcagggaggatggtctctccactgtagaaagtagagtaggattgtggtcagacttaatttgaggcatctagtgaagacacgtacaaatccaccaaggaaaaagatttcaaaagcaaaataaaagcgggaaataaaacagacccaagaataatcaagtcaaagtgatgttgcacaaaatgcagagaaaccaagaagggggagggttaatgtattaaatgtgctattaagaacttaattttattaaaagtactattacttaa

SEQ ID NO: 288868 - DNA, 556 bp, Homo sapiens
ttgagacagagtttcgctcctgttgcccaggctggagtgcaatggtgcgatctcggctcactgcaacctctgcctcccgggttgaagagattctcctgccttatcctccctagtagctgggattacaggtttgctgaaatgaaaatgcgaccttttgcaagggacatgcaagatgaaaccttctatttccttggcagcccagaggaatcatgtgcacgataccttaatttgctgatgtcttttctctgagtggggcatgagcatcagacaagctaatgcaaaagccggaagttctaactggatatactgcctggcgactccgatcaggtcaagatcacctgagactggacatcttcgagagagaacattaattagttaataatctggcagattcactagattatattggcctttctagctttccatagtcatctgcctgtccaagttttcaataattttaaacactaaagtgctggtgcatgacatatgcttaggaatgagtaacacaagtctttgacagcactctacacagaataaaagaatttacccatgggaa

SEQ ID NO: 288869 - DNA, 470 bp, Homo sapiens
ataaaactaatatttataaataaacacaaacacaaaatcttagtttgctgaaatgaaaatgcgaccttttgcaagggacatgcaagatgaaaccttctatttccttggcagcccagaggaatcatgtgcacgataccttaatttgctgatgtcttttctctgagtggggcatgagcatcagacaagctaatgcaaaagccggaagttctaactggatatactgcctggcgactccgatcaggtcaagatcacctgagactggacatcttcgagagagaacattaattagttaataatctggcagattcactagattatattggcctttctagctttccatagtcatctgcctgtccaagttttcaataattttaaacactaaagtgctggtgcatgacatatgcttaggaatgagtaacacaagtctttgacagcactctacacagaataaaagaatttacccatgggaa

SEQ ID NO: 288870 - DNA, 781 bp, Homo sapiens
ttgagacagagtttcgctcctgttgcccaggctggagtgcaatggtgcgatctcggctcactgcaacctctgcctcccgggttgaagagattctcctgccttatcctccctagtagctgggattacaggtttgctgaaatgaaaatgcgaccttttgcaagggacatgcaagatgaaaccttctatttccttggcagcccagaggaatcatgtgcacgataccttaatttgctgatgtcttttctctgagtggggcatgagcatcagacaagctaatgcaaaagccggaagttctaactggatatactgcctggcgactccgatcaggtcaagatcacctgagactggacatcttcgagagagaacattaattagttaataatctggcagattcactagattatattggcctttctagctttccatagtcatctgcctgtccaagttttcaataattttaaacactaaagtgctggtgcatgacatatgcttaggaatgagtaacacaagtctttgacagcactctacacagaataaaagaatttacccatgggaacacggactactgtttgctatcatgattatgtctgaaagcctacagatgcctaaagataggcttctaaattctcagaagactcaaaaccttttttttttttttttttgagaaacagtctagctctgtcacccaggctggagtacgatggcatgatcttagctcactgcaaccaacacctcccgggttcaagtgattctccctcctcagcttcctgagtagctggga

SEQ ID NO: 288871 - DNA, 507 bp, Homo sapiens
ataaaactaatatttataaataaacacaaacacaaaatcttagtttgctgaaatgaaaatgcgaccttttgcaagggacatgcaagatgaaaccttctatttccttggcagcccagaggaatcatgtgcacgataccttaatttgctgatgtcttttctctgagtggggcatgagcatcagacaagctaatgcaaaagccggaagttctaactggatatactgcctggcgactccgatcaggtcaagatcacctgagactggacatcttcgagagagaacattaattagttaataatctggcagattcactagattatattggcctttctagctttccatagtcatctgcctgtccaagttttcaataattttaaacactaaagtgctggtgcatgacatatgcttaggaatgagtaacacaagtctttgacagcactctacacagaataaaagaatttacccatgggaaaaacccaacaaaaaacccgcctccctggcctcaccgc

SEQ ID NO: 288872 - DNA, 655 bp, Homo sapiens
ttgcctcaagacctgaaaatgaatgagcatcatcccttaaagtgttaacacggaagcattaataaaccaagaacaatgagataaatcctgtttgcacatcatttccactgcgtcactcttccttgtctacattctgaagaaatcgcactgaaaacatgtctaaatattcatactctttttgagcttaaatttcagtggccaatttcatactatattggaaagttctgtctaataagagcctgacctgtgtatcctgtatagattttcgccagcagagggtattgtcctgagtgccagcattttgggggatggtgaactgtatcagctgaggagctatagtctatcagttaggagcattattcctttgtcttggatatacttatgttcaaaagcaatttcttctccctcaagaactcattaaatgtattcaccaaattccctaaggttggcatatttcatgttatctggattaaaaatttaggactcagtctcccacatcaattgtctcacataggcagagtaatttttgaaggacggtgaaattaataaataattttagtgaattggggccctaaagtaacaaagaatctggtccatgatgtttaggaatgaaaactataaactactgctggatgaatgacttcacgaatttaaa

SEQ ID NO: 288873 - DNA, 1573 bp, Homo sapiens
tgttttgtttccggtggttgctcctccgggatgtctctttgtgggattgttgttcccaccgtgtctcgttttccccccgggggctttttttatatgtgtgtgggaattcccagtcctcttttttctctgtccccgtttttccctgggtacccctcgtagtgcccctgtttcccttgtgccgctcctggtggcccgcgcggcgctcccacaaccatgtgtttctcttgagagactcttttcgcgggggccgcggggcggccccacacacgtgttgtgttttttttttttttttttttcttctagtctttggtgttcaatattctggtttcaatcatagatgagggaacattaaagttggatgaattctgtgggcttatctactccacactgccttacttcacaaggaggccagtcaggagaaaccaagcactgttttccatacctacacagctccaatgtataagccagtctttaagatattcaaaaaggctatttatgtatgctaatttgacacagggagtgagagtttacaaagagctattaaacacatttgtagccatcaggaactatttctttggatcataaacctgcattgctttcttttccttcccctttgtttcttttcttttcccttttttaaaatttgtttttctccctcccttatttacctatttctgtacttaaagactgtcctggatctgttgcttgattatatatcttaaacacacaaactataaaatggctgtgtatacatgaaactcacagcttgcattataatgcagaggcttaaatttgccatcacatggatgtttttcatatcatactttaaaaaaacacatggatagtttaccctaataaatatttgggggtaccttgagaaatgtaaatggaacagctccatttcaacttctcatataaagagttcagaatattctgtttatgggcttagtagctttgtttaatatagtgattgtgtatttcagaccaagaacaatgagataaatcctgtttgcacatcatttccactgcgtcactcttccttgtctacattctgaagaaatcgcactgaaaacatgtctaaatattcatactctttttgagcttaaatttcagtggccaatttcatactatattggaaagttctgtctaataagagcctgacctgtgtatcctgtatagattttcgccagcagagggtattgtcctgagtgccagcattttgggggatggtgaactgtatcagctgaggagctatagtctatcagttaggagcattattcctttgtcttggatatacttatgttcaaaagcaatttcttctccctcaagaactcattaaatgtattcaccaaattccctaaggttggcatatttcatgttatctggattaaaaatttaggactcagtctcccacatcaattgtctcacataggcagagtaatttttgaaggacggtgaaattaataaataattttagtgaattggggccctaaagtaacaaagaatctggtccatgatgtttaggaatgaaaactataaactactgctggatgaatgacttcacgaatttaaa

SEQ ID NO: 288874 - DNA, 1302 bp, Homo sapiens
gtgatttttctcaggctgttttgtcattttaaaatccagtggtagatgtagcttagcgacggtagttttttgttttggctatactaagacttggaaattattctctccagtgtcagcgaatccagaagggtatcagattaaacaccgaattcagccactggacttttaaaagtacttaagatggtttatctcgggttttttcttcagttaacaaaatcataaatatggtgccttataacatgaaaggaaaattagttgtgtatttcacgacgaaagcgacggaccaaaagaaatttcctgccccaagaagcatgggatccaggaaggggcgcgtagatgcttaacggtctcttcggaaatcctgcaaatagaaagataattctagatccggaatacctgtatctggtggaaaccatggatttctacaagctcgaattattcctcattgtatagcctgctttgtaaactagtttacaatttgcaggctgatcttaagatttttttatatctaattgctgctgccttcattttaggttcagcagttacttttaactaccttaatttattgccagaaggtatgagcctaacattctgatgagtccagaaaactacgttttgtcagtagcaatacactaggaagtaaaatatatttagaatttaaacattgtgtgccagtggtcctcgcgcttgactgcacatcagttacttgaagagccacacctcagatcaatgcagtcagaacctgggaagtaggtcccagacatcaggacctttttaaagctccccaagtgattctacgttccccaagtttgaggaccacttttctgtgcattggcttgcacaatttgaaaataatgcttttcctgagctggatcccagtgttgccttaacagggtgtctgtcgtgccgcagtagagcactgctgcttcctccaaccccaaaatttatgttcctaagtaagtcaggtccctaagccccgtcccaagaagtgacacaagtggccaacatccacactgtaggcttgcaggctacccgccctgagatttggtaaagaacactgccttgttccccatcagtaaacaaggttacctacctcaggaggctgcttgtgagagagcaaatgcagtatcttcagaatgatttatttttttaattaattgtaaagacttgtgccattggctgctctttctagtcccctaaatttctgttctagttttaaatttctctagaacttgcaatagttgggggttttataatgatgttttacaatgtttatttcttaaataaaaacttaaaaattca

SEQ ID NO: 288875 - DNA, 2253 bp, Homo sapiens
gtgatttttctcaggctgttttgtcattttaaaatccagtggtagatgtagcttagcgacggtagttttttgttttggctatactaagacttggaaattattctctccagtgtcagcgaatccagaagggtatcagattaaacaccgaattcagccactggacttttaaaagtacttaagatggtttatctcgggttttttcttcagttaacaaaatcataaatatggtgccttataacatgaaaggaaaattagttgtgtatttcacgacgaaagcgacggaccaaaagaaatttcctgccccaagaagcatgggatccaggaaggggcgcgtagatgcttaacggtctcttcggaaatcctgcaaatagaaagataattctagatccggaatacctgtatctggtggaaaccatggatttctacaagctcgaattattcctcattgtatagcctgctttgtaaactagtttacaatttgcaggctgatcttaagatttttttatatctaattgctgctgccttcattttaggttcagcagttacttttaactaccttaatttattgccagaaggtatgagcctaacattctgatgagtccagaaaactacgttttgtcagtagcaatacactaggaagtaaaatatatttagaatttaaacattgtgtgccagtggtcctcgcgcttgactgcacatcagttacttgaagagccacacctcagatcaatgcagtcagaacctgggaagtaggtcccagacatcaggacctttttaaagctccccaagtgattctacgttccccaagtttgaggaccacttttctgtgcattggcttgcacaatttgaaaataatgcttttcctgagctggatcccagtgttgccttaacagggtgtctgtcgtgccgcagtagagcactgctgcttcctccaaccccaaaatttatgttcctaagtaagtcaggtccctaagccccgtcccaagaagtgacacaagtggccaacatccacactgtaggcttgcaggctacccgccctgagatttggtaaagaacactgccttgttccccatcagtaaacaaggttacctacctcaggaggctgcttgtgagagagcaaatgcagtatcttcagaatgatttatttttttaattaattgtaaagacttgtgccattggctgctctttctagtcccctaaatttctgttctagttttaaatttctctagaacttgcaatagttgggggttttataatgatgttttacaatgtttatttcttaaataaaaacttaaaaattcaacatttctcagctggtggctcacacctgtaatcccagcattttgggaggccaaggcgggaggatcacttgaggccaggagttcaagaccagcctgggcaacacagttaaaccccatcgccacagaaaatcttcaaaaaatttgccagatatggtggcacacaactgtgatcccagctacttggggtggggctgaggtgggaagatcacttgagcccaggaggttgaggctgcagtgaactgtgatcacaccactgcaccacagcctaggcaacagcgagaccttgtctcaaaaattttttctcaaatcaaacatcattgaaaatctactttttataagcttcaaatcacaacatctagtatgtatgctgacagtgatgtttttaaatgccatatatatttaataagtataatgtagaggtttattgtttaaatgaattcactctcaaaatgtgatctgtcaagtccagtagagcttcaaggtaaaatgaaaatttttaaatgtgatctggttatctgcttactgagatactatgtttctaaagttaaagcccaaaataatgaaaatttttccactagaatctcagggaaaaaaagtctaatcttgatatgggtttggtctctggatccggttttagcttcatgaaatttgattacagtttctctctctttaagctataccagttgggggtgagtgaagaaatacccataacctaaagcaatcttgagcctcctaatagcatgtttatggtggagcgctgattaaataagctgtaatttcaaagttaaaaaaaaaatagtctctagattctaacactgaaaagcagtgtatatggctgacattttctcactccacagaaatcaattagcttttgctgttttttacattcatagagaaccagttaaattttcatatcctgttaaactatatcagtatgccttttctaagcaac

SEQ ID NO: 288876 - DNA, 2151 bp, Homo sapiens
gtgatttttctcaggctgttttgtcattttaaaatccagtggtagatgtagcttagcgacggtagttttttgttttggctatactaagacttggaaattattctctccagtgtcagcgaatccagaagggtatcagattaaacaccgaattcagccactggacttttaaaagtacttaagatggtttatctcgggttttttcttcagttaacaaaatcataaatatggtgccttataacatgaaaggaaaattagttgtgtatttcacgacgaaagcgacggaccaaaagaaatttcctgccccaagaagcatgggatccaggaaggggcgcgtagatgcttaacggtctcttcggaaatcctgcaaatagaaagataattctagatccggaatacctgtatctggtggaaaccatggatttctacaagctcgaattattcctcattgtatagcctgctttgtaaactagtttacaatttgcaggctgatcttaagatttttttatatctaattgctgctgccttcattttaggttcagcagttacttttaactaccttaatttattgccagaaggtatgagcctaacattctgatgagtccagaaaactacgttttgtcagtagcaatacactaggaagtaaaatatatttagaatttaaacattgtgtgccagtggtcctcgcgcttgactgcacatcagttacttgaagagccacttttctgtgcattggcttgcacaatttgaaaataatgcttttcctgagctggatcccagtgttgccttaacagggtgtctgtcgtgccgcagtagagcactgctgcttcctccaaccccaaaatttatgttcctaagtaagtcaggtccctaagccccgtcccaagaagtgacacaagtggccaacatccacactgtaggcttgcaggctacccgccctgagatttggtaaagaacactgccttgttccccatcagtaaacaaggttacctacctcaggaggctgcttgtgagagagcaaatgcagtatcttcagaatgatttatttttttaattaattgtaaagacttgtgccattggctgctctttctagtcccctaaatttctgttctagttttaaatttctctagaacttgcaatagttgggggttttataatgatgttttacaatgtttatttcttaaataaaaacttaaaaattcaacatttctcagctggtggctcacacctgtaatcccagcattttgggaggccaaggcgggaggatcacttgaggccaggagttcaagaccagcctgggcaacacagttaaaccccatcgccacagaaaatcttcaaaaaatttgccagatatggtggcacacaactgtgatcccagctacttggggtggggctgaggtgggaagatcacttgagcccaggaggttgaggctgcagtgaactgtgatcacaccactgcaccacagcctaggcaacagcgagaccttgtctcaaaaattttttctcaaatcaaacatcattgaaaatctactttttataagcttcaaatcacaacatctagtatgtatgctgacagtgatgtttttaaatgccatatatatttaataagtataatgtagaggtttattgtttaaatgaattcactctcaaaatgtgatctgtcaagtccagtagagcttcaaggtaaaatgaaaatttttaaatgtgatctggttatctgcttactgagatactatgtttctaaagttaaagcccaaaataatgaaaatttttccactagaatctcagggaaaaaaagtctaatcttgatatgggtttggtctctggatccggttttagcttcatgaaatttgattacagtttctctctctttaagctataccagttgggggtgagtgaagaaatacccataacctaaagcaatcttgagcctcctaatagcatgtttatggtggagcgctgattaaataagctgtaatttcaaagttaaaaaaaaaatagtctctagattctaacactgaaaagcagtgtatatggctgacattttctcactccacagaaatcaattagcttttgctgttttttacattcatagagaaccagttaaattttcatatcctgttaaactatatcagtatgccttttctaagcaac

SEQ ID NO: 288877 - DNA, 866 bp, Homo sapiens
gcgccacaattacttccttgaggctcgctgcaaaagttaatgaagaagaggagtttattccacaagtaaaagacttcacaaagcactatggctctgactattccccgaatgagctgctgaggatggagctggctattctggacagactgcactgggacctctatattgggacgccgctggacttcttgactatagtgagtaaggaggtgtttacagagtctaccctaaactcgtttgtgcctttggaacagctgtttacaacatgggatggcaaagcacaggcgtgcacacgcccttgcacatgcaccacagtgaggtgacgcacaaggctcatgacatacggaagagtgaaaaggtatcttaaatccaacacagttccaccagactcccacttctaaaggacattaaattaactttacaaagatttttagacggcactattatggtgagtttctcttttaaatacacactgcaaaaatatttaactttccattctatgaatactgtacataaatatctgtctgcttttgctacactttacacacattcacttagctgtctttattcacctacacacaatccttattgaagctttagaccatattgatctggcacttaaaaaaatatcatacattagtttgtatttgttttagttgggggaatgatggtcatccttaaggatatgattctgttagtaaggcaaaattatgcaatgtggaaatctcatggggttttggtttgttatgaagcatgaagattaaattactaaagactgtttcattacgaaaactggccaccgttgccaagttgcagagtttcgtcttatgataagcagatacaagtaacttttctgctaccttggtctt

SEQ ID NO: 288878 - DNA, 660 bp, Homo sapiens
gcgccacaattacttccttgaggctcgctgcaaaagttaatgaagaagaggagtttattccacaagtaaaagacttcacaaagcactatggctctgactattccccgaatgagctgctgaggatggagctggctattctggacagactgcactgggacctctatattgggacgccgctggacttcttgactataaatggaaacattgtcatctaggtactttccgctcataacgatgatgtcacaaagcagacttttttttttttttggtcccggagtggaagctcagcttggccacaggatgggcattaagcctcaagccccttacggagccatggataggaatgaaaagggttgggcaacatttgatgttccctgatggaaatttaaattgtttgcacttttgatcattgatataggaaaagtatggcgttttctgttctaacattaaaaaccatggtctccagttccatgccctggtggtcctgagctggccccatgtgttggagctgctgcctcagaggaatccttccctccacgtcgcatccctgaccaggcagctgcagcactgtatggcgggccaccagctgctgcagttcaagggctccacactggccttggtcatcatcaccttagagctggagaggctcatgcccggctg

SEQ ID NO: 288879 - DNA, 740 bp, Homo sapiens
  misc_feature (24)..(24): n is a, c, g, or t
  misc_feature (30)..(30): n is a, c, g, or t
  misc_feature (39)..(39): n is a, c, g, or t
  misc_feature (65)..(65): n is a, c, g, or t
  misc_feature (67)..(68): n is a, c, g, or t
  misc_feature (70)..(70): n is a, c, g, or t
ggcaccatgctgcgggtggaaaanaccccntaccacccnccctacaaaaaacccccccctacaananngnagatgtgattcccctgacagaaaccaaggaccggcctcaggagatgtttgtgcgtatccagcggtacagtgggaaacagaccttctacgtcaccctgcgctatggacgcatcctggacagagagcgtttcacacaggtgtttggggtacatcagatgctcaagtgaacaactgggacctggacctctgggtaaccctgggtcgcctggattaacaggaaggctgagggtgtgggcaaggctgaagaaaggggactgggtacttggagactttgcctgggcccctgggaacatgtgttttgtggtgaataaattcacaaggcaagagctggtgtacaggtttaggaaaaaggctctaagcaagttcttacagcacttgtttgtgacattcagtcagataatggccagaagtttttgttaagagccagttcttagaagaacctatgccaaggtcacccatagagtccattggtgtgaaagagaaaggcaaagaggtgtggcgggggagcgtaagatttggagtcagaagtctcagttctgtcatttgtcctggagcaggttattgagtctctttgaatcttggttttcacatctgtaaaatggaaagtcctgcttgtttcatgggatgggtgtgggaataaacaataaatgtcaaacgtgtggcagactcaa

SEQ ID NO: 288880 - DNA, 1180 bp, Homo sapiens
gtgggatttacttccggcagcaggtggtggggccatggctgcccttctccgagctgtgcgtaggtttcggggaaaagctgtgtgggaaaggcctctccatgggctgtggtgctgcagtgggcaggaggatcctaagaggtgggtgggcagcagttcacccatctcgaaggagaaactaccaaacgcagagactgagaaattctggatgttttaccgttttgatgccatcagaaccttcgggttcctgtcacgactgaagttggcacagactgccctgacagtggtagctttgccaccaggctattacttgtactcccagggcctcctcactctcaacaccgtgtgcctcatgagtgggatatcgggctttgccctgaccatgctgtgctggatgagctatttcttacggagactggttggtatcctgtatctgaatgagtctggcaccatgctgcgggtggcccatctgaacttctggggctggcggcaggacacatactgtcccatggcagatgtgattcccctgacagaaaccaaggaccggcctcaggagatgtttgtgcgtatccagcggtacagtgggaaacagaccttctacgtcaccctgcgctatggacgcatcctggacagagagcgtttcacacaggtgtttggggtacatcagatgctcaagtgaacaactgggacctggacctctgggtaaccctgggtcgcctggattaacaggaaggctgagggtgtgggcaaggctgaagaaaggggactgggtacttggagactttgcctgggcccctgggaacatgtgttttgtggtgaataaattcacaaggcaagagctggtgtacaggtttaggaaaaaggctctaagcaagttcttacagcacttgtttgtgacattcagtcagataatggccagaagtttttgttaagagccagttcttagaagaacctatgccaaggtcacccatagagtccattggtgtgaaagagaaaggcaaagaggtgtggcgggggagcgtaagatttggagtcagaagtctcagttctgtcatttgtcctggagcaggttattgagtctctttgaatcttggttttcacatctgtaaaatggaaagtcctgcttgtttcatgggatgggtgtgggaataaacaataaatgtcaaacgtgtggcagactcaa

SEQ ID NO: 288881 - DNA, 672 bp, Homo sapiens
  misc_feature (11)..(11): n is a, c, g, or t
gttagaggacnccacgccgaggcacaaacgcagagactgagaaattctggatgttttaccgttttgatgccatcagaaccttcgggttcctgtcacgactgaagttggcacagactgccctgacagtggtagctttgccaccaggctattacttgtactcccagggcctcctcactctcaacaccgtgtgcctcatgagtgggatatcgggctttgccctgaccatgctgtgctggatgagctatttcttacggagactggttggtatcctgtatctgaatgagtctggcaccatgctgcgggtggcccatctgaacttctggggctggcggcaggacacatactgtcccatggcagatgtgattcccctgacagaaaccaaggaccggcctcaggagatgtttgtgcgtatccagcggtacagtgggaaacagaccttctacgtcaccctgcgctatggacgcatcctggacagagagcgtttcacacaggtgtttggggtacatcagatgctcaagtgaacaactgggacctggacctctgggtaaccctgggtcgcctggattaacaggaaggctgagggtgtggactttcggcgtgtgcagactacagatgtttttctttcattgtttgtgtgtgtgtgcgtgtgtgtgcatctgtgtgtggtgactc

SEQ ID NO: 288882 - DNA, 1534 bp, Homo sapiens
gtgggatttacttccggcagcaggtggtggggccatggctgcccttctccgagctgtgcgtaggtttcggggaaaagctgtgtgggaaaggcctctccatgggctgtggtgctgcagtgggcaggaggatcctaagaggtgggtgggcagcagttcacccatctcgaaggagaaactaccaaacgcagagactgagaaattctggatgttttaccgttttgatgccatcagaaccttcgggttcctgtcacgactgaagttggcacagactgccctgacagtggtagctttgccaccaggctattacttgtactcccagggcctcctcactctcaacaccgtgtgcctcatgagtgggatatcgggctttgccctgaccatgctgtgctggatgagctatttcttacggagactggttggtatcctgtatctgaatgagtctggcaccatgctgcgggtggcccatctgaacttctggggctggcggcaggacacatactgtcccatggcagatgtgattcccctgacagaaaccaaggaccggcctcaggagatgtttgtgcgtatccagcggtacagtgggaaacagaccttctacgtcaccctgcgctatggacgcatcctggacagagagcgtttcacacaggtgtttggggtacatcagatgctcaagtgaacaactgggacctggacctctgggtaaccctgggtcgcctggattaacaggaaggctgagggtgtgggcaaggctgaagaaaggggactgggtacttggagactttgcctgggcccctgggaacatgtgttttgtggtgaataaattcacaaggcaagagctggtgtacaggtttaggaaaaaggctctaagcaagttcttacagcacttgtttgtgacattcagtcagataatggccagaagtttttgttaagagccagttcttagaagaacctatgccaaggtcacccatagagtccattggtgtgaaagagaaaggcaaagaggtgtggcgggggagcgtaagatttggagtcagaagtctcagttctgtcatttgtcctggagcaggttattgagtctctttgaatcttggttttcacatctgtaaaatggaaagtcctgcttgtttcatgggatgggtgtgggaataaacaataaatgtcaaacgtgtggcagactcaaaaaaaaaaaaaaaaaaaaaaaaaaaaaaaaaagggggggggggccaaaagagaaccccgcgaggggggcccacaggatataagagagagctaaccgaagattgcgggaacacgagggtcggaccacatagagggagaccgataaaagaggcaaagcaccaggccagccgcgttaccacaaccgccgagtaccggggggagaaacgagggcgcacacgggggacccctcagggaggagggcacccctaaacgcgcggggggagggcgcccatcgtggggacagaactggcccaacggaaacataaacaggccccagaggggaaactaagagaaactggaagggagacaaacggga

SEQ ID NO: 288883 - DNA, 837 bp, Homo sapiens
gtgggatttacttccggcagcaggtggtggggccatggctgcccttctccgagctgtgcgtaggtttcggggaaaagctgtgtgggaaaggcctctccatgggctgtggtgctgcagtgggcaggaggatcctaagaggtgggtgggcagcagttcacccatctcgaaggagaaactaccaaacgcagagactgagaaattctggatgttttaccgttttgatgccatcagaaccttcgggttcctgtcacgactgaagttggcacagactgccctgacagtggtagctttgccaccaggctattacttgtactcccagggcctcctcactctcaacaccgtgtgcctcatgagtgggatatcgggctttgccctgaccatgctgtgctggatgagctatttcttacggagactggttggtatcctgtatctgaatgagtctggcaccatgctgcgggtggcccatctgaacttctggggctggcggcaggacacatactgtcccatggcagatgtgattcccctgacagaaaccaaggaccggcctcaggagatgtttgtgcgtatccagcggtacagtgggaaacagaccttctacgtcaccctgcgctatggacgcatcctggacagagagcgtttcacacaggtgtttggggtacatcagatgctcaagtgaacaactgggacctggacctctgggtaaccctgggtcgcctggattaacaggaaggctgagggtgtgggcaaggctgaagaaaggggactgggtacttggagactttgcctgggccctctgacatctcggacgaagctagggatacctctagagtcaactac

SEQ ID NO: 288884 - DNA, 721 bp, Homo sapiens
ttgtttcatgggatgggtgtgggaataaacaataaatgtcaaacgtgtggcagactcaacagcctacagcagatattattaagcatttggtcagaggttttagcagggagaaaggcttcgagcagtcagcagggacttccagagccctgtgctgtgcccctcacatatccagcggcagaagggtctgtcaggatgttaactacacattgacgagcagatgtcgtccaggtaggcacgaaaccccagttgagatttgttcaccacccagaggtctagaggctcttgctttggatggccctgcagtgtaataaagccaaatgcaccggatgctggtacgttattttataaacttaagccagttatatacattgccccacataattaataatatatgttcattatacaatttgtaacacagtaaagaggaaggaaggcatgatctttattattttgccactcgaaagtcaataagaatgttttatcgctgggggcggtggctcacacctgtaatcccagcacgttgggaggtcaaggtggcggatcacgaggtcaggagatcgaggccatcctcgctaacagggtgaaaccgtgtctccactaaaaaatacaaaaaaattagctgggcgtggtggcaggtgcctgtagtcccagctactcgggaggctgaggcaggacaatggtgtgaacctgggaggcggagtttgcagtgagccgagatcac

SEQ ID NO: 288885 - DNA, 4361 bp, Homo sapiens
  misc_feature (30)..(30): n is a, c, g, or t
  misc_feature (63)..(63): n is a, c, g, or t
  misc_feature (79)..(79): n is a, c, g, or t
  misc_feature (190)..(190): n is a, c, g, or t
ggtaattttcaacaaacccaggggtaaaangccatcagtcattatggaaatggtcccctggangctacagataaacttnaagtaagtttgcagctttgggtgggacacaaatggcatgtgctgacatcctcatactttattaggggaacatattctggctctgggctgaagccaactcatttcatcatcnatcattgttgtcataatcatcgtcggtcatcatcatagcaaccatttcctgaacgtttattgtgttgcatacactggtccagaaccttaaggcagatgatctatttcatcttctgaagaaatctgagacctgagatgctcccatgagttttgaatatgctctgctccttacagcaaagacaccatttttaaaagtaccattcttttgactttgctgttcccaaggcttctgtgatattccggcccctccgtttaaaagccatcagatttgagagcaataagtcttcaaaaccgggaatttacattgtttttcagctgaccgacttccaggaaaaggactcaaccgcatctacccaaataccgtggcactgcttgcgctctttgccaccggatactccccttccaatgagactttctgattgtgtctaccaactctcctattaggaaacccgtgggttgcatgcagctattctgttgtattctcattctcactctccctcccttctctcactctcactcttgctggaggcgagccactaccattctgctgagaaggaaaagcccgcaactactttaagagattaagacaatatgcgcaatcctcgcctttcctagcaatcactatttaaatctggcaagaactgacaacagtctttgcaagaatggaatccgtaaaacaaaggattttggccccaggaaaagaggggctaaagaattttgctggaaaatcactcggccagatctacagggtgctggagaagaagcaagacaccggggagacaatcgagctgacggaggatgggaagcccctagaggtgcccgagaggaaggcgccgctgtgcgactgcacgtgcttcggcctgccccgccgctacattatcgccatcatgagcggcctgggcttctgcatctccttcggtatccgctgcaacctgggcgtggccattgtggacatggtcaacaacagcaccatccaccgcgggggcaaggtcatcaaggagaaagccaaattcaactgggacccggaaaccgtggggatgatccacggttccttcttttggggctacatcatcactcagattccgggaggctacatcgcgtctcggctggcagccaacagggttttcggagctgccatacttcttacctctaccctaaatatgctaattccatcagcagccagagtgcattatggatgtgtcatctttgtcagaatactgcagggacttgttgagggtgtgacctacccagcatgtcatgggatatggagcaaatgggccccacctctagagaggagtagactggcaaccacctccttttgtggttcctatgccggagctgtgattgcaatgcctttagctggcattcttgtgcagtacactggctggtcttcagtgttttatgtctacggaagctttggaatggtctggtacatgttttggcttttggtgtcttatgaaagtcctgcaaagcatcctactattacagatgaagaacgtaggtacatagaagaaagcattggagagagtgcaaatcttttaggtgcaatggaaaaattcaagactccatggaggaagttttttacatccatgccagtctatgcaataattgttgcaaacttctgcagaagctggactttttatttattgcttattagtcagccagcatattttgaggaagtctttggatttgaaattagcaaggttggtatgctatctgctgtgccacacttagtaatgacaattattgtgcctattgggggacaaattgcagattttctaagaagcaagcagattctttcaactacgacagtgagaaagatcatgaattgtggtggttttggcatggaagccacactgctcctggtcgttggctattctcatactagaggggtagcaatctcattcttggtacttgcagtgggattcagtggatttgctatatctggtttcaatgttaaccacttggatatcgctccaagatatgccagtatcttaatgggcatttcgaatggtgttggcacattgtcaggaatggtttgtcctatcattgttggtgcaatgacaaagaataagtcacgtgaagagtggcagtatgtcttcctgatcgctgccctagtccactatggtggagttatattttatgcaatatttgcctcaggagagaaacaaccctgggcagacccggaggaaacaagtgaagaaaaatgtggatttattcatgaagatgaactcgatgaagaaacaggggacattactcaaaattatataaattatggtaccaccaagtcttatggtgccacaacacaggccaatggaggttggcctagtggttgggaaaagaaagaggaatttgtacaaggagaagtacaagactcacatagctataaggaccgagttgattattcataacaaaactaattactggatttatttttagtgtttgtgattaaattcattgtgattgcacaaaaattttaaaaacacgtgatgtaaacttgcaagcatatcaaccaggcaagtcttgctgtaaaaatgaaaacaaaacaaacccatgaggttaccatcaagtgcaatctgtaaaattgtgaagttccatcatttccattcaagtcatccattcttgcatttgtgacttaaaggttgactggtcaaaattgtagaaacaagtagttacccattggattcatatgagctaaaactcatcactatttactaaagcacaacatctcatcctacaaaagttaagaagccaaagctacttgatcatgcaaaatgcacttatatatttgttacactgtattgcaagatagcacacagaagttggctgcgtcaagtagaggcgacatttattaagtgaaaatcatggagttgggatatctctcaattaaagaaatacattgtgaactatcagctacaaagttgtactgaataactattagaattgcataatgtgagatattttgttagtcctcaaaaggaatatcttgcagtgttttctatgaaatgcttgggcacaaacacttatttctgtgaaagagaacatgtaagttgaggggtatgcttcatgttcttccatccatttacctaatagtatgaaacagttcacatttcaataaaatcaaacttttcatgtagcgtatcacataacttttttgcaaaaaatataaaaagaaataaacttcaatgtattttttattacaactttgtactggttgtaacttgcattagaaaaaaaaaagagatatataaaccacaaagaatctaataagaaatttattatggagatatagcccttaaaatgcaatattaagaacaaagaaatagaaaatggtttagatatctttcttccttcataattaaatactatatgaaacttgtgccacagagctatatgtaatatgaaaagattaacttcatagagatattgtaagtaggtaattttattatttaaagtcctattaagaaatatttgtcttaaatatataggacaatacattatattaaaatggtctctctctatatatatctgtatatcttatacatgtccatacacagaaacataataaacaatcttcacacgaaaccaaaaatagcatacacctaatgttgggttagggaattgcaatttctactttcatagagtcatagaattttaggtggggaagaggcattttgcttgtcatttcttaatataactcaacaagaattgcaacatttgtgtaccaagcaataagtgcaatgcataaaatttcctgtctgtatattaccttcattttgcttgtagtagctgtttgggtggttggaataattttatttttcttttaaaaaagctaacatcagacccctttataatgtcctaaaattatgataatacatttcccaattcaactcaaaatattattggtgtattttgtctattctggatatttgatctgtttaatgtactgtgctagtgactggaggccctgctactgcaaatataaaacctaaagtttgtttaaaaaaatgcaaatcattctttaccttaagaaaaaaaaaataccctttgctttgtgcctcaaagtgatgtaatgtgatcacagcttttgttgtgttgaatgaaaatatgtggactgtcattttgttgcagcaaaaaagtgttaataaaatgctctatttatccttttttta

SEQ ID NO: 288886 - DNA, 822 bp, Homo sapiens
cgagtgtcagtcggctctccgcacgtgtccgcggcctcgcggagcagtccacccctggctggtttctgcttccacctgctgatctcacagagcttgattttgacacaaagcaagatactgaacattaacaccaccacagaggcctactatgtgctcctgtccctgttgttacttcctccaaagtgttggaggaggggccttgtggaaggtgattgaatcacggggacggactttcctgttgctgctcttgtgatggatttctcacaagatctggttgtttgaaagtgtgtagcacctgccacttcactccctctctctcctcctggccatgtgaagactgtgcctgcttcctctttgtcttccaccatgattgtaagtttcctgaggtctccccaggagcagaagcctatacatcctgcagaactgcaagctaattaaatctgttttctttataaattacccagtcccagcactgcaagctatttggcatatgaaggtcttgacctgagaaaaccatcttggataactgcagcaaggaaaaggaaaaatgcaacacctaggagatttcagtaaacagtagaatcatgccaacctaatctgtgttaaaatgcttggaatgtgggagccgctgatgatgcctcttgtctgtgtgtctgactgaatcctttcttttctcagagcagcaaagcaaagcctgggaaccaggccaaatgcctgccacttaccttaaattgatcagccactttgagattaaaacccctgaaagctgccacaccgtgaaaacaaggcctccttcacattaaaggcaaattgcgactttga

SEQ ID NO: 288887 - DNA, 410 bp, Homo sapiens
cccacaaaggctcgcctcatccacttactcatataatcaagaaaattttagactgccgcactgcaagctatttggcatatgaaggtcttgacctgagaaaaccatcttggataactgcagcaaggaaaaggaaaaatgcaacacctaggagatttcagtaaacagtagaatcatgccaacctaatctgtgttaaaatgcttggaatgtgggagccgctgatgatgcctcttgtctgtgtgtctgactgaatcctttcttttctcagagcagcaaagcaaagcctgggaaccaggccaaatgcctgccacttaccttaaattgatcagccactttgagattaaaacccctgaaagctgccacaccgtgaaaacaaggcctccttcacattaaaggcaaattgcgactttga

SEQ ID NO: 288888 - DNA, 588 bp, Homo sapiens
cgagtgtcagtcggctctccgcacgtgtccgcggcctcgcggagcagtccacccctggctggtttctgcttccacctgctgatctcacagagccctagaagtttggaattttattattcgttccagaaaggttacaaaacttgccctagatagctcaaaactggtgaagttgggattctcaagtctcacccctgcatcatatgccattctgcctctccaaggatgtctacacatcacactgcaagctatttggcatatgaaggtcttgacctgagaaaaccatcttggataactgcagcaaggaaaaggaaaaatgcaacacctaggagatttcagtaaacagtagaatcatgccaacctaatctgtgttaaaatgcttggaatgtgggagccgctgatgatgcctcttgtctgtgtgtctgactgaatcctttcttttctcagagcagcaaagcaaagcctgggaaccaggccaaatgcctgccacttaccttaaattgatcagccactttgagattaaaacccctgaaagctgccacaccgtgaaaacaaggcctccttcacattaaaggcaaattgcgactttga

SEQ ID NO: 288889 - DNA, 444 bp, Homo sapiens
cgagtgtcagtcggctctccgcacgtgtccgcggcctcgcggagcagtccacccctggctggtttctgcttccacctgctgatctcacagagcactgcaagctatttggcatatgaaggtcttgacctgagaaaaccatcttggataactgcagcaaggaaaaggaaaaatgcaacacctaggagatttcagtaaacagtagaatcatgccaacctaatctgtgttaaaatgcttggaatgtgggagccgctgatgatgcctcttgtctgtgtgtctgactgaatcctttcttttctcagagcagcaaagcaaagcctgggaaccaggccaaatgcctgccacttaccttaaattgatcagccactttgagattaaaacccctgaaagctgccacaccgtgaaaacaaggcctccttcacattaaaggcaaattgcgactttga

SEQ ID NO: 288890 - DNA, 535 bp, Homo sapiens
cgagtgtcagtcggctctccgcacgtgtccgcggcctcgcggagcagtccacccctggctggtttctgcttccacctgctgatctcacagagcttgattttgacacaaagcaagatactgaacattaacaccaccacagaggcctactatgtgctcctgtccctgttgttacttcctccaaagcactgcaagctatttggcatatgaaggtcttgacctgagaaaaccatcttggataactgcagcaaggaaaaggaaaaatgcaacacctaggagatttcagtaaacagtagaatcatgccaacctaatctgtgttaaaatgcttggaatgtgggagccgctgatgatgcctcttgtctgtgtgtctgactgaatcctttcttttctcagagcagcaaagcaaagcctgggaaccaggccaaatgcctgccacttaccttaaattgatcagccactttgagattaaaacccctgaaagctgccacaccgtgaaaacaaggcctccttcacattaaaggcaaattgcgactttga

SEQ ID NO: 288891 - DNA, 607 bp, Homo sapiens
tagctgggactacaggcgcgcaccaccacacctggctaattttttttttttttttagtagagacggagtttcaccatgtcagccagatggtcttgatctcttgacctcgtgatctgcccacctcggcctccgaaagtgctgggattacaggcatgagccaccgtgcctggccaatttttctatttttagtagaaatggggttttgccatgttggccaggctggtctcgaactcctgacctcaagtgatctgctggcatccaccccacaatgtgctgagattacaagcgtgagccatcgcgcctcgccctgtttcattttataataccattaggcgacctaaaagtagcaaatgtactttccaaaaaattttagctggctttttctttttttatttggtttggattaatataaaaatgttttcattccctgcagatgctgttgactggggcaaagaataatgggagaaaaacagctgggtcctaaataacagagggaaaccaactttcaataaagtattcaacaactaatccacaaagcagataactgaagtaatttagtatatgtaattacatctttttttttttttttttgaggcggattcttgct

SEQ ID NO: 288892 - DNA, 3609 bp, Homo sapiens
ttcaaaaagtaatatgcatctccagcgccactcaaattttgctaaggacagggcagcaaaatcctgccttcaagaaatgtatagactactgcaagaaacaaagaaattaggcaattacaatatagtgtattcaaaagtgttatgctaaaggagctaaagaagacaatgggggtggggagtggataggggtgtctgacacagccgtgcagtcaggaaaagctttccagatgttaaaatttgattcttcagagataggtgttagaccaattaaaataggagaaatgctagggaggatggaggatagaggatctcaatgctactaaagctgaggactagaaaatggtgagtaatgaactgagaggggaagagcaagccagatcacaaataataaaattgtactttattctgagtgcagtggagagacactaaagtaaaaagagagtgacataaccaaatttgtgttttttactgactttattgtcgaatgagtgttaaaattgcaaagaggcgagcatctgaacctgagtactaggttaatcaaatctcaaatccaatccaatactgaaaaggaactagaaatctagagggggaaaagctaaatacaaagcaattccttcaaggcaaaaaccactatcactatcatggggttggggggcaggatacaacagcatctctgagactgtaggattagaattatgtcagaaggaggccaagaagggtctaggatttatctctggaatgacaatgcattatactgatttaagatttgatccttacttacatcctcaattattagaaatataactactagaagttagtctgactatactcctaagaacaaagaaaggcctggtggctcaagcctgtaatcccagcattttggaaggccaaggtgggtggatcacttgaggtcaggagtttaagaccaacctggccaacatgacgaaaccccatctctactaaaaatacaaaaattagccgggtatagtggtgagcacctgtaatcccaactactcaggaggctgaggcacgagaattgcctgaacccgggaagcggaggctgcagtgagccaagactgcaccactgcactccggcgtgggcgcagagccagactctgttgggggtggggtgggggggaaagagaaaaataatacttctaatatgttgcaaacaagacctttaccaatccaagtgttaaaaagaagcctgttgctacagtgccatttacaattaggtttgtttatatgaagcaaattttacatgtggactgggaattagaagactttttgtttcagtctgcctgttttactttgtttttttctgagtctcggctctactgctaactagctatatgattttggctaaggcacttgaaatccatgggccacaagatgatgcaatgggaaatgaatttcatcctttcttacagcctgacaatctgacaatatttgcaacctctatttgtttcaatggcaaactggttgtgacatgatacatgtgcgaaaggtgattttttttgttccaaattagtatccttttaggtaaattctgtattgcccatatgctgtaattgtagttaaaatattagtgttaataaaataaaaaatttaataatgtcacgttagagtggtaagggcttaggggtagttataggtagtattaggagtagttagaaattacttatttttgtaggcttgtttccaagttatcagcagttgaaagggatgtttctacagtacgtggtaaatggcaataaaacaggataaaggaaagatcaaaacaaggctgtggaccaaactataaatccaagagctttgattattatttttttttttttttggagacagtcttactctgtcgcccaggctggagtgcaatggcgcaatctctgctcactgcaagctccgcctcctgggttcaggtcattctcctgcctcagcctcccgagttcccaagtagctgggactacaggcacctaccaccacgcccggccagttttttgtatctttagtacagacagggtttcactgtgttagccaggatggtctccatctcctaacctcgtgatccgcccgcctcagcctcccaaagtgctgggattacaggcgtgagccaccgcgcccagccagctttgactatttttatactcctcacaattctcaagcacttcttaggcagagcacaaaaacaaaaacaaaaaaaaaaacttagaaatatatgaatgcaagagatgggaagaggaaagaccatttcccaactagctcagagtagcctgatcgtaactccaaacagttcacaaaattctcttaggctgaaactattcatctttcctaaatgtccctcatgtctgctaaaatcactttcccaaatgccttgtatctaggaatctgatgcctactgagcttaccttttatcaaattaatagtgactcaatctccattactggaaagcaggcactttaaccttgtagctctaaacagaaatagtttttactgattcagttggaaaacccagcaatttaacaaaaagggggaggggcagcccaatagcatttggaaaatgttaaattttattatttaacattctttaccattatagttactgcacataagactattactactaaaggtcacttcagagtccctgcaaaatggcctggaattttggcagcacccattttacacaatatttctttttccacaaaataacagacataccaggaaaatcatttcagctaaaaatatgagtgaggtggtagaaatatcatcccttataaagcgcaatgttagaatagtacttgagaaagcaggattgttttaagttccaagatttaacaaacttactgttcagcatcatattcaagcctaaaaggaagataggattttcaagatatatttccaacttctttaacatggcaccatggatgaactgtttctcagcactgtgctgcttcacttggaattaaggatgaattgggaggagacagtatgacataggtgggtaggttgggtggtgaggggaaccagttctaatagtcctcaactccactccagctgttcctgttccacacggtccactgagctggcccagtccctttcactcagtgtgtcaccaaaggcagcttcaaggctcaatggcaagagaccacctataacctcttcaccttctgctgcctctttctgctgccactgactgccatggccatctgctatagccgcattgtcctcagtgtgtccaggccccagacaaggaaggggagccatggtgagactccaattcccaggccttaatccttaaccctagacctgttgcctctagcatcatttatttatctacctacctaatagctatctaccagtcactaaaccatggtgagattctaaccatgtctagcacctgatgctagagataattttgttgaatcccttcaattataaacagctgagttagctggacaaggactagggaggcaatcagtattatttattcttgaacaccatcaagtctagacttggtggcttcatatttctatcataatccctgggggtaagaaatcatatagtcccaggttgggaaggggaaaacggtttgcaacattctcctccttg

SEQ ID NO: 288893 - DNA, 2840 bp, Homo sapiens
ttcaaaaagtaatatgcatctccagcgccactcaaattttgctaaggacagggcagcaaaatcctgccttcaagaaatgtatagactactgcaagaaacaaagaaattaggcaattacaatatagtgtattcaaaagtgttatgctaaaggagctaaagaagacaatgggggtggggagtggataggggtgtctgacacagccgtgcagtcaggaaaagctttccagatgttaaaatttgattcttcagagataggtgttagaccaattaaaataggagaaatgctagggaggatggaggatagaggatctcaatgctactaaagctgaggactagaaaatggtgagtaatgaactgagaggggaagagcaagccagatcacaaataataaaattgtactttattctgagtgcagtggagagacactaaagtaaaaagagagtgacataaccaaatttgtgttttttactgactttattgtcgaatgagtgttaaaattgcaaagaggcgagcatctgaacctgagtactaggttaatcaaatctcaaatccaatccaatactgaaaaggaactagaaatctagagggggaaaagctaaatacaaagcaattccttcaaggcaaaaaccactatcactatcatggggttggggggcaggatacaacagcatctctgagactgtaggattagaattatgtcagaaggaggccaagaagggtctaggatttatctctggaatgacaatgcattatactgatttaagatttgatccttacttacatcctcaattattagaaatataactactagaagttagtctgactatactcctaagaacaaagaaaggcctggtggctcaagcctgtaatcccagcattttggaaggccaaggtgggtggatcacttgaggtcaggagtttaagaccaacctggccaacatgacgaaaccccatctctactaaaaatacaaaaattagccgggtatagtggtgagcacctgtaatcccaactactcaggaggctgaggcacgagaattgcctgaacccgggaagcggaggctgcagtgagccaagactgcaccactgcactccggcgtgggcgcagagccagactctgttgggggtggggtgggggggaaagagaaaaataatacttctaatatgttgcaaacaagacctttaccaatccaagtgttaaaaagaagcctgttgctacagtgccatttacaattaggtttgtttatatgaagcaaattttacatgtggactgggaattagaagactttttgtttcagtctgcctgttttactttgtttttttctgagtctcggctctactgctaactagctatatgattttggctaaggcacttgaaatccatgggccacaagatgatgcaatgggaaatgaatttcatcctttcttacagcctgacaatctgacaatatttgcaacctctatttgtttcaatggcaaactggttgtgacatgatacatgtgcgaaaggtgattttttttgttccaaattagtatccttttaggtaaattctgtattgcccatatgctgtaattgtagttaaaatattagtgttaataaaataaaaaatttaataatgtcacgttagagtggtaagggcttaggggtagttataggtagtattaggagtagttagaaattacttatttttgtaggcttgtttccaagttatcagcagttgaaagggatgtttctacagtacgtggtaaatggcaataaaacaggataaaggaaagatcaaaacaaggctgtggaccaaactataaatccaagagctttgattattatttttttttttttttggagacagtcttactctgtcgcccaggctggagtgcaatggcgcaatctctgctcactgcaagctccgcctcctgggttcaggtcattctcctgcctcagcctcccgagttcccaagtagctgggactacaggcacctaccaccacgcccggccagttttttgtatctttagtacagacagggtttcactgtgttagccaggatggtctccatctcctaacctcgtgatccgcccgcctcagcctcccaaagtgctgggattacaggcgtgagccaccgcgcccagccagctttgactatttttatactcctcacaattctcaagcacttcttaggcagagcacaaaaacaaaaacaaaaaaaaaaacttagaaatatatgaatgcaagagatgggaagaggaaagaccatttcccaactagctcagagtagcctgatcgtaactccaaacagttcacaaaattctcttaggctgaaactattcatctttcctaaatgtccctcatgtctgctaaaatcactttcccaaatgccttgtatctaggaatctgatgcctactgagcttaccttttatcaaattaatagtgactcaatctccattactggaaagcaggcactttaaccttgtagctctaaacagaaatagtttttactgattcagttggaaaacccagcaatttaacaaaaagggggaggggcagcccaatagcatttggaaaatgttaaattttattatttaacattctttaccattatagttactgcacataagactattactactaaaggtcacttcagagtccctgcaaaatggcctggaattttggcagcacccattttacacaatatttctttttccacaaaataacagacataccaggaaaatcatttcagctaaaaatatgagtgaggtggtagaaatatcatcccttataaagcgcaatgttagaatagtactttataagggatgatatttctaccacctcactcataaagtac

SEQ ID NO: 288894 - DNA, 2522 bp, Homo sapiens
aaaacaggctcttgctctgtcacagactctgttgggggtggggtgggggggaaagagaaaaataatacttctaatatgttgcaaacaagacctttaccaatccaagtgttaaaaagaagcctgttgctacagtgccatttacaattaggtttgtttatatgaagcaaattttacatgtggactgggaattagaagactttttgtttcagtctgcctgttttactttgtttttttctgagtctcggctctactgctaactagctatatgattttggctaaggcacttgaaatccatgggccacaagatgatgcaatgggaaatgaatttcatcctttcttacagcctgacaatctgacaatatttgcaacctctatttgtttcaatggcaaactggttgtgacatgatacatgtgcgaaaggtgattttttttgttccaaattagtatccttttaggtaaattctgtattgcccatatgctgtaattgtagttaaaatattagtgttaataaaataaaaaatttaataatgtcacgttagagtggtaagggcttaggggtagttataggtagtattaggagtagttagaaattacttatttttgtaggcttgtttccaagttatcagcagttgaaagggatgtttctacagtacgtggtaaatggcaataaaacaggataaaggaaagatcaaaacaaggctgtggaccaaactataaatccaagagctttgattattatttttttttttttttggagacagtcttactctgtcgcccaggctggagtgcaatggcgcaatctctgctcactgcaagctccgcctcctgggttcaggtcattctcctgcctcagcctcccgagttcccaagtagctgggactacaggcacctaccaccacgcccggccagttttttgtatctttagtacagacagggtttcactgtgttagccaggatggtctccatctcctaacctcgtgatccgcccgcctcagcctcccaaagtgctgggattacaggcgtgagccaccgcgcccagccagctttgactatttttatactcctcacaattctcaagcacttcttaggcagagcacaaaaacaaaaacaaaaaaaaaaacttagaaatatatgaatgcaagagatgggaagaggaaagaccatttcccaactagctcagagtagcctgatcgtaactccaaacagttcacaaaattctcttaggctgaaactattcatctttcctaaatgtccctcatgtctgctaaaatcactttcccaaatgccttgtatctaggaatctgatgcctactgagcttaccttttatcaaattaatagtgactcaatctccattactggaaagcaggcactttaaccttgtagctctaaacagaaatagtttttactgattcagttggaaaacccagcaatttaacaaaaagggggaggggcagcccaatagcatttggaaaatgttaaattttattatttaacattctttaccattatagttactgcacataagactattactactaaaggtcacttcagagtccctgcaaaatggcctggaattttggcagcacccattttacacaatatttctttttccacaaaataacagacataccaggaaaatcatttcagctaaaaatatgagtgaggtggtagaaatatcatcccttataaagcgcaatgttagaatagtacttgagaaagcaggattgttttaagttccaagatttaacaaacttactgttcagcatcatattcaagcctaaaaggaagataggattttcaagatatatttccaacttctttaacatggcaccatggatgaactgtttctcagcactgtgctgcttcacttggaattaaggatgaattgggaggagacagtatgacataggtgggtaggttgggtggtgaggggaaccagttctaatagtcctcaactccactccagctgttcctgttccacacggtccactgagctggcccagtccctttcactcagtgtgtcaccaaaggcagcttcaaggctcaatggcaagagaccacctataacctcttcaccttctgctgcctctttctgctgccactgactgccatggccatctgctatagccgcattgtcctcagtgtgtccaggccccagacaaggaaggggagccatggtgagactccaattcccaggccttaatccttaaccctagacctgttgcctctagcatcatttatttatctacctacctaatagctatctaccagtcactaaaccatggtgagattctaaccatgtctagcacctgatgctagagataattttgttgaatcccttcaattataaacagctgagttagctggacaaggactagggaggcaatcagtattatttattcttgaacaccatcaagtctagacttggtggcttcatatttctatcataatccctgggggtaagaaatcatatagtcccaggttgggaaggggaaaacggtttgcaacattctcctccttg

SEQ ID NO: 288895 - DNA, 2384 bp, Homo sapiens
  misc_feature (30)..(30): n is a, c, g, or t
tcgagctcggtaccgggtgtcatgaaacanatttacatgtggactgggaattagaagactttttgtttcagtctgcctgttttactttgtttttttctgagtctcggctctactgctaactagctatatgattttggctaaggcacttgaaatccatgggccacaagatgatgcaatgggaaatgaatttcatcctttcttacagcctgacaatctgacaatatttgcaacctctatttgtttcaatggcaaactggttgtgacatgatacatgtgcgaaaggtgattttttttgttccaaattagtatccttttaggtaaattctgtattgcccatatgctgtaattgtagttaaaatattagtgttaataaaataaaaaatttaataatgtcacgttagagtggtaagggcttaggggtagttataggtagtattaggagtagttagaaattacttatttttgtaggcttgtttccaagttatcagcagttgaaagggatgtttctacagtacgtggtaaatggcaataaaacaggataaaggaaagatcaaaacaaggctgtggaccaaactataaatccaagagctttgattattatttttttttttttttggagacagtcttactctgtcgcccaggctggagtgcaatggcgcaatctctgctcactgcaagctccgcctcctgggttcaggtcattctcctgcctcagcctcccgagttcccaagtagctgggactacaggcacctaccaccacgcccggccagttttttgtatctttagtacagacagggtttcactgtgttagccaggatggtctccatctcctaacctcgtgatccgcccgcctcagcctcccaaagtgctgggattacaggcgtgagccaccgcgcccagccagctttgactatttttatactcctcacaattctcaagcacttcttaggcagagcacaaaaacaaaaacaaaaaaaaaaacttagaaatatatgaatgcaagagatgggaagaggaaagaccatttcccaactagctcagagtagcctgatcgtaactccaaacagttcacaaaattctcttaggctgaaactattcatctttcctaaatgtccctcatgtctgctaaaatcactttcccaaatgccttgtatctaggaatctgatgcctactgagcttaccttttatcaaattaatagtgactcaatctccattactggaaagcaggcactttaaccttgtagctctaaacagaaatagtttttactgattcagttggaaaacccagcaatttaacaaaaagggggaggggcagcccaatagcatttggaaaatgttaaattttattatttaacattctttaccattatagttactgcacataagactattactactaaaggtcacttcagagtccctgcaaaatggcctggaattttggcagcacccattttacacaatatttctttttccacaaaataacagacataccaggaaaatcatttcagctaaaaatatgagtgaggtggtagaaatatcatcccttataaagcgcaatgttagaatagtacttgagaaagcaggattgttttaagttccaagatttaacaaacttactgttcagcatcatattcaagcctaaaaggaagataggattttcaagatatatttccaacttctttaacatggcaccatggatgaactgtttctcagcactgtgctgcttcacttggaattaaggatgaattgggaggagacagtatgacataggtgggtaggttgggtggtgaggggaaccagttctaatagtcctcaactccactccagctgttcctgttccacacggtccactgagctggcccagtccctttcactcagtgtgtcaccaaaggcagcttcaaggctcaatggcaagagaccacctataacctcttcaccttctgctgcctctttctgctgccactgactgccatggccatctgctatagccgcattgtcctcagtgtgtccaggccccagacaaggaaggggagccatggtgagactccaattcccaggccttaatccttaaccctagacctgttgcctctagcatcatttatttatctacctacctaatagctatctaccagtcactaaaccatggtgagattctaaccatgtctagcacctgatgctagagataattttgttgaatcccttcaattataaacagctgagttagctggacaaggactagggaggcaatcagtattatttattcttgaacaccatcaagtctagacttggtggcttcatatttctatcataatccctgggggtaagaaatcatatagtcccaggttgggaaggggaaaacggtttgcaacattctcctccttg

SEQ ID NO: 288896 - DNA, 2395 bp, Homo sapiens
ttcaaaaagtaatatgcatctccagcgccactcaaattttgctaaggacagggcagcaaaatcctgccttcaagaaatgtatagactactgcaagaaacaaagaaattaggcaattacaatatagtgtattcaaaagtgttatgctaaaggagctaaagaagacaatgggggtggggagtggataggggtgtctgacacagccgtgcagtcaggaaaagctttccagatgttaaaatttgattcttcagagataggtgttagaccaattaaaataggagaaatgctagggaggatggaggatagaggatctcaatgctactaaagctgaggactagaaaatggtgagtaatgaactgagaggggaagagcaagccagatcacaaataataaaattgtactttattctgagtgcagtggagagacactaaagtaaaaagagagtgacataaccaaatttgtgttttttactgactttattgtcgaatgagtgttaaaattgcaaagaggcgagcatctgaacctgagtactaggttaatcaaatctcaaatccaatccaatactgaaaaggaactagaaatctagagggggaaaagctaaatacaaagcaattccttcaaggcaaaaaccactatcactatcatggggttggggggcaggatacaacagcatctctgagactgtaggattagaattatgtcagaaggaggccaagaagggtctaggatttatctctggaatgacaatgcattatactgatttaagatttgatccttacttacatcctcaattattagaaatataactactagaagttagtctgactatactcctaagaacaaagaaaggcctggtggctcaagcctgtaatcccagcattttggaaggccaaggcgtgagccaccgcgcccagccagctttgactatttttatactcctcacaattctcaagcacttcttaggcagagcacaaaaacaaaaacaaaaaaaaaaacttagaaatatatgaatgcaagagatgggaagaggaaagaccatttcccaactagctcagagtagcctgatcgtaactccaaacagttcacaaaattctcttaggctgaaactattcatctttcctaaatgtccctcatgtctgctaaaatcactttcccaaatgccttgtatctaggaatctgatgcctactgagcttaccttttatcaaattaatagtgactcaatctccattactggaaagcaggcactttaaccttgtagctctaaacagaaatagtttttactgattcagttggaaaacccagcaatttaacaaaaagggggaggggcagcccaatagcatttggaaaatgttaaattttattatttaacattctttaccattatagttactgcacataagactattactactaaaggtcacttcagagtccctgcaaaatggcctggaattttggcagcacccattttacacaatatttctttttccacaaaataacagacataccaggaaaatcatttcagctaaaaatatgagtgaggtggtagaaatatcatcccttataaagcgcaatgttagaatagtacttgagaaagcaggattgttttaagttccaagatttaacaaacttactgttcagcatcatattcaagcctaaaaggaagataggattttcaagatatatttccaacttctttaacatggcaccatggatgaactgtttctcagcactgtgctgcttcacttggaattaaggatgaattgggaggagacagtatgacataggtgggtaggttgggtggtgaggggaaccagttctaatagtcctcaactccactccagctgttcctgttccacacggtccactgagctggcccagtccctttcactcagtgtgtcaccaaaggcagcttcaaggctcaatggcaagagaccacctataacctcttcaccttctgctgcctctttctgctgccactgactgccatggccatctgctatagccgcattgtcctcagtgtgtccaggccccagacaaggaaggggagccatggtgagactccaattcccaggccttaatccttaaccctagacctgttgcctctagcatcatttatttatctacctacctaatagctatctaccagtcactaaaccatggtgagattctaaccatgtctagcacctgatgctagagataattttgttgaatcccttcaattataaacagctgagttagctggacaaggactagggaggcaatcagtattatttattcttgaacaccatcaagtctagacttggtggcttcatatttctatcataatccctgggggtaagaaatcatatagtcccaggttgggaaggggaaaacggtttgcaacattctcctccttg

SEQ ID NO: 288897 - DNA, 2491 bp, Homo sapiens
ttcttattcttccgccaggctgaagtccaatgcgcaagagcaaagactctgttgggggtggggtgggggggaaagagaaaaataatacttctaatatgttgcaaacaagacctttaccaatccaagtgttaaaaagaagctacatgtggactgggaattagaagactttttgtttcagtctgcctgttttactttgtttttttctgagtctcggctctactgctaactagctatatgattttggctaaggcacttgaaatccatgggccacaagatgatgcaatgggaaatgaatttcatcctttcttacagcctgacaatctgacaatatttgcaacctctatttgtttcaatggcaaactggttgtgacatgatacatgtgcgaaaggtgattttttttgttccaaattagtatccttttaggtaaattctgtattgcccatatgctgtaattgtagttaaaatattagtgttaataaaataaaaaatttaataatgtcacgttagagtggtaagggcttaggggtagttataggtagtattaggagtagttagaaattacttatttttgtaggcttgtttccaagttatcagcagttgaaagggatgtttctacagtacgtggtaaatggcaataaaacaggataaaggaaagatcaaaacaaggctgtggaccaaactataaatccaagagctttgattattatttttttttttttttggagacagtcttactctgtcgcccaggctggagtgcaatggcgcaatctctgctcactgcaagctccgcctcctgggttcaggtcattctcctgcctcagcctcccgagttcccaagtagctgggactacaggcacctaccaccacgcccggccagttttttgtatctttagtacagacagggtttcactgtgttagccaggatggtctccatctcctaacctcgtgatccgcccgcctcagcctcccaaagtgctgggattacaggcgtgagccaccgcgcccagccagctttgactatttttatactcctcacaattctcaagcacttcttaggcagagcacaaaaacaaaaacaaaaaaaaaaacttagaaatatatgaatgcaagagatgggaagaggaaagaccatttcccaactagctcagagtagcctgatcgtaactccaaacagttcacaaaattctcttaggctgaaactattcatctttcctaaatgtccctcatgtctgctaaaatcactttcccaaatgccttgtatctaggaatctgatgcctactgagcttaccttttatcaaattaatagtgactcaatctccattactggaaagcaggcactttaaccttgtagctctaaacagaaatagtttttactgattcagttggaaaacccagcaatttaacaaaaagggggaggggcagcccaatagcatttggaaaatgttaaattttattatttaacattctttaccattatagttactgcacataagactattactactaaaggtcacttcagagtccctgcaaaatggcctggaattttggcagcacccattttacacaatatttctttttccacaaaataacagacataccaggaaaatcatttcagctaaaaatatgagtgaggtggtagaaatatcatcccttataaagcgcaatgttagaatagtacttgagaaagcaggattgttttaagttccaagatttaacaaacttactgttcagcatcatattcaagcctaaaaggaagataggattttcaagatatatttccaacttctttaacatggcaccatggatgaactgtttctcagcactgtgctgcttcacttggaattaaggatgaattgggaggagacagtatgacataggtgggtaggttgggtggtgaggggaaccagttctaatagtcctcaactccactccagctgttcctgttccacacggtccactgagctggcccagtccctttcactcagtgtgtcaccaaaggcagcttcaaggctcaatggcaagagaccacctataacctcttcaccttctgctgcctctttctgctgccactgactgccatggccatctgctatagccgcattgtcctcagtgtgtccaggccccagacaaggaaggggagccatggtgagactccaattcccaggccttaatccttaaccctagacctgttgcctctagcatcatttatttatctacctacctaatagctatctaccagtcactaaaccatggtgagattctaaccatgtctagcacctgatgctagagataattttgttgaatcccttcaattataaacagctgagttagctggacaaggactagggaggcaatcagtattatttattcttgaacaccatcaagtctagacttggtggcttcatatttctatcataatccctgggggtaagaaatcatatagtcccaggttgggaaggggaaaacggtttgcaacattctcctccttg

SEQ ID NO: 288898 - DNA, 2374 bp, Homo sapiens
  misc_feature (8)..(8): n is a, c, g, or t
  misc_feature (10)..(10): n is a, c, g, or t
  misc_feature (12)..(12): n is a, c, g, or t
cccaattngncnttggccgggggtttgaggatgtaggcactggtgtgaaggaacatggccctgtatcagaggtggcggtgtctccggctccaaggtttacaggcttgcaggctacacacggcagttgtgtcgacccctccacgctggttggcagagcggcttggcctttttgaggagctgtgggctgctcaggtaaagagattagcaagcatggcacagaaggaaccccggactattaagatatcacttcctggaggccagaaaattgatgctgtggcatggaacacaaccccctaccaactagcccggcagatcagttcaacactggcagatactgcagtggctgctcaagtgaatggagaaccttatgatctggagcggcccttggagacagattctgacctcagatttctgacattcgattccccagaggggaaagcagtgttctggcactccagcacccatgtcctgggggcagcagctgaacaattcctaggtgctgttctctgcagaggtccaagtacagaatatggcttttaccatgatttcttcctgggaaaggagaggacaatccggggctcagagctgcctgttttggagcggatttgccaggaacttacagctgctgctcgacccttccggaggctagaggcttcacgggatcagcttcgccagttgttcaaggctgagtatgcccatcgtggtttctccgaggtgaaaactcccacactgttttctacgaagctctgggaacagtcagggcactgggagcattatcaggaagacatgtttgccgtgcagcccccaggctctgacaggcctcccagctcccagagtgacgattctaccaggcatatcacagatacactcgccctcaagcctatgaactgccctgcacactgcctgatgttcgcccaccggcccagatcctggcgggaactgcccctgcgactagctgactttggggctctacaccgggccgaagcctctggtggtctggggggactgacccgactgcggtgcttccagcaggatgacgctcacatcttctgtacaacagatcagctggaagcagagatccaaagctgtcttgatttcctccgttccgtctatgccgttcttggcttctccttccgcctggcactgtccacccggccatctggcttcctgggggacccttgcctttgggaccaggccgaacaggtccttaaacaggccctgaaggaatttggagaaccctgggacctcaactctggagatggtgccttctatggacctaagattgacgtgcacctccacgatgccctgggccggccacatcagtgtgggacaattcagcttgacttccaactgcccctgagatttgacctccagtataaggggcaggcgggtgccctggagcgtccagtcctcattcaccgagcagtgctcggttctgtggaaagactgttgggagtgctggcagaaagctgcggggggaaatggccactgtggctgtccccgttccaggtggtggtcatccctgtggggagtgagcaagaggaatacgccaaagaggcacagcagagcctgcgggctgcaggactggtcagtgacctggatgcagactctggactgaccctcagccggagaatccgccgggcccagcttgcccactacaattttcagtttgtggttggccagaaagagcaaagtaagagaacagtgaacattcggactcgagataatcgtcgccttggggagtgggacttgcctgaggctgtgcagcgactggtggagctacagaacacgagggtcccaaatgccgaagaaattttctgagcctttgtacatagatgaggcaaaaacctgcgagtgccatcagcctccctcacatgggagaccccaacccagctgacaatgtggagcccccagaacttcagaactgtgtggaggcacatgtctgctctcctgaaaagagacttggtttggggaccccacaaaaggagggaagctgtagctgtttggatgtgaggagaatgaaactacaaaaaaaaataaattgggccaggcgcagtggctcatgcctgtaatcccagcactctgggaggctgaggcggacggatcatgaggtcaggagatcaagaccaccctggctaacacggtgaaaccctgtctctactaaaaatacaaaaaattagccgggcatggtggcacacgcctgtaatcccagctactcaggaggctgaggcaggagaatcgcttgaacccgggaggtggaggttgcagtgagctgagattgcgccactgcacccccctaggcgacagagcgagactctgtctctaaataaataaataaataaataaatacaaactggaaactgctggtcatatg

SEQ ID NO: 288899 - DNA, 2662 bp, Homo sapiens
  misc_feature (8)..(8): n is a, c, g, or t
  misc_feature (10)..(10): n is a, c, g, or t
  misc_feature (12)..(12): n is a, c, g, or t
cccaattngncnttggccgggggtttgaggatgtaggcactggtgtgaaggaacatggccctgtatcagaggtggcggtgtctccggctccaaggtttacaggcttgcaggctacacacggcagttgtgtcgacccctccacgctggttggcagagcggcttggcctttttgaggagctgtgggctgctcaggtaaagagattagcaagcatggcacagaaggaaccccggactattaagatatcacttcctggaggccagaaaattgatgctgtggcatggaacacaaccccctaccaactagcccggcagatcagttcaacactggcagatactgcagtggctgctcaagtgaatggagaaccttatgatctggagcggcccttggagacagattctgacctcagatttctgacattcgattccccagaggggaaagcagtgttctggcactccagcacccatgtcctgggggcagcagctgaacaattcctaggtgctgttctctgcagaggtccaagtacagaatatggcttttaccatgatttcttcctgggaaaggagaggacaatccggggctcagagctgcctgttttggagcggatttgccaggaacttacagctgctgctcgacccttccggaggctagaggcttcacgggatcagcttcgccagttgttcaaggataacccctttaagcttcacttgattgaggagaaagtgacaggtccaacagcaacagtatatgggtgtggcacattggttgacctttgccagggcccccaccttcggcatactggacagattggaggactgaagctgctatcgaactcatcatccttatggaggtcttcaggggccccagagacactgcagagagtgtcagggatttccttccccacaacagaattgctgagggtctgggaagcatggagggaggaagcagaattgcgggaccaccggcgcattgggaaggaacaggagctcttcttcttccatgaactgagccctgggagctgcttcttcctgccacgagggacaagggtgtataatgcactagtggcgtttatcagggctgagtatgcccatcgtggtttctccgaggtgaaaactcccacactgttttctacgaagctctgggaacagtcagggcactgggagcattatcaggaagacatgtttgccgtgcagcccccaggctctgacaggcctcccagctcccagagtgacgattctaccaggcatatcacagatacactcgccctcaagcctatgaactgccctgcacactgcctgatgttcgcccaccggcccagatcctggcgggaactgcccctgcgactagctgactttggggctctacaccgggccgaagcctctggtggtctggggggactgacccgactgcggtgcttccagcaggatgacgctcacatcttctgtacaacagatcagctggaagcagagatccaaagctgtcttgatttcctccgttccgtctatgccgttcttggcttctccttccgcctggcactgtccacccggccatctggcttcctgggggacccttgcctttgggaccaggccgaacaggtccttaaacaggccctgaaggaatttggagaaccctgggacctcaactctggagatggtgccttctatggacctaagattgacgtgcacctccacgatgccctgggccggccacatcagtgtgggacaattcagcttgacttccaactgcccctgagatttgacctccagtataaggggccactgtggctgtccccgttccaggtggtggtcatccctgtggggagtgagcaagaggaatacgccaaagaggcacagcagagcctgcgggctgcaggactggtcagtgacctggatgcagactctggactgaccctcagccggagaatccgccgggcccagcttgcccactacaattttcagtttgtggttggccagaaagagcaaagtaagagaacagtgaacattcggactcgagataatcgtcgccttggggagtgggacttgcctgaggctgtgcagcgactggtggagctacagaacacgagggtcccaaatgccgaagaaattttctgagcctttgtacatagatgaggcaaaaacctgcgagtgccatcagcctccctcacatgggagaccccaacccagctgacaatgtggagcccccagaacttcagaactgtgtggaggcacatgtctgctctcctgaaaagagacttggtttggggaccccacaaaaggagggaagctgtagctgtttggatgtgaggagaatgaaactacaaaaaaaaataaattgggccaggcgcagtggctcatgcctgtaatcccagcactctgggaggctgaggcggacggatcatgaggtcaggagatcaagaccaccctggctaacacggtgaaaccctgtctctactaaaaatacaaaaaattagccgggcatggtggcacacgcctgtaatcccagctactcaggaggctgaggcaggagaatcgcttgaacccgggaggtggaggttgcagtgagctgagattgcgccactgcacccccctaggcgacagagcgagactctgtctctaaataaataaataaataaataaatacaaactggaaactgctggtcatatg

SEQ ID NO: 288900 - DNA, 2206 bp, Homo sapiens
tttttttttttgagatgaagtcttgttctgtcacccaggctggaatgcagtggcgcgatctcggctcactgcatctctgcctcccgggttcaaacaattcttctgcctcagcctcccgagtagctggaactacaggcatgcaccaccatgcctagctaatttttatatttttagtagagacggggtttcaccatattgtccaggctggtctcgaactcctgaccacgtgatccacccaccttggcctcccaaagttctgggattatagacatgagccaccgcgccctgccagggaattgatttttatctgccattgccctctctcagtaggacagttcctttctcttcacctcttctgtcagctaaagaccatgagagggagaaagctagaagctgaagattctgaaaatcactaactggcctcttctttctcctaggtgtggcacattggttgacctttgccagggcccccaccttcggcatactggacagattggaggactgaagctgctatcggctgagtatgcccatcgtggtttctccgaggtgaaaactcccacactgttttctacgaagctctgggaacagtcagggcactgggagcattatcaggaagacatgtttgccgtgcagcccccaggctctgacaggcctcccagctcccagagtgacgattctaccaggcatatcacagatacactcgccctcaagcctatgaactgccctgcacactgcctgatgttcgcccaccggcccagatcctggcgggaactgcccctgcgactagctgactttggggctctacaccgggccgaagcctctggtggtctggggggactgacccgactgcggtgcttccagcaggatgacgctcacatcttctgtacaacagatcagctggaagcagagatccaaagctgtcttgatttcctccgttccgtctatgccgttcttggcttctccttccgcctggcactgtccacccggccatctggcttcctgggggacccttgcctttgggaccaggccgaacaggtccttaaacaggccctgaaggaatttggagaaccctgggacctcaactctggagatggtgccttctatggacctaagattgacgtgcacctccacgatgccctgggccggccacatcagtgtgggacaattcagcttgacttccaactgcccctgagatttgacctccagtataaggggcaggcgggtgccctggagcgtccagtcctcattcaccgagcagtgctcggttctgtggaaagactgttgggagtgctggcagaaagctgcggggggaaatggccactgtggctgtccccgttccaggtggtggtcatccctgtggggagtgagcaagaggaatacgccaaagaggcacagcagagcctgcgggctgcaggactggtcagtgacctggatgcagactctggactgaccctcagccggagaatccgccgggcccagcttgcccactacaattttcagtttgtggttggccagaaagagcaaagtaagagaacagtgaacattcggactcgagataatcgtcgccttggggagtgggacttgcctgaggctgtgcagcgactggtggagctacagaacacgagggtcccaaatgccgaagaaattttctgagcctttgtacatagatgaggcaaaaacctgcgagtgccatcagcctccctcacatgggagaccccaacccagctgacaatgtggagcccccagaacttcagaactgtgtggaggcacatgtctgctctcctgaaaagagacttggtttggggaccccacaaaaggagggaagctgtagctgtttggatgtgaggagaatgaaactacaaaaaaaaataaattgggccaggcgcagtggctcatgcctgtaatcccagcactctgggaggctgaggcggacggatcatgaggtcaggagatcaagaccaccctggctaacacggtgaaaccctgtctctactaaaaatacaaaaaattagccgggcatggtggcacacgcctgtaatcccagctactcaggaggctgaggcaggagaatcgcttgaacccgggaggtggaggttgcagtgagctgagattgcgccactgcacccccctaggcgacagagcgagactctgtctctaaataaataaataaataaataaatacaaactggaaactgctggtcatatg

SEQ ID NO: 288901 - DNA, 2128 bp, Homo sapiens
  misc_feature (8)..(8): n is a, c, g, or t
  misc_feature (10)..(10): n is a, c, g, or t
  misc_feature (12)..(12): n is a, c, g, or t
cccaattngncnttggccgggggtttgaggatgtaggcactggtgtgaaggaacatggccctgtatcagaggtggcggtgtctccggctccaaggtttacaggcttgcaggctacacacggcagttgtgtcgacccctccacgctggttggcagagcggcttggcctttttgaggagctgtgggctgctcaggtaaagagattagcaagcatggcacagaaggaaccccggactattaagatatcacttcctggaggccagaaaattgatgctgtggcatggaacacaaccccctaccaactagcccggcagatcagttcaacactggcagatactgcagtggctgctcaagtgaatggagaaccttatgatctggagcggcccttggagacagattctgacctcagatttctgacattcgattccccagaggggaaagcagtgttctggcactccagcacccatgtcctgggggcagcagctgaacaattcctaggtgctgttctctgcagaggtccaagtacagaatatggcttttaccatgatttcttcctgggaaaggagaggacaatccggggctcagagctgcctgttttggagcggatttgccaggaacttacagctgctgctcgacccttccggaggctagaggcttcacgggatcagcttcgccagttgttcaaggataacccctttaagcttcacttgattgaggagaaagtgacaggtccaacagcaacagtatatgggtgtggcacattggttgacctttgccagggcccccaccttcggcatactggacagattggaggactgaagctgctatcgaactcatcatccttatggaggtcttcaggggccccagagacactgcagagagtgtcagggatttccttccccacaacagaattgctgagggtctgggaagcatggagggaggaagcagaattgcgggaccaccggcgcattgggaaggaacaggagctcttcttcttccatgaactgagccctgggagctgcttcttcctgccacgagggacaagggtgtataatgcactagtggcgtttatcagggctgagtatgcccatcgtggtttctccgaggtgaaaactcccacactgttttctacgaagctctgggaacagtcagggcactgggagcattatcaggaagacatgtttgccgtgcagcccccaggctctgacaggcctcccagctcccagagtgacgattctaccaggcatatcacagatacactcgccctcaagcctatgaactgccctgcacactgcctgatgttcgcccaccggcccagatcctggcgggaactgcccctgcgactagctgactttggggctctacaccgggccgaagcctctggtggtctggggggactgacccgactgcggtgcttccagcaggatgacgctcacatcttctgtacaacagatcagctggaagcagagatccaaagctgtcttgatttcctccgttccgtctatgccgttcttggcttctccttccgcctggcactgtccacccggccatctggcttcctgggggacccttgcctttgggaccaggccgaacaggtccttaaacaggccctgaaggaatttggagaaccctgggacctcaactctggagatggtgccttctatggacctaagattgacgtgcacctccacgatgccctgggccggccacatcagtgtgggacaattcagcttgacttccaactgcccctgagatttgacctccagtataaggggcaggcgggtgccctggagcgtccagtcctcattcaccgagcagtgctcggttctgtggaaagactgttgggagtgctggcagaaagctgcggggggaaatggccactgtggctgtccccgttccaggtggtggtcatccctgtggggagtgagcaagaggaatacgccaaagaggcacagcagagcctgcgggctgcaggactggtcagtgacctggatgcagactctggactgaccctcagccggagaatccgccgggcccagcttgcccactacaattttcagtttgtggttggccagaaagagcaaagtaagagaacagtgatgcccaaatggccggaagctcggggtaccg

SEQ ID NO: 288902 - DNA, 2101 bp, Homo sapiens
  misc_feature (8)..(8): n is a, c, g, or t
  misc_feature (10)..(10): n is a, c, g, or t
  misc_feature (12)..(12): n is a, c, g, or t
cccaattngncnttggccgggggtttgaggatgtaggcactggtgtgaaggaacatggccctgtatcagaggtggcggtgtctccggctccaaggtttacaggcttgcaggctacacacggcagttgtgtcgacccctccacgctggttggcagagcggcttggcctttttgaggagctgtgggctgctcaggtaaagagattagcaagcatggcacagaaggaaccccggactattaagatatcacttcctggaggccagaaaattgatgctgtggcatggaacacaaccccctaccaactagcccggcagatcagttcaacactggcagatactgcagtggctgctcaagtgaatggagaaccttatgatctggagcggcccttggagacagattctgacctcagatttctgacattcgattccccagaggggaaagcagtgttctggcactccagcacccatgtcctgggggcagcagctgaacaattcctaggtgctgttctctgcagaggtccaagtacagaatatggcttttaccatgatttcttcctgggaaaggagaggacaatccggggctcagagctgcctgttttggagcggatttgccaggaacttacagctgctgctcgacccttccggaggctagaggcttcacgggatcagcttcgccagttgttcaaggataacccctttaagcttcacttgattgaggagaaagtgacaggtccaacagcaacagtatatgggtgtggcacattggttgacctttgccagggcccccaccttcggcatactggacagattggaggactgaagctgctatcgaactcatcatccttatggaggtcttcaggggccccagagacactgcagagagtgtcagggatttccttccccacaacagaattgctgagggtctgggaagcatggagggaggaagcagaattgcgggaccaccggcgcattgggaaggaacaggagctcttcttcttccatgaactgagccctgggagctgcttcttcctgccacgagggacaagggtgtataatgcactagtggcgtttatcagggctgagtatgcccatcgtggtttctccgaggtgaaaactcccacactgttttctacgaagctctgggaacagtcagggcactgggagcattatcaggaagacatgtttgccgtgcagcccccaggctctgacaggcctcccagctcccagagtgacgattctaccaggcatatcacagatacactcgccctcaagcctatgaactgccctgcacactgcctgatgttcgcccaccggcccagatcctggcgggaactgcccctgcgactagctgactttggggctctacaccgggccgaagcctctggtggtctggggggactgacccgactgcggtgcttccagcaggatgacgctcacatcttctgtacaacagatcagctggaagcagagatccaaagctgtcttgatttcctccgttccgtctatgccgttcttggcttctccttccgcctggcactgtccacccggccatctggcttcctgggggacccttgcctttgggaccaggccgaacaggtccttaaacaggccctgaaggaatttggagaaccctgggacctcaactctggagatggtgccttctatggacctaagattgacgtgcacctccacgatgccctgggccggccacatcagtgtgggacaattcagcttgacttccaactgcccctgagatttgacctccagtataaggggcaggcgggtgccctggagcgtccagtcctcattcaccgagcagtgctcggttctgtggaaagactgtcaggagatcaagaccaccctggctaacacggtgaaaccctgtctctactaaaaatacaaaaaattagccgggcatggtggcacacgcctgtaatcccagctactcaggaggctgaggcaggagaatcgcttgaacccgggaggtggaggttgcagtgagctgagattgcgccactgcacccccctaggcgacagagcgagactctgtctctaaataaataaataaataaataaatacaaactggaaactgctggtcatatg

SEQ ID NO: 288903 - DNA, 1249 bp, Homo sapiens
gcggcctggctgattaagtacgagggcggccatatggctctgatgggggacccttgcctttgtcaccactccgaacaggtccttaaacaggccctgaaggaatttggagaaccctgggacctcaactctggagatggtgccttctatggacctaagattgacgtgcacctccacgatgccctgggccggccacatcagtgtgggacaattcagcttgacttccaactgcccctgagatttgacctccagtataaggggcaggcgggtgccctggagcgtccagtcctcattcaccgagcagtgctcggttctgtggaaagactgttgggagtgctggcagaaagctgcggggggaaatggccactgtggctgtccccgttccaggtggtggtcatccctgtggggagtgagcaagaggaatacgccaaagaggcacagcagagcctgcgggctgcaggactggtcagtgacctggatgcagactctggactgaccctcagccggagaatccgccgggcccagcttgcccactacaattttcagtttgtggttggccagaaagagcaaagtaagagaacagtgaacattcggactcgagataatcgtcgccttggggagtgggacttgcctgaggctgtgcagcgactggtggagctacagaacacgagggtcccaaatgccgaagaaattttctgagcctttgtacatagatgaggcaaaaacctgcgagtgccatcagcctccctcacatgggagaccccaacccagctgacaatgtggagcccccagaacttcagaactgtgtggaggcacatgtctgctctcctgaaaagagacttggtttggggaccccacaaaaggagggaagctgtagctgtttggatgtgaggagaatgaaactacaaaaaaaaataaattgggccaggcgcagtggctcatgcctgtaatcccagcactctgggaggctgaggcggacggatcatgaggtcaggagatcaagaccaccctggctaacacggtgaaaccctgtctctactaaaaatacaaaaaattagccgggcatggtggcacacgcctgtaatcccagctactcaggaggctgaggcaggagaatcgcttgaacccgggaggtggaggttgcagtgagctgagattgcgccactgcacccccctaggcgacagagcgagactctgtctctaaataaataaataaataaataaatacaaactggaaactgctggtcatatg

SEQ ID NO: 288904 - DNA, 897 bp, Homo sapiens
  misc_feature (8)..(8): n is a, c, g, or t
  misc_feature (10)..(10): n is a, c, g, or t
  misc_feature (12)..(12): n is a, c, g, or t
cccaattngncnttggccgggggtttgaggatgtaggcactggtgtgaaggaacatggccctgtatcagaggtggcggtgtctccggctccaaggtttacaggcttgcaggctacacacggcagttgtgtcgacccctccacgctggttggcagagcggcttggcctttttgaggagctgtgggctgctcaggtaaagagattagcaagcatggcacagaaggaaccccggactattaagatatcacttcctggaggccagaaaattgatgctgtggcatggaacacaaccccctaccaactagcccggcagatcaggtaacaggcccatcctgtaactaccaggattatccttctgcccctttactttctcttcacttgagcaggggaagaaaacttggtctgcttgtttctgttccgtccccattaagatagcctttcctgaagattttgtttttgttttttgttgttgttcttttatacagacggggtctctccatgttgcccaggctagtcttgaactcctgggctcaagcgatccttccatctcagcctcccgaagtgctgggattacaggcatgagccaccaaacccggcctgagatttgttttatctgtattagtttctgcatcagagtctctgtcctttcattggggaaagaaatgaaagcttctgttgctctggtaactcatttcacctttgcaagtttacagttgctgagagatgagcaactttctccccactgtggattgtaaccctgtctgttttaaatcattaatttactttttaataattgatacataataattgaacatatgaatgggtatatgtgatattttgatatatgcatacaatatgtaatgatcaaatcagggtgttcaggatatctgttacccca

SEQ ID NO: 288905 - DNA, 830 bp, Homo sapiens
  misc_feature (8)..(8): n is a, c, g, or t
  misc_feature (10)..(10): n is a, c, g, or t
  misc_feature (12)..(12): n is a, c, g, or t
cccaattngncnttggccgggggtttgaggatgtaggcactggtgtgaaggaacatggccctgtatcagaggtggcggtgtctccggctccaaggtttacaggcttgcaggctacacacggcagttgtgtcgacccctccacgctggttggcagagcggcttggcctttttgaggagctgtgggctgctcaggtaaagagattagcaagcatggcacagaaggaaccccggactattaagatatcacttcctggaggccagaaaattgatgctgtggcatggaacacaaccccctaccaactagcccggcagatcaggtaacaggcccatcctgtaactaccaggattatccttctgcccctttactttctcttcacttgagcaggggaagaaaacttggtctgcttgtttctgttccgtccccattaagatagcctttcctgaagattttgtttttgttttttgttgttgttcttttatacagacggggtctctccatgttgcccaggctagtcttgaactcctgggctcaagcgatccttccatctcagcacctgtaatcccagcactttggggagggtgaggcaggcggatcacttgaggtcaggagttcgagaccagcctggccaacatggtgaaaccctgtctctactaaaaatacacaaattagctgggtgtgctggcctacgcctgtaatcccagctacaaaaaaggctgaggcaggagagtcacttgaactctgccaggaggcagaggttgcagtgagctgagattgtgccactgcattccagcctgggccacggagcgagacaacatctcaaaaaaaaaaa

SEQ ID NO: 288906 - DNA, 2764 bp, Homo sapiens
  misc_feature (8)..(8): n is a, c, g, or t
  misc_feature (10)..(10): n is a, c, g, or t
  misc_feature (12)..(12): n is a, c, g, or t
cccaattngncnttggccgggggtttgaggatgtaggcactggtgtgaaggaacatggccctgtatcagaggtggcggtgtctccggctccaaggtttacaggcttgcaggctacacacggcagttgtgtcgacccctccacgctggttggcagagcggcttggcctttttgaggagctgtgggctgctcaggtaaagagattagcaagcatggcacagaaggaaccccggactattaagatatcacttcctggaggccagaaaattgatgctgtggcatggaacacaaccccctaccaactagcccggcagatcagttcaacactggcagatactgcagtggctgctcaagtgaatggagaaccttatgatctggagcggcccttggagacagattctgacctcagatttctgacattcgattccccagaggggaaagcagtgttctggcactccagcacccatgtcctgggggcagcagctgaacaattcctaggtgctgttctctgcagaggtccaagtacagaatatggcttttaccatgatttcttcctgggaaaggagaggacaatccggggctcagagctgcctgttttggagcggatttgccaggaacttacagctgctgctcgacccttccggaggctagaggcttcacgggatcagcttcgccagttgttcaaggataacccctttaagcttcacttgattgaggagaaagtgacaggtccaacagcaacagtatatgggtgtggcacattggttgacctttgccagggcccccaccttcggcatactggacagattggaggactgaagctgctatcgaactcatcatccttatggaggtcttcaggggccccagagacactgcagagagtgtcagggatttccttccccacaacagaattgctgagggtctgggaagcatggagggaggaagcagaattgcgggaccaccggcgcattgggaaggaacaggagctcttcttcttccatgaactgagccctgggagctgcttcttcctgccacgagggacaagggtgtataatgcactagtggcgtttatcagggctgagtatgcccatcgtggtttctccgaggtgaaaactcccacactgttttctacgaagctctgggaacagtcagggcactgggagcattatcaggaagacatgtttgccgtgcagcccccaggctctgacaggcctcccagctcccagagtgacgattctaccaggcatatcacagatacactcgccctcaagcctatgaactgccctgcacactgcctgatgttcgcccaccggcccagatcctggcgggaactgcccctgcgactagctgactttggggctctacaccgggccgaagcctctggtggtctggggggactgacccgactgcggtgcttccagcaggatgacgctcacatcttctgtacaacagatcagctggaagcagagatccaaagctgtcttgatttcctccgttccgtctatgccgttcttggcttctccttccgcctggcactgtccacccggccatctggcttcctgggggacccttgcctttgggaccaggccgaacaggtccttaaacaggccctgaaggaatttggagaaccctgggacctcaactctggagatggtgccttctatggacctaagattgacgtgcacctccacgatgccctgggccggccacatcagtgtgggacaattcagcttgacttccaactgcccctgagatttgacctccagtataaggggcaggcgggtgccctggagcgtccagtcctcattcaccgagcagtgctcggttctgtggaaagactgttgggagtgctggcagaaagctgcggggggaaatggccactgtggctgtccccgttccaggtggtggtcatccctgtggggagtgagcaagaggaatacgccaaagaggcacagcagagcctgcgggctgcaggactggtcagtgacctggatgcagactctggactgaccctcagccggagaatccgccgggcccagcttgcccactacaattttcagtttgtggttggccagaaagagcaaagtaagagaacagtgaacattcggactcgagataatcgtcgccttggggagtgggacttgcctgaggctgtgcagcgactggtggagctacagaacacgagggtcccaaatgccgaagaaattttctgagcctttgtacatagatgaggcaaaaacctgcgagtgccatcagcctccctcacatgggagaccccaacccagctgacaatgtggagcccccagaacttcagaactgtgtggaggcacatgtctgctctcctgaaaagagacttggtttggggaccccacaaaaggagggaagctgtagctgtttggatgtgaggagaatgaaactacaaaaaaaaataaattgggccaggcgcagtggctcatgcctgtaatcccagcactctgggaggctgaggcggacggatcatgaggtcaggagatcaagaccaccctggctaacacggtgaaaccctgtctctactaaaaatacaaaaaattagccgggcatggtggcacacgcctgtaatcccagctactcaggaggctgaggcaggagaatcgcttgaacccgggaggtggaggttgcagtgagctgagattgcgccactgcacccccctaggcgacagagcgagactctgtctctaaataaataaataaataaataaatacaaactggaaactgctggtcatatg

SEQ ID NO: 288907 - DNA, 2518 bp, Homo sapiens
  misc_feature (8)..(8): n is a, c, g, or t
  misc_feature (10)..(10): n is a, c, g, or t
  misc_feature (12)..(12): n is a, c, g, or t
cccaattngncnttggccgggggtttgaggatgtaggcactggtgtgaaggaacatggccctgtatcagaggtggcggtgtctccggctccaaggtttacaggcttgcaggctacacacggcagttgtgtcgacccctccacgctggttggcagagcggcttggcctttttgaggagctgtgggctgctcaggtaaagagattagcaagcatggcacagaaggaaccccggactattaagatatcacttcctggaggccagaaaattgatgctgtggcatggaacacaaccccctaccaactagcccggcagatcagttcaacactggcagatactgcagtggctgctcaagtgaatggagaaccttatgatctggagcggcccttggagacagattctgacctcagatttctgacattcgattccccagaggggaaagcagtgttctggcactccagcacccatgtcctgggggcagcagctgaacaattcctaggtgctgttctctgcagaggtccaagtacagaatatggcttttaccatgatttcttcctgggaaaggagaggacaatccggggctcagagctgcctgttttggagcggatttgccaggaacttacagctgctgctcgacccttccggaggctagaggcttcacgggatcagcttcgccagttgttcaaggataacccctttaagcttcacttgattgaggagaaagtgacaggtccaacagcaacagtatatgggtgtggcacattggttgacctttgccagggcccccaccttcggcatactggacagattggaggactgaagctgctatcggctgagtatgcccatcgtggtttctccgaggtgaaaactcccacactgttttctacgaagctctgggaacagtcagggcactgggagcattatcaggaagacatgtttgccgtgcagcccccaggctctgacaggcctcccagctcccagagtgacgattctaccaggcatatcacagatacactcgccctcaagcctatgaactgccctgcacactgcctgatgttcgcccaccggcccagatcctggcgggaactgcccctgcgactagctgactttggggctctacaccgggccgaagcctctggtggtctggggggactgacccgactgcggtgcttccagcaggatgacgctcacatcttctgtacaacagatcagctggaagcagagatccaaagctgtcttgatttcctccgttccgtctatgccgttcttggcttctccttccgcctggcactgtccacccggccatctggcttcctgggggacccttgcctttgggaccaggccgaacaggtccttaaacaggccctgaaggaatttggagaaccctgggacctcaactctggagatggtgccttctatggacctaagattgacgtgcacctccacgatgccctgggccggccacatcagtgtgggacaattcagcttgacttccaactgcccctgagatttgacctccagtataaggggcaggcgggtgccctggagcgtccagtcctcattcaccgagcagtgctcggttctgtggaaagactgttgggagtgctggcagaaagctgcggggggaaatggccactgtggctgtccccgttccaggtggtggtcatccctgtggggagtgagcaagaggaatacgccaaagaggcacagcagagcctgcgggctgcaggactggtcagtgacctggatgcagactctggactgaccctcagccggagaatccgccgggcccagcttgcccactacaattttcagtttgtggttggccagaaagagcaaagtaagagaacagtgaacattcggactcgagataatcgtcgccttggggagtgggacttgcctgaggctgtgcagcgactggtggagctacagaacacgagggtcccaaatgccgaagaaattttctgagcctttgtacatagatgaggcaaaaacctgcgagtgccatcagcctccctcacatgggagaccccaacccagctgacaatgtggagcccccagaacttcagaactgtgtggaggcacatgtctgctctcctgaaaagagacttggtttggggaccccacaaaaggagggaagctgtagctgtttggatgtgaggagaatgaaactacaaaaaaaaataaattgggccaggcgcagtggctcatgcctgtaatcccagcactctgggaggctgaggcggacggatcatgaggtcaggagatcaagaccaccctggctaacacggtgaaaccctgtctctactaaaaatacaaaaaattagccgggcatggtggcacacgcctgtaatcccagctactcaggaggctgaggcaggagaatcgcttgaacccgggaggtggaggttgcagtgagctgagattgcgccactgcacccccctaggcgacagagcgagactctgtctctaaataaataaataaataaataaatacaaactggaaactgctggtcatatg

SEQ ID NO: 288908 - DNA, 2777 bp, Homo sapiens
ttgaaatttaccttcttggctggtgcacatgtagtcccagctacttgggaggctgaggtggaaggatcacttgagcctgggaggttgaggctgtggtgagccatgatcttaaccactgcacccaacttgtgtgacacagcaagacactttctcaaaaaaaaaacaaaaagaaaaagaagaaacaacttactttgttacttgttagctttcataaattcaagttttacttaatcgccctcattactattgttctaactttgtctatccagatttcctgcattcaacttttaacttcatgcatagagctttttctccagctgataatatctgttacctgatatcctatttatattttctctgagtttgtctgtctttgcctataactctagatttctcttgaaggacaggaccttacccgctagccaacaggtgtgtcacccaggtgattgatgcacctcataggatgcaacccaaccaattctcctctttccaggacaatccggggctcagagctgcctgttttggagcggatttgccaggaacttacagctgctgctcgacccttccggaggctagaggcttcacgggatcagcttcgccagttgttcaaggtggggtggagggaagaggtggctcttccaggacatctttgtgggaataaacacttttcttcaatctcccttctacctttttccaggataacccctttaagcttcacttgattgaggagaaagtgacaggtccaacagcaacagtatatgggtgtggcacattggttgacctttgccagggcccccaccttcggcatactggacagattggaggactgaagctgctatcgaactcatcatccttatggaggtcttcaggggccccagagacactgcagagagtgtcagggatttccttccccacaacagaattgctgagggtctgggaagcatggagggaggaagcagaattgcgggaccaccggcgcattgggaaggaacaggagctcttcttcttccatgaactgagccctgggagctgcttcttcctgccacgagggacaagggtgtataatgcactagtggcgtttatcagggctgagtatgcccatcgtggtttctccgaggtgaaaactcccacactgttttctacgaagctctgggaacagtcagggcactgggagcattatcaggaagacatgtttgccgtgcagcccccaggctctgacaggcctcccagctcccagagtgacgattctaccaggcatatcacagatacactcgccctcaagcctatgaactgccctgcacactgcctgatgttcgcccaccggcccagatcctggcgggaactgcccctgcgactagctgactttggggctctacaccgggccgaagcctctggtggtctggggggactgacccgactgcggtgcttccagcaggatgacgctcacatcttctgtacaacagatcagctggaagcagagatccaaagctgtcttgatttcctccgttccgtctatgccgttcttggcttctccttccgcctggcactgtccacccggccatctggcttcctgggggacccttgcctttgggaccaggccgaacaggtccttaaacaggccctgaaggaatttggagaaccctgggacctcaactctggagatggtgccttctatggacctaagattgacgtgcacctccacgatgccctgggccggccacatcagtgtgggacaattcagcttgacttccaactgcccctgagatttgacctccagtataaggggcaggcgggtgccctggagcgtccagtcctcattcaccgagcagtgctcggttctgtggaaagactgttgggagtgctggcagaaagctgcggggggaaatggccactgtggctgtccccgttccaggtggtggtcatccctgtggggagtgagcaagaggaatacgccaaagaggcacagcagagcctgcgggctgcaggactggtcagtgacctggatgcagactctggactgaccctcagccggagaatccgccgggcccagcttgcccactacaattttcagtttgtggttggccagaaagagcaaagtaagagaacagtgaacattcggactcgagataatcgtcgccttggggagtgggacttgcctgaggctgtgcagcgactggtggagctacagaacacgagggtcccaaatgccgaagaaattttctgagcctttgtacatagatgaggcaaaaacctgcgagtgccatcagcctccctcacatgggagaccccaacccagctgacaatgtggagcccccagaacttcagaactgtgtggaggcacatgtctgctctcctgaaaagagacttggtttggggaccccacaaaaggagggaagctgtagctgtttggatgtgaggagaatgaaactacaaaaaaaaataaattgggccaggcgcagtggctcatgcctgtaatcccagcactctgggaggctgaggcggacggatcatgaggtcaggagatcaagaccaccctggctaacacggtgaaaccctgtctctactaaaaatacaaaaaattagccgggcatggtggcacacgcctgtaatcccagctactcaggaggctgaggcaggagaatcgcttgaacccgggaggtggaggttgcagtgagctgagattgcgccactgcacccccctaggcgacagagcgagactctgtctctaaataaataaataaataaataaatacaaactggaaactgctggtcatatg

SEQ ID NO: 288909 - DNA, 2488 bp, Homo sapiens
  misc_feature (8)..(8): n is a, c, g, or t
  misc_feature (10)..(10): n is a, c, g, or t
  misc_feature (12)..(12): n is a, c, g, or t
cccaattngncnttggccgggggtttgaggatgtaggcactggtgtgaaggaacatggccctgtatcagaggtggcggtgtctccggctccaaggtttacaggcttgcaggctacacacggcagttgtgtcgacccctccacgctggttggcagagcggcttggcctttttgaggagctgtgggctgctcaggtaaagagattagcaagcatggcacagaaggaaccccggactattaagatatcacttcctggaggccagaaaattgatgctgtggcatggaacacaaccccctaccaactagcccggcagatcagttcaacactggcagatactgcagtggctgctcaagtgaatggagaaccttatgatctggagcggcccttggagacagattctgacctcagatttctgacattcgattccccagaggggaaagcagtgttctggcactccagcacccatgtcctgggggcagcagctgaacaattcctaggtgctgttctctgcagaggtccaagtacagaatatggcttttaccatgatttcttcctgggaaaggagaggacaatccggggctcagagctgcctgttttggagcggatttgccaggaacttacagctgctgctcgacccttccggaggctagaggcttcacgggatcagcttcgccagttgttcaaggataacccctttaagcttcacttgattgaggagaaagtgacaggtccaacagcaacagtatatgggtgtggcacattggttgacctttgccagggcccccaccttcggcatactggacagattggaggactgaagctgctatcgaactcatcatccttatggaggtcttcaggggccccagagacactgcagagagtgtcagggatttccttccccacaacagaattgctgagggtctgggaagcatggagggaggaagcagaattgcgggaccaccggcgcattgggaaggaacaggagctcttcttcttccatgaactgagccctgggagctgcttcttcctgccacgagggacaagggtgtataatgcactagtggcgtttatcagggctgagtatgcccatcgtggtttctccgaggtgaaaactcccacactgttttctacgaagctctgggaacagtcagggcactgggagcattatcaggaagacatgtttgccgtgcagcccccaggctctgacaggcctcccagctcccagagtgacgattctaccaggcatatcacagatacactcgccctcaagcctatgaactgccctgcacactgcctgatgttcgcccaccggcccagatcctggcgggaactgcccctgcgactagctgactttggggctctacaccgggccgaagcctctggtggtctggggggactgacccgactgcggtgcttccagcaggatgacgctcacatcttctgtacaacagatcagctggaagcagagatccaaagctgtcttgatttcctccgttccgtctatgccgttcttggcttctccttccgcctggcactgtccacccggccatctggcttcctgggggacccttgcctttgggaccaggccgaacaggtccttaaacaggccctgaaggaatttggagaaccctgggacctcaactctggagatggtgccttctatggacctaagattgacgtgcacctccacgatgccctgggccggccacatcagtgtgggacaattcagcttgacttccaactgcccctgagatttgacctccagtataaggggcaggcgggtgccctggagcgtccagtcctcattcaccgagcagtgctcggttctgtggaaagactgttgggagtgctggcagaaagctgcggggggaaatggccactgtggctgtccccgttccaggtggtggtcatccctgtggggagtgagcaagaggaatacgccaaagaggcacagcagagcctgcgggctgcaggactggtcagtgacctggatgcagactctggactgaccctcagccggagaatccgccgggcccagcttgcccactacaattttcagtttgtggttggccagaaagagcaaagtaagagaacagtgaacattcggactcgagataatcgtcgccttggggagtgggacttgcctgagtcacttaacttctgagcccatttcctcatttgcaaagtgggaaagaaaatactactcaccctgtccacctcaaagagttgtcgcaaagccaggtttcgttgagggttgagatgactgtggaaactggagagtcccaggcacggtacgatgccacgtgatgaccgcccttatgcaaacacgagtaccgctccctgaagcagccttctgtgttagatagaggtccgcatccctgggagctcatccacgcgcacctctggggaccaacatggcatgcctgtcagtatctttgattgatgatggattagaatgctgtaacccttgatggctactaggacttacg

SEQ ID NO: 288910 - DNA, 1740 bp, Homo sapiens
  misc_feature (8)..(8): n is a, c, g, or t
  misc_feature (10)..(10): n is a, c, g, or t
  misc_feature (12)..(12): n is a, c, g, or t
cccaattngncnttggccgggggtttgaggatgtaggcactggtgtgaaggaacatggccctgtatcagaggtggcggtgtctccggctccaaggtttacaggcttgcaggctacacacggcagttgtgtcgacccctccacgctggttggcagagcggcttggcctttttgaggagctgtgggctgctcaggtaaagagattagcaagcatggcacagaaggaaccccggactattaagatatcacttcctggaggccagaaaattgatgctgtggcatggaacacaaccccctaccaactagcccggcagatcagttcaacactggcagatactgcagtggctgctcaagtgaatggagaaccttatgatctggagcggcccttggagacagattctgacctcagatttctgacattcgattccccagaggggaaagcagtgttctggcactccagcacccatgtcctgggggcagcagctgaacaattcctaggtgctgttctctgcagaggtccaagtacagaatatggcttttaccatgatttcttcctgggaaaggagaggacaatccggggctcagagctgcctgttttggagcggatttgccaggaacttacagctgctgctcgacccttccggaggctagaggcttcacgggatcagcttcgccagttgttcaaggataacccctttaagcttcacttgattgaggagaaagtgacaggtccaacagcaacagtatatgggtgtggcacattggttgacctttgccagggcccccaccttcggcatactggacagattggaggactgaagctgctatcgaactcatcatccttatggaggtcttcaggggccccagagacactgcagagagtgtcagggatttccttccccacaacagaattgctgagggtctgggaagcatggagggaggaagcagaattgcgggaccaccggcgcattgggaaggaacaggagctcttcttcttccatgaactgagccctgggagctgcttcttcctgccacgagggacaagggtgtataatgcactagtggcgtttatcagggctgagtatgcccatcgtggtttctccgaggtgaaaactcccacactgttttctacgaagctctgggaacagtcagggcactgggagcattatcaggaagacatgtttgccgtgcagcccccaggctctgacaggcctcccagctcccagagtgacgattctaccaggcatatcacagatacactcgccctcaagcctatgaactgccctgcacactgcctgatgttcgcccaccggcccagatcctggcgggaactgcccctgcgactagctgactttggggctctacaccgggccgaagcctctggtggtctggggggactgacccgactgcggtgcttccagcaggatgacgctcacatcttctgtacaacagatcaggctgaggcggacggatcatgaggtcaggagatcaagaccaccctggctaacacggtgaaaccctgtctctactaaaaatacaaaaaattagccgggcatggtggcacacgcctgtaatcccagctactcaggaggctgaggcaggagaatcgcttgaacccgggaggtggaggttgcagtgagctgagattgcgccactgcacccccctaggcgacagagcgagactctgtctctaaataaataaataaataaataaatacaaactggaaactgctggtcatatg

SEQ ID NO: 288911 - DNA, 680 bp, Homo sapiens
  misc_feature (8)..(8): n is a, c, g, or t
  misc_feature (10)..(10): n is a, c, g, or t
  misc_feature (12)..(12): n is a, c, g, or t
cccaattngncnttggccgggggtttgaggatgtaggcactggtgtgaaggaacatggccctgtatcagaggtggcggtgtctccggctccaaggtttacaggcttgcaggctacacacggcagttgtgtcgacccctccacgctggttggcagagcggcttggcctttttgaggagctgtgggctgctcaggtaaagagattagcaagcatggcacagaaggaaccccggactattaagatatcacttcctggaggccagaaaattgatgctgtggcatggaacacaaccccctaccaactagcccggcagatcagttcaacactggcagatactgcagtggctgctcaagtgaatggagaaccttatgatctggagcggcccttggagacagattctgacctcagatttctgacattcgattccccagaggggaaagcagacaatccggggctcagagctgcctgttttggagcggatttgccaggaacttacagctgctgctcgacccttccggaggctagaggcttcacgggatcagcttcgccagttgttcaaggataacccctttaagcttcacttgattgaggagaaagtgacaggtccaacagcaacagtatatgggtaagagttgtcaagattaaggcaaacagagaggtggggaagcattgaagaaggcc

SEQ ID NO: 288912 - DNA, 754 bp, Homo sapiens
ttgtgtcattgaatcatctttaaatttatttttatttttttttatatgtcttatcatcttccaaaaaggatgttttggtgaactgcaaagagatatactcagagacaggaaaaagatctggtagggtgaagaatgaaagaaaaacaggcaggcagaataaagctgaaagctgagcctagtatctaaaacgcacactcccagggcttgtatactcaataaagttgagaagtaactgggttgtcaatttaaagaggaatacttgatcagacacacaattctatgttgataagattaaaaacaagctctagtcatccttccgtacctgtaggagattggctgtaggacctttgtggatgccaaactctgcagatactcaagtcccttatgtaaaatggcataagggaccatttgcatgcaacctatgcccctcctcccatatactttaaataatctttagattacctataatacctaatacaatataaaggctatggaaatagttgttatactatattttttcatttgtgtcatttttattgttatttttaattttttagaatatttccaatccatggttgggtgcggaacctgcggatacagaggactgactataatatcaagagatcataaggctgtcggaatggactctttgtggcaataagataccatattataaacaggacccaaggtcatgccaggtaagaatgaagtcacacacccttcctcttaaggaataaactatattgtaactgcc

SEQ ID NO: 288913 - DNA, 724 bp, Homo sapiens
cgggcgccactcgctttgaagtgcagacgaggaggcgcgggcgcgagcgtgtgtgtctgtggggctgctgtgggactgtctgtgctaggagagcggcggaaaacccggcgtggagcgcctgcagtccgccgtccggggtcgcgcccgccgcggggctcaggagggaccggcacgcaggcgcgcacggccgcgcacctgtctcgctagaaccccgcgcgccccgccgagccactgccctccaggttgcccagaccgctggagcctctgcgactccacgaccggctgcttcctgcgaagtttcacaaacaagatttgattgaaaatggcccatggagtacaaccacctgggaacatatcctcgagaaagacagttgaggcttattgcctaaaccacaggctactgaaaacttggccaaaggcgactactctagactggtgacttcaaaagtgctgatgaatacagtgaaccatgaaagatgcattatttgttttgaacattttactatgattgatgacccagatttggcaagttagttcactcccagtggagatgaaagtttcactgccttctttctttcaacattcttgttgagacagatttcacttttattggccaatgtactaacaaatcacttgcatttgcagcataatgaattcattagcaacactgtggatcaatgctatacataatattcctgagtcaacattaactcttaattaaact

SEQ ID NO: 288914 - DNA, 1436 bp, Homo sapiens
cgcgtgtgctttggtggtcttttctgttgactgcatgttgaccagtccctgtttattggtgcggttcttctccatttttgtcgtgtactctggggctggttatgcgtgtgttggtcgtatatgtctgtggttgtgttttttctgctcggcggctgtgcgcgttgtggaactctgcgtgttgctgttcagcctgttattgggctcgtatttcgcctgggtggctgctgcttgtgcctcatctctgtggtgcgtgttatgcgcttgccggatacgccgtcttgttgtgtgttgtgtctatcagcttgatctggttttgcgccgctcccctcgtttgtgctggcgtcttgttgtggtgttctctgcctgctatttcctctttgtggcggccgcggtctagtcgggctgtttctcgtgtcgctgttcttatggcgttctcgacatttgtgtggtgcgtagtggtttgctggcgtggctgtgcctcgctgtttatgtttcctcgtggggcgttgtgttgccgtccccgctttgttggtcggctgtggtttgctgttccgtctcactcgtctgtgctatttagtctgcgtggtactatcgctcggggtggtttcgctggcccacggctctcgggactgccgcgttatgcgcgccctgtggtctgctcgttgtctccgctgcggcttgtccttgcatgtgcgtggtttgcttggcggtgtcctatggtactggtgctgttggatagcgtcttcggtggcctctggtccgttcctcgtgtgtgctgccctctggcagtctctgcgggacccgttggttgctaggcctaggggctctaccgtcacgcgggcatcatgtgctgcgcttgtgtcctcgatcgcgtgtcgcggaacgtgttcccacctctcaccctcgcgtccccttctcgcgtctgttggctgcgctggaggggctgggccgggactcacaacctgtgtcatggtcccctcctcggggacagggtgccgcctgagatactgaagtgcaatgggtctgacctctgacggggcgagagcggcccaagtggttatgctggctctaacaaccctgggccggccaccttcccggagatgacgtcacccccaagagctgcagcaccgcgctgacatcatggcccggccgccccacttctccttgtttatactacacggcgtctttaaaaagctgaatcagaaaccccctttcagcttggggaacagacatgtttatggcaatgtttagaccagcaatgatcgtatcactgtgcaacacaatgactgaagatggaactgagccggctgtcggcagatctctaagcaacacaagagcaaggtcatgatgcagtgctatcgatgctccctggaacgccaaactctatccatcacagttaaaaattacatgtgcatgagaataagtgtggctataca

SEQ ID NO: 288915 - DNA, 1203 bp, Homo sapiens
gggggcgggggaggggggggggtgcctgtctggatcctttaagagctcccgccctgcggaacaatgtgctcccctccccacccccgggtccgggggcagcccggctccttccggggcctctctctttgttgtccgcccgacggcgtctgcctcgcgaggcccacgcgcgatcagtctctctcggcccaggccctcagggagcgggaggcggcgcaggacgcagctgggtctgcgcggcagccggcggctggccctttaagaactgtccgcggcggcagcggaatgtaacaaaccccacatttgattcacaacattcgaagcggcggggtcgcgcgccagacgggagggggctcgcgggggcgcgccgggaggctccggcaaacagtagcccgctgcaagcccgcaggggccccgccccgcgccgggagctccgccctgagagccaatcactcgccgcgaccacgcacgtgactagtgggccgccatcttgaatttttttaacctcctcctcgcccccaccttcgcacttaaagggaccgcagccatagtcaaaagcaaggggcggggccgcatatcctgacataaagatggggagaccccagggtgggcaaaaccgatcggctgcaactcgaacttgctatgcaaactcgctaactactcgcgcctctgaggctcagtttccctgccgaagaaatgggtcccgccaggagaaccggcagtacggacttactgtgtcatggtcccctcctcggggacagggtgccgcctgagatactgaagtgcaatgggtctgacctctgacggggcgagagcggcccaagtggttatgctggctctaacaaccctgggccggccaccttcccggagatgacgtcacccccaagagctgcagcaccgcgctgacatcatggcccggccgccccacttctccttgtttatactacacggcgtctttaaaaagctgaatcagaaaccccctttcagcttggggaacagacatgtttatggcaatgtttagaccagcaatgatcgtatcactgtgcaacacaatgactgaagatggaactgagccggctgtcggcagatctctaagcaacacaagagcaaggtcatgatgcagtgctatcgatgctccctggaacgccaaactctatccatcacagttaaaaattacatgtgcatgagaataagtgtggctataca

SEQ ID NO: 288916 - DNA, 427 bp, Homo sapiens
ttctaacagtatgtatcaggtttctttaattggacatatgccacatctgcatatatttctggaagggtatacaggaaactgattaacaattgttgtccttagggagaactggaagggagaagttgggtcagtaggatagactattgtatatattgcacattagctcttttttaaaaaccctatgcattataacccactgaaatttttaaagaaagctattataaagactatgtcttaagtcttttaagccagaaaaccttttgttcccttagaatcagaaaccccctttcagcttggggaacagacatgtttatggcaatgtttagaccagcaatgatcgtatcactgtgcaacacaatgactgaagatggaactgagccggctgtcggcagatctctaagcaacacaagagcaaggtcatgatgca

SEQ ID NO: 288917 - DNA, 369 bp, Homo sapiens
tctgggtcctgcgggctgcgctagagtgaccctggcacctcgcgtccctcagaactgtgcatccgggctttccgcgtgacacccaggtctccgtacctttgggcacccaccctcgggggcatagtcctgccacctagccctaccctgcagaccgggctctgtccaaggtgctgccggacgggtccggcctacatccggtccttctctgcattccaggcagctccaccaaagtctgcgtgcaacgcccttcatttgcatggacacacgcaaccctcggcgtttgtatggtcattaacatgctcctcccaccacggaagaactttcgaggcccgtaccaaagtagatcctttattcaaaatcaaaaaaaag

SEQ ID NO: 288918 - DNA, 315 bp, Homo sapiens
cctcgagcaggtgcctcccctctccaatgaagcctctcccgtccgcccggcccagaaactgggcaacttactggtttcggcattttcggtttctgggacacactgctgtttgggcaaccctttgtcagggcctgttatctcccacttgcagatccagggcatttcagaggtcagagagaggagggaggcctcttctgagattttgacctctattcaggttctacattcatggaatcagccaaccttggatggaaaagatttggaaaataataaaaataatactacaattaaaataccaataaaaatccaatacag

SEQ ID NO: 288919 - DNA, 2452 bp, Homo sapiens
cagaagaagtggctggaccaggagatggagaaggtgctacagcagcggcgggcgctggaggagctgggggaggagctccacaagcgggaggccatcctggccaagaaggaggccctgatgcaggagaagacggggctggagagcaagcgcctgagatccagccaggccctcaacgaggacatcgtgcgagtgtccagccggctggagcacctggagaaggagctgtccgagaagagcgggcagctgcggcagggcagcgcccagagccagcagcagatccgcggggagatcgacagcctgcgccaggagaaggactcgctgctcaagcagcgcctggagatcgacggcaagctgaggcaggggagtctgctgtcccccgaggaggagcggacgctgttccagttggatgaggccatcgaggccctggatgctgccattgagtataagaatgaggccatcacatgccgccagcgggtgcttcgggcctcagcctcgttgctgtcccagtgcgagatgaacctcatggccaagctcagctacctctcatcctcagagaccagagccctcctctgcaagtattttgacaaggtggtgacgctccgagaggagcagcaccagcagcagattgccttctcggaactggagatgcagctggaggagcagcagaggctggtgtactggctggaggtggccctggagcggcagcgcctggagatggaccgccagctgaccctgcagcagaaggagcacgagcagaacatgcagctgctcctgcagcagagtcgagaccacctcggtgaagggttagcagacagcaggaggcagtatgaggcccggattcaagctctggagaaggaactgggccgttacatgtggataaaccaggaactgaaacagaagctcggcggtgtgaacgctgtaggccacagcaggggtggggagaagaggagcctgtgctcggagggcagacaggctcctggaaatgaagatgagctccacctggcacccgagcttctctggctgtcccccctcactgagggggccccccgcacccgggaggagacgcgggacttggtccacgctccgttacccttgacctggaaacgctcgagcctgtgtggtgaggagcaggggtcccccgaggaactgaggcagcgggaggcggctgagcccctggtggggcgggtgcttcctgtgggtgaggcaggcctgccctggaactttgggcctttgtccaagccccggcgggaactgcgacgagccagcccggggatgattgatgtccggaaaaaccccctgtaagccctcggggcagaccctgccttggagggagactccgagcctgctgaaaggggcagctgcctgttttgcttctgtgaagggcagtccttaccgcacaccctaaatccaggccctcatctgtaccctcactgggatcaacaaatttgggccatggcccaaaagaactggaccctcatttaacaaaataatatgcaaattcccaccacttacttccatgaagctgtggtacccaattgccgccttgtgtcttgctcgaatctcaggacaattctggtttcaggcgtaaatggatgtgcttgtagttcaggggtttggccaagaatcatcacgaaagggtcggtggtaaccaggttgtggtttaaatggtcttatgtatataggggaaactgggagactttaggatcttaaaaaaccatttaataaaaaaaaatctttgaagggacaaatgggaagttttcacttagagtttgatttacaagacaataggaggaatcagatttgggaacacaacaggcttgaacactttctggagactgagagacagttcagagtcagccctcaccgttagccagacccctggccaggacccgcagcaggctggtccagcgggtctgtggggcactcctgtggggcactcttggtggaaacgatgagccaggtgatggtctccccaggagtgggcaatgggtgaggcctgagccctgaactggctggcttttggacagtccttgaaaatgtggctgctccagaagccactcaagctggaccatggtcacagttaacctcaggcccaacattaaacaaaaatgtactgagtgctcagtcactagagatgattttactgttacacagggaaggcaaaaaatagcttccactgcccaatgcactcttcagtttcacgtatatggcttcacagtttacaaagcgctgcctgtgtcgcagcagcccagccttacagcagctcaagggaccccagggagggcgcctttctccatttgcataaatgaggcagagtggccccctgacttgccaaggtcatggttggggtgaggctggaatgggattccttgtctgggttcctgactcccaggctgcctgagttatagcaccaatcacattgccatccacctctcctcctgcaacttcccca

SEQ ID NO: 288920 - DNA, 1694 bp, Homo sapiens
gcgctctgaagtcagacctgttccctttctttggggaaagcttagagaccactctccctccagcctttattggctcaattcacaggttgcttattgtgctggggcactggggagctagggcttcgggaaggtgttgccacctgtttctgatgaggacacgttactctccatgacaggtggggagaagaggagcctgtgctcggagggcagacaggctcctggaaatgaagatgagctccacctggcacccgagcttctctggctgtcccccctcactgagggggccccccgcacccgggaggagacgcgggacttggtccacgctccgttacccttgacctggaaacgctcgagcctgtgtggtgaggagcaggggtcccccgaggaactgaggcagcgggaggcggctgagcccctggtggggcgggtgcttcctgtgggtgaggcaggcctgccctggaactttgggcctttgtccaagccccggcgggaactgcgacgagccagcccggggatgattgatgtccggaaaaaccccctgtaagccctcggggcagaccctgccttggagggagactccgagcctgctgaaaggggcagctgcctgttttgcttctgtgaagggcagtccttaccgcacaccctaaatccaggccctcatctgtaccctcactgggatcaacaaatttgggccatggcccaaaagaactggaccctcatttaacaaaataatatgcaaattcccaccacttacttccatgaagctgtggtacccaattgccgccttgtgtcttgctcgaatctcaggacaattctggtttcaggcgtaaatggatgtgcttgtagttcaggggtttggccaagaatcatcacgaaagggtcggtggtaaccaggttgtggtttaaatggtcttatgtatataggggaaactgggagactttaggatcttaaaaaaccatttaataaaaaaaaatctttgaagggacaaatgggaagttttcacttagagtttgatttacaagacaataggaggaatcagatttgggaacacaacaggcttgaacactttctggagactgagagacagttcagagtcagccctcaccgttagccagacccctggccaggacccgcagcaggctggtccagcgggtctgtggggcactcctgtggggcactcttggtggaaacgatgagccaggtgatggtctccccaggagtgggcaatgggtgaggcctgagccctgaactggctggcttttggacagtccttgaaaatgtggctgctccagaagccactcaagctggaccatggtcacagttaacctcaggcccaacattaaacaaaaatgtactgagtgctcagtcactagagatgattttactgttacacagggaaggcaaaaaatagcttccactgcccaatgcactcttcagtttcacgtatatggcttcacagtttacaaagcgctgcctgtgtcgcagcagcccagccttacagcagctcaagggaccccagggagggcgcctttctccatttgcataaatgaggcagagtggccccctgacttgccaaggtcatggttggggtgaggctggaatgggattccttgtctgggttcctgactcccaggctgcctgagttatagcaccaatcacattgccatccacctctcctcctgcaacttcccca

SEQ ID NO: 288921 - DNA, 1676 bp, Homo sapiens
cagaagaagtggctggaccaggagatggagaaggtgctacagcagcggcgggcgctggaggagctgggggaggagctccacaagcgggaggccatcctggccaagaaggaggccctgatgcaggagaagacggggctggagagcaagcgcctgagatccagccaggccctcaacgaggacatcgtgcgagtgtccagccggctggagcacctggagaaggagctgtccgagaagagcgggcagctgcggcagggcagcgcccagagccagcagcagatccgcggggagatcgacagcctgcgccaggagaaggactcgctgctcaagcagcgcctggagatcgacggcaagctgaggcaggggagtctgctgtcccccgaggaggagcggacgctgttccagttggatgaggccatcgaggccctggatgctgccattgagtataagaatgaggccatcacatgccgccagcgggtgcttcgggcctcagcctcgttgctgtcccagtgcgagatgaacctcatggccaagctcagctacctctcatcctcagagaccagagccctcctctgcaagtattttgacaaggtggtgacgctccgagaggagcagcaccagcagcagattgccttctcggaactggagatgcagctggaggagcagcagaggctggtgtactggctggaggtggccctggagcggcagcgcctggagatggaccgccagctgaccctgcagcagaaggagcacgagcagaacatgcagctgctcctgcagcagagtcgagaccacctcggtgaagggttagcagacagcaggaggcagtatgaggcccggattcaagctctggagaaggaactgggccgttacatgtggataaaccaggaactgaaacagaagctcggcggtgtgaacgctgtaggccacagcaggggtggggagaagaggagcctgtgctcggagggcagacaggctcctggaaatgaagatgagctccacctggcacccgagcttctctggctgtcccccctcactgagggggccccccgcacccgggaggagacgcgggacttggtccacgctccgttacccttgacctggaaacgctcgagcctgtgtggggactcttcaacaacaccaatatcaggaccaggatcagaggacctcgaggaaccacatgcacaaggattactccataccacttgtaattaacacttattaaggagacaggcagcttctcacttaacaagatcacaaagatcacagggtctgataacaccagtgctgctattctgaaatgtggtacctttgttcttcttgaagttgtcaagtttatcctctagaccatccacagctgacacagaatggcttctaggcaacccccgctttagtgatctctttgaaggggaaagcaattcctggttgaaaagatttcttcgaactttggtcacttctgaaagcatcaaaaattaaaagaaaaagaaaaacccaaagattatcatcaataaatgccgtatctgagaaaagataaccaaaacagagaagctccttgaggaaactacagattgctattgtcacatatgctaataaggtttccttaaatagcatattcccataatgcattaaaaatatttacttttgcaaattaaaaaaaattttatatgttattttgcatg

SEQ ID NO: 288922 - DNA, 859 bp, Homo sapiens
ttttttggtcaggtcctacagcagtggttctcaaaatatttatttttcaacatttaggcccctttgataggcatggcaaaaagcccccaaaagtacctctctgctgctttcttcataccaatagagaaacagtctgcccatgttatcatttctgtactgctgtaacccacagcgtggaatagactttacattcatgctttgtgagactgccttcctgacccgcttgtaggctgcttttgagaaccactaccccagacaacagggcatgtgtgtttaactggaaaatgtggaacacagtgctgagtacagatggcacttcctaagaaatgatggaaacgtctcccttgcactccccactgatgcaggtttgcctcccttctcctccagttgcaggctcctttagctgcaccatgaagtttacagtccgggactgtgaccctaacactggagttccagatgaggatgggtatgatgatgagtatgtggtgagtcttcccagcatagagactttctttgacaccttcacaacactaagtgacttctgccttgagagaacatttttctaggagcatctgacataaacttaagggatttctattcttctgaaacagatgacaaattaggaggacctggactaaccctcctctgtaactggacagcaccaggccagagagaattgagatttaccacttcatcattaaaacaaactcacccttttttttctttataatagggataattaagagatgaaaataatgacatgattttcattgagatcagttttatttaaaatgatttggggagggggttggttttgttttttggttttttgtttttgcttcagcagctgttagtttat

SEQ ID NO: 288923 - DNA, 469 bp, Homo sapiens
ctcttagtgaatgatcagagggtaccgtgtgcccagaactcagtggtcaagtgtgggtgcaacatgactactccttgctttcctttgctaagggctacaacattagatttatccagactacagaacttaaactattttggtggtagagttttctctaggctccggaggaccatattgactagttcctttatctttgccctataacagaaaggacttttctttactgactgcttattacccactagctggaagatctcgaagtgactgtgtctgaccatattcagaaagtactgaagcctaactttgctgctgcttgggaagaggtgggagatacctttgagaaagaggaaacctttgccctcagttctaccaaaacccttgaaggtgagacccattttgctatcagtatattgcctgataacagtataacacctaacaggcatatttgttactccagaagaactccttt

SEQ ID NO: 288924 - DNA, 2373 bp, Homo sapiens
gaagaacaggaagagagcattgtgcatttattaaaacaacatataacacaaactcagttaccaccccgtatgtctgggataggcactgaaatacagcacatcgtccctgtgagtgctaccccatcctcctgctcaggaaaggaagtgggcagctgtatcaacctggcttccttcccctctttctgacaatcgcaggtcacccaacgaccaggcattattatacaaaagttcctttacaaaaagcaccaaattggcatacatatacaagtatatacaaaaatcacattttaaaaatgtacaaaatattccattttgcaccaatgtagaaaagtgtcctgtgtgattgtttcaagcacgtttccaattctggttcagtgtctgctggacgcagcggtgagggtcctaccctagtccctgctctctgagcagagagaagacatcacctccccattgcccctccaggggccccgacccctcccaccctgggcctgtcaccaaggccgctgggcccctccccaccctctccagtctctctgcatctgggggcctctcattcatccagctccttactggtgtccttcttccttcccttctgtggactcttcctcttcctgatcttcttcttcaatgaattcttcctcttcctcatctgtcccaaagtcaatggctctcagggcgtctgctatgtgctctaaatccaaagtaaagaagtccatgttctcaaagccctgctctgtcttccccagctggcagcccttggaagcttccacaatgcttttgatgagttgcttggcagtcaagaggaaggtggctcccccaggctcgtccagggactggatggcagtttccaccagctttgtggacttgtccagctgctcctggtactgctggatgagggcctcgatgaagctaagcttttcctcctgctcctgcgtgatccgctgcagcaactcacttttcttctcatccaggatggcatacaacgtgtcaaacttctggctcagctcttcctttacctggtgactgttctccttggtcactcgacgggaatcctccagctgagtgatgatggtctgcacacggtcattccccgccaccagcatggagatacagttattcagttcagtcttttgtccctggaagacactctgcaatggggccacctcgcaggccttgtggatcccaaacaccttgcacatggagcaggtgggcacctcacacgtgagacagtagatgttgattttctcatcttcgtgctccttgcacatggggtgactgcccttctgcagcggccgactggagcactcctgtttgtagatgtcgatgatgttctccaccagcaggttcctctgcaggccgtacactccgtgacgatccatgatcacctcgtggcggcaggtggggcagcggaaacggcctccagacatggacactgagctgccccggctggtccagtagggatttgcagcctggaagatgtcattggcacacttccggcacaggttgtgctggcacggcaagatgaccactggcttggtaaacatctccaggcagatagggcagatcagctgcttctccaagttctccatgggattcccatcctggatcaggctcgacttataatccattctgtgggaaggaatgagagccacgcctagctgcctcctctactaactttgctctaagtagacctgggggtcttgcctttgtcacaaaacaccgggtcggatcctgttggcttccttctcctggtgcccgaattctaacactcacaacaaaactaactaatactaacatctcagacgctcaggaaatggaaaccgtctgaactatcctgcccgccatcatcctagtcctcatcgccctcccatccctacgcatcctttacataacagacgaggtcagcctaactttgctgctgcttgggaagaggtgggagatacctttgagaaagaggaaacctttgccctcagttctaccaaaacccttgaagaggctgtcaacaatatcatcacatttctgggcatgcagccatgtgagaggtccgataaagtacctgagaacaagaattcccattcgctctatctggcaggtatattcagaggtggctatgatttattggtgaggtccaggctggccttagccgatggagtgaccatgcaggtgactgtcagaagtaaagagagaacacctgtagatgttatcttagcttctgttggataaatgcttactggacaagaggaaactgatgcacactacatggtcagtgggcttttaggctagtggcatcagtttcccagaatcagacttttgaagatgaatgactttggagaagcaaattaaacatttggccctgagccagcagatcaagca

SEQ ID NO: 288925 - DNA, 2659 bp, Homo sapiens
gaagaacaggaagagagcattgtgcatttattaaaacaacatataacacaaactcagttaccaccccgtatgtctgggataggcactgaaatacagcacatcgtccctgtgagtgctaccccatcctcctgctcaggaaaggaagtgggcagctgtatcaacctggcttccttcccctctttctgacaatcgcaggtcacccaacgaccaggcattattatacaaaagttcctttacaaaaagcaccaaattggcatacatatacaagtatatacaaaaatcacattttaaaaatgtacaaaatattccattttgcaccaatgtagaaaagtgtcctgtgtgattgtttcaagcacgtttccaattctggttcagtgtctgctggacgcagcggtgagggtcctaccctagtccctgctctctgagcagagagaagacatcacctccccattgcccctccaggggccccgacccctcccaccctgggcctgtcaccaaggccgctgggcccctccccaccctctccagtctctctgcatctgggggcctctcattcatccagctccttactggtgtccttcttccttcccttctgtggactcttcctcttcctgatcttcttcttcaatgaattcttcctcttcctcatctgtcccaaagtcaatggctctcagggcgtctgctatgtgctctaaatccaaagtaaagaagtccatgttctcaaagccctgctctgtcttccccagctggcagcccttggaagcttccacaatgcttttgatgagttgcttggcagtcaagaggaaggtggctcccccaggctcgtccagggactggatggcagtttccaccagctttgtggacttgtccagctgctcctggtactgctggatgagggcctcgatgaagctaagcttttcctcctgctcctgcgtgatccgctgcagcaactcacttttcttctcatccaggatggcatacaacgtgtcaaacttctggctcagctcttcctttacctggtgactgttctccttggtcactcgacgggaatcctccagctgagtgatgatggtctgcacacggtcattccccgccaccagcatggagatacagttattcagttcagtcttttgtccctggaagacactctgcaatggggccacctcgcaggccttgtggatcccaaacaccttgcacatggagcaggtgggcacctcacacgtgagacagtagatgttgattttctcatcttcgtgctccttgcacatggggtgactgcccttctgcagcggccgactggagcactcctgtttgtagatgtcgatgatgttctccaccagcaggttcctctgcaggccgtacactccgtgacgatccatgatcacctcgtggcggcaggtggggcagcggaaacggcctccagacatggacactgagctgccccggctggtccagtagggatttgcagcctggaagatgtcattggcacacttccggcacaggttgtgctggcacggcaagatgaccactggcttggtaaacatctccaggcagatagggcagatcagctgcttctccaagttctccatgggattcccatcctggatcaggctcgacttataatccattctgtgggaaggaatgagagccacgcctagctgcctcctctactaactttgctctaagtagacctgggggtcttgcctttgtcacaaaacaccgggtcggatcctgttggcttccttctcctggtgcccgaattctaacactcacaacaaaactaactaatactaacatctcagacgctcaggaaatggaaaccgtctgaactatcctgcccgccatcatcctagtcctcatcgccctcccatccctacgcatcctttacataacagacgaggtcagcctaactttgctgctgcttgggaagaggtgggagatacctttgagaaagaggaaacctttgccctcagttctaccaaaacccttgaagaggctgtcaacaatatcatcacatttctgggcatgcagccatgtgagaggtccgataaagtacctgagaacaagaattcccattcgctctatctggcaggtatattcagaggtggctatgatttattggtgaggtccaggctggccttagccgatggagtgaccatgcaggtgactgtcagaagtaaagagagaacacctgtagatgttatcttagcttctgttggataaatgcttactggacaagaggaaactgatgcacactacatggtcagtgggcttttaggctagtggcatcagtttcccagaatcagacttttgaagatgaatgactttggagaagcaaattaaacatttggccctgagccagcagatcaagcaaatgtctatctttgcgcatgggttgttttttttttttttctttttattctacttggtcagctttgggacgatagtgcagctttgggtgatcttgaaaatcaaatactatcctatactccagctgcttaacttcattttattctttaatgtgtacctgaaagctcctggcaatgctggaaaatttttatcccagaggggtgggggggaggggggaggggaagccagagtccacttttgtcacaattcatttttattaatagaaaataaacacttattccagtttcaa

SEQ ID NO: 288926 - DNA, 1004 bp, Homo sapiens
ttttttggtcaggtcctacagcagtggttctcaaaatatttatttttcaacatttaggcccctttgataggcatggcaaaaagcccccaaaagtacctctctgctgctttcttcataccaatagagaaacagtctgcccatgttatcatttctgtactgctgtaacccacagcgtggaatagactttacattcatgctttgtgagactgccttcctgacccgcttgtaggctgcttttgagaaccactaccccagacaacagggcatgtgtgtttaactggaaaatgtggaacacagtgctgagtacagatggcacttcctaagaaatgatggaaacgtctcccttgcactccccactgatgcaggtttgcctcccttctcctccagttgcaggctcctttagctgcaccatgaagtttacagtccgggactgtgaccctaacactggagttccagatgaggatgggtatgatgatgagtatgtgctggaagatctcgaagtgactgtgtctgaccatattcagaaagtactgaagcctaactttgctgctgcttgggaagaggtgggagatacctttgagaaagaggaaacctttgccctcagttctaccaaaacccttgaagaggctgtcaacaatatcatcacatttctgggcatgcagccatgtgagaggtccgataaagtacctgagaacaagaattcccattcgctctatctggcaggtatattcagaggtggctatgatttattggtgaggtccaggctggccttagccgatggagtgaccatgcaggtgactgtcagaagtaaagagagaacacctgtagatgttatcttagcttctgttggataaatgcttactggacaagaggaaactgatgcacactacatggtcagtgggcttttaggctagtggcatcagtttcccagaatcagacttttgaagatgaatgactttggagaagcaaattaaacatttggccctgagccagcagatcaagca

SEQ ID NO: 288927 - DNA, 764 bp, Homo sapiens
ctcttagtgaatgatcagagggtaccgtgtgcccagaactcagtggtcaagtgtgggtgcaacatgactactccttgctttcctttgctaagggctacaacattagatttatccagactacagaacttaaactattttggtggtagagttttctctaggctccggaggaccatattgactagttcctttatctttgccctataacagaaaggacttttctttactgactgcttattacccactagctggaagatctcgaagtgactgtgtctgaccatattcagaaagtactgaagcctaactttgctgctgcttgggaagaggtgggagatacctttgagaaagaggaaacctttgccctcagttctaccaaaacccttgaagaggctgtcaacaatatcatcacatttctgggcatgcagccatgtgagaggtccgataaagtacctgagaacaagaattcccattcgctctatctggcaggtatattcagaggtggctatgatttattggtgaggtccaggctggccttagccgatggagtgaccatgcaggtgactgtcagaagtaaagagagaacacctgtagatgttatcttagcttctgttggataaatgcttactggacaagaggaaactgatgcacactacatggtcagtgggcttttaggctagtggcatcagtttcccagaatcagacttttgaagatgaatgactttggagaagcaaattaaacatttggccctgagccagcagatcaagca

SEQ ID NO: 288928 - DNA, 2445 bp, Homo sapiens
tagaaagaatgatcgacttgctgtttccaagatgttgaataagtttactaaatctggtctcaagtcacagtttgcttactgcatgctgatccgaattgccagtcgcttactaaaagaaactgaggatggccatgaaagtccactgtttgatttcattgagagctgcttgcgaaataaacatgaaatggttatttatgaagctgcttcagctatcatccatcttcctaactgcactgcaagagagttggcacctgctgtttcagttcttcaacttttctgtagttctcctaagccagccttgagatatgcagctgtgaggaccttgaacaaggtggcaatgaagcacccctctgctgttactgcctgcaatctggacttagaaaacttaatcacagactcaaacagaagcattgctaccttagccattactacactcctcaaaacaggaagtgagagcagtgtggaccggctcatgaagcagatatcttcttttgtgtctgaaatctcagatgagttcaaggtggtggttgtacaggcaattagtgctctctgtcagaaataccctcgaaagcacagtgtcatgatgactttcctctccaacatgctccgagatgatggaggctttgagtacaagcgggccattgtggactgtataatcagcattgtggaagagaaccctgagagtaaagaagcaggcctagcccacctttgtgaattcattgaggactgtgaacacactgttctggctactaagattctacacttgttgggcaaagagggccctagaacgcctgtcccctccaaatatatccgttttatttttaatagggttgtcctggagaatgaggctgtcagagctgctgctgtgagtgctttggctaaatttggggctcagaatgagagtcttctcccaagcatccttgtactcttacagaggtgtatgatggatactgatgacgaggtacgagacagagctaccttctatctgaatgtgctgcagcagaggcagatggcactaaatgccacatatatctttaatggtttgacagtctctgtaccagggatggaaaaagccttacaccagtacacgttggagccttcagaaaaaccgtttgacatgaaatcaattcctcttgctatggctcctgtctttgaacagaaagcagaaatcacacttgtggctactaagccaagagaagttggctccttccaggcaagacattttccaagaacaattggctgccattcctgagtttctgaatataggacccttgttcaagtcttctgagcctgttcaacttacagaagcagagacagaatattttgttcgatgtatcaagcacatgtttaccaatcacatcgtgttccagtttgactgcaccaacactctcaatgaccagctgctggaaaaagtgacagtgcagatggagccatcagattcctatgaagtgctgtcttgtatcccagcccccagccttccttataaccaaccaggaatatgttacactcttgttcgtttgcctgatgatgaccctacagcagttgcaggctcctttagctgcaccatgaagtttacagtccgggactgtgaccctaacactggagttccagatgaggatgggtatgatgatgagtatgtgctggaagatctcgaagtgactgtgtctgaccatattcagaaagtactgaagcctaactttgctgctgcttgggaagaggtgggagatacctttgagaaagaggaaacctttgccctcagttctaccaaaacccttgaagaggctgtcaacaatatcatcacatttctgggcatgcagccatgtgagaggtccgataaagtacctgagaacaagaattcccattcgctctatctggcaggtatattcagaggtggctatgatttattggtgaggtccaggctggccttagccgatggagtgaccatgcaggtgactgtcagaagtaaagagagaacacctgtagatgttatcttagcttctgttggataaatgcttactggacaagaggaaactgatgcacactacatggtcagtgggcttttaggctagtggcatcagtttcccagaatcagacttttgaagatgaatgactttggagaagcaaattaaacatttggccctgagccagcagatcaagcaaatgtctatctttgcgcatgggttgttttttttttttttctttttattctacttggtcagctttgggacgatagtgcagctttgggtgatcttgaaaatcaaatactatcctatactccagctgcttaacttcattttattctttaatgtgtacctgaaagctcctggcaatgctggaaaatttttatcccagaggggtgggggggaggggggaggggaagccagagtccacttttgtcacaattcatttttattaatagaaaataaacacttattccagtttcaa

SEQ ID NO: 288929 - DNA, 2159 bp, Homo sapiens
tagaaagaatgatcgacttgctgtttccaagatgttgaataagtttactaaatctggtctcaagtcacagtttgcttactgcatgctgatccgaattgccagtcgcttactaaaagaaactgaggatggccatgaaagtccactgtttgatttcattgagagctgcttgcgaaataaacatgaaatggttatttatgaagctgcttcagctatcatccatcttcctaactgcactgcaagagagttggcacctgctgtttcagttcttcaacttttctgtagttctcctaagccagccttgagatatgcagctgtgaggaccttgaacaaggtggcaatgaagcacccctctgctgttactgcctgcaatctggacttagaaaacttaatcacagactcaaacagaagcattgctaccttagccattactacactcctcaaaacaggaagtgagagcagtgtggaccggctcatgaagcagatatcttcttttgtgtctgaaatctcagatgagttcaaggtggtggttgtacaggcaattagtgctctctgtcagaaataccctcgaaagcacagtgtcatgatgactttcctctccaacatgctccgagatgatggaggctttgagtacaagcgggccattgtggactgtataatcagcattgtggaagagaaccctgagagtaaagaagcaggcctagcccacctttgtgaattcattgaggactgtgaacacactgttctggctactaagattctacacttgttgggcaaagagggccctagaacgcctgtcccctccaaatatatccgttttatttttaatagggttgtcctggagaatgaggctgtcagagctgctgctgtgagtgctttggctaaatttggggctcagaatgagagtcttctcccaagcatccttgtactcttacagaggtgtatgatggatactgatgacgaggtacgagacagagctaccttctatctgaatgtgctgcagcagaggcagatggcactaaatgccacatatatctttaatggtttgacagtctctgtaccagggatggaaaaagccttacaccagtacacgttggagccttcagaaaaaccgtttgacatgaaatcaattcctcttgctatggctcctgtctttgaacagaaagcagaaatcacacttgtggctactaagccaagagaagttggctccttccaggcaagacattttccaagaacaattggctgccattcctgagtttctgaatataggacccttgttcaagtcttctgagcctgttcaacttacagaagcagagacagaatattttgttcgatgtatcaagcacatgtttaccaatcacatcgtgttccagtttgactgcaccaacactctcaatgaccagctgctggaaaaagtgacagtgcagatggagccatcagattcctatgaagtgctgtcttgtatcccagcccccagccttccttataaccaaccaggaatatgttacactcttgttcgtttgcctgatgatgaccctacagcagttgcaggctcctttagctgcaccatgaagtttacagtccgggactgtgaccctaacactggagttccagatgaggatgggtatgatgatgagtatgtgctggaagatctcgaagtgactgtgtctgaccatattcagaaagtactgaagcctaactttgctgctgcttgggaagaggtgggagatacctttgagaaagaggaaacctttgccctcagttctaccaaaacccttgaagaggctgtcaacaatatcatcacatttctgggcatgcagccatgtgagaggtccgataaagtacctgagaacaagaattcccattcgctctatctggcaggtatattcagaggtggctatgatttattggtgaggtccaggctggccttagccgatggagtgaccatgcaggtgactgtcagaagtaaagagagaacacctgtagatgttatcttagcttctgttggataaatgcttactggacaagaggaaactgatgcacactacatggtcagtgggcttttaggctagtggcatcagtttcccagaatcagacttttgaagatgaatgactttggagaagcaaattaaacatttggccctgagccagcagatcaagca

SEQ ID NO: 288930 - DNA, 527 bp, Homo sapiens
agccagcacggcactggagactcccgtgagcatgttcactgctgcgatgaccccaattaacagtttaatgggggaaatgtacagaggggatctgaaaactgttgaagtcaccaaagcattacaagatgccaagagataatggtcaaaaacagcctaataacacacagtgcccatgtgcatgctccactatctcaagccactgtcaccctggatcttttgcagcactggctggaatcagtggtggatactgccgttgaggaatttttgatgcctttctcacctggggaaggtgaaccctgcactgaatgaagggctttcaggtcttcctcaaagtcaagcaggaaatcttcaaggtcacgttcatctgcagcccaagaagtcctggaatgattagttctgactctcttttcaagggaccaaatcccagagtggagagtcctgggttattctggagacatgaactgtcacaaattccttgtgctctagctttcttgcaagttattataaagttgcctttggatgtttga

SEQ ID NO: 288931 - DNA, 3155 bp, Homo sapiens
  misc_feature (151)..(151): n is a, c, g, or t
  misc_feature (651)..(651): n is a, c, g, or t
  misc_feature (756)..(756): n is a, c, g, or t
  misc_feature (1003)..(1003): n is a, c, g, or t
  misc_feature (1769)..(1769): n is a, c, g, or t
  misc_feature (2124)..(2124): n is a, c, g, or t
gatttatatttatatatatatatgctgttaaatacagatatatattagatgacattgttaggtacattcaagcttagaattctatcttcctgttttttaaattttttaaaagtggatccatttatcatgaatgccctcctttttcttaacnataaagtatcacttagagtaccttttgtcaaaaaagaaccacttttctttttaaagtattttcttagtattgtaaaaccttttcattttgaacttttctgtacccttatgttgggggaatgtctcttttttggggaagatagattatgtctcttaaaacaacatataattggatattaaaaaaatccattctggcaagctgtcctttagccagtaagtttagtcctcttacatttactctaattactaatatctaacatactattctgagatttgtttatctgctttattcattcttttcccccttccttctcatcttcctttaggttgagacaaacagggtgaatgttcactcttacatttttaacacgcttacttaaagtctagttgagtggttggcaaactacagcccaaaggccaaatccatcctgccgccttgtacagccagagagccaagactagcttttacatttataaatggttgaaaaaaaaaccaaaatnttattttgatacgtgaaaagcatatgaaatttaaatctttcctttagtgtaaaatcaaggggcaaaaagatctatttatagatctatttacagatcatgaaattngaatttcatgatctataaataaagtttaactggaacacagcggttcatgatgtaaaaaaactaatttgtttacatacgttctatggctgtttttgcattaaaatagcaaaatctgccgggcatggtggctcatgcctgtaatcctagcaggttgggaggccaaggtgggaggattgcttgaacccaggagtttcagaccaccttggcaacacagtgagaccctgtctttaaaaaataaaaaaaaaantttaattagctgggtgtggtggctcaagcctgtagttccagctactcgggaggctgaggtgaaaggatcacttgagcctgggaggtcaaggctgcagtaagctgatatcacgccaggctggagtgcagtggcgcgatctcggctcactgcaacctccgcctcctgggttcaagcgattgtcctgcctcagcctcgagtagctgggactacaggcgcatgccaccacacccggctaatttttgtatttttagtagagatggggcttcaccatgttggccaggctggtcttgaactcctgacctcaggtgatccacctgcctcggcctcccaaagtgctgggttaacaggcatgagccaccgtgcctggccctctccttatttaatatatcatatatagcatctctgctttgtcctatttatcaaaaaacattatttttcctttgttaggtcctcgatcttatcatctaaccatttttaaactacaaatttgtattttagaaatatttggtctagcaaaatggctccgaagcaaaaatcaggactcttttgcttcagaataacaaaaatataccctcaagctagttcatcaaacaggccagttaggctatggaatgaacaaacaggaaggaaagggtattgccacctcagggaatactgtcacagaactcttcctccctgtacctatttttccctcctctctctctgacttcattctttccaactgcaaaccagcttttcaatgaaaaatgagctatcctgagatgcntattttcccagtttcaccaccaaaaggaaaagccctctattttctagattcaacctgagaaattctggggaaggattcaaatgcttcagtaaggtgtcctgcggtgataccaacttgagataacttaaatttattttatggcttgaggtttctaactatgccatgctattcttatcccaaaactatgtgaggattgatgtatagttgtgaattgttgagttctgtgcctggcctacagattaaccagttacaaaaaggttagaaattctgatcagtctacttttggtcagtatgtccctcaacttacttatcactgtggccaagaaggtgagtttatgtaaagatatggcatctnccgttcaaccacagttaagggtaaaagggactgaggtcagaaaaaaggaattcctcagaagaagcaggtattcttgtccaaggaacaggtgctagacagtggaaacataaaaatccaactcaaaccaaataaagtatagactaaattgacattgatacattctcacaaacagatattatacagctcctaagaactttacaggagaatatttaataatatgaaaatatgctcataatactttaagtgataaaaagcaatttttaaaattatgaaaattattccattttaaggaggcaaatatatttctaaaaatacatgtacatgggccaggcacggtggctcacgtctgtaatcccagcaatttgggaggctgaggtgggcggatcatgaggttaggagatcgagaccatcctggctaacacagtgaaaccccctctgataaaaatacaaaaaattagccaggtgtggtgcaggcgcctataatcccagctactcaggagtctgaggcaggagaatggcatgaacctgggaggcggagcttgcagtgagctgagattttgcaactgcactccagcctgggctacagagcaagactccacctcaaaaaaaaaaaaaatacatgtacatgtagaaaaaagactggaaggtgatacatgaaaatgtcaatacgatctcagtctttacctactgaacagaggatgttgtacactgattacatttaccctttccttccataggatcatagaagtgttcctattagggagaattcaggccgtctcaatttctgaaggctgggaagtccaagaggatagcactggcatctggcaagggccttcatgctgcatcatcccatggtggaaggcagaagggaaaagaatcaatcagaatgatggacacagcatctttatggcctatctagtttactgtagtttttatgggcttaagaagaagaccaccttgtctaatcatgaaattttgaaaaatttaaacataaaaaataaaattcctacattctggaacttttcagcaaa

SEQ ID NO: 288932 - DNA, 3296 bp, Homo sapiens
tgtacttctgccttttgctctcagatgctgccagggtccctgaagagggaagacacgcggaaacaggcttgcacccagacacgacaccatgcatctcctcggcccctggctcctgctcctggttctagaatacttggctttctctgactcaagtaaatgggtttttgagcaccctgaaaccctctacgcctgggagggggcctgcgtctggatcccctgcacctacagagccctagatggtgacctggaaagcttcatcctgttccacaatcctgagtataacaagaacacctcgaagtttgatgggacaagactctatgaaagcacaaaggatgggaaggttccttctgagcagaaaagggtgcaattcctgggagacaagaataagaactgcacactgagtatccacccggtgcacctcaatgacagtggtcagctggggctgaggatggagtccaagactgagaaatggatggaacgaatacacctcaatgtctctgaaaggccttttccacctcatatccagctccctccagaaattcaagagtcccaggaagtcactctgacctgcttgctgaatttctcctgctatgggtatccgatccaattgcagtggctcctagagggggttccaatgaggcaggctgctgtcacctcgacctccttgaccatcaagtctgtcttcacccggagcgagctcaagttctccccacagtggagtcaccatgggaagattgtgacctgccagcttcaggatgcagatgggaagttcctctccaatgacacggtgcagctgaacgtgaagcacaccccgaagttggagatcaaggtcactcccagtgatgccatagtgagggagggggactctgtgaccatgacctgcgaggtcagcagcagcaacccggagtacacgacggtatcctggctcaaggatgggacctcgctgaagaagcagaatacattcacgctaaacctgcgcgaagtgaccaaggaccagagtgggaagtactgctgtcaggtctccaatgacgtgggcccgggaaggtcggaagaagtgttcctgcaagtgcagtatgccccggaaccttccacggttcagatcctccactcaccggctgtggagggaagtcaagtcgagtttctttgcatgtcactggccaatcctcttccaacaaattacacgtggtaccacaatgggaaagaaatgcagggaaggacagaggagaaagtccacatcccaaagatcctcccctggcacgctgggacttattcctgtgtggcagaaaacattcttggtactggacagaggggcccgggagctgagctggatgtccagtatcctcccaagaaggtgaccacagtgattcaaaaccccatgccgattcgagaaggagacacagtgaccctttcctgtaactacaattccagtaaccccagtgttacccggtatgaatggaaaccccatggcgcctgggaggagccatcgcttggggtgctgaagatccaaaacgttggctgggacaacacaaccatcgcctgcgcagcttgtaatagttggtgctcgtgggcctcccctgtcgccctgaatgtccagtatgccccccgagacgtgagggtccggaaaatcaagcccctttccgagattcactctggaaactcggtcagcctccaatgtgacttctcaagcagccaccccaaagaagtccagttcttctgggagaaaaatggcaggcttctggggaaagaaagccagctgaattttgactccatctccccagaagatgctgggagttacagctgctgggtgaacaactccataggacagacagcgtccaaggcctggacacttgaagtgctgtatgcacccaggaggctgcgtgtgtccatgagcccgggggaccaagtgatggaggggaagagtgcaaccctgacctgtgagagcgacgccaaccctcccgtctcccactacacctggtttgactggaataaccaaagcctcccctaccacagccagaagctgagattggagccggtgaaggtccagcactcgggtgcctactggtgccaggggaccaacagtgtgggcaagggccgttcgcctctcagcaccctcaccgtctactatagcccggagaccatcggcaggcgagtggctgtgggactcgggtcctgcctcgccatcctcatcctggcaatctgtgggctcaagctccagcgacgttggaagaggacacagagccagcaggggcttcaggagaattccagcggccagagcttctttgtgaggaataaaaaggttagaagggcccccctctctgaaggcccccactccctgggatgctacaatccaatgatggaagatggcattagctacaccaccctgcgctttcccgagatgaacataccacgaactggagatgcagagtcctcagagatgcagagacctcccccggactgcgatgacacggtcacttattcagcattgcacaagcgccaagtgggcgactatgagaacgtcattccagattttccagaagatgaggggattcattactcagagctgatccagtttggggtcggggagcggcctcaggcacaagaaaatgtggactatgtgatcctcaaacattgacactggatgggctgcagcagaggcactgggggcagcgggggccagggaagtccccgagtttccccagacaccgccacatggcttcctcctgcgcgcatgtgcgcacacacacacacacacgcacacacacacacacacactcactgcggagaaccttgtgcctggctcagagccagtctttttggtgagggtaaccccaaacctccaaaactcctgcccctgttctcttccactctccttgctacccagaaatccatctaaatacctgccctgacatgcacacctccccctgcccccaccacggccactggccatctccacccccagctgcttgtgtccctcctgggatctgctcgtcatcatttttccttcccttctccatctctctggccctctacccctgatctgacatccccactcacgaatattatgcccagtttctgcctctgagggaaagcccagaaaaggacagaaacgaagtagaaaggggcccagtcctggcctggcttctcctttggaagtgaggcattgcacggggagacgtacgtatcagcggccccttgactctggggactccgggtttgagatggacacactggtgtggattaacctgccagggagacagagctcacaataaaaatggctcagatgccacttcaaagaa

SEQ ID NO: 288933 - DNA, 2545 bp, Homo sapiens
tgtacttctgccttttgctctcagatgctgccagggtccctgaagagggaagacacgcggaaacaggtaaaaatcattttgcttttattttgcattcaacaagcaagttattacggaacagcagttatgggccaggcatacctcccagagctgggaacacagtggggacctccctggctctctcttaccggtgttacaacaggttgtagacagacccctgtcttgagcatcctccttgccaggcctgctgagtcttctgagagtagggtaggttattggatgcccaggagggaagaaggagccagggaggtcagccccaaggttctgcaaggccctcaacaggcctggactgaggaggtctggacagcatggccctgtcctgagcctctgtgcataataactgctgtccctaacctccaccccaccctcagccttccaattcccgggcctggggccctactcctgtgctccagagactcctggagctccttgaggcagcacacagtcctgctctggaggcgcccatctcccactcatgctgggatgctccagcccgtcccagagcaggttgtggctggagggtgctggcagaggagggacaatggcccggctcctggaggcaagtgttggctgcagggaacggagtctagtccttgccacagcccttgttaccccttaggtaaccttaaggggatttcaaagaactctggctctgcaaccctgctaagttttttatggaacatgtaaaatagatcccatggccaaagaagtatggacaatgtattatactatactctaatccccatgtctagagattaatggtgtagatagagtttactgaaaggtttttaaagtcctgcaataaagaatcttacttaagccaggtgcggtggctcacgcctgtcatctcagcactttgggaggccaaggcgggaggatcacttgaggtcaggagttcgagaccagcctggccagcatggcgaaaccctgtctctactagaaatacagaaaaattagctgggtgtggtggtgggcacctgtaatcccagctactcgggaggctgaggcaggaggatcacttgaactggggaggtagaggttacagcgagccaagatcgcgccactgcactccagcctgggtgacagagggaaactccatctcaaaaaaacaacaacacaacaacaacaacaataacaacaaaaaaacaaagcaggactggagagaggtggaatgaagtggcaaggggttcctgaggggtgatttgggacaggacatctaaagccaggtgtacgctcacgtcctcagtcccccaggctcctgcacgggctctgttcttttgcagaaaggccttttccacctcatatccagctccctccagaaattcaagagtcccaggaagtcactctgacctgcttgctgaatttctcctgctatgggtatccgatccaattgcagtggctcctagagggggttccaatgaggcaggctgctgtcacctcgacctccttgaccatcaagtctgtcttcacccggagcgagctcaagttctccccacagtggagtcaccatgggaagattgtgacctgccagcttcaggatgcagatgggaagttcctctccaatgacacggtgcagctgaacgtgaagcgtgagtctccccggcatgcctgtgggaagggcaaggtctgtgtcaccttctccccagccccgcagggggcatgcacccagggcagggggaagcctgcacagacggcggcatcctccagccctggtcacgccgccttgtcagccctggtgtttcgggaaaaagatttgctctagcctaacagaataaaatggtccatcctcaagccatgacatgaattggggattatctggttaggtctttttgttcccctcttggtggggatttttttcgcatcattatcttgtgcctcattcattcaataaatacgtatcatgaacctactaggtaccaggccctattacggctgccaatggggggcatggggcggtgggcagggtgcagcagtgagcaaaactcttgccccacgcggagccagcgctgcagtgaaagagacagacaacaaatggattaccaaagaaatacagagcatgagccaagacattagaatctggaacaaagcaatgttaacaaagaaatatacaacactattgtaggtagtgatatgtgtgttaggaaaaaaataaggccgagagaggggagtgatggagagagacctctctaagaaggtgagcacttaggccgggtgcggtggctcacgcctgtaatcctagcactttggaaggccgaggcggggggatcacaaggtcaggagatcgagaccatcctggctaacatggtgaaaccccatctctagtaaaaatacaaaaaattagccaggcatgatggcaggcgcctgtagtcccagctacttgggaggccaaggcaggagaatgacatgaacccaggaggcggagcttgcagtgagctgagatcgcaccactgcactccaacctgggtgacgagtgagactccatctc

SEQ ID NO: 288934 - DNA, 910 bp, Homo sapiens
gctgtacgccgattcgggatgtcctgaagagggaagacacgcggaaacaggcttgcacccagacacgacaccatgcatctcctcggcccctggctcctgctcctggttctagaatacttggctttctctgactcaagtaaatgggtttttgagcaccctgaaaccctctacgcctgggagggggcctgcgtctggatcccctgcacctacagagccctagatggtgacctggaaagcttcatcctgttccacaatcctgagtataacaagaacacctcgaagtttgatgggacaagactctatgaaagcacaaaggatgggaaggttccttctgagcagaaaagggtgcaattcctgggagacaagaataagaactgcacactgagtatccacccggtgcacctcaatgacagtggtcagctggggctgaggatggagtccaagactgagaaatggatggaacgaatacacctcaatgtctctgaaaggccttttccacctcatatccagctccctccagaaattcaagagtcccaggaagtcactctgacctgcttgctgaatttctcctgctatgggtatccgatccaattgcagtggctcctagagggggttccaatgaggcaggctgctgtcacctcgacctccttgaccatcaagtctgtcttcacccggagcgagctcaagttctccccacagtggagtcaccatgggaagattgtgacctgccagcttcaggatgcagatgggaagttcctctccaatgacacggtgcagctgaacgtgaagcacaccccgaagttggggatcaggtccttcccagtgatgcctaggggggggggcccgtggccaaaccgcggtcgggcaccggggaaacagggccggggcacaaggggcccaaaacaaaaaa

SEQ ID NO: 288935 - DNA, 1054 bp, Homo sapiens
tgtacttctgccttttgctctcagatgctgccagggtccctgaagagggaagacacgcggaaacaggcttgcacccagacacgacaccatgcatctcctcggcccctggctcctgctcctggcaccctgaaaccctctacgcctgggagggggcctgcgtctggatcccctgcacctacagagccctagatggtgacctggaaagcttcatcctgttccacaatcctgagtataacaagaacacctcgaagtttgatgggacaagactctatgaaagcacaaaggatgggaaggttccttctgagcagaaaagggtgcaattcctgggagacaagaataagaactgcacactgagtatccacccggtgcacctcaatgacagtggtcagctggggctgaggatggagtccaagactgagaaatggatggaacgaatacacctcaatgtctctgaaaggccttttccacctcatatccagctccctccagaaattcaagagtcccaggaagtcactctgacctgcttgctgaatttctcctgctatgggtatccgatccaattgcagtggctcctagagggggttccaatgaggcaggctgctgtcacctcgacctccttgaccatcaagtctgtcttcacccggagcgagctcaagttctccccacagtggagtcaccatgggaagattgtgacctgccagcttcaggatgcagatgggaagttcctctccaatgacacggtgcagctgaacgtgaagcacacccggaagtgggatcacgtcactccagtgatgcatagtgggggggggacctgggagcatgaccgtgaggtcacagcgcagaacccggagcaacgaagggtccgggcaaggtggaccagctgaaaacgaaaattcagcaactggcaatgccaggcaagggagagggaggccaaacgggccggaggagggaaatgccaagaaccgcacacagaacaccccgggagaaacacaagagggacccccaagaacacgaaagaggagagcaccgcgcgaaaacagaggcacaagcacaa

SEQ ID NO: 288936 - DNA, 2749 bp, Homo sapiens
gctgtacgccgattcgggatgtcctgaagagggaagacacgcggaaacaggcttgcacccagacacgacaccatgcatctcctcggcccctggctcctgctcctggttctagaatacttggctttctctgactcaagtaaatgggtttttgagcaccctgaaaccctctacgcctgggagggggcctgcgtctggatcccctgcacctacagagccctagatggtgacctggaaagcttcatcctgttccacaatcctgagtataacaagaacacctcgaagtttgatgggacaagactctatgaaagcacaaaggatgggaaggttccttctgagcagaaaagggtgcaattcctgggagacaagaataagaactgcacactgagtatccacccggtgcacctcaatgacagtggtcagctggggctgaggatggagtccaagactgagaaatggatggaacgaatacacctcaatgtctctgaaaggccttttccacctcatatccagctccctccagaaattcaagagtcccaggaagtcactctgacctgcttgctgaatttctcctgctatgggtatccgatccaattgcagtggctcctagagggggttccaatgaggcaggctgctgtcacctcgacctccttgaccatcaagtctgtcttcacccggagcgagctcaagttctccccacagtggagtcaccatgggaagattgtgacctgccagcttcaggatgcagatgggaagttcctctccaatgacacggtgcagctgaacgtgaagcatcctcccaagaaggtgaccacagtgattcaaaaccccatgccgattcgagaaggagacacagtgaccctttcctgtaactacaattccagtaaccccagtgttacccggtatgaatggaaaccccatggcgcctgggaggagccatcgcttggggtgctgaagatccaaaacgttggctgggacaacacaaccatcgcctgcgcagcttgtaatagttggtgctcgtgggcctcccctgtcgccctgaatgtccagtatgccccccgagacgtgagggtccggaaaatcaagcccctttccgagattcactctggaaactcggtcagcctccaatgtgacttctcaagcagccaccccaaagaagtccagttcttctgggagaaaaatggcaggcttctggggaaagaaagccagctgaattttgactccatctccccagaagatgctgggagttacagctgctgggtgaacaactccataggacagacagcgtccaaggcctggacacttgaagtgctgtatgcacccaggaggctgcgtgtgtccatgagcccgggggaccaagtgatggaggggaagagtgcaaccctgacctgtgagagcgacgccaaccctcccgtctcccactacacctggtttgactggaataaccaaagcctcccctaccacagccagaagctgagattggagccggtgaaggtccagcactcgggtgcctactggtgccaggggaccaacagtgtgggcaagggccgttcgcctctcagcaccctcaccgtctactatagcccggagaccatcggcaggcgagtggctgtgggactcgggtcctgcctcgccatcctcatcctggcaatctgtgggctcaagctccagcgacgttggaagaggacacagagccagcaggggcttcaggagaattccagcggccagagcttctttgtgaggaataaaaaggttagaagggcccccctctctgaaggcccccactccctgggatgctacaatccaatgatggaagatggcattagctacaccaccctgcgctttcccgagatgaacataccacgaactggagatgcagagtcctcagagatgcagagacctcccccggactgcgatgacacggtcacttattcagcattgcacaagcgccaagtgggcgactatgagaacgtcattccagattttccagaagatgaggggattcattactcagagctgatccagtttggggtcggggagcggcctcaggcacaagaaaatgtggactatgtgatcctcaaacattgacactggatgggctgcagcagaggcactgggggcagcgggggccagggaagtccccgagtttccccagacaccgccacatggcttcctcctgcgcgcatgtgcgcacacacacacacacacgcacacacacacacacacactcactgcggagaaccttgtgcctggctcagagccagtctttttggtgagggtaaccccaaacctccaaaactcctgcccctgttctcttccactctccttgctacccagaaatccatctaaatacctgccctgacatgcacacctccccctgcccccaccacggccactggccatctccacccccagctgcttgtgtccctcctgggatctgctcgtcatcatttttccttcccttctccatctctctggccctctacccctgatctgacatccccactcacgaatattatgcccagtttctgcctctgagggaaagcccagaaaaggacagaaacgaagtagaaaggggcccagtcctggcctggcttctcctttggaagtgaggcattgcacggggagacgtacgtatcagcggccccttgactctggggactccgggtttgagatggacacactggtgtggattaacctgccagggagacagagctcacaataaaaatggctcagatgccacttcaaagaa

SEQ ID NO: 288937 - DNA, 2853 bp, Homo sapiens
tgtacttctgccttttgctctcagatgctgccagggtccctgaagagggaagacacgcggaaacagatacccagcagcctttggcatgagccatgtggcccgaggagataaacagacagagagaggaacattgatgcgtgtgaaatgttggcaggcttgcacccagacacgacaccatgcatctcctcggcccctggctcctgctcctggttctagaatacttggctttctctgactcaagtaaatgggtttttgagcaccctgaaaccctctacgcctgggagggggcctgcgtctggatcccctgcacctacagagccctagatggtgacctggaaagcttcatcctgttccacaatcctgagtataacaagaacacctcgaagtttgatgggacaagactctatgaaagcacaaaggatgggaaggttccttctgagcagaaaagggtgcaattcctgggagacaagaataagaactgcacactgagtatccacccggtgcacctcaatgacagtggtcagctggggctgaggatggagtccaagactgagaaatggatggaacgaatacacctcaatgtctctgaaaggccttttccacctcatatccagctccctccagaaattcaagagtcccaggaagtcactctgacctgcttgctgaatttctcctgctatgggtatccgatccaattgcagtggctcctagagggggttccaatgaggcaggctgctgtcacctcgacctccttgaccatcaagtctgtcttcacccggagcgagctcaagttctccccacagtggagtcaccatgggaagattgtgacctgccagcttcaggatgcagatgggaagttcctctccaatgacacggtgcagctgaacgtgaagcatcctcccaagaaggtgaccacagtgattcaaaaccccatgccgattcgagaaggagacacagtgaccctttcctgtaactacaattccagtaaccccagtgttacccggtatgaatggaaaccccatggcgcctgggaggagccatcgcttggggtgctgaagatccaaaacgttggctgggacaacacaaccatcgcctgcgcagcttgtaatagttggtgctcgtgggcctcccctgtcgccctgaatgtccagtatgccccccgagacgtgagggtccggaaaatcaagcccctttccgagattcactctggaaactcggtcagcctccaatgtgacttctcaagcagccaccccaaagaagtccagttcttctgggagaaaaatggcaggcttctggggaaagaaagccagctgaattttgactccatctccccagaagatgctgggagttacagctgctgggtgaacaactccataggacagacagcgtccaaggcctggacacttgaagtgctgtatgcacccaggaggctgcgtgtgtccatgagcccgggggaccaagtgatggaggggaagagtgcaaccctgacctgtgagagcgacgccaaccctcccgtctcccactacacctggtttgactggaataaccaaagcctcccctaccacagccagaagctgagattggagccggtgaaggtccagcactcgggtgcctactggtgccaggggaccaacagtgtgggcaagggccgttcgcctctcagcaccctcaccgtctactatagcccggagaccatcggcaggcgagtggctgtgggactcgggtcctgcctcgccatcctcatcctggcaatctgtgggctcaagctccagcgacgttggaagaggacacagagccagcaggggcttcaggagaattccagcggccagagcttctttgtgaggaataaaaaggttagaagggcccccctctctgaaggcccccactccctgggatgctacaatccaatgatggaagatggcattagctacaccaccctgcgctttcccgagatgaacataccacgaactggagatgcagagtcctcagagatgcagagacctcccccggactgcgatgacacggtcacttattcagcattgcacaagcgccaagtgggcgactatgagaacgtcattccagattttccagaagatgaggggattcattactcagagctgatccagtttggggtcggggagcggcctcaggcacaagaaaatgtggactatgtgatcctcaaacattgacactggatgggctgcagcagaggcactgggggcagcgggggccagggaagtccccgagtttccccagacaccgccacatggcttcctcctgcgcgcatgtgcgcacacacacacacacacgcacacacacacacacacactcactgcggagaaccttgtgcctggctcagagccagtctttttggtgagggtaaccccaaacctccaaaactcctgcccctgttctcttccactctccttgctacccagaaatccatctaaatacctgccctgacatgcacacctccccctgcccccaccacggccactggccatctccacccccagctgcttgtgtccctcctgggatctgctcgtcatcatttttccttcccttctccatctctctggccctctacccctgatctgacatccccactcacgaatattatgcccagtttctgcctctgagggaaagcccagaaaaggacagaaacgaagtagaaaggggcccagtcctggcctggcttctcctttggaagtgaggcattgcacggggagacgtacgtatcagcggccccttgactctggggactccgggtttgagatggacacactggtgtggattaacctgccagggagacagagctcacaataaaaatggctcagatgccacttcaaagaa

SEQ ID NO: 288938 - DNA, 3754 bp, Homo sapiens
gctgtacgccgattcgggatgtcctgaagagggaagacacgcggaaacaggcttgcacccagacacgacaccatgcatctcctcggcccctggctcctgctcctgggtaaggactgtggcctgggctagtactggggttctgggatgtcagtgggcactggaggaggaggaaagacccaggcagagaggcgtcaacatagggtagggtgggggcagcggtgtgtatagataaatgtacatacaaatatatatgtttcccatatatacatacacttctctcattgcatcctgctgtctttgtgtatctctgtatttctcccactatcttcagagggaattctttagtctttagaaagctctctgctgggtgcagtggctcatgcctgaaatctcagcactttgtgaggctgaggtgggaggatcacttgaggtcaggagttcaaggccagcttggacaacatagcaagacccctatctctaaaaagaataaaaaattaaacaaattttaaaataaaaaataacttttaaaagaaggctctcatgcccccttagtaatgctttctgatcactgtggtgagttttctagaatacttggctttctctgactcaagtaaatgggtttttgagcaccctgaaaccctctacgcctgggagggggcctgcgtctggatcccctgcacctacagagccctagatggtgacctggaaagcttcatcctgttccacaatcctgagtataacaagaacacctcgaagtttgatgggacaagactctatgaaagcacaaaggatgggaaggttccttctgagcagaaaagggtgcaattcctgggagacaagaataagaactgcacactgagtatccacccggtgcacctcaatgacagtggtcagctggggctgaggatggagtccaagactgagaaatggatggaacgaatacacctcaatgtctctgaaaggccttttccacctcatatccagctccctccagaaattcaagagtcccaggaagtcactctgacctgcttgctgaatttctcctgctatgggtatccgatccaattgcagtggctcctagagggggttccaatgaggcaggctgctgtcacctcgacctccttgaccatcaagtctgtcttcacccggagcgagctcaagttctccccacagtggagtcaccatgggaagattgtgacctgccagcttcaggatgcagatgggaagttcctctccaatgacacggtgcagctgaacgtgaagcacaccccgaagttggagatcaaggtcactcccagtgatgccatagtgagggagggggactctgtgaccatgacctgcgaggtcagcagcagcaacccggagtacacgacggtatcctggctcaaggatgggacctcgctgaagaagcagaatacattcacgctaaacctgcgcgaagtgaccaaggaccagagtgggaagtactgctgtcaggtctccaatgacgtgggcccgggaaggtcggaagaagtgttcctgcaagtgcagtatgccccggaaccttccacggttcagatcctccactcaccggctgtggagggaagtcaagtcgagtttctttgcatgtcactggccaatcctcttccaacaaattacacgtggtaccacaatgggaaagaaatgcagggaaggacagaggagaaagtccacatcccaaagatcctcccctggcacgctgggacttattcctgtgtggcagaaaacattcttggtactggacagaggggcccgggagctgagctggatgtccagtatcctcccaagaaggtgaccacagtgattcaaaaccccatgccgattcgagaaggagacacagtgaccctttcctgtaactacaattccagtaaccccagtgttacccggtatgaatggaaaccccatggcgcctgggaggagccatcgcttggggtgctgaagatccaaaacgttggctgggacaacacaaccatcgcctgcgcagcttgtaatagttggtgctcgtgggcctcccctgtcgccctgaatgtccagtatgccccccgagacgtgagggtccggaaaatcaagcccctttccgagattcactctggaaactcggtcagcctccaatgtgacttctcaagcagccaccccaaagaagtccagttcttctgggagaaaaatggcaggcttctggggaaagaaagccagctgaattttgactccatctccccagaagatgctgggagttacagctgctgggtgaacaactccataggacagacagcgtccaaggcctggacacttgaagtgctgtatgcacccaggaggctgcgtgtgtccatgagcccgggggaccaagtgatggaggggaagagtgcaaccctgacctgtgagagcgacgccaaccctcccgtctcccactacacctggtttgactggaataaccaaagcctcccctaccacagccagaagctgagattggagccggtgaaggtccagcactcgggtgcctactggtgccaggggaccaacagtgtgggcaagggccgttcgcctctcagcaccctcaccgtctactatagcccggagaccatcggcaggcgagtggctgtgggactcgggtcctgcctcgccatcctcatcctggcaatctgtgggctcaagctccagcgacgttggaagaggacacagagccagcaggggcttcaggagaattccagcggccagagcttctttgtgaggaataaaaaggttagaagggcccccctctctgaaggcccccactccctgggatgctacaatccaatgatggaagatggcattagctacaccaccctgcgctttcccgagatgaacataccacgaactggagatgcagagtcctcagagatgcagagacctcccccggactgcgatgacacggtcacttattcagcattgcacaagcgccaagtgggcgactatgagaacgtcattccagattttccagaagatgaggggattcattactcagagctgatccagtttggggtcggggagcggcctcaggcacaagaaaatgtggactatgtgatcctcaaacattgacactggatgggctgcagcagaggcactgggggcagcgggggccagggaagtccccgagtttccccagacaccgccacatggcttcctcctgcgcgcatgtgcgcacacacacacacacacgcacacacacacacacacactcactgcggagaaccttgtgcctggctcagagccagtctttttggtgagggtaaccccaaacctccaaaactcctgcccctgttctcttccactctccttgctacccagaaatccatctaaatacctgccctgacatgcacacctccccctgcccccaccacggccactggccatctccacccccagctgcttgtgtccctcctgggatctgctcgtcatcatttttccttcccttctccatctctctggccctctacccctgatctgacatccccactcacgaatattatgcccagtttctgcctctgagggaaagcccagaaaaggacagaaacgaagtagaaaggggcccagtcctggcctggcttctcctttggaagtgaggcattgcacggggagacgtacgtatcagcggccccttgactctggggactccgggtttgagatggacacactggtgtggattaacctgccagggagacagagctcacaataaaaatggctcagatgccacttcaaagaa

SEQ ID NO: 288939 - DNA, 3197 bp, Homo sapiens
cacgaggagacacgcggaaacagttctagaatacttggctttctctgactcaagtaaatgggtttttgagcaccctgaaaccctctacgcctgggagggggcctgcgtctggatcccctgcacctacagagccctagatggtgacctggaaagcttcatcctgttccacaatcctgagtataacaagaacacctcgaagtttgatgggacaagactctatgaaagcacaaaggatgggaaggttccttctgagcagaaaagggtgcaattcctgggagacaagaataagaactgcacactgagtatccacccggtgcacctcaatgacagtggtcagctggggctgaggatggagtccaagactgagaaatggatggaacgaatacacctcaatgtctctgaaaggccttttccacctcatatccagctccctccagaaattcaagagtcccaggaagtcactctgacctgcttgctgaatttctcctgctatgggtatccgatccaattgcagtggctcctagagggggttccaatgaggcaggctgctgtcacctcgacctccttgaccatcaagtctgtcttcacccggagcgagctcaagttctccccacagtggagtcaccatgggaagattgtgacctgccagcttcaggatgcagatgggaagttcctctccaatgacacggtgcagctgaacgtgaagcacaccccgaagttggagatcaaggtcactcccagtgatgccatagtgagggagggggactctgtgaccatgacctgcgaggtcagcagcagcaacccggagtacacgacggtatcctggctcaaggatgggacctcgctgaagaagcagaatacattcacgctaaacctgcgcgaagtgaccaaggaccagagtgggaagtactgctgtcaggtctccaatgacgtgggcccgggaaggtcggaagaagtgttcctgcaagtgcagtatgccccggaaccttccacggttcagatcctccactcaccggctgtggagggaagtcaagtcgagtttctttgcatgtcactggccaatcctcttccaacaaattacacgtggtaccacaatgggaaagaaatgcagggaaggacagaggagaaagtccacatcccaaagatcctcccctggcacgctgggacttattcctgtgtggcagaaaacattcttggtactggacagaggggcccgggagctgagctggatgtccagtatcctcccaagaaggtgaccacagtgattcaaaaccccatgccgattcgagaaggagacacagtgaccctttcctgtaactacaattccagtaaccccagtgttacccggtatgaatggaaaccccatggcgcctgggaggagccatcgcttggggtgctgaagatccaaaacgttggctgggacaacacaaccatcgcctgcgcagcttgtaatagttggtgctcgtgggcctcccctgtcgccctgaatgtccagtatgccccccgagacgtgagggtccggaaaatcaagcccctttccgagattcactctggaaactcggtcagcctccaatgtgacttctcaagcagccaccccaaagaagtccagttcttctgggagaaaaatggcaggcttctggggaaagaaagccagctgaattttgactccatctccccagaagatgctgggagttacagctgctgggtgaacaactccataggacagacagcgtccaaggcctggacacttgaagtgctgtatgcacccaggaggctgcgtgtgtccatgagcccgggggaccaagtgatggaggggaagagtgcaaccctgacctgtgagagcgacgccaaccctcccgtctcccactacacctggtttgactggaataaccaaagcctcccctaccacagccagaagctgagattggagccggtgaaggtccagcactcgggtgcctactggtgccaggggaccaacagtgtgggcaagggccgttcgcctctcagcaccctcaccgtctactatagcccggagaccatcggcaggcgagtggctgtgggactcgggtcctgcctcgccatcctcatcctggcaatctgtgggctcaagctccagcgacgttggaagaggacacagagccagcaggggcttcaggagaattccagcggccagagcttctttgtgaggaataaaaaggttagaagggcccccctctctgaaggcccccactccctgggatgctacaatccaatgatggaagatggcattagctacaccaccctgcgctttcccgagatgaacataccacgaactggagatgcagagtcctcagagatgcagagacctcccccggactgcgatgacacggtcacttattcagcattgcacaagcgccaagtgggcgactatgagaacgtcattccagattttccagaagatgaggggattcattactcagagctgatccagtttggggtcggggagcggcctcaggcacaagaaaatgtggactatgtgatcctcaaacattgacactggatgggctgcagcagaggcactgggggcagcgggggccagggaagtccccgagtttccccagacaccgccacatggcttcctcctgcgcgcatgtgcgcacacacacacacacacgcacacacacacacacacactcactgcggagaaccttgtgcctggctcagagccagtctttttggtgagggtaaccccaaacctccaaaactcctgcccctgttctcttccactctccttgctacccagaaatccatctaaatacctgccctgacatgcacacctccccctgcccccaccacggccactggccatctccacccccagctgcttgtgtccctcctgggatctgctcgtcatcatttttccttcccttctccatctctctggccctctacccctgatctgacatccccactcacgaatattatgcccagtttctgcctctgagggaaagcccagaaaaggacagaaacgaagtagaaaggggcccagtcctggcctggcttctcctttggaagtgaggcattgcacggggagacgtacgtatcagcggccccttgactctggggactccgggtttgagatggacacactggtgtggattaacctgccagggagacagagctcacaataaaaatggctcagatgccacttcaaagaa

SEQ ID NO: 288940 - DNA, 3240 bp, Homo sapiens
tgtacttctgccttttgctctcagatgctgccagggtccctgaagagggaagacacgcggaaacagttctagaatacttggctttctctgactcaagtaaatgggtttttgagcaccctgaaaccctctacgcctgggagggggcctgcgtctggatcccctgcacctacagagccctagatggtgacctggaaagcttcatcctgttccacaatcctgagtataacaagaacacctcgaagtttgatgggacaagactctatgaaagcacaaaggatgggaaggttccttctgagcagaaaagggtgcaattcctgggagacaagaataagaactgcacactgagtatccacccggtgcacctcaatgacagtggtcagctggggctgaggatggagtccaagactgagaaatggatggaacgaatacacctcaatgtctctgaaaggccttttccacctcatatccagctccctccagaaattcaagagtcccaggaagtcactctgacctgcttgctgaatttctcctgctatgggtatccgatccaattgcagtggctcctagagggggttccaatgaggcaggctgctgtcacctcgacctccttgaccatcaagtctgtcttcacccggagcgagctcaagttctccccacagtggagtcaccatgggaagattgtgacctgccagcttcaggatgcagatgggaagttcctctccaatgacacggtgcagctgaacgtgaagcacaccccgaagttggagatcaaggtcactcccagtgatgccatagtgagggagggggactctgtgaccatgacctgcgaggtcagcagcagcaacccggagtacacgacggtatcctggctcaaggatgggacctcgctgaagaagcagaatacattcacgctaaacctgcgcgaagtgaccaaggaccagagtgggaagtactgctgtcaggtctccaatgacgtgggcccgggaaggtcggaagaagtgttcctgcaagtgcagtatgccccggaaccttccacggttcagatcctccactcaccggctgtggagggaagtcaagtcgagtttctttgcatgtcactggccaatcctcttccaacaaattacacgtggtaccacaatgggaaagaaatgcagggaaggacagaggagaaagtccacatcccaaagatcctcccctggcacgctgggacttattcctgtgtggcagaaaacattcttggtactggacagaggggcccgggagctgagctggatgtccagtatcctcccaagaaggtgaccacagtgattcaaaaccccatgccgattcgagaaggagacacagtgaccctttcctgtaactacaattccagtaaccccagtgttacccggtatgaatggaaaccccatggcgcctgggaggagccatcgcttggggtgctgaagatccaaaacgttggctgggacaacacaaccatcgcctgcgcagcttgtaatagttggtgctcgtgggcctcccctgtcgccctgaatgtccagtatgccccccgagacgtgagggtccggaaaatcaagcccctttccgagattcactctggaaactcggtcagcctccaatgtgacttctcaagcagccaccccaaagaagtccagttcttctgggagaaaaatggcaggcttctggggaaagaaagccagctgaattttgactccatctccccagaagatgctgggagttacagctgctgggtgaacaactccataggacagacagcgtccaaggcctggacacttgaagtgctgtatgcacccaggaggctgcgtgtgtccatgagcccgggggaccaagtgatggaggggaagagtgcaaccctgacctgtgagagcgacgccaaccctcccgtctcccactacacctggtttgactggaataaccaaagcctcccctaccacagccagaagctgagattggagccggtgaaggtccagcactcgggtgcctactggtgccaggggaccaacagtgtgggcaagggccgttcgcctctcagcaccctcaccgtctactatagcccggagaccatcggcaggcgagtggctgtgggactcgggtcctgcctcgccatcctcatcctggcaatctgtgggctcaagctccagcgacgttggaagaggacacagagccagcaggggcttcaggagaattccagcggccagagcttctttgtgaggaataaaaaggttagaagggcccccctctctgaaggcccccactccctgggatgctacaatccaatgatggaagatggcattagctacaccaccctgcgctttcccgagatgaacataccacgaactggagatgcagagtcctcagagatgcagagacctcccccggactgcgatgacacggtcacttattcagcattgcacaagcgccaagtgggcgactatgagaacgtcattccagattttccagaagatgaggggattcattactcagagctgatccagtttggggtcggggagcggcctcaggcacaagaaaatgtggactatgtgatcctcaaacattgacactggatgggctgcagcagaggcactgggggcagcgggggccagggaagtccccgagtttccccagacaccgccacatggcttcctcctgcgcgcatgtgcgcacacacacacacacacgcacacacacacacacacactcactgcggagaaccttgtgcctggctcagagccagtctttttggtgagggtaaccccaaacctccaaaactcctgcccctgttctcttccactctccttgctacccagaaatccatctaaatacctgccctgacatgcacacctccccctgcccccaccacggccactggccatctccacccccagctgcttgtgtccctcctgggatctgctcgtcatcatttttccttcccttctccatctctctggccctctacccctgatctgacatccccactcacgaatattatgcccagtttctgcctctgagggaaagcccagaaaaggacagaaacgaagtagaaaggggcccagtcctggcctggcttctcctttggaagtgaggcattgcacggggagacgtacgtatcagcggccccttgactctggggactccgggtttgagatggacacactggtgtggattaacctgccagggagacagagctcacaataaaaatggctcagatgccacttcaaagaa

SEQ ID NO: 288941 - DNA, 3082 bp, Homo sapiens
  misc_feature (2946)..(2946): n is a, c, g, or t
gctgtacgccgattcgggatgtcctgaagagggaagacacgcggaaacaggcttgcacccagacacgacaccatgcatctcctcggcccctggctcctgctcctggttctagaatacttggctttctctgactcaagtaaatgggtttttgagcaccctgaaaccctctacgcctgggagggggcctgcgtctggatcccctgcacctacagagccctagatggtgacctggaaagcttcatcctgttccacaatcctgagtataacaagaacacctcgaagtttgatgggacaagactctatgaaagcacaaaggatgggaaggttccttctgagcagaaaagggtgcaattcctgggagacaagaataagaactgcacactgagtatccacccggtgcacctcaatgacagtggtcagctggggctgaggatggagtccaagactgagaaatggatggaacgaatacacctcaatgtctctgaaaggccttttccacctcatatccagctccctccagaaattcaagagtcccaggaagtcactctgacctgcttgctgaatttctcctgctatgggtatccgatccaattgcagtggctcctagagggggttccaatgaggcaggctgctgtcacctcgacctccttgaccatcaagtctgtcttcacccggagcgagctcaagttctccccacagtggagtcaccatgggaagattgtgacctgccagcttcaggatgcagatgggaagttcctctccaatgacacggtgcagctgaacgtgaagcatcctcccaagaaggtgaccacagtgattcaaaaccccatgccgattcgagaaggagacacagtgaccctttcctgtaactacaattccagtaaccccagtgttacccggtatgaatggaaaccccatggcgcctgggaggagccatcgcttggggtgctgaagatccaaaacgttggctgggacaacacaaccatcgcctgcgcagcttgtaatagttggtgctcgtgggcctcccctgtcgccctgaatgtccagtatgccccccgagacgtgagggtccggaaaatcaagcccctttccgagattcactctggaaactcggtcagcctccaatgtgacttctcaagcagccaccccaaagaagtccagttcttctgggagaaaaatggcaggcttctggggaaagaaagccagctgaattttgactccatctccccagaagatgctgggagttacagctgctgggtgaacaactccataggacagacagcgtccaaggcctggacacttgaagtgctgtatgcacccaggaggctgcgtgtgtccatgagcccgggggaccaagtgatggaggggaagagtgcaaccctgacctgtgagagcgacgccaaccctcccgtctcccactacacctggtttgactggaataaccaaagcctcccctaccacagccagaagctgagattggagccggtgaaggtccagcactcgggtgcctactggtgccaggggaccaacagtgtgggcaagggccgttcgcctctcagcaccctcaccgtctactatagcccggagaccatcggcaggcgagtggctgtgggactcgggtcctgcctcgccatcctcatcctggcaatctgtgggctcaagctccagcgacgttggaagaggacacagagccagcaggggcttcaggagaattccagcggccagagcttctttgtgaggaataaaaaggttagaagggcccccctctctgaaggcccccactccctgggatgctacaatccaatgatggaagatggcattagctacaccaccctgcgctttcccgagatgaacataccacgaactggagatgcagagtcctcagagatgcagagacctcccccggactgcgatgacacggtcacttattcagcattgcacaagcgccaagtgggcgactatgagaacgtcattccagattttccagaagatgaggggattcattactcagagctgatccagtttggggtcggggagcggcctcaggcacaagaaaatgtggactatgtgatcctcaaacattgacactggatgggctgcagcagaggcactgggggcagcgggggccagggaagtccccgagtttccccagacaccgccacatggcttcctcctgcgcgcatgtgcgcacacacacacacacacgcacacacacacacacacactcactgcggagaaccttgtgcctggctcagagccagtctttttggtgagggtaaccccaaacctccaaaactcctgcccctgttctcttccactctccttgctacccagaaatccatctaaatacctgccctgacatgcacacctccccctgcccccaccacggccactggccatctccacccccagctgcttgtgtccctcctgggatctgctcgtcatcatttttccttcccttctccatctctctggccctctacccctgatctgacatccccactcacgaatattatgcccagtttctgcctctgagggaaagcccagaaaaggacagaaacgaagtagaaaggggcccagtcctggcctggcttctcctttggaagtgaggcattgcacggggagacgtacgtatcagcggccccttgactctggggactccgggtttgagatggacacactggtgtggattaacctgccagggagacagagctcacaataaaaatggctcagatgccacttcaaagaaaaaaaaaaaaaaaaaaaaaaaaaaaaaaatcgggggcttttttgggggggggggaaaaaggggtatcagaatggggcacaggggtcattaggcgtgtttctgtgaccaaggttttctgtggtaccaaggggggcgtaagaacctcgccgcggcgctcgtccccaatatataggagagacggcgcgagatatgtaaancttctcgcgagatataaagcggccgaggcggttatgaccacggcgcgactataattgagaactcccgcacgcaggaaaaaaccacccccacgcaagcgagaaccgaaacacccaaacgacagaaccccaaatcagg

SEQ ID NO: 288942 - DNA, 3174 bp, Homo sapiens
gctgtacgccgattcgggatgtcctgaagagggaagacacgcggaaacaggcttgcacccagacacgacaccatgcatctcctcggcccctggctcctgctcctggagccctagatggtgacctggaaagcttcatcctgttccacaatcctgagtataacaagaacacctcgaagtttgatgggacaagactctatgaaagcacaaaggatgggaaggttccttctgagcagaaaagggtgcaattcctgggagacaagaataagaactgcacactgagtatccacccggtgcacctcaatgacagtggtcagctggggctgaggatggagtccaagactgagaaatggatggaacgaatacacctcaatgtctctgaaaggccttttccacctcatatccagctccctccagaaattcaagagtcccaggaagtcactctgacctgcttgctgaatttctcctgctatgggtatccgatccaattgcagtggctcctagagggggttccaatgaggcaggctgctgtcacctcgacctccttgaccatcaagtctgtcttcacccggagcgagctcaagttctccccacagtggagtcaccatgggaagattgtgacctgccagcttcaggatgcagatgggaagttcctctccaatgacacggtgcagctgaacgtgaagcacaccccgaagttggagatcaaggtcactcccagtgatgccatagtgagggagggggactctgtgaccatgacctgcgaggtcagcagcagcaacccggagtacacgacggtatcctggctcaaggatgggacctcgctgaagaagcagaatacattcacgctaaacctgcgcgaagtgaccaaggaccagagtgggaagtactgctgtcaggtctccaatgacgtgggcccgggaaggtcggaagaagtgttcctgcaagtgcagtatgccccggaaccttccacggttcagatcctccactcaccggctgtggagggaagtcaagtcgagtttctttgcatgtcactggccaatcctcttccaacaaattacacgtggtaccacaatgggaaagaaatgcagggaaggacagaggagaaagtccacatcccaaagatcctcccctggcacgctgggacttattcctgtgtggcagaaaacattcttggtactggacagaggggcccgggagctgagctggatgtccagtatcctcccaagaaggtgaccacagtgattcaaaaccccatgccgattcgagaaggagacacagtgaccctttcctgtaactacaattccagtaaccccagtgttacccggtatgaatggaaaccccatggcgcctgggaggagccatcgcttggggtgctgaagatccaaaacgttggctgggacaacacaaccatcgcctgcgcagcttgtaatagttggtgctcgtgggcctcccctgtcgccctgaatgtccagtatgccccccgagacgtgagggtccggaaaatcaagcccctttccgagattcactctggaaactcggtcagcctccaatgtgacttctcaagcagccaccccaaagaagtccagttcttctgggagaaaaatggcaggcttctggggaaagaaagccagctgaattttgactccatctccccagaagatgctgggagttacagctgctgggtgaacaactccataggacagacagcgtccaaggcctggacacttgaagtgctgtatgcacccaggaggctgcgtgtgtccatgagcccgggggaccaagtgatggaggggaagagtgcaaccctgacctgtgagagcgacgccaaccctcccgtctcccactacacctggtttgactggaataaccaaagcctcccctaccacagccagaagctgagattggagccggtgaaggtccagcactcgggtgcctactggtgccaggggaccaacagtgtgggcaagggccgttcgcctctcagcaccctcaccgtctactatagcccggagaccatcggcaggcgagtggctgtgggactcgggtcctgcctcgccatcctcatcctggcaatctgtgggctcaagctccagcgacgttggaagaggacacagagccagcaggggcttcaggagaattccagcggccagagcttctttgtgaggaataaaaaggttagaagggcccccctctctgaaggcccccactccctgggatgctacaatccaatgatggaagatggcattagctacaccaccctgcgctttcccgagatgaacataccacgaactggagatgcagagtcctcagagatgcagagacctcccccggactgcgatgacacggtcacttattcagcattgcacaagcgccaagtgggcgactatgagaacgtcattccagattttccagaagatgaggggattcattactcagagctgatccagtttggggtcggggagcggcctcaggcacaagaaaatgtggactatgtgatcctcaaacattgacactggatgggctgcagcagaggcactgggggcagcgggggccagggaagtccccgagtttccccagacaccgccacatggcttcctcctgcgcgcatgtgcgcacacacacacacacacgcacacacacacacacacactcactgcggagaaccttgtgcctggctcagagccagtctttttggtgagggtaaccccaaacctccaaaactcctgcccctgttctcttccactctccttgctacccagaaatccatctaaatacctgccctgacatgcacacctccccctgcccccaccacggccactggccatctccacccccagctgcttgtgtccctcctgggatctgctcgtcatcatttttccttcccttctccatctctctggccctctacccctgatctgacatccccactcacgaatattatgcccagtttctgcctctgagggaaagcccagaaaaggacagaaacgaagtagaaaggggcccagtcctggcctggcttctcctttggaagtgaggcattgcacggggagacgtacgtatcagcggccccttgactctggggactccgggtttgagatggacacactggtgtggattaacctgccagggagacagagctcacaataaaaatggctcagatgccacttcaaagaa

SEQ ID NO: 288943 - DNA, 3249 bp, Homo sapiens
tgtacttctgccttttgctctcagatgctgccagggtccctgaagagggaagacacgcggaaacaggcttgcacccagacacgacaccatgcatctcctcggcccctggctcctgctcctggcaccctgaaaccctctacgcctgggagggggcctgcgtctggatcccctgcacctacagagccctagatggtgacctggaaagcttcatcctgttccacaatcctgagtataacaagaacacctcgaagtttgatgggacaagactctatgaaagcacaaaggatgggaaggttccttctgagcagaaaagggtgcaattcctgggagacaagaataagaactgcacactgagtatccacccggtgcacctcaatgacagtggtcagctggggctgaggatggagtccaagactgagaaatggatggaacgaatacacctcaatgtctctgaaaggccttttccacctcatatccagctccctccagaaattcaagagtcccaggaagtcactctgacctgcttgctgaatttctcctgctatgggtatccgatccaattgcagtggctcctagagggggttccaatgaggcaggctgctgtcacctcgacctccttgaccatcaagtctgtcttcacccggagcgagctcaagttctccccacagtggagtcaccatgggaagattgtgacctgccagcttcaggatgcagatgggaagttcctctccaatgacacggtgcagctgaacgtgaagcacaccccgaagttggagatcaaggtcactcccagtgatgccatagtgagggagggggactctgtgaccatgacctgcgaggtcagcagcagcaacccggagtacacgacggtatcctggctcaaggatgggacctcgctgaagaagcagaatacattcacgctaaacctgcgcgaagtgaccaaggaccagagtgggaagtactgctgtcaggtctccaatgacgtgggcccgggaaggtcggaagaagtgttcctgcaagtgcagtatgccccggaaccttccacggttcagatcctccactcaccggctgtggagggaagtcaagtcgagtttctttgcatgtcactggccaatcctcttccaacaaattacacgtggtaccacaatgggaaagaaatgcagggaaggacagaggagaaagtccacatcccaaagatcctcccctggcacgctgggacttattcctgtgtggcagaaaacattcttggtactggacagaggggcccgggagctgagctggatgtccagtatcctcccaagaaggtgaccacagtgattcaaaaccccatgccgattcgagaaggagacacagtgaccctttcctgtaactacaattccagtaaccccagtgttacccggtatgaatggaaaccccatggcgcctgggaggagccatcgcttggggtgctgaagatccaaaacgttggctgggacaacacaaccatcgcctgcgcagcttgtaatagttggtgctcgtgggcctcccctgtcgccctgaatgtccagtatgccccccgagacgtgagggtccggaaaatcaagcccctttccgagattcactctggaaactcggtcagcctccaatgtgacttctcaagcagccaccccaaagaagtccagttcttctgggagaaaaatggcaggcttctggggaaagaaagccagctgaattttgactccatctccccagaagatgctgggagttacagctgctgggtgaacaactccataggacagacagcgtccaaggcctggacacttgaagtgctgtatgcacccaggaggctgcgtgtgtccatgagcccgggggaccaagtgatggaggggaagagtgcaaccctgacctgtgagagcgacgccaaccctcccgtctcccactacacctggtttgactggaataaccaaagcctcccctaccacagccagaagctgagattggagccggtgaaggtccagcactcgggtgcctactggtgccaggggaccaacagtgtgggcaagggccgttcgcctctcagcaccctcaccgtctactatagcccggagaccatcggcaggcgagtggctgtgggactcgggtcctgcctcgccatcctcatcctggcaatctgtgggctcaagctccagcgacgttggaagaggacacagagccagcaggggcttcaggagaattccagcggccagagcttctttgtgaggaataaaaaggttagaagggcccccctctctgaaggcccccactccctgggatgctacaatccaatgatggaagatggcattagctacaccaccctgcgctttcccgagatgaacataccacgaactggagatgcagagtcctcagagatgcagagacctcccccggactgcgatgacacggtcacttattcagcattgcacaagcgccaagtgggcgactatgagaacgtcattccagattttccagaagatgaggggattcattactcagagctgatccagtttggggtcggggagcggcctcaggcacaagaaaatgtggactatgtgatcctcaaacattgacactggatgggctgcagcagaggcactgggggcagcgggggccagggaagtccccgagtttccccagacaccgccacatggcttcctcctgcgcgcatgtgcgcacacacacacacacacgcacacacacacacacacactcactgcggagaaccttgtgcctggctcagagccagtctttttggtgagggtaaccccaaacctccaaaactcctgcccctgttctcttccactctccttgctacccagaaatccatctaaatacctgccctgacatgcacacctccccctgcccccaccacggccactggccatctccacccccagctgcttgtgtccctcctgggatctgctcgtcatcatttttccttcccttctccatctctctggccctctacccctgatctgacatccccactcacgaatattatgcccagtttctgcctctgagggaaagcccagaaaaggacagaaacgaagtagaaaggggcccagtcctggcctggcttctcctttggaagtgaggcattgcacggggagacgtacgtatcagcggccccttgactctggggactccgggtttgagatggacacactggtgtggattaacctgccagggagacagagctcacaataaaaatggctcagatgccacttcaaagaa

SEQ ID NO: 288944 - DNA, 3539 bp, Homo sapiens
gctgtacgccgattcgggatgtcctgaagagggaagacacgcggaaacaggcttgcacccagacacgacaccatgcatctcctcggcccctggctcctgctcctgggtaaggactgtggcctgggctagtactggggttctgggatgtcagtgggcactggaggaggaggaaagacccaggcagagaggcgtcaacatagggtagggtgggggcagcggtgtgtatagataaatgtacatacaaatatatatgtttcccatatatacatacacttctctcattgcatcctgctgtctttgtgtatctctgtatttctcccactatcttcagagggaattctttagtctttagaaagctctctgctgggtgcagtggctcatgcctgaaatctcagcactttgtgaggctgaggtgggaggatcacttgaggtcaggagttcaaggccagcttggacaacatagcaagacccctatctctaaaaagaataaaaaattaaacaaattttaaaataaaaaataacttttaaaagaaggctctcatgcccccttagtaatgctttctgatcactgtggtgagttttctagaatacttggctttctctgactcaagtaaatgggtttttgagcaccctgaaaccctctacgcctgggagggggcctgcgtctggatcccctgcacctacagagccctagatggtgacctggaaagcttcatcctgttccacaatcctgagtataacaagaacacctcgaagtttgatgggacaagactctatgaaagcacaaaggatgggaaggttccttctgagcagaaaagggtgcaattcctgggagacaagaataagaactgcacactgagtatccacccggtgcacctcaatgacagtggtcagctggggctgaggatggagtccaagactgagaaatggatggaacgaatacacctcaatgtctctgtggagtcaccatgggaagattgtgacctgccagcttcaggatgcagatgggaagttcctctccaatgacacggtgcagctgaacgtgaagcacaccccgaagttggagatcaaggtcactcccagtgatgccatagtgagggagggggactctgtgaccatgacctgcgaggtcagcagcagcaacccggagtacacgacggtatcctggctcaaggatgggacctcgctgaagaagcagaatacattcacgctaaacctgcgcgaagtgaccaaggaccagagtgggaagtactgctgtcaggtctccaatgacgtgggcccgggaaggtcggaagaagtgttcctgcaagtgcagtatgccccggaaccttccacggttcagatcctccactcaccggctgtggagggaagtcaagtcgagtttctttgcatgtcactggccaatcctcttccaacaaattacacgtggtaccacaatgggaaagaaatgcagggaaggacagaggagaaagtccacatcccaaagatcctcccctggcacgctgggacttattcctgtgtggcagaaaacattcttggtactggacagaggggcccgggagctgagctggatgtccagtatcctcccaagaaggtgaccacagtgattcaaaaccccatgccgattcgagaaggagacacagtgaccctttcctgtaactacaattccagtaaccccagtgttacccggtatgaatggaaaccccatggcgcctgggaggagccatcgcttggggtgctgaagatccaaaacgttggctgggacaacacaaccatcgcctgcgcagcttgtaatagttggtgctcgtgggcctcccctgtcgccctgaatgtccagtatgccccccgagacgtgagggtccggaaaatcaagcccctttccgagattcactctggaaactcggtcagcctccaatgtgacttctcaagcagccaccccaaagaagtccagttcttctgggagaaaaatggcaggcttctggggaaagaaagccagctgaattttgactccatctccccagaagatgctgggagttacagctgctgggtgaacaactccataggacagacagcgtccaaggcctggacacttgaagtgctgtatgcacccaggaggctgcgtgtgtccatgagcccgggggaccaagtgatggaggggaagagtgcaaccctgacctgtgagagcgacgccaaccctcccgtctcccactacacctggtttgactggaataaccaaagcctcccctaccacagccagaagctgagattggagccggtgaaggtccagcactcgggtgcctactggtgccaggggaccaacagtgtgggcaagggccgttcgcctctcagcaccctcaccgtctactatagcccggagaccatcggcaggcgagtggctgtgggactcgggtcctgcctcgccatcctcatcctggcaatctgtgggctcaagctccagcgacgttggaagaggacacagagccagcaggggcttcaggagaattccagcggccagagcttctttgtgaggaataaaaaggttagaagggcccccctctctgaaggcccccactccctgggatgctacaatccaatgatggaagatggcattagctacaccaccctgcgctttcccgagatgaacataccacgaactggagatgcagagtcctcagagatgcagagacctcccccggactgcgatgacacggtcacttattcagcattgcacaagcgccaagtgggcgactatgagaacgtcattccagattttccagaagatgaggggattcattactcagagctgatccagtttggggtcggggagcggcctcaggcacaagaaaatgtggactatgtgatcctcaaacattgacactggatgggctgcagcagaggcactgggggcagcgggggccagggaagtccccgagtttccccagacaccgccacatggcttcctcctgcgcgcatgtgcgcacacacacacacacacgcacacacacacacacacactcactgcggagaaccttgtgcctggctcagagccagtctttttggtgagggtaaccccaaacctccaaaactcctgcccctgttctcttccactctccttgctacccagaaatccatctaaatacctgccctgacatgcacacctccccctgcccccaccacggccactggccatctccacccccagctgcttgtgtccctcctgggatctgctcgtcatcatttttccttcccttctccatctctctggccctctacccctgatctgacatccccactcacgaatattatgcccagtttctgcctctgagggaaagcccagaaaaggacagaaacgaagtagaaaggggcccagtcctggcctggcttctcctttggaagtgaggcattgcacggggagacgtacgtatcagcggccccttgactctggggactccgggtttgagatggacacactggtgtggattaacctgccagggagacagagctcacaataaaaatggctcagatgccacttcaaagaa

SEQ ID NO: 288945 - DNA, 3758 bp, Homo sapiens
gctgtacgccgattcgggatgtcctgaagagggaagacacgcggaaacaggcttgcacccagacacgacaccatgcatctcctcggcccctggctcctgctcctgggtaaggactgtggcctgggctagtactggggttctgggatgtcagtgggcactggaggaggaggaaagacccaggcagagaggcgtcaacatagggtagggtgggggcagcggtgtgtatagataaatgtacatacaaatatatatgtttcccatatatacatacacttctctcattgcatcctgctgtctttgtgtatctctgtatttctcccactatcttcagagggaattctttagtctttagaaagctctctgctgggtgcagtggctcatgcctgaaatctcagcactttgtgaggctgagatcggaggatcgtttgagcccaggagtttgagaccagcctgggtaacatggcaagaccctgtctctacaaaatgtttaaaaaactagctaggtgtggtggcttacacctgtaatcccagcactttgggaggccaaggcgggaggatcacttgaggtcaggagttcgagaccagcctggccagcatggcgaaaccctgtctctactagaaatacagaaaaattagctgggtgtggtggtgggcacctgtaatcccagctactcgggaggctgaggcaggaggatcacttgaactggggaggtagaggttacagcgagccaagatcgcgccactgcactccagcctgggtgacagagggaaactccatctcaaaaaaacaacaacacaacaacaacaacaataacaacaaaaaaacaaagcaggactggagagaggtggaatgaagtggcaaggggttcctgaggggtgatttgggacaggacatctaaagccaggtgtacgctcacgtcctcagtcccccaggctcctgcacgggctctgttcttttgcagaaaggccttttccacctcatatccagctccctccagaaattcaagagtcccaggaagtcactctgacctgcttgctgaatttctcctgctatgggtatccgatccaattgcagtggctcctagagggggttccaatgaggcaggctgctgtcacctcgacctccttgaccatcaagtctgtcttcacccggagcgagctcaagttctccccacagtggagtcaccatgggaagattgtgacctgccagcttcaggatgcagatgggaagttcctctccaatgacacggtgcagctgaacgtgaagcacaccccgaagttggagatcaaggtcactcccagtgatgccatagtgagggagggggactctgtgaccatgacctgcgaggtcagcagcagcaacccggagtacacgacggtatcctggctcaaggatgggacctcgctgaagaagcagaatacattcacgctaaacctgcgcgaagtgaccaaggaccagagtgggaagtactgctgtcaggtctccaatgacgtgggcccgggaaggtcggaagaagtgttcctgcaagtgcagtatgccccggaaccttccacggttcagatcctccactcaccggctgtggagggaagtcaagtcgagtttctttgcatgtcactggccaatcctcttccaacaaattacacgtggtaccacaatgggaaagaaatgcagggaaggacagaggagaaagtccacatcccaaagatcctcccctggcacgctgggacttattcctgtgtggcagaaaacattcttggtactggacagaggggcccgggagctgagctggatgtccagtatcctcccaagaaggtgaccacagtgattcaaaaccccatgccgattcgagaaggagacacagtgaccctttcctgtaactacaattccagtaaccccagtgttacccggtatgaatggaaaccccatggcgcctgggaggagccatcgcttggggtgctgaagatccaaaacgttggctgggacaacacaaccatcgcctgcgcagcttgtaatagttggtgctcgtgggcctcccctgtcgccctgaatgtccagtatgccccccgagacgtgagggtccggaaaatcaagcccctttccgagattcactctggaaactcggtcagcctccaatgtgacttctcaagcagccaccccaaagaagtccagttcttctgggagaaaaatggcaggcttctggggaaagaaagccagctgaattttgactccatctccccagaagatgctgggagttacagctgctgggtgaacaactccataggacagacagcgtccaaggcctggacacttgaagtgctgtatgcacccaggaggctgcgtgtgtccatgagcccgggggaccaagtgatggaggggaagagtgcaaccctgacctgtgagagcgacgccaaccctcccgtctcccactacacctggtttgactggaataaccaaagcctcccctaccacagccagaagctgagattggagccggtgaaggtccagcactcgggtgcctactggtgccaggggaccaacagtgtgggcaagggccgttcgcctctcagcaccctcaccgtctactatagcccggagaccatcggcaggcgagtggctgtgggactcgggtcctgcctcgccatcctcatcctggcaatctgtgggctcaagctccagcgacgttggaagaggacacagagccagcaggggcttcaggagaattccagcggccagagcttctttgtgaggaataaaaaggttagaagggcccccctctctgaaggcccccactccctgggatgctacaatccaatgatggaagatggcattagctacaccaccctgcgctttcccgagatgaacataccacgaactggagatgcagagtcctcagagatgcagagacctcccccggactgcgatgacacggtcacttattcagcattgcacaagcgccaagtgggcgactatgagaacgtcattccagattttccagaagatgaggggattcattactcagagctgatccagtttggggtcggggagcggcctcaggcacaagaaaatgtggactatgtgatcctcaaacattgacactggatgggctgcagcagaggcactgggggcagcgggggccagggaagtccccgagtttccccagacaccgccacatggcttcctcctgcgcgcatgtgcgcacacacacacacacacgcacacacacacacacacactcactgcggagaaccttgtgcctggctcagagccagtctttttggtgagggtaaccccaaacctccaaaactcctgcccctgttctcttccactctccttgctacccagaaatccatctaaatacctgccctgacatgcacacctccccctgcccccaccacggccactggccatctccacccccagctgcttgtgtccctcctgggatctgctcgtcatcatttttccttcccttctccatctctctggccctctacccctgatctgacatccccactcacgaatattatgcccagtttctgcctctgagggaaagcccagaaaaggacagaaacgaagtagaaaggggcccagtcctggcctggcttctcctttggaagtgaggcattgcacggggagacgtacgtatcagcggccccttgactctggggactccgggtttgagatggacacactggtgtggattaacctgccagggagacagagctcacaataaaaatggctcagatgccacttcaaagaa

SEQ ID NO: 288946 - DNA, 2907 bp, Homo sapiens
gaagggcaggttcaaagctttgaggcagcagctgggtgggaggacctcagaggctgaagttcaccgcctctgagggccacatggtaggacaggaggcaggagatggagcaggactctggatcccgagggctgaggtgagggtttgggattctatgcaaagcacagaacccgctcgtggtttccagcaggattggcgaggtctggtagatggtgttaggaaccctgcgtgctgctggtggagaccaagaagtagaggaagtgggagggggaagctgagagccgagttaggaggctgtgaccatcacctgggtgaagggactggcaggccatggctttgtcagaataaaagcactttccacaccctccaccctctgaggattccccgccccctccccgactgcccctctgctcctccagacaccccgaagttggagatcaaggtcactcccagtgatgccatagtgagggagggggactctgtgaccatgacctgcgaggtcagcagcagcaacccggagtacacgacggtatcctggctcaaggatgggacctcgctgaagaagcagaatacattcacgctaaacctgcgcgaagtgaccaaggaccagagtgggaagtactgctgtcaggtctccaatgacgtgggcccgggaaggtcggaagaagtgttcctgcaagtgcagtatgccccggaaccttccacggttcagatcctccactcaccggctgtggagggaagtcaagtcgagtttctttgcatgtcactggccaatcctcttccaacaaattacacgtggtaccacaatgggaaagaaatgcagggaaggacagaggagaaagtccacatcccaaagatcctcccctggcacgctgggacttattcctgtgtggcagaaaacattcttggtactggacagaggggcccgggagctgagctggatgtccagtatcctcccaagaaggtgaccacagtgattcaaaaccccatgccgattcgagaaggagacacagtgaccctttcctgtaactacaattccagtaaccccagtgttacccggtatgaatggaaaccccatggcgcctgggaggagccatcgcttggggtgctgaagatccaaaacgttggctgggacaacacaaccatcgcctgcgcagcttgtaatagttggtgctcgtgggcctcccctgtcgccctgaatgtccagtatgccccccgagacgtgagggtccggaaaatcaagcccctttccgagattcactctggaaactcggtcagcctccaatgtgacttctcaagcagccaccccaaagaagtccagttcttctgggagaaaaatggcaggcttctggggaaagaaagccagctgaattttgactccatctccccagaagatgctgggagttacagctgctgggtgaacaactccataggacagacagcgtccaaggcctggacacttgaagtgctgtatgcacccaggaggctgcgtgtgtccatgagcccgggggaccaagtgatggaggggaagagtgcaaccctgacctgtgagagcgacgccaaccctcccgtctcccactacacctggtttgactggaataaccaaagcctcccctaccacagccagaagctgagattggagccggtgaaggtccagcactcgggtgcctactggtgccaggggaccaacagtgtgggcaagggccgttcgcctctcagcaccctcaccgtctactatagcccggagaccatcggcaggcgagtggctgtgggactcgggtcctgcctcgccatcctcatcctggcaatctgtgggctcaagctccagcgacgttggaagaggacacagagccagcaggggcttcaggagaattccagcggccagagcttctttgtgaggaataaaaaggttagaagggcccccctctctgaaggcccccactccctgggatgctacaatccaatgatggaagatggcattagctacaccaccctgcgctttcccgagatgaacataccacgaactggagatgcagagtcctcagagatgcagagacctcccccggactgcgatgacacggtcacttattcagcattgcacaagcgccaagtgggcgactatgagaacgtcattccagattttccagaagatgaggggattcattactcagagctgatccagtttggggtcggggagcggcctcaggcacaagaaaatgtggactatgtgatcctcaaacattgacactggatgggctgcagcagaggcactgggggcagcgggggccagggaagtccccgagtttccccagacaccgccacatggcttcctcctgcgcgcatgtgcgcacacacacacacacacgcacacacacacacacacactcactgcggagaaccttgtgcctggctcagagccagtctttttggtgagggtaaccccaaacctccaaaactcctgcccctgttctcttccactctccttgctacccagaaatccatctaaatacctgccctgacatgcacacctccccctgcccccaccacggccactggccatctccacccccagctgcttgtgtccctcctgggatctgctcgtcatcatttttccttcccttctccatctctctggccctctacccctgatctgacatccccactcacgaatattatgcccagtttctgcctctgagggaaagcccagaaaaggacagaaacgaagtagaaaggggcccagtcctggcctggcttctcctttggaagtgaggcattgcacggggagacgtacgtatcagcggccccttgactctggggactccgggtttgagatggacacactggtgtggattaacctgccagggagacagagctcacaataaaaatggctcagatgccacttcaaagaa

SEQ ID NO: 288947 - DNA, 2709 bp, Homo sapiens
tgtacttctgccttttgctctcagatgctgccagggtccctgaagagggaagacacgcggaaacagttctagaatacttggctttctctgactcaagtaaatgggtttttgagcaccctgaaaccctctacgcctgggagggggcctgcgtctggatcccctgcacctacagagccctagatggtgacctggaaagcttcatcctgttccacaatcctgagtataacaagaacacctcgaagtttgatgggacaagactctatgaaagcacaaaggatgggaaggttccttctgagcagaaaagggtgcaattcctgggagacaagaataagaactgcacactgagtatccacccggtgcacctcaatgacagtggtcagctggggctgaggatggagtccaagactgagaaatggatggaacgaatacacctcaatgtctctgaaaggccttttccacctcatatccagctccctccagaaattcaagagtcccaggaagtcactctgacctgcttgctgaatttctcctgctatgggtatccgatccaattgcagtggctcctagagggggttccaatgaggcaggctgctgtcacctcgacctccttgaccatcaagtctgtcttcacccggagcgagctcaagttctccccacagtggagtcaccatgggaagattgtgacctgccagcttcaggatgcagatgggaagttcctctccaatgacacggtgcagctgaacgtgaagcatcctcccaagaaggtgaccacagtgattcaaaaccccatgccgattcgagaaggagacacagtgaccctttcctgtaactacaattccagtaaccccagtgttacccggtatgaatggaaaccccatggcgcctgggaggagccatcgcttggggtgctgaagatccaaaacgttggctgggacaacacaaccatcgcctgcgcagcttgtaatagttggtgctcgtgggcctcccctgtcgccctgaatgtccagtatgccccccgagacgtgagggtccggaaaatcaagcccctttccgagattcactctggaaactcggtcagcctccaatgtgacttctcaagcagccaccccaaagaagtccagttcttctgggagaaaaatggcaggcttctggggaaagaaagccagctgaattttgactccatctccccagaagatgctgggagttacagctgctgggtgaacaactccataggacagacagcgtccaaggcctggacacttgaagtgctgtatgcacccaggaggctgcgtgtgtccatgagcccgggggaccaagtgatggaggggaagagtgcaaccctgacctgtgagagcgacgccaaccctcccgtctcccactacacctggtttgactggaataaccaaagcctcccctaccacagccagaagctgagattggagccggtgaaggtccagcactcgggtgcctactggtgccaggggaccaacagtgtgggcaagggccgttcgcctctcagcaccctcaccgtctactatagcccggagaccatcggcaggcgagtggctgtgggactcgggtcctgcctcgccatcctcatcctggcaatctgtgggctcaagctccagcgacgttggaagaggacacagagccagcaggggcttcaggagaattccagcggccagagcttctttgtgaggaataaaaaggttagaagggcccccctctctgaaggcccccactccctgggatgctacaatccaatgatggaagatggcattagctacaccaccctgcgctttcccgagatgaacataccacgaactggagatgcagagtcctcagagatgcagagacctcccccggactgcgatgacacggtcacttattcagcattgcacaagcgccaagtgggcgactatgagaacgtcattccagattttccagaagatgaggggattcattactcagagctgatccagtttggggtcggggagcggcctcaggcacaagaaaatgtggactatgtgatcctcaaacattgacactggatgggctgcagcagaggcactgggggcagcgggggccagggaagtccccgagtttccccagacaccgccacatggcttcctcctgcgcgcatgtgcgcacacacacacacacacgcacacacacacacacacactcactgcggagaaccttgtgcctggctcagagccagtctttttggtgagggtaaccccaaacctccaaaactcctgcccctgttctcttccactctccttgctacccagaaatccatctaaatacctgccctgacatgcacacctccccctgcccccaccacggccactggccatctccacccccagctgcttgtgtccctcctgggatctgctcgtcatcatttttccttcccttctccatctctctggccctctacccctgatctgacatccccactcacgaatattatgcccagtttctgcctctgagggaaagcccagaaaaggacagaaacgaagtagaaaggggcccagtcctggcctggcttctcctttggaagtgaggcattgcacggggagacgtacgtatcagcggccccttgactctggggactccgggtttgagatggacacactggtgtggattaacctgccagggagacagagctcacaataaaaatggctcagatgccacttcaaagaa

SEQ ID NO: 288948 - DNA, 2164 bp, Homo sapiens
actggccaatcctctgtccttccctgcatttcggtgcgccattgtggtaccacgtgtaatttgttggaagaaatgcagggaaggacagaggagaaagtccacatcccaaagatcctcccctggcacgctgggacttattcctgtgtggcagaaaacattcttggtactggacagaggggcccgggagctgagctggatgtccagtatcctcccaagaaggtgaccacagtgattcaaaaccccatgccgattcgagaaggagacacagtgaccctttcctgtaactacaattccagtaaccccagtgttacccggtatgaatggaaaccccatggcgcctgggaggagccatcgcttggggtgctgaagatccaaaacgttggctgggacaacacaaccatcgcctgcgcagcttgtaatagttggtgctcgtgggcctcccctgtcgccctgaatgtccagtatgccccccgagacgtgagggtccggaaaatcaagcccctttccgagattcactctggaaactcggtcagcctccaatgtgacttctcaagcagccaccccaaagaagtccagttcttctgggagaaaaatggcaggcttctggggaaagaaagccagctgaattttgactccatctccccagaagatgctgggagttacagctgctgggtgaacaactccataggacagacagcgtccaaggcctggacacttgaagtgctgtatgcacccaggaggctgcgtgtgtccatgagcccgggggaccaagtgatggaggggaagagtgcaaccctgacctgtgagagcgacgccaaccctcccgtctcccactacacctggtttgactggaataaccaaagcctcccctaccacagccagaagctgagattggagccggtgaaggtccagcactcgggtgcctactggtgccaggggaccaacagtgtgggcaagggccgttcgcctctcagcaccctcaccgtctactatagcccggagaccatcggcaggcgagtggctgtgggactcgggtcctgcctcgccatcctcatcctggcaatctgtgggctcaagctccagcgacgttggaagaggacacagagccagcaggggcttcaggagaattccagcggccagagcttctttgtgaggaataaaaaggttagaagggcccccctctctgaaggcccccactccctgggatgctacaatccaatgatggaagatggcattagctacaccaccctgcgctttcccgagatgaacataccacgaactggagatgcagagtcctcagagatgcagagacctcccccggactgcgatgacacggtcacttattcagcattgcacaagcgccaagtgggcgactatgagaacgtcattccagattttccagaagatgaggggattcattactcagagctgatccagtttggggtcggggagcggcctcaggcacaagaaaatgtggactatgtgatcctcaaacattgacactggatgggctgcagcagaggcactgggggcagcgggggccagggaagtccccgagtttccccagacaccgccacatggcttcctcctgcgcgcatgtgcgcacacacacacacacacgcacacacacacacacacactcactgcggagaaccttgtgcctggctcagagccagtctttttggtgagggtaaccccaaacctccaaaactcctgcccctgttctcttccactctccttgctacccagaaatccatctaaatacctgccctgacatgcacacctccccctgcccccaccacggccactggccatctccacccccagctgcttgtgtccctcctgggatctgctcgtcatcatttttccttcccttctccatctctctggccctctacccctgatctgacatccccactcacgaatattatgcccagtttctgcctctgagggaaagcccagaaaaggacagaaacgaagtagaaaggggcccagtcctggcctggcttctcctttggaagtgaggcattgcacggggagacgtacgtatcagcggccccttgactctggggactccgggtttgagatggacacactggtgtggattaacctgccagggagacagagctcacaataaaaatggctcagatgccacttcaaagaa

SEQ ID NO: 288949 - DNA, 2245 bp, Homo sapiens
gctgtacgccgattcgggatgtcctgaagagggaagacacgcggaaacaggcttgcacccagacacgacaccatgcatctcctcggcccctggctcctgctcctggttctagaatacttggctttctctgactcaagtaaatgggtttttgagcaccctgaaaccctctacgcctgggagggggcctgcgtctggatcccctgcacctacagagccctagatggtgacctggaaagcttcatcctgttccacaatcctgagtataacaagaacacctcgaagtttgatgggacaagactctatgaaagcacaaaggatgggaaggttccttctgagcagaaaagggtgcaattcctgggagacaagaataagaactgcacactgagtatccacccggtgcacctcaatgacagtggtcagctggggctgaggatggagtccaagactgagaaatggatggaacgaatacacctcaatgtctctgaaaggccttttccacctcatatccagctccctccagaaattcaagagtcccaggaagtcactctgacctgcttgctgaatttctcctgctatgggtatccgatccaattgcagtggctcctagagggggttccaatgaggcaggctgctgtcacctcgacctccttgaccatcaagtctgtcttcacccggagcgagctcaagttctccccacagtggagtcaccatgggaagattgtgacctgccagcttcaggatgcagatgggaagttcctctccaatgacacggtgcagctgaacgtgaagcatcctcccaagaaggtgaccacagtgattcaaaaccccatgccgattcgagaaggagacacagtgaccctttcctgtaactacaattccagtaaccccagtgttacccggtatgaatggaaaccccatggcgcctgggaggagccatcgcttggggtgctgaagatccaaaacgttggctgggacaacacaaccatcgcctgcgcagcttgtaatagttggtgctcgtgggcctcccctgtcgccctgaatgtccagtatgccccccgagacgtgagggtccggaaaatcaagcccctttccgagattcactctggaaactcggtcagcctccaatgtgacttctcaagcagccaccccaaagaagtccagttcttctgggagaaaaatggcaggcttctggggaaagaaagccagctgaattttgactccatctccccagaagatgctgggagttacagctgctgggtgaacaactccataggacagacagcgtccaaggcctggacacttgaagtgctgtatgcacccaggaggctgcgtgtgtccatgagcccgggggaccaagtgatggaggggaagagtgcaaccctgacctgtgagagcgacgccaaccctcccgtctcccactacacctggtttgactggaataaccaaagcctcccctaccacagccagaagctgagattggagccggtgaaggtccagcactcgggtgcctactggtgccaggggaccaacagtgtgggcaagggccgttcgcctctcagcaccctcaccgtctactatagcccggagaccatcggcaggcgagtggctgtgggactcgggtcctgcctcgccatcctcatcctggcaatctgtgggctcaagctccagcgacgttggaagaggacacagagccagcaggggcttcaggagaattccagcggccagagcttctttgtgaggaataaaaaggttagaagggcccccctctctgaaggcccccactccctgggatgctacaatccaatgatggaagatggcattagctacaccaccctgcgctttcccgagatgaacataccacgaactggagatgcagagtcctcagagatgcagagacctcccccggactgcgatgacacggtcacttattcagcattgcacaagcgccaagtgggcgactatgagaacgtcattccagattttccagaagatgaggggattcattactcagagctgatccagtttggggtcggggagcggcctcaggcacaagaaaatgtggactatgtgatcctcaaacattgacactggatgggctgcagcagaggcactgggggcagcgggggccagggaagtccccgagtttccccagacaccgccacatggcttcctcctgcgcgcatgtgcgcacacacacacacacaaacatataacctatgccaataaaaatgtctcagcaacagtg

SEQ ID NO: 288950 - DNA, 2688 bp, Homo sapiens
gctgtacgccgattcgggatgtcctgaagagggaagacacgcggaaacaggcttgcacccagacacgacaccatgcatctcctcggcccctggctcctgctcctggttctagaatacttggctttctctgactcaagtaaatgggtttttgagcaccctgaaaccctctacgcctgggagggggcctgcgtctggatcccctgcacctacagagccctagatggtgacctggaaagcttcatcctgttccacaatcctgagtataacaagaacacctcgaagtttgatgggacaagactctatgaaagcacaaaggatgggaaggttccttctgagcagaaaagggtgcaattcctgggagacaagaataagaactgcacactgagtatccacccggtgcacctcaatgacagtggtcagctggggctgaggatggagtccaagactgagaaatggatggaacgaatacacctcaatgtctctgaaaggccttttccacctcatatccagctccctccagaaattcaagagtcccaggaagtcactctgacctgcttgctgaatttctcctgctatgggtatccgatccaattgcagtggctcctagagggggttccaatgaggcaggctgctgtcacctcgacctccttgaccatcaagtctgtcttcacccggagcgagctcaagttctccccacagtggagtcaccatgggaagattgtgacctgccagcttcaggatgcagatgggaagttcctctccaatgacacggtgcagctgaacgtgaagcacaccccgaagttggagatcaaggtcactcccagtgatgccatagtgagggagggggactctgtgaccatgacctgcgaggtcagcagcagcaacccggagtacacgacggtatcctggctcaaggatgggacctcgctgaagaagcagaatacattcacgctaaacctgcgcgaagtgaccaaggaccagagtgggaagtactgctgtcaggtctccaatgacgtgggcccgggaaggtcggaagaagtgttcctgcaagtgcagtatgccccggaaccttccacggttcagatcctccactcaccggctgtggagggaagtcaagtcgagtttctttgcatgtcactggccaatcctcttccaacaaattacacgtggtaccacaatgggaaagaaatgcagggaaggacagaggagaaagtccacatcccaaagatcctcccctggcacgctgggacttattcctgtgtggcagaaaacattcttggtactggacagaggggcccgggagctgagctggatgtccagtatcctcccaagaaggtgaccacagtgattcaaaaccccatgccgattcgagaaggagacacagtgaccctttcctgtaactacaattccagtaaccccagtgttacccggtatgaatggaaaccccatggcgcctgggaggagccatcgcttggggtgctgaagatccaaaacgttggctgggacaacacaaccatcgcctgcgcagcttgtaatagttggtgctcgtgggcctcccctgtcgccctgaatgtccagtatgccccccgagacgtgagggtccggaaaatcaagcccctttccgagattcactctggaaactcggtcagcctccaatgtgacttctcaagcagccaccccaaagaagtccagttcttctgggagaaaaatggcaggcttctggggaaagaaagccagctgaattttgactccatctccccagaagatgctgggagttacagctgctgggtgaacaactccataggacagacagcgtccaaggcctggacacttgaagtgctgtatgcacccaggaggctgcgtgtgtccatgagcccgggggaccaagtgatggaggggaagagtgcaaccctgacctgtgagagcgacgccaaccctcccgtctcccactacacctggtttgactggaataaccaaagcctcccctaccacagccagaagctgagattggagccggtgaaggtccagcactcgggtgcctactggtgccaggggaccaacagtgtgggcaagggccgttcgcctctcagcaccctcaccgtctactatagcccggagaccatcggcaggcgagtggctgtgggactcgggtcctgcctcgccatcctcatcctggcaatctgtgggctcaagctccagcgacgttggaagaggacacagagccagcaggggcttcaggagaattccagcggccagagcttctttgtgaggaataaaaaggttagaagggcccccctctctgaaggcccccactccctgggatgctacaatccaatgatggaagatggcattagctacaccaccctgcgctttcccgagatgaacataccacgaactggagatgcagagtcctcagagatgcagagacctcccccggactgcgatgacacggtcacttattcagcattgcacaagcgccaagtgggcgactatgagaacgtcattccagattttccagaagatgaggggattcattactcagagctgatccagtttggggtcggggagcggcctcaggcacaagaaaatgtggactatgtgatcctcaaacattgacaactggtgtggattaacctgccagggagacagagctcacaataaaaatggctcagatgccacttcaaagaa

SEQ ID NO: 288951 - DNA, 1995 bp, Homo sapiens
ccccgactagcccgacagctgagctggatgtccagtatcctcccaagaaggtgaccacagtgattcaaaaccccatgccgattcgagaaggagacacagtgaccctttcctgtaactacaattccagtaaccccagtgttacccggtatgaatggaaaccccatggcgcctgggaggagccatcgcttggggtgctgaagatccaaaacgttggctgggacaacacaaccatcgcctgcgcagcttgtaatagttggtgctcgtgggcctcccctgtcgccctgaatgtccagtatgccccccgagacgtgagggtccggaaaatcaagcccctttccgagattcactctggaaactcggtcagcctccaatgtgacttctcaagcagccaccccaaagaagtccagttcttctgggagaaaaatggcaggcttctggggaaagaaagccagctgaattttgactccatctccccagaagatgctgggagttacagctgctgggtgaacaactccataggacagacagcgtccaaggcctggacacttgaagtgctgtatgcacccaggaggctgcgtgtgtccatgagcccgggggaccaagtgatggaggggaagagtgcaaccctgacctgtgagagcgacgccaaccctcccgtctcccactacacctggtttgactggaataaccaaagcctcccctaccacagccagaagctgagattggagccggtgaaggtccagcactcgggtgcctactggtgccaggggaccaacagtgtgggcaagggccgttcgcctctcagcaccctcaccgtctactatagcccggagaccatcggcaggcgagtggctgtgggactcgggtcctgcctcgccatcctcatcctggcaatctgtgggctcaagctccagcgacgttggaagaggacacagagccagcaggggcttcaggagaattccagcggccagagcttctttgtgaggaataaaaaggttagaagggcccccctctctgaaggcccccactccctgggatgctacaatccaatgatggaagatggcattagctacaccaccctgcgctttcccgagatgaacataccacgaactggagatgcagagtcctcagagatgcagagacctcccccggactgcgatgacacggtcacttattcagcattgcacaagcgccaagtgggcgactatgagaacgtcattccagattttccagaagatgaggggattcattactcagagctgatccagtttggggtcggggagcggcctcaggcacaagaaaatgtggactatgtgatcctcaaacattgacactggatgggctgcagcagaggcactgggggcagcgggggccagggaagtccccgagtttccccagacaccgccacatggcttcctcctgcgcgcatgtgcgcacacacacacacacacgcacacacacacacacacactcactgcggagaaccttgtgcctggctcagagccagtctttttggtgagggtaaccccaaacctccaaaactcctgcccctgttctcttccactctccttgctacccagaaatccatctaaatacctgccctgacatgcacacctccccctgcccccaccacggccactggccatctccacccccagctgcttgtgtccctcctgggatctgctcgtcatcatttttccttcccttctccatctctctggccctctacccctgatctgacatccccactcacgaatattatgcccagtttctgcctctgagggaaagcccagaaaaggacagaaacgaagtagaaaggggcccagtcctggcctggcttctcctttggaagtgaggcattgcacggggagacgtacgtatcagcggccccttgactctggggactccgggtttgagatggacacactggtgtggattaacctgccagggagacagagctcacaataaaaatggctcagatgccacttcaaagaa

SEQ ID NO: 288952 - DNA, 2012 bp, Homo sapiens
  misc_feature (46)..(46): n is a, c, g, or t
tggtacaggtcccgagtccttgggatctgaagagggaagacacgcngaaacagatcctcccaagaaggtgaccacagtgattcaaaaccccatgccgattcgagaaggagacacagtgaccctttcctgtaactacaattccagtaaccccagtgttacccggtatgaatggaaaccccatggcgcctgggaggagccatcgcttggggtgctgaagatccaaaacgttggctgggacaacacaaccatcgcctgcgcagcttgtaatagttggtgctcgtgggcctcccctgtcgccctgaatgtccagtatgccccccgagacgtgagggtccggaaaatcaagcccctttccgagattcactctggaaactcggtcagcctccaatgtgacttctcaagcagccaccccaaagaagtccagttcttctgggagaaaaatggcaggcttctggggaaagaaagccagctgaattttgactccatctccccagaagatgctgggagttacagctgctgggtgaacaactccataggacagacagcgtccaaggcctggacacttgaagtgctgtatgcacccaggaggctgcgtgtgtccatgagcccgggggaccaagtgatggaggggaagagtgcaaccctgacctgtgagagcgacgccaaccctcccgtctcccactacacctggtttgactggaataaccaaagcctcccctaccacagccagaagctgagattggagccggtgaaggtccagcactcgggtgcctactggtgccaggggaccaacagtgtgggcaagggccgttcgcctctcagcaccctcaccgtctactatagcccggagaccatcggcaggcgagtggctgtgggactcgggtcctgcctcgccatcctcatcctggcaatctgtgggctcaagctccagcgacgttggaagaggacacagagccagcaggggcttcaggagaattccagcggccagagcttctttgtgaggaataaaaaggttagaagggcccccctctctgaaggcccccactccctgggatgctacaatccaatgatggaagatggcattagctacaccaccctgcgctttcccgagatgaacataccacgaactggagatgcagagtcctcagagatgcagagacctcccccggactgcgatgacacggtcacttattcagcattgcacaagcgccaagtgggcgactatgagaacgtcattccagattttccagaagatgaggggattcattactcagagctgatccagtttggggtcggggagcggcctcaggcacaagaaaatgtggactatgtgatcctcaaacattgacactggatgggctgcagcagaggcactgggggcagcgggggccagggaagtccccgagtttccccagacaccgccacatggcttcctcctgcgcgcatgtgcgcacacacacacacacacgcacacacacacacacacactcactgcggagaaccttgtgcctggctcagagccagtctttttggtgagggtaaccccaaacctccaaaactcctgcccctgttctcttccactctccttgctacccagaaatccatctaaatacctgccctgacatgcacacctccccctgcccccaccacggccactggccatctccacccccagctgcttgtgtccctcctgggatctgctcgtcatcatttttccttcccttctccatctctctggccctctacccctgatctgacatccccactcacgaatattatgcccagtttctgcctctgagggaaagcccagaaaaggacagaaacgaagtagaaaggggcccagtcctggcctggcttctcctttggaagtgaggcattgcacggggagacgtacgtatcagcggccccttgactctggggactccgggtttgagatggacacactggtgtggattaacctgccagggagacagagctcacaataaaaatggctcagatgccacttcaaagaa

SEQ ID NO: 288953 - DNA, 1839 bp, Homo sapiens
tgtacttctgccttttgctctcagatgctgccagggtccctgaagagggaagacacgcggaaacagatcctcccaagaaggtgaccacagtgattcaaaaccccatgccgattcgagaaggagacacagtgaccctttcctgtaactacaattccagtaaccccagtgttacccggtatgaatggaaaccccatggcgcctgggaggagccatcgcttggggtgctgaagatccaaaacgttggctgggacaacacaaccatcgcctgcgcagcttgtaatagttggtgctcgtgggcctcccctgtcgccctgaatgtccagtatgctgggagttacagctgctgggtgaacaactccataggacagacagcgtccaaggcctggacacttgaagtgctgtatgcacccaggaggctgcgtgtgtccatgagcccgggggaccaagtgatggaggggaagagtgcaaccctgacctgtgagagcgacgccaaccctcccgtctcccactacacctggtttgactggaataaccaaagcctcccctaccacagccagaagctgagattggagccggtgaaggtccagcactcgggtgcctactggtgccaggggaccaacagtgtgggcaagggccgttcgcctctcagcaccctcaccgtctactatagcccggagaccatcggcaggcgagtggctgtgggactcgggtcctgcctcgccatcctcatcctggcaatctgtgggctcaagctccagcgacgttggaagaggacacagagccagcaggggcttcaggagaattccagcggccagagcttctttgtgaggaataaaaaggttagaagggcccccctctctgaaggcccccactccctgggatgctacaatccaatgatggaagatggcattagctacaccaccctgcgctttcccgagatgaacataccacgaactggagatgcagagtcctcagagatgcagagacctcccccggactgcgatgacacggtcacttattcagcattgcacaagcgccaagtgggcgactatgagaacgtcattccagattttccagaagatgaggggattcattactcagagctgatccagtttggggtcggggagcggcctcaggcacaagaaaatgtggactatgtgatcctcaaacattgacactggatgggctgcagcagaggcactgggggcagcgggggccagggaagtccccgagtttccccagacaccgccacatggcttcctcctgcgcgcatgtgcgcacacacacacacacacgcacacacacacacacacactcactgcggagaaccttgtgcctggctcagagccagtctttttggtgagggtaaccccaaacctccaaaactcctgcccctgttctcttccactctccttgctacccagaaatccatctaaatacctgccctgacatgcacacctccccctgcccccaccacggccactggccatctccacccccagctgcttgtgtccctcctgggatctgctcgtcatcatttttccttcccttctccatctctctggccctctacccctgatctgacatccccactcacgaatattatgcccagtttctgcctctgagggaaagcccagaaaaggacagaaacgaagtagaaaggggcccagtcctggcctggcttctcctttggaagtgaggcattgcacggggagacgtacgtatcagcggccccttgactctggggactccgggtttgagatggacacactggtgtggattaacctgccagggagacagagctcacaataaaaatggctcagatgccacttcaaagaa

SEQ ID NO: 288954 - DNA, 2311 bp, Homo sapiens
  misc_feature (46)..(46): n is a, c, g, or t
tggtacaggtcccgagtccttgggatctgaagagggaagacacgcngaaacagatcctcccaagaaggtgaccacagtgattcaaaaccccatgccgattcgagaaggagacacagtgaccctttcctgtaactacaattccagtaaccccagtgttacccggtatgaatggaaaccccatggcgcctgggaggagccatcgcttggggtgctgaagatccaaaacgttggctgggacaacacaaccatcgcctgcgcagcttgtaatagttggtgctcgtgggcctcccctgtcgccctgaatgtccagtgtgagtccctgggctaggcagggggatctgggaggtggcccggctgggatgaggggatgaaggcaacgaggccggagcctgggccagtgtcttcaacagaattgagggacaggagcctggcgtcagggccaaggggaggggaggcctggggacagcaaaagggacagggagcggagaggtcagcttgggacccttgccctccagatgccccccgagacgtgagggtccggaaaatcaagcccctttccgagattcactctggaaactcggtcagcctccaatgtgacttctcaagcagccaccccaaagaagtccagttcttctgggagaaaaatggcaggcttctggggaaagaaagccagctgaattttgactccatctccccagaagatgctgggagttacagctgctgggtgaacaactccataggacagacagcgtccaaggcctggacacttgaagtgctgtgtgagtgagggccggaggctgggagtggagcagagaagggaccagtggcctgcctggtagtgacttcgcaccccctccccctgcccgccatgcagatgcacccaggaggctgcgtgtgtccatgagcccgggggaccaagtgatggaggggaagagtgcaaccctgacctgtgagagcgacgccaaccctcccgtctcccactacacctggtttgactggaataaccaaagcctcccctaccacagccagaagctgagattggagccggtgaaggtccagcactcgggtgcctactggtgccaggggaccaacagtgtgggcaagggccgttcgcctctcagcaccctcaccgtctactatagcccggagaccatcggcaggcgagtggctgtgggactcgggtcctgcctcgccatcctcatcctggcaatctgtgggctcaagctccagcgacgttggaagaggacacagagccagcaggggcttcaggagaattccagcggccagagcttctttgtgaggaataaaaaggttagaagggcccccctctctgaaggcccccactccctgggatgctacaatccaatgatggaagatggcattagctacaccaccctgcgctttcccgagatgaacataccacgaactggagatgcagagtcctcagagatgcagagacctcccccggactgcgatgacacggtcacttattcagcattgcacaagcgccaagtgggcgactatgagaacgtcattccagattttccagaagatgaggggattcattactcagagctgatccagtttggggtcggggagcggcctcaggcacaagaaaatgtggactatgtgatcctcaaacattgacactggatgggctgcagcagaggcactgggggcagcgggggccagggaagtccccgagtttccccagacaccgccacatggcttcctcctgcgcgcatgtgcgcacacacacacacacacgcacacacacacacacacactcactgcggagaaccttgtgcctggctcagagccagtctttttggtgagggtaaccccaaacctccaaaactcctgcccctgttctcttccactctccttgctacccagaaatccatctaaatacctgccctgacatgcacacctccccctgcccccaccacggccactggccatctccacccccagctgcttgtgtccctcctgggatctgctcgtcatcatttttccttcccttctccatctctctggccctctacccctgatctgacatccccactcacgaatattatgcccagtttctgcctctgagggaaagcccagaaaaggacagaaacgaagtagaaaggggcccagtcctggcctggcttctcctttggaagtgaggcattgcacggggagacgtacgtatcagcggccccttgactctggggactccgggtttgagatggacacactggtgtggattaacctgccagggagacagagctcacaataaaaatggctcagatgccacttcaaagaa

SEQ ID NO: 288955 - DNA, 1222 bp, Homo sapiens
cgggtcccttaacgcgttagccgaaggccctgtggttggccgacaatttatagcccggagaccatcggcaggcgagtggctgtgggactcgggtcctgcctcgccatcctcatcctggcaatctgtgggctcaagctccagcgacgttggaagaggacacagagccagcaggggcttcaggagaattccagcggccagagcttctttgtgaggaataaaaaggttagaagggcccccctctctgaaggcccccactccctgggatgctacaatccaatgatggaagatggcattagctacaccaccctgcgctttcccgagatgaacataccacgaactggagatgcagagtcctcagagatgcagagacctcccccggactgcgatgacacggtcacttattcagcattgcacaagcgccaagtgggcgactatgagaacgtcattccagattttccagaagatgaggggattcattactcagagctgatccagtttggggtcggggagcggcctcaggcacaagaaaatgtggactatgtgatcctcaaacattgacactggatgggctgcagcagaggcactgggggcagcgggggccagggaagtccccgagtttccccagacaccgccacatggcttcctcctgcgcgcatgtgcgcacacacacacacacacgcacacacacacacacacactcactgcggagaaccttgtgcctggctcagagccagtctttttggtgagggtaaccccaaacctccaaaactcctgcccctgttctcttccactctccttgctacccagaaatccatctaaatacctgccctgacatgcacacctccccctgcccccaccacggccactggccatctccacccccagctgcttgtgtccctcctgggatctgctcgtcatcatttttccttcccttctccatctctctggccctctacccctgatctgacatccccactcacgaatattatgcccagtttctgcctctgagggaaagcccagaaaaggacagaaacgaagtagaaaggggcccagtcctggcctggcttctcctttggaagtgaggcattgcacggggagacgtacgtatcagcggccccttgactctggggactccgggtttgagatggacacactggtgtggattaacctgccagggagacagagctcacaataaaaatggctcagatgccacttcaaagaa

SEQ ID NO: 288956 - DNA, 1878 bp, Homo sapiens
gctgtacgccgattcgggatgtcctgaagagggaagacacgcggaaacaggcttgcacccagacacgacaccatgcatctcctcggcccctggctcctgctcctggttctagaatacttggctttctctgactcaagtaaatgggtttttgagcaccctgaaaccctctacgcctgggagggggcctgcgtctggatcccctgcacctacagagccctagatggtgacctggaaagcttcatcctgttccacaatcctgagtataacaagaacacctcgaagtttgatgggacaagactctatgaaagcacaaaggatgggaaggttccttctgagcagaaaagggtgcaattcctgggagacaagaataagaactgcacactgagtatccacccggtgcacctcaatgacagtggtcagctggggctgaggatggagtccaagactgagaaatggatggaacgaatacacctcaatgtctctgaaaggccttttccacctcatatccagctccctccagaaattcaagagtcccaggaagtcactctgacctgcttgctgaatttctcctgctatgggtatccgatccaattgcagtggctcctagagggggttccaatgaggcaggctgctgtcacctcgacctccttgaccatcaagtctgtcttcacccggagcgagctcaagttctccccacagtggagtcaccatgggaagattgtgacctgccagcttcaggatgcagatgggaagttcctctccaatgacacggtgcagctgaacgtgaagcacaccccgaagttggagatcaaggtcactcccagtgatgccatagtgagggagggggactctgtgaccatgacctgcgaggtcagcagcagcaacccggagtacacgacggtatcctggctcaaggatgggacctcgctgaagaagcagaatacattcacgctaaacctgcgcgaagtgaccaaggaccagagtgggaagtactgctgtcaggtctccaatgacgtgggcccgggaaggtcggaagaagtgttcctgcaagtgcagtatgccccggaaccttccacggttcagatcctccactcaccggctgtggagggaagtcaagtcgagtttctttgcatgtcactggccaatcctcttccaacaaattacacgtggtaccacaatgggaaagaaatgcagggaaggacagaggagaaagtccacatcccaaagatcctcccctggcacgctgggacttattcctgtgtggcagaaaacattcttggtactggacagaggggcccgggagctgagctggatgtccagtatcctcccaagaaggtgaccacagtgattcaaaaccccatgccgattcgagaaggagacacagtgaccctttcctgtaactacaattccagtaaccccagtgttacccggtatgaatggaaaccccatggcgcctgggaggagccatcgcttggggtgctgaagatccaaaacgttggctgggacaacacaaccatcgcctgcgcagcttgtaatagttgctgcttgtgtccctcctgggatctgctcgtcatcatttttccttcccttctccatctctctggccctctacccctgatctgacatccccactcacgaatattatgcccagtttctgcctctgagggaaagcccagaaaaggacagaaacgaagtagaaaggggcccagtcctggcctggcttctcctttggaagtgaggcattgcacggggagacgtacgtatcagcggccccttgactctggggactccgggtttgagatggacacactggtgtggattaacctgccagggagacagagctcacaataaaaatggctcagatgccacttcaaagaa

SEQ ID NO: 288957 - DNA, 1842 bp, Homo sapiens
gctgtacgccgattcgggatgtcctgaagagggaagacacgcggaaacaggcttgcacccagacacgacaccatgcatctcctcggcccctggctcctgctcctggttctagaatacttggctttctctgactcaagtaaatgggtttttgagcaccctgaaaccctctacgcctgggagggggcctgcgtctggatcccctgcacctacagagccctagatggtgacctggaaagcttcatcctgttccacaatcctgagtataacaagaacacctcgaagtttgatgggacaagactctatgaaagcacaaaggatgggaaggttccttctgagcagaaaagggtgcaattcctgggagacaagaataagaactgcacactgagtatccacccggtgcacctcaatgacagtggtcagctggggctgaggatggagtccaagactgagaaatggatggaacgaatacacctcaatgtctctgaaaggccttttccacctcatatccagctccctccagaaattcaagagtcccaggaagtcactctgacctgcttgctgaatttctcctgctatgggtatccgatccaattgcagtggctcctagagggggttccaatgaggcaggctgctgtcacctcgacctccttgaccatcaagtctgtcttcacccggagcgagctcaagttctccccacagtggagtcaccatgggaagattgtgacctgccagcttcaggatgcagatgggaagttcctctccaatgacacggtgcagctgaacgtgaagcacaccccgaagttggagatcaaggtcactcccagtgatgccatagtgagggagggggactctgtgaccatgacctgcgaggtcagcagcagcaacccggagtacacgacggtatcctggctcaaggatgggacctcgctgaagaagcagaatacattcacgctaaacctgcgcgaagtgaccaaggaccagagtgggaagtactgctgtcaggtctccaatgacgtgggcccgggaaggtcggaagaagtgttcctgcaagtgcagtatgccccggaaccttccacggttcagatcctccactcaccggctgtggagggaagtcaagtcgagtttctttgcatgtcagttagaagggcccccctctctgaaggcccccactccctgggatgctacaatccaatgatggaagatggcattagctacaccaccctgcgctttcccgagatgaacataccacgaactggagatgcagagtcctcagagatgcagagacctcccccggactgcgatgacacggtcacttattcagcattgcacaagcgccaagtgggcgactatgagaacgtcattccagattttccagaagatgaggggattcattactcagagctgatccagtttggggtcggggagcggcctcaggcacaagaaaatgtggactatgtgatcctcaaacattgacactggatgggctgcagcagaggcactgggggcagcgggggccagggaagtccccgagtttccccagacaccgccacatggcttcctcctgcgcgcatgtgcgcacacacacacacacacgcacacacacacacacacactcactgcggagaaccttgtgcctggctcagagccagtctttttggtgagggtaaccccaaacctccaaaactcctgcccctgttctcttccactctccttgctacccagaaatccatctaatactgctgatggaacctccctgcccacagggctggcattccccagtgtgtgcccctggatggcgaaatctccccaaatttggcttaccgttgatccgaaattccatgc

SEQ ID NO: 288958 - DNA, 5701 bp, Homo sapiens
agggcgagcgggcgcgcgaagatggcggcggccgccggcgggccgtgtgtgaggagcagtagagaactgtggactattctgcttggaaggtcagctctgagagagctgagtcagattgaggcagaactgaataaacattggcggcgattgttagaggggctttcttactacaaacctcccagtccaagttcagctgaaaaagtgaaagctaataaagatgtagcttcaccattgaaggaactgggtttaagaatcagcaagtttttgggtcttgatgaagaacagagtgtgcagttactccagtgttacctgcaagaggactacaggggtactcgggactcagtaaagacagtactgcaagatgagaggcagagccaggccttaatcctgaagattgcagattattattatgaagaaagaacctgtattcttcgttgtgtcttacaccttctcacttacttccaagatgaaagacacccctatagggttgaatatgcagactgtgttgataaattggagaaggaactagtttcaaaatacagacagcagttcgaagagctttataaaactgaagcaccaacttgggagacacatggaaatctcatgacagagcgccaagtgtctcgctggtttgttcagtgccttcgggaacagtccatgctgctagaaattattttcctttattatgcatactttgagatggcacccagtgacttacttgtattaaccaagatgtttaaagagcaaggatttggtagtaggcagaccaataggcacctggtggatgagactatggatccttttgtagatcggattggctacttcagtgccctcatcctggtggagggcatggatatcgagtccttgcataagtgtgctttggatgacagaagagaactgcatcagtttgcgcaggatgggcttatttgtcaggatatggactgtttaatgttgacctttggggacattccacatcatgccccagtgcttttggcctgggctctcctccgtcacactctgaacccagaagagacaagcagtgtggtccggaagataggtggcacagccatccagctgaatgtgtttcagtacttgacccgattgctccagtcccttgccagtgggggaaatgattgcaccaccagcactgcatgcatgtgtgtctatggactgctctctttcgttctgacctcgttggagctgcacaccctgggcaatcagcaggatataattgatacagcatgtgaagtattggccgacccttctcttccggaactgttctggggaacagagccaacttctggccttgggatcattctggacagtgtgtgtggaatgtttccccaccttctctccccactcctgcaactgctccgagccctggtatcagggaagtccacagccaaaaaggtgtatagcttcttggataagatgtctttctacaatgaactttataaacacaagcctcatgatgtgatctcccatgaagatggaactctttggcggagacaaacacccaaactcctttatccccttgggggtcaaaccaaccttcgcatacctcaaggcactgtgggccaagtaatgttggatgatagggcatacctggtacgctgggaatactcctatagcagctggaccctctttacctgcgagattgaaatgttgcttcatgttgtttcaactgcagatgtgattcagcactgccagcgagtcaaacccatcattgatctcgtccataaggtcatcagtacagacctgtcgatagcagactgtctcctgcccatcacatctcgcatctacatgctgctgcagcggttaacgacagtgatctccccacctgtggatgtcattgcttcttgtgtcaactgcttaactgttttggctgcccgcaatccagcaaaggtctggactgatcttcgtcacacaggttttttaccatttgtggcccatcctgtctccagcctgagtcagatgattagtgcggaagggatgaatgctggagggtacggaaacctcttgatgaacagtgaacagcctcagggcgagtatggggttactattgcctttctgcgcttgatcaccacccttgtcaaggggcaacttggtagtacccagagccaaggacttgtaccctgtgtaatgtttgtgctgaaggagatgcttcccagctaccataagtggcgctacaactctcatggagtgagggaacagattggttgcctgatcttggagctgattcatgcgatactgaacctgtgccacgagacagacctgcacagcagtcatactcccagcctgcagtttctctgcatctgcagcctggcatacacagaagcaggacagacagttatcaatatcatgggcattggcgtggacaccattgacatggtgatggctgctcagcctcgaagtgatggggcagagggccaggggcagggccagctgctgatcaagacagtgaaactggcattctccgtcaccaacaatgttattcggctgaaacctccttctaatgtggtgtcccccctggaacaggctctctcacaacatggtgctcatggaaacaacctcattgctgttctagccaaatacatctaccacaaacatgaccctgctttgccacgtcttgccattcagctgctgaaacgtctggccacggtggccccaatgtcagtgtatgcttgtctgggcaatgatgcggctgccattcgtgatgccttcctgacccgattgcagagcaaaattgaggacatgcgcatcaaagtcatgattctagagttcctcactgttgcagtagagacccagccaggcctcatcgaactgtttctgaacctggaagttaaggatggcagtgatggctcaaaggaattcagccttgggatgtggagctgtctccatgcagtgctggagctgattgattcccaacagcaagatcgatactggtgcccacccctgctgcatcgtgccgccattgcctttttgcatgctctgtggcaggatcggagggacagtgccatgctggtcctccgaaccaaacccaagttttgggaaaatttaaccagtccgctgtttggaaccctttctcctccctctgaaacatcagagcccagcatcctggaaacctgtgccctaatcatgaagataatttgcttggagatatactatgtagtaaagggttcattagaccagtcattaaaggatacactgaagaaattttccatcgagaaacgctttgcctactggtcagggtatgtcaagtcattggcagttcacgtggccgaaacagaaggcagcagctgcacctccttgttagagtaccagatgctggtgtccgcctggaggatgcttctcatcattgccaccactcatgcagatataatgcacctgactgactctgtggtgcgtcgccagctctttcttgacgtgcttgatggaaccaaagcattactcctagttccagcctcagtgaactgccttcgccttggctccatgaagtgcactctgctgcttatcctcctccggcagtggaagagtattctttctagagagttaggttctgtggatgaaatccttggacccttgacggagatcctggagggagtgctgcaggccgaccagcaactcatggagaagaccaaggccaaggtgttctcagcattcatcacagtgttgcaaatgaaggagatgaaagtaagtgacatcccccagtactcccagctggtgctgaatgtctgtgagaccctccaagaggaagtgattgcactcttcgaccagacccgccacagtctggcattaggcagtgccacagaggacaaggacagcatggagactgacgactgttctcggtcccggcacagggaccagcgtgatggggtgtgtgtcctgggcctgcacctggccaaggagctgtgtgaggtagacgaggatggtgactcctggctgcaggtaacccgcaggctccccatcctacccaccctcctcaccactctagaggtgagccttcgcatgaagcagaacctgcatttcactgaggccacattgcatctgctcctcaccctggctcgcactcagcagggagccacagcagtggctggagctggcatcacccagagcatttgtttgccccttctgagtgtgtaccagctgagcaccaacggcacagcacagacacctagtgcctctcggaagtccctggatgccccctcttggccaggagtctaccgcctgtccatgtccctgatggagcagctgctcaaaactctgcgctacaacttcctgcctgaggccctggacttcgtgggtgtccaccaggagcggaccttacagtgcctcaacgcagtgaggacagtgcagagtctggcctgcctggaggaggcggaccacaccgtgggttttattctgcagctctctaacttcatgaaggagtggcacttccacctgcctcagctcatgcgtgatatccaggtcaacctgggttacttgtgccaggcatgtacctctctcctgcacagtcgaaagatgctgcagcattacttacagaacaaaaatggggatggcctcccctcagctgttgcccagcgagtccagaggccaccgtctgctgcttctgctgccccctcctcctcaaagcagcccgctgctgacacagaggcatcagagcagcaggccttgcacacagtccagtatggccttctcaagatcctcagcaagacgctggcagccctgcgccacttcaccccagatgtctgccagattctgctggatcagtccctggaccttgctgaatacaacttcctgtttgccctgagctttaccactcccacctttgactccgaagtggccccctccttcgggacccttctggccacagtgaatgtggccctcaacatgcttggagagctggacaagaaaaaggagcccctcacccaggcagtggggctcagcacacaggcagaagggaccaggacgttaaagtccctcctgatgtttaccatggaaaactgcttctacctgctcatctctcaggcgatgcggtaccttagggacccggctgtgcacccccgggacaaacagcggatgaagcaggagctcagctctgagttgagcacgctgctgtccagcctctcgcgctacttccgccggggagcccccagctcccctgccactggtgtcctcccctcgccgcagggcaagtccacctctctctccaaagccagccctgagagtcaggagcctctgatccagttggtgcaggcgtttgtccggcatatgcaaagatagggcagtgctgttctgcccacctacccctctccaccagcctacactgcaccctggctggcaggggtgctgctggctgctagggcctatacaatggagggcacctcctgtcacccccctcccggagtagccacgactccagccaccacccactgacgttatttttatactagatgaagaggtcaacagcaggcatggggagccgagtcttctgtgctcaggtcctcacgctgcagacgccccctagaggaactttccttcctttccagcattccccacagcactgccggccaggggagaggcggcagcccagcagagggctctatgcacgggtttcaaacctgttttccacactctgtctttgcagttttggtaattctgtggtctatttatacagatattaaaatcttgtttatagaca

SEQ ID NO: 288959 - DNA, 433 bp, Homo sapiens
atggtctcgatcttctgacctcatgatccgcccgcctcgacctcccaaagtgctgggattacaggcatgagccaccgtgcccggccctaacaatattattatataacaagattactttccaaaaatttaacaaatcgttttgtatattgagattttttgcttttagagagcagacaaaatggctatgaggcagtgtacaagtttgtatgatcagaaagagcaaaattacctctgttctctcattttgcaggagcagtagagaactgtggactattctgcttggaaggtcagctctgagagagctgagtcagattgaggcagaactgaataaacattggcggcgattgttagaggggctttcttactacaaacctcccaggtatggcagttccgggtgtctggttaaagtaattgtcctaaggaagctgacatg

SEQ ID NO: 288960 - DNA, 285 bp, Homo sapiens
agggcgagcgggcgcgcgaagatggcggcggccgccggcgggccgtgtgtgaggtgcggagcgggtcgaatggaccggggtggctgtgaagcgcggtgtcaaagccgagcggaagcggggcgggaattggaggcgggatgtggcgacagtggcagggccaaccccggctggatggacgggcaccgagacgggaggcggttacgtccaaacggtccccgcgcgcggggatctgaagagtcttcttcaggaggggggccggctcttcacccctttcctccgcgctcg

SEQ ID NO: 288961 - DNA, 5668 bp, Homo sapiens
agggcgagcgggcgcgcgaagatggcggcggccgccggcgggccgtgtgtgaggagcagtagagaactgtggactattctgcttggaaggtcagctctgagagagctgagtcagattgaggcagaactgaataaacattggcggcgattgttagaggggctttcttactacaaacctcccagtccaagttcagctgaaaaagtgaaagctaataaagatgtagcttcaccattgaaggaactgggtttaagaatcagcaagtttttgggtcttgatgaagaacagagtgtgcagttactccagtgttacctgcaagaggactacaggggtactcgggactcagtaaagacagtactgcaagatgagaggcagagccaggccttaatcctgaagattgcagattattattatgaagaaagaacctgtattcttcgttgtgtcttacaccttctcacttacttccaagatgaaagacacccctatagggttgaatatgcagactgtgttgataaattggagaaggaactagtttcaaaatacagacagcagttcgaagagctttataaaactgaagcaccaacttgggagacacatggaaatctcatgacagagcgccaagtgtctcgctggtttgttcagtgccttcgggaacagtccatgctgctagaaattattttcctttattatgcatactttgagatggcacccagtgacttacttgtattaaccaagatgtttaaagagcaaggatttggtagtaggcagaccaataggcacctggtggatgagactatggatccttttgtagatcggattggctacttcagtgccctcatcctggtggagggcatggatatcgagtccttgcataagtgtgctttggatgacagaagagaactgcatcagtttgcgcaggatgggcttatttgtcaggatatggactgtttaatgttgacctttggggacattccacatcatgccccagtgcttttggcctgggctctcctccgtcacactctgaacccagaagagacaagcagtgtggtccggaagataggtggcacagccatccagctgaatgtgtttcagtacttgacccgattgctccagtcccttgccagtgggggaaatgattgcaccaccagcactgcatgcatgtgtgtctatggactgctctctttcgttctgacctcgttggagctgcacaccctgggcaatcagcaggatataattgatacagcatgtgaagtattggccgacccttctcttccggaactgttctggggaacagagccaacttctggccttgggatcattctggacagtgtgtgtggaatgtttccccaccttctctccccactcctgcaactgctccgagccctggtatcagggaagtccacagccaaaaaggtgtatagcttcttggataagatgtctttctacaatgaactttataaacacaagcctcatgatgtgatctcccatgaagatggaactctttggcggagacaaacacccaaactcctttatccccttgggggtcaaaccaaccttcgcatacctcaaggcactgtgggccaagtaatgttggatgatagggcatacctggtacgctgggaatactcctatagcagctggaccctctttacctgcgagattgaaatgttgcttcatgttgtttcaactgcagatgtgattcagcactgccagcgagtcaaacccatcattgatctcgtccataaggtcatcagtacagacctgtcgatagcagactgtctcctgcccatcacatctcgcatctacatgctgctgcagcggttaacgacagtgatctccccacctgtggatgtcattgcttcttgtgtcaactgcttaactgttttggctgcccgcaatccagcaaaggtctggactgatcttcgtcacacaggttttttaccatttgtggcccatcctgtctccagcctgagtcagatgattagtgcggaagggatgaatgctggagggtacggaaacctcttgatgaacagtgaacagcctcagggcgagtatggggttactattgcctttctgcgcttgatcaccacccttgtcaaggggcaacttggtagtacccagagccaaggacttgtaccctgtgtaatgtttgtgctgaaggagatgcttcccagctaccataagtggcgctacaactctcatggagtgagggaacagattggttgcctgatcttggagctgattcatgcgatactgaacctgtgccacgagacagacctgcacagcagtcatactcccagcctgcagtttctctgcatctgcagcctggcatacacagaagcaggacagacagttatcaatatcatgggcattggcgtggacaccattgacatggtgatggctgctcagcctcgaagtgatggggcagagggccaggggcagggccagctgctgatcaagacagtgaaactggcattctccgtcaccaacaatgttattcggctgaaacctccttctaatgtggtgtcccccctggaacaggctctctcacaacatgccaaatacatctaccacaaacatgaccctgctttgccacgtcttgccattcagctgctgaaacgtctggccacggtggccccaatgtcagtgtatgcttgtctgggcaatgatgcggctgccattcgtgatgccttcctgacccgattgcagagcaaaattgaggacatgcgcatcaaagtcatgattctagagttcctcactgttgcagtagagacccagccaggcctcatcgaactgtttctgaacctggaagttaaggatggcagtgatggctcaaaggaattcagccttgggatgtggagctgtctccatgcagtgctggagctgattgattcccaacagcaagatcgatactggtgcccacccctgctgcatcgtgccgccattgcctttttgcatgctctgtggcaggatcggagggacagtgccatgctggtcctccgaaccaaacccaagttttgggaaaatttaaccagtccgctgtttggaaccctttctcctccctctgaaacatcagagcccagcatcctggaaacctgtgccctaatcatgaagataatttgcttggagatatactatgtagtaaagggttcattagaccagtcattaaaggatacactgaagaaattttccatcgagaaacgctttgcctactggtcagggtatgtcaagtcattggcagttcacgtggccgaaacagaaggcagcagctgcacctccttgttagagtaccagatgctggtgtccgcctggaggatgcttctcatcattgccaccactcatgcagatataatgcacctgactgactctgtggtgcgtcgccagctctttcttgacgtgcttgatggaaccaaagcattactcctagttccagcctcagtgaactgccttcgccttggctccatgaagtgcactctgctgcttatcctcctccggcagtggaagagtattctttctagagagttaggttctgtggatgaaatccttggacccttgacggagatcctggagggagtgctgcaggccgaccagcaactcatggagaagaccaaggccaaggtgttctcagcattcatcacagtgttgcaaatgaaggagatgaaagtaagtgacatcccccagtactcccagctggtgctgaatgtctgtgagaccctccaagaggaagtgattgcactcttcgaccagacccgccacagtctggcattaggcagtgccacagaggacaaggacagcatggagactgacgactgttctcggtcccggcacagggaccagcgtgatggggtgtgtgtcctgggcctgcacctggccaaggagctgtgtgaggtagacgaggatggtgactcctggctgcaggtaacccgcaggctccccatcctacccaccctcctcaccactctagaggtgagccttcgcatgaagcagaacctgcatttcactgaggccacattgcatctgctcctcaccctggctcgcactcagcagggagccacagcagtggctggagctggcatcacccagagcatttgtttgccccttctgagtgtgtaccagctgagcaccaacggcacagcacagacacctagtgcctctcggaagtccctggatgccccctcttggccaggagtctaccgcctgtccatgtccctgatggagcagctgctcaaaactctgcgctacaacttcctgcctgaggccctggacttcgtgggtgtccaccaggagcggaccttacagtgcctcaacgcagtgaggacagtgcagagtctggcctgcctggaggaggcggaccacaccgtgggttttattctgcagctctctaacttcatgaaggagtggcacttccacctgcctcagctcatgcgtgatatccaggtcaacctgggttacttgtgccaggcatgtacctctctcctgcacagtcgaaagatgctgcagcattacttacagaacaaaaatggggatggcctcccctcagctgttgcccagcgagtccagaggccaccgtctgctgcttctgctgccccctcctcctcaaagcagcccgctgctgacacagaggcatcagagcagcaggccttgcacacagtccagtatggccttctcaagatcctcagcaagacgctggcagccctgcgccacttcaccccagatgtctgccagattctgctggatcagtccctggaccttgctgaatacaacttcctgtttgccctgagctttaccactcccacctttgactccgaagtggccccctccttcgggacccttctggccacagtgaatgtggccctcaacatgcttggagagctggacaagaaaaaggagcccctcacccaggcagtggggctcagcacacaggcagaagggaccaggacgttaaagtccctcctgatgtttaccatggaaaactgcttctacctgctcatctctcaggcgatgcggtaccttagggacccggctgtgcacccccgggacaaacagcggatgaagcaggagctcagctctgagttgagcacgctgctgtccagcctctcgcgctacttccgccggggagcccccagctcccctgccactggtgtcctcccctcgccgcagggcaagtccacctctctctccaaagccagccctgagagtcaggagcctctgatccagttggtgcaggcgtttgtccggcatatgcaaagatagggcagtgctgttctgcccacctacccctctccaccagcctacactgcaccctggctggcaggggtgctgctggctgctagggcctatacaatggagggcacctcctgtcacccccctcccggagtagccacgactccagccaccacccactgacgttatttttatactagatgaagaggtcaacagcaggcatggggagccgagtcttctgtgctcaggtcctcacgctgcagacgccccctagaggaactttccttcctttccagcattccccacagcactgccggccaggggagaggcggcagcccagcagagggctctatgcacgggtttcaaacctgttttccacactctgtctttgcagttttggtaattctgtggtctatttatacagatattaaaatcttgtttatagaca

SEQ ID NO: 288962 - DNA, 3448 bp, Homo sapiens
aggtataaatgaacatgatattttttattagatatttccaaattaccttccaaaaaacattgtaacagtttatacttataacaccaagtattctatcgttgctgcaaggtcttcatcattgtttagtctttgccaatctaataagcaaaaaaatgtttcacttttcagtttgtatttatttaaccatgagggaagttgagcatttctttatactgattactgtctttcctgtgaatttgcgggcatctcatgcttgtttgtggtgatgtcccttttagcccagagctgtagtctggatgcttccctttctgccaattttctgggagctcttcagtgcccttctgtgggagcccattgaggtttttgtggaagcagagctctaagcctgtgtgttccggtctccaccaggtggccccaatgtcagtgtatgcttgtctgggcaatgatgcggctgccattcgtgatgccttcctgacccgattgcagagcaaaattgaggacatgcgcatcaaagtcatgattctagagttcctcactgttgcagtagagacccagccaggcctcatcgaactgtttctgaacctggaagttaaggatggcagtgatggctcaaaggaattcagccttgggatgtggagctgtctccatgcagtgctggagctgattgattcccaacagcaagatcgatactggtgcccacccctgctgcatcgtgccgccattgcctttttgcatgctctgtggcaggatcggagggacagtgccatgctggtcctccgaaccaaacccaagttttgggaaaatttaaccagtccgctgtttggaaccctttctcctccctctgaaacatcagagcccagcatcctggaaacctgtgccctaatcatgaagataatttgcttggagatatactatgtagtaaagggttcattagaccagtcattaaaggatacactgaagaaattttccatcgagaaacgctttgcctactggtcagggtatgtcaagtcattggcagttcacgtggccgaaacagaaggcagcagctgcacctccttgttagagtaccagatgctggtgtccgcctggaggatgcttctcatcattgccaccactcatgcagatataatgcacctgactgactctgtggtgcgtcgccagctctttcttgacgtgcttgatggaaccaaagcattactcctagttccagcctcagtgaactgccttcgccttggctccatgaagtgcactctgctgcttatcctcctccggcagtggaagagtattctttctagagagttaggttctgtggatgaaatccttggacccttgacggagatcctggagggagtgctgcaggccgaccagcaactcatggagaagaccaaggccaaggtgttctcagcattcatcacagtgttgcaaatgaaggagatgaaagtaagtgacatcccccagtactcccagctggtgctgaatgtctgtgagaccctccaagaggaagtgattgcactcttcgaccagacccgccacagtctggcattaggcagtgccacagaggacaaggacagcatggagactgacgactgttctcggtcccggcacagggaccagcgtgatggggtgtgtgtcctgggcctgcacctggccaaggagctgtgtgaggtagacgaggatggtgactcctggctgcaggtaacccgcaggctccccatcctacccaccctcctcaccactctagaggtgagccttcgcatgaagcagaacctgcatttcactgaggccacattgcatctgctcctcaccctggctcgcactcagcagggagccacagcagtggctggagctggcatcacccagagcatttgtttgccccttctgagtgtgtaccagctgagcaccaacggcacagcacagacacctagtgcctctcggaagtccctggatgccccctcttggccaggagtctaccgcctgtccatgtccctgatggagcagctgctcaaaactctgcgctacaacttcctgcctgaggccctggacttcgtgggtgtccaccaggagcggaccttacagtgcctcaacgcagtgaggacagtgcagagtctggcctgcctggaggaggcggaccacaccgtgggttttattctgcagctctctaacttcatgaaggagtggcacttccacctgcctcagctcatgcgtgatatccaggtcaacctgggttacttgtgccaggcatgtacctctctcctgcacagtcgaaagatgctgcagcattacttacagaacaaaaatggggatggcctcccctcagctgttgcccagcgagtccagaggccaccgtctgctgcttctgctgccccctcctcctcaaagcagcccgctgctgacacagaggcatcagagcagcaggccttgcacacagtccagtatggccttctcaagatcctcagcaagacgctggcagccctgcgccacttcaccccagatgtctgccagattctgctggatcagtccctggaccttgctgaatacaacttcctgtttgccctgagctttaccactcccacctttgactccgaagtggccccctccttcgggacccttctggccacagtgaatgtggccctcaacatgcttggagagctggacaagaaaaaggagcccctcacccaggcagtggggctcagcacacaggcagaagggaccaggacgttaaagtccctcctgatgtttaccatggaaaactgcttctacctgctcatctctcaggcgatgcggtaccttagggacccggctgtgcacccccgggacaaacagcggatgaagcaggagctcagctctgagttgagcacgctgctgtccagcctctcgcgctacttccgccggggagcccccagctcccctgccactggtgtcctcccctcgccgcagggcaagtccacctctctctccaaagccagccctgagagtcaggagcctctgatccagttggtgcaggcgtttgtccggcatatgcaaagatagggcagtgctgttctgcccacctacccctctccaccagcctacactgcaccctggctggcaggggtgctgctggctgctagggcctatacaatggagggcacctcctgtcacccccctcccggagtagccacgactccagccaccacccactgacgttatttttatactagatgaagaggtcaacagcaggcatggggagccgagtcttctgtgctcaggtcctcacgctgcagacgccccctagaggaactttccttcctttccagcattccccacagcactgccggccaggggagaggcggcagcccagcagagggctctatgcacgggtttcaaacctgttttccacactctgtctttgcagttttggtaattctgtggtctatttatacagatattaaaatcttgtttatagaca

SEQ ID NO: 288963 - DNA, 3569 bp, Homo sapiens
aggtataaatgaacatgatattttttattagatatttccaaattaccttccaaaaaacattgtaacagtttatacttataacaccaagtattctatcgttgctgcaaggtcttcatcattgtttagtctttgccaatctaataagcaaaaaaatgtttcacttttcagtttgtatttatttaaccatgagggaagttgagcatttctttatactgattactgtctttcctgtgaatttgcgggcatctcatgcttgtttgtggtgatgtcccttttagcccagagctgtagtctggatgcttccctttctgccaattttctgggagctcttcagtgcccttctgtgggagcccattgaggtttttgtggaagcagagctctaagcctgtgtgttccggtctccaccaggtggccccaatgtcagtgtatgcttgtctgggcaatgatgcggctgccattcgtgatgccttcctgacccgattgcagagcaaaattgaggacatgcgcatcaaagtcatgattctagagttcctcactgttgcagtagagacccagccaggcctcatcgaactgtttctgaacctggaagttaaggatggcagtgatggctcaaaggtaagcctgtaacctgggatgacactgggagttggctcactgggaggcagatgctgggctctgcaagtacagctgctggcagtggctgtggaactgaactcttacctgtcccttcttgcaggaattcagccttgggatgtggagctgtctccatgcagtgctggagctgattgattcccaacagcaagatcgatactggtgcccacccctgctgcatcgtgccgccattgcctttttgcatgctctgtggcaggatcggagggacagtgccatgctggtcctccgaaccaaacccaagttttgggaaaatttaaccagtccgctgtttggaaccctttctcctccctctgaaacatcagagcccagcatcctggaaacctgtgccctaatcatgaagataatttgcttggagatatactatgtagtaaagggttcattagaccagtcattaaaggatacactgaagaaattttccatcgagaaacgctttgcctactggtcagggtatgtcaagtcattggcagttcacgtggccgaaacagaaggcagcagctgcacctccttgttagagtaccagatgctggtgtccgcctggaggatgcttctcatcattgccaccactcatgcagatataatgcacctgactgactctgtggtgcgtcgccagctctttcttgacgtgcttgatggaaccaaagcattactcctagttccagcctcagtgaactgccttcgccttggctccatgaagtgcactctgctgcttatcctcctccggcagtggaagagtattctttctagagagttaggttctgtggatgaaatccttggacccttgacggagatcctggagggagtgctgcaggccgaccagcaactcatggagaagaccaaggccaaggtgttctcagcattcatcacagtgttgcaaatgaaggagatgaaagtaagtgacatcccccagtactcccagctggtgctgaatgtctgtgagaccctccaagaggaagtgattgcactcttcgaccagacccgccacagtctggcattaggcagtgccacagaggacaaggacagcatggagactgacgactgttctcggtcccggcacagggaccagcgtgatggggtgtgtgtcctgggcctgcacctggccaaggagctgtgtgaggtagacgaggatggtgactcctggctgcaggtaacccgcaggctccccatcctacccaccctcctcaccactctagaggtgagccttcgcatgaagcagaacctgcatttcactgaggccacattgcatctgctcctcaccctggctcgcactcagcagggagccacagcagtggctggagctggcatcacccagagcatttgtttgccccttctgagtgtgtaccagctgagcaccaacggcacagcacagacacctagtgcctctcggaagtccctggatgccccctcttggccaggagtctaccgcctgtccatgtccctgatggagcagctgctcaaaactctgcgctacaacttcctgcctgaggccctggacttcgtgggtgtccaccaggagcggaccttacagtgcctcaacgcagtgaggacagtgcagagtctggcctgcctggaggaggcggaccacaccgtgggttttattctgcagctctctaacttcatgaaggagtggcacttccacctgcctcagctcatgcgtgatatccaggtcaacctgggttacttgtgccaggcatgtacctctctcctgcacagtcgaaagatgctgcagcattacttacagaacaaaaatggggatggcctcccctcagctgttgcccagcgagtccagaggccaccgtctgctgcttctgctgccccctcctcctcaaagcagcccgctgctgacacagaggcatcagagcagcaggccttgcacacagtccagtatggccttctcaagatcctcagcaagacgctggcagccctgcgccacttcaccccagatgtctgccagattctgctggatcagtccctggaccttgctgaatacaacttcctgtttgccctgagctttaccactcccacctttgactccgaagtggccccctccttcgggacccttctggccacagtgaatgtggccctcaacatgcttggagagctggacaagaaaaaggagcccctcacccaggcagtggggctcagcacacaggcagaagggaccaggacgttaaagtccctcctgatgtttaccatggaaaactgcttctacctgctcatctctcaggcgatgcggtaccttagggacccggctgtgcacccccgggacaaacagcggatgaagcaggagctcagctctgagttgagcacgctgctgtccagcctctcgcgctacttccgccggggagcccccagctcccctgccactggtgtcctcccctcgccgcagggcaagtccacctctctctccaaagccagccctgagagtcaggagcctctgatccagttggtgcaggcgtttgtccggcatatgcaaagatagggcagtgctgttctgcccacctacccctctccaccagcctacactgcaccctggctggcaggggtgctgctggctgctagggcctatacaatggagggcacctcctgtcacccccctcccggagtagccacgactccagccaccacccactgacgttatttttatactagatgaagaggtcaacagcaggcatggggagccgagtcttctgtgctcaggtcctcacgctgcagacgccccctagaggaactttccttcctttccagcattccccacagcactgccggccaggggagaggcggcagcccagcagagggctctatgcacgggtttcaaacctgttttccacactctgtctttgcagttttggtaattctgtggtctatttatacagatattaaaatcttgtttatagaca

SEQ ID NO: 288964 - DNA, 4247 bp, Homo sapiens
aggtataaatgaacatgatattttttattagatatttccaaattaccttccaaaaaacattgtaacagtttatacttataacaccaagtattctatcgttgctgcaaggtcttcatcattgtttagtctttgccaatctaataagcaaaaaaatgtttcacttttcagtttgtatttatttaaccatgagggaagttgagcatttctttatactgattactgtctttcctgtgaatttgcgggcatctcatgcttgtttgtggtgatgtcccttttagcccagagctgtagtctggatgcttccctttctgccaattttctgggagctcttcagtgcccttctgtgggagcccattgaggtttttgtggaagcagagctctaagcctgtgtgttccggtctccaccaggtggccccaatgtcagtgtatgcttgtctgggcaatgatgcggctgccattcgtgatgccttcctgacccgattgcagagcaaaattgaggacatgcgcatcaaagtcatgattctagagttcctcactgttgcagtagagacccagccaggcctcatcgaactgtttctgaacctggaagttaaggatggcagtgatggctcaaaggtaagcctgtaacctgggatgacactgggagttggctcactgggaggcagatgctgggctctgcaagtacagctgctggcagtggctgtggaactgaactcttacctgtcccttcttgcaggaattcagccttgggatgtggagctgtctccatgcagtgctggagctgattgattcccaacagcaagatcgatactggtgcccacccctgctgcatcgtgccgccattgcctttttgcatgctctgtggcaggatcggagggacagtgccatgctggtcctccgaaccaagtaagtctgcctctgggagtagtttcattgttctggtctataaaatgggagtaataatagctcttatcccagaggtttgttgtgacagttcactgggaataagagtgcttagtcctggttcaatacctgggagttttacactaattctctttctaatgctgctgcaagtattaaggatctttaaatattaagcacctggaaggttcagttgcttttgtgttcctgccttttgctaactagctgcatcaaaactcattattcttgagaaacagtagattcaggagagaggcgcttgctcaagtcactggattgaatgaaacattccgttctattggacctgctggcacaaagggaaggagtgttaaaaggctaaatttgggagtctgctgtcttatttccctccctcctcttctgtggggcttttgggaatctacagtggaaggaatcttgaagagtttttattgatcaactctataatgcataagtgtgattcatgagaggaaaatgtaattttatctatggaaacctttcatttatacgggaacaactgacttatcagacacatattaggattgagactggtaaaatatgaagtgaccaccaaagggagcttgagagaggagaaaatgactgtgagagggaaaaagttatgatttcaaacatttatttcctttttagacccaagttttgggaaaatttaaccagtccgctgtttggaaccctttctcctccctctgaaacatcagagcccagcatcctggaaacctgtgccctaatcatgaagataatttgcttggagatatactatgtagtaaagggttcattagaccagtcattaaaggatacactgaagaaattttccatcgagaaacgctttgcctactggtcagggtatgtcaagtcattggcagttcacgtggccgaaacagaaggcagcagctgcacctccttgttagagtaccagatgctggtgtccgcctggaggatgcttctcatcattgccaccactcatgcagatataatgcacctgactgactctgtggtgcgtcgccagctctttcttgacgtgcttgatggaaccaaagcattactcctagttccagcctcagtgaactgccttcgccttggctccatgaagtgcactctgctgcttatcctcctccggcagtggaagagtattctttctagagagttaggttctgtggatgaaatccttggacccttgacggagatcctggagggagtgctgcaggccgaccagcaactcatggagaagaccaaggccaaggtgttctcagcattcatcacagtgttgcaaatgaaggagatgaaagtaagtgacatcccccagtactcccagctggtgctgaatgtctgtgagaccctccaagaggaagtgattgcactcttcgaccagacccgccacagtctggcattaggcagtgccacagaggacaaggacagcatggagactgacgactgttctcggtcccggcacagggaccagcgtgatggggtgtgtgtcctgggcctgcacctggccaaggagctgtgtgaggtagacgaggatggtgactcctggctgcaggtaacccgcaggctccccatcctacccaccctcctcaccactctagaggtgagccttcgcatgaagcagaacctgcatttcactgaggccacattgcatctgctcctcaccctggctcgcactcagcagggagccacagcagtggctggagctggcatcacccagagcatttgtttgccccttctgagtgtgtaccagctgagcaccaacggcacagcacagacacctagtgcctctcggaagtccctggatgccccctcttggccaggagtctaccgcctgtccatgtccctgatggagcagctgctcaaaactctgcgctacaacttcctgcctgaggccctggacttcgtgggtgtccaccaggagcggaccttacagtgcctcaacgcagtgaggacagtgcagagtctggcctgcctggaggaggcggaccacaccgtgggttttattctgcagctctctaacttcatgaaggagtggcacttccacctgcctcagctcatgcgtgatatccaggtcaacctgggttacttgtgccaggcatgtacctctctcctgcacagtcgaaagatgctgcagcattacttacagaacaaaaatggggatggcctcccctcagctgttgcccagcgagtccagaggccaccgtctgctgcttctgctgccccctcctcctcaaagcagcccgctgctgacacagaggcatcagagcagcaggccttgcacacagtccagtatggccttctcaagatcctcagcaagacgctggcagccctgcgccacttcaccccagatgtctgccagattctgctggatcagtccctggaccttgctgaatacaacttcctgtttgccctgagctttaccactcccacctttgactccgaagtggccccctccttcgggacccttctggccacagtgaatgtggccctcaacatgcttggagagctggacaagaaaaaggagcccctcacccaggcagtggggctcagcacacaggcagaagggaccaggacgttaaagtccctcctgatgtttaccatggaaaactgcttctacctgctcatctctcaggcgatgcggtaccttagggacccggctgtgcacccccgggacaaacagcggatgaagcaggagctcagctctgagttgagcacgctgctgtccagcctctcgcgctacttccgccggggagcccccagctcccctgccactggtgtcctcccctcgccgcagggcaagtccacctctctctccaaagccagccctgagagtcaggagcctctgatccagttggtgcaggcgtttgtccggcatatgcaaagatagggcagtgctgttctgcccacctacccctctccaccagcctacactgcaccctggctggcaggggtgctgctggctgctagggcctatacaatggagggcacctcctgtcacccccctcccggagtagccacgactccagccaccacccactgacgttatttttatactagatgaagaggtcaacagcaggcatggggagccgagtcttctgtgctcaggtcctcacgctgcagacgccccctagaggaactttccttcctttccagcattccccacagcactgccggccaggggagaggcggcagcccagcagagggctctatgcacgggtttcaaacctgttttccacactctgtctttgcagttttggtaattctgtggtctatttatacagatattaaaatcttgtttatagaca

SEQ ID NO: 288965 - DNA, 5998 bp, Homo sapiens
agggcgagcgggcgcgcgaagatggcggcggccgccggcgggccgtgtgtgaggagcagtagagaactgtggactattctgcttggaaggtcagctctgagagagctgagtcagattgaggcagaactgaataaacattggcggcgattgttagaggggctttcttactacaaacctcccagtccaagttcagctgaaaaagtgaaagctaataaagatgtagcttcaccattgaaggaactgggtttaagaatcagcaagtttttgggtcttgatgaagaacagagtgtgcagttactccagtgttacctgcaagaggactacaggggtactcgggactcagtaaagacagtactgcaagatgagaggcagagccaggccttaatcctgaagattgcagattattattatgaagaaagaacctgtattcttcgttgtgtcttacaccttctcacttacttccaagatgaaagacacccctatagggttgaatatgcagactgtgttgataaattggagaaggaactagtttcaaaatacagacagcagttcgaagagctttataaaactgaagcaccaacttgggagacacatggaaatctcatgacagagcgccaagtgtctcgctggtttgttcagtgccttcgggaacagtccatgctgctagaaattattttcctttattatgcatactttgagatggcacccagtgacttacttgtattaaccaagatgtttaaagagcaaggatttggtagtaggcagaccaataggcacctggtggatgagactatggatccttttgtagatcggattggctacttcagtgccctcatcctggtggagggcatggatatcgagtccttgcataagtgtgctttggatgacagaagagaactgcatcagtttgcgcaggatgggcttatttgtcaggatatggactgtttaatgttgacctttggggacattccacatcatgccccagtgcttttggcctgggctctcctccgtcacactctgaacccagaagagacaagcagtgtggtccggaagataggtggcacagccatccagctgaatgtgtttcagtacttgacccgattgctccagtcccttgccagtgggggaaatgattgcaccaccagcactgcatgcatgtgtgtctatggactgctctctttcgttctgacctcgttggagctgcacaccctgggcaatcagcaggatataattgatacagcatgtgaagtattggccgacccttctcttccggaactgttctggggaacagagccaacttctggccttgggatcattctggacagtgtgtgtggaatgtttccccaccttctctccccactcctgcaactgctccgagccctggtatcagggaagtccacagccaaaaaggtgtatagcttcttggataagatgtctttctacaatgaactttataaacacaagcctcatgatgtgatctcccatgaagatggaactctttggcggagacaaacacccaaactcctttatccccttgggggtcaaaccaaccttcgcatacctcaaggcactgtgggccaagtaatgttggatgatagggcatacctggtacgctgggaatactcctatagcagctggaccctctttacctgcgagattgaaatgttgcttcatgttgtttcaactgcagatgtgattcagcactgccagcgagtcaaacccatcattgatctcgtccataaggtcatcagtacagacctgtcgatagcagactgtctcctgcccatcacatctcgcatctacatgctgctgcagcggttaacgacagtgatctccccacctgtggatgtcattgcttcttgtgtcaactgcttaactgttttggctgcccgcaatccagcaaaggtctggactgatcttcgtcacacaggttttttaccatttgtggcccatcctgtctccagcctgagtcagatgattagtgcggaagggatgaatgctggagggtacggaaacctcttgatgaacagtgaacagcctcagggcgagtatggggttactattgcctttctgcgcttgatcaccacccttgtcaaggggcaacttggtagtacccagagccaaggacttgtaccctgtgtaatgtttgtgctgaaggagatgcttcccagctaccataagtggcgctacaactctcatggagtgagggaacagattggttgcctgatcttggagctgattcatgcgatactgaacctgtgccacgagacagacctgcacagcagtcatactcccagcctgcagtttctctgcatctgcagcctggcatacacagaagcaggacagacagttatcaatatcatgggcattggcgtggacaccattgacatggtgatggctgctcagcctcgaagtgatggggcagagggccaggggcagggccagctgctgatcaagacagtgaaactggcattctccgtcaccaacaatgttattcggctgaaacctccttctaatgtggtgtcccccctggaacaggctctctcacaacatggtgctcatggaaacaacctcattgctgttctagccaaatacatctaccacaaacatgaccctgctttgccacgtcttgccattcagctgctgaaacgtctggccacggtggccccaatgtcagtgtatgcttgtctgggcaatgatgcggctgccattcgtgatgccttcctgacccgattgcagagcaaaattgaggacatgcgcatcaaagtcatgattctagagttcctcactgttgcagtagagacccagccaggcctcatcgaactgtttctgaacctggaagttaaggatggcagtgatggctcaaaggaattcagccttgggatgtggagctgtctccatgcagtgctggagctgattgattcccaacagcaagatcgatactggtgcccacccctgctgcatcgtgccgccattgcctttttgcatgctctgtggcaggatcggagggacagtgccatgctggtcctccgaaccaaacccaagttttgggaaaatttaaccagtccgctgtttggaaccctttctcctccctctgaaacatcagagcccagcatcctggaaacctgtgccctaatcatgaagataatttgcttggagatatactatgtagtaaagggttcattagaccagtcattaaaggatacactgaagaaattttccatcgagaaacgctttgcctactggtcagggtatgtcaagtcattggcagttcacgtggccgaaacagaaggcagcagctgcacctccttgttagagtaccagatgctggtgtccgcctggaggatgcttctcatcattgccaccactcatgcagatataatgcacctgactgactctgtggtgcgtcgccagctctttcttgacgtgcttgatggaaccaaagcattactcctagttccagcctcagtgaactgccttcgccttggctccatgaagtgcactctgctgcttatcctcctccggcagtggaagagtattctttctagagagttaggttctgtggatgaaatccttggacccttgacggagatcctggagggagtgctgcaggccgaccagcaactcatggagaagaccaaggccaaggtgttctcagcattcatcacagtgttgcaaatgaaggagatgaaagtaagtgacatcccccagtactcccagctggtgctgaatgtctgtgagaccctccaagaggaagtgattgcactcttcgaccagacccgccacagtctggcattaggcagtgccacagaggacaaggacagcatggagactgacgactgttctcggtcccggcacagggaccagcgtgatggggtgtgtgtcctgggcctgcacctggccaaggagctgtgtgaggtagacgaggatggtgactcctggctgcaggtaacccgcaggctccccatcctacccaccctcctcaccactctagaggtgagccttcgcatgaagcagaacctgcatttcactgaggccacattgcatctgctcctcaccctggctcgcactcagcagggagccacagcagtggctggagctggcatcacccagagcatttgtttgccccttctgagtgtgtaccagctgagcaccaacggcacagcacagacacctagtgcctctcggaagtccctggatgccccctcttggccaggagtctaccgcctgtccatgtccctgatggagcagctgctcaaaactctgcgctacaacttcctgcctgaggccctggacttcgtgggtgtccaccaggagcggaccttacagtgcctcaacgcagtgaggacagtgcagagtctggcctgcctggaggaggcggaccacaccgtgggttttattctgcagctctctaacttcatgaaggagtggcacttccacctgcctcagctcatgcgtgatatccaggtcaacctgggttacttgtgccaggcatgtacctctctcctgcacagtcgaaagatgctgcagcattacttacagaacaaaaatggggatggcctcccctcagctgttgcccagcgagtccagaggccaccgtctgctgcttctgctgccccctcctcctcaaagcagcccgctgctgacacagaggcatcagagcagcaggccttgcacacagtccagtatggccttctcaagatcctcagcaagacgctggcagccctgcgccacttcaccccagatgtctgccagattctgctggatcagtccctggaccttgctgaatacaacttcctgtttgccctgagctttaccactcccacctttgactccgaagtggccccctccttcgggacccttctggccacagtgaatgtggccctcaacatgcttggagagctggacaagaaaaaggagcccctcacccaggcagtggggctcagcacacaggcagaagggaccaggacgttaaagtccctcctgatgtttaccatggaaaactgcttctacctgctcatctctcaggcgatgcggtaccttagggacccggctgtgcacccccgggacaaacagcggatgaagcaggagctcagctctgagttgagcacgctgctgtccagcctctcgcgctacttccgccggggagcccccagctcccctgccactggtgtcctcccctcgccgcagggcaagtccacctctctctccaaagccagccctgagagtcaggagcctctgatccagttggtgcaggcgtttgtccggcatatgcaaagatagggcagtgctgttctgcccacctacccctctccaccagcctacactgcaccctggctggcaggggtgctgctggctgctagggcctatacaatggagggcacctcctgtcacccccctcccggagtagccacgactccagccaccacccactgacgttatttttatactagatgaagaggtcaacagcaggcatggggagccgagtcttctgtgctcaggtcctcacgctgcagacgccccctagaggaactttccttcctttccagcattccccacagcactgccggccaggggagaggcggcagcccagcagagggctctatgcacgggtttcaaacctgttttccacactctgtctttgcagttttggtaattctgtggtctatttatacagatattaaaatcttgtttatagacagctgtgtgatgtttaacttcaaagcccagggatgacaacgtggctctcagaacctagaaaactcccctggccaggcgcctgggagtggggctgcagcctcgggggaaggcaggtactgatggatggctagttcaccagcatctcctcattcctgtccttgggctgagggtttggctgggtgggcgctgtcagatattcccttccttggcctgcgctggtcctgtccttgaccctgctttcattggcccagtgggctgagctcatccctgggtgagcctttcttgaagctctgtgcct

SEQ ID NO: 288966 - DNA, 5634 bp, Homo sapiens
agggcgagcgggcgcgcgaagatggcggcggccgccggcgggccgtgtgtgaggagcagtagagaactgtggactattctgcttggaaggtcagctctgagagagctgagtcagattgaggcagaactgaataaacattggcggcgattgttagaggggctttcttactacaaacctcccagtccaagttcagctgaaaaagtgaaagctaataaagatgtagcttcaccattgaaggaactgggtttaagaatcagcaagtttttgggtcttgatgaagaacagagtgtgcagttactccagtgttacctgcaagaggactacaggggtactcgggactcagtaaagacagtactgcaagatgagaggcagagccaggccttaatcctgaagattgcagattattattatgaagaaagaacctgtattcttcgttgtgtcttacaccttctcacttacttccaagatgaaagacacccctatagggttgaatatgcagactgtgttgataaattggagaaggaactagtttcaaaatacagacagcagttcgaagagctttataaaactgaagcaccaacttgggagacacatggaaatctcatgacagagcgccaagtgtctcgctggtttgttcagtgccttcgggaacagtccatgctgctagaaattattttcctttattatgcatactttgagatggcacccagtgacttacttgtattaaccaagatgtttaaagagcaaggatttggtagtaggcagaccaataggcacctggtggatgagactatggatccttttgtagatcggattggctacttcagtgccctcatcctggtggagggcatggatatcgagtccttgcataagtgtgctttggatgacagaagagaactgcatcagtttgcgcaggatgggcttatttgtcaggatatggactgtttaatgttgacctttggggacattccacatcatgccccagtgcttttggcctgggctctcctccgtcacactctgaacccagaagagacaagcagtgtggtccggaagataggtggcacagccatccagctgaatgtgtttcagtacttgacccgattgctccagtcccttgccagtgggggaaatgattgcaccaccagcactgcatgcatgtgtgtctatggactgctctctttcgttctgacctcgttggagctgcacaccctgggcaatcagcaggatataattgatacagcatgtgaagtattggccgacccttctcttccggaactgttctggggaacagagccaacttctggccttgggatcattctggacagtgtgtgtggaatgtttccccaccttctctccccactcctgcaactgctccgagccctggtatcagggaagtccacagccaaaaaggtgtatagcttcttggataagatgtctttctacaatgaactttataaacacaagcctcatgatgtgatctcccatgaagatggaactctttggcggagacaaacacccaaactcctttatccccttgggggtcaaaccaaccttcgcatacctcaaggcactgtgggccaagtaatgttggatgatagggcatacctggtacgctgggaatactcctatagcagctggaccctctttacctgcgagattgaaatgttgcttcatgttgtttcaactgcagatgtgattcagcactgccagcgagtcaaacccatcattgatctcgtccataaggtcatcagtacagacctgtcgatagcagactgtctcctgcccatcacatctcgcatctacatgctgctgcagcggttaacgacagtgatctccccacctgtggatgtcattgcttcttgtgtcaactgcttaactgttttggctgcccgcaatccagcaaaggtctggactgatcttcgtcacacaggttttttaccatttgtggcccatcctgtctccagcctgagtcagatgattagtgcggaagggatgaatgctggagggtacggaaacctcttgatgaacagtgaacagcctcagggcgagtatggggttactattgcctttctgcgcttgatcaccacccttgtcaaggggcaacttggtagtacccagagccaaggacttgtaccctgtgtaatgtttgtgctgaaggagatgcttcccagctaccataagtggcgctacaactctcatggagtgagggaacagattggttgcctgatcttggagctgattcatgcgatactgaacctgtgccacgagacagacctgcacagcagtcatactcccagcctgcagtttctctgcatctgcagcctggcatacacagaagcaggacagacagttatcaatatcatgggcattggcgtggacaccattgacatggtgatggctgctcagcctcgaagtgatggggcagagggccaggggcagggccagctgctgatcaagacagtgaaactggcattctccgtcaccaacaatgttattcggctgaaacctccttctaatgtggtgtcccccctggaacaggctctctcacaacatggtgctcatggaaacaacctcattgctgttctagccaaatacatctaccacaaacatgaccctgctttgccacgtcttgccattcagctgctgaaacgtctggccacggtggccccaatgtcagtgtatgcttgtctgggcaatgatgcggctgccattcgtgatgccttcctgacccgattgcagagcaaaattgaggacatgcgcatcaaagtcatgattctagagttcctcactgttgcagtagagacccagccaggcctcatcgaactgtttctgaacctggaagttaaggatggcagtgatggctcaaaggaattcagccttgggatgtggagctgtctccatgcagtgctggagctgattgattcccaacagcaagatcgatactggtgcccacccctgctgcatcgtgccgccattgcctttttgcatgctctgtggcaggatcggagggacagtgccatgctggtcctccgaaccaaacccaagttttgggaaaatttaaccagtccgctgtttggaaccctttctcctccctctgaaacatcagagcccagcatcctggaaacctgtgccctaatcatgaagataatttgcttggagatatactatgtagtaaagggttcattagaccagtcattaaaggatacactgaagaaattttccatcgagaaacgctttgcctactggtcagggtatgtcaagtcattggcagttcacgtggccgaaacagaaggcagcagctgcacctccttgttagagtaccagatgctggtgtccgcctggaggatgcttctcatcattgccaccactcatgcagatataatgcacctgactgactctgtggtgcgtcgccagctctttcttgacgtgcttgatggaaccaaagcattactcctagttccagcctcagtgaactgccttcgccttggctccatgaagtgcactctgctgcttatcctcctccggcagtggaagagtattctttctagagagttaggttctgtggatgaaatccttggacccttgacggagatcctggagggagtgctgcaggccgaccagcaactcatggagaagaccaaggccaaggtgttctcagcattcatcacagtgttgcaaatgaaggagatgaaagtaagtgacatcccccagtactcccagctggtgctgaatgtctgtgagaccctccaagaggaagtgattgcactcttcgaccagacccgccacagtctggcattaggcagtgccacagaggacaaggacagcatggagactgacgactgttctcggtcccggcacagggaccagcgtgatggggtgtgtgtcctgggcctgcacctggccaaggagctgtgtgaggtagacgaggatggtgactcctggctgcaggtaacccgcaggctccccatcctacccaccctcctcaccactctagaggtgagccttcgcatgaagcagaacctgcatttcactgaggccacattgcatctgctcctcaccctggctcgcactcagcagggagccacagcagtggctggagctggcatcacccagagcatttgtttgccccttctgagtgtgtaccagctgagcaccaacggcacagcacagacacctagtgcctctcggaagtccctggatgccccctcttggccaggagtctaccgcctgtccatgtccctgatggagcagctgctcaaaactctgcgctacaacttcctgcctgaggccctggacttcgtgggtgtccaccaggagcggaccttacagtgcctcaacgcagtgaggacagtgcagagtctggcctgcctggaggaggcggaccacaccgtgggttttattctgcagctctctaacttcatgaaggagtggcacttccacctgcctcagctcatgcgtgatatccaggtcaacctgggttacttgtgccaggcatgtacctctctcctgcacagtcgaaagatgctgcagcattacttacagaacaaaaatggggatggcctcccctcagctgttgcccagcgagtccagaggccaccgtctgctgcttctgctgccccctcctccttctcaagatcctcagcaagacgctggcagccctgcgccacttcaccccagatgtctgccagattctgctggatcagtccctggaccttgctgaatacaacttcctgtttgccctgagctttaccactcccacctttgactccgaagtggccccctccttcgggacccttctggccacagtgaatgtggccctcaacatgcttggagagctggacaagaaaaaggagcccctcacccaggcagtggggctcagcacacaggcagaagggaccaggacgttaaagtccctcctgatgtttaccatggaaaactgcttctacctgctcatctctcaggcgatgcggtaccttagggacccggctgtgcacccccgggacaaacagcggatgaagcaggagctcagctctgagttgagcacgctgctgtccagcctctcgcgctacttccgccggggagcccccagctcccctgccactggtgtcctcccctcgccgcagggcaagtccacctctctctccaaagccagccctgagagtcaggagcctctgatccagttggtgcaggcgtttgtccggcatatgcaaagatagggcagtgctgttctgcccacctacccctctccaccagcctacactgcaccctggctggcaggggtgctgctggctgctagggcctatacaatggagggcacctcctgtcacccccctcccggagtagccacgactccagccaccacccactgacgttatttttatactagatgaagaggtcaacagcaggcatggggagccgagtcttctgtgctcaggtcctcacgctgcagacgccccctagaggaactttccttcctttccagcattccccacagcactgccggccaggggagaggcggcagcccagcagagggctctatgcacgggtttcaaacctgttttccacactctgtctttgcagttttggtaattctgtggtctatttatacagatattaaaatcttgtttatagaca

SEQ ID NO: 288967 - DNA, 5614 bp, Homo sapiens
agggcgagcgggcgcgcgaagatggcggcggccgccggcgggccgtgtgtgaggagcagtagagaactgtggactattctgcttggaaggtcagctctgagagagctgagtcagattgaggcagaactgaataaacattggcggcgattgttagaggggctttcttactacaaacctcccagtccaagttcagctgaaaaagtgaaagctaataaagatgtagcttcaccattgaaggaactgggtttaagaatcagcaagtttttgggtcttgatgaagaacagagtgtgcagttactccagtgttacctgcaagaggactacaggggtactcgggactcagtaaagacagtactgcaagatgagaggcagagccaggccttaatcctgaagattgcagattattattatgaagaaagaacctgtattcttcgttgtgtcttacaccttctcacttacttccaagatgaaagacacccctatagggttgaatatgcagactgtgttgataaattggagaaggaactagtttcaaaatacagacagcagttcgaagagctttataaaactgaagcaccaacttgggagacacatggaaatctcatgacagagcgccaagtgtctcgctggtttgttcagtgccttcgggaacagtccatgctgctagaaattattttcctttattatgcatactttgagatggcacccagtgacttacttgtattaaccaagatgtttaaagagcaaggatttggtagtaggcagaccaataggcacctggtggatgagactatggatccttttgtagatcggattggctacttcagtgccctcatcctggtggagggcatggatatcgagtccttgcataagtgtgctttggatgacagaagagaactgcatcagtttgcgcaggatgggcttatttgtcaggatatggactgtttaatgttgacctttggggacattccacatcatgccccagtgcttttggcctgggctctcctccgtcacactctgaacccagaagagacaagcagtgtggtccggaagataggtggcacagccatccagctgaatgtgtttcagtacttgacccgattgctccagtcccttgccagtgggggaaatgattgcaccaccagcactgcatgcatgtgtgtctatggactgctctctttcgttctgacctcgttggagctgcacaccctgggcaatcagcaggatataattgatacagcatgtgaagtattggccgacccttctcttccggaactgttctggggaacagagccaacttctggccttgggatcattctggacagtgtgtgtggaatgtttccccaccttctctccccactcctgcaactgctccgagccctggtatcagggaagtccacagccaaaaaggtgtatagcttcttggataagatgtctttctacaatgaactttataaacacaagcctcatgatgtgatctcccatgaagatggaactctttggcggagacaaacacccaaactcctttatccccttgggggtcaaaccaaccttcgcatacctcaaggcactgtgggccaagtaatgttggatgatagggcatacctggtacgctgggaatactcctatagcagctggaccctctttacctgcgagattgaaatgttgcttcatgttgtttcaactgcagatgtgattcagcactgccagcgagtcaaacccatcattgatctcgtccataaggtcatcagtacagacctgtcgatagcagactgtctcctgcccatcacatctcgcatctacatgctgctgcagcggttaacgacagtgatctccccacctgtggatgtcattgcttcttgtgtcaactgcttaactgttttggctgcccgcaatccagcaaaggtctggactgatcttcgtcacacaggttttttaccatttgtggcccatcctgtctccagcctgagtcagatgattagtgcggaagggatgaatgctggagggtacggaaacctcttgatgaacagtgaacagcctcagggcgagtatggggttactattgcctttctgcgcttgatcaccacccttgtcaaggggcaacttggtagtacccagagccaaggacttgtaccctgtgtaatgtttgtgctgaaggagatgcttcccagctaccataagtggcgctacaactctcatggagtgagggaacagattggttgcctgatcttggagctgattcatgcgatactgaacctgtgccacgagacagacctgcacagcagtcatactcccagcctgcagtttctctgcatctgcagcctggcatacacagaagcaggacagacagttatcaatatcatgggcattggcgtggacaccattgacatggtgatggctgctcagcctcgaagtgatggggcagagggccaggggcagggccagctgctgatcaagacagtgaaactggcattctccgtcaccaacaatgttattcggctgaaacctccttctaatgtggtgtcccccctggaacaggctctctcacaacatggtgctcatggaaacaacctcattgctgttctagccaaatacatctaccacaaacatgaccctgctttgccacgtcttgccattcagctgctgaaacgtctggccacggtggccccaatgtcagtgtatgcttgtctgggcaatgatgcggctgccattcgtgatgccttcctgacccgattgcagagcaaaattgaggacatgcgcatcaaagtcatgattctagagttcctcactgttgcagtagagacccagccaggcctcatcgaactgtttctgaacctggaagttaaggatggcagtgatggctcaaaggaattcagccttgggatgtggagctgtctccatgcagtgctggagctgattgattcccaacagcaagatcgatactggtgcccacccctgctgcatcgtgccgccattgcctttttgcatgctctgtggcaggatcggagggacagtgccatgctggtcctccgaaccaaacccaagttttgggaaaatttaaccagtccgctgtttggaaccctttctcctccctctgaaacatcagagcccagcatcctggaaacctgtgccctaatcatgaagataatttgcttggagatatactatgtagtaaagggttcattagaccagtcattaaaggatacactgaagaaattttccatcgagaaacgctttgcctactggtcagggtatgtcaagtcattggcagttcacgtggccgaaacagaaggcagcagctgcacctccttgttagagtaccagatgctggtgtccgcctggaggatgcttctcatcattgccaccactcatgcagatataatgcacctgactgactctgtggtgcgtcgccagctctttcttgacgtgcttgatggaaccaaagcattactcctagttccagcctcagtgaactgccttcgccttggctccatgaagtgcactctgctgcttatcctcctccggcagtggaagagtattctttctagagagttaggttctgtggatgaaatccttggacccttgacggagatcctggagggagtgctgcaggccgaccagcaactcatggagaagaccaaggccaaggtgttctcagcattcatcacagtgttgcaaatgaaggagatgaaagtaagtgacatcccccagtactcccagctggtgctgaatgtctgtgagaccctccaagaggaagtgattgcactcttcgaccagacccgccacagtctggcattaggcagtgccacagaggacaaggacagcatggagactgacgactgttctcggtcccggcacagggaccagcgtgatggggtgtgtgtcctgggcctgcacctggccaaggagctgtgtgaggtagacgaggatggtgactcctggctgcaggtaacccgcaggctccccatcctacccaccctcctcaccactctagaggtgagccttcgcatgaagcagaacctgcatttcactgaggccacattgcatctgctcctcaccctggctcgcactcagcagggagccacagcagtggctggagctggcatcacccagagcatttgtttgccccttctgagtgtgtaccagctgagcaccaacggcacagcacagacacctagtgcctctcggaagtccctggatgccccctcttggccaggagtctaccgcctgtccatgtccctgatggagcagctgctcaaaactctgcgctacaacttcctgcctgaggccctggacttcgtgggtgtccaccaggagcggaccttacagtgcctcaacgcagtgaggacagtgcagagtctggcctgcctggaggaggcggaccacaccgtgggttttattctgcagctctctaacttcatgaaggagtggcacttccacctgcctcagctcatgcgtgatatccaggtcaacctgggttacttgtgccaggcatgtacctctctcctgcacagtcgaaagatgctgcagcattacttacagaacaaaaatggggatggcctcccctcagctgttgcccagcgagtccagaggccaccgtctgctgcttctgctgccccctcctcctcaaagcagcccgctgctgacacagaggcatcagagcagcaggccttgcacacagtccagtatggccttctcaagatcctcagcaagacgctggcagccctgcgccacttcaccccagatgtctgccagattctgctggatcagtccctggaccttgctgaatacaacttcctgtttgccctgagctttaccactcccacctttgactccgaagtggccccctccttcgggacccttctggccacagtgaatgtggccctcaacatgcttggagagctggacaagaaaaaggagcccctcacccaggcagtggggctcagcacacaggcagaagggaccaggacgttaaagtccctcctgatgtttaccatggaaaactgcttctacctgctcatctctcaggcgatgcggtaccttagggacccggctgtgcacccccgggacaaacagcggatgaagcaggagctcagctctgagttgagcacgctgctgtccagcctctcgcgctacttccgccggggagcccccagctcccctgccactggtgtcctcccctcgccgcagggcaagtccacctctctctccaaagccagccctgagagtcaggagcctctgatccagttggtgcaggcgtttgtccggcatatgcaaagatagggcagtgctgttctgcccacctacccccctcccggagtagccacgactccagccaccacccactgacgttatttttatactagatgaagaggtcaacagcaggcatggggagccgagtcttctgtgctcaggtcctcacgctgcagacgccccctagaggaactttccttcctttccagcattccccacagcactgccggccaggggagaggcggcagcccagcagagggctctatgcacgggtttcaaacctgttttccacactctgtctttgcagttttggtaattctgtggtctatttatacagatattaaaatcttgtttatagaca

SEQ ID NO: 288968 - DNA, 5855 bp, Homo sapiens
agggcgagcgggcgcgcgaagatggcggcggccgccggcgggccgtgtgtgaggagcagtagagaactgtggactattctgcttggaaggtcagctctgagagagctgagtcagattgaggcagaactgaataaacattggcggcgattgttagaggggctttcttactacaaacctcccagtccaagttcagctgaaaaagtgaaagctaataaagatgtagcttcaccattgaaggaactgggtttaagaatcagcaagtttttgggtcttgatgaagaacagagtgtgcagttactccagtgttacctgcaagaggactacaggggtactcgggactcagtaaagacagtactgcaagatgagaggcagagccaggccttaatcctgaagattgcagattattattatgaagaaagaacctgtattcttcgttgtgtcttacaccttctcacttacttccaagatgaaagacacccctatagggttgaatatgcagactgtgttgataaattggagaaggaactagtttcaaaatacagacagcagttcgaagagctttataaaactgaagcaccaacttgggagacacatggaaatctcatgacagagcgccaagtgtctcgctggtttgttcagtgccttcgggaacagtccatgctgctagaaattattttcctttattatgcatactttgagatggcacccagtgacttacttgtattaaccaagatgtttaaagagcaaggatttggtagtaggcagaccaataggcacctggtggatgagactatggatccttttgtagatcggattggctacttcagtgccctcatcctggtggagggcatggatatcgagtccttgcataagtgtgctttggatgacagaagagaactgcatcagtttgcgcaggatgggcttatttgtcaggatatggactgtttaatgttgacctttggggacattccacatcatgccccagtgcttttggcctgggctctcctccgtcacactctgaacccagaagagacaagcagtgtggtccggaagataggtggcacagccatccagctgaatgtgtttcagtacttgacccgattgctccagtcccttgccagtgggggaaatgattgcaccaccagcactgcatgcatgtgtgtctatggactgctctctttcgttctgacctcgttggagctgcacaccctgggcaatcagcaggatataattgatacagcatgtgaagtattggccgacccttctcttccggaactgttctggggaacagagccaacttctggccttgggatcattctggacagtgtgtgtggaatgtttccccaccttctctccccactcctgcaactgctccgagccctggtatcagggaagtccacagccaaaaaggtgtatagcttcttggataagatgtctttctacaatgaactttataaacacaagcctcatgatgtgatctcccatgaagatggaactctttggcggagacaaacacccaaactcctttatccccttgggggtcaaaccaaccttcgcatacctcaaggcactgtgggccaagtaatgttggatgatagggcatacctggtacgctgggaatactcctatagcagctggaccctctttacctgcgagattgaaatgttgcttcatgttgtttcaactgcagatgtgattcagcactgccagcgagtcaaacccatcattgatctcgtccataaggtcatcagtacagacctgtcgatagcagactgtctcctgcccatcacatctcgcatctacatgctgctgcagcggttaacgacagtgatctccccacctgtggatgtcattgcttcttgtgtcaactgcttaactgttttggctgcccgcaatccagcaaaggtctggactgatcttcgtcacacaggttttttaccatttgtggcccatcctgtctccagcctgagtcagatgattagtgcggaagggatgaatgctggagggtacggaaacctcttgatgaacagtgaacagcctcagggcgagtatggggttactattgcctttctgcgcttgatcaccacccttgtcaaggggcaacttggtagtacccagagccaaggacttgtaccctgtgtaatgtttgtgctgaaggagatgcttcccagctaccataagtggcgctacaactctcatggagtgagggaacagattggttgcctgatcttggagctgattcatgcgatactgaacctgtgccacgagacagacctgcacagcagtcatactcccagcctgcagtttctctgcatctgcagcctggcatacacagaagcaggacagacagttatcaatatcatgggcattggcgtggacaccattgacatggtgatggctgctcagcctcgaagtgatggggcagagggccaggggcagggccagctgctgatcaagacagtgaaactggcattctccgtcaccaacaatgttattcggctgaaacctccttctaatgtggtgtcccccctggaacaggctctctcacaacatggtgctcatggaaacaacctcattgctgttctagccaaatacatctaccacaaacatgaccctgctttgccacgtcttgccattcagctgctgaaacgtctggccacggtggccccaatgtcagtgtatgcttgtctgggcaatgatgcggctgccattcgtgatgccttcctgacccgattgcagagcaaaattgaggacatgcgcatcaaagtcatgattctagagttcctcactgttgcagtagagacccagccaggcctcatcgaactgtttctgaacctggaagttaaggatggcagtgatggctcaaaggaattcagccttgggatgtggagctgtctccatgcagtgctggagctgattgattcccaacagcaagatcgatactggtgcccacccctgctgcatcgtgccgccattgcctttttgcatgctctgtggcaggatcggagggacagtgccatgctggtcctccgaaccaaacccaagttttgggaaaatttaaccagtccgctgtttggaaccctttctcctccctctgaaacatcagagcccagcatcctggaaacctgtgccctaatcatgaagataatttgcttggagatatactatgtagtaaagggttcattagaccagtcattaaaggatacactgaagaaattttccatcgagaaacgctttgcctactggtcagggtatgtcaagtcattggcagttcacgtggccgaaacagaaggcagcagctgcacctccttgttagagtaccagatgctggtgtccgcctggaggatgcttctcatcattgccaccactcatgcagatataatgcacctgactgactctgtggtgcgtcgccagctctttcttgacgtgcttgatggaaccaaagcattactcctagttccagcctcagtgaactgccttcgccttggctccatgaagtgcactctgctgcttatcctcctccggcagtggaagagtattctttctagagagttaggttctgtggatgaaatccttggacccttgacggagatcctggagggagtgctgcaggccgaccagcaactcatggagaagaccaaggccaaggtgttctcagcattcatcacagtgttgcaaatgaaggagatgaaagtaagtgacatcccccagtactcccagctggtgctgaatgtctgtgagaccctccaagaggaagtgattgcactcttcgaccagacccgccacagtctggcattaggcagtgccacagaggacaaggacagcatggagactgacgactgttctcggtcccggcacagggaccagcgtgatggggtgtgtgtcctgggcctgcacctggccaaggagctgtgtgaggtagacgaggatggtgactcctggctgcaggtaacccgcaggctccccatcctacccaccctcctcaccactctagaggtgagccttcgcatgaagcagaacctgcatttcactgaggccacattgcatctgctcctcaccctggctcgcactcagcaggtaggaggccagcccgaaggcaggagggagcgtccttgcttgcctgggtgggttctgacaatcccagaagctgtgatctagcctgagagccctacctaccctaggcagggcaggggcaggctccatctcatttcctgtctttccctcctcccagggagccacagcagtggctggagctggcatcacccagagcatttgtttgccccttctgagtgtgtaccagctgagcaccaacggcacagcacagacacctagtgcctctcggaagtccctggatgccccctcttggccaggagtctaccgcctgtccatgtccctgatggagcagctgctcaaaactctgcgctacaacttcctgcctgaggccctggacttcgtgggtgtccaccaggagcggaccttacagtgcctcaacgcagtgaggacagtgcagagtctggcctgcctggaggaggcggaccacaccgtgggttttattctgcagctctctaacttcatgaaggagtggcacttccacctgcctcagctcatgcgtgatatccaggtcaacctgggttacttgtgccaggcatgtacctctctcctgcacagtcgaaagatgctgcagcattacttacagaacaaaaatggggatggcctcccctcagctgttgcccagcgagtccagaggccaccgtctgctgcttctgctgccccctcctcctcaaagcagcccgctgctgacacagaggcatcagagcagcaggccttgcacacagtccagtatggccttctcaagatcctcagcaagacgctggcagccctgcgccacttcaccccagatgtctgccagattctgctggatcagtccctggaccttgctgaatacaacttcctgtttgccctgagctttaccactcccacctttgactccgaagtggccccctccttcgggacccttctggccacagtgaatgtggccctcaacatgcttggagagctggacaagaaaaaggagcccctcacccaggcagtggggctcagcacacaggcagaagggaccaggacgttaaagtccctcctgatgtttaccatggaaaactgcttctacctgctcatctctcaggcgatgcggtaccttagggacccggctgtgcacccccgggacaaacagcggatgaagcaggagctcagctctgagttgagcacgctgctgtccagcctctcgcgctacttccgccggggagcccccagctcccctgccactggtgtcctcccctcgccgcagggcaagtccacctctctctccaaagccagccctgagagtcaggagcctctgatccagttggtgcaggcgtttgtccggcatatgcaaagatagggcagtgctgttctgcccacctacccctctccaccagcctacactgcaccctggctggcaggggtgctgctggctgctagggcctatacaatggagggcacctcctgtcacccccctcccggagtagccacgactccagccaccacccactgacgttatttttatactagatgaagaggtcaacagcaggcatggggagccgagtcttctgtgctcaggtcctcacgctgcagacgccccctagaggaactttccttcctttccagcattccccacagcactgccggccaggggagaggcggcagcccagcagagggctctatgcacgggtttcaaacctgttttccacactctgtctttgcagttttggtaattctgtggtctatttatacagatattaaaatcttgtttatagaca

SEQ ID NO: 288969 - DNA, 4985 bp, Homo sapiens
agggcgagcgggcgcgcgaagatggcggcggccgccggcgggccgtgtgtgaggagcagtagagaactgtggactattctgcttggaaggtcagctctgagagagctgagtcagattgaggcagaactgaataaacattggcggcgattgttagaggggctttcttactacaaacctcccagtccaagttcagctgaaaaagtgaaagctaataaagatgtagcttcaccattgaaggaactgggtttaagaatcagcaagtttttgggtcttgatgaagaacagagtgtgcagttactccagtgttacctgcaagaggactacaggggtactcgggactcagtaaagacagtactgcaagatgagaggcagagccaggccttaatcctgaagattgcagattattattatgaagaaagaacctgtattcttcgttgtgtcttacaccttctcacttacttccaagatgaaagacacccctatagggttgaatatgcagactgtgttgataaattggagaaggaactagtttcaaaatacagacagcagttcgaagagctttataaaactgaagcaccaacttgggagacacatggaaatctcatgacagagcgccaagtgtctcgctggtttgttcagtgccttcgggaacagtccatgctgctagaaattattttcctttattatgcatactttgagatggcacccagtgacttacttgtattaaccaagatgtttaaagagcaaggatttggtagtaggcagaccaataggcacctggtggatgagactatggatccttttgtagatcggattggctacttcagtgccctcatcctggtggagggcatggatatcgagtccttgcataagtgtgctttggatgacagaagagaactgcatcagtttgcgcaggatgggcttatttgtcaggatatggactgtttaatgttgacctttggggacattccacatcatgccccagtgcttttggcctgggctctcctccgtcacactctgaacccagaagagacaagcagtgtggtccggaagataggtggcacagccatccagctgaatgtgtttcagtacttgacccgattgctccagtcccttgccagtgggggaaatgattgcaccaccagcactgcatgcatgtgtgtctatggactgctctctttcgttctgacctcgttggagctgcacaccctgggcaatcagcaggatataattgatacagcatgtgaagtattggccgacccttctcttccggaactgttctggggaacagagccaacttctggccttgggatcattctggacagtgtgtgtggaatgtttccccaccttctctccccactcctgcaactgctccgagccctggtatcagggaagtccacagccaaaaaggtgtatagcttcttggataagatgtctttctacaatgaactttataaacacaagcctcatgatgtgatctcccatgaagatggaactctttggcggagacaaacacccaaactcctttatccccttgggggtcaaaccaaccttcgcatacctcaaggcactgtgggccaagtaatgttggatgatagggcatacctggtacgctgggaatactcctatagcagctggaccctctttacctgcgagattgaaatgttgcttcatgttgtttcaactgcagatgtgattcagcactgccagcgagtcaaacccatcattgatctcgtccataaggtcatcagtacagacctgtcgatagcagactgtctcctgcccatcacatctcgcatctacatgctgctgcagcggttaacgacagtgatctccccacctgtggatgtcattgcttcttgtgtcaactgcttaactgttttggctgcccgcaatccagcaaaggtctggactgatcttcgtcacacaggttttttaccatttgtggcccatcctgtctccagcctgagtcagatgattagtgcggaagggatgaatgctggagggtacggaaacctcttgatgaacagtgaacagcctcagggcgagtatggggttactattgcctttctgcgcttgatcaccacccttgtcaaggggcaacttggtagtacccagagccaaggacttgtaccctgtgtaatgtttgtgctgaaggagatgcttcccagctaccataagtggcgctacaactctcatggagtgagggaacagattggttgcctgatcttggagctgattcatgcgatactgaacctgtgccacgagacagacctgcacagcagtcatactcccagcctgcagtttctctgcatctgcagcctggcatacacagaagcaggacagacagttatcaatatcatgggcattggcgtggacaccattgacatggtgatggctgctcagcctcgaagtgatggggcagagggccaggggcagggccagctgctgatcaagacagtgaaactggcattctccgtcaccaacaatgttattcggctgaaacctccttctaatgtggtgtcccccctggaacaggctctctcacaacatggtgctcatggaaacaacctcattgctgttctagccaaatacatctaccacaaacatgaccctgctttgccacgtcttgccattcagctgctgaaacgtctggccacggtggccccaatgtcagtgtatgcttgtctgggcaatgatgcggctgccattcgtgatgccttcctgacccgattgcagagcaaaattgaggacatgcgcatcaaagtcatgattctagagttcctcactgttgcagtagagacccagccaggcctcatcgaactgtttctgaacctggaagttaaggatggcagtgatggctcaaaggaattcagccttgggatgtggagctgtctccatgcagtgctggagctgattgattcccaacagcaagatcgatactggtgcccacccctgctgcatcgtgccgccattgcctttttgcatgctctgtggcaggatcggagggacagtgccatgctggtcctccgaaccaaacccaagttttgggaaaatttaaccagtccgctgtttggaaccctttctcctccctctgaaacatcagagcccagcatcctggaaacctgtgccctaatcatgaagataatttgcttggagatatactatgtagtaaagggttcattagaccagtcattaaaggatacactgaagaaattttccatcgagaaacgctttgcctactggtcagggtatgtcaagtcattggcagttcacgtggccgaaacagaaggcagcagctgcacctccttgttagagtaccagatgctggtgtccgcctggaggatgcttctcatcattgccaccactcatgcagatataatgcacctgactgactctgtggtgcgtcgccagctctttcttgacgtgcttgatggaaccaaagcattactcctagttccagcctcagtgaactgccttcgccttggctccatgaagtgcactctgctgcttatcctcctccggcagtggaagagtattctttctagagagttaggttctgtggatgaaatccttggacccttgacggagatcctggagggagtgctgcaggccgaccagcaactcatggagaagaccaaggccaaggtgttctcagcattcatcacagtgttgcaaatgaaggagatgaaagtaagtgacatcccccagtactcccagctggtgctgaatgtctgtgagaccctccaagaggaagtgattgcactcttcgaccagacccgccacagtctggcattaggcagtgccacagaggacaaggacagcatggagactgacgactgttctcggtcccggcacagggaccagcgtgatggggtgtgtgtcctgggcctgcacctggccaaggagctgtgtgaggtagacgaggatggtgactcctggctgcaggtaacccgcaggctccccatcctacccaccctcctcaccactctagaggtgagccttcgcatgaagcagaacctgcatttcactgaggccacattgcatctgctcctcaccctggctcgcactcagcagggagccacagcagtggctggagctggcatcacccagagcatttgtttgccccttctgagtgtgtaccagctgagcaccaacggcacagcacagacacctagtgcctctcggaagtccctggatgccccctcttggccaggagtctaccgcctgtccatgtccctgatggagcagctgctcaaaactctgcgctacaacttcctgcctgaggccctggacttcgtgggtgtccaccaggagcggaccttacagtgcctcaacgcagtgaggacagtgcagagtctggcctgcctggaggaggcggaccacaccgtgggttttattctgcagctctctaacttcatgaaggagtggcacttccacctgcctcagctcatgcgtgatatccaggtgggggcccaagatggtgtcttggagtctggggtaatgcttggagacagggaggctgtgaggtctcactggggcactcctagtgaattgcaggatgttcctgaacgggggcttttcccttggggagcacagggtttgctgtcatgtgcttactctggctaaatgtttccttccatagtcaagggcagccatgtaggttaagaatttggacttttatcagttagatcttggttcagatcccttaagaatacacttggggccgggcatggtggctcacgcctgtaatcctagcactttgggaggcagtcaggagttcgagatcagcctggccaacatggtgaaaccctgtctctactaaaaatacaaaaattagctgggcgtggtggcacgtgactgtaatcccagctactcgggaggctgagttgggagaatcgcttgaacctgggaggcggaggttgcagtgagctaggatcgaaccattacactccagcctgggtgacagagcgagactccgtccc

SEQ ID NO: 288970 - DNA, 1678 bp, Homo sapiens
ggcacgaggacttgcttctgcctccgtacacccatgtggcgtcgcgtctcagcaggagccacagcagtggctggagctggcatcacccagagcatttgtttgccccttctgagtgtgtaccagctgagcaccaacggcacagcacagacacctagtgcctctcggaagtccctggatgccccctcttggccaggagtctaccgcctgtccatgtccctgatggagcagctgctcaaaactctgcgctacaacttcctgcctgaggccctggacttcgtgggtgtccaccaggagcggaccttacagtgcctcaacgcagtgaggacagtgcagagtctggcctgcctggaggaggcggaccacaccgtgggttttattctgcagctctctaacttcatgaaggagtggcacttccacctgcctcagctcatgcgtgatatccaggtcaacctgggttacttgtgccaggcatgtacctctctcctgcacagtcgaaagatgctgcagcattacttacagaacaaaaatggggatggcctcccctcagctgttgcccagcgagtccagaggccaccgtctgctgcttctgctgccccctcctcctcaaagcagcccgctgctgacacagaggcatcagagcagcaggccttgcacacagtccagtatggccttctcaagatcctcagcaagacgctggcagccctgcgccacttcaccccagatgtctgccagattctgctggatcagtccctggaccttgctgaatacaacttcctgtttgccctgagctttaccactcccacctttgactccgaagtggccccctccttcgggacccttctggccacagtgaatgtggccctcaacatgcttggagagctggacaagaaaaaggagcccctcacccaggcagtggggctcagcacacaggcagaagggaccaggacgttaaagtccctcctgatgtttaccatggaaaactgcttctacctgctcatctctcaggcgatgcggtaccttagggacccggctgtgcacccccgggacaaacagcggatgaagcaggagctcagctctgagttgagcacgctgctgtccagcctctcgcgctacttccgccggggagcccccagctcccctgccactggtgtcctcccctcgccgcagggcaagtccacctctctctccaaagccagccctgagagtcaggagcctctgatccagttggtgcaggcgtttgtccggcatatgcaaagatagggcagtgctgttctgcccacctacccctctccaccagcctacactgcaccctggctggcaggggtgctgctggctgctagggcctatacaatggagggcacctcctgtcacccccctcccggagtagccacgactccagccaccacccactgacgttatttttatactagatgaagaggtcaacagcaggcatggggagccgagtcttctgtgctcaggtcctcacgctgcagacgccccctagaggaactttccttcctttccagcattccccacagcactgccggccaggggagaggcggcagcccagcagagggctctatgcacgggtttcaaacctgttttccacactctgtctttgcagttttggtaattctgtggtctatttatacagatattaaaatcttgtttatagaca

SEQ ID NO: 288971 - DNA, 1182 bp, Homo sapiens
  misc_feature (40)..(41): n is a, c, g, or t
gaggcagtaatataaggtcatatggtacgaggctgggtgnnctcccctcagctgttgcccagcgagtccagaggccaccgtctgctgcttctgctgccccctcctcctcaaagcagcccgctgctgacacagaggcatcagagcagcaggccttgcacacagtccagtatggccttctcaagatcctcagcaagacgctggcagccctgcgccacttcaccccagatgtctgccagattctgctggatcagtccctggaccttgctgaatacaacttcctgtttgccctgagctttaccactcccacctttgactccgaagtggccccctccttcgggacccttctggccacagtgaatgtggccctcaacatgcttggagagctggacaagaaaaaggagcccctcacccaggcagtggggctcagcacacaggcagaagggaccaggacgttaaagtccctcctgatgtttaccatggaaaactgcttctacctgctcatctctcaggcgatgcggtaccttagggacccggctgtgcacccccgggacaaacagcggatgaagcaggagctcagctctgagttgagcacgctgctgtccagcctctcgcgctacttccgccggggagcccccagctcccctgccactggtgtcctcccctcgccgcagggcaagtccacctctctctccaaagccagccctgagagtcaggagcctctgatccagttggtgcaggcgtttgtccggcatatgcaaagatagggcagtgctgttctgcccacctacccctctccaccagcctacactgcaccctggctggcaggggtgctgctggctgctagggcctatacaatggagggcacctcctgtcacccccctcccggagtagccacgactccagccaccacccactgacgttatttttatactagatgaagaggtcaacagcaggcatggggagccgagtcttctgtgctcaggtcctcacgctgcagacgccccctagaggaactttccttcctttccagcattccccacagcactgccggccaggggagaggcggcagcccagcagagggctctatgcacgggtttcaaacctgttttccacactctgtctttgcagttttggtaattctgtggtctatttatacagatattaaaatcttgtttatagaca

SEQ ID NO: 288972 - DNA, 1014 bp, Homo sapiens
aaaggcccccaaaaagggaaccccggtcgctggcagccctgcgccacttcaccccagatgtctgccagattctgctggatcagtccctggaccttgctgaatacaacttcctgtttgccctgagctttaccactcccacctttgactccgaagtggccccctccttcgggacccttctggccacagtgaatgtggccctcaacatgcttggagagctggacaagaaaaaggagcccctcacccaggcagtggggctcagcacacaggcagaagggaccaggacgttaaagtccctcctgatgtttaccatggaaaactgcttctacctgctcatctctcaggcgatgcggtaccttagggacccggctgtgcacccccgggacaaacagcggatgaagcaggagctcagctctgagttgagcacgctgctgtccagcctctcgcgctacttccgccggggagcccccagctcccctgccactggtgtcctcccctcgccgcagggcaagtccacctctctctccaaagccagccctgagagtcaggagcctctgatccagttggtgcaggcgtttgtccggcatatgcaaagatagggcagtgctgttctgcccacctacccctctccaccagcctacactgcaccctggctggcaggggtgctgctggctgctagggcctatacaatggagggcacctcctgtcacccccctcccggagtagccacgactccagccaccacccactgacgttatttttatactagatgaagaggtcaacagcaggcatggggagccgagtcttctgtgctcaggtcctcacgctgcagacgccccctagaggaactttccttcctttccagcattccccacagcactgccggccaggggagaggcggcagcccagcagagggctctatgcacgggtttcaaacctgttttccacactctgtctttgcagttttggtaattctgtggtctatttatacagatattaaaatcttgtttatagaca

SEQ ID NO: 288973 - DNA, 4338 bp, Homo sapiens
agggcgagcgggcgcgcgaagatggcggcggccgccggcgggccgtgtgtgaggagcagtagagaactgtggactattctgcttggaaggtcagctctgagagagctgagtcagattgaggcagaactgaataaacattggcggcgattgttagaggggctttcttactacaaacctcccagtccaagttcagctgaaaaagtgaaagctaataaagatgtagcttcaccattgaaggaactgggtttaagaatcagcaagtttttgggtcttgatgaagaacagagtgtgcagttactccagtgttacctgcaagaggactacaggggtactcgggactcagtaaagacagtactgcaagatgagaggcagagccaggccttaatcctgaagattgcagattattattatgaagaaagaacctgtattcttcgttgtgtcttacaccttctcacttacttccaagatgaaagacacccctatagggttgaatatgcagactgtgttgataaattggagaaggaactagtttcaaaatacagacagcagttcgaagagctttataaaactgaagcaccaacttgggagacacatggaaatctcatgacagagcgccaagtgtctcgctggtttgttcagtgccttcgggaacagtccatgctgctagaaattattttcctttattatgcatactttgagatggcacccagtgacttacttgtattaaccaagatgtttaaagagcaaggatttggtagtaggcagaccaataggcacctggtggatgagactatggatccttttgtagatcggattggctacttcagtgccctcatcctggtggagggcatggatatcgagtccttgcataagtgtgctttggatgacagaagagaactgcatcagtttgcgcaggatgggcttatttgtcaggatatggactgtttaatgttgacctttggggacattccacatcatgccccagtgcttttggcctgggctctcctccgtcacactctgaacccagaagagacaagcagtgtggtccggaagataggtggcacagccatccagctgaatgtgtttcagtacttgacccgattgctccagtcccttgccagtgggggaaatgattgcaccaccagcactgcatgcatgtgtgtctatggactgctctctttcgttctgacctcgttggagctgcacaccctgggcaatcagcaggatataattgatacagcatgtgaagtattggccgacccttctcttccggaactgttctggggaacagagccaacttctggccttgggatcattctggacagtgtgtgtggaatgtttccccaccttctctccccactcctgcaactgctccgagccctggtatcagggaagtccacagccaaaaaggtgtatagcttcttggataagatgtctttctacaatgaactttataaacacaagcctcatgatgtgatctcccatgaagatggaactctttggcggagacaaacacccaaactcctttatccccttgggggtcaaaccaaccttcgcatacctcaaggcactgtgggccaagtaatgttggatgatagggcatacctggtacgctgggaatactcctatagcagctggaccctctttacctgcgagattgaaatgttgcttcatgttgtttcaactgcagatgtgattcagcactgccagcgagtcaaacccatcattgatctcgtccataaggtcatcagtacagacctgtcgatagcagactgtctcctgcccatcacatctcgcatctacatgctgctgcagcggttaacgacagtgatctccccacctgtggatgtcattgcttcttgtgtcaactgcttaactgttttggctgcccgcaatccagcaaaggtctggactgatcttcgtcacacaggttttttaccatttgtggcccatcctgtctccagcctgagtcagatgattagtgcggaagggatgaatgctggagggtacggaaacctcttgatgaacagtgaacagcctcagggcgagtatggggttactattgcctttctgcgcttgatcaccacccttgtcaaggggcaacttggtagtacccagagccaaggacttgtaccctgtgtaatgtttgtgctgaaggagatgcttcccagctaccataagtggcgctacaactctcatggagtgagggaacagattggttgcctgatcttggagctgattcatgcgatactgaacctgtgccacgagacagacctgcacagcagtcatactcccagcctgcagtttctctgcatctgcagcctggcatacacagaagcaggacagacagttatcaatatcatgggcattggcgtggacaccattgacatggtgatggctgctcagcctcgaagtgatggggcagagggccaggggcagggccagctgctgatcaagacagtgaaactggcattctccgtcaccaacaatgttattcggctgaaacctccttctaatgtggtgtcccccctggaacaggctctctcacaacatggtgctcatggaaacaacctcattgctgttctagccaaatacatctaccacaaacatgaccctgctttgccacgtcttgccattcagctgctgaaacgtctggccacggtggccccaatgtcagtgtatgcttgtctgggcaatgatgcggctgccattcgtgatgccttcctgacccgattgcagagcaaaattgaggacatgcgcatcaaagtcatgattctagagttcctcactgttgcagtagagacccagccaggcctcatcgaactgtttctgaacctggaagttaaggatggcagtgatggctcaaaggaattcagccttgggatgtggagctgtctccatgcagtgctggagctgattgattcccaacagcaagatcgatactggtgcccacccctgctgcatcgtgccgccattgcctttttgcatgctctgtggcaggatcggagggacagtgccatgctggtcctccgaaccaaacccaagttttgggaaaatttaaccagtccgctgtttggaaccctttctcctccctctgaaacatcagagcccagcatcctggaaacctgtgccctaatcatgaagataatttgcttggagatatactatgtagtaaagggttcattagaccagtcattaaaggatacactgaagaaattttccatcgagaaacgctttgcctactggtcagggtatgtcaagtcattggcagttcacgtggccgaaacagaaggcagcagctgcacctccttgttagagtaccagatgctggtgtccgcctggaggatgcttctcatcattgccaccactcatgcagatataatgcacctgactgactctgtggtgcgtcgccagctctttcttgacgtgcttgatggaaccaaagcattactcctagttccagcctcagtgaactgccttcgccttggctccatgaagtgcactctgctgcttatcctcctccggcagtggaagagtattctttctagagagttaggttctgtggatgaaatccttggacccttgacggagatcctggagggagtgctgcaggccgaccagcaactcatggagaagaccaaggccaaggtgttctcagcattcatcacagtgttgcaaatgaaggagatgaaagtaagtgacatcccccagtactcccagctggtgctgaatgtctgtgagaccctccaagaggaagtgattgcactcttcgaccagacccgccacagtctggcattaggcagtgccacagaggacaaggacagcatggagactgacgactgtcctcacgctgcagacgccccctagaggaactttccttcctttccagcattccccacagcactgccggccaggggagaggcggcagcccagcagagggctctatgcacgggtttcaaacctgttttccacactctgtctttgcagttttggtaattctgtggtctatttatacagatattaaaatcttgtttatagacagctgtgtgatgtttaacttcaaagcccagggatgacaacgtggctctcagaacctagaaaactcccctggccaggcgcctgggagtggggctgcagcctcgggggaaggcaggtactgatggatggctagttcaccagcatctcctcattcctgtccttgggctgagggtttggctgggtgggcgctgtcagatattcccttccttggcctgcgctggtcctgtccttgaccctgctttcattggcccagtgggctgagctcatccctgggtgagcctttcttgaagctctgtgcct

SEQ ID NO: 288974 - DNA, 4041 bp, Homo sapiens
agggcgagcgggcgcgcgaagatggcggcggccgccggcgggccgtgtgtgaggagcagtagagaactgtggactattctgcttggaaggtcagctctgagagagctgagtcagattgaggcagaactgaataaacattggcggcgattgttagaggggctttcttactacaaacctcccagtccaagttcagctgaaaaagtgaaagctaataaagatgtagcttcaccattgaaggaactgggtttaagaatcagcaagtttttgggtcttgatgaagaacagagtgtgcagttactccagtgttacctgcaagaggactacaggggtactcgggactcagtaaagacagtactgcaagatgagaggcagagccaggccttaatcctgaagattgcagattattattatgaagaaagaacctgtattcttcgttgtgtcttacaccttctcacttacttccaagatgaaagacacccctatagggttgaatatgcagactgtgttgataaattggagaaggaactagtttcaaaatacagacagcagttcgaagagctttataaaactgaagcaccaacttgggagacacatggaaatctcatgacagagcgccaagtgtctcgctggtttgttcagtgccttcgggaacagtccatgctgctagaaattattttcctttattatgcatactttgagatggcacccagtgacttacttgtattaaccaagatgtttaaagagcaaggatttggtagtaggcagaccaataggcacctggtggatgagactatggatccttttgtagatcggattggctacttcagtgccctcatcctggtggagggcatggatatcgagtccttgcataagtgtgctttggatgacagaagagaactgcatcagtttgcgcaggatgggcttatttgtcaggatatggactgtttaatgttgacctttggggacattccacatcatgccccagtgcttttggcctgggctctcctccgtcacactctgaacccagaagagacaagcagtgtggtccggaagataggtggcacagccatccagctgaatgtgtttcagtacttgacccgattgctccagtcccttgccagtgggggaaatgattgcaccaccagcactgcatgcatgtgtgtctatggactgctctctttcgttctgacctcgttggagctgcacaccctgggcaatcagcaggatataattgatacagcatgtgaagtattggccgacccttctcttccggaactgttctggggaacagagccaacttctggccttgggatcattctggacagtgtgtgtggaatgtttccccaccttctctccccactcctgcaactgctccgagccctggtatcagggaagtccacagccaaaaaggtgtatagcttcttggataagatgtctttctacaatgaactttataaacacaagcctcatgatgtgatctcccatgaagatggaactctttggcggagacaaacacccaaactcctttatccccttgggggtcaaaccaaccttcgcatacctcaaggcactgtgggccaagtaatgttggatgatagggcatacctggtacgctgggaatactcctatagcagctggaccctctttacctgcgagattgaaatgttgcttcatgttgtttcaactgcagatgtgattcagcactgccagcgagtcaaacccatcattgatctcgtccataaggtcatcagtacagacctgtcgatagcagactgtctcctgcccatcacatctcgcatctacatgctgctgcagcggttaacgacagtgatctccccacctgtggatgtcattgcttcttgtgtcaactgcttaactgttttggctgcccgcaatccagcaaaggtctggactgatcttcgtcacacaggttttttaccatttgtggcccatcctgtctccagcctgagtcagatgattagtgcggaagggatgaatgctggagggtacggaaacctcttgatgaacagtgaacagcctcagggcgagtatggggttactattgcctttctgcgcttgatcaccacccttgtcaaggggcaacttggtagtacccagagccaaggacttgtaccctgtgtaatgtttgtgctgaaggagatgcttcccagctaccataagtggcgctacaactctcatggagtgagggaacagattggttgcctgatcttggagctgattcatgcgatactgaacctgtgccacgagacagacctgcacagcagtcatactcccagcctgcagtttctctgcatctgcagcctggcatacacagaagcaggacagacagttatcaatatcatgggcattggcgtggacaccattgacatggtgatggctgctcagcctcgaagtgatggggcagagggccaggggcagggccagctgctgatcaagacagtgaaactggcattctccgtcaccaacaatgttattcggctgaaacctccttctaatgtggtgtcccccctggaacaggctctctcacaacatggtgctcatggaaacaacctcattgctgttctagccaaatacatctaccacaaacatgaccctgctttgccacgtcttgccattcagctgctgaaacgtctggccacggtggccccaatgtcagtgtatgcttgtctgggcaatgatgcggctgccattcgtgatgccttcctgacccgattgcagagcaaaattgaggacatgcgcatcaaagtcatgattctagagttcctcactgttgcagtagagacccagccaggcctcatcgaactgtttctgaacctggaagttaaggatggcagtgatggctcaaaggaattcagccttgggatgtggagctgtctccatgcagtgctggagctgattgattcccaacagcaagatcgatactggtgcccacccctgctgcatcgtgccgccattgcctttttgcatgctctgtggcaggatcggagggacagtgccatgctggtcctccgaaccaaacccaagttttgggaaaatttaaccagtccgctgtttggaaccctttctcctccctctgaaacatcagagcccagcatcctggaaacctgtgccctaatcatgaagataatttgcttggagatatactatgtagtaaagggttcattagaccagtcattaaaggatacactgaagaaattttccatcgagaaacgctttgcctactggtcagggtatgtcaagtcattggcagttcacgtggccgaaacagaaggcagcagctgcacctccttgttagagtaccagatgctggtgtccgcctggaggatgcttctcatcattgccaccactcatgcagatataatgcacctgactgactctgtggtgcgtcgccagctctttcttgacgtgcttgatggaaccaaagcattactcctagttccagcctcagtgaactgccttcgccttggctccatgaagtgcactctgctgcttatcctcctccggcagtggaagagtattctttctagagagttaggttctgtggatgaaatccttggacccttgacggagatcctggagggagtgctgcaggccgaccagcaactcatggagaagaccaaggccaaggtgttctcagcattcatcacagtgttgcaaatgaaggagatgaaagtaagtgacatcccccagtactcccagctggtgctgaatgtctgtgagaccctccaagaggaagtgattgcactcttcgaccagacccgccacagtctggcattaggcagtgccacagaggacaaggacagcatggagactgacgactgtcctcacgctgcagacgccccctagaggaactttccttcctttccagcattccccacagcactgccggccaggggagaggcggcagcccagcagagggctctatgcacgggtttcaaacctgttttccacactctgtctttgcagttttggtaattctgtggtctatttatacagatattaaaatcttgtttatagaca

SEQ ID NO: 288975 - DNA, 3610 bp, Homo sapiens
  misc_feature (3460)..(3460): n is a, c, g, or t
  misc_feature (3468)..(3468): n is a, c, g, or t
  misc_feature (3504)..(3504): n is a, c, g, or t
  misc_feature (3513)..(3513): n is a, c, g, or t
  misc_feature (3517)..(3517): n is a, c, g, or t
  misc_feature (3539)..(3539): n is a, c, g, or t
  misc_feature (3551)..(3551): n is a, c, g, or t
  misc_feature (3604)..(3604): n is a, c, g, or t
agggcgagcgggcgcgcgaagatggcggcggccgccggcgggccgtgtgtgaggagcagtagagaactgtggactattctgcttggaaggtcagctctgagagagctgagtcagattgaggcagaactgaataaacattggcggcgattgttagaggggctttcttactacaaacctcccagtccaagttcagctgaaaaagtgaaagctaataaagatgtagcttcaccattgaaggaactgggtttaagaatcagcaagtttttgggtcttgatgaagaacagagtgtgcagttactccagtgttacctgcaagaggactacaggggtactcgggactcagtaaagacagtactgcaagatgagaggcagagccaggccttaatcctgaagattgcagattattattatgaagaaagaacctgtattcttcgttgtgtcttacaccttctcacttacttccaagatgaaagacacccctatagggttgaatatgcagactgtgttgataaattggagaaggaactagtttcaaaatacagacagcagttcgaagagctttataaaactgaagcaccaacttgggagacacatggaaatctcatgacagagcgccaagtgtctcgctggtttgttcagtgccttcgggaacagtccatgctgctagaaattattttcctttattatgcatactttgagatggcacccagtgacttacttgtattaaccaagatgtttaaagagcaaggatttggtagtaggcagaccaataggcacctggtggatgagactatggatccttttgtagatcggattggctacttcagtgccctcatcctggtggagggcatggatatcgagtccttgcataagtgtgctttggatgacagaagagaactgcatcagtttgcgcaggatgggcttatttgtcaggatatggactgtttaatgttgacctttggggacattccacatcatgccccagtgcttttggcctgggctctcctccgtcacactctgaacccagaagagacaagcagtgtggtccggaagataggtggcacagccatccagctgaatgtgtttcagtacttgacccgattgctccagtcccttgccagtgggggaaatgattgcaccaccagcactgcatgcatgtgtgtctatggactgctctctttcgttctgacctcgttggagctgcacaccctgggcaatcagcaggatataattgatacagcatgtgaagtattggccgacccttctcttccggaactgttctggggaacagagccaacttctggccttgggatcattctggacagtgtgtgtggaatgtttccccaccttctctccccactcctgcaactgctccgagccctggtatcagggaagtccacagccaaaaaggtgtatagcttcttggataagatgtctttctacaatgaactttataaacacaagcctcatgatgtgatctcccatgaagatggaactctttggcggagacaaacacccaaactcctttatccccttgggggtcaaaccaaccttcgcatacctcaaggcactgtgggccaagtaatgttggatgatagggcatacctggtacgctgggaatactcctatagcagctggaccctctttacctgcgagattgaaatgttgcttcatgttgtttcaactgcagatgtgattcagcactgccagcgagtcaaacccatcattgatctcgtccataaggtcatcagtacagacctgtcgatagcagactgtctcctgcccatcacatctcgcatctacatgctgctgcagcggttaacgacagtgatctccccacctgtggatgtcattgcttcttgtgtcaactgcttaactgttttggctgcccgcaatccagcaaaggtctggactgatcttcgtcacacaggttttttaccatttgtggcccatcctgtctccagcctgagtcagatgattagtgcggaagggatgaatgctggagggtacggaaacctcttgatgaacagtgaacagcctcagggcgagtatggggttactattgcctttctgcgcttgatcaccacccttgtcaaggggcaacttggtagtacccagagccaaggacttgtaccctgtgtaatgtttgtgctgaaggagatgcttcccagctaccataagtggcgctacaactctcatggagtgagggaacagattggttgcctgatcttggagctgattcatgcgatactgaacctgtgccacgagacagacctgcacagcagtcatactcccagcctgcagtttctctgcatctgcagcctggcatacacagaagcaggacagacagttatcaatatcatgggcattggcgtggacaccattgacatggtgatggctgctcagcctcgaagtgatggggcagagggccaggggcagggccagctgctgatcaagacagtgaaactggcattctccgtcaccaacaatgttattcggctgaaacctccttctaatgtggtgtcccccctggaacaggctctctcacaacatggtgctcatggaaacaacctcattgctgttctagccaaatacatctaccacaaacatgaccctgctttgccacgtcttgccattcagctgctgaaacgtctggccacggtggccccaatgtcagtgtatgcttgtctgggcaatgatgcggctgccattcgtgatgccttcctgacccgattgcagagcaaaattgaggacatgcgcatcaaagtcatgattctagagttcctcactgttgcagtagagacccagccaggcctcatcgaactgtttctgaacctggaagttaaggatggcagtgatggctcaaaggaattcagccttgggatgtggagctgtctccatgcagtgctggagctgattgattcccaacagcaagatcgatactggtgcccacccctgctgcatcgtgccgccattgcctttttgcatgctctgtggcaggatcggagggacagtgccatgctggtcctccgaaccaaacccaagttttgggaaaatttaaccagtccgctgtttggaaccctttctcctccctctgaaacatcagagcccagcatcctggaaacctgtgccctaatcatgaagataatttgcttggagatatactatgtagtaaagggttcattagaccagtcattaaaggatacactgaagaaattttccatcgagaaacgctttgcctactggtcagggtatgtcaagtcattggcagttcacgtggccgaaacagaaggcagcagctgcacctccttgttagagtaccagatgctggtgtccgcctggaggatgcttctcatcattgccaccactcatgcagatataatgcacctgactgactctgtggtgcgtcgccagctctttcttgacgtgcttgatggaaccaaagcattacttctagttncaagcctnaagtgaactggccttcgcctttggcttcatgaaagngcactctgntggnttatccttccttccgggcaagngggaaaaaaaanaagttaagggttcttgggggattgaaatccctttggacccctttggacggganaatccc

SEQ ID NO: 288976 - DNA, 3454 bp, Homo sapiens
agggcgagcgggcgcgcgaagatggcggcggccgccggcgggccgtgtgtgaggagcagtagagaactgtggactattctgcttggaaggtcagctctgagagagctgagtcagattgaggcagaactgaataaacattggcggcgattgttagaggggctttcttactacaaacctcccagtccaagttcagctgaaaaagtgaaagctaataaagatgtagcttcaccattgaaggaactgggtttaagaatcagcaagtttttgggtcttgatgaagaacagagtgtgcagttactccagtgttacctgcaagaggactacaggggtactcgggactcagtaaagacagtactgcaagatgagaggcagagccaggccttaatcctgaagattgcagattattattatgaagaaagaacctgtattcttcgttgtgtcttacaccttctcacttacttccaagatgaaagacacccctatagggttgaatatgcagactgtgttgataaattggagaaggaactagtttcaaaatacagacagcagttcgaagagctttataaaactgaagcaccaacttgggagacacatggaaatctcatgacagagcgccaagtgtctcgctggtttgttcagtgccttcgggaacagtccatgctgctagaaattattttcctttattatgcatactttgagatggcacccagtgacttacttgtattaaccaagatgtttaaagagcaaggatttggtagtaggcagaccaataggcacctggtggatgagactatggatccttttgtagatcggattggctacttcagtgccctcatcctggtggagggcatggatatcgagtccttgcataagtgtgctttggatgacagaagagaactgcatcagtttgcgcaggatgggcttatttgtcaggatatggactgtttaatgttgacctttggggacattccacatcatgccccagtgcttttggcctgggctctcctccgtcacactctgaacccagaagagacaagcagtgtggtccggaagataggtggcacagccatccagctgaatgtgtttcagtacttgacccgattgctccagtcccttgccagtgggggaaatgattgcaccaccagcactgcatgcatgtgtgtctatggactgctctctttcgttctgacctcgttggagctgcacaccctgggcaatcagcaggatataattgatacagcatgtgaagtattggccgacccttctcttccggaactgttctggggaacagagccaacttctggccttgggatcattctggacagtgtgtgtggaatgtttccccaccttctctccccactcctgcaactgctccgagccctggtatcagggaagtccacagccaaaaaggtgtatagcttcttggataagatgtctttctacaatgaactttataaacacaagcctcatgatgtgatctcccatgaagatggaactctttggcggagacaaacacccaaactcctttatccccttgggggtcaaaccaaccttcgcatacctcaaggcactgtgggccaagtaatgttggatgatagggcatacctggtacgctgggaatactcctatagcagctggaccctctttacctgcgagattgaaatgttgcttcatgttgtttcaactgcagatgtgattcagcactgccagcgagtcaaacccatcattgatctcgtccataaggtcatcagtacagacctgtcgatagcagactgtctcctgcccatcacatctcgcatctacatgctgctgcagcggttaacgacagtgatctccccacctgtggatgtcattgcttcttgtgtcaactgcttaactgttttggctgcccgcaatccagcaaaggtctggactgatcttcgtcacacaggttttttaccatttgtggcccatcctgtctccagcctgagtcagatgattagtgcggaagggatgaatgctggagggtacggaaacctcttgatgaacagtgaacagcctcagggcgagtatggggttactattgcctttctgcgcttgatcaccacccttgtcaaggggcaacttggtagtacccagagccaaggacttgtaccctgtgtaatgtttgtgctgaaggagatgcttcccagctaccataagtggcgctacaactctcatggagtgagggaacagattggttgcctgatcttggagctgattcatgcgatactgaacctgtgccacgagacagacctgcacagcagtcatactcccagcctgcagtttctctgcatctgcagcctggcatacacagaagcaggacagacagttatcaatatcatgggcattggcgtggacaccattgacatggtgatggctgctcagcctcgaagtgatggggcagagggccaggggcagggccagctgctgatcaagacagtgaaactggcattctccgtcaccaacaatgttattcggctgaaacctccttctaatgtggtgtcccccctggaacaggctctctcacaacatggtgctcatggaaacaacctcattgctgttctagccaaatacatctaccacaaacatgaccctgctttgccacgtcttgccattcagctgctgaaacgtctggccacggtggccccaatgtcagtgtatgcttgtctgggcaatgatgcggctgccattcgtgatgccttcctgacccgattgcagagcaaaattgaggacatgcgcatcaaagtcatgattctagagttcctcactgttgcagtagagacccagccaggcctcatcgaactgtttctgaacctggaagttaaggatggcagtgatggctcaaaggaattcagccttgggatgtggagctgtctccatgcagtgctggagctgattgattcccaacagcaagatcgatactggtgcccacccctgctgcatcgtgccgccattgcctttttgcatgctctgtggcaggatcggagggacagtgccatgctggtcctccgaaccaaacccaagttttgggaaaatttaaccagtccgctgtttggaaccctttctcctccctctgaaacatcagagcccagcatcctggaaacctgtgccctaatcatgaagataatttgcttggagatatactatgtagtaaagagagtactttcccctcttgagattttaactgaaggttgggggagtgggagttggtggcctatccactgggtgcatggctggaagagccaaggcagaggagagaactggtttggaaccattcatggaaggccagtgagctgtgttcctggccaatccaccgatggcatttatgattgtcagaaagagttattgtgaagcaaactccatgcaactgggattttatggaggaggaatcctggaaaggcctcagcctaacccacacgttggaggtgtcctg

SEQ ID NO: 288977 - DNA, 4169 bp, Homo sapiens
agggcgagcgggcgcgcgaagatggcggcggccgccggcgggccgtgtgtgaggagcagtagagaactgtggactattctgcttggaaggtcagctctgagagagctgagtcagattgaggcagaactgaataaacattggcggcgattgttagaggggctttcttactacaaacctcccagtccaagttcagctgaaaaagtgaaagctaataaagatgtagcttcaccattgaaggaactgggtttaagaatcagcaagtttttgggtcttgatgaagaacagagtgtgcagttactccagtgttacctgcaagaggactacaggggtactcgggactcagtaaagacagtactgcaagatgagaggcagagccaggccttaatcctgaagattgcagattattattatgaagaaagaacctgtattcttcgttgtgtcttacaccttctcacttacttccaagatgaaagacacccctatagggttgaatatgcagactgtgttgataaattggagaaggaactagtttcaaaatacagacagcagttcgaagagctttataaaactgaagcaccaacttgggagacacatggaaatctcatgacagagcgccaagtgtctcgctggtttgttcagtgccttcgggaacagtccatgctgctagaaattattttcctttattatgcatactttgagatggcacccagtgacttacttgtattaaccaagatgtttaaagagcaaggatttggtagtaggcagaccaataggcacctggtggatgagactatggatccttttgtagatcggattggctacttcagtgccctcatcctggtggagggcatggatatcgagtccttgcataagtgtgctttggatgacagaagagaactgcatcagtttgcgcaggatgggcttatttgtcaggatatggactgtttaatgttgacctttggggacattccacatcatgccccagtgcttttggcctgggctctcctccgtcacactctgaacccagaagagacaagcagtgtggtccggaagataggtggcacagccatccagctgaatgtgtttcagtacttgacccgattgctccagtcccttgccagtgggggaaatgattgcaccaccagcactgcatgcatgtgtgtctatggactgctctctttcgttctgacctcgttggagctgcacaccctgggcaatcagcaggatataattgatacagcatgtgaagtattggccgacccttctcttccggaactgttctggggaacagagccaacttctggccttgggatcattctggacagtgtgtgtggaatgtttccccaccttctctccccactcctgcaactgctccgagccctggtatcagggaagtccacagccaaaaaggtgtatagcttcttggataagatgtctttctacaatgaactttataaacacaagcctcatgatgtgatctcccatgaagatggaactctttggcggagacaaacacccaaactcctttatccccttgggggtcaaaccaaccttcgcatacctcaaggcactgtgggccaagtaatgttggatgatagggcatacctggtacgctgggaatactcctatagcagctggaccctctttacctgcgagattgaaatgttgcttcatgttgtttcaactgcagatgtgattcagcactgccagcgagtcaaacccatcattgatctcgtccataaggtcatcagtacagacctgtcgatagcagactgtctcctgcccatcacatctcgcatctacatgctgctgcagcggttaacgacagtgatctccccacctgtggatgtcattgcttcttgtgtcaactgcttaactgttttggctgcccgcaatccagcaaaggtctggactgatcttcgtcacacaggttttttaccatttgtggcccatcctgtctccagcctgagtcagatgattagtgcggaagggatgaatgctggagggtacggaaacctcttgatgaacagtgaacagcctcagggcgagtatggggttactattgcctttctgcgcttgatcaccacccttgtcaaggggcaacttggtagtacccagagccaaggacttgtaccctgtgtaatgtttgtgctgaaggagatgcttcccagctaccataagtggcgctacaactctcatggagtgagggaacagattggttgcctgatcttggagctgattcatgcgatactgaacctgtgccacgagacagacctgcacagcagtcatactcccagcctgcagtttctctgcatctgcagcctggcatacacagaagcaggacagacagttatcaatatcatgggcattggcgtggacaccattgacatggtgatggctgctcagcctcgaagtgatggggcagagggccaggggcagggccagctgctgatcaagacagtgaaactggcattctccgtcaccaacaatgttattcggctgaaacctccttctaatgtggtgtcccccctggaacaggctctctcacaacatggtgctcatggaaacaacctcattgctgttctagccaaatacatctaccacaaacatgaccctgctttgccacgtcttgccattcagctgctgaaacgtctggccacggtggccccaatgtcagtgtatgcttgtctgggcaatgatgcggctgccattcgtgatgccttcctgacccgattgcagagcaaaattgaggacatgcgcatcaaagtcatgattctagagttcctcactgttgcagtagagacccagccaggcctcatcgaactgtttctgaacctggaagttaaggatggcagtgatggctcaaaggaattcagccttgggatgtggagctgtctccatgcagtgctggagctgattgattcccaacagcaagatcgatactggtgcccacccctgctgcatcgtgccgccattgcctttttgcatgctctgtggcaggatcggagggacagtgccatgctggtcctccgaaccaagtaagtctgcctctgggagtagtttcattgttctggtctataaaatgggagtaataatagctcttatcccagaggtttgttgtgacagttcactgggaataagagtgcttagtcctggttcaatacctgggagttttacactaattctctttctaatgctgctgcaagtattaaggatctttaaatattaagcacctggaaggttcagttgcttttgtgttcctgccttttgctaactagctgcatcaaaactcattattcttgagaaacagtagattcaggagagaggcgcttgctcaagtcactggattgaatgaaacattccgttctattggacctgctggcacaaagggaaggagtgttaaaaggctaaatttgggagtctgctgtcttatttccctccctcctcttctgtggggcttttgggaatctacagtggaaggaatcttgaagagtttttattgatcaactctataatgcataagtgtgattcatgagaggaaaatgtaattttatctatggaaacctttcatttatacgggaacaactgacttatcagacacatattaggattgagactggtaaaatatgaagtgaccaccaaagggagcttgagagaggagaaaatgactgtgagagggaaaaagttatgatttcaaacatttatttcctttttagacccaagttttgggaaaatttaaccagtccgctgtttggaaccctttctcctccctctgaaacatcagaggtaagctgtggcagagggcaggatggtggctacaagtcccttggaggaaaggctgtgggctgtgagatggggccgtagacaatgatacctcccctaattaaacaacagaatgttcccttcactagaaacgtctttctcagggaagtgccagctttctgtccctttgatgtcttgctttgggaaggaaagtggtttgcgctactgtgtgttggtggctctgtggtcttctccattcagttggagacgttgtggacctgacgcctctgctcttgcaagtcaggacattcacattcaacaggggttgtgctaacttgttctgcaagtgttgggcccctgctctgttccctgtttgatatactgggggagatcagtgatcagagatg

SEQ ID NO: 288978 - DNA, 2352 bp, Homo sapiens
agggcgagcgggcgcgcgaagatggcggcggccgccggcgggccgtgtgtgaggagcagtagagaactgtggactattctgcttggaaggtcagctctgagagagctgagtcagattgaggcagaactgaataaacattggcggcgattgttagaggggctttcttactacaaacctcccagtccaagttcagctgaaaaagtgaaagctaataaagatgtagcttcaccattgaaggaactgggtttaagaatcagcaagtttttgggtcttgatgaagaacagagtgtgcagttactccagtgttacctgcaagaggactacaggggtactcgggactcagtaaagacagtactgcaagatgagaggcagagccaggccttaatcctgaagattgcagattattattatgaagaaagaacctgtattcttcgttgtgtcttacaccttctcacttacttccaagatgaaagacacccctatagggttgaatatgcagactgtgttgataaattggagaaggaactagtttcaaaatacagacagcagttcgaagagctttataaaactgaagcaccaacttgggagacacatggaaatctcatgacagagcgccaagtgtctcgctggtttgttcagtgccttcgggaacagtccatgctgctagaaattattttcctttattatgcatactttgagatggcacccagtgacttacttgtattaaccaagatgtttaaagagcaaggatttggtagtaggcagaccaataggcacctggtggatgagactatggatccttttgtagatcggattggctacttcagtgccctcatcctggtggagggcatggatatcgagtccttgcataagtgtgctttggatgacagaagagaactgcatcagtttgcgcaggatgggcttatttgtcaggatatggactgtttaatgttgacctttggggacattccacatcatgccccagtgcttttggcctgggctctcctccgtcacactctgaacccagaagagacaagcagtgtggtccggaagataggtggcacagccatccagctgaatgtgtttcagtacttgacccgattgctccagtcccttgccagtgggggaaatgattgcaccaccagcactgcatgcatgtgtgtctatggactgctctctttcgttctgacctcgttggagctgcacaccctgggcaatcagcaggatataattgatacagcatgtgaagtattggccgacccttctcttccggaactgttctggggaacagagccaacttctggccttgggatcattctggacagtgtgtgtggaatgtttccccaccttctctccccactcctgcaactgctccgagccctggtatcagggaagtccacagccaaaaaggtgtatagcttcttggataagatgtctttctacaatgaactttataaacacaagcctcatgatgtgatctcccatgaagatggaactctttggcggagacaaacacccaaactcctttatccccttgggggtcaaaccaaccttcgcatacctcaaggcactgtgggccaagtaatgttggatgatagggcatacctggtacgctgggaatactcctatagcagctggaccctctttacctgcgagattgaaatgttgcttcatgttgtttcaactgcagatgtgattcagcactgccagcgagtcaaacccatcattgatctcgtccataaggtcatcagtacagacctgtcgatagcagactgtctcctgcccatcacatctcgcatctacatgctgctgcagcggttaacgacagtgatctccccacctgtggatgtcattgcttcttgtgtcaactgcttaactgttttggctgcccgcaatccagcaaaggtctggactgatcttcgtcacacaggttttttaccatttgtggcccatcctgtctccagcctgagtcagatgattagtgcggaagggatgaatgctggagggtacggaaacctcttgatgaacagtgaacagcctcagggcgagtatggggttactattgcctttctgcgcttgatcaccacccttgtcaaggtacagtctgattttgttcacaaagggcagaaaaagaaaaggtccagtcttgtcagatgactctgaaatagtttccctggcccctggtgctgtaatcttcttgtctgtaggcagaatagtcatcttgaagttacagtgacaacagtttctatgtattgagtacctagtatgtgccagttatgtactctattaggtgcttaattatgtgaatttatttaatgattggaaggtttatgaagtagaatggaagaggcc

SEQ ID NO: 288979 - DNA, 1746 bp, Homo sapiens
  misc_feature (1717)..(1717): n is a, c, g, or t
agggcgagcgggcgcgcgaagatggcggcggccgccggcgggccgtgtgtgaggagcagtagagaactgtggactattctgcttggaaggtcagctctgagagagctgagtcagattgaggcagaactgaataaacattggcggcgattgttagaggggctttcttactacaaacctcccagtccaagttcagctgaaaaagtgaaagctaataaagatgtagcttcaccattgaaggaactgggtttaagaatcagcaagtttttgggtcttgatgaagaacagagtgtgcagttactccagtgttacctgcaagaggactacaggggtactcgggactcagtaaagacagtactgcaagatgagaggcagagccaggccttaatcctgaagattgcagattattattatgaagaaagaacctgtattcttcgttgtgtcttacaccttctcacttacttccaagatgaaagacacccctatagggttgaatatgcagactgtgttgataaattggagaaggaactagtttcaaaatacagacagcagttcgaagagctttataaaactgaagcaccaacttgggagacacatggaaatctcatgacagagcgccaagtgtctcgctggtttgttcagtgccttcgggaacagtccatgctgctagaaattattttcctttattatgcatactttgagatggcacccagtgacttacttgtattaaccaagatgtttaaagagcaaggatttggtagtaggcagaccaataggcacctggtggatgagactatggatccttttgtagatcggattggctacttcagtgccctcatcctggtggagggcatggatatcgagtccttgcataagtgtgctttggatgacagaagagaactgcatcagtttgcgcaggatgggcttatttgtcaggatatggactgtttaatgttgacctttggggacattccacatcatgccccagtgcttttggcctgggctctcctccgtcacactctgaacccagaagagacaagcagtgtggtccggaagataggtggcacagccatccagctgaatgtgtttcagtacttgacccgattgctccagtcccttgccagtgggggaaatgattgcaccaccagcactgcatgcatgtgtgtctatggactgctctctttcgttctgacctcgttggagctgcacaccctgggcaatcagcaggatataattgatacagcatgtgaagtattggccgacccttctcttccggaactgttctggggaacagagccaacttctggccttgggatcattctggacagtgtgtgtggaatgtttccccaccttctctccccactcctgcaactgctccgagccctggtatcagggaagtccacagccaaaaaggtgtatagcttcttggataagatgtctttctacaatgaactttataaacacaagcctcatgatgtgatctcccatgaagatggaactctttggcggagacaaacacccaaactcctttatccccttgggggtcaaaccaaccttcgcatacctcaaggcactgtgggccaagtaatgttggatgatagggcatacctggtacgctgggaatactcctatagcagctggaccctctttacctgcgagattgaaatgttgcttcatgttgtttcaactgcagatgtgattcagcactccagcgatcttnggcaagaaagggatcctctagatagacct

SEQ ID NO: 288980 - DNA, 310 bp, Homo sapiens
tgttcctgttgtcttagttttttacccttgcttctcttcagctggacaagaaaaaggagcccctcacccaggcagtggggctcagcacacaggcagaagggaccaggacgttaaagtaagtgctctttctgggatttgataaggggctggggcagtcatgggcccactgttctcaagcttggccagcctggccctctgcagcagtaccaaaaacctgtgtctcctcccaggtccctcctgatgtttaccatggaaaactgcttctacctgctcatctctcaggcgatgcggtaccttagggacccggctg

SEQ ID NO: 288981 - DNA, 427 bp, Homo sapiens
gtagggctccttctccacgttccctttgtctgtctttattgtgcctgcatgttactaataactccagtttaagttaacttgcagtagcttttagaagacgacattgttcttcctaggacatagcctttacataccctagtggctgctgtatagattggcgtatagcaaagggagttgattactcctcctctctcctagtttggactggggcctctaacagaagctgttgaactctgggattattgttggaatctaattcatgagagcacatatattgcgaatgaagtcatactgtctgaatcatctttggtttccatttggcaccctagtgatggggcagagggccaggggcagggccagctgctgatcaagacagtgaaactggcattctccgtcaccaacaatgttattcggctgaaacctcctt

SEQ ID NO: 288982 - DNA, 316 bp, Homo sapiens
agggaaggagggagagaaggggagcatgagggaaggagggagagaagagcagcagcgagtgaggagcgcatgggtgttacatggagggctattgggttggtctggttgggtgactgggctgctgacaagagaatccgctcatctctcctgtgtctctcccaggtcaacctgggttacttgtgccaggcatgtacctctctcctgcacagtcgaaagatgctgcagcattacttacaggtaagcgtcctatgccatgaggtcctggaatacctcacgctagcttcccaagctccaccttcatttcttgactctcctt

SEQ ID NO: 288983 - DNA, 590 bp, Homo sapiens
cagtagcggagggttgtcgatgccttcatttttgagatgctctaagtactctgctggctcactggccagctagtctgctgaaggacgggaacggtctcgggtcagaatcctggttgtaccactaagccatttctttgccaactcagcatttgggggcctgggacgttgcctctccacaggagggtaggtgtgggtatgtcaggtccctcagccatccccatctttccctgatgtgtgctttcctcccagtgcctcaacgcagtgaggacagtgcagagtctggcctgcctggaggaggcggaccacaccgtgggttttattctgcagctctctaacttcatgaaggagtggcacttccacctgcctcagctcatgcgtgatatccaggtgggggcccaagatggtgtcttggagtctggggtaatgcttggagacagggaggctgtgaggtctcactggggcactcctagtgaattgcaggatgttcctgaacgggggcttttcccttggggagcacagggtttgctgtcatgtgcttactctggctaaatgtttccttccatagtcaagggcagccatgtaggttaaga

SEQ ID NO: 288984 - DNA, 131 bp, Homo sapiens
ggccttgcacacagtccagtatggccttctcaagatcctcagcaagacgctggcagccctgcgccacttcaccccagatgtctgccagattctgctggatcaggtactgcccatcatctgttcagcaccac

SEQ ID NO: 288985 - DNA, 263 bp, Homo sapiens
gtggtcttcccactttagtgtttattggtgttttggtgtttttatttcaacagaatacaataataaagatagactggttcagctagggaaaatgatccatttttcttcccttcctcaaacaggatataattgatacagcatgtgaagtattggccgacccttctcttccggaactgttctggggaacagtaagtatgtcagagagagtcactgcatagcaaaagaattgttcaaacacttgttttcttacaggttttgtacta

SEQ ID NO: 288986 - DNA, 926 bp, Homo sapiens
cgcgcctcaggagccagtgtaggcgccgcaaagcggaaggggcgcgcggataggctgccaggatggaaactaactacctgaagaggtgctttggaaattgcctggcccaggcactggcagaggtggcgaaggttcggcccagtgacccaatagaatacctggctcactggctttatcattacaggaaaacagcaaaagcaaaagaagagaatagggaaaagaagatccacctgcaggaggaatatgacagtagcctcaaggaaatggaaatgacagaaatgctgaaacaggaagagtatcagattcaacagaactgtgaaaagtgtcacaaggaactgacttctgaaactgtttccacgaagaagaccatattcatgcaggaggacacaaacccccttgagaaggaggccttgaagcaggaattcctgccaggtacttccagtctgattccaggaatgcctcaacaggttcctccttcagagtctgctggccagattgaccagaacttcaaaatgccacaagaaataaattacaaggaggcttttcagcatgaagttgctcatgaaatgcctcctggctccaaatctcctttttaggttacagaaggtagatgcttctgatttacttctctcaaagctagaagccaagaaaatggccagctagaaccaagatttaaggggctgtaaaaggcaagttcagggactctccagcctactccttttctgaaaaacccttaatcatgtgaacatttgaactagttataggataaaataaactcagaataaggatttaaaataagtaaccaagtggctgtgactttttcctcttgttttatcaacgttttggagactacacaatgaaaacacatctgttggggtgatcagacccaacacccggccatgggggctacaaagtccagccgagtc

SEQ ID NO: 288987 - DNA, 1240 bp, Homo sapiens
ggcacgatggaagaagtgcctttcgcctcccaccatgattctgagacctccccagcaatgtggaactaaacagctgcctccagcgtgaagaaggtgccacagagatggaaggagattccttacccacacctgggagacagctagccagccagccagccaactgggcgggggcacccgggcaggggtgccagatacagtattgtatctggcaacctcccggggcgctcagtgtggttttcccacccgggagtctggaagggtctcccgcagcccgcaggagacgcagcgctccccgctcagggggagcaggaggacagctggccgctttcgggagccccaggcgcgaagcggcctctctccgcctcaggctgccaggatggaaactaactacctgaagaggtgctttggaaattgcctggcccaggcactggcagaggtggcgaaggttcggcccagtgacccaatagaatacctggctcactggctttatcattacaggaaaacagcaaaagcaaaagaagagaatagggaaaagaagatccacctgcaggaggaatatgacagtagcctcaaggaaatggaaatgacagaaatgctgaaacaggaagagtatcagattcaacagaactgtgaaaagtgtcacaaggaactgacttctgaaactgtttccacgaagaagaccatattcatgcaggaggacacaaacccccttgagaaggaggccttgaagcaggaattcctgccaggtacttccagtctgattccaggaatgcctcaacaggttcctccttcagagtctgctggccagattgaccagaacttcaaaatgccacaagaaataaattacaaggaggcttttcagcatgaagttgctcatgaaatgcctcctggctccaaatctcctttttaggttacagaaggtagatgcttctgatttacttctctcaaagctagaagccaagaaaatggccagctagaaccaagatttaaggggctgtaaaaggcaagttcagggactctccagcctactccttttctgaaaaacccttaatcatgtgaacatttgaactagttataggataaaataaactcagaataaggatttaaaataagtaaccaagtggctgtgactttttcctcttgttttatcaacgttttggagactacacaatgaaaacacatctgttggggtgatcagacccaacacccggccatgggggctacaaagtccagccgagtc

SEQ ID NO: 288988 - DNA, 514 bp, Homo sapiens
cacaaggggttttatcctggaccccggacatgttccaagccctgcctcaacttttctcccaacactaagctttcctcccaacacacatccatctcgtgtgttcatgtcttaacttttgcttcacttcacagtcaggcctctccgagtattttttacacatatcctggagtctacctatgtcactgatagcagatatttttcttcaacatatattatcaatgttttaatactttttttcaattttagtaactggtaaaatacatgtaagatgtaccatcttaaccatttttaagtgtacagatcagttgtattaagtagattcatattcttgtgcaaccatcatcaccatccggctgcaaaactctttcatcttgcaaaactgaaactacacccattaaaaaataactcgccatttctctctctccccagcccctggcaaccaccattctttctgtctctgtgatttagattactctgtaagtatgttgtataaatagactcatacaatgttagt

SEQ ID NO: 288989 - DNA, 1458 bp, Homo sapiens
ggcacgatggaagaagtgcctttcgcctcccaccatgattctgagacctccccagcaatgtggaactaaggagattcctacttaccagttgttccatggtcacattttccttatacttgtaaatccacaatgctaaatattctatcggatccactgggcgaactcttgccacttctgcaagaccttgagttaaacaggccccaaggtgcttttgaagatatattgactccatttctaactcctaaaaagcatcttggctcaacataagaaagccctttcccacagaaacagctgcctccagcgtgaagaaggtgccacagagatggaaggagattccttacccacacctgggagacagctagccagccagccagccaactgggcgggggcacccgggcaggggtgccagatacagtattgtatctggcaacctcccggggcgctcagtgtggttttcccacccgggagtctggaagggtctcccgcagcccgcaggagacgcagcgctccccgctcagggggagcaggaggacagctggccgctttcgggagccccaggcgcgaagcggcctctctccgcctcaggctgccaggatggaaactaactacctgaagaggtgctttggaaattgcctggcccaggcactggcagaggtggcgaaggttcggcccagtgacccaatagaatacctggctcactggctttatcattacaggaaaacagcaaaagcaaaagaagagaatagggaaaagaagatccacctgcaggaggaatatgacagtagcctcaaggaaatggaaatgacagaaatgctgaaacaggaagagtatcagattcaacagaactgtgaaaagtgtcacaaggaactgacttctgaaactgtttccacgaagaagaccatattcatgcaggaggacacaaacccccttgagaaggaggccttgaagcaggaattcctgccaggtacttccagtctgattccaggaatgcctcaacaggttcctccttcagagtctgctggccagattgaccagaacttcaaaatgccacaagaaataaattacaaggaggcttttcagcatgaagttgctcatgaaatgcctcctggctccaaatctcctttttaggttacagaaggtagatgcttctgatttacttctctcaaagctagaagccaagaaaatggccagctagaaccaagatttaaggggctgtaaaaggcaagttcagggactctccagcctactccttttctgaaaaacccttaatcatgtgaacatttgaactagttataggataaaataaactcagaataaggatttaaaataagtaaccaagtggctgtgactttttcctcttgttttatcaacgttttggagactacacaatgaaaacacatctgttggggtgatcagacccaacacccggccatgggggctacaaagtccagccgagtc

SEQ ID NO: 288990 - DNA, 1208 bp, Homo sapiens
ggcacgatggaagaagtgcctttcgcctcccaccatgattctgagacctccccagcaatgtggaactaaggagattcctacttaccagttgttccatggtcacattttccttatacttgtaaatccacaatgctaaatattctatcggatccactgggcgaactcttgccacttctgcaagaccttgagttaaacaggccccaaggtgcttttgaagatatattgactccatttctaactcctaaaaagcatcttggctcaacataagaaagccctttcccacagaaacagctgcctccagcgtgaagaaggtgccacagagatggaaggagattccttacccacacctgggagacagctagccagccagccagccaactgggcgggggcacccgggcaggggtgccagatacagtattgtatctggcaacctcccggggcgctcagtgtggttttcccacccgggagtctggaagggtctcccgcagcccgcaggagacgcagcgctccccgctcagggggagcaggaggacagctggccgctttcgggagccccaggcgcgaagcggcctctctccgcctcaggctgccaggatggaaactaactacctgaagaggtgctttggaaattgcctggcccaggcactggcagaggtggcgaaggttcggcccagtgacccaatagaatacctggctcactggctttatcattacaggaaaacagcaaaagcaaaagaagagaatagggaaaagaagatccacctgcaggaggaatatgacagtagcctcaaggaaatggaaatgacagaaatgctgaaacaggaagagtatcagattcaacagaactgtgaaaagtgtcacaaggaactgacttctgaaactgtttccacgaagaagaccatattcatgcaggaggacacaaacccccttgagaaggaggccttgaagcaggaattcctgccagcccctggcaaccaccattctttctgtctctgtgatttagattactctgaatcatcctatgaccatagggagaaccatccttaatatgaagccaacacatggataatggcagagaagcaagagaacctcgactgttgatgacatcatgaaaccacaggatcacctcaaggcaactggaattgggttttctgttaacttgcaaatcaaagcttcctaactgaataaagactcagttaatgttagtt

SEQ ID NO: 288991 - DNA, 312 bp, Homo sapiens
tataaatggtatgaggtgaaggtccaccatcactcttggtgggtgtggatatctaattttctctgcaccattttttgaaaaggctgctcttccgctttaaatggtcttggcatccttggcaaaaatcagttggccataagatgtatggctttatgtctggtctctcaattccatttcttttgtccatatgtctgttcttatgccagcaccacactggtgtttttgattttgtttctttgagacaaggttttggtcttttgcccaggccagagtgcagtggcatgatcatagctcactgcaaccttaaacttt

SEQ ID NO: 288992 - DNA, 2964 bp, Homo sapiens
  misc_feature (32)..(32): n is a, c, g, or t
tgcggcccgggccgaggaaggagaagtgggangaggggggagctcggcgtcccgctccctccgcggctcatggcgacgactctcggcacatccgggaccctccggccgtggcggccgaggcgccggctgctcgggccccagccccggccgctgtggtgactccgccgcgcctcgccgtcgcccccgtgccgcccgccgcccccgccgcccccgccgccggggacatgtctaaccccggaggccggaggaacgggcccgtcaagctgcgcctgacagtactctgtgcaaaaaacctggtgaaaaaggattttttccgacttcctgatccatttgctaaggtggtggttgatggatctgggcaatgccattctacagatactgtgaagaatacgcttgatccaaagtggaatcagcattatgacctgtatattggaaagtctgattcagttacgatcagtgtatggaatcacaagaagatccataagaaacaaggtgctggatttctcggttgtgttcgtcttctttccaatgccatcaaccgcctcaaagacactggttatcagaggttggatttatgcaaactcgggccaaatgacaatgatacagttagaggacagatagtagtaagtcttcagtccagagaccgaataggcacaggaggacaagttgtggactgcagtcgtttatttgataacgatttaccagacggctgggaagaaaggagaaccgcctctggaagaatccagtatctaaaccatataacaagaactacgcaatgggagcgcccaacacgaccggcatccgaatattctagccctggcagacctcttagctgctttgttgatgagaacactccaattagtggaacaaatggtgcaacatgtggacagtcttcagatcccaggctggcagagaggagagtcaggtcacaacgacatagaaattacatgagcagaacacatttacatactcctccagacctaccagaaggctatgaacagaggacaacgcaacaaggccaggtgtatttcttacatacacagactggtgtgagcacatggcatgatccaagagtgcccagggatcttagcaacatcaattgtgaagagcttggtccattgcctcctggatgggagatccgtaatacggcaacaggcagagtttatttcgttgaccataacaacagaacaacacaatttacagatcctcggctgtctgctaacttgcatttagttttaaatcggcagaaccaattgaaagaccaacagcaacagcaagtggtatcgttatgtcctgatgacacagaatgcctgacagtcccaaggtacaagcgagacctggttcagaaactaaaaattttgcggcaagaactttcccaacaacagcctcaggcaggtcattgccgcattgaggtttccagggaagagatttttgaggaatcatatcgacaggtcatgaaaatgagaccaaaagatctctggaagcgattaatgataaaatttcgtggagaagaaggccttgactatggaggcgttgccagggaatggttgtatctcttgtcacatgaaatgttgaatccatactatggcctcttccagtattcaagagatgatatttatacattgcagatcaatcctgattctgcagttaatccggaacatttatcctatttccactttgttggacgaataatgggaatggctgtgtttcatggacattatattgatggtggtttcacattgcctttttataagcaattgcttgggaagtcaattaccttggatgacatggagttagtagatccggatcttcacaacagtttagtgtggatacttgagaatgatattacaggtgttttggaccataccttctgtgttgaacataatgcatatggtgaaattattcagcatgaacttaaaccaaatggcaaaagtatccctgttaatgaagaaaataaaaaagaatatgtcaggctctatgtgaactggagatttttacgaggcattgaggctcaattcttggctctgcagaaaggatttaatgaagtaattccacaacatctgctgaagacatttgatgagaaggagttagagctcattatttgtggacttggaaagatagatgttaatgactggaaggtaaacacccggttaaaacactgtacaccagacagcaacattgtcaaatggttctggaaagctgtggagttttttgatgaagagcgacgagcaagattgcttcagtttgtgacaggatcctctcgagtgcctctgcagggcttcaaagcattgcaaggtgctgcaggcccgagactctttaccatacaccagattgatgcctgcactaacaacctgccgaaagcccacacttgcttcaatcgaatagacattccaccctatgaaagctatgaaaagctatatgaaaagctgctaacagccattgaagaaacatgtggatttgctgtggaatgacaagcttcaaggatttacccaggactctatttatacaaccctgactgacagcctcctttcagcagagtttcaaagaatatgctgaaatacaggaaaacactcccccccccccctttttttttttttttttacattttaggacactgtgaggggaaaggacaattttgaaattccttttcaaggaaaaaaaaggtctttatgctttgccatgaggccacattcagctgctatttaaacttaatatcttgaacctaaagaatgctgacttttcctacatttccagagttaggcagtattctacacttaaagactactactatttttataaaaggtaatctattcaaatttcttcacagatttcaagtctctcaaacatcaagacaacttcagcagtcggtacaagtcacatttcattttgattgaatacatgatcttgaacagctcctgtacttgctctttgtaaaaaaaaataaaattattttgaattattcta

SEQ ID NO: 288993 - DNA, 2302 bp, Homo sapiens
cctagattataaagtttcatgtggaagataacatgagtcttctcctaatagaatacggaagtttctaatttaataccatcttgtgaatccttgtatatagtctgaacttgacttcctcttcttgccaaaagctcaccaaggttacttacatctttgccctcttaacagactatagataaaccactttggattgatgttgacatctaatgaccaacactgggaattgccacatctaagttttattttactcaagaatatattttaaaactcttctgcaaatgcatgattcttattttagttttaaatgtattttagctctttaatttgaaaaaacttgtccattaactgtgctatgactcaaaggttaacttttagcacaatcattaaattataggcttgagtgacagacagacttaggacctaggttcgtatcctggctttgccatgtaacaccgagcacattatttaacctctttgagcctcaattttatcctctatagaggaaaataacagcaccaaccatctaggtttgttgcaagaaatcagtgatatctaatttcatgtgaaatgctggcacagtgtctggcatagtaaattttaactgtcattatcagtgttcagacctgagaagaaatactctcctgccatttctctttgagattataaggcaagctctttagagtgggagtggttatacttctacaatatttctgtgatttgaattttaaaaactgtacaaccaaaacataaaaataaagtggataccaaggctgaagttattacagctgtcctctatagtaatatgattttgtttataatctgtgaaagtttaaagtttaaatttattgacattatacgtttataaacaaattagatttatactaataaatattagtaatagttttttatgtattgaagtttctcactggattttgtctaaagaaaagtggttctgttgttctaaaaaaaaaagacaaaacaaaacccaccataaagaaacccttttagagattgttctcttcaccctggcctttcctctgtcttcccaaggattttgagttcattttgtccttgacttttttctccccagtgtgcgtgcttgctctttagtcctcttctttctaatttggctatttttccatctctatctgtttatgacatagaatgtctccccagtatctcatctgttttgcttctctttgagctcaaatgtaatcttgagaatatacctttgtctagcaaagagaaaacataagttttggtataaaattaggcataataagcattatcaacctccagactctttgaaaatttctggaagttcctcctcaaatcttcccaatgttggccagcctctttctcagagccttttatacatcatttaaaattttttagttattagtattgtgacaatcttgatttgttttccattgcaacatatttagtatttaagccacgttataagtttagtttgtttatggatagctggcctgtggccctcatcatttgtaaaattgtttccaagagacagaacaaatgatttgtaaagcccttttttgataataaataaaatagattggtaatttggagatttttccctattagtatatcatcttagtgtatataactgtctttgatctggacactctgaatgtttttgttatcagtgtttattaattttacagaacagaggacaacgcaacaaggccaggtgtatttcttacatacacagactggtgtgagcacatggcatgatccaagagtgcccaggtaagaacgtattttaagcactctttagaccatcaaagagccatttcacctaggatttctttgatttttaagaaatttttaccttttaaaaatagtttatgtaaaagtttgactcttctgatagttacttcagttttaacgtttagtagaaagtcctgcctactgctctgcaatcccacctcagttctcccctccctcaccagttcctagccaccctcccctgcttccccttaaaaaaaagtggaataggcagggcatggtagctcatgcctgtaatcccagcactttgggaggccaaggtgggcagatcatgaggtcaagagatcgaaaccatcctggccaacatggtgaaaccccatctctactaaaaatacaaaaatgagctgggcgtggtggcgcgtgcctgtaatcccagctactcgggtggctgaggcagggaatcgcttgaacccagggaggtggaggtttgcagtgagctgagatcacgccactgcactccagcctggccacagagcgagactctgtctcaaaa

SEQ ID NO: 288994 - DNA, 481 bp, Homo sapiens
tccttaagaccaacaattattaagactcagactaaagtggtctaaaagttttggagagaaagtgactgcatgttggcaatgtaatacaccagtgtttggtttttgaaatctgaactctttaaatgataggtttgatttctaatggattgtggaaatttattgtcactctatagatgttagaatctctgataccagctaattttttcgttgctttctttgttgacttcaaatagatcagaggttggatttatgcaaactcgggccaaatgacaatgatacagttagaggacagatagtaggtaagtgtggaatttaaagttacatgaattttggtttcaaactgacctaaagtgtaaaataccttttaaatcaaagtataataactgtagcttcattgtgttggcctgaattaaatgagccaggtaaaatgttacagtgaatccaggatccaggttaacttaatttaaaaaactttaatgta

SEQ ID NO: 288995 - DNA, 5031 bp, Homo sapiens
  misc_feature (32)..(32): n is a, c, g, or t
tgcggcccgggccgaggaaggagaagtgggangaggggggagctcggcgtcccgctccctccgcggctcatggcgacgactctcggcacatccgggaccctccggccgtggcggccgaggcgccggctgctcgggccccagccccggccgctgtggtgactccgccgcgcctcgccgtcgcccccgtgccgcccgccgcccccgccgcccccgccgccggggacatgtctaaccccggaggccggaggaacgggcccgtcaagctgcgcctgacagtactctgtgcaaaaaacctggtgaaaaaggattttttccgacttcctgatccatttgctaaggtggtggttgatggatctgggcaatgccattctacagatactgtgaagaatacgcttgatccaaagtggaatcagcattatgacctgtatattggaaagtctgattcagttacgatcagtgtatggaatcacaagaagatccataagaaacaaggtgctggatttctcggttgtgttcgtcttctttccaatgccatcaaccgcctcaaagacactggttatcagaggttggatttatgcaaactcgggccaaatgacaatgatacagttagaggacagatagtagtaagtcttcagtccagagaccgaataggcacaggaggacaagttgtggactgcagtcgtttatttgataacgatttaccagacggctgggaagaaaggagaaccgcctctggaagaatccagtatctaaaccatataacaagaactacgcaatgggagcgcccaacacgaccggcatccgaatattctagccctggcagacctcttagctgctttgttgatgagaacactccaattagtggaacaaatggtgcaacatgtggacagtcttcagatcccaggctggcagagaggagagtcaggtcacaacgacatagaaattacatgagcagaacacatttacatactcctccagacctaccagaaggctatgaacagaggacaacgcaacaaggccaggtgtatttcttacatacacagactggtgtgagcacatggcatgatccaagagtgcccagggatcttagcaacatcaattgtgaagagcttggtccattgcctcctggatgggagatccgtaatacggcaacaggcagagtttatttcgttgaccataacaacagaacaacacaatttacagatcctcggctgtctgctaacttgcatttagttttaaatcggcagaaccaattgaaagaccaacagcaacagcaagtggtatcgttatgtcctgatgacacagaatgcctgacagtcccaaggtacaagcgagacctggttcagaaactaaaaattttgcggcaagaactttcccaacaacagcctcaggcaggtcattgccgcattgaggtttccagggaagagatttttgaggaatcatatcgacaggtcatgaaaatgagaccaaaagatctctggaagcgattaatgataaaatttcgtggagaagaaggccttgactatggaggcgttgccagggaatggttgtatctcttgtcacatgaaatgttgaatccatactatggcctcttccagtattcaagagatgatatttatacattgcagatcaatcctgattctgcagttaatccggaacatttatcctatttccactttgttggacgaataatgggaatggctgtgtttcatggacattatattgatggtggtttcacattgcctttttataagcaattgcttgggaagtcaattaccttggatgacatggagttagtagatccggatcttcacaacagtttagtgtggatacttgagaatgatattacaggtgttttggaccataccttctgtgttgaacataatgcatatggtgaaattattcagcatgaacttaaaccaaatggcaaaagtatccctgttaatgaagaaaataaaaaagaatatgtcaggctctatgtgaactggagatttttacgaggcattgaggctcaattcttggctctgcagaaaggatttaatgaagtaattccacaacatctgctgaagacatttgatgagaaggagttagagctcattatttgtggacttggaaagatagatgttaatgactggaaggtaaacacccggttaaaacactgtacaccagacagcaacattgtcaaatggttctggaaagctgtggagttttttgatgaagagcgacgagcaagattgcttcagtttgtgacaggatcctctcgagtgcctctgcagggcttcaaagcattgcaaggtgctgcaggcccgagactctttaccatacaccagattgatgcctgcactaacaacctgccgaaagcccacacttgcttcaatcgaatagacattccaccctatgaaagctatgaaaagctatatgaaaagctgctaacagccattgaagaaacatgtggatttgctgtggaatgacaagcttcaaggatttacccaggactctatttatacaaccctgactgacagcctcctttcagcagagtttcaaagaatatgctgaaatacaggaaaacactcccccccccccctttttttttttttttttacattttaggacactgtgaggggaaaggacaattttgaaattccttttcaaggaaaaaaaaggtctttatgctttgccatgaggccacattcagctgctatttaaacttaatatcttgaacctaaagaatgctgacttttcctacatttccagagttaggcagtattctacacttaaagactactactatttttataaaaggtaatctattcaaatttcttcacagatttcaagtctctcaaacatcaagacaacttcagcagtcggtacaagtcacatttcattttgattgaatacatgatcttgaacagctcctgtacttgctctttgtaaaaaaaaataaaattattttgaattattctacctttgtaaacaattggctaaaagaatcatctttaagaaattaagccatttacatgtttgtgtttttctatagcagagcattatattttgcattatatgtttcaacctagtctaagtgggtcttttttacatttttcaagaacggatttcctggaatacagcgatataattttggttgtcaaattcctaatgcaaccatttagtctaaacttagtcatttatttgtgacaataagatgtgttcaggggctccctgtttttaagagactcttttaaaaaaaaaaaaacctaatgtttttatcttgagtcaatatgattaggtattttggatttacttttaatcttaaaatactgcatttttatagcttctcagagcatgtggatgggatgggattttcgttattttgctgggtcagcttatctttaatatatggactattcctataaaccaaagtctctgacaagtgcacctaatttatattgtattttaactacagtgtaagtttccattaacaaaaccatcctaaagcgttaactgctcataattttaatcagctacagttatgaaaaaggaagaattttgctctaaagattattaataagcttagaaaatcctgcttttacctaacagaatgaagtggggttgaggggcggtagtatgaacagtgattctaactctatggcgtaaattactttgaagagttcattttggaagtaagggaatcccgcttcccttggtgttgaagatctgcatctgattttgaaacgtccagatttagctttcaaggtgcgtgcatgttgaatgatccagaagcaacgaaaactctggggtgagggattgaaaaaatctgaaatcacagttggatttttaaattcaaccatcaaaaatatgtactatcagtttttttttacattgatgtgaaataagcaaattttcatgataattaagctgcaaaatttaaagttatcaagtaaataggtcctctgtgttctgtttcatgtgatggagtgggtttcagtctgtgttcttggagccaaagggttcctcaggggtgcctcaggagtaatggtttaagagaagaggggcaatgagagggagcgagggggaaggcctagttggtatttgagcaggggccttaggctccatatccccaccccctttacccagaacagcccatttttcttatgtatattggaatttcaagtaagctttcatggggtgcagtggggcggggaggaatggatgggataaaaaaagtggagattttgctgctttaaaaaagttgagaactacttgtgtagtttttaagtattttaatgtatttcatttggccaaattcaactgccacaagcaagctagtcatagttgtaactgtgcagtggtaatatgcttatgcctacctttttcctctcaaacaatttgttttttttacattgcattctgagtactgaagagcatcttgaaatgtatggaagtggtttctatgctatttgataatcagtaatgttcagctgtcatgatagtactttactggttgcagacccatctctcttttatattaaagcactagtgcagtttataattgtgcctacttttaaaatctttcagtaaaaaagtacataatgaatacagaaatcataactgacagggatacagtaataatgaaatgctactatcacttattttaatatacaatataaagcaggcaaataccattgctttttgagtgcctttttaactttatactaatgacttaatagagctttaaaagaaagaaattggctgggcatggtggctcacacctgtaatcccagcactttgggaggccgaggtgggcggatcacctgaggtcaggagttcgagaccagcctggccaacgtggtgaaaccctgtctctactaaaaatacaaaatttagccgggcatggtggcgcactcctgtaatccaactacttgggaggctgaggcaggagaattgcttgaatctgggaggcagagattgcagtgagccgagatcgcaccactgcactccagcctgggcgacaagagtgagactccgtccccgccc

SEQ ID NO: 288996 - DNA, 5720 bp, Homo sapiens
cctagattataaagtttcatgtggaagataacatgagtcttctcctaatagaatacggaagtttctaatttaataccatcttgtgaatccttgtatatagtctgaacttgacttcctcttcttgccaaaagctcaccaaggttacttacatctttgccctcttaacagactatagataaaccactttggattgatgttgacatctaatgaccaacactgggaattgccacatctaagttttattttactcaagaatatattttaaaactcttctgcaaatgcatgattcttattttagttttaaatgtattttagctctttaatttgaaaaaacttgtccattaactgtgctatgactcaaaggttaacttttagcacaatcattaaattataggcttgagtgacagacagacttaggacctaggttcgtatcctggctttgccatgtaacaccgagcacattatttaacctctttgagcctcaattttatcctctatagaggaaaataacagcaccaaccatctaggtttgttgcaagaaatcagtgatatctaatttcatgtgaaatgctggcacagtgtctggcatagtaaattttaactgtcattatcagtgttcagacctgagaagaaatactctcctgccatttctctttgagattataaggcaagctctttagagtgggagtggttatacttctacaatatttctgtgatttgaattttaaaaactgtacaaccaaaacataaaaataaagtggataccaaggctgaagttattacagctgtcctctatagtaatatgattttgtttataatctgtgaaagtttaaagtttaaatttattgacattatacgtttataaacaaattagatttatactaataaatattagtaatagttttttatgtattgaagtttctcactggattttgtctaaagaaaagtggttctgttgttctaaaaaaaaaagacaaaacaaaacccaccataaagaaacccttttagagattgttctcttcaccctggcctttcctctgtcttcccaaggattttgagttcattttgtccttgacttttttctccccagtgtgcgtgcttgctctttagtcctcttctttctaatttggctatttttccatctctatctgtttatgacatagaatgtctccccagtatctcatctgttttgcttctctttgagctcaaatgtaatcttgagaatatacctttgtctagcaaagagaaaacataagttttggtataaaattaggcataataagcattatcaacctccagactctttgaaaatttctggaagttcctcctcaaatcttcccaatgttggccagcctctttctcagagccttttatacatcatttaaaattttttagttattagtattgtgacaatcttgatttgttttccattgcaacatatttagtatttaagccacgttataagtttagtttgtttatggatagctggcctgtggccctcatcatttgtaaaattgtttccaagagacagaacaaatgatttgtaaagcccttttttgataataaataaaatagattggtaatttggagatttttccctattagtatatcatcttagtgtatataactgtctttgatctggacactctgaatgtttttgttatcagtgtttattaattttacagaacagaggacaacgcaacaaggccaggtgtatttcttacatacacagactggtgtgagcacatggcatgatccaagagtgcccagggatcttagcaacatcaattgtgaagagcttggtccattgcctcctggatgggagatccgtaatacggcaacaggcagagtttatttcgttgaccataacaacagaacaacacaatttacagatcctcggctgtctgctaacttgcatttagttttaaatcggcagaaccaattgaaagaccaacagcaacagcaagtggtatcgttatgtcctgatgacacagaatgcctgacagtcccaaggtacaagcgagacctggttcagaaactaaaaattttgcggcaagaactttcccaacaacagcctcaggcaggtcattgccgcattgaggtttccagggaagagatttttgaggaatcatatcgacaggtcatgaaaatgagaccaaaagatctctggaagcgattaatgataaaatttcgtggagaagaaggccttgactatggaggcgttgccagggaatggttgtatctcttgtcacatgaaatgttgaatccatactatggcctcttccagtattcaagagatgatatttatacattgcagatcaatcctgattctgcagttaatccggaacatttatcctatttccactttgttggacgaataatgggaatggctgtgtttcatggacattatattgatggtggtttcacattgcctttttataagcaattgcttgggaagtcaattaccttggatgacatggagttagtagatccggatcttcacaacagtttagtgtggatacttgagaatgatattacaggtgttttggaccataccttctgtgttgaacataatgcatatggtgaaattattcagcatgaacttaaaccaaatggcaaaagtatccctgttaatgaagaaaataaaaaagaatatgtcaggctctatgtgaactggagatttttacgaggcattgaggctcaattcttggctctgcagaaaggatttaatgaagtaattccacaacatctgctgaagacatttgatgagaaggagttagagctcattatttgtggacttggaaagatagatgttaatgactggaaggtaaacacccggttaaaacactgtacaccagacagcaacattgtcaaatggttctggaaagctgtggagttttttgatgaagagcgacgagcaagattgcttcagtttgtgacaggatcctctcgagtgcctctgcagggcttcaaagcattgcaaggtgctgcaggcccgagactctttaccatacaccagattgatgcctgcactaacaacctgccgaaagcccacacttgcttcaatcgaatagacattccaccctatgaaagctatgaaaagctatatgaaaagctgctaacagccattgaagaaacatgtggatttgctgtggaatgacaagcttcaaggatttacccaggactctatttatacaaccctgactgacagcctcctttcagcagagtttcaaagaatatgctgaaatacaggaaaacactcccccccccccctttttttttttttttttacattttaggacactgtgaggggaaaggacaattttgaaattccttttcaaggaaaaaaaaggtctttatgctttgccatgaggccacattcagctgctatttaaacttaatatcttgaacctaaagaatgctgacttttcctacatttccagagttaggcagtattctacacttaaagactactactatttttataaaaggtaatctattcaaatttcttcacagatttcaagtctctcaaacatcaagacaacttcagcagtcggtacaagtcacatttcattttgattgaatacatgatcttgaacagctcctgtacttgctctttgtaaaaaaaaataaaattattttgaattattctacctttgtaaacaattggctaaaagaatcatctttaagaaattaagccatttacatgtttgtgtttttctatagcagagcattatattttgcattatatgtttcaacctagtctaagtgggtcttttttacatttttcaagaacggatttcctggaatacagcgatataattttggttgtcaaattcctaatgcaaccatttagtctaaacttagtcatttatttgtgacaataagatgtgttcaggggctccctgtttttaagagactcttttaaaaaaaaaaaaacctaatgtttttatcttgagtcaatatgattaggtattttggatttacttttaatcttaaaatactgcatttttatagcttctcagagcatgtggatgggatgggattttcgttattttgctgggtcagcttatctttaatatatggactattcctataaaccaaagtctctgacaagtgcacctaatttatattgtattttaactacagtgtaagtttccattaacaaaaccatcctaaagcgttaactgctcataattttaatcagctacagttatgaaaaaggaagaattttgctctaaagattattaataagcttagaaaatcctgcttttacctaacagaatgaagtggggttgaggggcggtagtatgaacagtgattctaactctatggcgtaaattactttgaagagttcattttggaagtaagggaatcccgcttcccttggtgttgaagatctgcatctgattttgaaacgtccagatttagctttcaaggtgcgtgcatgttgaatgatccagaagcaacgaaaactctggggtgagggattgaaaaaatctgaaatcacagttggatttttaaattcaaccatcaaaaatatgtactatcagtttttttttacattgatgtgaaataagcaaattttcatgataattaagctgcaaaatttaaagttatcaagtaaataggtcctctgtgttctgtttcatgtgatggagtgggtttcagtctgtgttcttggagccaaagggttcctcaggggtgcctcaggagtaatggtttaagagaagaggggcaatgagagggagcgagggggaaggcctagttggtatttgagcaggggccttaggctccatatccccaccccctttacccagaacagcccatttttcttatgtatattggaatttcaagtaagctttcatggggtgcagtggggcggggaggaatggatgggataaaaaaagtggagattttgctgctttaaaaaagttgagaactacttgtgtagtttttaagtattttaatgtatttcatttggccaaattcaactgccacaagcaagctagtcatagttgtaactgtgcagtggtaatatgcttatgcctacctttttcctctcaaacaatttgttttttttacattgcattctgagtactgaagagcatcttgaaatgtatggaagtggtttctatgctatttgataatcagtaatgttcagctgtcatgatagtactttactggttgcagacccatctctcttttatattaaagcactagtgcagtttataattgtgcctacttttaaaatctttcagtaaaaaagtacataatgaatacagaaatcataactgacagggatacagtaataatgaaatgctactatcacttattttaatatacaatataaagcaggcaaataccattgctttttgagtgcctttttaactttatactaatgacttaatagagctttaaaagaaagaaattggctgggcatggtggctcacacctgtaatcccagcactttgggaggccgaggtgggcggatcacctgaggtcaggagttcgagaccagcctggccaacgtggtgaaaccctgtctctactaaaaatacaaaatttagccgggcatggtggcgcactcctgtaatccaactacttgggaggctgaggcaggagaattgcttgaatctgggaggcagagattgcagtgagccgagatcgcaccactgcactccagcctgggcgacaagagtgagactccgtccccgccc

SEQ ID NO: 288997 - DNA, 3552 bp, Homo sapiens
gagagagagagagagagagagagagagagagagagagagagagagagagagaggttgccagggaatggttgtatctcttgtcacatgaaatgttgaatccatactatggcctcttccagtattcaagagatgatatttatacattgcagatcaatcctgattctgcagttaatccggaacatttatcctatttccactttgttggacgaataatgggaatggctgtgtttcatggacattatattgatggtggtttcacattgcctttttataagcaattgcttgggaagtcaattaccttggatgacatggagttagtagatccggatcttcacaacagtttagtgtggatacttgagaatgatattacaggtgttttggaccataccttctgtgttgaacataatgcatatggtgaaattattcagcatgaacttaaaccaaatggcaaaagtatccctgttaatgaagaaaataaaaaagaatatgtcaggctctatgtgaactggagatttttacgaggcattgaggctcaattcttggctctgcagaaaggatttaatgaagtaattccacaacatctgctgaagacatttgatgagaaggagttagagctcattatttgtggacttggaaagatagatgttaatgactggaaggtaaacacccggttaaaacactgtacaccagacagcaacattgtcaaatggttctggaaagctgtggagttttttgatgaagagcgacgagcaagattgcttcagtttgtgacaggatcctctcgagtgcctctgcagggcttcaaagcattgcaaggtgctgcaggcccgagactctttaccatacaccagattgatgcctgcactaacaacctgccgaaagcccacacttgcttcaatcgaatagacattccaccctatgaaagctatgaaaagctatatgaaaagctgctaacagccattgaagaaacatgtggatttgctgtggaatgacaagcttcaaggatttacccaggactctatttatacaaccctgactgacagcctcctttcagcagagtttcaaagaatatgctgaaatacaggaaaacactcccccccccccctttttttttttttttttacattttaggacactgtgaggggaaaggacaattttgaaattccttttcaaggaaaaaaaaggtctttatgctttgccatgaggccacattcagctgctatttaaacttaatatcttgaacctaaagaatgctgacttttcctacatttccagagttaggcagtattctacacttaaagactactactatttttataaaaggtaatctattcaaatttcttcacagatttcaagtctctcaaacatcaagacaacttcagcagtcggtacaagtcacatttcattttgattgaatacatgatcttgaacagctcctgtacttgctctttgtaaaaaaaaataaaattattttgaattattctacctttgtaaacaattggctaaaagaatcatctttaagaaattaagccatttacatgtttgtgtttttctatagcagagcattatattttgcattatatgtttcaacctagtctaagtgggtcttttttacatttttcaagaacggatttcctggaatacagcgatataattttggttgtcaaattcctaatgcaaccatttagtctaaacttagtcatttatttgtgacaataagatgtgttcaggggctccctgtttttaagagactcttttaaaaaaaaaaaaacctaatgtttttatcttgagtcaatatgattaggtattttggatttacttttaatcttaaaatactgcatttttatagcttctcagagcatgtggatgggatgggattttcgttattttgctgggtcagcttatctttaatatatggactattcctataaaccaaagtctctgacaagtgcacctaatttatattgtattttaactacagtgtaagtttccattaacaaaaccatcctaaagcgttaactgctcataattttaatcagctacagttatgaaaaaggaagaattttgctctaaagattattaataagcttagaaaatcctgcttttacctaacagaatgaagtggggttgaggggcggtagtatgaacagtgattctaactctatggcgtaaattactttgaagagttcattttggaagtaagggaatcccgcttcccttggtgttgaagatctgcatctgattttgaaacgtccagatttagctttcaaggtgcgtgcatgttgaatgatccagaagcaacgaaaactctggggtgagggattgaaaaaatctgaaatcacagttggatttttaaattcaaccatcaaaaatatgtactatcagtttttttttacattgatgtgaaataagcaaattttcatgataattaagctgcaaaatttaaagttatcaagtaaataggtcctctgtgttctgtttcatgtgatggagtgggtttcagtctgtgttcttggagccaaagggttcctcaggggtgcctcaggagtaatggtttaagagaagaggggcaatgagagggagcgagggggaaggcctagttggtatttgagcaggggccttaggctccatatccccaccccctttacccagaacagcccatttttcttatgtatattggaatttcaagtaagctttcatggggtgcagtggggcggggaggaatggatgggataaaaaaagtggagattttgctgctttaaaaaagttgagaactacttgtgtagtttttaagtattttaatgtatttcatttggccaaattcaactgccacaagcaagctagtcatagttgtaactgtgcagtggtaatatgcttatgcctacctttttcctctcaaacaatttgttttttttacattgcattctgagtactgaagagcatcttgaaatgtatggaagtggtttctatgctatttgataatcagtaatgttcagctgtcatgatagtactttactggttgcagacccatctctcttttatattaaagcactagtgcagtttataattgtgcctacttttaaaatctttcagtaaaaaagtacataatgaatacagaaatcataactgacagggatacagtaataatgaaatgctactatcacttattttaatatacaatataaagcaggcaaataccattgctttttgagtgcctttttaactttatactaatgacttaatagagctttaaaagaaagaaattggctgggcatggtggctcacacctgtaatcccagcactttgggaggccgaggtgggcggatcacctgaggtcaggagttcgagaccagcctggccaacgtggtgaaaccctgtctctactaaaaatacaaaatttagccgggcatggtggcgcactcctgtaatccaactacttgggaggctgaggcaggagaattgcttgaatctgggaggcagagattgcagtgagccgagatcgcaccactgcactccagcctgggcgacaagagtgagactccgtccccgccc

SEQ ID NO: 288998 - DNA, 3218 bp, Homo sapiens
gtgaagttgtatttctgctacatgtatttatatggggtgcctgtgcgaactgaaatggattctatagacggctcttttgctgtcagcccagtttgagtcatgaaatctaaatttgcatcaggtcgtcatctttttgaatgtgtgcctatgtattttaccttggatttgcctgattacttttcttctcatgcttttgggatattgactttctataaaagatagaaattgagaaagggatttcaatcttgagttttttctcaaatggaaatgtgaacctattacggaatctaagccttatccaaggttaattctggctcttaaaacccagatgcttttcctgctgccctttggtagtatgtgtggattcattagcattcccctatccccagatcctgtggttaacttaccagttttattcttaagattttggagactaatgcacgcacctgcagtgatttcatccacatttccttcatttgcaggtgctgcaggcccgagactctttaccatacaccagattgatgcctgcactaacaacctgccgaaagcccacacttgcttcaatcgaatagacattccaccctatgaaagctatgaaaagctatatgaaaagctgctaacagccattgaagaaacatgtggatttgctgtggaatgacaagcttcaaggatttacccaggactctatttatacaaccctgactgacagcctcctttcagcagagtttcaaagaatatgctgaaatacaggaaaacactcccccccccccctttttttttttttttttacattttaggacactgtgaggggaaaggacaattttgaaattccttttcaaggaaaaaaaaggtctttatgctttgccatgaggccacattcagctgctatttaaacttaatatcttgaacctaaagaatgctgacttttcctacatttccagagttaggcagtattctacacttaaagactactactatttttataaaaggtaatctattcaaatttcttcacagatttcaagtctctcaaacatcaagacaacttcagcagtcggtacaagtcacatttcattttgattgaatacatgatcttgaacagctcctgtacttgctctttgtaaaaaaaaataaaattattttgaattattctacctttgtaaacaattggctaaaagaatcatctttaagaaattaagccatttacatgtttgtgtttttctatagcagagcattatattttgcattatatgtttcaacctagtctaagtgggtcttttttacatttttcaagaacggatttcctggaatacagcgatataattttggttgtcaaattcctaatgcaaccatttagtctaaacttagtcatttatttgtgacaataagatgtgttcaggggctccctgtttttaagagactcttttaaaaaaaaaaaaacctaatgtttttatcttgagtcaatatgattaggtattttggatttacttttaatcttaaaatactgcatttttatagcttctcagagcatgtggatgggatgggattttcgttattttgctgggtcagcttatctttaatatatggactattcctataaaccaaagtctctgacaagtgcacctaatttatattgtattttaactacagtgtaagtttccattaacaaaaccatcctaaagcgttaactgctcataattttaatcagctacagttatgaaaaaggaagaattttgctctaaagattattaataagcttagaaaatcctgcttttacctaacagaatgaagtggggttgaggggcggtagtatgaacagtgattctaactctatggcgtaaattactttgaagagttcattttggaagtaagggaatcccgcttcccttggtgttgaagatctgcatctgattttgaaacgtccagatttagctttcaaggtgcgtgcatgttgaatgatccagaagcaacgaaaactctggggtgagggattgaaaaaatctgaaatcacagttggatttttaaattcaaccatcaaaaatatgtactatcagtttttttttacattgatgtgaaataagcaaattttcatgataattaagctgcaaaatttaaagttatcaagtaaataggtcctctgtgttctgtttcatgtgatggagtgggtttcagtctgtgttcttggagccaaagggttcctcaggggtgcctcaggagtaatggtttaagagaagaggggcaatgagagggagcgagggggaaggcctagttggtatttgagcaggggccttaggctccatatccccaccccctttacccagaacagcccatttttcttatgtatattggaatttcaagtaagctttcatggggtgcagtggggcggggaggaatggatgggataaaaaaagtggagattttgctgctttaaaaaagttgagaactacttgtgtagtttttaagtattttaatgtatttcatttggccaaattcaactgccacaagcaagctagtcatagttgtaactgtgcagtggtaatatgcttatgcctacctttttcctctcaaacaatttgttttttttacattgcattctgagtactgaagagcatcttgaaatgtatggaagtggtttctatgctatttgataatcagtaatgttcagctgtcatgatagtactttactggttgcagacccatctctcttttatattaaagcactagtgcagtttataattgtgcctacttttaaaatctttcagtaaaaaagtacataatgaatacagaaatcataactgacagggatacagtaataatgaaatgctactatcacttattttaatatacaatataaagcaggcaaataccattgctttttgagtgcctttttaactttatactaatgacttaatagagctttaaaagaaagaaattggctgggcatggtggctcacacctgtaatcccagcactttgggaggccgaggtgggcggatcacctgaggtcaggagttcgagaccagcctggccaacgtggtgaaaccctgtctctactaaaaatacaaaatttagccgggcatggtggcgcactcctgtaatccaactacttgggaggctgaggcaggagaattgcttgaatctgggaggcagagattgcagtgagccgagatcgcaccactgcactccagcctgggcgacaagagtgagactccgtccccgccc

SEQ ID NO: 288999 - DNA, 782 bp, Homo sapiens
  misc_feature (32)..(32): n is a, c, g, or t
tgcggcccgggccgaggaaggagaagtgggangaggggggagctcggcgtcccgctccctccgcggctcatggcgacgactctcggcacatccgggaccctccggccgtggcggccgaggcgccggctgctcgggccccagccccggccgctgtggtgactccgccgcgcctcgccgtcgcccccgtgccgcccgccgcccccgccgcccccgccgccggggacatgtctaaccccggaggccggaggaacgggcccgtcaagctgcgcctgacagtactctgtgcaaaaaacctggtgaaaaaggattttttccgacttcctgatccatttgctaaggtggtggttgatggatctgggcaatgccattctacagatactgtgaagaatacgcttgatccaaagtggaatcagcattatgacctgtatattggaaagtctgattcagttacgatcagtgtatggaatcacaagaagatccataagaaacaaggtgctggatttctcggttgtgttcgtcttctttccaatgccatcaaccgcctcaaagacactggttgtgagtagatacgagtgcttttccaattaaaaaacatatatgtgtgtgtgtgtatatgtatttgtgcatatacatatatacatgcactatatatgtatcctcaaatatatatttaaaaataatatatatatttgagtatgttggtagggcttcaaacacaacttcttgtgcatgtctgaaacattggtaaaaattcctgatctaaatttattttgtagacttaa

SEQ ID NO: 289000 - DNA, 806 bp, Homo sapiens
  misc_feature (32)..(32): n is a, c, g, or t
tgcggcccgggccgaggaaggagaagtgggangaggggggagctcggcgtcccgctccctccgcggctcatggcgacgactctcggcacatccgggaccctccggccgtggcggccgaggcgccggctgctcgggccccagccccggccgctgtggtgactccgccgcgcctcgccgtcgcccccgtgccgcccgccgcccccgccgcccccgccgccggggacatgtctaaccccggaggccggaggaacgggcccgtcaagctgcgcctgacagtactctgtgcaaaaaacctggtgaaaaaggattttttccgacttcctgatccatttgctaaggtggtggttgatggatctgggcaatgccattctacagatactgtgaagaatacgcttgatccaaagtggaatcagcattatgacctgtatattggaaagtctgattcagttacgatcagtgtatggaatcacaagaagatccataagaaacaaggtgctggatttctcggttgtgttcgtcttctttccaatgccatcaaccgcctcaaagacactggttatcagaggttggatttatgcaaactcgggccaaatgacaatgatacagttagaggacagatagtaggtaagtgtggaatttaaagttacatgaattttggtttcaaactgacctaaagtgtaaaataccttttaaatcaaagtataataactgtagcttcattgtgttggcctgaattaaatgagccaggtaaaatgttacagtgaatccaggatccaggttaacttaatttaaaaaactttaatgta

SEQ ID NO: 289001 - DNA, 373 bp, Homo sapiens
catgcagccgttttgttttttaggtatattggaaagtctgattcagttacgatcagtgtatggaatcacaagaagatccataagaaacaaggtgctggatttctcggttgtgttcgtcttctttccaatgccatcaaccgcctcaaagacactggttgtgagtagatacgagtgcttttccaattaaaaaacatatatgtgtgtgtgtgtatatgtatttgtgcatatacatatatacatgcactatatatgtatcctcaaatatatatttaaaaataatatatatatttgagtatgttggtagggcttcaaacacaacttcttgtgcatgtctgaaacattggtaaaaattcctgatctaaatttattttgt

SEQ ID NO: 289002 - DNA, 516 bp, Homo sapiens
gcctcggcctcccaaagtgctgggattacaggcatgagccaccgcgcccagctatgcctcttcttaattaagtacagtagtgactctgctatgcaccattactatggtgaaaaaggaattaggcttcttccatgaacgtaataaagtgtagaaaaccttagaattctaatattactcctaaagggaaaaatctatgggaaaagaaattataaattttagtagaaaccaaagagttcattctaaagtattaaaataagctaagtcagatgtcttctgaagatagaaattttagattataatagttctttctagttgtatgaatcttagtaatatttctgtcatttaatagtaagtcttcagtccagagaccgaataggcacaggaggacaagttgtggactgcagtcgtttatttgataacgatttaccagacgggtaagctaacatcactgaaatcattagagaaatatatagataatatccttaaaagaatagaaataagtgggtgtttattgta

SEQ ID NO: 289003 - DNA, 587 bp, Homo sapiens
gcagtgatttcatccacatttccttcatttgcaggtgctgcaggcccgagactctttaccatacaccagattgatgcctgcactaacaacctgccgaaagcccacacttggtaaggtatttttgtagctgtattccccattccatgtacataagtgttagttccaaacagatttgactttttatttattgtacttactagtgttaaatgggcctttaaagggaatgataagcaacttaagtgatttaaaagttaagattattcggaaattggtaggaaaacccaaaagtggtcatctctgttttagagaaataccttttagttttctgtgtgacacagagtgatgtggctatactggtatacacttgctaggccagtttacttattttgaatgaactgtataaaatttgatttgcttattcacagcttcaatcgaatagacattccaccctatgaaagctatgaaaagctatatgaaaagctgctaacagccattgaagaaacatgtggatttgctgtggaatgacaagcttcaaggatttacccaggactctatttatacaaccctgactgacagcctcctttcag

SEQ ID NO: 289004 - DNA, 2088 bp, Homo sapiens
gcatatcagaaatgcattttaatttttatttgaaaacacgagggcttcagccctaagaagtcagcttcccaggaatccactctgagtgatgactccacgccccccagcagcagccccaagatccccagtgggccctggcaggaggccaaatgttcttacccctaccacacgctgtctcagtcttcagatgagttcctggatgaacccctcccccctgtccaccactggaccagccagcaggtgggccagtggctgcagagcctcaacctggaacagtatgctgctgagtttgctgcacggcaggtagacgggccgcagctgctgcagctggacggaagcaaactaaagagcctggggctcagcaactctcatgaccgggcactggtgaagcgcaagttgaaggagatggcagcagctgccgagaaggagcgcaaggcccaggagaaggctgcgcggcagcgggagaagctccggcgccgagagcaggaggccaagaagagctaggggagggtgcacaggcgctggcacccggcaggggcagccactggctccgcgggcacaggcctcaccagggaggctggacctgggcgctgcacttgggctagcctggtcccacgctctcaggggggacatgctctctcttaccctgtcacttggtctagacccagagaccccagaaagggagaccccagggagagggcctagtaataaatcctattttgaggacttgtttggcacagagttcctgggggaggagcagatgaaggggagagggcagagaggccagggctgaggcaagtctgggaggctgggtcaggctgtcccattgccctcaggccatcgtggggctggggtggaggggagctaggaggcctgcctgcctgcttgcctgccagaggccctgaggccgggccccagggctcagagctgggctgggcatttcagcaggagcccatgtgggagcggctcctctccactcttccagggggctgtgtggtgggagagctctgtcctgctcccccaagaggccagtgggcgctgcagcaagtcgcactcagggtagactcccagccaaactcctcaacaggagcgcagagaaagcagcctggggcgagtgcagtctttgccaggactcaagaggggaggatgaacatccccttctccctctcccctcctctgtcctgtgggtcccagggggcgagatgacaccacacaggtctgcctctcagggcccattcaagacctggtctttgacccattctccaagccaggactcccttcacttcctgctgcttcctcagagggcacctaagtcctctttgggagctgagcaaacaggaactgatagggacagaggacaccacttccaccagccaaggcctaggagctgctgacctggtcagccctcaccccagccaggcagagaggcaaaacctgggggtccccggcagctacgagattggaaaggttcatcagccctcccccatctgccccaggcattgtcagggaatcagtgggctcagaactggcaggcggtgcaagctctgcttccctgggccacactgagggctggggccagctccctggatgggggtggagtttaccagcagcctggggacagcatgtgtcctttttaggaaatgtccttggaggaagtgttcatgtgtggcgctggtcagcagctagtcccgcttccaggacactggtcagagttaccgatgaggcctgggggctcccgcttggaaacccctccagctcctcccatctgcccagacagagcggcagatggcaccaatgcatgctggctccctcattcctgcccaggggctgtggcttacggccagcaccctgtacctgggactcagcccttatcccccctctgctatctgtgctgggagaggggcttcggagggaaacagatatgaggacactggcaccatctgggcctggtggcagggccatgggaggttggaaggcacccacatccttaaagccatcagtagctatagtgggtgcccacctgcatgtgaaggggaggcagttctcaatttatttcaataaatccttatgatgtgccagtgaccagaa

SEQ ID NO: 289005 - DNA, 2724 bp, Homo sapiens
gaccctcagggcccgcagtttacagggtgaaagtctcccagctcctccgggaagggaggaggagggttctcggtgagcggctgccccctcgtccaggtgaccgatggctgcgggagccccctgcaccggctgcgctcgcctttgcactcaggcccggggtccccggccgggggctctttctgcctggatcctccggggttgcggcgcagcctggacgaggacgagccgccgccctcgccgctcacacgctaccggcccctgcacaacgctgcgtcgcacgagggcctggccgccgcctcctgctctccgccgcgctccgcgccctcctccgacagctcccccagcttcgtgcgccgccacccgcgcgcagagccgcacagcgaagatgacagccgtgacgccagtcctcctgagcccgccagccccaccatcggcctcgataagaagactcgccgaaagttcctggacctgggggtcaccctgcgccgagcatccacgggcaagagccggaaggagaaaggcagcaaccgactgtccatgggcagcagggagtcagtggaggggtccggcaggtcagggggctccccgttcctgcctttttcctggttcacggacagcggcaagggctcagcatcctcgggtagcaccacctcccccacctgctcccctaaacacgagggcttcagccctaagaagtcagcttcccaggaatccactctgagtgatgactccacgccccccagcagcagccccaagatccccagtgggccctggcaggaggccaaatgttcttacccctaccacacgctgtctcagtcttcagatgagttcctggatgaacccctcccccctgtccaccactggaccagccagcaggtgggccagtggctgcagagcctcaacctggaacagtatgctgctgagtttgctgcacggcaggtagacgggccgcagctgctgcagctggacggaagcaaactaaagagcctggggctcagcaactctcatgaccgggcactggtgaagcgcaagttgaaggagatggcagcagctgccgagaaggagcgcaaggcccaggagaaggctgcgcggcagcgggagaagctccggcgccgagagcaggaggccaagaagagctaggggagggtgcacaggcgctggcacccggcaggggcagccactggctccgcgggcacaggcctcaccagggaggctggacctgggcgctgcacttgggctagcctggtcccacgctctcaggggggacatgctctctcttaccctgtcacttggtctagacccagagaccccagaaagggagaccccagggagagggcctagtaataaatcctattttgaggacttgtttggcacagagttcctgggggaggagcagatgaaggggagagggcagagaggccagggctgaggcaagtctgggaggctgggtcaggctgtcccattgccctcaggccatcgtggggctggggtggaggggagctaggaggcctgcctgcctgcttgcctgccagaggccctgaggccgggccccagggctcagagctgggctgggcatttcagcaggagcccatgtgggagcggctcctctccactcttccagggggctgtgtggtgggagagctctgtcctgctcccccaagaggccagtgggcgctgcagcaagtcgcactcagggtagactcccagccaaactcctcaacaggagcgcagagaaagcagcctggggcgagtgcagtctttgccaggactcaagaggggaggatgaacatccccttctccctctcccctcctctgtcctgtgggtcccagggggcgagatgacaccacacaggtctgcctctcagggcccattcaagacctggtctttgacccattctccaagccaggactcccttcacttcctgctgcttcctcagagggcacctaagtcctctttgggagctgagcaaacaggaactgatagggacagaggacaccacttccaccagccaaggcctaggagctgctgacctggtcagccctcaccccagccaggcagagaggcaaaacctgggggtccccggcagctacgagattggaaaggttcatcagccctcccccatctgccccaggcattgtcagggaatcagtgggctcagaactggcaggcggtgcaagctctgcttccctgggccacactgagggctggggccagctccctggatgggggtggagtttaccagcagcctggggacagcatgtgtcctttttaggaaatgtccttggaggaagtgttcatgtgtggcgctggtcagcagctagtcccgcttccaggacactggtcagagttaccgatgaggcctgggggctcccgcttggaaacccctccagctcctcccatctgcccagacagagcggcagatggcaccaatgcatgctggctccctcattcctgcccaggggctgtggcttacggccagcaccctgtacctgggactcagcccttatcccccctctgctatctgtgctgggagaggggcttcggagggaaacagatatgaggacactggcaccatctgggcctggtggcagggccatgggaggttggaaggcacccacatccttaaagccatcagtagctatagtgggtgcccacctgcatgtgaaggggaggcagttctcaatttatttcaataaatccttatgatgtgccagtgaccagaa

SEQ ID NO: 289006 - DNA, 3006 bp, Homo sapiens
ggacaggctggcccaccttgcctcaaaaccaccaagccccttaggagtccccttgctccccagcccctccaagacctggacttggctgtgccagagacggccagactggacagcagtttacacaaggcccgggcccaactgttggccaagggccggagacaccggccatcccgctccaggcttcgggacagtgccagctccgcggaggatggtgaaggctcggatgggcccggaggcaaggtgaccgatggctgcgggagccccctgcaccggctgcgctcgcctttgcactcaggcccggggtccccggccgggggctctttctgcctggatcctccggggttgcggcgcagcctggacgaggacgagccgccgccctcgccgctcacacgctaccggcccctgcacaacgctgcgtcgcacgagggcctggccgccgcctcctgctctccgccgcgctccgcgccctcctccgacagctcccccagcttcgtgcgccgccacccgcgcgcagagccgcacagcgaaggacacccagctagtgaaggccaccagagccaggatgcctgattctaagtcaagagaatttctaccaccccacactggcagccgaaggaggcaggcagggcagcaaacaggcagtttccttccttctctccctggaaagatgacagccgtgacgccagtcctcctgagcccgccagccccaccatcggcctcgataagaagactcgccgaaagttcctggacctgggggtcaccctgcgccgagcatccacgggcaagagccggaaggagaaaggcagcaaccgactgtccatgggcagcagggagtcagtggaggggtccggcaggtcagggggctccccgttcctgcctttttcctggttcacggacagcggcaagggctcagcatcctcgggtagcaccacctcccccacctgctcccctaaacacgagggcttcagccctaagaagtcagcttcccaggaatccactctgagtgatgactccacgccccccagcagcagccccaagatccccagtgggccctggcaggaggccaaatgttcttacccctaccacacgctgtctcagtcttcagatgagttcctggatgaacccctcccccctgtccaccactggaccagccagcaggtgggccagtggctgcagagcctcaacctggaacagtatgctgctgagtttgctgcacggcaggtagacgggccgcagctgctgcagctggacggaagcaaactaaagagcctggggctcagcaactctcatgaccgggcactggtgaagcgcaagttgaaggagatggcagcagctgccgagaaggagcgcaaggcccaggagaaggctgcgcggcagcgggagaagctccggcgccgagagcaggaggccaagaagagctaggggagggtgcacaggcgctggcacccggcaggggcagccactggctccgcgggcacaggcctcaccagggaggctggacctgggcgctgcacttgggctagcctggtcccacgctctcaggggggacatgctctctcttaccctgtcacttggtctagacccagagaccccagaaagggagaccccagggagagggcctagtaataaatcctattttgaggacttgtttggcacagagttcctgggggaggagcagatgaaggggagagggcagagaggccagggctgaggcaagtctgggaggctgggtcaggctgtcccattgccctcaggccatcgtggggctggggtggaggggagctaggaggcctgcctgcctgcttgcctgccagaggccctgaggccgggccccagggctcagagctgggctgggcatttcagcaggagcccatgtgggagcggctcctctccactcttccagggggctgtgtggtgggagagctctgtcctgctcccccaagaggccagtgggcgctgcagcaagtcgcactcagggtagactcccagccaaactcctcaacaggagcgcagagaaagcagcctggggcgagtgcagtctttgccaggactcaagaggggaggatgaacatccccttctccctctcccctcctctgtcctgtgggtcccagggggcgagatgacaccacacaggtctgcctctcagggcccattcaagacctggtctttgacccattctccaagccaggactcccttcacttcctgctgcttcctcagagggcacctaagtcctctttgggagctgagcaaacaggaactgatagggacagaggacaccacttccaccagccaaggcctaggagctgctgacctggtcagccctcaccccagccaggcagagaggcaaaacctgggggtccccggcagctacgagattggaaaggttcatcagccctcccccatctgccccaggcattgtcagggaatcagtgggctcagaactggcaggcggtgcaagctctgcttccctgggccacactgagggctggggccagctccctggatgggggtggagtttaccagcagcctggggacagcatgtgtcctttttaggaaatgtccttggaggaagtgttcatgtgtggcgctggtcagcagctagtcccgcttccaggacactggtcagagttaccgatgaggcctgggggctcccgcttggaaacccctccagctcctcccatctgcccagacagagcggcagatggcaccaatgcatgctggctccctcattcctgcccaggggctgtggcttacggccagcaccctgtacctgggactcagcccttatcccccctctgctatctgtgctgggagaggggcttcggagggaaacagatatgaggacactggcaccatctgggcctggtggcagggccatgggaggttggaaggcacccacatccttaaagccatcagtagctatagtgggtgcccacctgcatgtgaaggggaggcagttctcaatttatttcaataaatccttatgatgtgccagtgaccagaa

SEQ ID NO: 289007 - DNA, 2874 bp, Homo sapiens
agccggtttcccagcgggattccggtggaggagtcaggaggagtcctgagcaaaggaacttggaggaatgagggagaggacctggacttggctgtgccagagacggccagactggacagcagtttacacaaggcccgggcccaactgttggccaagggccggagacaccggccatcccgctccaggcttcgggacagtgccagctccgcggaggatggtgaaggctcggatgggcccggaggcaaggtgaccgatggctgcgggagccccctgcaccggctgcgctcgcctttgcactcaggcccggggtccccggccgggggctctttctgcctggatcctccggggttgcggcgcagcctggacgaggacgagccgccgccctcgccgctcacacgctaccggcccctgcacaacgctgcgtcgcacgagggcctggccgccgcctcctgctctccgccgcgctccgcgccctcctccgacagctcccccagcttcgtgcgccgccacccgcgcgcagagccgcacagcgaagatgacagccgtgacgccagtcctcctgagcccgccagccccaccatcggcctcgataagaagactcgccgaaagttcctggacctgggggtcaccctgcgccgagcatccacgggcaagagccggaaggagaaaggcagcaaccgactgtccatgggcagcagggagtcagtggaggggtccggcaggtcagggggctccccgttcctgcctttttcctggttcacggacagcggcaagggctcagcatcctcgggtagcaccacctcccccacctgctcccctaaacacgagggcttcagccctaagaagtcagcttcccaggaatccactctgagtgatgactccacgccccccagcagcagccccaagatccccagtgggccctggcaggaggccaaatgttcttacccctaccacacgctgtctcagtcttcagatgagttcctggatgaacccctcccccctgtccaccactggaccagccagcaggtgggccagtggctgcagagcctcaacctggaacagtatgctgctgagtttgctgcacggcaggtagacgggccgcagctgctgcagctggacggaagcaaactaaagagcctggggctcagcaactctcatgaccgggcactggtgaagcgcaagttgaaggagatggcagcagctgccgagaaggagcgcaaggcccaggagaaggctgcgcggcagcgggagaagctccggcgccgagagcaggaggccaagaagagctaggggagggtgcacaggcgctggcacccggcaggggcagccactggctccgcgggcacaggcctcaccagggaggctggacctgggcgctgcacttgggctagcctggtcccacgctctcaggggggacatgctctctcttaccctgtcacttggtctagacccagagaccccagaaagggagaccccagggagagggcctagtaataaatcctattttgaggacttgtttggcacagagttcctgggggaggagcagatgaaggggagagggcagagaggccagggctgaggcaagtctgggaggctgggtcaggctgtcccattgccctcaggccatcgtggggctggggtggaggggagctaggaggcctgcctgcctgcttgcctgccagaggccctgaggccgggccccagggctcagagctgggctgggcatttcagcaggagcccatgtgggagcggctcctctccactcttccagggggctgtgtggtgggagagctctgtcctgctcccccaagaggccagtgggcgctgcagcaagtcgcactcagggtagactcccagccaaactcctcaacaggagcgcagagaaagcagcctggggcgagtgcagtctttgccaggactcaagaggggaggatgaacatccccttctccctctcccctcctctgtcctgtgggtcccagggggcgagatgacaccacacaggtctgcctctcagggcccattcaagacctggtctttgacccattctccaagccaggactcccttcacttcctgctgcttcctcagagggcacctaagtcctctttgggagctgagcaaacaggaactgatagggacagaggacaccacttccaccagccaaggcctaggagctgctgacctggtcagccctcaccccagccaggcagagaggcaaaacctgggggtccccggcagctacgagattggaaaggttcatcagccctcccccatctgccccaggcattgtcagggaatcagtgggctcagaactggcaggcggtgcaagctctgcttccctgggccacactgagggctggggccagctccctggatgggggtggagtttaccagcagcctggggacagcatgtgtcctttttaggaaatgtccttggaggaagtgttcatgtgtggcgctggtcagcagctagtcccgcttccaggacactggtcagagttaccgatgaggcctgggggctcccgcttggaaacccctccagctcctcccatctgcccagacagagcggcagatggcaccaatgcatgctggctccctcattcctgcccaggggctgtggcttacggccagcaccctgtacctgggactcagcccttatcccccctctgctatctgtgctgggagaggggcttcggagggaaacagatatgaggacactggcaccatctgggcctggtggcagggccatgggaggttggaaggcacccacatccttaaagccatcagtagctatagtgggtgcccacctgcatgtgaaggggaggcagttctcaatttatttcaataaatccttatgatgtgccagtgaccagaa

SEQ ID NO: 289008 - DNA, 2536 bp, Homo sapiens
gttattatccccatatttaaaatggaggaaggccagagaggtaaagtggcttatcctaggacacccagctagtgaaggccaccagagccaggatgcctgattctaagtcaagagaatttctaccaccccacactggcagccgaaggaggcaggcagggcagcaaacaggcagtttccttccttctctccctggaaagatgacagccgtgacgccagtcctcctgagcccgccagccccaccatcggcctcgataagaagactcgccgaaagttcctggacctgggggtcaccctgcgccgagcatccacgggcaagagccggaaggagaaaggcagcaaccgactgtccatgggcagcagggagtcagtggaggggtccggcaggtcagggggctccccgttcctgcctttttcctggttcacggacagcggcaagggctcagcatcctcgggtagcaccacctcccccacctgctcccctaaacacgagggcttcagccctaagaagtcagcttcccaggaatccactctgagtgatgactccacgccccccagcagcagccccaagatccccagtgggccctggcaggaggccaaatgttcttacccctaccacacgctgtctcagtcttcagatgagttcctggatgaacccctcccccctgtccaccactggaccagccagcaggtgggccagtggctgcagagcctcaacctggaacagtatgctgctgagtttgctgcacggcaggtagacgggccgcagctgctgcagctggacggaagcaaactaaagagcctggggctcagcaactctcatgaccgggcactggtgaagcgcaagttgaaggagatggcagcagctgccgagaaggagcgcaaggcccaggagaaggctgcgcggcagcgggagaagctccggcgccgagagcaggaggccaagaagagctaggggagggtgcacaggcgctggcacccggcaggggcagccactggctccgcgggcacaggcctcaccagggaggctggacctgggcgctgcacttgggctagcctggtcccacgctctcaggggggacatgctctctcttaccctgtcacttggtctagacccagagaccccagaaagggagaccccagggagagggcctagtaataaatcctattttgaggacttgtttggcacagagttcctgggggaggagcagatgaaggggagagggcagagaggccagggctgaggcaagtctgggaggctgggtcaggctgtcccattgccctcaggccatcgtggggctggggtggaggggagctaggaggcctgcctgcctgcttgcctgccagaggccctgaggccgggccccagggctcagagctgggctgggcatttcagcaggagcccatgtgggagcggctcctctccactcttccagggggctgtgtggtgggagagctctgtcctgctcccccaagaggccagtgggcgctgcagcaagtcgcactcagggtagactcccagccaaactcctcaacaggagcgcagagaaagcagcctggggcgagtgcagtctttgccaggactcaagaggggaggatgaacatccccttctccctctcccctcctctgtcctgtgggtcccagggggcgagatgacaccacacaggtctgcctctcagggcccattcaagacctggtctttgacccattctccaagccaggactcccttcacttcctgctgcttcctcagagggcacctaagtcctctttgggagctgagcaaacaggaactgatagggacagaggacaccacttccaccagccaaggcctaggagctgctgacctggtcagccctcaccccagccaggcagagaggcaaaacctgggggtccccggcagctacgagattggaaaggttcatcagccctcccccatctgccccaggcattgtcagggaatcagtgggctcagaactggcaggcggtgcaagctctgcttccctgggccacactgagggctggggccagctccctggatgggggtggagtttaccagcagcctggggacagcatgtgtcctttttaggaaatgtccttggaggaagtgttcatgtgtggcgctggtcagcagctagtcccgcttccaggacactggtcagagttaccgatgaggcctgggggctcccgcttggaaacccctccagctcctcccatctgcccagacagagcggcagatggcaccaatgcatgctggctccctcattcctgcccaggggctgtggcttacggccagcaccctgtacctgggactcagcccttatcccccctctgctatctgtgctgggagaggggcttcggagggaaacagatatgaggacactggcaccatctgggcctggtggcagggccatgggaggttggaaggcacccacatccttaaagccatcagtagctatagtgggtgcccacctgcatgtgaaggggaggcagttctcaatttatttcaataaatccttatgatgtgccagtgaccagaa

SEQ ID NO: 289009 - DNA, 1835 bp, Homo sapiens
tggagaaaagataagtcttttgaaaaattgctgctgcctggaaatagtcaaaacatctctgttgtgggattttagagtgggtatgtttggtggtaggttgtcctagggtgagcctttgtaataagtagcagtgtgtttcctggaagtaaggaggaaggagagttgcccagccactgtgtgataaggcagtagcagaaagagagatgaggaggccaaatgttcttacccctaccacacgctgtctcagtcttcagatgagttcctggatgaacccctcccccctgtccaccactggctccgcgggcacaggcctcaccagggaggctggacctgggcgctgcacttgggctagcctggtcccacgctctcaggggggacatgctctctcttaccctgtcacttggtctagacccagagaccccagaaagggagaccccagggagagggcctagtaataaatcctattttgaggacttgtttggcacagagttcctgggggaggagcagatgaaggggagagggcagagaggccagggctgaggcaagtctgggaggctgggtcaggctgtcccattgccctcaggccatcgtggggctggggtggaggggagctaggaggcctgcctgcctgcttgcctgccagaggccctgaggccgggccccagggctcagagctgggctgggcatttcagcaggagcccatgtgggagcggctcctctccactcttccagggggctgtgtggtgggagagctctgtcctgctcccccaagaggccagtgggcgctgcagcaagtcgcactcagggtagactcccagccaaactcctcaacaggagcgcagagaaagcagcctggggcgagtgcagtctttgccaggactcaagaggggaggatgaacatccccttctccctctcccctcctctgtcctgtgggtcccagggggcgagatgacaccacacaggtctgcctctcagggcccattcaagacctggtctttgacccattctccaagccaggactcccttcacttcctgctgcttcctcagagggcacctaagtcctctttgggagctgagcaaacaggaactgatagggacagaggacaccacttccaccagccaaggcctaggagctgctgacctggtcagccctcaccccagccaggcagagaggcaaaacctgggggtccccggcagctacgagattggaaaggttcatcagccctcccccatctgccccaggcattgtcagggaatcagtgggctcagaactggcaggcggtgcaagctctgcttccctgggccacactgagggctggggccagctccctggatgggggtggagtttaccagcagcctggggacagcatgtgtcctttttaggaaatgtccttggaggaagtgttcatgtgtggcgctggtcagcagctagtcccgcttccaggacactggtcagagttaccgatgaggcctgggggctcccgcttggaaacccctccagctcctcccatctgcccagacagagcggcagatggcaccaatgcatgctggctccctcattcctgcccaggggctgtggcttacggccagcaccctgtacctgggactcagcccttatcccccctctgctatctgtgctgggagaggggcttcggagggaaacagatatgaggacactggcaccatctgggcctggtggcagggccatgggaggttggaaggcacccacatccttaaagccatcagtagctatagtgggtgcccacctgcatgtgaaggggaggcagttctcaatttatttcaataaatccttatgatgtgccagtgaccagaa

SEQ ID NO: 289010 - DNA, 2578 bp, Homo sapiens
ggacaggctggcccaccttgcctcaaaaccaccaagccccttaggagtccccttgctccccagcccctccaagacctggacttggctgtgccagagacggccagactggacagcagtttacacaaggcccgggcccaactgttggccaagggccggagacaccggccatcccgctccaggcttcgggacagtgccagctccgcggaggatggtgaaggctcggatgggcccggaggcaaggtgaccgatggctgcgggagccccctgcaccggctgcgctcgcctttgcactcaggcccggggtccccggccgggggctctttctgcctggatcctccggggttgcggcgcagcctggacgaggacgagccgccgccctcgccgctcacacgctaccggcccctgcacaacgctgcgtcgcacgagggcctggccgccgcctcctgctctccgccgcgctccgcgccctcctccgacagctcccccagcttcgtgcgccgccacccgcgcgcagagccgcacagcgaaggacacccagctagtgaaggccaccagagccaggatgcctgattctaagtcaagagaatttctaccaccccacactggcagccgaaggaggcaggcagggcagcaaacaggcagtttccttccttctctccctggaaagatgacagccgtgacgccagtcctcctgagcccgccagccccaccatcggcctcgataagaagactcgccgaaagttcctggacctgggggtcaccctgcgccgagcatccacgggcaagagccggaaggagaaaggcagcaaccgactgtccatgggcagcagggagtcagtggaggggtccggcaggtcagggggctccccgttcctgcctttttcctggttcacggacagcggcaagggctcagcatcctcgggtagcaccacctcccccacctgctcccctaaacacgagggcttcagccctaagaagtcagcttcccaggaatccactctgagtgatgactccacgccccccagcagcagccactggctccgcgggcacaggcctcaccagggaggctggacctgggcgctgcacttgggctagcctggtcccacgctctcaggggggacatgctctctcttaccctgtcacttggtctagacccagagaccccagaaagggagaccccagggagagggcctagtaataaatcctattttgaggacttgtttggcacagagttcctgggggaggagcagatgaaggggagagggcagagaggccagggctgaggcaagtctgggaggctgggtcaggctgtcccattgccctcaggccatcgtggggctggggtggaggggagctaggaggcctgcctgcctgcttgcctgccagaggccctgaggccgggccccagggctcagagctgggctgggcatttcagcaggagcccatgtgggagcggctcctctccactcttccagggggctgtgtggtgggagagctctgtcctgctcccccaagaggccagtgggcgctgcagcaagtcgcactcagggtagactcccagccaaactcctcaacaggagcgcagagaaagcagcctggggcgagtgcagtctttgccaggactcaagaggggaggatgaacatccccttctccctctcccctcctctgtcctgtgggtcccagggggcgagatgacaccacacaggtctgcctctcagggcccattcaagacctggtctttgacccattctccaagccaggactcccttcacttcctgctgcttcctcagagggcacctaagtcctctttgggagctgagcaaacaggaactgatagggacagaggacaccacttccaccagccaaggcctaggagctgctgacctggtcagccctcaccccagccaggcagagaggcaaaacctgggggtccccggcagctacgagattggaaaggttcatcagccctcccccatctgccccaggcattgtcagggaatcagtgggctcagaactggcaggcggtgcaagctctgcttccctgggccacactgagggctggggccagctccctggatgggggtggagtttaccagcagcctggggacagcatgtgtcctttttaggaaatgtccttggaggaagtgttcatgtgtggcgctggtcagcagctagtcccgcttccaggacactggtcagagttaccgatgaggcctgggggctcccgcttggaaacccctccagctcctcccatctgcccagacagagcggcagatggcaccaatgcatgctggctccctcattcctgcccaggggctgtggcttacggccagcaccctgtacctgggactcagcccttatcccccctctgctatctgtgctgggagaggggcttcggagggaaacagatatgaggacactggcaccatctgggcctggtggcagggccatgggaggttggaaggcacccacatccttaaagccatcagtagctatagtgggtgcccacctgcatgtgaaggggaggcagttctcaatttatttcaataaatccttatgatgtgccagtgaccagaa

SEQ ID NO: 289011 - DNA, 2905 bp, Homo sapiens
gaccctcagggcccgcagtttacagggtgaaagtctcccagctcctccgggaagggaggaggagggttctcggtgagcggctgccccctcgtccaggtgaccgatggctgcgggagccccctgcaccggctgcgctcgcctttgcactcaggcccggggtccccggccgggggctctttctgcctggatcctccggggttgcggcgcagcctggacgaggacgagccgccgccctcgccgctcacacgctaccggcccctgcacaacgctgcgtcgcacgagggcctggccgccgcctcctgctctccgccgcgctccgcgccctcctccgacagctcccccagcttcgtgcgccgccacccgcgcgcagagccgcacagcgaagatgacagccgtgacgccagtcctcctgagcccgccagccccaccatcggcctcgataagaagactcgccgaaagttcctggacctgggggtcaccctgcgccgagcatccacgggcaagagccggaaggagaaaggcagcaaccgactgtccatgggcagcagggagtcagtggaggggtccggcaggtcagggggctccccgttcctgcctttttcctggttcacggacagcggcaagggctcagcatcctcgggtagcaccacctcccccacctgctcccctaaacacgagggcttcagccctaagaagtcagcttcccaggaatccactctgagtgatgactccacgccccccagcagcagccccaagatccccagtgggccctggcaggaggccaaatgttcttacccctaccacacgctgtctcagtcttcagatgagttcctggatgaacccctcccccctgtccaccactggaccagccagcaggtgggccagtggctgcagagcctcaacctggaacagtatgctgctgagtttgctgcacggcaggtagacgggccgcagctgctgcagctggacggaagcaaactaaagagcctggggctcagcaactctcatgaccgggcactggtgaagcgcaagttgaaggagatggcagcagctgccgagaaggagcgcaaggcccaggagaaggctgcgcggcagcgggagaagctccggcgccgagagcaggaggccaagaagagctaggggagggtgcacaggcgctggcacccggcaggggcagccactggctccgcgggcacaggcctcaccagggaggctggacctgggcgctgcacttgggctagcctggtcccacgctctcaggggggacatgctctctcttaccctgtcacttggtctagacccagagaccccagaaagggagaccccagggagagggcctagtaataaatcctattttgaggacttgtttggcacagagttcctgggggaggagcagatgaaggggagagggcagagaggccagggctgaggcaagtctgggaggctgggtcaggctgtcccattgccctcaggccatcgtggggctggggtggaggggagctaggaggcctgcctgcctgcttgcctgccagaggccctgaggccgggccccagggctcagagctgggctgggcatttcagcaggagcccatgtgggagcggctcctctccactcttccagggggctgtgtggtgggagagctctgtcctgctcccccaagaggccagtgggcgctgcagcaagtcgcactcagggtagactcccagccaaactcctcaacaggagcgcagagaaagcagcctggggcgagtgcagtctttgccaggactcaagaggggaggatgaacatccccttctccctctcccctcctctgtcctgtgggtcccagggggcgagatgacaccacacaggtctgcctctcagggcccattcaagacctggtctttgacccattctccaagccaggactcccttcacttcctgctgcttcctcagagggcacctaagtcctctttgggagctgagcaaacaggaactgatagggacagaggacaccacttccaccagccaaggcctaggagctgctgacctggtcagccctcaccccagccaggcagagaggcaaaacctgggggtccccggcagctacgagattggaaaggttcatcagccctcccccatctgccccaggcattgtcagggaatcagtgggctcagaactggcaggcggtgcaagctctgcttccctgggccacactgagggctggggccagctccctggatgggggtggagtttaccagcagcctggggacagcatgtgtcctttttaggaaatgtccttggaggaagtgttcatgtgtggcgctggtcagcagctagtcccgcttccaggacactggtcagagttaccgatgaggcctgggggctcccgcttggaaacccctccagctcctcccatctgcccagacagagcggcagatggcaccaatgcatgctggctccctcattcctgcccaggggctgtggcttacggccagcaccctgtacctgggactcagcccttatcccccctctgctatctgtgctgggagaggggcttcggagggaaacagatatgaggacactggcaccatctgggcctggtggcagggccatgggaggttggaaggcacccacatccttaaagccatcagtagctatagtgggtgcccacctgcatgtgaaggggaggcagttctcaatttatttcaataaatccttatgatgtgccagtgaccagaaaaaaaaaaaggggggggctaaaatatcccggaggggccagagtagccggccagtttggaaaaggccccaggggggaaaaaaagccggcgttaaaggggagggaagcacggtctggcagccctgggggcatggacccacaaacgccggataaagttgtgaccatcgggaggcgataaacacg

SEQ ID NO: 289012 - DNA, 777 bp, Homo sapiens
ccggggagcaggcgctccagcagcctgcagaggaccaccccatccttcagcgacgcctgcagaaagccctccgggtccgagatggtttttttgggcgactccagcacccccagagtgatgagccacgtaacggtggcggggacaggctgaaaacgagacgtttgtttcgctttgctaccttgcaagccggtcatgacggaacagaaatgatggttccatctgaagccatatgggtctgaatcgggaggaaccgactctccggagcgcggcgccgacctcaccggcagggcaggggcctgcgcgactctgctctagacggacggtgacgcttcagaccctgccgggggaaggtcaaggaaacggcgtggcctgaagtggggctgtgcagagggccgggccgggccgggccgggcgcctggctgcgtctcggggacgccgaagatctgggctgtgaaagcagcaggccgaacctggagagcccagacggcaagtgtcgcgtcatgcgcgagcttcctcgaacaactgatgacacgcacacattgacatgcgaggaagaaatggagcctcttcttaaaaggacacgagtctccactcactccatccactgtccctgggcgctcccccagtttgctcgctatgacccgcgggcagtttaacaagcaaagcacttagtctatgccaggcacatacattaatccattcaatgacaaaggctagaaagcatataaagcttccaaaaataatcagaggcttaagtcgtctccccctgccttctgc

SEQ ID NO: 289013 - DNA, 795 bp, Homo sapiens
cctgcgcttacctgccccgggcccgccgtgcgccccgcgcccctggccggggcactcggaagcctttgtttatgttttgaattcgtgagcgttgaaatgatgaagtacttcccagaatgctctttttatttttgccggttttatttcaaggtggcggggacaggctgaaaacgagacgtttgtttcgctttgctaccttgcaagccggtcatgacggaacagaaatgatggttccatctgaagccatatgggtctgaatcgggaggaaccgactctccggagcgcggcgccgacctcaccggcagggcaggggcctgcgcgactctgctctagacggacggtgacgcttcagaccctgccgggggaaggtcaaggaaacggcgtggcctgaagtggggctgtgcagagggccgggccgggccgggccgggcgcctggctgcgtctcggggacgccgaagatctgggctgtgaaagcagcaggccgaacctggagagcccagacggcaagtgtcgcgtcatgcgcgagcttcctcgaacaactgatgacacgcacacattgacatgcgaggaagaaatggagcctcttcttaaaaggacacgagtctccactcactccatccactgtccctgggcgctcccccagtttgctcgctatgacccgcgggcagtttaacaagcaaagcacttagtctatgccaggcacatacattaatccattcaatgacaaaggctagaaagcatataaagcttccaaaaataatcagaggcttaagtcgtctccccctgccttctgc

SEQ ID NO: 289014 - DNA, 794 bp, Homo sapiens
ccgcggccgggccaggcgccgagcaggcagctgcggccctcgggaagcccggagaggggacccactccggcgccctgcccgcgtccccctttgtgggtgacagactgcacgggaggacaccggggcagctcccatgcccacgagggtgccctccctcgggaactagggaaggcagaagagcccgctgaccaccagaaaaaacacggggacggcggggacaagggctgacccgtctccaccgagactgaacctcgagttctaaggtgggactgccaagatgaatagacataatcctcgatctaaccacttcacagtttatcatcggagtcaagtttgcagataaacaattgccatgcaactttcaagaaaatggtgcctgagatgagcaaggtcagcagacaagaagtgaggtcaatgtcaggtttccatgccagcagcgggaactctggatacagtggagagtcacagctggtcaaaccctgaaccgcttgctccttgaaatggccagagaggcccatcccagagccatctcatcatctctcctcagacaggaaaccgagaaggaaaacaatcagctctgttctctctgggccgagggagtgagctgtaatgagggagcacaggaacgcattgggcgccctcagacctgaacacacaggttagcaccacctgcctggctgacctggctcacaggtgcgcggttgccagttgagaataactcatccagggttgttgaatggtggaggatcttccaaaatcagcagctaggaggtcgagaacccttcatgccatac

SEQ ID NO: 289015 - DNA, 407 bp, Homo sapiens
ctaccacccagcagtgtgccaggcaggtgtcgtcagcctcgaagtccctcacgtactcgaacttgctttttgccatggtcgcccccaatctcaggtaccgtctcagagtgatggaaatggtggccaaggaatcgtgaaccttaactttacaggcgccccacattctacacgcggaaaggaaagggccagatagccccgccccggaagtgttctcttcgtggctactctagccgtagggcggtcatagtctctctcgcctctccctgtagttcttaacctcccagggaaagaggatggaggtttaggttcctccgttagcaccttccacgcttgcttcttcctcctcccgtcctgcggcaaatcagtctcacgaggtttttaaaaattattttttatctgctggtctt

SEQ ID NO: 289016 - DNA, 830 bp, Homo sapiens
aacatccattttcaaaattctctaggcaaacaacacattcagtacagtgcagcatatcagcaggccaagttaaccaatcaggttccatatcttcattagtgttatatgatccatatgacctccccttcctttcacatgggctggtctgacaatatttattggcacatgaacaagcctcagcatcacagtgacttgctgttcctggagaattgtgaagtacgctttgcttatcttcaaatacttccttctcactactcaaagtgtctgtgttctcactttccgagtcattttcagtatcttgagacccctccgacatttcctcttcagactggactccaagacatttaaatcgccacattgagactatacgtaacatggacctggaaaagcttaaaaatatgaagaggattgaactggctgccatctgtgcatcttcatttatgaaaacactcctcatagacttaaaacaaatgacagagaacaaattagtcagcttcttctaaaatacagtggtctccccttaccctcagtttcactttctgcagtcaactgcagtccgaaaatactacatacaattagatattcggagagagagacaccacatttacataaatgttatttcagtatactgttataattgttctatttttattagttgttgttgttactgtgcctaacttacacattaaactttatcacaggtatgtatgtataggaaaaaacatagactatataggatttggtactatccacggtttcaggcatccactgggggtcttggaacgcatccccctcagataaggggggactactgtaaacagaaaataaca

SEQ ID NO: 289017 - DNA, 718 bp, Homo sapiens
ttattttaccaaggagcaaaactgagtaagtttcctgacgaaaataatgagtgtctactgttctagggcctttaacaacaacaacaacaaatttacattaacgcacattatgtgccaggaattgcaagatgcataagattagtttttaaaatgtgcctgctagagctgaacaggtaacgagagttcgaagccgggtccagagctatcttctgtaacattcttctgggtcgagtccctgccccgctacgagactatacgtaacatggacctggaaaagcttaaaaatatgaagaggattgaactggctgccatctgtgcatcttcatttatgaaaacactcctcatagacttaaaacaaatgacagagaacaaattagtcagcttcttctaaaatacagtggtctccccttaccctcagtttcactttctgcagtcaactgcagtccgaaaatactacatacaattagatattcggagagagagacaccacatttacataaatgttatttcagtatactgttataattgttctatttttattagttgttgttgttactgtgcctaacttacacattaaactttatcacaggtatgtatgtataggaaaaaacatagactatataggatttggtactatccacggtttcaggcatccactgggggtcttggaacgcatccccctcagataaggggggactactgtaaacagaaaataaca

SEQ ID NO: 289018 - DNA, 958 bp, Homo sapiens
tgcagtttaaaaaatgtatttttattggtacatagtaattttacatattcatggggtagatatgatatttcaatatatgcatacaatgtgtaatgatcaaatcagggtatttagaatatgacatccaacatgtatcatttctttgtgttataatcttcatatgcaataatcaataatcataaacaggatttctagttctcaaacgggcatggaatcattacaaaatgttattagttgtaataggtgaggcttctaatgaatgaggaatttcctaatctctctcaaccacagattattatgaaatggagtacaggcttccacctccatcactgacactccttcttttggtgaaccacaagaagattggcattctggttgtgagccctgcccatcacaggagatctggcaaccaaaaaacagcaacgcaaagggaccgagacgcccctcttgtatgaggtcttgtcatgccaagtgtatgggatttggagtcagcctggtcacagtttgaacccttgttacaccattttgagactgcggacctcagagaatctgtttcctcttctgtaaaatgaggagtggtcttgggcatcatgaaatcattcgaccccaaactgtctccccggcaggagtttgttttgctttcttgaaatcggccatcattcaattcctctgccagagtccatgttagcctgagaccaactggaaattttttgcctctgagaaaggaaaccagagagactcctccgtgagctccggaggaagagacgccagccttctgacttctcaaagcatgttattcgcatcactacctactcaggccacacgggggagccgcgggccgggcaaaggcgagtccgcgcgcccgcccagcgcacacctgcccggcggtggcggatgccggctgcgggctcccagcgtgggccaagagtcctcactcggcgagttacactgaaatcaa

SEQ ID NO: 289019 - DNA, 484 bp, Homo sapiens
tttttttgcagtttaaaaaatgtatttttattggtacatagtaattttacatattcatggggtagatatgatatttcaatatatgcatacaatgtgtaatgatcaaatcagggtatttagaatatgacatccaacatgtatcatttctttgtgttataatcttcatatgcaataatcaataatcataaacaggatttctagttctcaaacgggcatggaatcattacaaaatgttattagttgtaataggtgaggcttctaatgaatgaggaatttcctaatctctctcaaccacagattattatgaaatggagtacaggcttccacctccatcactgacactccttcttttggtgaaccacaagaagattggcattctggttgtgagccctgcccatcacaggagatctggcaaccaaaaaacaggtactatttgtactgcctactgtctcccatcactatctgctataagtaagaactaaaa

SEQ ID NO: 289020 - DNA, 746 bp, Homo sapiens
cggacgcgtgggtcgacccacgcgtccggagaccccaagacatgacaacatggaagcctcacctcggataccgtttctgattattatgaaatggagtacaggcttccacctccatcactgacactccttcttttggtgaaccacaagaagattggcattctggttgtgagccctgcccatcacaggagatctggcaaccaaaaaacagcaacgcaaagggaccgagacgcccctcttgtatgaggtcttgtcatgccaagtgtatgggatttggagtcagcctggtcacagtttgaacccttgttacaccattttgagactgcggacctcagagaatctgtttcctcttctgtaaaatgaggagtggtcttgggcatcatgaaatcattcgaccccaaactgtctccccggcaggagtttgttttgctttcttgaaatcggccatcattcaattcctctgccagagtccatgttagcctgagaccaactggaaattttttgcctctgagaaaggaaaccagagagactcctccgtgagctccggaggaagagacgccagccttctgacttctcaaagcatgttattcgcatcactacctactcaggccacacgggggagccgcgggccgggcaaaggcgagtccgcgcgcccgcccagcgcacacctgcccggcggtggcggatgccggctgcgggctcccagcgtgggccaagagtcctcactcggcgagttacactgaaatcaa

SEQ ID NO: 289021 - DNA, 628 bp, Homo sapiens
gcaatacttactatatgcatattcatctctctaacaataattctttacactgtaggcttgagttttgtgggttttttttttttctcattccagagtgaaaggaataaaattcgtgatgtgagatttttacaaaagcagagtggaagaagccaaaagttataaatcctccatcgcagtcctagttaaatatattgctgctaggctctagacagaattacaagatgttcacaatttgtctcattttccctttcagatcgccaaactttggcatcagagcaaggtccacacttatcactgaaaattttcccacccagccccattaaaaacgttaaagtgtgagagattttatttcaacactgacaagctagttactagagggcctacaaaggtaagtaacaagtttccatttcaacttgagagacaaatgatgttaaaatataagaagcagggtaagtcaggtttgtgattttaaataaaagggagaaggatttcagactgaggaatgacaggttagtatggctaaagattgaggtgtgataaatgggagccaaagtgcacagcaaaaatatcttgactaatccatatcctccctgtcttctatcatgtaaccaaggaaggagaccacctg

SEQ ID NO: 289022 - DNA, 1388 bp, Homo sapiens
acgtctcagtgggcgccctaacgaacccgggatacggtctgttcctagtccgctccggaaatgcaactgcgtacgggctggccgcgtaatcgtgacgacagcgcgccagcgccggctagccggacgccctaggcttccgcgagatcttcggtgggggtacgggtgttttacgccaggacgctgatgcgtttgggttctcgtctgcagaccctctggacctggtcacgattccataatgtaccacaacagtagtcagaagcggcactggaccttctccagcgaggagcagctggcaagactgcgggctgacgccaaccgcaaattcagatgcaaagccgtggccaacgggaaggttcttccgaatgatccagtctttcttgagcctcatgaagaaatgacactctgcaaatactatgagaaaaggttattggaattctgttcggtgtttaagccagcaatgccaagatctgttgtgggtacggcttgtatgtatttcaaacgtttttatcttaataactcagtaatggaatatcaccccaggataataatgctcacttgtgcatttttggcctgcaaagtagatgaattcaatgtatctagtcctcagtttgttggaaacctccgggagagtcctcttggacaggagaaggcacttgaacagatactggaatatgaactacttcttatacagcaacttaatttccaccttattgtccacaatccttacagaccatttgagggcttcctcatcgacttaaagacccgctatcccatattggagaatccagagattttgaggaaaacagctgatgactttcttaatagaattgcattgacggatgcttaccttttatacacaccttcccaaattgccctgactgccattttatctagtgcctccagggctggaattactatggaaagttatttatcagagagtctgatgctgaaagagaacagaacttgcctgtcacagttactagatataatgaaaagcatgagaaacttagtaaagaagtatgaaccacccagatctgaagaagttgctgttctgaaacagaagttggagcgatgtcattctgctgagcttgcacttaacgtaatcacgaagaagaggaaaggctatgaagatgatgattacgtctcaaagaaatccaaacatgaggaggaagaatggactgatgacgacctggtagaatctctctaaccatttgaagttgatttctcaatgctaactaatcaagagaagtaggaagcatatcaaacgtttaactttatttaaaaagtataatgtgaaaacataaaatatattaaaacttttctattgttttctttccctttcacagtaactttatgtaaaataaaccatcttcaaaagagctagaata

SEQ ID NO: 289023 - DNA, 1245 bp, Homo sapiens
acgtctcagtgggcgccctaacgaacccgggatacggtctgttcctagtccgctccggaaatgcaactgcgtacgggctggccgcgtaatcgtgacgacagcgcgccagcgccggctagccggacgccctaggcttccgcgagatcttcggtgggggtacgggtgttttacgccaggacgctgatgcgtttgggttctcgtctgcagaccctctggacctggtcacgattccataatgtaccacaacagtagtcagaagcggcactggaccttctccagcgaggagcagctggcaagactgcgggctgacgccaaccgcaaattcagatgcaaagccgtggccaacgggaaggttcttccgaatgatccagtctttcttgagcctcatgaagaaatgacactctgcaaatactatgagaaaagtaactttatgtaaaataaaccatcttcaaaagagaaaaaaacccaaacaaaaaaaaaaaaaaaacaaaaaaaaacacgcaaaacaacaacaaaaaaaaaaaaaacaaaacaaaacaaaccaaacaaacacaaccaaacacaaaacagacacaaaacaacaaacacaaaaccaaacaaaaacaacaaaaacaaacaaaaaaccacaacggggggggcgcgccaaactataaccctccgccagacggagcgacaacactaccaagccgcccacccctcgactagctaacagaggcacgcgccccccctcgaatcgggggcgtctacaatctacgacgagcgcgcggccaccgctcccaaaccaccccccccgcacgcgacaccaccccacacggccctcccctgtggcaccacacaccccccctcccgtggcgggaaccactgcccacgcacccccacgccagaatagtaccgcgcccaggaaaaacacaccgcgccgtcatctggcggccacacccccaccccatactgcgcgcgcgcgaagaaacccaccccccgctgagcctgacaccacacaacaaaaggcggggcccaccctcatacccaccgccccccccccgcccaccccgacaaggcaagcaaccccacccgccgcagcgcaccccgccccccgctcgagcagtccaccacgcccgacacagcacacgccacaccccgcacgcatcccacgccgcaccccccaccagcagacgagccacacagaacacgacagcacacccacaacaccgcacccgcacgtcgctctgacgccgcgccagcgccact

SEQ ID NO: 289024 - DNA, 729 bp, Homo sapiens
tcaatctccaatcctagcactccctaatgccatgccttacacctggctctattcacatgtacatgcaccttcctggtttctctgtatatgaactgaattactaataagtttagtttaaaactgactcagtacctgaaaatctgttcaatcatgaaaatttaacttgattaagaaaggcagggtcctagaaattataaaataccctcattcgtaattttgtaatcacaatttattttattaacaaggcccaaatgaggcacagatattcacactgaatgaagtgtaacaccgaatccacgtcttttattcctagaaaagaagacttttcagtctacttatttaacctggtcagaactgtgtcatcgtcttgcttcacgccccacatagtagcagcaaagtaaaaaagctaaggaggcaacagaatgtcatggcagtcagatgtgatagctttaaaaggatatgaaaagcaagacagaccctaaaaaatgatggaagtagtctaaaagccacaataatgtatgctttggtgtaaactatttagtgtaagaataaatggttttaattacaaacaaaaatatgttttttgtttaggaaggcagacaaaaatttgcaggctttttgtctttttagttttggatagaaaatctttctaaagattgctgcttaaatgggttaactcagctatatcaactagaagtcttaaaaaaagtacctgaaaactatatacat

SEQ ID NO: 289025 - DNA, 1727 bp, Homo sapiens
acgtctcagtgggcgccctaacgaacccgggatacggtctgttcctagtccgctccggaaatgcaactgcgtacgggctggccgcgtaatcgtgacgacagcgcgccagcgccggctagccggacgccctaggcttccgcgagatcttcggtgggggtacgggtgttttacgccaggacgctgatgcgtttgggttctcgtctgcagaccctctggacctggtcacgattccataatgtaccacaacagtagtcagaagcggcactggaccttctccagcgaggagcagctggcaagactgcgggctgacgccaaccgcaaattcagatgcaaagccgtggccaacgggaaggttcttccgaatgatccagtctttcttgagcctcatgaagaaatgacactctgcaaatactatgagaaaaggttattggaattctgttcggtgtttaagccagcaatgccaagatctgttgtgggtacggcttgtatgtatttcaaacgtttttatcttaataactcagtaatggaatatcaccccaggataataatgctcacttgtgcatttttggcctgcaaagtagatgaattcaatgtatctagtcctcagtttgttggaaacctccgggagagtcctcttggacaggagaaggcacttgaacagatactggaatatgaactacttcttatacagcaacttaatttccaccttattgtccacaatccttacagaccatttgagggcttcctcatcgacttaaagacccgctatcccatattggagaatccagagattttgaggaaaacagctgatgactttcttaatagaattgcattgacggatgcttaccttttatacacaccttcccaaattgccctgactgccattttatctagtgcctccagggctggaattactatggaaagttatttatcagagagtctgatgctgaaagagaacagaacttgcctgtcacagttactagatataatgaaaagcatgagaaacttagtaaagaagtatgaaccacccagatctgaagaagttgctgttctgaaacagaagttggagcgatgtcattctgctgagcttgcacttaacgtaatcacgaagaagaggaaaggctatgaagatgatgattacgtctcaaagaaatccaaacatgaggaggaagaatggactgatgacgacctggtagaatctctctaaccatttgaagttgatttctcaatgctaactaatcaagagaagtaggaagcatatcaaacgtttaactttatttaaaaagtataatgtgaaaacataaaatatattaaaacttttctattgttttctttccctttcacagtaactttatgtaaaataaaccatcttcaaaagagctagaatagcacctgttttgaatattcttattccatcgtgactaatatcaaattaaagctgcaactcatttgcctaattttttaagcaaaatatgataggcaaacctatgctttttttaaaaaaggcaccacaaaaaacaaaacttagtagccagctttaaaagtgttaaggaatgtgttttgccctctagaaacctttataaatggctttttgaatgccatcctgatatatttagctatttgtccattactattaaactgcagaaggtatttcaactgttacatggtactgaaagccagtcgtctgggtaatgaatattatttttctttagttacccgaaaacatt

SEQ ID NO: 289026 - DNA, 1947 bp, Homo sapiens
acgtctcagtgggcgccctaacgaacccgggatacggtctgttcctagtccgctccggaaatgcaactgcgtacgggctggccgcgtaatcgtgacgacagcgcgccagcgccggctagccggacgccctaggcttccgcgagatcttcggtgggggtacgggtgttttacgccaggacgctgatgcgtttgggttctcgtctgcagaccctctggacctggtcacgattccataatgtaccacaacagtagtcagaagcggcactggaccttctccagcgaggagcagctggcaagactgcgggctgacgccaaccgcaaattcagatgcaaagccgtggccaacgggaaggttcttccgaatgatccagtctttcttgagcctcatgaagaaatgacactctgcaaatactatgagaaaaggttattggaattctgttcggtgtttaagccagcaatgccaagatctgttgtgggtacggcttgtatgtatttcaaacgtttttatcttaataactcagtaatggaatatcaccccaggataataatgctcacttgtgcatttttggcctgcaaagtagatgaattcaatgtatctagtcctcagtttgttggaaacctccgggagagtcctcttggacaggagaaggcacttgaacagatactggaatatgaactacttcttatacagcaacttaatttccaccttattgtccacaatccttacagaccatttgagggcttcctcatcgacttaaagacccgctatcccatattggagaatccagagattttgaggaaaacagctgatgactttcttaatagaattgcattgacggatgcttaccttttatacacaccttcccaaattgccctgactgccattttatctagtgcctccagggctggaattactatggaaagttatttatcagagagtctgatgctgaaagagaacagaacttgcctgtcacagttactagatataatgaaaagcatgagaaacttagtaaagaagtatgaaccacccagatctgaagaagttgctgttctgaaacagaagttggagcgatgtcattctgctgagcttgcacttaacgtaatcacgaagaagaggaaaggctatgaagatgatgattacgtctcaaagaaatccaaacatgaggaggtatgttttactccaaagatgaactctaagttatttttgttatacattctggtgtgactatactgttaagatttattctccaagagtacaggcattatagagttgtgggttttttcattttttgcatacttccttacgtacagtactgttgtccattattaaagggatttttctctcttctgtctttatttaatgaagaatccttcctgtgttcatagaaagcagaagcaatatgtatacatactacatttttgctttttttcttattctccaaggatttttcccttacccccttttaaaaaaaattttctatctgtcaagtcaaataagtgaataatcagaggcaaaaggtcacagccataacctttattcctcactggaggagtctggtgagaccatgccaacattactaacagtgaactattacaaaatttcctggtttatcttttgtaatccacatgggtaaaaggaggagaacattttcttaaagggaggtaagaggtaaacaatactggttatgcttcagtgttatccttaccacactttttttccttcttaggaagaatggactgatgacgacctggtagaatctctctaaccatttgaagttgatttctcaatgctaactaatcaagagaagtaggaagcatatcaaacgtttaactttatttaaaaagtataatgtgaaaacataaaatatattaaaacttttctattgttttctttccctttcacagtaactttatgtaaaataaaccatcttcaaaagagctagaata

SEQ ID NO: 289027 - DNA, 2286 bp, Homo sapiens
acgtctcagtgggcgccctaacgaacccgggatacggtctgttcctagtccgctccggaaatgcaactgcgtacgggctggccgcgtaatcgtgacgacagcgcgccagcgccggctagccggacgccctaggcttccgcgagatcttcggtgggggtacgggtgttttacgccaggacgctgatgcgtttgggttctcgtctgcagaccctctggacctggtcacgattccataatgtaccacaacagtagtcagaagcggcactggaccttctccagcgaggagcagctggcaagactgcgggctgacgccaaccgcaaattcagatgcaaagccgtggccaacgggaaggttcttccgaatgatccagtctttcttgagcctcatgaagaaatgacactctgcaaatactatgagaaaaggttattggaattctgttcggtgtttaagccagcaatgccaagatctgttgtgggtacggcttgtatgtatttcaaacgtttttatcttaataactcagtaatggaatatcaccccaggataataatgctcacttgtgcatttttggcctgcaaagtagatgaattcaatgtatctagtcctcagtttgttggaaacctccgggagagtcctcttggacaggagaaggcacttgaacagatactggaatatgaactacttcttatacagcaacttaatttccaccttattgtccacaatccttacagaccatttgagggcttcctcatcgacttaaagacccgctatcccatattggagaatccagagattttgaggaaaacagctgatgactttcttaatagaattgcattgacggatgcttaccttttatacacaccttcccaaattgccctgactgccattttatctagtgcctccagggctggaattactatggaaagttatttatcagagagtctgatgctgaaagagaacagaacttgcctgtcacagttactagatataatgaaaagcatgagaaacttagtaaagaagtatgaaccacccagatctgaagaagttgctgttctgaaacagaagttggagcgatgtcattctgctgagcttgcacttaacgtaatcacgaagaagaggaaaggctatgaagatgatgattacgtctcaaagaaatccaaacatgaggaggtatgttttactccaaagatgaactctaagttatttttgttatacattctggtgtgactatactgttaagatttattctccaagagtacaggcattatagagttgtgggttttttcattttttgcatacttccttacgtacagtactgttgtccattattaaagggatttttctctcttctgtctttatttaatgaagaatccttcctgtgttcatagaaagcagaagcaatatgtatacatactacatttttgctttttttcttattctccaaggatttttcccttacccccttttaaaaaaaattttctatctgtcaagtcaaataagtgaataatcagaggcaaaaggtcacagccataacctttattcctcactggaggagtctggtgagaccatgccaacattactaacagtgaactattacaaaatttcctggtttatcttttgtaatccacatgggtaaaaggaggagaacattttcttaaagggaggtaagaggtaaacaatactggttatgcttcagtgttatccttaccacactttttttccttcttaggaagaatggactgatgacgacctggtagaatctctctaaccatttgaagttgatttctcaatgctaactaatcaagagaagtaggaagcatatcaaacgtttaactttatttaaaaagtataatgtgaaaacataaaatatattaaaacttttctattgttttctttccctttcacagtaactttatgtaaaataaaccatcttcaaaagagctagaatagcacctgttttgaatattcttattccatcgtgactaatatcaaattaaagctgcaactcatttgcctaattttttaagcaaaatatgataggcaaacctatgctttttttaaaaaaggcaccacaaaaaacaaaacttagtagccagctttaaaagtgttaaggaatgtgttttgccctctagaaacctttataaatggctttttgaatgccatcctgatatatttagctatttgtccattactattaaactgcagaaggtatttcaactgttacatggtactgaaagccagtcgtctgggtaatgaatattatttttctttagttacccgaaaacatt

SEQ ID NO: 289028 - DNA, 1719 bp, Homo sapiens
acgtctcagtgggcgccctaacgaacccgggatacggtctgttcctagtccgctccggaaatgcaactgcgtacgggctggccgcgtaatcgtgacgacagcgcgccagcgccggctagccggacgccctaggcttccgcgagatcttcggtgggggtacgggtgttttacgccaggacgctgatgcgtttgggttctcgtctgcagaccctctggacctggtcacgattccataatgtaccacaacagtagtcagaagcggcactggaccttctccagcgaggagcagctggcaagactgcgggctgacgccaaccgcaaattcagatgcaaagccgtggccaacgggaaggttcttccgaatgatccagtctttcttgagcctcatgaagaaatgacactctgcaaatactatgagaaaaggttattggaattctgttcggtgtttaagccagcaatgccaagatctgttgtgggtacggcttgtatgtatttcaaacgtttttatcttaataactcagtaatggaatatcaccccaggataataatgctcacttgtgcatttttggcctgcaaagtagatgaattcaatgtatctagtcctcagtttgttggaaacctccgggagagtcctcttggacaggagaaggcacttgaacagatactggaatatgaactacttcttatacagcaacttaatttccaccttattgtccacaatccttacagaccatttgagggcttcctcatcgacttaaagacccgctatcccatattggagaatccagagattttgaggaaaacagctgatgactttcttaatagaattgcattgacggatgcttaccttttatacacaccttcccaaattgccctgactgccattttatctagtgcctccagggctggaattactatggaaagttatttatcagagagtctgatgctgaaagagaacagaacttgcctgtcacagttactagatataatgaaaagcatgagaaacttagtaaagaagtatgaaccacccagatctgaagaagttgctgttctgaaacagaagttggagcgatgtcattctgctgagcttgcacttaacgtaatcacgaagaagaggaaaggctatgaagatgatgattacgtctcaaagaaatccaaacatgaggagatcgccaaactttggcatcagagcaaggtccacacttatcactgaaaattttcccacccagccccattaaaaacgttaaagtgtgagagattttatttcaacactgacaagctagttactagagggcctacaaagaaaagaagacttttcagtctacttatttaacctggtcagaactgtgtcatcgtcttgcttcacgccccacatagtagcagcaaagtaaaaaagctaaggaggcaacagaatgtcatggcagtcagatgtgatagctttaaaaggatatgaaaagcaagacagaccctaaaaaatgatggaagtagtctaaaagccacaataatgtatgctttggtgtaaactatttagtgtaagaataaatggttttaattacaaacaaaaatatgttttttgtttaggaaggcagacaaaaatttgcaggctttttgtctttttagttttggatagaaaatctttctaaagattgctgcttaaatgggttaactcagctatatcaactagaagtcttaaaaaaagtacctgaaaactatatacat

SEQ ID NO: 289029 - DNA, 1320 bp, Homo sapiens
acgtctcagtgggcgccctaacgaacccgggatacggtctgttcctagtccgctccggaaatgcaactgcgtacgggctggccgcgtaatcgtgacgacagcgcgccagcgccggctagccggacgccctaggcttccgcgagatcttcggtgggggtacgggtgttttacgccaggacgctgatgcgtttgggttctcgtctgcagaccctctggacctggtcacgattccataatgtaccacaacagtagtcagaagcggcactggaccttctccagcgaggagcagctggcaagactgcgggctgacgccaaccgcaaattcagatgcaaagccgtggccaacgggaaggttcttccgaatgatccagtctttcttgagcctcatgaagaaatgacactctgcaaatactatgagaaaaggttattggaattctgttcggtgtttaagccagcaatgccaagatctgttgtgggtacggcttgtatgtatttcaaacgtttttatcttaataactcagtaatggaatatcaccccaggataataatgctcacttgtgcatttttggcctgcaaagtagatgaattcaatgtatctagtcctcagtttgttggaaacctccgggagagtcctcttggacaggagaaggcacttgaacagaccatttgagggcttcctcatcgacttaaagacccgctatcccatattggagaatccagagattttgaggaaaacagctgatgactttcttaatagaattgcattgacggatgcttaccttttatacacaccttcccaaattgccctgactgccattttatctagtgcctccagggctggaattactatggaaagttatttatcagagagtctgatgctgaaagagaacagaacttgcctgtcacagttactagatataatgaaaagcatgagaaacttagtaaagaagtatgaaccacccagatctgaagaagttgctgttctgaaacagaagttggagcgatgtcattctgctgagcttgcacttaacgtaatcacgaagaagaggaaaggctatgaagatgatgattacgtctcaaagaaatccaaacatgaggaggaagaatggactgatgacgacctggtagaatctctctaaccatttgaagttgatttctcaatgctaactaatcaagagaagtaggaagcatatcaaacgtttaactttatttaaaaagtataatgtgaaaacataaaatatattaaaacttttctattgttttctttccctttcacagtaactttatgtaaaataaaccatcttcaaaagagctagaata

SEQ ID NO: 289030 - DNA, 1224 bp, Homo sapiens
acgtctcagtgggcgccctaacgaacccgggatacggtctgttcctagtccgctccggaaatgcaactgcgtacgggctggccgcgtaatcgtgacgacagcgcgccagcgccggctagccggacgccctaggcttccgcgagatcttcggtgggggtacgggtgttttacgccaggacgctgatgcgtttgggttctcgtctgcagaccctctggacctggtcacgattccataatgtaccacaacagtagtcagaagcggcactggaccttctccagcgaggagcagctggcaagactgcgggctgacgccaaccgcaaattcagatgcaaagccgtggccaacgggaaggttcttccgaatgatccagtctttcttgagcctcatgaagaaatgacactctgcaaatactatgagaaaaggttattggaattctgttcggtgtttaagccagcaatgccaagatctgttgtgggtacggcttgtatgtatttcaaacgtttttatcttaataactcagtaatggaatatcaccccaggataataatgctcacttgtgcatttttggcctgcaaagtagatgaattcaatgtatctagtcctcagtttgttggaaacctccgggagagtcctcttggacaggagaaggcacttgaacagatactggaatatgaactacttcttatacagcaacttaatttccaccttattgtccacaatccttacagaccatttgagggcttcctcatcgacttaaagttatttatcagagagtctgatgctgaaagagaacagaacttgcctgtcacagttactagatataatgaaaagcatgagaaacttagtaaagaagtatgaaccacccagatctgaagaagttgctgttctgaaacagaagttggagcgatgtcattctgctgagcttgcacttaacgtaatcacgaagaagaggaaaggctatgaagatgatgattacgtctcaaagaaatccaaacatgaggaggaagaatggactgatgacgacctggtagaatctctctaaccatttgaagttgatttctcaatgctaactaatcaagagaagtaggaagcatatcaaacgtttaactttatttaaaaagtataatgtgaaaacataaaatatattaaaacttttctattgttttctttccctttcacagtaactttatgtaaaataaaccatcttcaaaagagctagaata

SEQ ID NO: 289031 - DNA, 1631 bp, Homo sapiens
acgtctcagtgggcgccctaacgaacccgggatacggtctgttcctagtccgctccggaaatgcaactgcgtacgggctggccgcgtaatcgtgacgacagcgcgccagcgccggctagccggacgccctaggcttccgcgagatcttcggtgggggtacgggtgttttacgccaggacgctgatgcgtttgggttctcgtctgcagaccctctggacctggtcacgattccataatgtaccacaacagtagtcagaagcggcactggaccttctccagcgaggagcagctggcaagactgcgggctgacgccaaccgcaaattcagatgcaaagccgtggccaacgggaaggtgaggttttcccaacggttgcccagttgcccggtcactaaattctgagcagctgcgggagctcttctggctcccaggacaatctcgctccgtcgtttctctgcctctgcggcgcggagtgcgtttttctatcaaaataagcgagcaccttgccaggttccgtgggtacaaagacgaacaacgccatccccgtcgtcgaatggcagacaagtaaccagtctttgtaacgtagtgaagaagagagttcttccgaatgatccagtctttcttgagcctcatgaagaaatgacactctgcaaatactatgagaaaaggttattggaattctgttcggtgtttaagccagcaatgccaagatctgttgtgggtacggcttgtatgtatttcaaacgtttttatcttaataactcagtaatggaatatcaccccaggataataatgctcacttgtgcatttttggcctgcaaagtagatgaattcaatgtatctagtcctcagtttgttggaaacctccgggagagtcctcttggacaggagaaggcacttgaacagatactggaatatgaactacttcttatacagcaacttaatttccaccttattgtccacaatccttacagaccatttgagggcttcctcatcgacttaaagacccgctatcccatattggagaatccagagattttgaggaaaacagctgatgactttcttaatagaattgcattgacggatgcttaccttttatacacaccttcccaaattgccctgactgccattttatctagtgcctccagggctggaattactatggaaagttatttatcagagagtctgatgctgaaagagaacagaacttgcctgtcacagttactagatataatgaaaagcatgagaaacttagtaaagaagtatgaaccacccagatctgaagaagttgctgttctgaaacagaagttggagcgatgtcattctgctgagcttgcacttaacgtaatcacgaagaagaggaaaggctatgaagatgatgattacgtctcaaagaaatccaaacatgaggaggaagaatggactgatgacgacctggtagaatctctctaaccatttgaagttgatttctcaatgctaactaatcaagagaagtaggaagcatatcaaacgtttaactttatttaaaaagtataatgtgaaaacataaaatatattaaaacttttctattgttttctttccctttcacagtaactttatgtaaaataaaccatcttcaaaagagctagaata

SEQ ID NO: 289032 - DNA, 1208 bp, Homo sapiens
acgtctcagtgggcgccctaacgaacccgggatacggtctgttcctagtccgctccggaaatgcaactgcgtacgggctggccgcgtaatcgtgacgacagcgcgccagcgccggctagccggacgccctaggcttccgcgagatcttcggtgggggtacgggtgttttacgccaggacgctgatgcgtttgggttctcgtctgcagaccctctggacctggtcacgattccataatgtaccacaacagtagtcagaagcggcactggaccttctccagcgaggagcagctggcaagactgcgggctgacgccaaccgcaaattcagatgcaaagccgtggccaacgggaaggttcttccgaatgatccagtctttcttgagcctcatgaagaaatgacactctgcaaatactatgagaaaaggttattggaattctgttcggtgtttaagccagcaatgccaagatctgttgtgggtacggcttgtatgtatttcaaacgtttttatcttaataactcagtaatggaatatcaccccaggataataataccatttgagggcttcctcatcgacttaaagacccgctatcccatattggagaatccagagattttgaggaaaacagctgatgactttcttaatagaattgcattgacggatgcttaccttttatacacaccttcccaaattgccctgactgccattttatctagtgcctccagggctggaattactatggaaagttatttatcagagagtctgatgctgaaagagaacagaacttgcctgtcacagttactagatataatgaaaagcatgagaaacttagtaaagaagtatgaaccacccagatctgaagaagttgctgttctgaaacagaagttggagcgatgtcattctgctgagcttgcacttaacgtaatcacgaagaagaggaaaggctatgaagatgatgattacgtctcaaagaaatccaaacatgaggaggaagaatggactgatgacgacctggtagaatctctctaaccatttgaagttgatttctcaatgctaactaatcaagagaagtaggaagcatatcaaacgtttaactttatttaaaaagtataatgtgaaaacataaaatatattaaaacttttctattgttttctttccctttcacagtaactttatgtaaaataaaccatcttcaaaagagctagaata

SEQ ID NO: 289033 - DNA, 1366 bp, Homo sapiens
  misc_feature (165)..(165): n is a, c, g, or t
  misc_feature (212)..(212): n is a, c, g, or t
ggcgacatctccggtgggggtactggtgtttgtacgccacggatcgctagatgcagttatgtggttgctccgatccgtgcgatactccatctaggtaaccgtggttcgatcgaatctgccattacgatgctagctcaaccagatgatgttgagtttcagaacagncgggacaactggcgaaccatatctaccaatgacgcagagagacacgnctgtgactagacgtacctgcagggactgacggtccagaccgacatacacttcaagaatgcatagaagtccgcgatggtccatagcaggcgcgaggttcttccgaatgatccagtctttcttgagcctcatgaagaaatgacactctgcaaatactatgagaaaaggttattggaattctgttcggtgtttaagccagcaatgccaagatctgttgtggtacggctatgatatgctcatttcaaagcgttggttgtatcgttaacaatagagcatcatgtcaatgggagatagtcaccccgatgtgatggataaatgctcacttgtgcatttttggcctgcaaagtagatgaattcaatgtatctagtcctcagtttgttggaaacctccgggagagtcctcttggacaggagaaggcacttgaacagatactggaatatgaactacttcttatacagcaacttaatttccaccttattgtccacaatccttacagaccatttgagggcttcctcatcgacttaaagacccgctatcccatattggagaatccagagattttgaggaaaacagctgatgactttcttaatagaattgcattgacggatgcttaccttttatacacaccttcccaaattgccctgactgccattttatctagtgcctccagggctggaattactatggaaagttatttatcagagagtctgatgctgaaagagaacagaacttgcctgtcacagttactagatataatgaaaagcatgagaaacttagtaaagaagtatgaaccacccagatctgaagaagttgctgttctgaaacagaagttggagcgatgtcattctgctgagcttgcacttaacgtaatcacgaagaagaggaaaggctatgaagatgatgattacgtctcaaagaaatccaaacatgaggaggaagaatggactgatgacgacctggtagaatctctctaaccatttgaagttgatttctcaatgctaactaatcaagagaagtaggaagcatatcaaacgtttaactttatttaaaaagtataatgtgaaaacataaaatatattaaaacttttctattgttttctttccctttcacagtaactttatgtaaaataaaccatcttcaaaagagctagaata

SEQ ID NO: 289034 - DNA, 340 bp, Homo sapiens
gacgccaaccgcaaattcagatgcaaagccgtggccaacgggaaggtgaggttttcccaacggttgcccagttgcccggtcactaaattctgagcagctgcgggagctcttctggctcccaggacaatctcgctccgtcgtttctctgcctctgcggcgcggagtgcgtttttctatcaaaataagcgagcaccttgccaggttccgtgggtacaaagacgaacaacgccatccccgtcgtcgaatggcagacaagtaaccagtctttgtaacgtagtgaagaagagagtaagtagtgtgctaaggtagtgcgtggcaagagccgttcacttgtcaagag

SEQ ID NO: 289035 - DNA, 139 bp, Homo sapiens
tcatcacgcgcatcctaggtgaggaaagggggcacggtgccgagagggtgtggaggagaaggaaggaggagcggagggatgaggtgcggggtgagcggtgcgacgctggccccagacaggagtggacatcgctgctggg

SEQ ID NO: 289036 - DNA, 749 bp, Homo sapiens
ctccctcaggcatgtgacttttctatggcaggcccctttacagtcacattatgccccatccttcctataacatgggagagtctttctttttaggatttagtggctcaacaggtttggaaggacttgggaaggggaggcttccctgagttctgttgctgggagaagacaggcaattcagtaggtcaaatggcaaaggtaaaaccacagtggaaggcttctctgtggacagagactgaagggtgtggaggtatcgaagctgaacggcagcaggggtgcctgacagaatctcagctgccatcctcagggactcagaagcagccttttccgcttctgcagcaatcatctagaaaacatgtgacgaaagcaaagtgattgttcttcattccctgaaggcttcaccactatgcagtatgactcagcagacaagcactgagcatctactatgtggcaagcacgcctccacagccagtgagtgctgaagcccagctggcaacctcacatctttactgaaaaagaaagaatgcaggtcactgaatccaaggcaacctgtggaaagaagaattcagatgtcagtgggagcctccaggtgggaggagagcatgcctaaaccctggtggccattgttctgtactaaggaacaacattccctttgaaaggacattatttgcctgttgtatttaacttcacagtgccttgcaaagagttgtttaacttgcatggtgccacccaataaatatctgtgcaattga

SEQ ID NO: 289037 - DNA, 488 bp, Homo sapiens
ctccctcaggcatgtgacttttctatggcaggcccctttacagtcacattatgccccatccttcctataacatgggagagtctttctttttaggatttagtggctcaacaggtttggaaggacttgggaaggggaggcttccctgagttctgttgctgggagaagacaggcaattcagtaggtcaaatggcaaagcctccacagccagtgagtgctgaagcccagctggcaacctcacatctttactgaaaaagaaagaatgcaggtcactgaatccaaggcaacctgtggaaagaagaattcagatgtcagtgggagcctccaggtgggaggagagcatgcctaaaccctggtggccattgttctgtactaaggaacaacattccctttgaaaggacattatttgcctgttgtatttaacttcacagtgccttgcaaagagttgtttaacttgcatggtgccacccaataaatatctgtgcaattga

SEQ ID NO: 289038 - DNA, 822 bp, Homo sapiens
cagcgttgatctgtgagcagctgtgccgtaacacactgagcactagacagtccgacgtagtcataaacaagagagaaagatgaagagggctggggcgtgatgtcagctcgagtgagtgcagctcattgagaggatgacgatcgatctccgtgtaaggattgtcagggccaaggattgtatcatcagtccaggtataatccgacattgggactcgctctcgtccccgttcagaggtcataacccgattgcagcatgctagttagtctctaggtgggacacgccgtgtcgcctcgaacgagggtgacctaggacccaggttgtctttcccggaacgagtgtaattgaacatatgcaggagaagttactggaggttgaaaatagagccagacaggcagaggagaagtttgaagatgcatatgagaaacttcatcatacccttataaaaaataaagatctagaggaattagtcatgacatcaagaaaggagtctaaagaagagaaagaaaatcaagatgaaagagaagtaaaagaagaagaagaacaacaagaagaagaagaagtcaggtcagcagaaaattcctcaaaatctccaaagaaaggtcactgaatccaaggcaacctgtggaaagaagaattcagatgtcagtgggagcctccaggtgggaggagagcatgcctaaaccctggtggccattgttctgtactaaggaacaacattccctttgaaaggacattatttgcctgttgtatttaacttcacagtgccttgcaaagagttgtttaacttgcatggtgccacccaataaatatctgtgcaattga

SEQ ID NO: 289039 - DNA, 339 bp, Homo sapiens
gcctggcctaaaatgggaaatttcatgtaaattttatctaaaacaatttttagattcatagagaaaaaaataatcagagtaatttgtccaaatgttatagtgattgtgttatggctgtcactgaatccaaggcaacctgtggaaagaagaattcagatgtcagtgggagcctccaggtgggaggagagcatgcctaaaccctggtggccattgttctgtactaaggaacaacattccctttgaaaggacattatttgcctgttgtatttaacttcacagtgccttgcaaagagttgtttaacttgcatggtgccacccaataaatatctgtgcaattga

SEQ ID NO: 289040 - DNA, 428 bp, Homo sapiens
gttttgtattgatgagctgtgctcagtttttccgcttaggatataatctaagccccaactaataaatttgaacaatggcttgaagagccacactactgataataaagataaggggaattcatccaagtttataaaagagaagaattgattttgaaaagggtacaactgaccaaataagaacaacgcttaatgtattgcataaaaggtcactgaatccaaggcaacctgtggaaagaagaattcagatgtcagtgggagcctccaggtgggaggagagcatgcctaaaccctggtggccattgttctgtactaaggaacaacattccctttgaaaggacattatttgcctgttgtatttaacttcacagtgccttgcaaagagttgtttaacttgcatggtgccacccaataaatatctgtgcaattga

SEQ ID NO: 289041 - DNA, 880 bp, Homo sapiens
accaatactccagctatttgagcagttgttgcaaagggatggtaacagcaatggctctgagtaaatccactaactcacacaaaaatgctactgaagacctttatgaggtggataagttgaaggaggctgtaaaagaattcattgagcctgaaatagacgagtcttttaaagaagatgaagaagaaagtaaggaggataggaaacttcaggaggaaaataaagagagagcagaagaacaaccttcaacatctacagagaaggaaaaactcattcgattcattggagaagatgaaaatgttcattccaaacctctatttgaaacagatgtgttgtcttcctggagagagtcagctaagcaaggtacattggcccaaaaatatcttgaagcaatggctgtaattgaacatatgcaggagaagttactggaggttgaaaatagagccagacaggcagaggagaagtttgaagatgcatatgagaaacttcatcatacccttataaaaaataaagatctagaggaattagtcatgacatcaagaaaggagtctaaagaagagaaagaaaatcaagatgaaagagaagtaaaagaagaagaagaacaacaagaagaagaagaagtcaggtcagcagaaaattcctcaaaatctccaaagaaaggtcactgaatccaaggcaacctgtggaaagaagaattcagatgtcagtgggagcctccaggtgggaggagagcatgcctaaaccctggtggccattgttctgtactaaggaacaacattccctttgaaaggacattatttgcctgttgtatttaacttcacagtgccttgcaaagagttgtttaacttgcatggtgccacccaataaatatctgtgcaattga

SEQ ID NO: 289042 - DNA, 740 bp, Homo sapiens
ggaagggcagggaatgaggacagagtgtctccctcaggcatgtgacttttctatggcaggcccctttacagtcacattatgccccatccttcctataacatgggagagtctttctttttaggatttagtggctcaacaggtttggaaggacttgggaaggggaggcttccctgagttctgttgctgggagaagacaggcaattcagtaggtcaaatggcaaaggtaaaaccacagtggaaggcttctctgtggacagagactgaagggtgtggaggtatcgaagctgaacggcagcaggggtgcctgacagaatctcagctgccatcctcagggactcagaagcagccttttccgcttctgcagcaatcatctagaaaacatgtgacgaaagcaaagtgattgttcttcattccctgaaggcttcaccactatgcagtatgactcagcagacaagcactgagcatctactatgtggcaagcacggttaagcatagaacatgtttattcttctttctgaagggtcttgagctggggagacagattaaactgttaatcacaatttaaggtggaatgcgttaggagccatcacaagtataaatgaagtattaggggagttattagcatctggtgggccttgaaagattaggattttgccaacatagagaaaagattagccagcattccatgcaaaggcatgacgttatgaaagggtgacccccaactcagggaaagtgaatgg

SEQ ID NO: 289043 - DNA, 693 bp, Homo sapiens
ttactaagaagtgataaatatattcttaaatagcagcatgatttctactctgacattagcattcagagtcgctcctgggcccccagttctcagttaatcattgatgctgttgcttcccttatttctacccttcagacacattcatctaatctcactgcctttttagaaaatgagtttcgaaatcaaaaatactttttcaaccctttctattttgttgtgtcttctcttccatatcagggaggttgaaaatagagccagacaggcagaggagaagtttgaagatgcatatgagaaacttcatcatacccttataaaaaataaagatctagaggaattagtcatgacatcaagaaaggagtctaaagaagagaaagaaaatcaagatgaaagagaagtaaaagaagaagaagaacaacaagaagaagaagaagtcaggtcagcagaaaattcctcaaaatctccaaagaaaggtcactgaatccaaggcaacctgtggaaagaagaattcagatgtcagtgggagcctccaggtgggaggagagcatgcctaaaccctggtggccattgttctgtactaaggaacaacattccctttgaaaggacattatttgcctgttgtatttaacttcacagtgccttgcaaagagttgtttaacttgcatggtgccacccaataaatatctgtgcaattga

SEQ ID NO: 289044 - DNA, 3032 bp, Homo sapiens
gtggcggcaaccggcacctcagtccccgccgcgcttctcctcgccgcccacgccgtggggtcaggaacgcggcgtctggcgctgcagacgcccgctgagttgcagaagcccacggagcggcgcccggcgcgccacggcccgtagcagtccggtgctgctctccgcccgcgtccggctcgtggccccctacttcgggcaccatggacacctcccggctcggtgtgctcctgtccttgcctgtgctgctgcagctggcgaccgggggcagctctcccaggtctggtgtgttgctgaggggctgccccacacactgtcattgcgagcccgacggcaggatgttgctcagggtggactgctccgacctggggctctcggagctgccttccaacctcagcgtcttcacctcctacctagacctcagtatgaacaacatcagtcagctgctcccgaatcccctgcccagtctccgcttcctggaggagttacgtcttgcgggaaacgctctgacatacattcccaagggagcattcactggcctttacagtcttaaagttcttatgctgcagaataatcagctaagacacgtacccacagaagctctgcagaatttgcgaagccttcaatccctgcgtctggatgctaaccacatcagctatgtgcccccaagctgtttcagtggcctgcattccctgaggcacctgtggctggatgacaatgcgttaacagaaatccccgtccaggcttttagaagtttatcggcattgcaagccatgaccttggccctgaacaaaatacaccacataccagactatgcctttggaaacctctccagcttggtagttctacatctccataacaatagaatccactccctgggaaagaaatgctttgatgggctccacagcctagagactttagatttaaattacaataaccttgatgaattccccactgcaattaggacactctccaaccttaaagaactaggatttcatagcaacaatatcaggtcgatacctgagaaagcatttgtaggcaacccttctcttattacaatacatttctatgacaatcccatccaatttgttgggagatctgcttttcaacatttacctgaactaagaacactgactctgaatggtgcctcacaaataactgaatttcctgatttaactggaactgcaaacctggagagtctgactttaactggagcacagatctcatctcttcctcaaaccgtctgcaatcagttacctaatctccaagtgctagatctgtcttacaacctattagaagatttacccagtttttcagtctgccaaaagcttcagaaaattgacctaagacataatgaaatctacgaaattaaagttgacactttccagcagttgcttagcctccgatcgctgaatttggcttggaacaaaattgctattattcaccccaatgcattttccactttgccatccctaataaagctggacctatcgtccaacctcctgtcgtcttttcctataactgggttacatggtttaactcacttaaaattaacaggaaatcatgccttacagagcttgatatcatctgaaaactttccagaactcaaggttatagaaatgccttatgcttaccagtgctgtgcatttggagtgtgtgagaatgcctataagatttctaatcaatggaataaaggtgacaacagcagtatggacgaccttcataagaaagatgctggaatgtttcaggctcaagatgaacgtgaccttgaagatttcctgcttgactttgaggaagacctgaaagcccttcattcagtgcagtgttcaccttccccaggccccttcaaaccctgtgaacacctgcttgatggctggctgatcagaattggagtgtggaccatagcagttctggcacttacttgtaatgctttggtgacttcaacagttttcagatcccctctgtacatttcccccattaaactgttaattggggtcatcgcagcagtgaacatgctcacgggagtctccagtgccgtgctggctggtgtggatgcgttcacttttggcagctttgcacgacatggtgcctggtgggagaatggggttggttgccatgtcattggttttttgtccatttttgcttcagaatcatctgttttcctgcttactctggcagccctggagcgtgggttctctgtgaaatattctgcaaaatttgaaacgaaagctccattttctagcctgaaagtaatcattttgctctgtgccctgctggccttgaccatggccgcagttcccctgctgggtggcagcaagtatggcgcctcccctctctgcctgcctttgccttttggggagcccagcaccatgggctacatggtcgctctcatcttgctcaattccctttgcttcctcatgatgaccattgcctacaccaagctctactgcaatttggacaagggagacctggagaatatttgggactgctctatggtaaaacacattgccctgttgctcttcaccaactgcatcctaaactgccctgtggctttcttgtccttctcctctttaataaaccttacatttatcagtcctgaagtaattaagtttatccttctggtggtagtcccacttcctgcatgtctcaatccccttctctacatcttgttcaatcctcactttaaggaggatctggtgagcctgagaaagcaaacctacgtctggacaagatcaaaacacccaagcttgatgtcaattaactctgatgatgtcgaaaaacagtcctgtgactcaactcaagccttggtaacctttaccagctccagcatcacttatgacctgcctcccagttccgtgccatcaccagcttatccagtgactgagagctgccatctttcctctgtggcatttgtcccatgtctctaattaatatgtgaaggaaaatgttttcaaaggttgagaacctgaaaatgtgagattgagtatatcagagcagtaattaataagaagagctgaggtgaaactcggtttaaa

SEQ ID NO: 289045 - DNA, 683 bp, Homo sapiens
tcccctccccagggtccctgttaatttctgtccttggtgctcaggcctgtccacagcctcccttgtctatgtctctatccagtgcaatcctgatgagtgatgtctgccaggcaccgtaagtttgattagtgatgtctgccacgggcagggatggaaggagcagtgtgatgtctgctctcttctctcccctctgtccctcttcaggaagaaagagctcattctgtctcacaagccaccggcatcctgtatcagcttccagcctcccctcaggctttccagtcaccagggacactcggagccacagcctagagccccgtgttccctggcctgtgcgtctgcccccttctgagatgcagccagaagctctgtgcctgctgcaaagattcaggtggaccctcctctaatctcctcctgctgtgcccgccagtccttgccctcccaccaggtctctgagctcagtcttaccaaattcgccctttaacagcttgctctggcaaccccataaatgacacctgagctccgtagaagctaagctcctgagacccagggggacctgccactggtaccgcggcccagcctggggcctgggggctgcccctcttgaaccacccacatgcttagccccagctttttggaagaggcaaatggctggtctgaggatgacacacaaaaacaaaaacaaa

SEQ ID NO: 289046 - DNA, 3264 bp, Homo sapiens
  misc_feature (2426)..(2426): n is a, c, g, or t
ggcgccgggaaggcagccggcgccgggcaagttgcgagcgcgcccctccgaccaggaaagtttccccccggccgccggcgggatttggcgcggggtccggcagccgccgctggaagagtgtatccagaagctactgtcaggaggacactgtaagagaaccttggcacctctgggcccaaagggaaagacaccagtggaaagaggtgagcatctcctggaccaccctcaagcttcaggtgagctgagcttctaacactaccatcaaagcaactggaaccccttgaatttgatttctggagacgcgagcataatccttttgcagacatctcaacgctggctctccaggtggagcaccatggaaggcgactgtctgagctgcatgaagtatctgatgtttgtattcaatttcttcatatttctgggcggggcctgcctgctggccatcggcatctgggtcatggtggaccccaccggcttccgggagatcgtggctgccaatcctctgctcctcacgggcgcctacatcctcctggccatggggggcctgctctttctgctcggcttcctgggctgctgcggggccgtccgtgagaacaagtgtctgctgctatttttcttcctgttcatcctgatcatcttcctggcagagctctcagcagccatcctggccttcatcttcagggaaaatctcacccgagaattcttcaccaaggagctcaccaagcactaccagggcaataacgacacagacgtcttctctgccacctggaactcggtcatgatcacatttggttgctgcggggtcaacgggcctgaagactttaagtttgcatctgtgtttcgactcctgaccctggatagtgaagaggtgccggaggcctgctgccggagggaaccccaaagtcgggacggggtcctgctgagccgggaggagtgcctcctgggaaggagcctattcctaaacaagcagggctgttacacggtgatcctcaacaccttcgagacctacgtctacttggccggagcccttgccatcggggtactggccatcgagcttttcgccatgatctttgccatgtgcctcttccggggcatccagtagagggtatggcctgaagcctgaagactcgccccacccaccactgcccagcacccaatgtcctcccgtgcccctccccgctgtcctcttggccccaggggagaagatgaggccatcagagatggccaggagaagggccaggggaatagagctatttttttaacaaaacaaaatgaagacaaaaatatggactgatgtatcctcgcctggactcagggcaggtgccgtgggttctccagagaccccagcacctggcccaggatgcaggctgctctagagaccaaaggaacaccaggcccagcgccctctttggtccagccagaccctgggccctctctcctcactgcaccaggacctgatgccaagaaagtgaggatttaggcaacaaggaggcaaaagcaaatctcagagaagtcatcaaagcccaggggctgcacggagattcagctgccatgtctttgaggactcggaacccacagcgcaatccctggtccactggaggatggactgttccccccttcaggccggggccaagagtgagctgctaacacggcatccaagaatggcccagctggtaggatccttgctttccccatctgttggaccaaataatctcaaaggcccagagaggacagtgaccatccacagacacacagcacaggcgtgacagttctgaaaagaagctgagttgtctccaggctgctgtcactgcatccaggactctgtcagctctgctgcccacatgcacccctggcctcagcatcccggttcccccagacaagagagggcaagtcagccaggaactgcctcctccctgctctacagctaagaaaacaccattccatgacttcccaccgcgccctcgctcctacctccccacacctctctctcagtccccaggaacacacagaggtgcacatcacattcccttgtccacactgcccgcctctcccacatgccacccccttccctgtccttccccaactccccagctccaagagtggaagaaatccccaagatcatctgggtctccctctccacacccagaactgaggcttggatatcttcttcaacatccttgccaagacttctccaccctcttgcatacctccagggacagagagcttactacctcccaaggcagcctcctgcctttggactgctctgactttagcatcagcttaatacacagaagaggtttctgtttttctgtggctctgtccatggcatcccacttgcccactctccttcctggagtgttgaggtcacacattgactcccctgagccctcttctctccaggctaaagaatcccgaagcatcgaggncatttctgctgcaacaaggtttcctgtctcttcactggtccgcacatttcttagtattccctccaggcttgggcagggagactcgcagatgcacacccacaagtattcagttctcaaactctagacgagtgttggcaactggattgcaagatgctcctaccctgatagatcaggggtggctgctggaggctgtgctggggatctgaggtttggtctgggctcagtgggagatggcagtgcaatcctgatgagtgatgtctgccaggcaccgtaagtttgattagtgatgtctgccacgggcagggatggaaggagcagtgtgatgtctgctctcttctctcccctctgtccctcttcaggaagaaagagctcattctgtctcacaagccaccggcatcctgtatcagcttccagcctcccctcaggctttccagtcaccagggacactcggagccacagcctagagccccgtgttccctggcctgtgcgtctgcccccttctgagatgcagccagaagctctgtgcctgctgcaaagattcaggtggaccctcctctaatctcctcctgctgtgcccgccagtccttgccctcccaccaggtctctgagctcagtcttaccaaattcgccctttaacagcttgctctggcaaccccataaatgacacctgagctccgtagaagctaagctcctgagacccagggggacctgccactggtaccgcggcccagcctggggcctgggggctgcccctcttgaaccacccacatgcttagccccagctttttggaagaggcaaatggctggtctgaggatgacacacaaaaacaaaaacaaa

SEQ ID NO: 289047 - DNA, 3341 bp, Homo sapiens
  misc_feature (2503)..(2503): n is a, c, g, or t
ggcgccgggaaggcagccggcgccgggcaagttgcgagcgcgcccctccgaccaggaaagtttccccccggccgccggcgggatttggcgcggggtccggcagccgccgctggaagagtgtatccagaagctactgtcaggaggacactgtaagagaaccttggcacctctgggcccaaagggaaagacaccagtggaaagaggtgagcatctcctggaccaccctcaagcttcaggtgagctgagcttctaacactaccatcaaagcaactggaaccccttgaatttgatttctggagacgcgagcataatccttttgcagacatctcaacgctggctctccagctgggccgataaaagaaatatacacaagcctcgctgacgggagagtctgtcctgctgatgcccgaagaactgcccaggtggagcaccatggaaggcgactgtctgagctgcatgaagtatctgatgtttgtattcaatttcttcatatttctgggcggggcctgcctgctggccatcggcatctgggtcatggtggaccccaccggcttccgggagatcgtggctgccaatcctctgctcctcacgggcgcctacatcctcctggccatggggggcctgctctttctgctcggcttcctgggctgctgcggggccgtccgtgagaacaagtgtctgctgctatttttcttcctgttcatcctgatcatcttcctggcagagctctcagcagccatcctggccttcatcttcagggaaaatctcacccgagaattcttcaccaaggagctcaccaagcactaccagggcaataacgacacagacgtcttctctgccacctggaactcggtcatgatcacatttggttgctgcggggtcaacgggcctgaagactttaagtttgcatctgtgtttcgactcctgaccctggatagtgaagaggtgccggaggcctgctgccggagggaaccccaaagtcgggacggggtcctgctgagccgggaggagtgcctcctgggaaggagcctattcctaaacaagcagggctgttacacggtgatcctcaacaccttcgagacctacgtctacttggccggagcccttgccatcggggtactggccatcgagcttttcgccatgatctttgccatgtgcctcttccggggcatccagtagagggtatggcctgaagcctgaagactcgccccacccaccactgcccagcacccaatgtcctcccgtgcccctccccgctgtcctcttggccccaggggagaagatgaggccatcagagatggccaggagaagggccaggggaatagagctatttttttaacaaaacaaaatgaagacaaaaatatggactgatgtatcctcgcctggactcagggcaggtgccgtgggttctccagagaccccagcacctggcccaggatgcaggctgctctagagaccaaaggaacaccaggcccagcgccctctttggtccagccagaccctgggccctctctcctcactgcaccaggacctgatgccaagaaagtgaggatttaggcaacaaggaggcaaaagcaaatctcagagaagtcatcaaagcccaggggctgcacggagattcagctgccatgtctttgaggactcggaacccacagcgcaatccctggtccactggaggatggactgttccccccttcaggccggggccaagagtgagctgctaacacggcatccaagaatggcccagctggtaggatccttgctttccccatctgttggaccaaataatctcaaaggcccagagaggacagtgaccatccacagacacacagcacaggcgtgacagttctgaaaagaagctgagttgtctccaggctgctgtcactgcatccaggactctgtcagctctgctgcccacatgcacccctggcctcagcatcccggttcccccagacaagagagggcaagtcagccaggaactgcctcctccctgctctacagctaagaaaacaccattccatgacttcccaccgcgccctcgctcctacctccccacacctctctctcagtccccaggaacacacagaggtgcacatcacattcccttgtccacactgcccgcctctcccacatgccacccccttccctgtccttccccaactccccagctccaagagtggaagaaatccccaagatcatctgggtctccctctccacacccagaactgaggcttggatatcttcttcaacatccttgccaagacttctccaccctcttgcatacctccagggacagagagcttactacctcccaaggcagcctcctgcctttggactgctctgactttagcatcagcttaatacacagaagaggtttctgtttttctgtggctctgtccatggcatcccacttgcccactctccttcctggagtgttgaggtcacacattgactcccctgagccctcttctctccaggctaaagaatcccgaagcatcgaggncatttctgctgcaacaaggtttcctgtctcttcactggtccgcacatttcttagtattccctccaggcttgggcagggagactcgcagatgcacacccacaagtattcagttctcaaactctagacgagtgttggcaactggattgcaagatgctcctaccctgatagatcaggggtggctgctggaggctgtgctggggatctgaggtttggtctgggctcagtgggagatggcagtgcaatcctgatgagtgatgtctgccaggcaccgtaagtttgattagtgatgtctgccacgggcagggatggaaggagcagtgtgatgtctgctctcttctctcccctctgtccctcttcaggaagaaagagctcattctgtctcacaagccaccggcatcctgtatcagcttccagcctcccctcaggctttccagtcaccagggacactcggagccacagcctagagccccgtgttccctggcctgtgcgtctgcccccttctgagatgcagccagaagctctgtgcctgctgcaaagattcaggtggaccctcctctaatctcctcctgctgtgcccgccagtccttgccctcccaccaggtctctgagctcagtcttaccaaattcgccctttaacagcttgctctggcaaccccataaatgacacctgagctccgtagaagctaagctcctgagacccagggggacctgccactggtaccgcggcccagcctggggcctgggggctgcccctcttgaaccacccacatgcttagccccagctttttggaagaggcaaatggctggtctgaggatgacacacaaaaacaaaaacaaa

SEQ ID NO: 289048 - DNA, 2628 bp, Homo sapiens
  misc_feature (1790)..(1790): n is a, c, g, or t
ctttcccatggtcacacagtggtgacaggtggagcccgcccacacccagtcttctgatgccactcctttgcagaggctgtatgtccttctctgtccccgcccctgtgtcctcctcctgcccaccagaaccttctctgggatctccccctagtttggttgctgcggggtcaacgggcctgaagactttaagtttgcatctgtgtttcgactcctgaccctggatagtgaagaggtgccggaggcctgctgccggagggaaccccaaagtcgggacggggtcctgctgagccgggaggagtgcctcctgggaaggagcctattcctaaacaagcagggctgttacacggtgatcctcaacaccttcgagacctacgtctacttggccggagcccttgccatcggggtactggccatcgagcttttcgccatgatctttgccatgtgcctcttccggggcatccagtagagggtatggcctgaagcctgaagactcgccccacccaccactgcccagcacccaatgtcctcccgtgcccctccccgctgtcctcttggccccaggggagaagatgaggccatcagagatggccaggagaagggccaggggaatagagctatttttttaacaaaacaaaatgaagacaaaaatatggactgatgtatcctcgcctggactcagggcaggtgccgtgggttctccagagaccccagcacctggcccaggatgcaggctgctctagagaccaaaggaacaccaggcccagcgccctctttggtccagccagaccctgggccctctctcctcactgcaccaggacctgatgccaagaaagtgaggatttaggcaacaaggaggcaaaagcaaatctcagagaagtcatcaaagcccaggggctgcacggagattcagctgccatgtctttgaggactcggaacccacagcgcaatccctggtccactggaggatggactgttccccccttcaggccggggccaagagtgagctgctaacacggcatccaagaatggcccagctggtaggatccttgctttccccatctgttggaccaaataatctcaaaggcccagagaggacagtgaccatccacagacacacagcacaggcgtgacagttctgaaaagaagctgagttgtctccaggctgctgtcactgcatccaggactctgtcagctctgctgcccacatgcacccctggcctcagcatcccggttcccccagacaagagagggcaagtcagccaggaactgcctcctccctgctctacagctaagaaaacaccattccatgacttcccaccgcgccctcgctcctacctccccacacctctctctcagtccccaggaacacacagaggtgcacatcacattcccttgtccacactgcccgcctctcccacatgccacccccttccctgtccttccccaactccccagctccaagagtggaagaaatccccaagatcatctgggtctccctctccacacccagaactgaggcttggatatcttcttcaacatccttgccaagacttctccaccctcttgcatacctccagggacagagagcttactacctcccaaggcagcctcctgcctttggactgctctgactttagcatcagcttaatacacagaagaggtttctgtttttctgtggctctgtccatggcatcccacttgcccactctccttcctggagtgttgaggtcacacattgactcccctgagccctcttctctccaggctaaagaatcccgaagcatcgaggncatttctgctgcaacaaggtttcctgtctcttcactggtccgcacatttcttagtattccctccaggcttgggcagggagactcgcagatgcacacccacaagtattcagttctcaaactctagacgagtgttggcaactggattgcaagatgctcctaccctgatagatcaggggtggctgctggaggctgtgctggggatctgaggtttggtctgggctcagtgggagatggcagtgcaatcctgatgagtgatgtctgccaggcaccgtaagtttgattagtgatgtctgccacgggcagggatggaaggagcagtgtgatgtctgctctcttctctcccctctgtccctcttcaggaagaaagagctcattctgtctcacaagccaccggcatcctgtatcagcttccagcctcccctcaggctttccagtcaccagggacactcggagccacagcctagagccccgtgttccctggcctgtgcgtctgcccccttctgagatgcagccagaagctctgtgcctgctgcaaagattcaggtggaccctcctctaatctcctcctgctgtgcccgccagtccttgccctcccaccaggtctctgagctcagtcttaccaaattcgccctttaacagcttgctctggcaaccccataaatgacacctgagctccgtagaagctaagctcctgagacccagggggacctgccactggtaccgcggcccagcctggggcctgggggctgcccctcttgaaccacccacatgcttagccccagctttttggaagaggcaaatggctggtctgaggatgacacacaaaaacaaaaacaaa

SEQ ID NO: 289049 - DNA, 2711 bp, Homo sapiens
  misc_feature (1873)..(1873): n is a, c, g, or t
ctttcccatggtcacacagtggtgacaggtggagcccgcccacacccagtcttctgatgccactcctttgcagaggctgtatgtccttctctgtccccgcccctgtgtcctcctcctgcccaccagaaccttctctgggatctccccctagtttggttgctgcggggtcaacgggcctgaagactttaagtttgcatctgtgtttcgactcctgaccctggatagtgaagaggtgccggaggcctgctgccggagggaaccccaaagtcgggacggggtcctgctgagccgggaggagtgcctcctgggaaggagcctattcctaaacaagcaggttctcagcctgggcccaaagaatatgcaggctcctataaaggaaggaaagttctcccactttgaaaatacgtgtcattcaaaggctgttacacggtgatcctcaacaccttcgagacctacgtctacttggccggagcccttgccatcggggtactggccatcgagcttttcgccatgatctttgccatgtgcctcttccggggcatccagtagagggtatggcctgaagcctgaagactcgccccacccaccactgcccagcacccaatgtcctcccgtgcccctccccgctgtcctcttggccccaggggagaagatgaggccatcagagatggccaggagaagggccaggggaatagagctatttttttaacaaaacaaaatgaagacaaaaatatggactgatgtatcctcgcctggactcagggcaggtgccgtgggttctccagagaccccagcacctggcccaggatgcaggctgctctagagaccaaaggaacaccaggcccagcgccctctttggtccagccagaccctgggccctctctcctcactgcaccaggacctgatgccaagaaagtgaggatttaggcaacaaggaggcaaaagcaaatctcagagaagtcatcaaagcccaggggctgcacggagattcagctgccatgtctttgaggactcggaacccacagcgcaatccctggtccactggaggatggactgttccccccttcaggccggggccaagagtgagctgctaacacggcatccaagaatggcccagctggtaggatccttgctttccccatctgttggaccaaataatctcaaaggcccagagaggacagtgaccatccacagacacacagcacaggcgtgacagttctgaaaagaagctgagttgtctccaggctgctgtcactgcatccaggactctgtcagctctgctgcccacatgcacccctggcctcagcatcccggttcccccagacaagagagggcaagtcagccaggaactgcctcctccctgctctacagctaagaaaacaccattccatgacttcccaccgcgccctcgctcctacctccccacacctctctctcagtccccaggaacacacagaggtgcacatcacattcccttgtccacactgcccgcctctcccacatgccacccccttccctgtccttccccaactccccagctccaagagtggaagaaatccccaagatcatctgggtctccctctccacacccagaactgaggcttggatatcttcttcaacatccttgccaagacttctccaccctcttgcatacctccagggacagagagcttactacctcccaaggcagcctcctgcctttggactgctctgactttagcatcagcttaatacacagaagaggtttctgtttttctgtggctctgtccatggcatcccacttgcccactctccttcctggagtgttgaggtcacacattgactcccctgagccctcttctctccaggctaaagaatcccgaagcatcgaggncatttctgctgcaacaaggtttcctgtctcttcactggtccgcacatttcttagtattccctccaggcttgggcagggagactcgcagatgcacacccacaagtattcagttctcaaactctagacgagtgttggcaactggattgcaagatgctcctaccctgatagatcaggggtggctgctggaggctgtgctggggatctgaggtttggtctgggctcagtgggagatggcagtgcaatcctgatgagtgatgtctgccaggcaccgtaagtttgattagtgatgtctgccacgggcagggatggaaggagcagtgtgatgtctgctctcttctctcccctctgtccctcttcaggaagaaagagctcattctgtctcacaagccaccggcatcctgtatcagcttccagcctcccctcaggctttccagtcaccagggacactcggagccacagcctagagccccgtgttccctggcctgtgcgtctgcccccttctgagatgcagccagaagctctgtgcctgctgcaaagattcaggtggaccctcctctaatctcctcctgctgtgcccgccagtccttgccctcccaccaggtctctgagctcagtcttaccaaattcgccctttaacagcttgctctggcaaccccataaatgacacctgagctccgtagaagctaagctcctgagacccagggggacctgccactggtaccgcggcccagcctggggcctgggggctgcccctcttgaaccacccacatgcttagccccagctttttggaagaggcaaatggctggtctgaggatgacacacaaaaacaaaaacaaa

SEQ ID NO: 289050 - DNA, 768 bp, Homo sapiens
cctagcctttgactgcagcaggagggaaggagaatattttgggagtaggagaaactgtggaggactcctctggaaactgatgtacaaagacttcctgcccggtcctgtagcttcttcaggccctgggacccagggcatctgcttggctctgtctggggaacagctcaggtggaaggggtggggtgaggtgcaaactccccacccagataagccctccctctgggcagagctgcaggtggagtgaggtcctcagcgtgccctgacctcggctccaccgagatgtgcatgtgtatggacttcctttctccactggggataagaagactgccccaagttggtggtttaggagaatcccaggggacctggcaccaggatgcagagcccctagctctcattcccccaactcccaagcaggtggatggagagacgatggagggtgggggctgcacccaactgccaggcctaagcccatcttctccctctgcccccagctcacccgagaattcttcaccaaggagctcaccaagcactaccagggcaataacgacacagacgtcttctctgccacctggaactcggtcatgatcacagtgagtgacgccccagagatgctatgaacattcagagccacgatgcccagtgttcacatgcccacgccaggcatcagtaatcaatccaggcactctcccattgatcacagacctggccttggaatcaccatccacgcagcattccaggcagccatgccacttgatcacagtccctact

SEQ ID NO: 289051 - DNA, 398 bp, Homo sapiens
ggtttctcttgctcacgggcctctgcattccttaggggagctggagaagcagcagggaacaaagacactctccttcaagccctgcggagcccagggggacccacagtcaaagcaaggatcgccgacagccaaaagggaagccgcgctcagggagaggccggcggagagcacggtggaggtattaatcaatgcctccccagcccgactcaccattttaccaatttcaagagatacaattaaaagttactgctagcatgggtaatgccactgttccagcgcctaattaagccacgagctctttctcccctttccccagcctgctgccctccgaggccgagctcccagactaacacagtggagacggagctcacggcaccctagggccatccttcctgtgt

SEQ ID NO: 289052 - DNA, 6376 bp, Homo sapiens
  misc_feature (1530)..(1530): n is a, c, g, or t
  misc_feature (3476)..(3476): n is a, c, g, or t
  misc_feature (3573)..(3573): n is a, c, g, or t
tcccccggccggcagcagcctgccctggcgacggcgctgtgcccccacgcccctgccgcctccgattacgaactctcccttgacctaaagaataaacagattgaaatgctagaacataagtacggcggtcacctggtgtcccggcgcgccgcttgcaccatccaaaccgccttccgccaataccagctcagcaagaacttcgagaaaatccgcaactcgcttctggagagccgcctgccacggcggatctccctgcgcaaggtgcggtcacccacggccgagagcctggcggccgagaaagcgctcatggagggctacggcctcgtggggctgccgctggtgcgctcgccctccctgccgcccaccttcgcaggcaccctcaccgagctggaggactccttcaccgagcaggtgcaatccctggccaagtccatcgacgacgcgctcagcacgtggagcctcaagaccatgtgctccctgcgggagagtggcgcttaccagctccaccaggccctgcaggcggccgcggggcccccaggcctggaggccgaggggcgggcgccggagagcgcgggccccgggcccggggatgacgccgcggagacccccggcctgcccccggcccacagcgggaccctcatgatggctttccgggacgtcacggtgcagatcgccaaccagaacatatccgtctcctcctccacggctctgtcggtggccaactgcctgggcgctcagacggtccaggcccccgcagagcccgcggcgggcaaggccgagcagggcgagacctctgggcgggaggccccggaagcccccgccgtgggccgggaggacgcgtcagccgaggactcatgcgcagaggctggggctagtggggcggcggatggggccacagcccccaaaacagaggaggaagaggaggaggaggagacggcggaggtggggagaggggccgaggccgaggcaggcgacttggagcagctgagcagcagcagcacgtccaccaagtccgccaagtcaggctcggaggcgtcggcctccgcctccaaggacgccctgcaggccatgatcctgagcctgccgcgctaccactgcgagaacccagccagctgcaagtcgcccacgctctccaccgacaccctgcgcaagcggctctaccgcatcggcctcaacctcttcaacataaaccccgacaagggcatccagttcctgatctcacgcggcttcatcccggacacccccatcggtgtggcccatttcctcctccagcgaaagggcctcagccgccagatgattggagagttcctgggcaacagcaagaagcagttcaaccgcgacgtgctggactgcgtggtggacgagatggacttctccagcatggagctggacgaggccctgcgcaagttccaggcacacatccgtgtgcagggggaggctcagaaggtggagcggctcattgaggccttcagccagcgctactgcatgtgcaaccccgaagtggttcagcagttccacaaccccgacacnatcttcatcctcgccttcgccatcatcctcctcaacaccgacatgtacagccccaacatcaagcctgaccggaagatgatgctggaggacttcatccgaaaccttcgaggtgtggacgatggcgctgacatccccagggagctggtggtaggcatctatgagaggatacagcagaaggagctcaagtccaatgaggaccacgtcacgtacgtcaccaaggtggagaagtccattgtgggcatgaagacagtgctgtccgtgccccaccgccgcctggtgtgctgcagccggctcttcgaggtgacggatgtgaacaagctgcagaagcaggcagcgcatcagagggaggtgttcctcttcaatgacctgctggtgattctcaaactttgcccgaagaagaagagctcctccacgtacaccttttgcaagtcagttggcctgctgggcatgcagttccagctctttgagaacgagtattactctcatggcatcacactggtgaccccgctctcgggctccgagaagaagcaggtgctgcatttctgtgccctgggctcggacgagatgcagaagttcgtggaggacctgaaggagtccattgctgaggtgacggagctggagcagatccgaatagagtgggagctggagaagcagcagggaacaaagacactctccttcaagccctgcggagcccagggggacccacagtcaaagcaaggatcgccgacagccaaaagggaagccgcgctcagggagaggccggcggagagcacggtggaggtgtcaattcacaacaggcttcaaacgtcccagcacaactccgggctgggggccgagaggggagcgccggtgccgccgccagacctgcagcctagccccccgagacagcagaccccaccactgccgccgccgccacccacgcccccgggcaccctggtgcagtgccagcaaattgtcaaggtcattgtcctggacaagccctgcctggcccgcatggagcccctgctgagccaggctctctcctgctacacctcgtcgtcctctgactcctgcggctccacacccctgggcggtcccggctctccggtcaaggtcacccaccagcctccgctgcccccgcccccacccccctacaaccaccctcaccagttctgtcccccaggctccctgctgcacgggcaccgctactccagtggctcaaggagcctggtgtagactctgccccaccaccctgctgtcctgggagggctggccactggggggcctgggctgcccctccactgctccccataccctggcacgatgcgttcctggtcactgatcaccatcattttgggaagagaatcccaatccctggcacctgggtttgcctcatccaaccatccttccctttctcagctgcaccccctctgcagatctgaagacacacctcactctcccagggccctacacagccagacccggcgaggcctcctcttcccctggccaccactttcccccattggaccatggactgaagaaaacgagctgagggtctaacgagcttgcaggctttgagtctgttagtgcccggggcctcgggccttgggcagcagcatgaggctgggccggccggcagtggagcactagacagagtggctggctcgcagcccagaactagtgcctctgtagctgcactgaggggaggagggttggtcccacccctggagggacaggtgggaggagtgaggagggggctttttctgccacccccgcccccaagcctgaaactctcaggagtctacttcttggtccccagggacattggctgtcctgaccatgtccttccccctcctcccagggcctctgcttcctcaggagctgcccagactccagaaaagcctggaaaaagggaggcgggaaggggagcactttcggctttctataggtcagtccagcagggccangggatcgcgaggtcatgtatctgcaaaatgcacctttttaaagagtgtcttagttccccagccccagctaatacccggccaatgccgtgtacgcacnggcatgtgcacgcaaacacgcatgagaaccaggccattccttccgctgtggaagcagaactggagacggggcaggaatgtgcccagcagagatggggctcagcccgaggcagggctccctcctgcatgaggctcggcccgaggcagggctccctcctgcatgagtctgtggcctccaggagggacttgggtgcagatgtaagcaagaaaaaccggggctccagaggcatgtgcatttcccctgcgcccctcagcctttaaatattccctcctcctagaaggttctagaccccccccttccagcaggggtgcccaagagtccctggaccctcaaaattgcaaaggagacccaagcggggctcgctgacctcccagggcccagcaagatgggatagccagccttaggtggccccacgagcccaagcctggggaagggcccctccccagccagacgagaggcagccaccccagagaccacaggagccgtaccatggcctgcgcagtcaggccctatcaggatgtgtctgtcccaagcctggccaggctccagtcctgtgccagtagctcactgctgtcctatgtgcaggtcccccaacacttggagcctgtggttaaggcctcctgggagaggcagtgagcatgagtcaaaggtgacatggacttgaatctccccaccccgccccgcctgcagtagccgggccaggtaggaggcaaggatcattccctgctcccagaggttccagatgacctagtttcgttttgtgtgtgtgtgtgtgtggtcacccagacgtcactgtgatatcacctagtgaatctatttctggccctgtcttcgtcggcccagtttctgtaacttgcagccaatttgccctctcccctgtggctgccagcccatctgcccctctgtgtccttgctgccctggccctcctctgttttctgtaacagatgctccagtcattgcctttcagagtggagcagatgacagatggggtgcacgcattcagacacctctgatgcccttagccagggcagggatcgtccttaaagtgaaggcctggacaggaggagtcagggacttgggaggaggtggagctgtggggatgggagtggaggaatcaaaatgagggaagctgaaaatagaatgaaaacgatgactaagaggcagggagtgcgaggtatgggggaataggaactatgagctaaatatacttatggggtgggggccgtgggggccaggggacactctcccagacagccctgacccgccagcaggaccccgtcccctgctcacacagctcttcaaacttaccaaggacaggcaggaccccgtcccctgctcacacagctcttcaagcttaccaagtcccctgttgagggcacagcaaccccaggccctccctcccacctcagctgaagccccaatcttccaaatcggaaccagcaagtcttagggctggcacgcatctgggcctctagctgagaacccggactctcaggcacctcagtgcccctgccccagggcagaggcccaccccgtgggttggtgcagtggctgccctgggctccacgggcagcacagggagtctgtccaggaagcagcccagccggggtcagtattccgtggagccagtcctgagctgggaggggcatttaacacccctgagggcctggggcaggacacagctggccctcctcattgtcaggggaagcaagtgcccaacatctgtaacctcccttccctgctcagtccccaggccaaggttgggacccctctccatccctgtccccagagcctagacctcagggacctaggaaaagcctcctgctccctccccacggcagcagacagggcagggcctccagcccccagagggccggtggggggtgctctcgggccttcctgctctcctaaggttgcggggacagtagagtgctgagccccagacccagtcaccccaagatggccccactctatccactctctagacctttgggaaatctgggtccctctcctgatttgatccattcggccccaactccagagtcgggaatgggagatgaaactagttttccacccacttttggacaagtcccacccctagatctgaagcaagctctaccagcagcgtgtcctggaagcctgcctgcctgcctgcccgtctgcacaggtgtcttgatccagccctgcgtcttcgagcccctgtgccaccggtccccacggcccgccaggagtctctttgtacccactaggcttccctgatgaccatctgtctgtccgtccctgtttttgctgtacataactcctgctgcaccctctccccgcacacccgtcacccatgagagagagaaacctctctagggaaaggcagggtggctgcacccagcaactaatccaaatggcaaatattttgtaacaaaatagcccagaggtattttatctgttcaattcatagagttttagagattatattgaaagatgtcacttgaaaaaaaaaaactgtgtcggcgcagcttcttttgctctcccagcggggggggctcgccttaaatcagagcatctcttggtgaggatttgagaaggacaccgatgccctcagcccctcaggcttctctcccctggccacagcagcaccattcctttaccccaggataatgcactcatgtcccatggttaggaacccctgtcttcaataaaggagactcgggtgtgggaagataaggtaagtcttctgatgggtgagcactggcagagctgggggcagggctaggaaactgatcaccgtgtgtgtgggcctgacccgct

SEQ ID NO: 289053 - DNA, 6433 bp, Homo sapiens
  misc_feature (1530)..(1530): n is a, c, g, or t
  misc_feature (3476)..(3476): n is a, c, g, or t
  misc_feature (3573)..(3573): n is a, c, g, or t
tcccccggccggcagcagcctgccctggcgacggcgctgtgcccccacgcccctgccgcctccgattacgaactctcccttgacctaaagaataaacagattgaaatgctagaacataagtacggcggtcacctggtgtcccggcgcgccgcttgcaccatccaaaccgccttccgccaataccagctcagcaagaacttcgagaaaatccgcaactcgcttctggagagccgcctgccacggcggatctccctgcgcaaggtgcggtcacccacggccgagagcctggcggccgagaaagcgctcatggagggctacggcctcgtggggctgccgctggtgcgctcgccctccctgccgcccaccttcgcaggcaccctcaccgagctggaggactccttcaccgagcaggtgcaatccctggccaagtccatcgacgacgcgctcagcacgtggagcctcaagaccatgtgctccctgcgggagagtggcgcttaccagctccaccaggccctgcaggcggccgcggggcccccaggcctggaggccgaggggcgggcgccggagagcgcgggccccgggcccggggatgacgccgcggagacccccggcctgcccccggcccacagcgggaccctcatgatggctttccgggacgtcacggtgcagatcgccaaccagaacatatccgtctcctcctccacggctctgtcggtggccaactgcctgggcgctcagacggtccaggcccccgcagagcccgcggcgggcaaggccgagcagggcgagacctctgggcgggaggccccggaagcccccgccgtgggccgggaggacgcgtcagccgaggactcatgcgcagaggctggggctagtggggcggcggatggggccacagcccccaaaacagaggaggaagaggaggaggaggagacggcggaggtggggagaggggccgaggccgaggcaggcgacttggagcagctgagcagcagcagcacgtccaccaagtccgccaagtcaggctcggaggcgtcggcctccgcctccaaggacgccctgcaggccatgatcctgagcctgccgcgctaccactgcgagaacccagccagctgcaagtcgcccacgctctccaccgacaccctgcgcaagcggctctaccgcatcggcctcaacctcttcaacataaaccccgacaagggcatccagttcctgatctcacgcggcttcatcccggacacccccatcggtgtggcccatttcctcctccagcgaaagggcctcagccgccagatgattggagagttcctgggcaacagcaagaagcagttcaaccgcgacgtgctggactgcgtggtggacgagatggacttctccagcatggagctggacgaggccctgcgcaagttccaggcacacatccgtgtgcagggggaggctcagaaggtggagcggctcattgaggccttcagccagcgctactgcatgtgcaaccccgaagtggttcagcagttccacaaccccgacacnatcttcatcctcgccttcgccatcatcctcctcaacaccgacatgtacagccccaacatcaagcctgaccggaagatgatgctggaggacttcatccgaaaccttcgaggtgtggacgatggcgctgacatccccagggagctggtggtaggcatctatgagaggatacagcagaaggagctcaagtccaatgaggaccacgtcacgtacgtcaccaaggtggagaagtccattgtgggcatgaagacagtgctgtccgtgccccaccgccgcctggtgtgctgcagccggctcttcgaggtgacggatgtgaacaagctgcagaagcaggcagcgcatcagagggaggtgttcctcttcaatgacctgctggtgattctcaaactttgcccgaagaagaagagctcctccacgtacaccttttgcaagtcagttggcctgctgggcatgcagttccagctctttgagaacgagtattactctcatggcatcacactggtgaccccgctctcgggctccgagaagaagcaggtgctgcatttctgtgccctgggctcggacgagatgcagaagttcgtggaggacctgaaggagtccattgctgaggtgacggagctggagcagatccgaatagagtgggagctggagaagcagcagggaacaaagacactctccttcaagccctgcggagcccagggggacccacagtcaaagcaaggatcgccgacagccaaaagggaagccgcgctcagggagaggccggcggagagcacggtggaggtgtcaattcacaacaggcttcaaacgtcccagcacaactccgggctgggggccgagaggggagcgccggtgccgccgccagacctgcagcctagccccccgagacagcagaccccaccactgccgccgccgccacccacgcccccgggcaccctggtgcagtgccagcaaattgtcaaggtcattgtcctggacaagccctgcctggcccgcatggagcccctgctgagccaggctctctcctgctacacctcgtcgtcctctgactcctgcggctccacacccctgggcggtcccggctctccggtcaaggtcacccaccagcctccgctgcccccgcccccacccccctacaaccaccctcaccagttctgtcccccaggctccctgctgcacgggcaccgctactccagtggctcaaggagcctggtgtagactctgccccaccaccctgctgtcctgggagggctggccactggggggcctgggctgcccctccactgctccccataccctggcacgatgcgttcctggtcactgatcaccatcattttgggaagagaatcccaatccctggcacctgggtttgcctcatccaaccatccttccctttctcagctgcaccccctctgcagatctgaagacacacctcactctcccagggccctacacagccagacccggcgaggcctcctcttcccctggccaccactttcccccattggaccatggactgaagaaaacgagctgagggtctaacgagcttgcaggctttgagtctgttagtgcccggggcctcgggccttgggcagcagcatgaggctgggccggccggcagtggagcactagacagagtggctggctcgcagcccagaactagtgcctctgtagctgcactgaggggaggagggttggtcccacccctggagggacaggtgggaggagtgaggagggggctttttctgccacccccgcccccaagcctgaaactctcaggagtctacttcttggtccccagggacattggctgtcctgaccatgtccttccccctcctcccagggcctctgcttcctcaggagctgcccagactccagaaaagcctggaaaaagggaggcgggaaggggagcactttcggctttctataggtcagtccagcagggccangggatcgcgaggtcatgtatctgcaaaatgcacctttttaaagagtgtcttagttccccagccccagctaatacccggccaatgccgtgtacgcacnggcatgtgcacgcaaacacgcatgagaaccaggccattccttccgctgtggaagcagaactggagacggggcaggaatgtgcccagcagagatggggctcagcccgaggcagggctccctcctgcatgaggctcggcccgaggcagggctccctcctgcatgagtctgtggcctccaggagggacttgggtgcagatgtaagcaagaaaaaccggggctccagaggcatgtgcatttcccctgcgcccctcagcctttaaatattccctcctcctagaaggttctagaccccccccttccagcaggggtgcccaagagtccctggaccctcaaaattgcaaaggagacccaagcggggctcgctgacctcccagggcccagcaagatgggatagccagccttaggtggccccacgagcccaagcctggggaagggcccctccccagccagacgagaggcagccaccccagagaccacaggagccgtaccatggcctgcgcagtcaggccctatcaggatgtgtctgtcccaagcctggccaggctccagtcctgtgccagtagctcactgctgtcctatgtgcaggtcccccaacacttggagcctgtggttaaggcctcctgggagaggcagtgagcatgagtcaaaggtgacatggacttgaatctccccaccccgccccgcctgcagtagccgggccaggtaggaggcaaggatcattccctgctcccagaggttccagatgacctagtttcgttttgtgtgtgtgtgtgtgtggtcacccagacgtcactgtgatatcacctagtgaatctatttctggccctgtcttcgtcggcccagtttctgtaacttgcagccaatttgccctctcccctgtggctgccagcccatctgcccctctgtgtccttgctgccctggccctcctctgttttctgtaacagatgctccagtcattgcctttcagagtggagcagatgacagatggggtgcacgcattcagacacctctgatgcccttagccagggcagggatcgtccttaaagtgaaggcctggacaggaggagtcagggacttgggaggaggtggagctgtggggatgggagtggaggaatcaaaatgagggaagctgaaaatagaatgaaaacgatgactaagaggcagggagtgcgaggtatgggggaataggaactatgagctaaatatacttatggggtgggggccgtgggggccaggggacactctcccagacagccctgacccgccagcaggaccccgtcccctgctcacacagctcttcaagcttaccaaggacaggcagaaccccgtcccctgctcacacagctcttcaagcttaccaaggacaggcaggaccccgtcccctgctcacacagctcttcaaacttaccaagtgccctctcccctgttgagggcacagcaaccccaggccctccctcccacctcagctgaagccccaatcttccaaatcggaaccagcaagtcttagggctggcacgcatctgggcctctagctgagaacccggactctcaggcacctcagtgcccctgccccagggcagaggcccaccccgtgggttggtgcagtggctgccctgggctccacgggcagcacagggagtctgtccaggaagcagcccagccggggtcagtattccgtggagccagtcctgagctgggaggggcatttaacacccctgagggcctggggcaggacacagctggccctcctcattgtcaggggaagcaagtgcccaacatctgtaacctcccttccctgctcagtccccaggccaaggttgggacccctctccatccctgtccccagagcctagacctcagggacctaggaaaagcctcctgctccctccccacggcagcagacagggcagggcctccagcccccagagggccggtggggggtgctctcgggccttcctgctctcctaaggttgcggggacagtagagtgctgagccccagacccagtcaccccaagatggccccactctatccactctctagacctttgggaaatctgggtccctctcctgatttgatccattcggccccaactccagagtcgggaatgggagatgaaactagttttccacccacttttggacaagtcccacccctagatctgaagcaagctctaccagcagcgtgtcctggaagcctgcctgcctgcctgcccgtctgcacaggtgtcttgatccagccctgcgtcttcgagcccctgtgccaccggtccccacggcccgccaggagtctctttgtacccactaggcttccctgatgaccatctgtctgtccgtccctgtttttgctgtacataactcctgctgcaccctctccccgcacacccgtcacccatgagagagagaaacctctctagggaaaggcagggtggctgcacccagcaactaatccaaatggcaaatattttgtaacaaaatagcccagaggtattttatctgttcaattcatagagttttagagattatattgaaagatgtcacttgaaaaaaaaaaactgtgtcggcgcagcttcttttgctctcccagcggggggggctcgccttaaatcagagcatctcttggtgaggatttgagaaggacaccgatgccctcagcccctcaggcttctctcccctggccacagcagcaccattcctttaccccaggataatgcactcatgtcccatggttaggaacccctgtcttcaataaaggagactcgggtgtgggaagataaggtaagtcttctgatgggtgagcactggcagagctgggggcagggctaggaaactgatcaccgtgtgtgtgggcctgacccgct

SEQ ID NO: 289054 - DNA, 6483 bp, Homo sapiens
  misc_feature (1530)..(1530): n is a, c, g, or t
  misc_feature (3476)..(3476): n is a, c, g, or t
  misc_feature (3573)..(3573): n is a, c, g, or t
tcccccggccggcagcagcctgccctggcgacggcgctgtgcccccacgcccctgccgcctccgattacgaactctcccttgacctaaagaataaacagattgaaatgctagaacataagtacggcggtcacctggtgtcccggcgcgccgcttgcaccatccaaaccgccttccgccaataccagctcagcaagaacttcgagaaaatccgcaactcgcttctggagagccgcctgccacggcggatctccctgcgcaaggtgcggtcacccacggccgagagcctggcggccgagaaagcgctcatggagggctacggcctcgtggggctgccgctggtgcgctcgccctccctgccgcccaccttcgcaggcaccctcaccgagctggaggactccttcaccgagcaggtgcaatccctggccaagtccatcgacgacgcgctcagcacgtggagcctcaagaccatgtgctccctgcgggagagtggcgcttaccagctccaccaggccctgcaggcggccgcggggcccccaggcctggaggccgaggggcgggcgccggagagcgcgggccccgggcccggggatgacgccgcggagacccccggcctgcccccggcccacagcgggaccctcatgatggctttccgggacgtcacggtgcagatcgccaaccagaacatatccgtctcctcctccacggctctgtcggtggccaactgcctgggcgctcagacggtccaggcccccgcagagcccgcggcgggcaaggccgagcagggcgagacctctgggcgggaggccccggaagcccccgccgtgggccgggaggacgcgtcagccgaggactcatgcgcagaggctggggctagtggggcggcggatggggccacagcccccaaaacagaggaggaagaggaggaggaggagacggcggaggtggggagaggggccgaggccgaggcaggcgacttggagcagctgagcagcagcagcacgtccaccaagtccgccaagtcaggctcggaggcgtcggcctccgcctccaaggacgccctgcaggccatgatcctgagcctgccgcgctaccactgcgagaacccagccagctgcaagtcgcccacgctctccaccgacaccctgcgcaagcggctctaccgcatcggcctcaacctcttcaacataaaccccgacaagggcatccagttcctgatctcacgcggcttcatcccggacacccccatcggtgtggcccatttcctcctccagcgaaagggcctcagccgccagatgattggagagttcctgggcaacagcaagaagcagttcaaccgcgacgtgctggactgcgtggtggacgagatggacttctccagcatggagctggacgaggccctgcgcaagttccaggcacacatccgtgtgcagggggaggctcagaaggtggagcggctcattgaggccttcagccagcgctactgcatgtgcaaccccgaagtggttcagcagttccacaaccccgacacnatcttcatcctcgccttcgccatcatcctcctcaacaccgacatgtacagccccaacatcaagcctgaccggaagatgatgctggaggacttcatccgaaaccttcgaggtgtggacgatggcgctgacatccccagggagctggtggtaggcatctatgagaggatacagcagaaggagctcaagtccaatgaggaccacgtcacgtacgtcaccaaggtggagaagtccattgtgggcatgaagacagtgctgtccgtgccccaccgccgcctggtgtgctgcagccggctcttcgaggtgacggatgtgaacaagctgcagaagcaggcagcgcatcagagggaggtgttcctcttcaatgacctgctggtgattctcaaactttgcccgaagaagaagagctcctccacgtacaccttttgcaagtcagttggcctgctgggcatgcagttccagctctttgagaacgagtattactctcatggcatcacactggtgaccccgctctcgggctccgagaagaagcaggtgctgcatttctgtgccctgggctcggacgagatgcagaagttcgtggaggacctgaaggagtccattgctgaggtgacggagctggagcagatccgaatagagtgggagctggagaagcagcagggaacaaagacactctccttcaagccctgcggagcccagggggacccacagtcaaagcaaggatcgccgacagccaaaagggaagccgcgctcagggagaggccggcggagagcacggtggaggtgtcaattcacaacaggcttcaaacgtcccagcacaactccgggctgggggccgagaggggagcgccggtgccgccgccagacctgcagcctagccccccgagacagcagaccccaccactgccgccgccgccacccacgcccccgggcaccctggtgcagtgccagcaaattgtcaaggtcattgtcctggacaagccctgcctggcccgcatggagcccctgctgagccaggctctctcctgctacacctcgtcgtcctctgactcctgcggctccacacccctgggcggtcccggctctccggtcaaggtcacccaccagcctccgctgcccccgcccccacccccctacaaccaccctcaccagttctgtcccccaggctccctgctgcacgggcaccgctactccagtggctcaaggagcctggtgtagactctgccccaccaccctgctgtcctgggagggctggccactggggggcctgggctgcccctccactgctccccataccctggcacgatgcgttcctggtcactgatcaccatcattttgggaagagaatcccaatccctggcacctgggtttgcctcatccaaccatccttccctttctcagctgcaccccctctgcagatctgaagacacacctcactctcccagggccctacacagccagacccggcgaggcctcctcttcccctggccaccactttcccccattggaccatggactgaagaaaacgagctgagggtctaacgagcttgcaggctttgagtctgttagtgcccggggcctcgggccttgggcagcagcatgaggctgggccggccggcagtggagcactagacagagtggctggctcgcagcccagaactagtgcctctgtagctgcactgaggggaggagggttggtcccacccctggagggacaggtgggaggagtgaggagggggctttttctgccacccccgcccccaagcctgaaactctcaggagtctacttcttggtccccagggacattggctgtcctgaccatgtccttccccctcctcccagggcctctgcttcctcaggagctgcccagactccagaaaagcctggaaaaagggaggcgggaaggggagcactttcggctttctataggtcagtccagcagggccangggatcgcgaggtcatgtatctgcaaaatgcacctttttaaagagtgtcttagttccccagccccagctaatacccggccaatgccgtgtacgcacnggcatgtgcacgcaaacacgcatgagaaccaggccattccttccgctgtggaagcagaactggagacggggcaggaatgtgcccagcagagatggggctcagcccgaggcagggctccctcctgcatgaggctcggcccgaggcagggctccctcctgcatgagtctgtggcctccaggagggacttgggtgcagatgtaagcaagaaaaaccggggctccagaggcatgtgcatttcccctgcgcccctcagcctttaaatattccctcctcctagaaggttctagaccccccccttccagcaggggtgcccaagagtccctggaccctcaaaattgcaaaggagacccaagcggggctcgctgacctcccagggcccagcaagatgggatagccagccttaggtggccccacgagcccaagcctggggaagggcccctccccagccagacgagaggcagccaccccagagaccacaggagccgtaccatggcctgcgcagtcaggccctatcaggatgtgtctgtcccaagcctggccaggctccagtcctgtgccagtagctcactgctgtcctatgtgcaggtcccccaacacttggagcctgtggttaaggcctcctgggagaggcagtgagcatgagtcaaaggtgacatggacttgaatctccccaccccgccccgcctgcagtagccgggccaggtaggaggcaaggatcattccctgctcccagaggttccagatgacctagtttcgttttgtgtgtgtgtgtgtgtggtcacccagacgtcactgtgatatcacctagtgaatctatttctggccctgtcttcgtcggcccagtttctgtaacttgcagccaatttgccctctcccctgtggctgccagcccatctgcccctctgtgtccttgctgccctggccctcctctgttttctgtaacagatgctccagtcattgcctttcagagtggagcagatgacagatggggtgcacgcattcagacacctctgatgcccttagccagggcagggatcgtccttaaagtgaaggcctggacaggaggagtcagggacttgggaggaggtggagctgtggggatgggagtggaggaatcaaaatgagggaagctgaaaatagaatgaaaacgatgactaagaggcagggagtgcgaggtatgggggaataggaactatgagctaaatatacttatggggtgggggccgtgggggccaggggacactctcccagacagccctgacccgccagcaggaccccgtcccctgctcacacagctcttcaaacttaccaaggacaggcaggaccccgtcccctgctcacacagctcttcaagcttaccaaggacaggcagaaccccgtcccctgctcacacagctcttcaagcttaccaaggacaggcaggaccccgtcccctgctcacacagctcttcaaacttaccaagtgccctctcccctgttgagggcacagcaaccccaggccctccctcccacctcagctgaagccccaatcttccaaatcggaaccagcaagtcttagggctggcacgcatctgggcctctagctgagaacccggactctcaggcacctcagtgcccctgccccagggcagaggcccaccccgtgggttggtgcagtggctgccctgggctccacgggcagcacagggagtctgtccaggaagcagcccagccggggtcagtattccgtggagccagtcctgagctgggaggggcatttaacacccctgagggcctggggcaggacacagctggccctcctcattgtcaggggaagcaagtgcccaacatctgtaacctcccttccctgctcagtccccaggccaaggttgggacccctctccatccctgtccccagagcctagacctcagggacctaggaaaagcctcctgctccctccccacggcagcagacagggcagggcctccagcccccagagggccggtggggggtgctctcgggccttcctgctctcctaaggttgcggggacagtagagtgctgagccccagacccagtcaccccaagatggccccactctatccactctctagacctttgggaaatctgggtccctctcctgatttgatccattcggccccaactccagagtcgggaatgggagatgaaactagttttccacccacttttggacaagtcccacccctagatctgaagcaagctctaccagcagcgtgtcctggaagcctgcctgcctgcctgcccgtctgcacaggtgtcttgatccagccctgcgtcttcgagcccctgtgccaccggtccccacggcccgccaggagtctctttgtacccactaggcttccctgatgaccatctgtctgtccgtccctgtttttgctgtacataactcctgctgcaccctctccccgcacacccgtcacccatgagagagagaaacctctctagggaaaggcagggtggctgcacccagcaactaatccaaatggcaaatattttgtaacaaaatagcccagaggtattttatctgttcaattcatagagttttagagattatattgaaagatgtcacttgaaaaaaaaaaactgtgtcggcgcagcttcttttgctctcccagcggggggggctcgccttaaatcagagcatctcttggtgaggatttgagaaggacaccgatgccctcagcccctcaggcttctctcccctggccacagcagcaccattcctttaccccaggataatgcactcatgtcccatggttaggaacccctgtcttcaataaaggagactcgggtgtgggaagataaggtaagtcttctgatgggtgagcactggcagagctgggggcagggctaggaaactgatcaccgtgtgtgtgggcctgacccgct

SEQ ID NO: 289055 - DNA, 5620 bp, Homo sapiens
  misc_feature (1530)..(1530): n is a, c, g, or t
  misc_feature (3476)..(3476): n is a, c, g, or t
  misc_feature (3573)..(3573): n is a, c, g, or t
tcccccggccggcagcagcctgccctggcgacggcgctgtgcccccacgcccctgccgcctccgattacgaactctcccttgacctaaagaataaacagattgaaatgctagaacataagtacggcggtcacctggtgtcccggcgcgccgcttgcaccatccaaaccgccttccgccaataccagctcagcaagaacttcgagaaaatccgcaactcgcttctggagagccgcctgccacggcggatctccctgcgcaaggtgcggtcacccacggccgagagcctggcggccgagaaagcgctcatggagggctacggcctcgtggggctgccgctggtgcgctcgccctccctgccgcccaccttcgcaggcaccctcaccgagctggaggactccttcaccgagcaggtgcaatccctggccaagtccatcgacgacgcgctcagcacgtggagcctcaagaccatgtgctccctgcgggagagtggcgcttaccagctccaccaggccctgcaggcggccgcggggcccccaggcctggaggccgaggggcgggcgccggagagcgcgggccccgggcccggggatgacgccgcggagacccccggcctgcccccggcccacagcgggaccctcatgatggctttccgggacgtcacggtgcagatcgccaaccagaacatatccgtctcctcctccacggctctgtcggtggccaactgcctgggcgctcagacggtccaggcccccgcagagcccgcggcgggcaaggccgagcagggcgagacctctgggcgggaggccccggaagcccccgccgtgggccgggaggacgcgtcagccgaggactcatgcgcagaggctggggctagtggggcggcggatggggccacagcccccaaaacagaggaggaagaggaggaggaggagacggcggaggtggggagaggggccgaggccgaggcaggcgacttggagcagctgagcagcagcagcacgtccaccaagtccgccaagtcaggctcggaggcgtcggcctccgcctccaaggacgccctgcaggccatgatcctgagcctgccgcgctaccactgcgagaacccagccagctgcaagtcgcccacgctctccaccgacaccctgcgcaagcggctctaccgcatcggcctcaacctcttcaacataaaccccgacaagggcatccagttcctgatctcacgcggcttcatcccggacacccccatcggtgtggcccatttcctcctccagcgaaagggcctcagccgccagatgattggagagttcctgggcaacagcaagaagcagttcaaccgcgacgtgctggactgcgtggtggacgagatggacttctccagcatggagctggacgaggccctgcgcaagttccaggcacacatccgtgtgcagggggaggctcagaaggtggagcggctcattgaggccttcagccagcgctactgcatgtgcaaccccgaagtggttcagcagttccacaaccccgacacnatcttcatcctcgccttcgccatcatcctcctcaacaccgacatgtacagccccaacatcaagcctgaccggaagatgatgctggaggacttcatccgaaaccttcgaggtgtggacgatggcgctgacatccccagggagctggtggtaggcatctatgagaggatacagcagaaggagctcaagtccaatgaggaccacgtcacgtacgtcaccaaggtggagaagtccattgtgggcatgaagacagtgctgtccgtgccccaccgccgcctggtgtgctgcagccggctcttcgaggtgacggatgtgaacaagctgcagaagcaggcagcgcatcagagggaggtgttcctcttcaatgacctgctggtgattctcaaactttgcccgaagaagaagagctcctccacgtacaccttttgcaagtcagttggcctgctgggcatgcagttccagctctttgagaacgagtattactctcatggcatcacactggtgaccccgctctcgggctccgagaagaagcaggtgctgcatttctgtgccctgggctcggacgagatgcagaagttcgtggaggacctgaaggagtccattgctgaggtgacggagctggagcagatccgaatagagtgggagctggagaagcagcagggaacaaagacactctccttcaagccctgcggagcccagggggacccacagtcaaagcaaggatcgccgacagccaaaagggaagccgcgctcagggagaggccggcggagagcacggtggaggtgtcaattcacaacaggcttcaaacgtcccagcacaactccgggctgggggccgagaggggagcgccggtgccgccgccagacctgcagcctagccccccgagacagcagaccccaccactgccgccgccgccacccacgcccccgggcaccctggtgcagtgccagcaaattgtcaaggtcattgtcctggacaagccctgcctggcccgcatggagcccctgctgagccaggctctctcctgctacacctcgtcgtcctctgactcctgcggctccacacccctgggcggtcccggctctccggtcaaggtcacccaccagcctccgctgcccccgcccccacccccctacaaccaccctcaccagttctgtcccccaggctccctgctgcacgggcaccgctactccagtggctcaaggagcctggtgtagactctgccccaccaccctgctgtcctgggagggctggccactggggggcctgggctgcccctccactgctccccataccctggcacgatgcgttcctggtcactgatcaccatcattttgggaagagaatcccaatccctggcacctgggtttgcctcatccaaccatccttccctttctcagctgcaccccctctgcagatctgaagacacacctcactctcccagggccctacacagccagacccggcgaggcctcctcttcccctggccaccactttcccccattggaccatggactgaagaaaacgagctgagggtctaacgagcttgcaggctttgagtctgttagtgcccggggcctcgggccttgggcagcagcatgaggctgggccggccggcagtggagcactagacagagtggctggctcgcagcccagaactagtgcctctgtagctgcactgaggggaggagggttggtcccacccctggagggacaggtgggaggagtgaggagggggctttttctgccacccccgcccccaagcctgaaactctcaggagtctacttcttggtccccagggacattggctgtcctgaccatgtccttccccctcctcccagggcctctgcttcctcaggagctgcccagactccagaaaagcctggaaaaagggaggcgggaaggggagcactttcggctttctataggtcagtccagcagggccangggatcgcgaggtcatgtatctgcaaaatgcacctttttaaagagtgtcttagttccccagccccagctaatacccggccaatgccgtgtacgcacnggcatgtgcacgcaaacacgcatgagaaccaggccattccttccgctgtggaagcagaactggagacggggcaggaatgtgcccagcagagatggggctcagcccgaggcagggctccctcctgcatgaggctcggcccgaggcagggctccctcctgcatgagtctgtggcctccaggagggacttgggtgcagatgtaagcaagaaaaaccggggctccagaggcatgtgcatttcccctgcgcccctcagcctttaaatattccctcctcctagaaggttctagaccccccccttccagcaggggtgcccaagagtccctggaccctcaaaattgcaaaggagacccaagcggggctcgctgacctcccagggcccagcaagatgggatagccagccttaggtggccccacgagcccaagcctggggaagggcccctccccagccagacgagaggcagccaccccagagaccacaggagccgtaccatggcctgcgcagtcaggccctatcaggatgtgtctgtcccaagcctggccaggctccagtcctgtgccagtagctcactgctgtcctatgtgcaggtcccccaacacttggagcctgtggttaaggcctcctgggagaggcagtgagcatgagtcaaaggtgacatggacttgaatctccccaccccgccccgcctgcagtagccgggccaggtaggaggcaaggatcattccctgctcccagaggttccagatgacctagtttcgttttgtgtgtgtgtgtgtgtggtcacccagacgtcactgtgatatcacctagtgaatctatttctggccctgtcttcgtcggcccagtttctgtaacttgcagccaatttgccctctcccctgtggctgccagcccatctgcccctctgtgtccttgctgccctggccctcctctgttttctgtaacagatgctccagtcattgcctttcagagtggagcagatgacagatggggtgcacgcattcagacacctctgatgcccttagccagggcagggatcgtccttaaagtgaaggcctggacaggaggagtcagggacttgggaggaggtggagctgtggggatgggagtggaggaatcaaaatgagggaagctgaaaatagaatgaaaacgatgactaagaggcagggaagtagagtgctgagccccagacccagtcaccccaagatggccccactctatccactctctagacctttgggaaatctgggtccctctcctgatttgatccattcggccccaactccagagtcgggaatgggagatgaaactagttttccacccacttttggacaagtcccacccctagatctgaagcaagctctaccagcagcgtgtcctggaagcctgcctgcctgcctgcccgtctgcacaggtgtcttgatccagccctgcgtcttcgagcccctgtgccaccggtccccacggcccgccaggagtctctttgtacccactaggcttccctgatgaccatctgtctgtccgtccctgtttttgctgtacataactcctgctgcaccctctccccgcacacccgtcacccatgagagagagaaacctctctagggaaaggcagggtggctgcacccagcaactaatccaaatggcaaatattttgtaacaaaatagcccagaggtattttatctgttcaattcatagagttttagagattatattgaaagatgtcacttgaaaaaaaaaaactgtgtcggcgcagcttcttttgctctcccagcggggggggctcgccttaaatcagagcatctcttggtgaggatttgagaaggacaccgatgccctcagcccctcaggcttctctcccctggccacagcagcaccattcctttaccccaggataatgcactcatgtcccatggttaggaacccctgtcttcaataaaggagactcgggtgtgggaagataaggtaagtcttctgatgggtgagcactggcagagctgggggcagggctaggaaactgatcaccgtgtgtgtgggcctgacccgct

SEQ ID NO: 289056 - DNA, 3208 bp, Homo sapiens
  misc_feature (1530)..(1530): n is a, c, g, or t
tcccccggccggcagcagcctgccctggcgacggcgctgtgcccccacgcccctgccgcctccgattacgaactctcccttgacctaaagaataaacagattgaaatgctagaacataagtacggcggtcacctggtgtcccggcgcgccgcttgcaccatccaaaccgccttccgccaataccagctcagcaagaacttcgagaaaatccgcaactcgcttctggagagccgcctgccacggcggatctccctgcgcaaggtgcggtcacccacggccgagagcctggcggccgagaaagcgctcatggagggctacggcctcgtggggctgccgctggtgcgctcgccctccctgccgcccaccttcgcaggcaccctcaccgagctggaggactccttcaccgagcaggtgcaatccctggccaagtccatcgacgacgcgctcagcacgtggagcctcaagaccatgtgctccctgcgggagagtggcgcttaccagctccaccaggccctgcaggcggccgcggggcccccaggcctggaggccgaggggcgggcgccggagagcgcgggccccgggcccggggatgacgccgcggagacccccggcctgcccccggcccacagcgggaccctcatgatggctttccgggacgtcacggtgcagatcgccaaccagaacatatccgtctcctcctccacggctctgtcggtggccaactgcctgggcgctcagacggtccaggcccccgcagagcccgcggcgggcaaggccgagcagggcgagacctctgggcgggaggccccggaagcccccgccgtgggccgggaggacgcgtcagccgaggactcatgcgcagaggctggggctagtggggcggcggatggggccacagcccccaaaacagaggaggaagaggaggaggaggagacggcggaggtggggagaggggccgaggccgaggcaggcgacttggagcagctgagcagcagcagcacgtccaccaagtccgccaagtcaggctcggaggcgtcggcctccgcctccaaggacgccctgcaggccatgatcctgagcctgccgcgctaccactgcgagaacccagccagctgcaagtcgcccacgctctccaccgacaccctgcgcaagcggctctaccgcatcggcctcaacctcttcaacataaaccccgacaagggcatccagttcctgatctcacgcggcttcatcccggacacccccatcggtgtggcccatttcctcctccagcgaaagggcctcagccgccagatgattggagagttcctgggcaacagcaagaagcagttcaaccgcgacgtgctggactgcgtggtggacgagatggacttctccagcatggagctggacgaggccctgcgcaagttccaggcacacatccgtgtgcagggggaggctcagaaggtggagcggctcattgaggccttcagccagcgctactgcatgtgcaaccccgaagtggttcagcagttccacaaccccgacacnatcttcatcctcgccttcgccatcatcctcctcaacaccgacatgtacagccccaacatcaagcctgaccggaagatgatgctggaggacttcatccgaaaccttcgaggtgtggacgatggcgctgacatccccagggagctggtggtaggcatctatgagaggatacagcagaaggagctcaagtccaatgaggaccacgtcacgtacgtcaccaaggtggagaagtccattgtgggcatgaagacagtgctgtccgtgccccaccgccgcctggtgtgctgcagccggctcttcgaggtgacggatgtgaacaagctgcagaagcaggcagcgcatcagagggaggtgttcctcttcaatgacctgctggtgattctcaaactttgcccgaagaagaagagctcctccacgtacaccttttgcaagtcagttggcctgctgggcatgcagttccagctctttgagaacgagtattactctcatggcatcacactggtgaccccgctctcgggctccgagaagaagcaggtgctgcatttctgtgccctgggctcggacgagatgcagaagttcgtggaggacctgaaggagtccattgctgaggtgacggagctggagcagatccgaatagagtgggagctggagaagcagcagggaacaaagacactctccttcaagccctgcggagcccagggggacccacagtcaaagcaaggatcgccgacagccaaaagggaagccgcgctcagggagaggccggcggagagcacggtggaggtgtcaattcacaacaggcttcaaacgtcccagcacaactccgggctgggggccgagaggggagcgccggtgccgccgccagacctgcagcctagccccccgagacagcagaccccaccactgccgccgccgccacccacgcccccgggcaccctggtgcagtgccagcaaattgtcaaggtcattgtcctggacaagccctgcctggcccgcatggagcccctgctgagccaggctctctcctgctacacccgtctgcacaggtgtcttgatccagccctgcgtcttcgagcccctgtgccaccggtccccacggcccgccaggagtctctttgtacccactaggcttccctgatgaccatctgtctgtccgtccctgtttttgctgtacataactcctgctgcaccctctccccgcacacccgtcacccatgagagagagaaacctctctagggaaaggcagggtggctgcacccagcaactaatccaaatggcaaatattttgtaacaaaatagcccagaggtattttatctgttcaattcatagagttttagagattatattgaaagatgtcacttgaaaaaaaaaaactgtgtcggcgcagcttcttttgctctcccagcggggggggctcgccttaaatcagagcatctcttggtgaggatttgagaaggacaccgatgccctcagcccctcaggcttctctcccctggccacagcagcaccattcctttaccccaggataatgcactcatgtcccatggttaggaacccctgtcttcaataaaggagactcgggtgtgggaagataaggtaagtcttctgatgggtgagcactggcagagctgggggcagggctaggaaactgatcaccgtgtgtgtgggcctgacccgct

SEQ ID NO: 289057 - DNA, 3846 bp, Homo sapiens
  misc_feature (1530)..(1530): n is a, c, g, or t
tcccccggccggcagcagcctgccctggcgacggcgctgtgcccccacgcccctgccgcctccgattacgaactctcccttgacctaaagaataaacagattgaaatgctagaacataagtacggcggtcacctggtgtcccggcgcgccgcttgcaccatccaaaccgccttccgccaataccagctcagcaagaacttcgagaaaatccgcaactcgcttctggagagccgcctgccacggcggatctccctgcgcaaggtgcggtcacccacggccgagagcctggcggccgagaaagcgctcatggagggctacggcctcgtggggctgccgctggtgcgctcgccctccctgccgcccaccttcgcaggcaccctcaccgagctggaggactccttcaccgagcaggtgcaatccctggccaagtccatcgacgacgcgctcagcacgtggagcctcaagaccatgtgctccctgcgggagagtggcgcttaccagctccaccaggccctgcaggcggccgcggggcccccaggcctggaggccgaggggcgggcgccggagagcgcgggccccgggcccggggatgacgccgcggagacccccggcctgcccccggcccacagcgggaccctcatgatggctttccgggacgtcacggtgcagatcgccaaccagaacatatccgtctcctcctccacggctctgtcggtggccaactgcctgggcgctcagacggtccaggcccccgcagagcccgcggcgggcaaggccgagcagggcgagacctctgggcgggaggccccggaagcccccgccgtgggccgggaggacgcgtcagccgaggactcatgcgcagaggctggggctagtggggcggcggatggggccacagcccccaaaacagaggaggaagaggaggaggaggagacggcggaggtggggagaggggccgaggccgaggcaggcgacttggagcagctgagcagcagcagcacgtccaccaagtccgccaagtcaggctcggaggcgtcggcctccgcctccaaggacgccctgcaggccatgatcctgagcctgccgcgctaccactgcgagaacccagccagctgcaagtcgcccacgctctccaccgacaccctgcgcaagcggctctaccgcatcggcctcaacctcttcaacataaaccccgacaagggcatccagttcctgatctcacgcggcttcatcccggacacccccatcggtgtggcccatttcctcctccagcgaaagggcctcagccgccagatgattggagagttcctgggcaacagcaagaagcagttcaaccgcgacgtgctggactgcgtggtggacgagatggacttctccagcatggagctggacgaggccctgcgcaagttccaggcacacatccgtgtgcagggggaggctcagaaggtggagcggctcattgaggccttcagccagcgctactgcatgtgcaaccccgaagtggttcagcagttccacaaccccgacacnatcttcatcctcgccttcgccatcatcctcctcaacaccgacatgtacagccccaacatcaagcctgaccggaagatgatgctggaggacttcatccgaaaccttcgaggtgtggacgatggcgctgacatccccagggagctggtggtaggcatctatgagaggatacagcagaaggagctcaagtccaatgaggaccacgtcacgtacgtcaccaaggtggagaagtccattgtgggcatgaagacagtgctgtccgtgccccaccgccgcctggtgtgctgcagccggctcttcgaggtgacggatgtgaacaagctgcagaagcaggcagcgcatcagagggaggtgttcctcttcaatgacctgctggtgattctcaaactttgcccgaagaagaagagctcctccacgtacaccttttgcaagtcagttggcctgctgggcatgcagttccagctctttgagaacgagtattactctcatggcatcacactggtgaccccgctctcgggctccgagaagaagcaggtgctgcatttctgtgccctgggctcggacgagatgcagaagttcgtggaggacctgaaggagtccattgctgaggtgacggagctggagcagatccgaatagagtgggagctggagaagcagcagggaacaaagacactctccttcaagccctgcggagcccagggggacccacagtcaaagcaaggatcgccgacagccaaaagggaagccgcgctcagggagaggccggcggagagcacggtggaggtgtcaattcacaacaggcttcaaacgtcccagcacaactccgggctgggggccgagaggggagcgccggtgccgccgccagacctgcagcctagccccccgagacagcagaccccaccactgccgccgccgccacccacgcccccgggcaccctggtgcagtgccagcaaattgtcaaggtcattgtcctggacaagccctgcctggcccgcatggagcccctgctgagccaggctctctcctgctacacctcgtcgtcctctgactcctgcggctccacacccctgggcggtcccggctctccggtcaaggtcacccaccagcctccgctgcccccgcccccacccccctacaaccaccctcaccagttctgtcccccaggctccctgctgcacgggcaccgctactccagtggctcaaggagcctggtgtagactctgccccaccaccctgctgtcctgggagggctggccactggggggcctgggctgcccctccactgctccccataccctggcacgatgcgttcctggtcactgatcaccatcattttgggaagagaatcccaatccctggcacctgggtttgcctcatccaaccatccttccctttctcagctgcaccccctctgcagatctgaagacacacctcactctcccagggccctacacagccagacccggcgaggcctcctcttcccctggccaccactttcccccattggaccatggactgaagaaaacgagctgagggtctaacgagcttgcaggctttgagtctgttagtgcccggggcctcgggccttgggcagcagcatgaggctgggccggccggcagtggagcactagacagagtggctggctcgcagcccagaactagtgcctctgtagctgcactgaggggaggagggttggtcccacccctggagggacaggtgggaggagtgaggagggggctttttctgccacccccgcccccaagcctgaaactctcaggagtctacttcttggtccctgtttttgctgtacataactcctgctgcaccctctccccgcacacccgtcacccatgagagagagaaacctctctagggaaaggcagggtggctgcacccagcaactaatccaaatggcaaatattttgtaacaaaatagcccagaggtattttatctgttcaattcatagagttttagagattatattgaaagatgtcacttgaaaaaaaaaaactgtgtcggcgcagcttcttttgctctcccagcggggggggctcgccttaaatcagagcatctcttggtgaggatttgagaaggacaccgatgccctcagcccctcaggcttctctcccctggccacagcagcaccattcctttaccccaggataatgcactcatgtcccatggttaggaacccctgtcttcaataaaggagactcgggtgtgggaagataaggtaagtcttctgatgggtgagcactggcagagctgggggcagggctaggaaactgatcaccgtgtgtgtgggcctgacccgct

SEQ ID NO: 289058 - DNA, 2530 bp, Homo sapiens
  misc_feature (1530)..(1530): n is a, c, g, or t
tcccccggccggcagcagcctgccctggcgacggcgctgtgcccccacgcccctgccgcctccgattacgaactctcccttgacctaaagaataaacagattgaaatgctagaacataagtacggcggtcacctggtgtcccggcgcgccgcttgcaccatccaaaccgccttccgccaataccagctcagcaagaacttcgagaaaatccgcaactcgcttctggagagccgcctgccacggcggatctccctgcgcaaggtgcggtcacccacggccgagagcctggcggccgagaaagcgctcatggagggctacggcctcgtggggctgccgctggtgcgctcgccctccctgccgcccaccttcgcaggcaccctcaccgagctggaggactccttcaccgagcaggtgcaatccctggccaagtccatcgacgacgcgctcagcacgtggagcctcaagaccatgtgctccctgcgggagagtggcgcttaccagctccaccaggccctgcaggcggccgcggggcccccaggcctggaggccgaggggcgggcgccggagagcgcgggccccgggcccggggatgacgccgcggagacccccggcctgcccccggcccacagcgggaccctcatgatggctttccgggacgtcacggtgcagatcgccaaccagaacatatccgtctcctcctccacggctctgtcggtggccaactgcctgggcgctcagacggtccaggcccccgcagagcccgcggcgggcaaggccgagcagggcgagacctctgggcgggaggccccggaagcccccgccgtgggccgggaggacgcgtcagccgaggactcatgcgcagaggctggggctagtggggcggcggatggggccacagcccccaaaacagaggaggaagaggaggaggaggagacggcggaggtggggagaggggccgaggccgaggcaggcgacttggagcagctgagcagcagcagcacgtccaccaagtccgccaagtcaggctcggaggcgtcggcctccgcctccaaggacgccctgcaggccatgatcctgagcctgccgcgctaccactgcgagaacccagccagctgcaagtcgcccacgctctccaccgacaccctgcgcaagcggctctaccgcatcggcctcaacctcttcaacataaaccccgacaagggcatccagttcctgatctcacgcggcttcatcccggacacccccatcggtgtggcccatttcctcctccagcgaaagggcctcagccgccagatgattggagagttcctgggcaacagcaagaagcagttcaaccgcgacgtgctggactgcgtggtggacgagatggacttctccagcatggagctggacgaggccctgcgcaagttccaggcacacatccgtgtgcagggggaggctcagaaggtggagcggctcattgaggccttcagccagcgctactgcatgtgcaaccccgaagtggttcagcagttccacaaccccgacacnatcttcatcctcgccttcgccatcatcctcctcaacaccgacatgtacagccccaacatcaagcctgaccggaagatgatgctggaggacttcatccgaaaccttcgaggtgtggacgatggcgctgacatccccagggagctggtggtaggcatctatgagaggatacagcagaaggagctcaagtccaatgaggaccacgtcacgtacgtcaccaaggtggagaagtccattgtgggcatgaagacagtgctgtccgtgccccaccgccgcctggtgtgctgcagccggctcttcgaggtgacggatgtgaacaagctgcagaagcaggcagcgcatcagagggaggtgttcctcttcaatgacctgctggtgattctcaaactttgcccgaagaagaagagctcctccacgtacaccttttgcaagtcagttggcctgctgggcatgcagttccagctctttgagaacgagtattactctcatggcatcacactggtgaccccgctctcgggctccgagaagaagcaggtgctgcatttctgtgccctgggctcggacgagatgcagaagttcgtggaggacctgaaggagtccattgctgaggtgacggagctggagcagatccgaatagagtgggagctggagaagcagcagggaacaaagacactctccttcaagccctgcggagcccagggggacccacagtcaaagcaaggatcgccgacagccaaaagggaagccgcgctcagggagaggccggcggagagcacggtggaggtattaatcaatgcctccccagcccgactcaccattttaccaatttcaagagatacaattaaaagttactgctagcatgggtaatgccactgttccagcgcctaattaagccacgagctctttctcccctttccccagcctgctgccctccgaggccgagctcccagactaacacagtggagacggagctcacggcaccctagggccatccttcctgtgt

SEQ ID NO: 289059 - DNA, 5293 bp, Homo sapiens
ggctcgcatccccatagtgctgggttacagtgaaggtacgccccgcgctctgctctggagaggcagggtgggatagggaacgtctcgagtggcgcccgcagtcatggtggtgttcgttggccgccgcctcccggcgctcctagggctgtttaagaagaagggctctgccaaggctgagaatgacaaacatctaagtgtagggcctggccaggggccagggtctgcagtggatgagcaccaggacaacgtcttctttcccagtgggcgacccccccacctggaagagctgcacactcaggcccaggaggggctccgctccctacaacaccaagagaaacagaaactgaacaagggtggctgggaccatggagacacccagagtatccagtcctcccggacggggccggatgaagacaacatctccttctgcagtcagaccacatcctacgtggctgagagctccacagcagaggacgcgctctccatccgctcggagatgatccagcgcaaaggctccaccttccgaccccatgactcatttcccaaatctggaaagtcagggcggcgtcggcgggagcggcggagcactgtgctgggactcccgcagcatgtgcagaaggagcttggcctgaggaatgagcgtgaggcaccaggcacgccccgggctcctggtgcacgggatgccgtacgcatccccacagtggacggccgcccccgaggcacctcagggatgggggcccgggtgtccctgcaggcgctggaggcggaggcggaggctggcgctgagacagaggccatgctgcagcgccacattgaccgtgtctaccgggatgacacctttgttggccggtccacgggtacccgggccccaccattgacccggcccatgtccctagcagtgcctggattgacaggaggggcagggcctgcagagcccctgagcccggccatgtccatctccccccaggccacctacctgtcgaagttgattccacatgctgtgctgccgcctacagtggacgtggtggccctaggccgctgcagcctgcgcacactaagccgctgcagcctgcactcggccagcccagcctcagtccgctcgctggggcgcttctcctccgtctccagcccacagccccgcagccgccacccatcctcctccagtgacacctggagccactctcaatcctccgacaccattgtgtctgacggttccaccctctcctctaagggtggctctgagggccagccggagagctctacggctagcaatagcgtggtaccccctccccagggaggcagtgggaggggctctcccagtgggggcagcactgctgaggcctcagacacactcagcattcggagcagtgggcagttgtctggccggagtgtgtccctgcgtaagctgaagcggcctccaccccctccccgccggacccactccctccatcagcggggcttagcagtgcctgatgggccattagggttgccccctaagcctgagcgtaagcagcagccccagctgcctcggccacccaccactggtggctcagaaggggcgggggcagcaccctgtccacccaacccagccaacagctgggtacctggcttgtctccgggtggttcccggcgccccccacggtccccagaacggacactttcgccctccagtggatactcgagccaaagtggtactcccaccctccctcccaagggcctggcaggtccccctgcttccccaggcaaggcccagccccctaaaccagagcgtgtcacgtctcttcgctcccctggggcctccgtctcctcttccctcacgtctttatgttcctcctcctctgacccagccccctcagaccgctctgggccacagatattgacccccctgggtgacaggtttgtcatacctcctcaccccaaggtgcctgcccccttctccccacctccctccaagcccaggagccctaacccagctgcccctgctctagccgcccctgctgtggttcctgggcctgtttctaccactgacgccagtcctcagtcccctcccactccccagacaaccttgactccactgcaggagtctcctgtcatctccaaagaccagtcacccccaccttccccacccccatcttatcatccacccccaccacccactaagaagccagaggtggttgtggaggcaccatctgcctcagagactgctgaggagcccctccaagatcccaactggccccctcccccaccccctgcccctgaggagcaggacctgtccatggctgacttccccccaccagaggaggcttttttctctgtggccagccctgagcctgcaggcccttcaggctccccagagcttgtcagctccccggctgcttcgtcctcctcagctactgctttgcagattcagcccccgggtagcccagaccctcctccagctccgccagccccagctcctgctagttccgccccagggcatgtggccaagctccctcagaaggaaccggtgggctgtagcaagggtggtgggcctcccagggaggacgtaggtgcgcccctggtcacgccctcgctcctgcagatggtgcggctgcgctccgtgggtgctccaggaggggctcccaccccagcactggggccatcggccccccagaaaccactgcgaagggccctgtcagggcgggccagcccagtgcctgccccctcctcagggctccatgctgcggtccgactcaaggcctgcagcctggccgccagtgaaggcctctcaagtgctcagcccaacggaccgcctgaggcagagccacggcctccccagtcccctgcctcaacggccagtttcatcttctccaagggctctaggaagctgcagctggagcggcccgtgtcccctgagacccaggctgacctccagcggaatctggtggcagaactccggagcatctcagagcagcggccaccccaggccccaaagaagtcacctaaggctcccccacctgtggcccgcaagccgtctgtgggagtccccccacccgcctcccccagttaccctcgagctgagccccttactgctcctcccaccaatgggctccctcacacccaggacaggactaagagggagctggcggagaatggaggtgtcctgcagctggtgggcccagaggagaagatgggcctcccgggctcagactcacagaaagagctggcctgaccaccaggcacctcactggcactgctgacccatcccagaaacacaatctcagggacccgagcagctccaaggacgagaggatacagcagacacaacctaatagagagggcgcctgcagccttaacctccacggccttcgatacttatgcaagcctggtgttgctcctgtcctcagagtcatcctgcgctcatgccttttcccgaatgggttcacctctggcagttgccgcttcagtcttggccttagcctcatcttgaagtgggtagctggcgggagagggtggctgcgccccctgctggccctgaggctgcagagttgggagcaggacacctcacctgagtttcattttttttcatgtccaaaccatgcacatactatagtccagaatcaaagcacttttgaaaagtggctgcatggccatcctccagggcccaggaagttgcattccaagggcctgtttacatggcagcagaatccatccccggcagtcagcccatagcttgggaccagtctgtgccctcctgcccagtccagtttactcctcttggttcctgaaggtggccaagtcattgtgttcccacaggcttctctaggctgggggcaggtgtggggctgtggaattccaaagcacaaaaggtgcagaggggattggccttcctgtgcctcaactcaccaaccaccctcctgccttccagttctgccaggtgctccatgctggggacaagtaggagactgccagggcccaaagaaatgggtgagcagtagagtcatctcggggcacttggcagtgtcaagcacctgccccttgcctccttgaccacactggggtgggtgggcccccagcacttcagaggcaggagcctttgggctgagcaagcactgaggaggtggatggaagggagcatctggagggggggagcttccttgagcagtgggcccaggcctggccctccacacttcattctctgacctttctctctcctcatttcggtgcatgtcctttctgcagctgcctttcagcacaggtggttccactgggggcagctaacgctgagtgacaaggatgggaagccacaggtgcattttactcaagtcttctctagtcaatgaggggcacccagtgcttctagggcaggctgggtggtggtcccctaggtatcagcctctcttactgtactctccgggaatgttaacctttctattttcagcctgtgccacctgtctaggcaagctggcttccccattggcccctgtgggtccacagcagcgtggctgccccccaggccaccgcttctttcttgatcctctttccttaacagtgacttgggcttgagtctggcaaggaaccttgcttttagcttcaccaccaaggagagaggttgacatgacctccccgccccctcaccaaggctgggaacagaggggatgtggtgagagccaggttcctctggccctctccagggtgttttccactagtcactactgtcttctccttgtagctaatcaatcaatattcttcccttgcctgtgggcagtggagagtgctgctgggtgtacgctgcacctgcccactgagttggggaaagaggataatcagtgagcactgttctgctcagagctcctgatctaccccaccccctaggatccaggactgggtcaaagctgcatgaaaccaggccctggcagcaacctgggaatggctggaggtgggagagaacctgacttctctttccctctccctcctccaacattactggaactctatcctgttaggatcttctgagcttgtttccctgctgggtgggacagaggacaaaggagaagggagggtctagaagaggcagcccttctttgtcctctggggtaaatgagcttgacctagagtaaatggagagaccaaaagcctctgatttttaatttccataaaatgttagaagtatatatatacatatatatatttctttaaatttttgagtctttgatatgtctaaaaatccattccctctgccctgaagcctgagtgagacacatgaagaaaactgtgtttcatttaaagatgttaattaaatgattgaaacttg

SEQ ID NO: 289060 - DNA, 284 bp, Homo sapiens
cccttctttgtcctctggggtaaagaagggctgctcttctagaccctcccttctttgtcctctggggtaaatgagcttgacctagagtaaatggagagaccaaaagcctctgatttttaatttccataaaatgttagaagtatatatatacatatatatatttctttaaatttttgagtctttgatatgtctaaaaatccattccctctgccctgaagcctgagtgagacacatgaagaaaactgtgtttcatttaaagatgttaattaaatgattgaaacttg

SEQ ID NO: 289061 - DNA, 5438 bp, Homo sapiens
ggcggccgcccccggcatgggcaccgcgccgcagggggcctgacccgccgcccgctccgcccccgcctgccatggcggcccgcgcgccccccgccgcacctgcggccgaggagccggggaacccgggcggccccccgcgcaggaagaagtcccgctccggcgcgtccggcctccgccgcgccttcagctggctgcggggcaagcggcgcaagaagaaggcggcgggggccgagggcgccgaaccggccgccccccgggccaagaaggcggaggacaaggccaagagggccaagggcaaaggccgaggctctgccaaggctgagaatgacaaacatctaagtgtagggcctggccaggggccagggtctgcagtggatgagcaccaggacaacgtcttctttcccagtgggcgacccccccacctggaagagctgcacactcaggcccaggaggggctccgctccctacaacaccaagagaaacagaaactgaacaagggtggctgggaccatggagacacccagagtatccagtcctcccggacggggccggatgaagacaacatctccttctgcagtcagaccacatcctacgtggctgagagctccacagcagaggacgcgctctccatccgctcggagatgatccagcgcaaaggctccaccttccgaccccatgactcatttcccaaatctggaaagtcagggcggcgtcggcgggagcggcggagcactgtgctgggactcccgcagcatgtgcagaaggagcttggcctgaggaatgagcgtgaggcaccaggcacgccccgggctcctggtgcacgggatgccgtacgcatccccacagtggacggccgcccccgaggcacctcagggatgggggcccgggtgtccctgcaggcgctggaggcggaggcggaggctggcgctgagacagaggccatgctgcagcgccacattgaccgtgtctaccgggatgacacctttgttggccggtccacgggtacccgggccccaccattgacccggcccatgtccctagcagtgcctggattgacaggaggggcagggcctgcagagcccctgagcccggccatgtccatctccccccaggccacctacctgtcgaagttgattccacatgctgtgctgccgcctacagtggacgtggtggccctaggccgctgcagcctgcgcacactaagccgctgcagcctgcactcggccagcccagcctcagtccgctcgctggggcgcttctcctccgtctccagcccacagccccgcagccgccacccatcctcctccagtgacacctggagccactctcaatcctccgacaccattgtgtctgacggttccaccctctcctctaagggtggctctgagggccagccggagagctctacggctagcaatagcgtggtaccccctccccagggaggcagtgggaggggctctcccagtgggggcagcactgctgaggcctcagacacactcagcattcggagcagtgggcagttgtctggccggagtgtgtccctgcgtaagctgaagcggcctccaccccctccccgccggacccactccctccatcagcggggcttagcagtgcctgatgggccattagggttgccccctaagcctgagcgtaagcagcagccccagctgcctcggccacccaccactggtggctcagaaggggcgggggcagcaccctgtccacccaacccagccaacagctgggtacctggcttgtctccgggtggttcccggcgccccccacggtccccagaacggacactttcgccctccagtggatactcgagccaaagtggtactcccaccctccctcccaagggcctggcaggtccccctgcttccccaggcaaggcccagccccctaaaccagagcgtgtcacgtctcttcgctcccctggggcctccgtctcctcttccctcacgtctttatgttcctcctcctctgacccagccccctcagaccgctctgggccacagatattgacccccctgggtgacaggtttgtcatacctcctcaccccaaggtgcctgcccccttctccccacctccctccaagcccaggagccctaacccagctgcccctgctctagccgcccctgctgtggttcctgggcctgtttctaccactgacgccagtcctcagtcccctcccactccccagacaaccttgactccactgcaggagtctcctgtcatctccaaagaccagtcacccccaccttccccacccccatcttatcatccacccccaccacccactaagaagccagaggtggttgtggaggcaccatctgcctcagagactgctgaggagcccctccaagatcccaactggccccctcccccaccccctgcccctgaggagcaggacctgtccatggctgacttccccccaccagaggaggcttttttctctgtggccagccctgagcctgcaggcccttcaggctccccagagcttgtcagctccccggctgcttcgtcctcctcagctactgctttgcagattcagcccccgggtagcccagaccctcctccagctccgccagccccagctcctgctagttccgccccagggcatgtggccaagctccctcagaaggaaccggtgggctgtagcaagggtggtgggcctcccagggaggacgtaggtgcgcccctggtcacgccctcgctcctgcagatggtgcggctgcgctccgtgggtgctccaggaggggctcccaccccagcactggggccatcggccccccagaaaccactgcgaagggccctgtcagggcgggccagcccagtgcctgccccctcctcagggctccatgctgcggtccgactcaaggcctgcagcctggccgccagtgaaggcctctcaagtgctcagcccaacggaccgcctgaggcagagccacggcctccccagtcccctgcctcaacggccagtttcatcttctccaagggctctaggaagctgcagctggagcggcccgtgtcccctgagacccaggctgacctccagcggaatctggtggcagaactccggagcatctcagagcagcggccaccccaggccccaaagaagtcacctaaggctcccccacctgtggcccgcaagccgtctgtgggagtccccccacccgcctcccccagttaccctcgagctgagccccttactgctcctcccaccaatgggctccctcacacccaggacaggactaagagggagctggcggagaatggaggtgtcctgcagctggtgggcccagaggagaagatgggcctcccgggctcagactcacagaaagagctggcctgaccaccaggcacctcactggcactgctgacccatcccagaaacacaatctcagggacccgagcagctccaaggacgagaggatacagcagacacaacctaatagagagggcgcctgcagccttaacctccacggccttcgatacttatgcaagcctggtgttgctcctgtcctcagagtcatcctgcgctcatgccttttcccgaatgggttcacctctggcagttgccgcttcagtcttggccttagcctcatcttgaagtgggtagctggcgggagagggtggctgcgccccctgctggccctgaggctgcagagttgggagcaggacacctcacctgagtttcattttttttcatgtccaaaccatgcacatactatagtccagaatcaaagcacttttgaaaagtggctgcatggccatcctccagggcccaggaagttgcattccaagggcctgtttacatggcagcagaatccatccccggcagtcagcccatagcttgggaccagtctgtgccctcctgcccagtccagtttactcctcttggttcctgaaggtggccaagtcattgtgttcccacaggcttctctaggctgggggcaggtgtggggctgtggaattccaaagcacaaaaggtgcagaggggattggccttcctgtgcctcaactcaccaaccaccctcctgccttccagttctgccaggtgctccatgctggggacaagtaggagactgccagggcccaaagaaatgggtgagcagtagagtcatctcggggcacttggcagtgtcaagcacctgccccttgcctccttgaccacactggggtgggtgggcccccagcacttcagaggcaggagcctttgggctgagcaagcactgaggaggtggatggaagggagcatctggagggggggagcttccttgagcagtgggcccaggcctggccctccacacttcattctctgacctttctctctcctcatttcggtgcatgtcctttctgcagctgcctttcagcacaggtggttccactgggggcagctaacgctgagtgacaaggatgggaagccacaggtgcattttactcaagtcttctctagtcaatgaggggcacccagtgcttctagggcaggctgggtggtggtcccctaggtatcagcctctcttactgtactctccgggaatgttaacctttctattttcagcctgtgccacctgtctaggcaagctggcttccccattggcccctgtgggtccacagcagcgtggctgccccccaggccaccgcttctttcttgatcctctttccttaacagtgacttgggcttgagtctggcaaggaaccttgcttttagcttcaccaccaaggagagaggttgacatgacctccccgccccctcaccaaggctgggaacagaggggatgtggtgagagccaggttcctctggccctctccagggtgttttccactagtcactactgtcttctccttgtagctaatcaatcaatattcttcccttgcctgtgggcagtggagagtgctgctgggtgtacgctgcacctgcccactgagttggggaaagaggataatcagtgagcactgttctgctcagagctcctgatctaccccaccccctaggatccaggactgggtcaaagctgcatgaaaccaggccctggcagcaacctgggaatggctggaggtgggagagaacctgacttctctttccctctccctcctccaacattactggaactctatcctgttaggatcttctgagcttgtttccctgctgggtgggacagaggacaaaggagaagggagggtctagaagaggcagcccttctttgtcctctggggtaaatgagcttgacctagagtaaatggagagaccaaaagcctctgatttttaatttccataaaatgttagaagtatatatatacatatatatatttctttaaatttttgagtctttgatatgtctaaaaatccattccctctgccctgaagcctgagtgagacacatgaagaaaactgtgtttcatttaaagatgttaattaaatgattgaaacttg

SEQ ID NO: 289062 - DNA, 5333 bp, Homo sapiens
gcccgcggtgcccgcccgcgagtctcgctgcctccctcccggggctgcgggcccggcggccgggctggctgggccgcgcttgggttcccgcgccggctcccgcacccgcaatggggaactcacaccacaagaggaaggcccccagcggtccccgggtccgcagcttctggcggttcgggcggtcggcgaagcggccggcaggctctgccaaggctgagaatgacaaacatctaagtgtagggcctggccaggggccagggtctgcagtggatgagcaccaggacaacgtcttctttcccagtgggcgacccccccacctggaagagctgcacactcaggcccaggaggggctccgctccctacaacaccaagagaaacagaaactgaacaagggtggctgggaccatggagacacccagagtatccagtcctcccggacggggccggatgaagacaacatctccttctgcagtcagaccacatcctacgtggctgagagctccacagcagaggacgcgctctccatccgctcggagatgatccagcgcaaaggctccaccttccgaccccatgactcatttcccaaatctggaaagtcagggcggcgtcggcgggagcggcggagcactgtgctgggactcccgcagcatgtgcagaaggagcttggcctgaggaatgagcgtgaggcaccaggcacgccccgggctcctggtgcacgggatgccgtacgcatccccacagtggacggccgcccccgaggcacctcagggatgggggcccgggtgtccctgcaggcgctggaggcggaggcggaggctggcgctgagacagaggccatgctgcagcgccacattgaccgtgtctaccgggatgacacctttgttggccggtccacgggtacccgggccccaccattgacccggcccatgtccctagcagtgcctggattgacaggaggggcagggcctgcagagcccctgagcccggccatgtccatctccccccaggccacctacctgtcgaagttgattccacatgctgtgctgccgcctacagtggacgtggtggccctaggccgctgcagcctgcgcacactaagccgctgcagcctgcactcggccagcccagcctcagtccgctcgctggggcgcttctcctccgtctccagcccacagccccgcagccgccacccatcctcctccagtgacacctggagccactctcaatcctccgacaccattgtgtctgacggttccaccctctcctctaagggtggctctgagggccagccggagagctctacggctagcaatagcgtggtaccccctccccagggaggcagtgggaggggctctcccagtgggggcagcactgctgaggcctcagacacactcagcattcggagcagtgggcagttgtctggccggagtgtgtccctgcgtaagctgaagcggcctccaccccctccccgccggacccactccctccatcagcggggcttagcagtgcctgatgggccattagggttgccccctaagcctgagcgtaagcagcagccccagctgcctcggccacccaccactggtggctcagaaggggcgggggcagcaccctgtccacccaacccagccaacagctgggtacctggcttgtctccgggtggttcccggcgccccccacggtccccagaacggacactttcgccctccagtggatactcgagccaaagtggtactcccaccctccctcccaagggcctggcaggtccccctgcttccccaggcaaggcccagccccctaaaccagagcgtgtcacgtctcttcgctcccctggggcctccgtctcctcttccctcacgtctttatgttcctcctcctctgacccagccccctcagaccgctctgggccacagatattgacccccctgggtgacaggtttgtcatacctcctcaccccaaggtgcctgcccccttctccccacctccctccaagcccaggagccctaacccagctgcccctgctctagccgcccctgctgtggttcctgggcctgtttctaccactgacgccagtcctcagtcccctcccactccccagacaaccttgactccactgcaggagtctcctgtcatctccaaagaccagtcacccccaccttccccacccccatcttatcatccacccccaccacccactaagaagccagaggtggttgtggaggcaccatctgcctcagagactgctgaggagcccctccaagatcccaactggccccctcccccaccccctgcccctgaggagcaggacctgtccatggctgacttccccccaccagaggaggcttttttctctgtggccagccctgagcctgcaggcccttcaggctccccagagcttgtcagctccccggctgcttcgtcctcctcagctactgctttgcagattcagcccccgggtagcccagaccctcctccagctccgccagccccagctcctgctagttccgccccagggcatgtggccaagctccctcagaaggaaccggtgggctgtagcaagggtggtgggcctcccagggaggacgtaggtgcgcccctggtcacgccctcgctcctgcagatggtgcggctgcgctccgtgggtgctccaggaggggctcccaccccagcactggggccatcggccccccagaaaccactgcgaagggccctgtcagggcgggccagcccagtgcctgccccctcctcagggctccatgctgcggtccgactcaaggcctgcagcctggccgccagtgaaggcctctcaagtgctcagcccaacggaccgcctgaggcagagccacggcctccccagtcccctgcctcaacggccagtttcatcttctccaagggctctaggaagctgcagctggagcggcccgtgtcccctgagacccaggctgacctccagcggaatctggtggcagaactccggagcatctcagagcagcggccaccccaggccccaaagaagtcacctaaggctcccccacctgtggcccgcaagccgtctgtgggagtccccccacccgcctcccccagttaccctcgagctgagccccttactgctcctcccaccaatgggctccctcacacccaggacaggactaagagggagctggcggagaatggaggtgtcctgcagctggtgggcccagaggagaagatgggcctcccgggctcagactcacagaaagagctggcctgaccaccaggcacctcactggcactgctgacccatcccagaaacacaatctcagggacccgagcagctccaaggacgagaggatacagcagacacaacctaatagagagggcgcctgcagccttaacctccacggccttcgatacttatgcaagcctggtgttgctcctgtcctcagagtcatcctgcgctcatgccttttcccgaatgggttcacctctggcagttgccgcttcagtcttggccttagcctcatcttgaagtgggtagctggcgggagagggtggctgcgccccctgctggccctgaggctgcagagttgggagcaggacacctcacctgagtttcattttttttcatgtccaaaccatgcacatactatagtccagaatcaaagcacttttgaaaagtggctgcatggccatcctccagggcccaggaagttgcattccaagggcctgtttacatggcagcagaatccatccccggcagtcagcccatagcttgggaccagtctgtgccctcctgcccagtccagtttactcctcttggttcctgaaggtggccaagtcattgtgttcccacaggcttctctaggctgggggcaggtgtggggctgtggaattccaaagcacaaaaggtgcagaggggattggccttcctgtgcctcaactcaccaaccaccctcctgccttccagttctgccaggtgctccatgctggggacaagtaggagactgccagggcccaaagaaatgggtgagcagtagagtcatctcggggcacttggcagtgtcaagcacctgccccttgcctccttgaccacactggggtgggtgggcccccagcacttcagaggcaggagcctttgggctgagcaagcactgaggaggtggatggaagggagcatctggagggggggagcttccttgagcagtgggcccaggcctggccctccacacttcattctctgacctttctctctcctcatttcggtgcatgtcctttctgcagctgcctttcagcacaggtggttccactgggggcagctaacgctgagtgacaaggatgggaagccacaggtgcattttactcaagtcttctctagtcaatgaggggcacccagtgcttctagggcaggctgggtggtggtcccctaggtatcagcctctcttactgtactctccgggaatgttaacctttctattttcagcctgtgccacctgtctaggcaagctggcttccccattggcccctgtgggtccacagcagcgtggctgccccccaggccaccgcttctttcttgatcctctttccttaacagtgacttgggcttgagtctggcaaggaaccttgcttttagcttcaccaccaaggagagaggttgacatgacctccccgccccctcaccaaggctgggaacagaggggatgtggtgagagccaggttcctctggccctctccagggtgttttccactagtcactactgtcttctccttgtagctaatcaatcaatattcttcccttgcctgtgggcagtggagagtgctgctgggtgtacgctgcacctgcccactgagttggggaaagaggataatcagtgagcactgttctgctcagagctcctgatctaccccaccccctaggatccaggactgggtcaaagctgcatgaaaccaggccctggcagcaacctgggaatggctggaggtgggagagaacctgacttctctttccctctccctcctccaacattactggaactctatcctgttaggatcttctgagcttgtttccctgctgggtgggacagaggacaaaggagaagggagggtctagaagaggcagcccttctttgtcctctggggtaaatgagcttgacctagagtaaatggagagaccaaaagcctctgatttttaatttccataaaatgttagaagtatatatatacatatatatatttctttaaatttttgagtctttgatatgtctaaaaatccattccctctgccctgaagcctgagtgagacacatgaagaaaactgtgtttcatttaaagatgttaattaaatgattgaaacttg

SEQ ID NO: 289063 - DNA, 2592 bp, Homo sapiens
ggcagagccacggcctccccagtcccctgcctcaaggcctgcagcctggccgccagtgaaggcctctcaagtgctcagcccaacggaccgcctgaggcagagccacggcctccccagtcccctgcctcaacggccagtttcatcttctccaagggctctaggaagctgcagctggagcggcccgtgtcccctgagacccaggctgacctccagcggaatctggtggcagaactccggagcatctcagagcagcggccaccccaggccccaaagaagtcacctaaggctcccccacctgtggcccgcaagccgtctgtgggagtccccccacccgcctcccccagttaccctcgagctgagccccttactgctcctcccaccaatgggctccctcacacccaggacaggactaagagggagctggcggagaatggaggtgtcctgcagctggtgggcccagaggagaagatgggcctcccgggctcagactcacagaaagagctggcctgaccaccaggcacctcactggcactgctgacccatcccagaaacacaatctcagggacccgagcagctccaaggacgagaggatacagcagacacaacctaatagagagggcgcctgcagccttaacctccacggccttcgatacttatgcaagcctggtgttgctcctgtcctcagagtcatcctgcgctcatgccttttcccgaatgggttcacctctggcagttgccgcttcagtcttggccttagcctcatcttgaagtgggtagctggcgggagagggtggctgcgccccctgctggccctgaggctgcagagttgggagcaggacacctcacctgagtttcattttttttcatgtccaaaccatgcacatactatagtccagaatcaaagcacttttgaaaagtggctgcatggccatcctccagggcccaggaagttgcattccaagggcctgtttacatggcagcagaatccatccccggcagtcagcccatagcttgggaccagtctgtgccctcctgcccagtccagtttactcctcttggttcctgaaggtggccaagtcattgtgttcccacaggcttctctaggctgggggcaggtgtggggctgtggaattccaaagcacaaaaggtgcagaggggattggccttcctgtgcctcaactcaccaaccaccctcctgccttccagttctgccaggtgctccatgctggggacaagtaggagactgccagggcccaaagaaatgggtgagcagtagagtcatctcggggcacttggcagtgtcaagcacctgccccttgcctccttgaccacactggggtgggtgggcccccagcacttcagaggcaggagcctttgggctgagcaagcactgaggaggtggatggaagggagcatctggagggggggagcttccttgagcagtgggcccaggcctggccctccacacttcattctctgacctttctctctcctcatttcggtgcatgtcctttctgcagctgcctttcagcacaggtggttccactgggggcagctaacgctgagtgacaaggatgggaagccacaggtgcattttactcaagtcttctctagtcaatgaggggcacccagtgcttctagggcaggctgggtggtggtcccctaggtatcagcctctcttactgtactctccgggaatgttaacctttctattttcagcctgtgccacctgtctaggcaagctggcttccccattggcccctgtgggtccacagcagcgtggctgccccccaggccaccgcttctttcttgatcctctttccttaacagtgacttgggcttgagtctggcaaggaaccttgcttttagcttcaccaccaaggagagaggttgacatgacctccccgccccctcaccaaggctgggaacagaggggatgtggtgagagccaggttcctctggccctctccagggtgttttccactagtcactactgtcttctccttgtagctaatcaatcaatattcttcccttgcctgtgggcagtggagagtgctgctgggtgtacgctgcacctgcccactgagttggggaaagaggataatcagtgagcactgttctgctcagagctcctgatctaccccaccccctaggatccaggactgggtcaaagctgcatgaaaccaggccctggcagcaacctgggaatggctggaggtgggagagaacctgacttctctttccctctccctcctccaacattactggaactctatcctgttaggatcttctgagcttgtttccctgctgggtgggacagaggacaaaggagaagggagggtctagaagaggcagcccttctttgtcctctggggtaaatgagcttgacctagagtaaatggagagaccaaaagcctctgatttttaatttccataaaatgttagaagtatatatatacatatatatatttctttaaatttttgagtctttgatatgtctaaaaatccattccctctgccctgaagcctgagtgagacacatgaagaaaactgtgtttcatttaaagatgttaattaaatgattgaaacttg

SEQ ID NO: 289064 - DNA, 1365 bp, Homo sapiens
ttaggctagtaaggcggtgttaatcggacgagaaatgggtgagcagtagagtcatctcggggcacttggcagtgtcaagcacctgccccttgcctccttgaccacactggggtgggtgggcccccagcacttcagaggcaggagcctttgggctgagcaagcactgaggaggtggatggaagggagcatctggagggggggagcttccttgagcagtgggcccaggcctggccctccacacttcattctctgacctttctctctcctcatttcggtgcatgtcctttctgcagctgcctttcagcacaggtggttccactgggggcagctaacgctgagtgacaaggatgggaagccacaggtgcattttactcaagtcttctctagtcaatgaggggcacccagtgcttctagggcaggctgggtggtggtcccctaggtatcagcctctcttactgtactctccgggaatgttaacctttctattttcagcctgtgccacctgtctaggcaagctggcttccccattggcccctgtgggtccacagcagcgtggctgccccccaggccaccgcttctttcttgatcctctttccttaacagtgacttgggcttgagtctggcaaggaaccttgcttttagcttcaccaccaaggagagaggttgacatgacctccccgccccctcaccaaggctgggaacagaggggatgtggtgagagccaggttcctctggccctctccagggtgttttccactagtcactactgtcttctccttgtagctaatcaatcaatattcttcccttgcctgtgggcagtggagagtgctgctgggtgtacgctgcacctgcccactgagttggggaaagaggataatcagtgagcactgttctgctcagagctcctgatctaccccaccccctaggatccaggactgggtcaaagctgcatgaaaccaggccctggcagcaacctgggaatggctggaggtgggagagaacctgacttctctttccctctccctcctccaacattactggaactctatcctgttaggatcttctgagcttgtttccctgctgggtgggacagaggacaaaggagaagggagggtctagaagaggcagcccttctttgtcctctggggtaaatgagcttgacctagagtaaatggagagaccaaaagcctctgatttttaatttccataaaatgttagaagtatatatatacatatatatatttctttaaatttttgagtctttgatatgtctaaaaatccattccctctgccctgaagcctgagtgagacacatgaagaaaactgtgtttcatttaaagatgttaattaaatgattgaaacttg

SEQ ID NO: 289065 - DNA, 1317 bp, Homo sapiens
cctcctctgtgctgtaagggagcctactagggtgtagaataggaagtatgtgcctgtgttcaggcgttctggctggttgcctcctctgtgctgtcggacagcacagaggagggcactgaggaggtggatggaagggagcatctggagggggggagcttccttgagcagtgggcccaggcctggccctccacacttcattctctgacctttctctctcctcatttcggtgcatgtcctttctgcagctgcctttcagcacaggtggttccactgggggcagctaacgctgagtgacaaggatgggaagccacaggtgcattttactcaagtcttctctagtcaatgaggggcacccagtgcttctagggcaggctgggtggtggtcccctaggtatcagcctctcttactgtactctccgggaatgttaacctttctattttcagcctgtgccacctgtctaggcaagctggcttccccattggcccctgtgggtccacagcagcgtggctgccccccaggccaccgcttctttcttgatcctctttccttaacagtgacttgggcttgagtctggcaaggaaccttgcttttagcttcaccaccaaggagagaggttgacatgacctccccgccccctcaccaaggctgggaacagaggggatgtggtgagagccaggttcctctggccctctccagggtgttttccactagtcactactgtcttctccttgtagctaatcaatcaatattcttcccttgcctgtgggcagtggagagtgctgctgggtgtacgctgcacctgcccactgagttggggaaagaggataatcagtgagcactgttctgctcagagctcctgatctaccccaccccctaggatccaggactgggtcaaagctgcatgaaaccaggccctggcagcaacctgggaatggctggaggtgggagagaacctgacttctctttccctctccctcctccaacattactggaactctatcctgttaggatcttctgagcttgtttccctgctgggtgggacagaggacaaaggagaagggagggtctagaagaggcagcccttctttgtcctctggggtaaatgagcttgacctagagtaaatggagagaccaaaagcctctgatttttaatttccataaaatgttagaagtatatatatacatatatatatttctttaaatttttgagtctttgatatgtctaaaaatccattccctctgccctgaagcctgagtgagacacatgaagaaaactgtgtttcatttaaagatgttaattaaatgattgaaacttg

SEQ ID NO: 289066 - DNA, 1170 bp, Homo sapiens
ggatccccgatcgatgaaaggacctaccaggcctggccctccacacttcattctctgacctttctctctcctcatttcggtgcatgtcctttctgcagctgcctttcagcacaggtggttccactgggggcagctaacgctgagtgacaaggatgggaagccacaggtgcattttactcaagtcttctctagtcaatgaggggcacccagtgcttctagggcaggctgggtggtggtcccctaggtatcagcctctcttactgtactctccgggaatgttaacctttctattttcagcctgtgccacctgtctaggcaagctggcttccccattggcccctgtgggtccacagcagcgtggctgccccccaggccaccgcttctttcttgatcctctttccttaacagtgacttgggcttgagtctggcaaggaaccttgcttttagcttcaccaccaaggagagaggttgacatgacctccccgccccctcaccaaggctgggaacagaggggatgtggtgagagccaggttcctctggccctctccagggtgttttccactagtcactactgtcttctccttgtagctaatcaatcaatattcttcccttgcctgtgggcagtggagagtgctgctgggtgtacgctgcacctgcccactgagttggggaaagaggataatcagtgagcactgttctgctcagagctcctgatctaccccaccccctaggatccaggactgggtcaaagctgcatgaaaccaggccctggcagcaacctgggaatggctggaggtgggagagaacctgacttctctttccctctccctcctccaacattactggaactctatcctgttaggatcttctgagcttgtttccctgctgggtgggacagaggacaaaggagaagggagggtctagaagaggcagcccttctttgtcctctggggtaaatgagcttgacctagagtaaatggagagaccaaaagcctctgatttttaatttccataaaatgttagaagtatatatatacatatatatatttctttaaatttttgagtctttgatatgtctaaaaatccattccctctgccctgaagcctgagtgagacacatgaagaaaactgtgtttcatttaaagatgttaattaaatgattgaaacttg

SEQ ID NO: 289067 - DNA, 926 bp, Homo sapiens
aaataaaggcataggtagagcccgcgtgttaatcaggacgaggctattttcagcctgtgccacctgtctaggcaagctggcttccccattggcccctgtgggtccacagcagcgtggctgccccccaggccaccgcttctttcttgatcctctttccttaacagtgacttgggcttgagtctggcaaggaaccttgcttttagcttcaccaccaaggagagaggttgacatgacctccccgccccctcaccaaggctgggaacagaggggatgtggtgagagccaggttcctctggccctctccagggtgttttccactagtcactactgtcttctccttgtagctaatcaatcaatattcttcccttgcctgtgggcagtggagagtgctgctgggtgtacgctgcacctgcccactgagttggggaaagaggataatcagtgagcactgttctgctcagagctcctgatctaccccaccccctaggatccaggactgggtcaaagctgcatgaaaccaggccctggcagcaacctgggaatggctggaggtgggagagaacctgacttctctttccctctccctcctccaacattactggaactctatcctgttaggatcttctgagcttgtttccctgctgggtgggacagaggacaaaggagaagggagggtctagaagaggcagcccttctttgtcctctggggtaaatgagcttgacctagagtaaatggagagaccaaaagcctctgatttttaatttccataaaatgttagaagtatatatatacatatatatatttctttaaatttttgagtctttgatatgtctaaaaatccattccctctgccctgaagcctgagtgagacacatgaagaaaactgtgtttcatttaaagatgttaattaaatgattgaaacttg

SEQ ID NO: 289068 - DNA, 5186 bp, Homo sapiens
ggcggccgcccccggcatgggcaccgcgccgcagggggcctgacccgccgcccgctccgcccccgcctgccatggcggcccgcgcgccccccgccgcacctgcggccgaggagccggggaacccgggcggccccccgcgcaggaagaagtcccgctccggcgcgtccggcctccgccgcgccttcagctggctgcggggcaagcggcgcaagaagaaggcggcgggggccgagggcgccgaaccggccgccccccgggccaagaaggcggaggacaaggccaagagggccaagggcaaaggccgaggctctgccaaggctgagaatgacaaacatctaagtgtagggcctggccaggggccagggtctgcagtggatgagcaccaggacaacgtcttctttcccagtgggcgacccccccacctggaagagctgcacactcaggcccaggaggggctccgctccctacaacaccaagagaaacagaaactgaacaagggtggctgggaccatggagacacccagagtatccagtcctcccggacggggccggatgaagacaacatctccttctgcagtcagaccacatcctacgtggctgagagctccacagcagaggacgcgctctccatccgctcggagatgatccagcgcaaaggctccaccttccgaccccatgactcatttcccaaatctggaaagtcagggcggcgtcggcgggagcggcggagcactgtgctgggactcccgcagcatgtgcagaaggagcttggcctgaggaatgagcgtgaggcaccaggcacgccccgggctcctggtgcacgggatgccgtacgcatccccacagtggacggccgcccccgaggcacctcagggatgggggcccgggtgtccctgcaggcgctggaggcggaggcggaggctggcgctgagacagaggccatgctgcagcgccacattgaccgtgtctaccgggatgacacctttgttggccggtccacgggtacccgggccccaccattgacccggcccatgtccctagcagtgcctggattgacaggaggggcagggcctgcagagcccctgagcccggccatgtccatctccccccaggccacctacctgtcgaagttgattccacatgctgtgctgccgcctacagtggacgtggtggccctaggccgctgcagcctgcgcacactaagccgctgcagcctgcactcggccagcccagcctcagtccgctcgctggggcgcttctcctccgtctccagcccacagccccgcagccgccacccatcctcctccagtgacacctggagccactctcaatcctccgacaccattgtgtctgacggttccaccctctcctctaagggtggctctgagggccagccggagagctctacggctagcaatagcgtggtaccccctccccagggaggcagtgggaggggctctcccagtgggggcagcactgctgaggcctcagacacactcagcattcggagcagtgggcagttgtctggccggagtgtgtccctgcgtaagctgaagcggcctccaccccctccccgccggacccactccctccatcagcggggcttagcagtgcctgatgggccattagggttgccccctaagcctgagcgtaagcagcagccccagctgcctcggccacccaccactggtggctcagaaggggcgggggcagcaccctgtccacccaacccagccaacagctgggtacctggcttgtctccgggtggttcccggcgccccccacggtccccagaacggacactttcgccctccagtggatactcgagccaaagtggtactcccaccctccctcccaagggcctggcaggtccccctgcttccccaggcaaggcccagccccctaaaccagagcgtgtcacgtctcttcgctcccctggggcctccgtctcctcttccctcacgtctttatgttcctcctcctctgacccagccccctcagaccgctctgggccacagatattgacccccctgggtgacaggtttgtcatacctcctcaccccaaggtgcctgcccccttctccccacctccctccaagcccaggagccctaacccagctgcccctgctctagccgcccctgctgtggttcctgggcctgtttctaccactgacgccagtcctcagtcccctcccactccccagacaaccttgactccactgcaggagtctcctgtcatctccaaagaccagtcacccccaccttccccacccccatcttatcatccacccccaccacccactaagaagccagaggtggttgtggaggcaccatctgcctcagagactgctgaggagcccctccaagatcccaactggccccctcccccaccccctgcccctgaggagcaggacctgtccatggctgacttccccccaccagaggaggcttttttctctgtggccagccctgagcctgcaggcccttcaggctccccagagcttgtcagctccccggctgcttcgtcctcctcagctactgctttgcagattcagcccccgggtagcccagaccctcctccagctccgccagccccagctcctgctagttccgccccagggcatgtggccaagctccctcagaaggaaccggtgggctgtagcaagggtggtgggcctcccagggaggacgtaggtgcgcccctggtcacgccctcgctcctgcagatggtgcggctgcgctccgtgggtgctccaggaggggctcccaccccagcactggggccatcggccccccagaaaccactgcgaagggccctgtcagggcgggccagcccagtgcctgccccctcctcagggctccatgctgcggtccgactcaaggcctgcagcctggccgccagtgaaggcctctcaagtgctcagcccaacggaccgcctgaggcagagccacggcctccccagtcccctgcctcaacggccagtttcatcttctccaagggctctaggaagctgcagctggagcggcccgtgtcccctgagacccaggctgacctccagcggaatctggtggcagaactccggagcatctcagagcagcggccaccccaggccccaaagaagtcacctaaggctcccccacctgtggcccgcaagccgtctgtgggagtccccccacccgcctcccccagttaccctcgagctgagccccttactgctcctcccaccaatgggctccctcacacccaggacaggactaagagggagctggcggagaatggaggtgtcctgcagctggtgggcccagaggagaagatgggcctcccgggctcagactcacagaaagagctggcctgaccaccaggcacctcactggcactgctgacccatcccagaaacacaatctcagggacccgagcagctccaaggacgagaggatacagcagacacaacctaatagagagggcgcctgcagccttaacctccacggccttcgatacttatgcaagcctggtgttgctcctgtcctcagagtcatcctgcgctcatgccttttcccgaatgggttcacctctggcagttgccgcttcagtcttggccttagcctcatcttgaagtgggtagctggcgggagagggtggctgcgccccctgctggccctgaggctgcagagttgggagcaggacacctcacctgagtttcattttttttcatgtccaaaccatgcacatactatagtccagaatcaaagcacttttgaaaagtggctgcatggccatcctccagggcccaggaagttgcattccaagggcctgtttacatggcagcagaatccatccccggcagtcagcccatagcttgggaccagtctgtgccctcctgcccagtccagtttactcctcttggttcctgaaggtggccaagtcattgtgttcccacaggcttctctaggctgggggcaggtgtggggctgtggaattccaaagcacaaaaggtgcagaggggattggccttcctgtgcctcaactcaccaaccaccctcctgccttccagttctgccaggtgctccatgctggggacaagtaggagactgccagggcccaaagaaatgggtgagcagtagagtcatctcggggcacttggcagtgtcaagcacctgccccttgcctccttgaccacactggggtgggtgggcccccagcacttcagaggcaggagcctttgggctgagcaagcactgaggaggtggatggaagggagcatctggagggggggagcttccttgagcagtgggcccaggcctggccctccacacttcattctctgacctttctctctcctcatttcggtgcatgtcctttctgcagctgcctttcagcacaggtggttccactgggggcagctaacgctgagtgacaaggatgggaagccacaggtgcattttactcaagtcttctctagtcaatgaggggcacccagtgcttctagggcaggctgggtggtggtcccctaggtatcagcctctcttactgtactctccgggaatgttaacctttctattttcagcctgtgccacctgtctaggcaagctggcttccccattggcccctgtgggtccacagcagcgtggctgccccccaggccaccgcttctttcttgatcctctttccttaacagtgacttgggcttgagtctggcaaggaaccttgcttttagcttcaccaccaaggagagaggttgacatgacctccccgccccctcaccaaggctgggaacagaggggatgtggtgagagccaggttcctctggccctctccagggtgttttccactagtcactactgtcttctccttgtagctaatcaatcaatattcttcccttgcctgtgggcagtggagagtgctgctgggtgtacgctgcacctgcccactgagttggggaaagaggataatcagtgagcactgttctgctcagagctcctgatctaccccaccccctaggatccaggactgggtcaaagctgcatgaaaccaggccctggcagcaacctgggaatggctggaggtgggagagaacctgacttctctttccctctccctcctccaacattactggaactctatcctgttaggatcttctgagcttgtttcctgcgacctatgaagggatcctctaggtcacctcgca

SEQ ID NO: 289069 - DNA, 4530 bp, Homo sapiens
ggcggccgcccccggcatgggcaccgcgccgcagggggcctgacccgccgcccgctccgcccccgcctgccatggcggcccgcgcgccccccgccgcacctgcggccgaggagccggggaacccgggcggccccccgcgcaggaagaagtcccgctccggcgcgtccggcctccgccgcgccttcagctggctgcggggcaagcggcgcaagaagaaggcggcgggggccgagggcgccgaaccggccgccccccgggccaagaaggcggaggacaaggccaagagggccaagggcaaaggccgaggctctgccaaggctgagaatgacaaacatctaagtgtagggcctggccaggggccagggtctgcagtggatgagcaccaggacaacgtcttctttcccagtgggcgacccccccacctggaagagctgcacactcaggcccaggaggggctccgctccctacaacaccaagagaaacagaaactgaacaagggtggctgggaccatggagacacccagagtatccagtcctcccggacggggccggatgaagacaacatctccttctgcagtcagaccacatcctacgtggctgagagctccacagcagaggacgcgctctccatccgctcggagatgatccagcgcaaaggctccaccttccgaccccatgactcatttcccaaatctggaaagtcagggcggcgtcggcgggagcggcggagcactgtgctgggactcccgcagcatgtgcagaaggagcttggcctgaggaatgagcgtgaggcaccaggcacgccccgggctcctggtgcacgggatgccgtacgcatccccacagtggacggccgcccccgaggcacctcagggatgggggcccgggtgtccctgcaggcgctggaggcggaggcggaggctggcgctgagacagaggccatgctgcagcgccacattgaccgtgtctaccgggatgacacctttgttggccggtccacgggtacccgggccccaccattgacccggcccatgtccctagcagtgcctggattgacaggaggggcagggcctgcagagcccctgagcccggccatgtccatctccccccaggccacctacctgtcgaagttgattccacatgctgtgctgccgcctacagtggacgtggtggccctaggccgctgcagcctgcgcacactaagccgctgcagcctgcactcggccagcccagcctcagtccgctcgctggggcgcttctcctccgtctccagcccacagccccgcagccgccacccatcctcctccagtgacacctggagccactctcaatcctccgacaccattgtgtctgacggttccaccctctcctctaagggtggctctgagggccagccggagagctctacggctagcaatagcgtggtaccccctccccagggaggcagtgggaggggctctcccagtgggggcagcactgctgaggcctcagacacactcagcattcggagcagtgggcagttgtctggccggagtgtgtccctgcgtaagctgaagcggcctccaccccctccccgccggacccactccctccatcagcggggcttagcagtgcctgatgggccattagggttgccccctaagcctgagcgtaagcagcagccccagctgcctcggccacccaccactggtggctcagaaggggcgggggcagcaccctgtccacccaacccagccaacagctgggtacctggcttgtctccgggtggttcccggcgccccccacggtccccagaacggacactttcgccctccagtggatactcgagccaaagtggtactcccaccctccctcccaagggcctggcaggtccccctgcttccccaggcaaggcccagccccctaaaccagagcgtgtcacgtctcttcgctcccctggggcctccgtctcctcttccctcacgtctttatgttcctcctcctctgacccagccccctcagaccgctctgggccacagatattgacccccctgggtgacaggtttgtcatacctcctcaccccaaggtgcctgcccccttctccccacctccctccaagcccaggagccctaacccagctgcccctgctctagccgcccctgctgtggttcctgggcctgtttctaccactgacgccagtcctcagtcccctcccactccccagacaaccttgactccactgcaggagtctcctgtcatctccaaagaccagtcacccccaccttccccacccccatcttatcatccacccccaccacccactaagaagccagaggtggttgtggaggcaccatctgcctcagagactgctgaggagcccctccaagatcccaactggccccctcccccaccccctgcccctgaggagcaggacctgtccatggctgacttccccccaccagaggaggcttttttctctgtggccagccctgagcctgcaggcccttcaggctccccagagcttgtcagctccccggctgcttcgtcctcctcagctactgctttgcagattcagcccccgggtagcccagaccctcctccagctccgccagccccagctcctgctagttccgccccagggcatgtggccaagctccctcagaaggaaccggtgggctgtagcaagggtggtgggcctcccagggaggacgtaggtgcgcccctggtcacgccctcgctcctgcagatggtgcggctgcgctccgtgggtgctccaggaggggctcccaccccagcactggggccatcggccccccagaaaccactgcgaagggccctgtcagggcgggccagcccagtgcctgccccctcctcagggctccatgctgcggtccgactcaaggcctgcagcctggccgccagtgaaggcctctcaagtgctcagcccaacggaccgcctgaggcagagccacggcctccccagtcccctgcctcaacggccagtttcatcttctccaagggctctaggaagctgcagctggagcggcccgtgtcccctgagacccaggctgacctccagcggaatctggtggcagaactccggagcatctcagagcagcggccaccccaggccccaaagaagtcacctaaggctcccccacctgtggcccgcaagccgtctgtgggagtccccccacccgcctcccccagttaccctcgagctgagccccttactgctcctcccaccaatgggctccctcacacccaggacaggactaagagggagctggcggagaatggaggtgtcctgcagctggtgggcccagaggagaagatgggcctcccgggctcagactcacagaaagagctggcctgaccaccaggcacctcactggcactgctgacccatcccagaaacacaatctcagggacccgagcagctccaaggacgagaggatacagcagacacaacctaatagagagggcgcctgcagccttaacctccacggccttcgatacttatgcaagcctggtgttgctcctgtcctcagagtcatcctgcgctcatgccttttcccgaatgggttcacctctggcagttgccgcttcagtcttggccttagcctcatcttgaagtgggtagctggcgggagagggtggctgcgccccctgctggccctgaggctgcagagttgggagcaggacacctcacctgagtttcattttttttcatgtccaaaccatgcacatactatagtccagaatcaaagcacttttgaaaagtggctgcatggccatcctccagggcccaggaagttgcattccaagggcctgtttacatggcagcagaatccatccccggcagtcagcccatagcttgggaccagtctgtgccctcctgcccagtccagtttactcctcttggttcctgaaggtggccaagtcattgtgttcccacaggcttctctaggctgggggcaggtgtggggctgtggaattccaaagcacaaaaggtgcagaggggattggccttcctgtgcctcaactcaccaaccaccctcctgccttccagttctgccaggtgctccatgctggggacaagtaggagactgccagggcccaaagaaatgggtgagcagtagagtcatctcggggcacttggcagtgtcaagcacctgccccttgcctccttgaccacactggggtgggtgggcccccagcacttcagaggcaggagcctttgggctgagcaagcactgaggaggtggatggaagggagcatctggagggggggagcttccttgagcagtgggcccaggcctggccctccacacttcattctctgacctttctctctcctcttgtgctgtcagcacagaggaggcctaaaagcggccaccaattaagaaagcgttcaagctcaacacccactaccgataaaaatcccaaacatataactgaactcctcacacccaattggaccaatctatcaccctatagaagaactaatgttagtataagtaacatgaaacattctcgggtcctctgag

SEQ ID NO: 289070 - DNA, 315 bp, Homo sapiens
aaatcaaagcggtaagaaggttgggtgagggtatgctttgttgggctcctagtgccagaaccaagccaggaggccccttgctaagtgtctcttatttttctcccccagactcacagaaagagctggcctgaccaccaggcacctcactggcactgctgacccatcccagaaacacaatctcagggacccgagcagctccaaggacgagaggatacagcagacacaacctaatagagagggcgcctgcagccttaacctccacggccttcgatacttatgcaagcctggtgttgctcctgtcctcagagtcatcct

SEQ ID NO: 289071 - DNA, 184 bp, Homo sapiens
caggatggctttagccaccggcggagtctcccctccagcctcggggtggatggttcccatggccgcatctgcctgactcagggatcaaggccacttttccctgaaatcatctccccagggcctttggagcgctcgttcccaccgcaattaccccgctctcgggggaatcctgctgacagggctg

SEQ ID NO: 289072 - DNA, 379 bp, Homo sapiens
acagggcagcggagatccggtaaggagggtctcagccattcagtgtgggcgctgccaagtcgggggccaagacccagacgcatcattctgtgacacggccctggtggcccatctcagaagcgaaactcatggaaacatgcaagaggcttcggatgttgtggaatccagtcatatgccctaaagcatacaaaatatctgttaggggctcagaatagcacagttatgatacaaaaatggattttctctctcttttaataatgttaagaagacatcacatacctgactccaccggtgtcccagaaacggtttttaagtaacctttcctgttgaagggtagcaagtattcagaaaagtgtacaggttggtcttcttgaagcaa

SEQ ID NO: 289073 - DNA, 341 bp, Homo sapiens
gttgcaggcaaattaaggtttgggcagttacgttctgtgagcctgacttatccgattcatatatttttagggtgatgtttgccttggaaaaattatccagatatttgccgtatcttctttttaaggtaaggaaacaagtgggagaagatgccaggataacgcagctggaagcgacagtgctgtgttagaacccaggcctatcagactctaggatccagcctcgaccactccctgatacactacatggcttcgttgtacttacttggcagaggtatgggtttttggtggatttgtctgcaagaaagaatttcagataattaaaggacaaagcacaaaatgag

SEQ ID NO: 289074 - DNA, 632 bp, Homo sapiens
gttgcaggcaaattaaggtttgggcagttacgttctgtgagcctgacttatccgattcatatatttttagggtgatgtttgccttggaaaaattatccagatatttgccgtatcttctttttaaggtaccttttgtagacatattttgtgatctttaaaatatattttgacttaatttaaatcggtattatttgtttagaaccaaacactatagctggtgcttcccatatgttgttttacttgatcttattattttgaaaacagctgtattgtttttgtaaaaaaaaaaaaagttaaaaaaggatgcatgatcagtaaaatattaaatcgctactaaaaaaagtaaaaattgcctcaaatatatttacttttcaaaacaactctgtgaaataaacattcttggccccattttacaggtaaggaaacaagtgggagaagatgccaggataacgcagctggaagcgacagtgctgtgttagaacccaggcctatcagactctaggatccagcctcgaccactccctgatacactacatggcttcgttgtacttacttggcagaggtatgggtttttggtggatttgtctgcaagaaagaatttcagataattaaaggacaaagcacaaaatgag

SEQ ID NO: 289075 - DNA, 286 bp, Homo sapiens
cttttcaaggcttcctgatccctgtgcataataagtttacttcactgcttacaaacactgagaagtcaccagatctttctcagtatggatcaaatcagtcatctgacctagaaggggaagaaggttatcaaatactcatatccttcaacacaagtatgttaagaataagaatgattgagactgtttcattctatgagacaatttaactggcatgaatcagatatgctggagactatcttttcttcctttttaccagataaaccaaaataaagccaaaaacttttct

SEQ ID NO: 289076 - DNA, 274 bp, Homo sapiens
ggtagagctggtcattgggcaacagagtctgcttgtctgaagctgcacaaaaaagaaacagaatccacacaagtcccccaggattcctggggaagcccatgtagtctaactaccaggaagtatctggaacagaaggaagactagatactcttcatgctccactgcgctccagttctcactgctgctcaccttatgatcacctctgtctccccaaccccttcattcaactcagtgctgaattgcttgaatccatggagcccacccaaaggtaaac

SEQ ID NO: 289077 - DNA, 4239 bp, Homo sapiens
attcggctcgagttcacctggtgctgctttgacttcaggctcttccttctgcccagctccgtcccacccagcagcccgcagagaaaggaggcagctggcaccacactgggctttggagacactgcggggactgtggaccccaccctgctgcacggagctcctgcaaaagcaaacctgagaaccttgggtcctcccagcgcccagccatgggggaactgtgccgcagggactccgcactcacggcactggacgaggagacactgtgggagatgatggagagccaccgccacaggatcgtacgctgcatctgccccagccgcctcaccccctacctgcgccaggccaaggtgctgtgccagctggacgaggaggaggtgctgcacagcccccggctcaccaacagcgccatgcgggccgggcacttgctggatttgctgaagactcgagggaagaacggggccatcgccttcctggagagcctgaagttccacaaccctgacgtctacaccctggtcaccgggctgcagcctgatgttgacttcagtaactttagcggtctcatggagacatccaagctgaccgagtgcctggctggggccatcggcagcctgcaggaggagctgaaccaggaaaaggggcagaaggaggtgctgctgcggcggtgccagcagctgcaggagcacctgggcctggccgagacccgtgccgagggcctgcaccagctggaggctgaccacagccgcatgaagcgtgaggttagcgcacacttccatgaggtgctgaggctgaaggacgagatgctcagcctctcgctgcactatagcaatgcgctgcaggagaaggagctggccgcctcacgctgccgcagcctgcaggaggagctgtatctactgaagcaggagctgcagcgagccaacatggtttcctcctgtgagctggaattgcaagagcagtccctgaggacagccagcgaccaggagtccggggatgaggagctgaaccgcctgaaggaggagaatgagaaactgcgctcgctgactttcagcctggcggagaaggacattctggagcagagcctggacgaggcgcgggggagccgacaggagctggtggagcgcatccactcgctgcgggagcgggccgtggctgccgagaggcagcgagagcagtactgggaagagaaggaacagaccctgctgcagttccagaagagtaagatggcctgccaactctacagggagaaggtgaatgcgctgcaggcccaggtgtgcgagctgcagaaggagcgagaccaggcgtactccgcgagggacagtgctcagagggagatttcccagagcctggtggagaaggactccctccgcaggcaggtgttcgagctgacggaccaggtctgcgagctgcgcacacagcttcgccagctgcaggcagagcctccgggtgtgctcaagcaggaagccaggaccagggagccctgtccacgggagaagcagcggctggtgcggatgcatgccatctgccccagagacgacagcgactgcagcctcgtcagctccacagagtctcagctcttgtcggacctgagtgccacgtccagccgcgagctggtggacagcttccgctccagcagccccgcgccccccagccagcagtccctgtacaagcgggtggccgaggacttcggggaagaaccctggtctttcagcagctgcctggagatcccggagggagacccgggagccctgccgggagctaaggcaggcgacccacacctggattatgagctcctagacacggcagaccttccgcagctggaaagcagcctgcagccagtctcccctggaaggcttgatgtctcggagagcggcgtcctcatgcggcggaggccagcccgcaggatcctgagccaggtcaccatgctggcgttccagggggatgcattgctggagcagatcagcgtcatcggcgggaacctcacgggcatcttcatccaccgggtcaccccgggctcggcggcggaccagatggccttgcgcccgggcacccagattgtgatggttgattacgaagcctcagagcccttgttcaaggcagtcctggaggacacgaccctggaggaggccgtggggcttctcaggagggtggacggcttctgctgcctgtctgtgaaggtcaacacggacggttataagaggctactccaggacctggaggccaaagtggcgacctcgggggactcattctacatccgggtcaacctggccatggagggcagggccaaaggggagctgcaggtgcattgcaacgaggtcctgcacgtcaccgacaccatgttccagggctgcggctgctggcatgcccaccgcgtgaactcttacaccatgaaggatactgccgcgcacggcaccatccccaactactccagggctcagcagcagctcatagccctcatccaggacatgactcagcagtgcaccgtgacccgcaagccatcttctgggggaccacagaagctggtccgcatcgtcagtatggacaaagccaaggccagccctctgcgtttgtcctttgacaggggccagttggaccccagcaggatggagggctccagcacgtgcttctgggccgagagctgcctcaccctggtgccctataccctggtgtggccccatcgacccgcccggccccggcctgtgctcctcgtgcccagggcggttgggaagatcctgagcgagaaactgtgcctcctccaagggtttaagaagtgcctggcagagtacttgagccaggaggagtatgaggcctggagccagagaggggacatcatccaggagggagaggtgtccgggggccgctgctgggtgacccgccatgctgtggagtccctcatggaaaagaacacccatgccctcctggacgtccagctggacagtgtctgcaccctgcacaggatggacatcttccccatcgtcatccacgtctctgtcaacgagaagatggcaaagaagctcaagaagggcctacagcggttgggcacctcagaggagcagctcctggaggctgcgaggcaggaggagggagacctggaccgggcgccctgtctatacagcagcctggctcctgacggctggagcgacctggacggcctgctcagctgtgtccgccaggccatcgccgacgagcagaagaaggtggtgtggacggagcagagcccccgatgatgcaccgtgccccttcccgggactgtgggggcttctgtgtgcctgttaatgcagtcctgttcctcagcccaggccctcttggcacagctgtgggctccttggcacatgaggccggctctccccactggctggggtctaaccttgaaccctcaccacgtgcaggtcacacacagtgaagccacttgtaactgcacacttttctgtggaaacatcttcaccctttaccaggcttggcatggtctgaactggaaaccctgagaatgtttctgcagtaggacaggagggacatcttcccatgccttccctagaaccggaggccccggacttctctggaaaaccgcctgtctgcaggcccgattcaaatctatgggggctgcacttcccttttacattttgatgtgtcaaaggcttttggagtgaccaaaagcacagaggcagcgggtggggcgcctgggtggtccccaaggtcgctgccacccttgcccggggcagaggcataagcccacatatgctgtgacgctggccaccttttctcagcttctgaggctgcgatgcctcaggaactccagtttacagagaccagtgtgtttacttgtaaataaagcctctgggtggtggagacggtactttcagtgggtctgtgccccgtggcccctgtgcctgttcggtgggggtgtcccagagaagcctggcaccagtacccccgtacaaggcccagcggactctgccttcccctgacctggctttgcaccccagcccttcttgggccaaacatctttactccaccttcagggctcggggaggacccaggtccgccagcacctggccttgcccctgcctcctggggctgttgcagactgaatgtcattttgacagcagtgtccaagaatcaggaagctgttctagaattcaggttggtatcatcataaatgagttcagaaaaagaacttctgtatattttactaaaataaaaagcttttacaatagctggcctgtggcctcctccagcccaccccag

SEQ ID NO: 289078 - DNA, 1766 bp, Homo sapiens
tctctgaatgctgagttctgccttaaaacagcacgggtcatgctagatgaaagggatctctgttttatactctcatctcttcgctattgccgtgggatgaaagacagcagaaggaaggcgtctaagttcagaacaaagtgagcaagaccagctggctgctgttggtagcagaggcacagccagcctgtcatggcactggggggccgaggtgagctgtgccccctcctcctgggcttgtgaccctctgccccccatgggagtttcactctggctcctaggctggaatgcggtggcaccatctcagctctctgcaacctccacttcccaggttcaagcgattctcctgcctcaccctcctgagtagctgggactacaggcgagcaccaccacagccggctaatttttctatttctagtagaaatggggtttcaccatgttggcaggctggtctcgaactctgacctcaagtgatctgcctgcctcagcctctgaaagtgctggattgcaggcgtgagccaccgcaccaggcctaaacagatttctttacaatctaccaccatgaacagcaagcattagcattgctccgtcccacccagcagcccgcagagaaaggaggcagctggcaccacactgggctttggagacactgcggggactgtggaccccaccctgctgcacggagctcctgcaaaagcaaacctgagaaccttgcatacagatccctgcaagaggcatctgtctccagtggtccagcctctccttccaaatgaaaagaatcaagtcacaggaattcatgggtctgtaaggaatcgctcccatctgtgcccaggagattaacaaaggcggtggctgcagctctgtgagcagtggagaaaaattaggcacaaccttgaaccctcaccacgtgcaggtcacacacagtgaagccacttgtaactgcacacttttctgtggaaacatcttcaccctttaccaggcttggcatggtctgaactggaaaccctgagaatgtttctgcagtaggacaggagggacatcttcccatgccttccctagaaccggaggccccggacttctctggaaaaccgcctgtctgcaggcccgattcaaatctatgggggctgcacttcccttttacattttgatgtgtcaaaggcttttggagtgaccaaaagcacagaggcagcgggtggggcgcctgggtggtccccaaggtcgctgccacccttgcccggggcagaggcataagcccacatatgctgtgacgctggccaccttttctcagcttctgaggctgcgatgcctcaggaactccagtttacagagaccagtgtgtttacttgtaaataaagcctctgggtggtggagacggtactttcagtgggtctgtgccccgtggcccctgtgcctgttcggtgggggtgtcccagagaagcctggcaccagtacccccgtacaaggcccagcggactctgccttcccctgacctggctttgcaccccagcccttcttgggccaaacatctttactccaccttcagggctcggggaggacccaggtccgccagcacctggccttgcccctgcctcctggggctgttgcagactgaatgtcattttgacagcagtgtccaagaatcaggaagctgttctagaattcaggttggtatcatcataaatgagttcagaaaaagaacttctgtatattttactaaaataaaaagcttttacaatagctggcctgtggcctcctccagcccaccccag

SEQ ID NO: 289079 - DNA, 1632 bp, Homo sapiens
  misc_feature (1540)..(1540): n is a, c, g, or t
gtccagaggaaggaggccagcaggacctggtgggatagtccctggaaggccagggccctgcacacagactgcaagtcaacacaggagctttgctgtctgaacagccccggtcccgcgttcccagctgtatctactgaagcaggagctgcagcgagccaacatggtttcctcctgtgagctggaattgcaagagcagtccctgaggacagccagcgaccaggagtccggggatgaggagctgaaccgcctgaaggaggagaatgagaaactgcgctcgctgactttcagcctggcggagaaggacattctggagcagagcctggacgaggcgcgggggagccgacaggagctggtggagcgcatccactcgctgcgggagcgggccgtggctgccgagaggcagcgagagcagtactgggaagagaaggaacagaccctgctgcagttccagaagagtaagatggcctgccaactctacagggagaaggtgaatgcgctgcaggcccaggtgtgcgagctgcagaaggagcgagaccaggcgtactccgcgagggacagtgctcagagggagatttcccagagcctggtggagaaggactccctccgcaggcaggtgttcgagctgacggaccaggtctgcgagctgcgcacacagcttcgccagctgcaggcagagcctccgggtgtgctcaagcaggaagccaggaccagggagccctgtccacgggagaagcagcggctggtgcggatgcatgccatctgccccagagacgacagcgactgcagcctcgtcagctccacagagtctcagctcttgtcggacctgagtgccacgtccagccgcgagctggtggacagcttccgctccagcagccccgcgccccccagccagcagtccctgtacaagcgggtggccgaggacttcggggaagaaccctggtctttcagcagctgcctggagatcccggagggagacccgggagccctgccgggagctaaggcaggcgacccacacctggattatgagctcctagacacggcagaccttccgcagctggaaagcagcctgcagccagtctcccctggaaggcttgatgtctcggagagcggcgtcctcatgcggcggaggccagcccgcaggatcctgagccaggtcaccatgctggcgttccagggggatgcattgctggagcagatcagcgtcatcggcgggaacctcacgggcatcttcatccaccgggtcaccccgggctcggcggcggaccagatggccttgcgcccgggcacccagattgtgatggtgagccgtgcgaggcccctcctgtcccccgggctcctcatggggacagtggcagcgggtggggtgacccaggcagacttcacctcccccagacgatgcagatccactctgggctgggcctctgctctttcctgggctgacgtaaagcgttctgctcatttatagatgagagtcgtgccgtgcagaacccagcatgtcacccgtggtgctgctgccatgcggcgcttctgaccaggggtntttgcatgaggccccttgacagggctgctctgggtggtcactttgggtgtgtacagtaaaatacacgtgacataaaattcactattttaacc

SEQ ID NO: 289080 - DNA, 4764 bp, Homo sapiens
tctctgaatgctgagttctgccttaaaacagcacgggtcatgctagatgaaagggatctctgttttatactctcatctcttcgctattgccgtgggatgaaagacagcagaaggaaggcgtctaagttcagaacaaagtgagcaagaccagctggctgctgttggtagcagaggcacagccagcctgtcatggcactggggggccgaggtgagctgtgccccctcctcctgggcttgtgaccctctgccccccatgggagtttcactctggctcctaggctggaatgcggtggcaccatctcagctctctgcaacctccacttcccaggttcaagcgattctcctgcctcaccctcctgagtagctgggactacaggcgagcaccaccacagccggctaatttttctatttctagtagaaatggggtttcaccatgttggcaggctggtctcgaactctgacctcaagtgatctgcctgcctcagcctctgaaagtgctggattgcaggcgtgagccaccgcaccaggcctaaacagatttctttacaatctaccaccatgaacagcaagcattagcattgctccgtcccacccagcagcccgcagagaaaggaggcagctggcaccacactgggctttggagacactgcggggactgtggaccccaccctgctgcacggagctcctgcaaaagcaaacctgagaaccttgggtcctcccagcgcccagccatgggggaactgtgccgcagggactccgcactcacggcactggacgaggagacactgtgggagatgatggagagccaccgccacaggatcgtacgctgcatctgccccagccgcctcaccccctacctgcgccaggccaaggtgctgtgccagctggacgaggaggaggtgctgcacagcccccggctcaccaacagcgccatgcgggccgggcacttgctggatttgctgaagactcgagggaagaacggggccatcgccttcctggagagcctgaagttccacaaccctgacgtctacaccctggtcaccgggctgcagcctgatgttgacttcagtaactttagcggtctcatggagacatccaagctgaccgagtgcctggctggggccatcggcagcctgcaggaggagctgaaccaggaaaaggggcagaaggaggtgctgctgcggcggtgccagcagctgcaggagcacctgggcctggccgagacccgtgccgagggcctgcaccagctggaggctgaccacagccgcatgaagcgtgaggttagcgcacacttccatgaggtgctgaggctgaaggacgagatgctcagcctctcgctgcactatagcaatgcgctgcaggagaaggagctggccgcctcacgctgccgcagcctgcaggaggagctgtatctactgaagcaggagctgcagcgagccaacatggtttcctcctgtgagctggaattgcaagagcagtccctgaggacagccagcgaccaggagtccggggatgaggagctgaaccgcctgaaggaggagaatgagaaactgcgctcgctgactttcagcctggcggagaaggacattctggagcagagcctggacgaggcgcgggggagccgacaggagctggtggagcgcatccactcgctgcgggagcgggccgtggctgccgagaggcagcgagagcagtactgggaagagaaggaacagaccctgctgcagttccagaagagtaagatggcctgccaactctacagggagaaggtgaatgcgctgcaggcccaggtgtgcgagctgcagaaggagcgagaccaggcgtactccgcgagggacagtgctcagagggagatttcccagagcctggtggagaaggactccctccgcaggcaggtgttcgagctgacggaccaggtctgcgagctgcgcacacagcttcgccagctgcaggcagagcctccgggtgtgctcaagcaggaagccaggaccagggagccctgtccacgggagaagcagcggctggtgcggatgcatgccatctgccccagagacgacagcgactgcagcctcgtcagctccacagagtctcagctcttgtcggacctgagtgccacgtccagccgcgagctggtggacagcttccgctccagcagccccgcgccccccagccagcagtccctgtacaagcgggtggccgaggacttcggggaagaaccctggtctttcagcagctgcctggagatcccggagggagacccgggagccctgccgggagctaaggcaggcgacccacacctggattatgagctcctagacacggcagaccttccgcagctggaaagcagcctgcagccagtctcccctggaaggcttgatgtctcggagagcggcgtcctcatgcggcggaggccagcccgcaggatcctgagccaggtcaccatgctggcgttccagggggatgcattgctggagcagatcagcgtcatcggcgggaacctcacgggcatcttcatccaccgggtcaccccgggctcggcggcggaccagatggccttgcgcccgggcacccagattgtgatggttgattacgaagcctcagagcccttgttcaaggcagtcctggaggacacgaccctggaggaggccgtggggcttctcaggagggtggacggcttctgctgcctgtctgtgaaggtcaacacggacggttataagaggctactccaggacctggaggccaaagtggcgacctcgggggactcattctacatccgggtcaacctggccatggagggcagggccaaaggggagctgcaggtgcattgcaacgaggtcctgcacgtcaccgacaccatgttccagggctgcggctgctggcatgcccaccgcgtgaactcttacaccatgaaggatactgccgcgcacggcaccatccccaactactccagggctcagcagcagctcatagccctcatccaggacatgactcagcagtgcaccgtgacccgcaagccatcttctgggggaccacagaagctggtccgcatcgtcagtatggacaaagccaaggccagccctctgcgtttgtcctttgacaggggccagttggaccccagcaggatggagggctccagcacgtgcttctgggccgagagctgcctcaccctggtgccctataccctggtgtggccccatcgacccgcccggccccggcctgtgctcctcgtgcccagggcggttgggaagatcctgagcgagaaactgtgcctcctccaagggtttaagaagtgcctggcagagtacttgagccaggaggagtatgaggcctggagccagagaggggacatcatccaggagggagaggtgtccgggggccgctgctgggtgacccgccatgctgtggagtccctcatggaaaagaacacccatgccctcctggacgtccagctggacagtgtctgcaccctgcacaggatggacatcttccccatcgtcatccacgtctctgtcaacgagaagatggcaaagaagctcaagaagggcctacagcggttgggcacctcagaggagcagctcctggaggctgcgaggcaggaggagggagacctggaccgggcgccctgtctatacagcagcctggctcctgacggctggagcgacctggacggcctgctcagctgtgtccgccaggccatcgccgacgagcagaagaaggtggtgtggacggagcagagcccccgatgatgcaccgtgccccttcccgggactgtgggggcttctgtgtgcctgttaatgcagtcctgttcctcagcccaggccctcttggcacagctgtgggctccttggcacatgaggccggctctccccactggctggggtctaaccttgaaccctcaccacgtgcaggtcacacacagtgaagccacttgtaactgcacacttttctgtggaaacatcttcaccctttaccaggcttggcatggtctgaactggaaaccctgagaatgtttctgcagtaggacaggagggacatcttcccatgccttccctagaaccggaggccccggacttctctggaaaaccgcctgtctgcaggcccgattcaaatctatgggggctgcacttcccttttacattttgatgtgtcaaaggcttttggagtgaccaaaagcacagaggcagcgggtggggcgcctgggtggtccccaaggtcgctgccacccttgcccggggcagaggcataagcccacatatgctgtgacgctggccaccttttctcagcttctgaggctgcgatgcctcaggaactccagtttacagagaccagtgtgtttacttgtaaataaagcctctgggtggtggagacggtactttcagtgggtctgtgccccgtggcccctgtgcctgttcggtgggggtgtcccagagaagcctggcaccagtacccccgtacaaggcccagcggactctgccttcccctgacctggctttgcaccccagcccttcttgggccaaacatctttactccaccttcagggctcggggaggacccaggtccgccagcacctggccttgcccctgcctcctggggctgttgcagactgaatgtcattttgacagcagtgtccaagaatcaggaagctgttctagaattcaggttggtatcatcataaatgagttcagaaaaagaacttctgtatattttactaaaataaaaagcttttacaatagctggcctgtggcctcctccagcccaccccag

SEQ ID NO: 289081 - DNA, 2244 bp, Homo sapiens
tacattgattgtacactttatttctattattattacactgtaatatgtaatgaaagaatcatacactgaaccataattcagaatcagtgggagccctgagcttgttttcctgcaactagacggtcccatctgggggtgatgggagacggtaacagatcatcaggaattagattctcataaggagcgtgaaacctagatccctcacttgcacagttcacgatagggctcatgctcctctgagaatctactgctgtgctgagctgacaggaggtggagctgaggccgtaatgctcactcgcccaccacgcccctcctgctgtgtgacccgggtcctgatggaccatggaccagtaccagtatgtggcccaggggttggggaaccctgctcttaaggttcccaattatcagctctgaggtagttcaagcaacagagccccttgacgatgttcagggagatagtcccgatatcctaagggggccaattagattctaatggtgttaaaacacatcttaatttttattgtaaaaatatctactctcctaagcttagaacaatattgagaagaaatgaagtggatggtggaagccctggggggtgggccttcacagtggggaaggctgtgggtggagagccagggcatcgggtaggtgaaggccagggatgccactcagcatcctgtagggcccggtatagcccgcagcagcacagaatgatcccaaggctaagaaacctctatctagaatgctcttgaatgttctagaaccgaggttctttcttttcttttcttttctttttcaagacaggaaagtgcttatcacaaagaacccccgatctcgactggggaagggttggcagttgactctctggccagcactatgtgtagcacgcatcactagaggtgtgaaggccccacagaggctctggtgtgtggctttgttttgaccaaggcgtgcaggcagtggtcctacggcagggctggcccgcgcctcgcctcagtgccctcagcgccttctgtcttctggctggattcagagtcccgggggaaagagactgaccttctcgacttgccctcaggttgattacgaagcctcagagcccttgttcaaggcagtcctggaggacacgaccctggaggaggccgtggggcttctcaggagggtggacggcttctgctgcctgtctgtgaaggtcaacacggacggttataagaggctactccaggacctggaggccaaagtggcgacctcgggggactcattctacatccgggtcaacctggccatggagggcagggccaaaggggagctgcaggtgcattgcaacgaggtcctgcacgtcaccgacaccatgttccagggctgcggctgctggcatgcccaccgcgtgaactcttacaccatgaaggatactgccgcgcacggcaccatccccaactactccagggctcagcagcagctcatagccctcatccaggacatgactcagcagtgcaccgtgacccgcaagccatcttctgggggaccacagaagctggtccgcatcgtcagtatggacaaagccaaggccagccctctgcgtttgtcctttgacaggggccagttggaccccagcaggatggagggctccagcacgtgcttctgggccgagagctgcctcaccctggtgccctataccctggtgtggccccatcgacccgcccggccccggcctgtgctcctcgtgcccagggcggttgggaagatcctgagcgagaaactgtgcctcctccaagggtttaagaagtgcctggcagagtacttgagccaggaggagtatgaggcctggagccagagaggggacatcatccaggagggagaggtgtccgggggccgctgctgggtgacccgccatgctgtggagtccctcatggaaaaggtgaggtccaagggcggggtgggcaggggagctgtcctgggaagggtttcaggaatgcagaggagggggatgagataaaggtacagggaccgacctgagaccctgggtgaccttgtcgccgacctctgggtcccaacagcccagcaggagcccaaaactcatctcagccagttaggatccacgtgactgtgggtgaggtctcccaactccttgaatctcagtttcctcagcttgggggatgtttaatagatatttgttcgagaatgaataaatccgagctaacaacactctccacgtttgaaggcgcaaacgcgtgaaaagcagctccc

SEQ ID NO: 289082 - DNA, 2534 bp, Homo sapiens
ctcccagccccagttgaatatttgggactattcattaggtgaaccctttcgtgggtttttcagtctcgaggcaggaagccccctgagtgctaaaagcatcattaggaggaagggtgagaaatgcccccagctcctgatcaggggagaagctgtttccatcgcccttcctgtcgcctccccaccgcacagctgtatctactgaagcaggagctgcagcgagccaacatggtttcctcctgtgagctggaattgcaagagcagtccctgaggacagccagcgaccaggagtccggggatgaggagctgaaccgcctgaaggaggagaatgagaaactgcgctcgctgactttcagcctggcggagaaggacattctggagcagagcctggacgaggcgcgggggagccgacaggagctggtggagcgcatccactcgctgcgggagcgggccgtggctgccgagaggcagcgagagcagtactgggaagagaaggaacagaccctgctgcagttccagaagagtaagatggcctgccaactctacagggagaaggtgaatgcgctgcaggcccaggtgtgcgagctgcagaaggagcgagaccaggcgtactccgcgagggacagtgctcagagggagatttcccagagcctggtggagaaggactccctccgcaggcaggtgttcgagctgacggaccaggtctgcgagctgcgcacacagcttcgccagctgcaggcagagcctccgggtgtgctcaagcaggaagccaggaccagggagccctgtccacgggagaagcagcggctggtgcggatgcatgccatctgccccagagacgacagcgactgcagcctcgtcagctccacagagtctcagctcttgtcggacctgagtgccacgtccagccgcgagctggtggacagcttccgctccagcagccccgcgccccccagccagcagtccctgtacaagcgggtggccgaggacttcggggaagaaccctggtctttcagcagctgcctggagatcccggagggagacccgggagccctgccgggagctaaggcaggcgacccacacctggattatgagctcctagacacggcagaccttccgcagctggaaagcagcctgcagccagtctcccctggaaggcttgatgtctcggagagcggcgtcctcatgcggcggaggccagcccgcaggatcctgagccaggtcaccatgctggcgttccagggggatgcattgctggagcagatcagcgtcatcggcgggaacctcacgggcatcttcatccaccgggtcaccccgggctcggcggcggaccagatggccttgcgcccgggcacccagattgtgatggttgattacgaagcctcagagcccttgttcaaggcagtcctggaggacacgaccctggaggaggccgtggggcttctcaggagggtggacggcttctgctgcctgtctgtgaaggtcaacacggacggttataagaggctactccaggacctggaggccaaagtggcgacctcgggggactcattctacatccgggtcaacctggccatggagggcagggccaaaggggagctgcaggtgcattgcaacgaggtcctgcacgtcaccgacaccatgttccagggctgcggctgctggcatgcccaccgcgtgaactcttacaccatgaaggatactgccgcgcacggcaccatccccaactactccagggctcagcagcagctcatagccctcatccaggacatgactcagcagtgcaccgtgacccgcaagccatcttctgggggaccacagaagctggtccgcatcgtcagtatggacaaagccaaggccagccctctgcgtttgtcctttgacaggggccagttggaccccagcaggatggagggctccagcacgtgcttctgggccgagagctgcctcaccctggtgccctataccctggtgtggccccatcgacccgcccggccccggcctgtgctcctcgtgcccagggcggttgggaagatcctgagcgagaaactgtgcctcctccaagggtttaagaagtgcctggcagagtacttgagccaggaggagtatgaggcctggagccagagaggggacatcatccaggagggagaggtgtccgggggccgctgctgggtgacccgccatgctgtggagtccctcatggaaaaggtgaggtccaagggcggggtgggcaggggagctgtcctgggaagggtttcaggaatgcagaggagggggatgagataaaggtacagggaccgacctgagaccctgggtgaccttgtcgccgacctctgggtcccaacagcccagcaggagcccaaaactcatctcagccagttaggatccacgtgactgtgggtgaggtctcccaactccttgaatctcagtttcctcagcttgggggatgtttaatagatatttgttcgagaatgaataaatccgagctaacaacactctccacgtttgaaggcgcaaacgcgtgaaaagcagctccc

SEQ ID NO: 289083 - DNA, 2819 bp, Homo sapiens
tacattgattgtacactttatttctattattattacactgtaatatgtaatgaaagaatcatacactgaaccataattcagaatcagtgggagccctgagcttgttttcctgcaactagacggtcccatctgggggtgatgggagacggtaacagatcatcaggaattagattctcataaggagcgtgaaacctagatccctcacttgcacagttcacgatagggctcatgctcctctgagaatctactgctgtgctgagctgacaggaggtggagctgaggccgtaatgctcactcgcccaccacgcccctcctgctgtgtgacccgggtcctgatggaccatggaccagtaccagtatgtggcccaggggttggggaaccctgctcttaaggttcccaattatcagctctgaggtagttcaagcaacagagccccttgacgatgttcagggagatagtcccgatatcctaagggggccaattagattctaatggtgttaaaacacatcttaatttttattgtaaaaatatctactctcctaagcttagaacaatattgagaagaaatgaagtggatggtggaagccctggggggtgggccttcacagtggggaaggctgtgggtggagagccagggcatcgggtaggtgaaggccagggatgccactcagcatcctgtagggcccggtatagcccgcagcagcacagaatgatcccaaggctaagaaacctctatctagaatgctcttgaatgttctagaaccgaggttctttcttttcttttcttttctttttcaagacaggaaagtgcttatcacaaagaacccccgatctcgactggggaagggttggcagttgactctctggccagcactatgtgtagcacgcatcactagaggtgtgaaggccccacagaggctctggtgtgtggctttgttttgaccaaggcgtgcaggcagtggtcctacggcagggctggcccgcgcctcgcctcagtgccctcagcgccttctgtcttctggctggattcagagtcccgggggaaagagactgaccttctcgacttgccctcaggttgattacgaagcctcagagcccttgttcaaggcagtcctggaggacacgaccctggaggaggccgtggggcttctcaggagggtggacggcttctgctgcctgtctgtgaaggtcaacacggacggttataagaggctactccaggacctggaggccaaagtggcgacctcgggggactcattctacatccgggtcaacctggccatggagggcagggccaaaggggagctgcaggtgcattgcaacgaggtcctgcacgtcaccgacaccatgttccagggctgcggctgctggcatgcccaccgcgtgaactcttacaccatgaaggatactgccgcgcacggcaccatccccaactactccagggctcagcagcagctcatagccctcatccaggacatgactcagcagtgcaccgtgacccgcaagccatcttctgggggaccacagaagctggtccgcatcgtcagtatggacaaagccaaggccagccctctgcgtttgtcctttgacaggggccagttggaccccagcaggatggagggctccagcacgtgcttctgggccgagagctgcctcaccctggtgccctataccctggtgtggccccatcgacccgcccggccccggcctgtgctcctcgtgcccagggcggttgggaagatcctgagcgagaaactgtgcctcctccaagggtttaagaagtgcctggcagagtacttgagccaggaggagtatgaggcctggagccagagaggggacatcatccaggagggagaggtgtccgggggccgctgctgggtgacccgccatgctgtggagtccctcatggaaaagaacacccatgccctcctggacgtccagctggacagtgtctgcaccctgcacaggatggacatcttccccatcgtcatccacgtctctgtcaacgagaagatggcaaagaagctcaagtaggtgcacgctgggggctgggcaggggcttcgaagcggctcctgggctcccccaaagcccacggcaggtgcctctggagtgtgctctgcggtttgcaggaagctgaggcgctgacagggccgtttccgcacaactttgggacaagggccccgctgattgctcatgagattcccctgattttggccgggcgtggtggctcacgcctgtaatcccagcactttgggaggccagggtgggcagattgcttgaggtcagcagttcgagaccagcctggccaacatggagaaaccctgtctctattaaaaatacaaaaactagccaggtgtggcggcgggcgcctgtaatcccagctactcgggaggctgagacatgataattacttgaactgggaggtggagttgcggtgagccaagatcgcgccactgcactccagcctgggtgacagagcgagactctgtctcaacaaaacaaaacaacaacaacaacaactgctctgatttcacgcttaccaaacaaacttgatttcaaatctggcctctccagaatcttgataccaggatgacggtgccttttacagtgggcaaaagtagcctagtcactggaaaatgacattttataattgaaatttaaagttgtaaattaacaaattggcactccctcccccaagagcagctcagaggaccattgtaaggccagaaccccacccggcctcagctccactgaccctccacttactggtgcttggctagcacaatctaatccttgtcggctaaggacaaaaaaaaa

SEQ ID NO: 289084 - DNA, 433 bp, Homo sapiens
tggagggtaaccccacctgtctctcctctgcaccccttcaaaccagggcagggtctgcagcccctgcccagcctgcaggctcttgcacaagtgcagacacacctcaggctgttctcagagcatctgcgcctctgcatcactcccaggtcgccctagtgccaatcatctcccctgaattcccattcctgttgatggcttcaacagctcctcctcatcctttctctgtccctcctttagccatcttctgggggaccacagaagctggtccgcatcgtcagtatggacaaagccaaggccagccctctgcgtttgtcctttgacaggggccagttggaccccagcaggatggagggtgaggcctggtgagctggcacaggggccactggctccaagtgggtgaggggctttgggagctgctgctagttggtcagct

SEQ ID NO: 289085 - DNA, 437 bp, Homo sapiens
agaaaggctctctagtgaactggaggatatgaagcaactctctaaagagaaagatgctcatggaaaccatttagctgaagaactgggggcttctaaagtacgtgaagctcatttagaagcaagaatgcaagcagaaatcaagaaattgtcagcagaagtagaatctctcaaagaagcttatcatatggagatgatttcacatcaagagaaccatgcaaagtggaagatttctgctgactctcaaaagtcttctgttcagcaactaaacgaacagttagagaaggcaaaattggaattagaagaagctcaggatactgtaagcaatttgcatcaacaagtccaagataggaatgaagtaattgaagctgcaaatgaagcattacttactaaagtaagtaaacatataaaagtaataaagcatatctatgaaaacataa

SEQ ID NO: 289086 - DNA, 521 bp, Homo sapiens
tgagtttatactaaagcaaagagcattagtatattagctatactaatgagtttatacttgttatacttgctataaacaattacaaagcctattctaagcatacaagtttttatatcagaataaaattgaacaacagtttaaggttattttttaggttacacatttggatatgactattcgtgagcacagaggagaaatggaacaaaaaaataattaaattagaaggtactctggagaaatcagaattggaacttaaagaatgtaacaaacagatagaaagtctgaatgacaaattacaaaatgctaaagaacagcttcgagaaaaagagtttataatgctacaaaatgaacaggagataagtcaactgaaaaaagaaattgaaagaacacaacaaaggatgaaagaaatggagagtgttatgaaagagcaagaacagtacattgccactcagtacaaggaggccatagatttggggcaagaattgaggctgacccgggagcaggtgcagaactctcataca

SEQ ID NO: 289087 - DNA, 382 bp, Homo sapiens
ttagatttttttcttgaatatcagtttcacagtgggtgatactcattgtatgttaaattttaacatactcattgtatgttaaaggatttagttggaaggtggaaatttacgtattaagcaaaatcagaataagaaataggttatctatatatttcattctgaaacctacaaataccttatgcttttcaggttatgaaagagcaagaacagtacattgccactcagtacaaggaggccatagatttggggcaagaattgaggctgacccgggagcaggtgcagaactctcatacagaattggcagaggctcgtcatcagcaagtccaagcacagagagaaatagaaaggctctctagtgaactggaggatatgaagcaactct

SEQ ID NO: 289088 - DNA, 292 bp, Homo sapiens
tttcattaattttactgatactgcttatctgtttaaaattcagatagaaagtctgaatgacaaattacaaaatgctaaagaacagcttcgagaaaaagagtttataatgctacaaaatgaacaggagataagtcaactgaaaaaagaaattgaaagaacacaacaaaggatgaaagaaatggagagtgttatgaaagagcaagaacagtacattgccactcagtacaaggaggccatagatttggggcaagaattgaggctgacccgggagcaggtgcagaactctcataca

SEQ ID NO: 289089 - DNA, 289 bp, Homo sapiens
gaaaagtcaggcgagtatcgggcttcccctagggtcccctccacctgggagaggggacgacctgtacctcctggtacctggctgttcccccagagtgaggcctttcctggaagcgttaaagctgcccaggtttcttcgtccaagcttcctacaatcaagtatgcggatcccagctttgaggaggagtctgaaattatttggaggagtgttggtgtatccttttaaggttatcgtaaaatgacagtttaaagtgtggcttcttagcgttgtttactaagttgagtgattt

SEQ ID NO: 289090 - DNA, 824 bp, Homo sapiens
agagcggccaagctggggccgctcctcggcctggcgcgggtgcccgacttaccgccgaccgcgctcacgacgactcgctcttctctatccgccggaccagctccaccagcatctctgccatcttcgcaatctccttggccttctcctcggccttctcgcacctcttggccgcccggccctcggccgcgtcgcccgggttctggaggtggttgagggcgctctcctccgaggcctccacctgcgttttgatctggatgagcatattgtccatctcccacagcttgctccggttccgcagagaagccacggacaagcgacttacgcgcagagtaacggcgaacaaaatggagtcccggccgtcaaccagcgctctgcgcgttgcggcccctttcacgacacagccgggcctctttacggtcaggggggcgagctgcgggcgcgcgcacgtctagaaagagaggcaccggcggcggcgtcgcggccgcacggacgcgcacgcaggcacgcgcaggtaaagggacacatcacagttttgactacagcagaattaaggattcagagaaacggtttcattctgttgcccaggctggagtgcagtagcatgatcacggcttactgtagccttgacctccccaggttcaggtgatcctcccacctcaccctctacagtagctgggactaaaggcacgcaccatcacacctggctaattttaaaattttttttagagattgggttttaccaagttgcccaggctggtctccaactcctgggctcaaatgatctctccccctcagcctcccaaagtgctggctgcaccaggcca

SEQ ID NO: 289091 - DNA, 1104 bp, Homo sapiens
agagcggccaagctggggccgctcctcggcctggcgcgggtgcccgacttaccgccgaccgcgctcacgacgactcgctcttctctatccgccggaccagctccaccagcatctctgccatcttcgcaatctccttggccttctcctcggccttctcgcacctcttggccgcccggccctcggccgcgtcgcccgggttctggaggtggttgagggcgctctcctccgaggcctccacctgcgttttgatctggatgagcatattgtccatctcccacagcttgctccggttccgcaggtacgcccgcccgtgctcgcgcgtcagcgacgcgatgtcctcgcgcatctcgttgatgaccgggagcagaaactgctcgaaatcctcctcgggctccagcacctccacttcctccggttccgccagctcgacgatgtccaggggccgcatctcttcccactgcctcggaaccgcaatagcgatgtctgttggagagagaaaaccgacactcgctatgcttagcaatagagagcccgaatattcctgaaaacttttaccctttttcaacttttcttctcagagaagccacggacaagcgacttacgcgcagagtaacggcgaacaaaatggagtcccggccgtcaaccagcgctctgcgcgttgcggcccctttcacgacacagccgggcctctttacggtcaggggggcgagctgcgggcgcgcgcacgtctagaaagagaggcaccggcggcggcgtcgcggccgcacggacgcgcacgcaggcacgcgcaggtaaagggacacatcacagttttgactacagcagaattaaggattcagagaaacggtttcattctgttgcccaggctggagtgcagtagcatgatcacggcttactgtagccttgacctccccaggttcaggtgatcctcccacctcaccctctacagtagctgggactaaaggcacgcaccatcacacctggctaattttaaaattttttttagagattgggttttaccaagttgcccaggctggtctccaactcctgggctcaaatgatctctccccctcagcctcccaaagtgctggctgcaccaggcca

SEQ ID NO: 289092 - DNA, 971 bp, Homo sapiens
aattacaaagttgagtaatactttatttgaaaaaatgaaaagtgcacacacacacacacacacacacacttacataggcacaggataatctggaagtatgaccagcaaatgataactgattccctcaggggagaagaaactgggtggctgaaggacaggaatgagaaagaaggacagttgcgtttgtttgtatcgtttgaaattgtccagtgtgtatgtgttcttttcaaatgtttgaagaaccattggctcccttatcaaaatgtaaataccaaggaaaatcaggaatttaagaagtctaagaattctgtaatgctgggtagaattttctgtacgtgtaaaactaaaatgtcttttgtaaatcactgagtcttcctgtttatttctggttagagatctttgggggcttggatggaggaacaggaaaagaggagccaggcttttttggaaaattggcggcagcggtggcatacgggaaactgaaatctttatctaatctcatcctttgtatattcgtcttggatttgctgaagaaaattaaaaggccaggcctaccactcctatggcacagtattgatgagagacatcagtggagctccccacctccaccccaggcttggaacttagggaatgactggtttttgtcatttcacacaacagctgaaggattctgtccccacctcgtcctctgtgaagtctgctggacgtacctgccagaatcttctgaagatgacgtttgctgaacactgacccacaggggtttgatggattattgacaatgagacaagctgtcttttcatcaattagatattccagttgtttcaggtcaatttcccaagatttctctggctggagagaaagaaaggatgagactaagatgattctgaaacatttagggggaatcctcacttatctcaagggtccaatgtaagcaataaagtctgtctctggcttcaaccaccaaaaaaaga

SEQ ID NO: 289093 - DNA, 918 bp, Homo sapiens
aattacaaagttgagtaatactttatttgaaaaaatgaaaagtgcacacacacacacacacacacacacttacataggcacaggataatctggaagtatgaccagcaaatgataactgattccctcaggggagaagaaactgggtggctgaaggacaggaatgagaaagaaggacaaatgtttgaagaaccattggctcccttatcaaaatgtaaataccaaggaaaatcaggaatttaagaagtctaagaattctgtaatgctgggtagaattttctgtacgtgtaaaactaaaatgtcttttgtaaatcactgagtcttcctgtttatttctggttagagatctttgggggcttggatggaggaacaggaaaagaggagccaggcttttttggaaaattggcggcagcggtggcatacgggaaactgaaatctttatctaatctcatcctttgtatattcgtcttggatttgctgaagaaaattaaaaggccaggcctaccactcctatggcacagtattgatgagagacatcagtggagctccccacctccaccccaggcttggaacttagggaatgactggtttttgtcatttcacacaacagctgaaggattctgtccccacctcgtcctctgtgaagtctgctggacgtacctgccagaatcttctgaagatgacgtttgctgaacactgacccacaggggtttgatggattattgacaatgagacaagctgtcttttcatcaattagatattccagttgtttcaggtcaatttcccaagatttctctggctggagagaaagaaaggatgagactaagatgattctgaaacatttagggggaatcctcacttatctcaagggtccaatgtaagcaataaagtctgtctctggcttcaaccaccaaaaaaaga

SEQ ID NO: 289094 - DNA, 1030 bp, Homo sapiens
aggagaccccactggctttggtcccctaagaatggactctgctgcctgtgctgctgctgccacccctgttccagccctggctttggccctagctccagacctagcacaagccccactggcactccctggcctgttaagcccatcttgccttctctcctctggacaagaagtaaatgggagtgaaaggctcttctggcctaaatcccgctccttcgactatctgtacagtgctggggagattttactgcagaactttcctgtccaggcaaccatcaacctatacgaggactcagacagcgaagaagaagaggaagatgaagagcaggaggatgaagaagagaagtaggaggccaatgaaaaggggccagaagggtgtgtgagggtaccagggtccataccctacagcgccacagctcatcccccttcctcacccctaacctatccaaatggaggcagccagagtctgattggggttcagtttgtctggcaagttttcacagacatcagttagccggaagtattagtccagcagatagagctttctggactgaaaattgggtcatctagctgcccagctcaccctggcttacctgaatggcctgtgagctcaggcctcttgcatctcattgtctgggctgctgttgtgttgaccatgggagggttctaggagctctagaaggaaggcttgctgaagcccccaggaagcagagcagggcagggaatgcccttgtggagggaagtagtcattcctcaggccctttgactccctagccttcccaggtggccatgtagtcccgtctctctgtggaaagcctgacttctggcttcaccccaaggaataccaacagcagatccatgcaaggttggggtgcctttttgatgagtcttacaggaagggaaggcagtgtgtagagaatcggcttgctctggggatgcctccccattttgcctgctgtccattgaagtctgtgtgttggcatgagatgaatcaggagaaaaataaactggatggtgttttcctttttcttgg

SEQ ID NO: 289095 - DNA, 1171 bp, Homo sapiens
aggagaccccactggctttggtcccctaagaatggactctgctgcctgtgctgctgctgccacccctgttccagccctggctttggccctagctccagacctagcacaagccccactggcactccctggcctgttaagcccatcttgccttctctcctctggacaagaagtaaatgggagtgaaagaggaacttgtctctggaggccctggctgtcttccacaaatgactccccaaggcagatgaggaagctggtggatttggctgctggtggggcaacggctgctgaggtcaccaaggctgaatccaagttccatcaccctgtcaggctcttctggcctaaatcccgctccttcgactatctgtacagtgctggggagattttactgcagaactttcctgtccaggcaaccatcaacctatacgaggactcagacagcgaagaagaagaggaagatgaagagcaggaggatgaagaagagaagtaggaggccaatgaaaaggggccagaagggtgtgtgagggtaccagggtccataccctacagcgccacagctcatcccccttcctcacccctaacctatccaaatggaggcagccagagtctgattggggttcagtttgtctggcaagttttcacagacatcagttagccggaagtattagtccagcagatagagctttctggactgaaaattgggtcatctagctgcccagctcaccctggcttacctgaatggcctgtgagctcaggcctcttgcatctcattgtctgggctgctgttgtgttgaccatgggagggttctaggagctctagaaggaaggcttgctgaagcccccaggaagcagagcagggcagggaatgcccttgtggagggaagtagtcattcctcaggccctttgactccctagccttcccaggtggccatgtagtcccgtctctctgtggaaagcctgacttctggcttcaccccaaggaataccaacagcagatccatgcaaggttggggtgcctttttgatgagtcttacaggaagggaaggcagtgtgtagagaatcggcttgctctggggatgcctccccattttgcctgctgtccattgaagtctgtgtgttggcatgagatgaatcaggagaaaaataaactggatggtgttttcctttttcttgg

SEQ ID NO: 289096 - DNA, 402 bp, Homo sapiens
ctcctcgctttcctccacccgagctccgccggctgctccttgggaggaaggggactcgctagaccaggccgaggcccagcctcagaagtcagcattttcaagacctggcatccgcagcgtttctgacgcggggacttctctcttcggctctgaggtctccgcgcgcagaacccatggcagcttttggtcttacgcgtggctgtgagctgggctcacgctgcgtggcgcatccacccctcgattgacgcgcggagaagcatttttcattttttctttcagcttccctgatttcaaacaaacatcagatttaagaaggtgaggactccaaagaagatccaaacgcgagaccaggaagattcacgtttccactacttcttccaatacatttcactaatctttcta

SEQ ID NO: 289097 - DNA, 772 bp, Homo sapiens
gcgaagcaggctgctcgcctcctgcctgtagtgtgtgggctggggttggtgcgagcttccagcttggccgcagttggttcgtagttcggctctggggtcttttgtgtccgggtctggcttggctttgtgtccgcgagtttttgttccgctccgcagcgctcttcccgggcaggagccgtgaggctcggaggcggcagcgcggtccccggccaggagcaagcgcgccggggcggagccgagcagccgtcggcaggaaagccacaaaaaaaactgataaacccagacaagaagataaagatgatctagatgtaacagagctcactaatgaagatcttttggatcagcttgtgaaatacggagtgaatcctggtcctattgtgggaacaaccaggaagctatatgagaaaaagcttttgaaactgagggaacaaggaacagaatcaagatcttctactcctctgccaacaatttcttcttcagcagaaaatacaaggcagaatggaagtaatgattctgacagatacagtgacaatgaagaagactctaaaatagagctcaagcttgagaagagagaaccactaaagggcagagcaaagactccagtaacactcaagcaaagaagagttgagcacaatcaggtatctttagttttattaccaccgtgtacaggtataaataacctcctgacaacactaatccatgttttagcctttaatggttgacacccagattccagcacgctcaataaacttaattctgttgttaaatgata

SEQ ID NO: 289098 - DNA, 4100 bp, Homo sapiens
gcgaagcaggctgctcgcctcctgcctgtagtgtgtgggctggggttggtgcgagcttccagcttggccgcagttggttcgtagttcggctctggggtcttttgtgtccgggtctggcttggctttgtgtccgcgagtttttgttccgctccgcagcgctcttcccgggcaggagccgtgaggctcggaggcggcagcgcggtccccggccaggagcaagcgcgccggcgtgagcggcggcggcaaaggctgtggggagggggcttcgcagatccccgagatgccggagttcctggaagacccctcggtcctgacaaaagacaagttgaagagtgagttggtcgccaacaatgtgacgctgccggccggggagcagcgcaaagacgtgtacgtccagctctacctgcagcacctcacggctcgcaaccggccgccgctccccgccggcaccaacagcaaggggcccccggacttctccagtgacgaagagcgcgagcccaccccggtcctcggctctggggccgccgccgcgggccggagccgagcagccgtcggcaggaaagccacaaaaaaaactgataaacccagacaagaagataaagatgatctagatgtaacagagctcactaatgaagatcttttggatcagcttgtgaaatacggagtgaatcctggtcctattgtgggaacaaccaggaagctatatgagaaaaagcttttgaaactgagggaacaaggaacagaatcaagatcttctactcctctgccaacaatttcttcttcagcagaaaatacaaggcagaatggaagtaatgattctgacagatacagtgacaatgaagaagactctaaaatagagctcaagcttgagaagagagaaccactaaagggcagagcaaagactccagtaacactcaagcaaagaagagttgagcacaatcagagctattctcaagctggaataactgagactgaatggacaagtggatcttcaaaaggcggacctctgcaggcattaactagggaatctacaagagggtcaagaagaactccaaggaaaagggtggaaacttcagaacattttcgtatagatggtccagtaatttcagagagtactcccatagctgaaactataatggcttcaagcaacgaatccttagttgtcaatagggtgactggaaatttcaagcatgcatctcctattctgccaatcactgaattctcagacatacccagaagagcaccaaagaaaccattgacaagagctgaagtgggagaaaaaacagaggaaagaagagtagaaagggatattcttaaggaaatgttcccctatgaagcatctacaccaacaggaattagtgctagttgccgcagaccaatcaaaggggctgcaggccggccattagaactcagtgatttcaggatggaggagtctttttcatctaaatatgttcctaagtatgttcccttggcagatgtcaagtcagaaaagacaaaaaagggacgctccattcccgtatggataaaaattttgctgtttgttgttgtggcagtttttttgtttttggtctatcaagctatggaaaccaaccaagtaaatcccttctctaattttcttcatgttgaccctagaaaatccaactgaatggtatctctttggcacgttcaacttggtctcctattttcaataactgttgaaaaacatttgtgtacacttgttgactccaagaactaaaaataatgtgatttcgcctcaataaatgtagtatttcattgaaaagcaaacaaaatatatataaatggacttcattaaaatgtttttgaactttggactagtaggagatcactttgtgccatatgaataatcttttttagctctggaactttttgtaggctttatttttttaatgtgggcatcttatttcatttttgaaaaaatgtatatgttttttgtgtatttgggaaacgaagggtgaaacatggtagtataatgtgaagctacacatttaaatacttagaattcttacagaaaagattttaagaattattctctgctgaataaaaactgcaaatatgtgaaacataatgaaattcagtaagaggaaaagtaacttggttgtactttttgtaactgcaacaaagtttgatggtgtttatgaggaaaagtacagcaataatctcttctgtaacctttattaatagtaatgttgttgtagccctatcatactcactttttaagacacagtatcatgaaagtcctatttcagtaagacccatttacatacagtagatttttagcagagatcttttagtgtaacatacatattttagagaattgttggctagctgtacatgttttgaaaagctgtttagctagctataaggctataattggaaatttgtattttttatttacagcaaaacatttattcagtcatccagtttgctaccaaaatatgttttagataagtgtgtgtatgtttgtttagaagttagaaattgtaaacactggtcttatgtttcatttggattcattattgcattgtcttgttaccagaaacaaattttgccgagctttttttgccctatatttcccagcataatttgattagaaagtacaaaaagggccgggcgcggtggcttacgcctgtaatcccagcactttgggaggccagggcgggtggatcacgaggtcaggagatcgagaccatcctggccaacatggtgaaaccccgtctctactaaaaatacaaaaaaattacgctgggcgtgatgatgtgcgcctgtagtcctgtctactagggagactgaggcaggagaatcgtttgaacccaggaggcagaggttgcagtgagcagagattacgtcactgcactgtagcctggcgacagagcgagactccatctcaaaaaaaataaaaaagtacaaaaagtacttgcttttatattacatcataagcagtagttaataaagttgtatactcttaagaggtgggcattatgattattttttatttttttattttttatgagatggagtctcgctcttgtcacccagactgtagtgcagtggcacgatctgggctcggtgcaacctctgcctcccgggttcaagcaattttcctgcctcggcagagacggggtttcaccatgttggccaggctggtctcgaacccctgacctcaagtgatcagcccacctcagcttcccaaagtgctgggattacaggtgtgatccactgcacccggccggcattatgattttgtgtactcttgaaatggttatctttgtggatgatttttttttttaagctgaaacttacctcatgaataacttgattaaagtagtaggtgattaaaatttcaatagaatcaaatgagacaaaaattttaaactgactcatttgagtttcaactttacagtcattgaccataaagcacactaaaaatgtaagttatttttaaatacatctgaaataaaaatacttactaaaaaggaagaagccgaagatgtatatttagaccagcacacaattttgatttcaattagccttattctaatatttagcttttagatctttcatacacattttcacgtactttgcaattgagaccagaaagacttgtaggtctttctgcagaatgagtgggtccttgcaaagtgagtgggaaacttactcctagatcagaaatgtttgcctctctgagtaaaatgtttctttcagatgagccatagagggggcaccttttactcaacttttctttgttttgaaactttgtttcccatactgttttcagccttttgtttataattagaaattgtgagaagcttcatttagtgtttaaaaatgtggggagataaatcagacttaacatgtatgtaagatcaattcacttaaaagtatggtccaaatagcaaaaataggaccaggtgaaacatgtagtcattttttaaaaacatgtacttggtcttttgtgtgtgtctgttttattccattagaataaatgtgtccttgatgtaaatgcaaagcatttcttcctgattaaattgtagatgtagactttacaatataattcaataataaaaagtaattaacctcta

SEQ ID NO: 289099 - DNA, 4251 bp, Homo sapiens
gcgaagcaggctgctcgcctcctgcctgtagtgtgtgggctggggttggtgcgagcttccagcttggccgcagttggttcgtagttcggctctggggtcttttgtgtccgggtctggcttggctttgtgtccgcgagtttttgttccgctccgcagcgctcttcccgggcaggagccgtgaggctcggaggcggcagcgcggtccccggccaggagcaagcgcgccggcgtgagcggcggcggcaaaggctgtggggagggggcttcgcagatccccgagatgccggagttcctggaagacccctcggtcctgacaaaagacaagttgaagagtgagttggtcgccaacaatgtgacgctgccggccggggagcagcgcaaagacgtgtacgtccagctctacctgcagcacctcacggctcgcaaccggccgccgctccccgccggcaccaacagcaaggggcccccggacttctccagtgacgaagagcgcgagcccaccccggtcctcggctctggggccgccgccgcgggccggagccgagcagccgtcggcaggaaagccacaaaaaaaactgataaacccagacaagaagataaagatgatctagatgtaacagagctcactaatgaagatcttttggatcagcttgtgaaatacggagtgaatcctggtcctattgtgggaacaaccaggaagctatatgagaaaaagcttttgaaactgagggaacaaggaacagaatcaagatcttctactcctctgccaacaatttcttcttcagcagaaaatacaaggcagaatggaagtaatgattctgacagatacagtgacaatgaagaagactctaaaatagagctcaagcttgagaagagagaaccactaaagggcagagcaaagactccagtaacactcaagcaaagaagagttgagcacaatcagagctattctcaagctggaataactgagactgaatggacaagtggatcttcaaaaggcggacctctgcaggcattaactagggaatctacaagagggtcaagaagaactccaaggaaaagggtggaaacttcagaacattttcgtatagatggtccagtaatttcagagagtactcccatagctgaaactataatggcttcaagcaacgaatccttagttgtcaatagggtgactggaaatttcaagcatgcatctcctattctgccaatcactgaattctcagacatacccagaagagcaccaaagaaaccattgacaagagctgaagtgggagaaaaaacagaggaaagaagagtagaaagggatattcttaaggaaatgttcccctatgaagcatctacaccaacaggaattagtgctagttgccgcagaccaatcaaaggggctgcaggccggccattagaactcagtgatttcaggatggaggagtctttttcatctaaatatgttcctaagtatgttcccttggcagatgtcaagtcagaaaagacaaaaaagggacgctccattcccgtatggataaaaattttgctgtttgttgttgtggcagtttttttgtttttggtctatcaagctatggaaaccaaccaagtaaatcccttctctaattttcttcatgttgaccctagaaaatccaactgaatggtatctctttggcacgttcaacttggtctcctattttcaataactgttgaaaaacatttgtgtacacttgttgactccaagaactaaaaataatgtgatttcgcctcaataaatgtagtatttcattgaaaagcaaacaaaatatatataaatggacttcattaaaatgtttttgaactttggactagtaggagatcactttgtgccatatgaataatcttttttagctctggaactttttgtaggctttatttttttaatgtgggcatcttatttcatttttgaaaaaatgtatatgttttttgtgtatttgggaaacgaagggtgaaacatggtagtataatgtgaagctacacatttaaatacttagaattcttacagaaaagattttaagaattattctctgctgaataaaaactgcaaatatgtgaaacataatgaaattcagtaagaggaaaagtaacttggttgtactttttgtaactgcaacaaagtttgatggtgtttatgaggaaaagtacagcaataatctcttctgtaacctttattaatagtaatgttgttgtagccctatcatactcactttttaagacacagtatcatgaaagtcctatttcagtaagacccatttacatacagtagatttttagcagagatcttttagtgtaacatacatattttagagaattgttggctagctgtacatgttttgaaaagctgtttagctagctataaggctataattggaaatttgtattttttatttacagcaaaacatttattcagtcatccagtttgctaccaaaatatgttttagataagtgtgtgtatgtttgtttagaagttagaaattgtaaacactggtcttatgtttcatttggattcattattgcattgtcttgttaccagaaacaaattttgccgagctttttttgccctatatttcccagcataatttgattagaaagtacaaaaagggccgggcgcggtggcttacgcctgtaatcccagcactttgggaggccagggcgggtggatcacgaggtcaggagatcgagaccatcctggccaacatggtgaaaccccgtctctactaaaaatacaaaaaaattacgctgggcgtgatgatgtgcgcctgtagtcctgtctactagggagactgaggcaggagaatcgtttgaacccaggaggcagaggttgcagtgagcagagattacgtcactgcactgtagcctggcgacagagcgagactccatctcaaaaaaaataaaaaagtacaaaaagtacttgcttttatattacatcataagcagtagttaataaagttgtatactcttaagaggtgggcattatgattattttttatttttttattttttatgagatggagtctcgctcttgtcacccagactgtagtgcagtggcacgatctgggctcggtgcaacctctgcctcccgggttcaagcaattttcctgcctcggcagagacggggtttcaccatgttggccaggctggtctcgaacccctgacctcaagtgatcagcccacctcagcttcccaaagtgctgggattacaggtgtgatccactgcacccggccggcattatgattttgtgtactcttgaaatggttatctttgtggatgatttttttttttaagctgaaacttacctcatgaataacttgattaaagtagtaggtgattaaaatttcaatagaatcaaatgagacaaaaattttaaactgactcatttgagtttcaactttacagtcattgaccataaagcacactaaaaatgtaagttatttttaaatacatctgaaataaaaatacttactaaaaaggaagaagccgaagatgtatatttagaccagcacacaattttgatttcaattagccttattctaatatttagcttttagatctttcatacacattttcacgtactttgcaattgagaccagaaagacttgtaggtctttctgcagaatgagtgggtccttgcaaagtgagtgggaaacttactcctagatcagaaatgtttgcctctctgagtaaaatgtttctttcagatgagccatagagggggcaccttttactcaacttttctttgttttgaaactttgtttcccatactgttttcagccttttgtttataattagaaattgtgagaagcttcatttagtgtttaaaaatgtggggagataaatcagacttaacatgtatgtaagatcaattcacttaaaagtatggtccaaatagcaaaaataggaccaggtgaaacatgtagtcattttttaaaaacatgtacttggtcttttgtgtgtgtctgttttattccattagaataaatgtgtccttgatgtaaatgcaaagcatttcttcctgattaaattgtagatgtagactttacaatataattcaataataaaaagtaattaacctctaaaaaaaaaaaaaaaaaaaaaattgttgggcggcctgaagtttagaccttgttgggggggccaggtaggatgcgggccagggaccgcgaaggtggtcccaaaaaggggggcggggttgcaaccgaggttgggtgggttaaaggcagactagt

SEQ ID NO: 289100 - DNA, 3773 bp, Homo sapiens
gcgaagcaggctgctcgcctcctgcctgtagtgtgtgggctggggttggtgcgagcttccagcttggccgcagttggttcgtagttcggctctggggtcttttgtgtccgggtctggcttggctttgtgtccgcgagtttttgttccgctccgcagcgctcttcccgggcaggagccgtgaggctcggaggcggcagcgcggtccccggccaggagcaagcgcgccggcgtgagcggcggcggcaaaggctgtggggagggggcttcgcagatccccgagatgccggagttcctggaagacccctcggtcctgacaaaagacaagttgaagagtgagttggtcgccaacaatgtgacgctgccggccggggagcagcgcaaagacgtgtacgtccagctctacctgcagcacctcacggctcgcaaccggccgccgctccccgccggcaccaacagcaaggggcccccggacttctccagtgacgaagagcgcgagcccaccccggtcctcggctctggggccgccgccgcgggccggagccgagcagccgtcggcaggaaagccacaaaaaaaactgataaacccagacaagaagataaagatgatctagatgtaacagagctcactaatgaagatcttttggatcagcttgtgaaatacggagtgaatcctggtcctattgtgggaacaaccaggaagctatatgagaaaaagcttttgaaactgagggaacaaggaacagaatcaagatcttctactcctctgccaacaatttcttcttcagcagaaaatacaaggcagaatggaagtaatgattctgacagatacagtgacaatgaagaagactctaaaatagagctcaagcttgagaagagagaaccactaaagggcagagcaaagactccagtaacactcaagcaaagaagagttgagcacaatcaggtgggagaaaaaacagaggaaagaagagtagaaagggatattcttaaggaaatgttcccctatgaagcatctacaccaacaggaattagtgctagttgccgcagaccaatcaaaggggctgcaggccggccattagaactcagtgatttcaggatggaggagtctttttcatctaaatatgttcctaagtatgttcccttggcagatgtcaagtcagaaaagacaaaaaagggacgctccattcccgtatggataaaaattttgctgtttgttgttgtggcagtttttttgtttttggtctatcaagctatggaaaccaaccaagtaaatcccttctctaattttcttcatgttgaccctagaaaatccaactgaatggtatctctttggcacgttcaacttggtctcctattttcaataactgttgaaaaacatttgtgtacacttgttgactccaagaactaaaaataatgtgatttcgcctcaataaatgtagtatttcattgaaaagcaaacaaaatatatataaatggacttcattaaaatgtttttgaactttggactagtaggagatcactttgtgccatatgaataatcttttttagctctggaactttttgtaggctttatttttttaatgtgggcatcttatttcatttttgaaaaaatgtatatgttttttgtgtatttgggaaacgaagggtgaaacatggtagtataatgtgaagctacacatttaaatacttagaattcttacagaaaagattttaagaattattctctgctgaataaaaactgcaaatatgtgaaacataatgaaattcagtaagaggaaaagtaacttggttgtactttttgtaactgcaacaaagtttgatggtgtttatgaggaaaagtacagcaataatctcttctgtaacctttattaatagtaatgttgttgtagccctatcatactcactttttaagacacagtatcatgaaagtcctatttcagtaagacccatttacatacagtagatttttagcagagatcttttagtgtaacatacatattttagagaattgttggctagctgtacatgttttgaaaagctgtttagctagctataaggctataattggaaatttgtattttttatttacagcaaaacatttattcagtcatccagtttgctaccaaaatatgttttagataagtgtgtgtatgtttgtttagaagttagaaattgtaaacactggtcttatgtttcatttggattcattattgcattgtcttgttaccagaaacaaattttgccgagctttttttgccctatatttcccagcataatttgattagaaagtacaaaaagggccgggcgcggtggcttacgcctgtaatcccagcactttgggaggccagggcgggtggatcacgaggtcaggagatcgagaccatcctggccaacatggtgaaaccccgtctctactaaaaatacaaaaaaattacgctgggcgtgatgatgtgcgcctgtagtcctgtctactagggagactgaggcaggagaatcgtttgaacccaggaggcagaggttgcagtgagcagagattacgtcactgcactgtagcctggcgacagagcgagactccatctcaaaaaaaataaaaaagtacaaaaagtacttgcttttatattacatcataagcagtagttaataaagttgtatactcttaagaggtgggcattatgattattttttatttttttattttttatgagatggagtctcgctcttgtcacccagactgtagtgcagtggcacgatctgggctcggtgcaacctctgcctcccgggttcaagcaattttcctgcctcggcagagacggggtttcaccatgttggccaggctggtctcgaacccctgacctcaagtgatcagcccacctcagcttcccaaagtgctgggattacaggtgtgatccactgcacccggccggcattatgattttgtgtactcttgaaatggttatctttgtggatgatttttttttttaagctgaaacttacctcatgaataacttgattaaagtagtaggtgattaaaatttcaatagaatcaaatgagacaaaaattttaaactgactcatttgagtttcaactttacagtcattgaccataaagcacactaaaaatgtaagttatttttaaatacatctgaaataaaaatacttactaaaaaggaagaagccgaagatgtatatttagaccagcacacaattttgatttcaattagccttattctaatatttagcttttagatctttcatacacattttcacgtactttgcaattgagaccagaaagacttgtaggtctttctgcagaatgagtgggtccttgcaaagtgagtgggaaacttactcctagatcagaaatgtttgcctctctgagtaaaatgtttctttcagatgagccatagagggggcaccttttactcaacttttctttgttttgaaactttgtttcccatactgttttcagccttttgtttataattagaaattgtgagaagcttcatttagtgtttaaaaatgtggggagataaatcagacttaacatgtatgtaagatcaattcacttaaaagtatggtccaaatagcaaaaataggaccaggtgaaacatgtagtcattttttaaaaacatgtacttggtcttttgtgtgtgtctgttttattccattagaataaatgtgtccttgatgtaaatgcaaagcatttcttcctgattaaattgtagatgtagactttacaatataattcaataataaaaagtaattaacctcta

SEQ ID NO: 289101 - DNA, 4367 bp, Homo sapiens
gcgaagcaggctgctcgcctcctgcctgtagtgtgtgggctggggttggtgcgagcttccagcttggccgcagttggttcgtagttcggctctggggtcttttgtgtccgggtctggcttggctttgtgtccgcgagtttttgttccgctccgcagcgctcttcccgggcaggagccgtgaggctcggaggcggcagcgcggtccccggccaggagcaagcgcgccggcgtgagcggcggcggcaaaggctgtggggagggggcttcgcagatccccgagatgccggagttcctggaagacccctcggtcctgacaaaagacaagttgaagagtgagttggtcgccaacaatgtgacgctgccggccggggagcagcgcaaagacgtgtacgtccagctctacctgcagcacctcacggctcgcaaccggccgccgctccccgccggcaccaacagcaaggggcccccggacttctccagtgacgaagagcgcgagcccaccccggtcctcggctctggggccgccgccgcgggccggagccgagcagccgtcggcaggaaagccacaaaaaaaactgataaacccagacaagaagataaagatgatctagatgtaacagagctcactaatgaagatcttttggatcagcttgtgaaatacggagtgaatcctggtcctattgtgggaacaaccaggaagctatatgagaaaaagcttttgaaactgagggaacaaggaacagaatcaagatcttctactcctctgccaacaatttcttcttcagcagaaaatacaaggcagaatggaagtaatgattctgacagatacagtgacaatgaagaagactctaaaatagagctcaagcttgagaagagagaaccactaaagggcagagcaaagactccagtaacactcaagcaaagaagagttgagcacaatcagagctattctcaagctggaataactgagactgaatggacaagtggatcttcaaaaggcggacctctgcaggcattaactagggaatctacaagagggtcaagaagaactccaaggaaaagggtggaaacttcagaacattttcgtatagatggtccagtaatttcagagagtactcccatagctgaaactataatggcttcaagcaacgaatccttagttgtcaatagggtgactggaaatttcaagcatgcatctcctattctgccaatcactgaattctcagacatacccagaagagcaccaaagaaaccattgacaagagctgaagtgggagaaaaaacagaggaaagaagagtagaaagggatattcttaaggaaatgttcccctatgaagcatctacaccaacaggaattagtgctagttgccgcagaccaatcaaaggggctgcaggccggccattagaactcagtgatttcaggatggaggagtctttttcatctaaatatgttcctaagtatgttcccttggcagatgtcaagtcagaaaagacaaaaaagggacgctccattcccgtatggataaaaattttgctgtttgttgttgtggcagtttttttgtttttggtctatcaagctatggaaaccaaccaagtaaatcccttctctaattttcttcatgttgaccctagaaaatccaactgaatggtatctctttggcacgttcaacttggtctcctattttcaataactgttgaaaaacatttgtgtacacttgttgactccaagaactaaaaataatgtgatttcgcctcaataaatgtagtatttcattgaaaagcaaacaaaatatatataaatggacttcattaaaatgtttttgaactttggactagtaggagatcactttgtgccatatgaataatcttttttagctctggaactttttgtaggctttatttttttaatgtgggcatcttatttcatttttgaaaaaatgtatatgttttttgtgtatttgggaaacgaagggtgaaacatggtagtataatgtgaagctacacatttaaatacttagaattcttacagaaaagattttaagaattattctctgctgaataaaaactgcaaatatgtgaaacataatgaaattcagtaagaggaaaagtaacttggttgtactttttgtaactgcaacaaagtttgatggtgtttatgaggaaaagtacagcaataatctcttctgtaacctttattaatagtaatgttgttgtagccctatcatactcactttttaagacacagtatcatgaaagtcctatttcagtaagacccatttacatacagtagatttttagcagagatcttttagtgtaacatacatattttagagaattgttggctagctgtacatgttttgaaaagctgtttagctagctataaggctataattggaaatttgtattttttatttacagcaaaacatttattcagtcatccagtttgctaccaaaatatgttttagataagtgtgtgtatgtttgtttagaagttagaaattgtaaacactggtcttatgtttcatttggattcattattgcattgtcttgttaccagaaacaaattttgccgagctttttttgccctatatttcccagcataatttgattagaaagtacaaaaagggccgggcgcggtggcttacgcctgtaatcccagcactttgggaggccagggcgggtggatcacgaggtcaggagatcgagaccatcctggccaacatggtgaaaccccgtctctactaaaaatacaaaaaaattacgctgggcgtgatgatgtgcgcctgtagtcctgtctactagggagactgaggcaggagaatcgtttgaacccaggaggcagaggttgcagtgagcagagattacgtcactgcactgtagcctggcgacagagcgagactccatctcaaaaaaaataaaaaagtacaaaaagtacttgcttttatattacatcataagcagtagttaataaagttgtatactcttaagaggtgggcattatgattattttttatttttttattttttatgagatggagtctcgctcttgtcacccagactgtagtgcagtggcacgatctgggctcggtgcaacctctgcctcccgggttcaagcaattttcctgcctcggcagagacggggtttcaccatgttggccaggctggtctcgaacccctgacctcaagtgatcagcccacctcagcttcccaaagtgctgggattacaggtgtgatccactgcacccggccggcattatgattttgtgtactcttgaaatggttatctttgtggatgatttttttttttaagctgaaacttacctcatgaataacttgattaaagtagtaggtgattaaaatttcaatagaatcaaatgagacaaaaattttaaactgactcatttgagtttcaactttacagtcattgaccataaagcacactaaaaatgtaagttatttttaaatacatctgaaataaaaatacttactaaaaaggaagaagccgaagatgtatatttagaccagcacacaattttgatttcaattagccttattctaatatttagcttttagatctttcatacacattttcacgtactttgcaattgagaccagaaagacttgtaggtctttctgcagaatgagtgggtccttgcaaagtgagtgggaaacttactcctagatcagaaatgtttgcctctctgagtaaaatgtttctttcagatgagccatagagggggcaccttttactcaacttttctttgttttgaaactttgtttcccatactgttttcagccttttgtttataattagaaattgtgagaagcttcatttagtgtttaaaaatgtggggagataaatcagacttaacatgtatgtaagatcaattcacttaaaagtatggtccaaatagcaaaaataggaccaggtgaaacatgtagtcattttttaaaaacatgtactccacagagcagcgcaccgctattcccttacgataacatcgtgccctgtatgcttaacgtcgaaggccttcgttccccgtgataaattgtgcagcttgcaccctcttcacatctatctacgcactaagcaggcacgtacaccccaagattagggcgtcgcccaaccagtggccgctgtgcccgagacatcatgaacacagctcttaccatgaagtctcgcgcccattcacactgcatctaacaacaaggtgggtccgatgataataggcgacactcagtctctccgatagctccaccttcgatctactgcgcccatactagagaagtttgccctctattgtctctcacaccacaatgagtcatagaatatgacatgaacccgatgcgatatcgccatttcgtaa

SEQ ID NO: 289102 - DNA, 3566 bp, Homo sapiens
gcgaagcaggctgctcgcctcctgcctgtagtgtgtgggctggggttggtgcgagcttccagcttggccgcagttggttcgtagttcggctctggggtcttttgtgtccgggtctggcttggctttgtgtccgcgagtttttgttccgctccgcagcgctcttcccgggcaggagccgtgaggctcggaggcggcagcgcggtccccggccaggagcaagcgcgccggcgtgagcggcggcggcaaaggctgtggggagggggcttcgcagatccccgagatgccggagttcctggaagacccctcggtcctgacaaaagacaagttgaagagtgagttggtcgccaacaatgtgacgctgccggccggggagcagcgcaaagacgtgtacgtccagctctacctgcagcacctcacggctcgcaaccggccgccgctccccgccggcaccaacagcaaggggcccccggacttctccagtgacgaagagcgcgagcccaccccggtcctcggctctggggccgccgccgcgggccggagccgagcagccgtcggcaggaaagccacaaaaaaaactgataaacccagacaagaagataaagatgatctagatgtaacagagctcactaatgaagatcttttggatcagcttgtgaaatacggagtgaatcctggtcctattgtgggaacaaccaggaagctatatgagaaaaagcttttgaaactgagggaacaaggaacagaatcaagatcttctactcctctgccaacaatttcttcttcagcagaaaatacaaggcagaatggaagtaatgattctgacagatacagtgacaatgaagaagactctaaaatagagctcaagcttgagaagagagaaccactaaagggcagagcaaagactccagtaacactcaagcaaagaagagttgagcacaatcagagctattctcaagctggaataactgagactgaatggacaagtggatcttcaaaaggcggacctctgcaggcattaactagggaatctacaagagggtcaagaagaactccaaggaaaagggtggaaacttcagaacattttcgtatagatggtccagtaatttcagagagtactcccatagctgaaactataatggcttcaagcaacgaatccttagttgtcaatagggtgactggaaatttcaagcatgcatctcctattctgccaatcactgaattctcagacatacccagaagagcaccaaagaaaccattgacaagagctgaagtgggagaaaaaacagaggaaagaagagtagaaagggatattcttaaggaaatgttcccctatgaagcatctacaccaacaggaattagtgctagttgccgcagaccaatcaaaggggctgcaggccggccattagaactcagtgatttcaggatggaggagtctttttcatctaaatatgttcctaagtatgttcccttggcagatgtcaagtcagaaaagacaaaaaagggacgctccattcccgtatggataaaaattttgctgtttgttgttgtggcagtttttttgtttttggtctatcaagctatggaaaccaaccaagtaaatcccttctctaattttcttcatgttgaccctagaaaatccaactgaatggtatctctttggcacgttcaacttggtctcctattttcaataactgttgaaaaacatttgtgtacacttgttgactccaagaactaaaaataatgtgatttcgcctcaataaatgtagtatttcattgaaaagcaaacaaaatatatataaatggacttcattaaaatgtttttgaactttggactagtaggagatcactttgtgccatatgaataatcttttttagctctggaactttttgtaggctttatttttttaatgtgggcatcttatttcatttttgaaaaaatgtatatgttttttgtgtatttgggaaacgaagggtgaaacatggtagtataatgtgaagctacacatttaaatacttagaattcttacagaaaagattttaagaattattctctgctgaataaaaactgcaaatatgtgaaacataatgaaattcagtaagaggaaaagtaacttggttgtactttttgtaactgcaacaaagtttgatggtgtttatgaggaaaagtacagcaataatctcttctgtaacctttattaatagtaatgttgttgtagccctatcatactcactttttaagacacagtatcatgaaagtcctatttcagtaagacccatttacatacagtagatttttagcagagatcttttagtgtaacatacatattttagagaattgttggctagctgtacatgttttgaaaagctgtttagctagctataaggctataattggaaatttgtattttttatttacagcaaaacatttattcagtcatccagtttgctaccaaaatatgttttagataagtgtgtgtatgtttgtttagaagttagaaattgtaaacactggtcttatgtttcatttggattcattattgcattgtcttgttaccagaaacaaatcctcccgggttcaagcaattttcctgcctcggcagagacggggtttcaccatgttggccaggctggtctcgaacccctgacctcaagtgatcagcccacctcagcttcccaaagtgctgggattacaggtgtgatccactgcacccggccggcattatgattttgtgtactcttgaaatggttatctttgtggatgatttttttttttaagctgaaacttacctcatgaataacttgattaaagtagtaggtgattaaaatttcaatagaatcaaatgagacaaaaattttaaactgactcatttgagtttcaactttacagtcattgaccataaagcacactaaaaatgtaagttatttttaaatacatctgaaataaaaatacttactaaaaaggaagaagccgaagatgtatatttagaccagcacacaattttgatttcaattagccttattctaatatttagcttttagatctttcatacacattttcacgtactttgcaattgagaccagaaagacttgtaggtctttctgcagaatgagtgggtccttgcaaagtgagtgggaaacttactcctagatcagaaatgtttgcctctctgagtaaaatgtttctttcagatgagccatagagggggcaccttttactcaacttttctttgttttgaaactttgtttcccatactgttttcagccttttgtttataattagaaattgtgagaagcttcatttagtgtttaaaaatgtggggagataaatcagacttaacatgtatgtaagatcaattcacttaaaagtatggtccaaatagcaaaaataggaccaggtgaaacatgtagtcattttttaaaaacatgtacttggtcttttgtgtgtgtctgttttattccattagaataaatgtgtccttgatgtaaatgcaaagcatttcttcctgattaaattgtagatgtagactttacaatataattcaataataaaaagtaattaacctcta

SEQ ID NO: 289103 - DNA, 2606 bp, Homo sapiens
gcgaagcaggctgctcgcctcctgcctgtagtgtgtgggctggggttggtgcgagcttccagcttggccgcagttggttcgtagttcggctctggggtcttttgtgtccgggtctggcttggctttgtgtccgcgagtttttgttccgctccgcagcgctcttcccgggcaggagccgtgaggctcggaggcggcagcgcggtccccggccaggagcaagcgcgccggcgtgagcggcggcggcaaaggctgtggggagggggcttcgcagatccccgagatgccggagttcctggaagacccctcggtcctgacaaaagacaagttgaagagtgagttggtcgccaacaatgtgacgctgccggccggggagcagcgcaaagacgtgtacgtccagctctacctgcagcacctcacggctcgcaaccggccgccgctccccgccggcaccaacagcaaggggcccccggacttctccagtgacgaagagcgcgagcccaccccggtcctcggctctggggccgccgccgcgggccggagccgagcagccgtcggcaggaaagccacaaaaaaaactgataaacccagacaagaagataaagatgatctagatgtaacagagctcactaatgaagatcttttggatcagcttgtgaaatacggagtgaatcctggtcctattgtgggaacaaccaggaagctatatgagaaaaagcttttgaaactgagggaacaaggaacagaatcaagatcttctactcctctgccaacaatttcttcttcagcagaaaatacaaggcagaatggaagtaatgattctgacagatacagtgacaatgaagaagactctaaaatagagctcaagcttgagaagagagaaccactaaagggcagagcaaagactccagtaacactcaagcaaagaagagttgagcacaatcagagctattctcaagctggaataactgagactgaatggacaagtggatcttcaaaaggcggacctctgcaggcattaactagggaatctacaagagggtcaagaagaactccaaggaaaagggtggaaacttcagaacattttcgtatagatggtccagtaatttcagagagtactcccatagctgaaactataatggcttcaagcaacgaatccttagttgtcaatagggtgactggaaatttcaagcatgcatctcctattctgccaatcactgaattctcagacatacccagaagagcaccaaagaaaccattgacaagagctgaagtgggagaaaaaacagaggaaagaagagtagaaagggatattcttaaggaaatgttcccctatgaagcatctacaccaacaggaattagtgctagttgccgcagaccaatcaaaggggctgcaggccggccattagaactcagtgatttcaggatggaggagtctttttcatctaaatatgttcctaagtatgttcccttggcagatgtcaagtcagaaaagacaaaaaagggacgctccattcccgtatggataaaaattttgctgtttgttgttgtggcagtttttttgtttttggtctatcaagctatggaaaccaaccaagtaaatcccttcctcccgggttcaagcaattttcctgcctcggcagagacggggtttcaccatgttggccaggctggtctcgaacccctgacctcaagtgatcagcccacctcagcttcccaaagtgctgggattacaggtgtgatccactgcacccggccggcattatgattttgtgtactcttgaaatggttatctttgtggatgatttttttttttaagctgaaacttacctcatgaataacttgattaaagtagtaggtgattaaaatttcaatagaatcaaatgagacaaaaattttaaactgactcatttgagtttcaactttacagtcattgaccataaagcacactaaaaatgtaagttatttttaaatacatctgaaataaaaatacttactaaaaaggaagaagccgaagatgtatatttagaccagcacacaattttgatttcaattagccttattctaatatttagcttttagatctttcatacacattttcacgtactttgcaattgagaccagaaagacttgtaggtctttctgcagaatgagtgggtccttgcaaagtgagtgggaaacttactcctagatcagaaatgtttgcctctctgagtaaaatgtttctttcagatgagccatagagggggcaccttttactcaacttttctttgttttgaaactttgtttcccatactgttttcagccttttgtttataattagaaattgtgagaagcttcatttagtgtttaaaaatgtggggagataaatcagacttaacatgtatgtaagatcaattcacttaaaagtatggtccaaatagcaaaaataggaccaggtgaaacatgtagtcattttttaaaaacatgtacttggtcttttgtgtgtgtctgttttattccattagaataaatgtgtccttgatgtaaatgcaaagcatttcttcctgattaaattgtagatgtagactttacaatataattcaataataaaaagtaattaacctcta

SEQ ID NO: 289104 - DNA, 3251 bp, Homo sapiens
tttttgaaagttttgaacatgctggtgcggtaagtctcctccatctcagcctcccaaagtgctgggattacaggcgtgagccaccgtacccggcccaacaatatactcttaatagtaaaaaacaaaatcaatgagggaattagcattgccatgttagattactgaattttttccccccagttatttaaatgtgtggcagtttttcactccaataaccacatatataaggtatcttcaagaaatttgaagagagccttggaagcatgtggatacctaaataataatttagaaatggcagctgtaaaatctatgatagatttaaaggcattttgttctctaaaacttactatttatgttttaattattgcatgtttacactaaattttaacttgtggttgtttgtttgtctgtttcttattaggtgggagaaaaaacagaggaaagaagagtagaaagggatattcttaaggaaatgttcccctatgaagcatctacaccaacaggaattagtgctagttgccgcagaccaatcaaaggggctgcaggccggccattagaactcagtgatttcaggatggaggagtctttttcatctaaatatgttcctaagtatgttcccttggcagatgtcaagtcagaaaagacaaaaaagggacgctccattcccgtatggataaaaattttgctgtttgttgttgtggcagtttttttgtttttggtctatcaagctatggaaaccaaccaagtaaatcccttctctaattttcttcatgttgaccctagaaaatccaactgaatggtatctctttggcacgttcaacttggtctcctattttcaataactgttgaaaaacatttgtgtacacttgttgactccaagaactaaaaataatgtgatttcgcctcaataaatgtagtatttcattgaaaagcaaacaaaatatatataaatggacttcattaaaatgtttttgaactttggactagtaggagatcactttgtgccatatgaataatcttttttagctctggaactttttgtaggctttatttttttaatgtgggcatcttatttcatttttgaaaaaatgtatatgttttttgtgtatttgggaaacgaagggtgaaacatggtagtataatgtgaagctacacatttaaatacttagaattcttacagaaaagattttaagaattattctctgctgaataaaaactgcaaatatgtgaaacataatgaaattcagtaagaggaaaagtaacttggttgtactttttgtaactgcaacaaagtttgatggtgtttatgaggaaaagtacagcaataatctcttctgtaacctttattaatagtaatgttgttgtagccctatcatactcactttttaagacacagtatcatgaaagtcctatttcagtaagacccatttacatacagtagatttttagcagagatcttttagtgtaacatacatattttagagaattgttggctagctgtacatgttttgaaaagctgtttagctagctataaggctataattggaaatttgtattttttatttacagcaaaacatttattcagtcatccagtttgctaccaaaatatgttttagataagtgtgtgtatgtttgtttagaagttagaaattgtaaacactggtcttatgtttcatttggattcattattgcattgtcttgttaccagaaacaaattttgccgagctttttttgccctatatttcccagcataatttgattagaaagtacaaaaagggccgggcgcggtggcttacgcctgtaatcccagcactttgggaggccagggcgggtggatcacgaggtcaggagatcgagaccatcctggccaacatggtgaaaccccgtctctactaaaaatacaaaaaaattacgctgggcgtgatgatgtgcgcctgtagtcctgtctactagggagactgaggcaggagaatcgtttgaacccaggaggcagaggttgcagtgagcagagattacgtcactgcactgtagcctggcgacagagcgagactccatctcaaaaaaaataaaaaagtacaaaaagtacttgcttttatattacatcataagcagtagttaataaagttgtatactcttaagaggtgggcattatgattattttttatttttttattttttatgagatggagtctcgctcttgtcacccagactgtagtgcagtggcacgatctgggctcggtgcaacctctgcctcccgggttcaagcaattttcctgcctcggcagagacggggtttcaccatgttggccaggctggtctcgaacccctgacctcaagtgatcagcccacctcagcttcccaaagtgctgggattacaggtgtgatccactgcacccggccggcattatgattttgtgtactcttgaaatggttatctttgtggatgatttttttttttaagctgaaacttacctcatgaataacttgattaaagtagtaggtgattaaaatttcaatagaatcaaatgagacaaaaattttaaactgactcatttgagtttcaactttacagtcattgaccataaagcacactaaaaatgtaagttatttttaaatacatctgaaataaaaatacttactaaaaaggaagaagccgaagatgtatatttagaccagcacacaattttgatttcaattagccttattctaatatttagcttttagatctttcatacacattttcacgtactttgcaattgagaccagaaagacttgtaggtctttctgcagaatgagtgggtccttgcaaagtgagtgggaaacttactcctagatcagaaatgtttgcctctctgagtaaaatgtttctttcagatgagccatagagggggcaccttttactcaacttttctttgttttgaaactttgtttcccatactgttttcagccttttgtttataattagaaattgtgagaagcttcatttagtgtttaaaaatgtggggagataaatcagacttaacatgtatgtaagatcaattcacttaaaagtatggtccaaatagcaaaaataggaccaggtgaaacatgtagtcattttttaaaaacatgtacttggtcttttgtgtgtgtctgttttattccattagaataaatgtgtccttgatgtaaatgcaaagcatttcttcctgattaaattgtagatgtagactttacaatataattcaataataaaaagtaattaacctcta

SEQ ID NO: 289105 - DNA, 2781 bp, Homo sapiens
ttcagctcggtaccagtgctactccacaaacaggaattagtgctagttgccgcagaccaatcaaaggggctgcaggccggccattagaactcagtgatttcaggatggaggagtctttttcatctaaatatgttcctaagtatgttcccttggcagatgtcaagtcagaaaagacaaaaaagggacgctccattcccgtatggataaaaattttgctgtttgttgttgtggcagtttttttgtttttggtctatcaagctatggaaaccaaccaagtaaatcccttctctaattttcttcatgttgaccctagaaaatccaactgaatggtatctctttggcacgttcaacttggtctcctattttcaataactgttgaaaaacatttgtgtacacttgttgactccaagaactaaaaataatgtgatttcgcctcaataaatgtagtatttcattgaaaagcaaacaaaatatatataaatggacttcattaaaatgtttttgaactttggactagtaggagatcactttgtgccatatgaataatcttttttagctctggaactttttgtaggctttatttttttaatgtgggcatcttatttcatttttgaaaaaatgtatatgttttttgtgtatttgggaaacgaagggtgaaacatggtagtataatgtgaagctacacatttaaatacttagaattcttacagaaaagattttaagaattattctctgctgaataaaaactgcaaatatgtgaaacataatgaaattcagtaagaggaaaagtaacttggttgtactttttgtaactgcaacaaagtttgatggtgtttatgaggaaaagtacagcaataatctcttctgtaacctttattaatagtaatgttgttgtagccctatcatactcactttttaagacacagtatcatgaaagtcctatttcagtaagacccatttacatacagtagatttttagcagagatcttttagtgtaacatacatattttagagaattgttggctagctgtacatgttttgaaaagctgtttagctagctataaggctataattggaaatttgtattttttatttacagcaaaacatttattcagtcatccagtttgctaccaaaatatgttttagataagtgtgtgtatgtttgtttagaagttagaaattgtaaacactggtcttatgtttcatttggattcattattgcattgtcttgttaccagaaacaaattttgccgagctttttttgccctatatttcccagcataatttgattagaaagtacaaaaagggccgggcgcggtggcttacgcctgtaatcccagcactttgggaggccagggcgggtggatcacgaggtcaggagatcgagaccatcctggccaacatggtgaaaccccgtctctactaaaaatacaaaaaaattacgctgggcgtgatgatgtgcgcctgtagtcctgtctactagggagactgaggcaggagaatcgtttgaacccaggaggcagaggttgcagtgagcagagattacgtcactgcactgtagcctggcgacagagcgagactccatctcaaaaaaaataaaaaagtacaaaaagtacttgcttttatattacatcataagcagtagttaataaagttgtatactcttaagaggtgggcattatgattattttttatttttttattttttatgagatggagtctcgctcttgtcacccagactgtagtgcagtggcacgatctgggctcggtgcaacctctgcctcccgggttcaagcaattttcctgcctcggcagagacggggtttcaccatgttggccaggctggtctcgaacccctgacctcaagtgatcagcccacctcagcttcccaaagtgctgggattacaggtgtgatccactgcacccggccggcattatgattttgtgtactcttgaaatggttatctttgtggatgatttttttttttaagctgaaacttacctcatgaataacttgattaaagtagtaggtgattaaaatttcaatagaatcaaatgagacaaaaattttaaactgactcatttgagtttcaactttacagtcattgaccataaagcacactaaaaatgtaagttatttttaaatacatctgaaataaaaatacttactaaaaaggaagaagccgaagatgtatatttagaccagcacacaattttgatttcaattagccttattctaatatttagcttttagatctttcatacacattttcacgtactttgcaattgagaccagaaagacttgtaggtctttctgcagaatgagtgggtccttgcaaagtgagtgggaaacttactcctagatcagaaatgtttgcctctctgagtaaaatgtttctttcagatgagccatagagggggcaccttttactcaacttttctttgttttgaaactttgtttcccatactgttttcagccttttgtttataattagaaattgtgagaagcttcatttagtgtttaaaaatgtggggagataaatcagacttaacatgtatgtaagatcaattcacttaaaagtatggtccaaatagcaaaaataggaccaggtgaaacatgtagtcattttttaaaaacatgtacttggtcttttgtgtgtgtctgttttattccattagaataaatgtgtccttgatgtaaatgcaaagcatttcttcctgattaaattgtagatgtagactttacaatataattcaataataaaaagtaattaacctcta

SEQ ID NO: 289106 - DNA, 2733 bp, Homo sapiens
gcgaagcaggctgctcgcctcctgcctgtagtgtgtgggctggggttggtgcgagcttccagcttggccgcagttggttcgtagttcggctctggggtcttttgtgtccgggtctggcttggctttgtgtccgcgagtttttgttccgctccgcagcgctcttcccgggcaggagccgtgaggctcggaggcggcagcgcggtccccggccaggagcaagcgcgccggcgtgagcggcggcggcaaaggctgtggggagggggcttcgcagatccccgagatgccggagttcctggaagacccctcggtcctgacaaaagacaagttgaagagtgagttggtcgccaacaatgtgacgctgccggccggggagcagcgcaaagacgtgtacgtccagctctacctgcagcacctcacggctcgcaaccggccgccgctccccgccggcaccaacagcaaggggcccccggacttctccagtgacgaagagcgcgagcccaccccggtcctcggctctggggccgccgccgcgggccggagccgagcagccgtcggcaggaaagccacaaaaaaaactgataaacccagacaagaagataaagatgatctagatgtaacagagctcactaatgaagatcttttggatcagcttgtgaaatacggagtgaatcctggtcctattgtgggaacaaccaggaagctatatgagaaaaagcttttgaaactgagggaacaaggaacagaatcaagatcttctactcctctgccaacaatttcttcttcagcagaaaatacaaggcagaatggaagtaatgattctgacagatacagtgacaatgaagaagactctaaaatagagctcaagcttgagaagagagaaccactaaagggcagagcaaagactccagtaacactcaagcaaagaagagttgagcacaatcagagctattctcaagctggaataactgagactgaatggacaagtggatcttcaaaaggcggacctctgcaggcattaactagggaatctacaagagggtcaagaagaactccaaggaaaagggtggaaacttcagaacattttcgtatagatggtccagtaatttcagagagtactcccatagctgaaactataatggcttcaagcaacgaatccttagttgtcaatagggtgactggaaatttcaagcatgcatctcctattctgccaatcactgaattctcagacatacccagaagagcaccaaagaaaccattgacaagagctgaagtgggagaaaaaacagaggaaagaagagtagaaagggatattcttaaggaaatgttcccctatgaagcatctacaccaacaggaattagtgctagttgccgcagaccaatcaaaggggctgcaggccggccattagaactcagtgatttcaggatggaggagtctttttcatctaaatatgttcctaagtatgttcccttggcagatgtcaagtcagaaaagacaaaaaagggacgctccattcccgtatggataaaaattttgctgtttgttgttgtggcagtttttttgtttttggtctatcaagctatggaaaccaaccaagtaaatcccttctctaattttcttcatgttgaccctagaaaatccaactgaatggtatctctttggcacgttcaacttggtctcctattttcaataactgttgaaaaacatttgtgtacacttgttgactccaagaactaaaaataatgtgatttcgcctcaataaatgtagtatttcattgaaaagcaaacaaaatatatataaatggacttcattaaaatgtttttgaactttggactagtaggagatcatgctgggattacaggtgtgatccactgcacccggccggcattatgattttgtgtactcttgaaatggttatctttgtggatgatttttttttttaagctgaaacttacctcatgaataacttgattaaagtagtaggtgattaaaatttcaatagaatcaaatgagacaaaaattttaaactgactcatttgagtttcaactttacagtcattgaccataaagcacactaaaaatgtaagttatttttaaatacatctgaaataaaaatacttactaaaaaggaagaagccgaagatgtatatttagaccagcacacaattttgatttcaattagccttattctaatatttagcttttagatctttcatacacattttcacgtactttgcaattgagaccagaaagacttgtaggtctttctgcagaatgagtgggtccttgcaaagtgagtgggaaacttactcctagatcagaaatgtttgcctctctgagtaaaatgtttctttcagatgagccatagagggggcaccttttactcaacttttctttgttttgaaactttgtttcccatactgttttcagccttttgtttataattagaaattgtgagaagcttcatttagtgtttaaaaatgtggggagataaatcagacttaacatgtatgtaagatcaattcacttaaaagtatggtccaaatagcaaaaataggaccaggtgaaacatgtagtcattttttaaaaacatgtacttggtcttttgtgtgtgtctgttttattccattagaataaatgtgtccttgatgtaaatgcaaagcatttcttcctgattaaattgtagatgtagactttacaatataattcaataataaaaagtaattaacctcta

SEQ ID NO: 289107 - DNA, 3623 bp, Homo sapiens
gcgaagcaggctgctcgcctcctgcctgtagtgtgtgggctggggttggtgcgagcttccagcttggccgcagttggttcgtagttcggctctggggtcttttgtgtccgggtctggcttggctttgtgtccgcgagtttttgttccgctccgcagcgctcttcccgggcaggagccgtgaggctcggaggcggcagcgcggtccccggccaggagcaagcgcgccggcgtgagcggcggcggcaaaggctgtggggagggggcttcgcagatccccgagatgccggagttcctggaagacccctcggtcctgacaaaagacaagttgaagagtgagttggtcgccaacaatgtgacgctgccggccggggagcagcgcaaagacgtgtacgtccagctctacctgcagcacctcacggctcgcaaccggccgccgctccccgccggcaccaacagcaaggggcccccggacttctccagtgacgaagagcgcgagcccaccccggtcctcggctctggggccgccgccgcgggccggagccgagcagccgtcggcaggaaagccacaaaaaaaactgataaacccagacaagaagataaagatgatctagatgtaacagagctcactaatgaagatcttttggatcagcttgtgaaatacggagtgaatcctggtcctattgtgggaacaaccaggaagctatatgagaaaaagcttttgaaactgagggaacaaggaacagaatcaagatcttctactcctctgccaacaatttcttcttcagcagaaaatacaaggcagaatggaagtaatgattctgacagatacagtgacaatgaagaagactctaaaatagagctcaagcttgagaagagagaaccactaaagggcagagcaaagactccagtaacactcaagcaaagaagagttgagcacaatcagagctattctcaagctggaataactgagactgaatggacaagtggatcttcaaaaggcggacctctgcaggcattaactagggaatctacaagagggtcaagaagaactccaaggaaaagggtggaaacttcagaacattttcgtatagatggtccagtaatttcagagagtactcccatagctgaaactataatggcttcaagcaacgaatccttagttgtcaatagggtgactggaaatttcaagcatgcatctcctattctgccaatcactgaattctcagacatacccagaagagcaccaaagaaaccattgacaagagctgaagtgggagaaaaaacagaggaaagaagagtagaaagggatattcttaaggaaatgttcccctatgaagcatctacaccaacaggaattagtgctagttgccgcagaccaatcaaaggggctgcaggccggccattagaactcagtgatttcaggatggaggagtctttttcatctaaatatgttcctaagtatgttcccttggcagatgtcaagtcagaaaagacaaaaaagggacgctccattcccgtatggataaaaattttgctgtttgttgttgtggcagtttttttgtttttggtctatcaagctatggaaaccaaccaagtaaatcccttctctaattttcttcatgttgaccctagaaaatccaactgaatggtatctctttggcacgttcaacttggtctcctattttcaataactgttgaaaaacatttgtgtacacttgttgactccaagaactaaaaataatgtgatttcgcctcaataaatgtagtatttcattgaaaagcaaacaaaatatatataaatggacttcattaaaatgtttttgaactttggactagtaggagatcactttgtgccatatgaataatcttttttagctctggaactttttgtaggctttatttttttaatgtgggcatcttatttcatttttgaaaaaatgtatatgttttttgtgtatttgggaaacgaagggtgaaacatggtagtataatgtgaagctacacatttaaatacttagaattcttacagaaaagattttaagaattattctctgctgaataaaaactgcaaatatgtgaaacataatgaaattcagtaagaggaaaagtaacttggttgtactttttgtaactgcaacaaagtttgatggtgtttatgaggaaaagtacagcaataatctcttctgtaacctttattaatagtaatgttgttgtagccctatcatactcactttttaagacacagtatcatgaaagtcctatttcagtaagacccatttacatacagtagatttttagcagagatcttttagtgtaacatacatattttagagaattgttggctagctgtacatgttttgaaaagctgtttagctagctataaggctataattggaaatttgtattttttatttacagcaaaacatttattcagtcatccagtttgctaccaaaatatgttttagataagtgtgtgtatgtttgtttagaagttagaaattgtaaacactggtcttatgtttcatttggattcattattgcattgtcttgttaccagaaacaaattttgccgagctttttttgccctatatttcccagcataatttgattagaaagtacaaaaagggccgggcgcggtggcttacgcctgtaatcccagcactttgggaggccagggcgggtggatcacgaggtcaggagatcgagaccatcctggccaacatggtgaaaccccgtctctactaaaaatacaaaaaaattacgctgggcgtgatgatgtgcgcctgtagtcctgtctactagggagactgaggcaggagaatcgtttgaacccaggaggcagaggttgcagtgagcagagattacgtcactgcactgtagcctggcgacagagcgagactccatctcaaaaaaaataaaaaagtacaaaaagtacttgcttttatattacatcataagcagtagttaataaagttgtatactcttaagaggtgggcattatgattattttttatttttttattttttatgagatggagtctcgctcttgtcacccagactgtagtgcagtggcacgatctgggctcggtgcaacctctgcctcccgggttcaagcaattttcctgcctcggcagagacggggtttcaccatgttggccaggctggtctcgaacccctgacctcaagtgatcagcccacctcagcttcccaaagtgctgggattacaggtgtgatccactgcacccggccggcattatgattttgtgtactcttgaaatggttatctttgtggatgatttttttttttaagctgaaacttacctcatgaataacttgattaaagtagtaggtgattaaaatttcaatagaatcaaatgagacaaaaattttaaactgactcatttgagtttcaactttacagtcattgaccataaagcacactaaaaatgtaagttattcatgaggtaagtttcagctttaaaaaaaaaatcttccacaaagatttaccattttcaagaagtacacaataatcataatgccggccgggttgcagatggatcacaccgtttaatcccagaacaaagggaaacaccgggaattcctctaaagttcgacctgtgcag

SEQ ID NO: 289108 - DNA, 3604 bp, Homo sapiens
gcgaagcaggctgctcgcctcctgcctgtagtgtgtgggctggggttggtgcgagcttccagcttggccgcagttggttcgtagttcggctctggggtcttttgtgtccgggtctggcttggctttgtgtccgcgagtttttgttccgctccgcagcgctcttcccgggcaggagccgtgaggctcggaggcggcagcgcggtccccggccaggagcaagcgcgccggcgtgagcggcggcggcaaaggctgtggggagggggcttcgcagatccccgagatgccggagttcctggaagacccctcggtcctgacaaaagacaagttgaagagtgagttggtcgccaacaatgtgacgctgccggccggggagcagcgcaaagacgtgtacgtccagctctacctgcagcacctcacggctcgcaaccggccgccgctccccgccggcaccaacagcaaggggcccccggacttctccagtgacgaagagcgcgagcccaccccggtcctcggctctggggccgccgccgcgggccggagccgagcagccgtcggcaggaaagccacaaaaaaaactgataaacccagacaagaagataaagatgatctagatgtaacagagctcactaatgaagatcttttggatcagcttgtgaaatacggagtgaatcctggtcctattgtgggaacaaccaggaagctatatgagaaaaagcttttgaaactgagggaacaaggaacagaatcaagatcttctactcctctgccaacaatttcttcttcagcagagaaagaagaaagaacacaagaaagtgaagtccactagggatattgttcctttttctgaacttggaactactccctctggtggtggattttttcagggtatttcttttcctgaaatctccacccgtcctcctttgggcagtaccgaactacaggcagctaagaaagtacatacttctaagggagacctacctagggagcctcttgttgccacaaacttgcctggcaggggacagttgcagaagttagcctctgaaaggaatttgtttatttcatgcaagtctagccatgataggtgtttagagaaaagttcttcgtcatcttctcagcctgaacacagtgccatgttggtctctactgcagcttctccttcactgattaaagaaaccaccactggttactataaagacatagtagaaaatatttgcggtagagagaaaagtggaattcaaccattatgtcctgagaggtcccatatttcagatcaatcgcctctctccagtaaaaggaaagcactagaagagtctgagagctcacaactaatttctccgccacttgcccaggcaatcagagattatgtcaattctctgttggtccagggtggggtaggtagtttgcctggaacttctaactctatgcccccactggatgtagaaaacatacagaagagaattgatcagtctaagtttcaagaaactgaattcctgtctcctccaagaaaagtccctagactgagtgagaagtcagtggaggaaagggattcaggttcctttgtggcatttcagaacatacctggatccgaactgatgtcttcttttgccaaaactgttgtctctcattcactcactaccttaggtctagaagtggctaagcaatcacagcatgataaaatagatgcctcagaactatcttttcccttccatgaatctattttaaaagtaattgaagaagaatggcagcaagttgacaggcagctgccttcactggcatgcaaatatccagtttcttccagggaggcaacacagatattatcagttccaaaagtagatgatgaaatcctagggtttatttctgaagccactccactaggaggtattcaagcagcctccactgagtcttgcaatcagcagttggacttagcactctgtagagcatatgaagctgcagcatcagcattgcagattgcaactcacactgcctttgtagctaaggctatgcaggcagacattagtcaagctgcacagattcttagctcagatcctagtcgtacccaccaagcgcttgggattctgagcaaaacatatgatgcagcctcatatatttgtgaagctgcatttgatgaagtgaagatggctgcccataccatgggaaatgccactgtaggtcgtcgatacctctggctgaaggattgcaaaattaatttagcttctaagaataagctggcttccactccctttaaaggtggaacattatttggaggagaagtatgcaaagtaattaaaaagcgtggaaataaacactagtaaaattaaggacaaaaagacatctatcttatctttcaggtactttatgccaacattttcttttctgttaaggttgttttagtttccagatagggctaattacaaaatgttaagcttctacccatcaaattacagtataaaagtaattgcctgtgtagaactacttgtcttttctaaagatttgcgtagataggaagcctggtacaaacaatttaacgctttctagatcacatattagtctctaagttgttttctgtttcctgctttacttatgtttttacaattctccaaaactaagaaaattctaattaggatataaggagtatttactgttcaatagaataatatgcatcctcctttatacctaggacagaattaaacatttgttacacattcagaacagtgatgttgttctttttgatacttttatctcagtatcttttcacgttccataacttgtccatatttttgctcatattttcttacttttctttgttatttattcatgtctgcaacatcaatcatagtagtctagatcaatgcaactcaaagcaccagtctacaaactgttacttatccacaggcaagataagcatgcacaagaatttaaatctagagatactttttaggtcaatgacaggatttgattttttagcaaaattttattaatagctaaagcaatgtattgatttacactctgatgcaagtaatttatctcttcattgactggtagcaaccaattcatggaccagtaccatggaccacactttgagaaacacttctttggataataatagatatcctgggatagtgcatgttcaccatctattttgtcagataatggggccttttaaaaaataatactttgctttcatgatatattgtattttgtggaaagttaagtttagcaatatagactctaaaagcaaattaaatttttttaagccataagaaattatactatatcccagtatctgtatgtctgtataaagcagtgtattatcatgttttcatttctgtgattgtaagttaagagtcttaactgcagaggtattgtggaaagtagtagccttaagcataataaaatatggtctcttgggtactccctctggccattaccacattcttagattatatgtgtccatctttgcagctttctgagagtaattttatttgttgtcttctgaaatgtacatgtatacatgtacctactgagtgctatgtgatttttaaaaatgtattactgtagaatgcttctgcaaattcaataaagttgttaaatttgaaaaaaaatg

SEQ ID NO: 289109 - DNA, 983 bp, Homo sapiens
gcgaagcaggctgctcgcctcctgcctgtagtgtgtgggctggggttggtgcgagcttccagcttggccgcagttggttcgtagttcggctctgggtgctgggattacaggtgtgatccactgcacccggccggcattatgattttgtgtactcttgaaatggttatctttgtggatgatttttttttttaagctgaaacttacctcatgaataacttgattaaagtagtaggtgattaaaatttcaatagaatcaaatgagacaaaaattttaaactgactcatttgagtttcaactttacagtcattgaccataaagcacactaaaaatgtaagttatttttaaatacatctgaaataaaaatacttactaaaaaggaagaagccgaagatgtatatttagaccagcacacaattttgatttcaattagccttattctaatatttagcttttagatctttcatacacattttcacgtactttgcaattgagaccagaaagacttgtaggtctttctgcagaatgagtgggtccttgcaaagtgagtgggaaacttactcctagatcagaaatgtttgcctctctgagtaaaatgtttctttcagatgagccatagagggggcaccttttactcaacttttctttgttttgaaactttgtttcccatactgttttcagccttttgtttataattagaaattgtgagaagcttcatttagtgtttaaaaatgtggggagataaatcagacttaacatgtatgtaagatcaattcacttaaaagtatggtccaaatagcaaaaataggaccaggtgaaacatgtagtcattttttaaaaacatgtacttggtcttttgtgtgtgtctgttttattccattagaataaatgtgtccttgatgtaaatgcaaagcatttcttcctgattaaattgtagatgtagactttacaatataattcaataataaaaagtaattaacctcta

SEQ ID NO: 289110 - DNA, 1803 bp, Homo sapiens
taggctagtacgaggctgggtgtgaatcggcgatgatgaaatcctagggtttatttctgaagccactccactaggaggtattcaagcagcctccactgagtcttgcaatcagcagttggacttagcactctgtagagcatatgaagctgcagcatcagcattgcagattgcaactcacactgcctttgtagctaaggctatgcaggcagacattagtcaagctgcacagattcttagctcagatcctagtcgtacccaccaagcgcttgggattctgagcaaaacatatgatgcagcctcatatatttgtgaagctgcatttgatgaagtgaagatggctgcccataccatgggaaatgccactgtaggtcgtcgatacctctggctgaaggattgcaaaattaatttagcttctaagaataagctggcttccactccctttaaaggtggaacattatttggaggagaagtatgcaaagtaattaaaaagcgtggaaataaacactagtaaaattaaggacaaaaagacatctatcttatctttcaggtactttatgccaacattttcttttctgttaaggttgttttagtttccagatagggctaattacaaaatgttaagcttctacccatcaaattacagtataaaagtaattgcctgtgtagaactacttgtcttttctaaagatttgcgtagataggaagcctggtacaaacaatttaacgctttctagatcacatattagtctctaagttgttttctgtttcctgctttacttatgtttttacaattctccaaaactaagaaaattctaattaggatataaggagtatttactgttcaatagaataatatgcatcctcctttatacctaggacagaattaaacatttgttacacattcagaacagtgatgttgttctttttgatacttttatctcagtatcttttcacgttccataacttgtccatatttttgctcatattttcttacttttctttgttatttattcatgtctgcaacatcaatcatagtagtctagatcaatgcaactcaaagcaccagtctacaaactgttacttatccacaggcaagataagcatgcacaagaatttaaatctagagatactttttaggtcaatgacaggatttgattttttagcaaaattttattaatagctaaagcaatgtattgatttacactctgatgcaagtaatttatctcttcattgactggtagcaaccaattcatggaccagtaccatggaccacactttgagaaacacttctttggataataatagatatcctgggatagtgcatgttcaccatctattttgtcagataatggggccttttaaaaaataatactttgctttcatgatatattgtattttgtggaaagttaagtttagcaatatagactctaaaagcaaattaaatttttttaagccataagaaattatactatatcccagtatctgtatgtctgtataaagcagtgtattatcatgttttcatttctgtgattgtaagttaagagtcttaactgcagaggtattgtggaaagtagtagccttaagcataataaaatatggtctcttgggtactccctctggccattaccacattcttagattatatgtgtccatctttgcagctttctgagagtaattttatttgttgtcttctgaaatgtacatgtatacatgtacctactgagtgctatgtgatttttaaaaatgtattactgtagaatgcttctgcaaattcaataaagttgttaaatttgaaaaaaaatg

SEQ ID NO: 289111 - DNA, 2747 bp, Homo sapiens
gcgaagcaggctgctcgcctcctgcctgtagtgtgtgggctggggttggtgcgagcttccagcttggccgcagttggttcgtagttcggctctggggtcttttgtgtccgggtctggcttggctttgtgtccgcgagtttttgttccgctccgcagcgctcttcccgggcaggagccgtgaggctcggaggcggcagcgcggtccccggccaggagcaagcgcgccggcgtgagcggcggcggcaaaggctgtggggagggggcttcgcagatccccgagatgccggagttcctggaagacccctcggtcctgacaaaagacaagttgaagagtgagttggtcgccaacaatgtgacgctgccggccggggagcagcgcaaagacgtgtacgtccagctctacctgcagcacctcacggctcgcaaccggccgccgctccccgccggcaccaacagcaaggggcccccggacttctccagtgacgaagagcgcgagcccaccccggtcctcggctctggggccgccgccgcgggccggagccgagcagccgtcggcaggaaagccacaaaaaaaactgataaacccagacaagaagataaagatgatctagatgtaacagagctcactaatgaagatcttttggatcagcttgtgaaatacggagtgaatcctggtcctattgtgggaacaaccaggaagctatatgagaaaaagcttttgaaactgagggaacaaggaacagaatcaagatcttctactcctctgccaacaatttcttcttcagcagaaaatacaaggcagaatggaagtaatgattctgacagatacagtgacaatgaagaagactctaaaatagagctcaagcttgagaagagagaaccactaaagggcagagcaaagactccagtaacactcaagcaaagaagagttgagcacaatcagagctattctcaagctggaataactgagactgaatggacaagtggatcttcaaaaggcggacctctgcaggcattaactagggaatctacaagagggtcaagaagaactccaaggaaaagggtggaaacttcagaacattttcgtatagatggtccagtaatttcagagagtactcccatagctgaaactataatggcttcaagcaacgaatccttagttgtcaatagggtgactggaaatttcaagcatgcatctcctattctgccaatcactgaattctcagacatacccagaagagcaccaaagaaaccattgacaagagctgaagtgggagaaaaaacagaggaaagaagagtagaaagggatattcttaaggaaatgttcccctatgaagcatctacaccaacaggaattagtgctagttgccgcagaccaatcaaaggggctgcaggccggccattagaactcagtgatttcaggatggaggagtctttttcatctaaatatgttcctaagtatgttcccttggcagatgtcaagtcagaaaagacaaaaaagggacgctccattcccgtatggataaaaattttgctgtttgttgttgtggcagtttttttgtttttggtctatcaagctatggaaaccaaccaagtaaatcccttctctaattttcttcatgttgaccctagaaaatccaactgaatggtatctctttggcacgttcaacttggtctcctattttcaataactgttgaaaaacatttgtgtacacttgttgactccaagaactaaaaataatgtgatttcgcctcaataaatgtagtatttcattgaaaagcaaacaaaatatatataaatggacttcattaaaatgtttttgaactttggactagtaggagatcactttgtgccatatgaataatcttttttagctctggaactttttgtaggctttatttttttaatgtgggcatcttatttcatttttgaaaaaatgtatatgttttttgtgtatttgggaaacgaagggtgaaacatggtagtataatgtgaagctacacatttaaatacttagaattcttacagaaaagattttaagaattattctctgctgaataaaaactgcaaatatgtgaaacaaaaatttcaatagaatcaaatgagacaaaaattttaaactgactcatttgagtttcaactttacagtcattgaccataaagcacactaaaaatgtaagttatttttaaatacatctgaaataaaaatacttactaaaaaggaagaagccgaagatgtatatttagaccagcacacaattttgatttcaattagccttattctaatatttagcttttagatctttcatacacattttcacgtactttgcaattgagaccagaaagacttgtaggtctttctgcagaatgagtgggtccttgcaaagtgagtgggaaacttactcctagatcagaaatgtttgcctctctgagtaaaatgtttctttcagatgagccatagagggggcaccttttactcaacttttctttgttttgaaactttgtttcccatactgttttcagccttttgtttataattagaaattgtgagaagcttcatttagtgtttaaaaatgtggggagataaatcagacttaacatgtatgtaagatcaattcacttaaaagtatggtccaaatagcaaaaataggaccaggtgaaacatgtagtcattttttaaaaacatgtacttggtcttttgtgtgtgtctgttttattccattagaataaatgtgtccttgatgta

SEQ ID NO: 289112 - DNA, 1286 bp, Homo sapiens
tttttcccccgctcaatatgttttatcaaaatttaccccgtagcgtaaatcatttattccccaccacatataatgagatagtgtgtttacaccaagattgccctcgtgatattttacatatatacgcctcgaaatcattacaatcttccactaggtgtaaaagtactcccccgactatttttctcctcacccccccgccaccaataaggtgcggttttcttctccccaacaaataaccacactctcgcgcctcgtgatttccatcctctcccactatttatcaagcaccccaccactactataaatacaactccccccctcaattgggcaccccatttctatataaaaaatggatgttgctgctcaaataaatccgttcgctccccgcagaatagcttttatcggcgccgccccccctcctttatttttttttttttttttttttttttttttttttttttttttttttttatctttttttctttgttatttattcatgtctgcaacatcaatcatagtagtctagatcaatgcaactcaaagcaccagtctacaaactgttacttatccacaggcaagataagcatgcacaagaatttaaatctagagatactttttaggtcaatgacaggatttgattttttagcaaaattttattaatagctaaagcaatgtattgatttacactctgatgcaagtaatttatctcttcattgactggtagcaaccaattcatggaccagtaccatggaccacactttgagaaacacttctttggataataatagatatcctgggatagtgcatgttcaccatctattttgtcagataatggggccttttaaaaaataatactttgctttcatgatatattgtattttgtggaaagttaagtttagcaatatagactctaaaagcaaattaaatttttttaagccataagaaattatactatatcccagtatctgtatgtctgtataaagcagtgtattatcatgttttcatttctgtgattgtaagttaagagtcttaactgcagaggtattgtggaaagtagtagccttaagcataataaaatatggtctcttgggtactccctctggccattaccacattcttagattatatgtgtccatctttgcagctttctgagagtaattttatttgttgtcttctgaaatgtacatgtatacatgtacctactgagtgctatgtgatttttaaaaatgtattactgtagaatgcttctgcaaattcaataaagttgttaaatttgaaaaaaaatg

SEQ ID NO: 289113 - DNA, 1285 bp, Homo sapiens
gcgaagcaggctgctcgcctcctgcctgtagtgtgtgggctggggttggtgcgagcttccagcttggccgcagttggttcgtagttcggctctggggtcttttgtgtccgggtctggcttggctttgtgtccgcgagtttttgttccgctccgcagcgctcttcccgggcaggagccgtgaggctcggaggcggcagcgcggtccccggccaggagcaagcgcgccggcgtgagcggcggcggcaaaggctgtggggagggggcttcgcagatccccgagatgccggagttcctggaagacccctcggtcctgacaaaagacaagttgaagagtgagttggtcgccaacaatgtgacgctgccggccggggagcagcgcaaagacgtgtacgtccagctctacctgcagcacctcacggctcgcaaccggccgccgctccccgccggcaccaacagcaaggggcccccggacttctccagtgacgaagagcgcgagcccaccccggtcctcggctctggggccgccgccgcgggccggagccgagcagccgtcggcaggaaagccacaaaaaaaactgataaacccagacaagaagataaagatgatctagatgtaacagagctcactaatgaagatcttttggatcagcttgtgaaatacggagtgaatcctggtcctattgtgggaacaaccaggaagctatatgagaaaaagcttttgaaactgagggaacaaggaacagaatcaagatcttctactcctctgccaacaatttcttcttcagcagaaaatacaaggcagaatggaagtaatgattctgacagatacagtgacaatgaagaaggtaaaattttaaatgatgttaatcaaatgtatgtaattttttcacactcaaaattcagtgaccatgaagaaagtaaaatttaaaacaatattggcaagatacacaaattttattcgtgtcattagagtaattctgtaatttgatttaaatactttttattgaaaattctaagaagcaacatagtacaaattcataattttccatcacctgaaattgcaagttaactttgtcttttttgctacaaatctaatttttctgagagaataaagtattacaagtaaaggcaaagtttctcgtacttacctgtacctatcacctccacagaagtaactactattattaattcaatgcctgtctttcaagttttatatttcacatacacatctgtctaatacatggtattattttatactttaagaataaaaaatttatataaacag

SEQ ID NO: 289114 - DNA, 966 bp, Homo sapiens
  misc_feature (688)..(688): n is a, c, g, or t
  misc_feature (691)..(692): n is a, c, g, or t
  misc_feature (699)..(700): n is a, c, g, or t
  misc_feature (703)..(703): n is a, c, g, or t
  misc_feature (705)..(705): n is a, c, g, or t
  misc_feature (708)..(708): n is a, c, g, or t
  misc_feature (710)..(710): n is a, c, g, or t
  misc_feature (713)..(713): n is a, c, g, or t
  misc_feature (722)..(722): n is a, c, g, or t
  misc_feature (726)..(726): n is a, c, g, or t
  misc_feature (728)..(728): n is a, c, g, or t
  misc_feature (771)..(771): n is a, c, g, or t
  misc_feature (804)..(804): n is a, c, g, or t
  misc_feature (941)..(941): n is a, c, g, or t
gcgaagcaggctgctcgcctcctgcctgtagtgtgtgggctggggttggtgcgagcttccagcttggccgcagttggttcgtagttcggctctggggtcttttgtgtccgggtctggcttggctttgtgtccgcgagtttttgttccgctccgcagcgctcttcccgggcaggagccgtgaggctcggaggcggcagcgcggtccccggccaggagcaagcgcgccggcgtgagcggcggcggcaaaggctgtggggagggggcttcgcagatccccgagatgccggagttcctggaagacccctcggtcctgacaaaagacaagttgaagagtgagttggtcgccaacaatgtgacgctgccggccggggagcagcgcaaagacgtgtacgtccagctctacctgcagcacctcacggctcgcaaccggccgccgctccccgccggcaccaacagcaaggggcccccggacttctccagtgacgaagagcgcgagcccaccccggtcctcggctctggggccgccgccgcgggccggagccgagcagccgtcggcaggaaagccacaaaaaaaactgataaacccagacaagaagataaagatgatctagatgtaacagagctcactaatgaagatcttttggatcagcttgtgaaatacggagtgaatcctggtcctattgtgggnacnnccaggannctntntgngnccncgcttttgnccangngggcaccccggccccgcctccacagctcttttcctagtgtggnccacctttgttgttgcagcacccctccccgggngcctggccagtcctgcttttgcaccgctcccagatagcccctgccagccgacactatcccctcgcagttacacaggttgcagccgcagcgccctcatcccgggacagcgccccgcatggcgtccccctcccaccccnccgcgttgcaacccctacgcgctct

SEQ ID NO: 289115 - DNA, 1519 bp, Homo sapiens
gcgaagcaggctgctcgcctcctgcctgtagtgtgtgggctggggttggtgcgagcttccagcttggccgcagttggttcgtagttcggctctggggtcttttgtgtccgggtctggcttggctttgtgtccgcgagtttttgttccgctccgcagcgctcttcccgggcaggagccgtgaggctcggaggcggcagcgcggtccccggccaggagcaagcgcgccggcgtgagcggcggcggcaaaggctgtggggagggggcttcgcagatccccgagatgccggagttcctggaagacccctcggtcctgacaaaagacaagttgaagagtgagttggtcgccaacaatgtgacgctgccggccggggagcagcgcaaagacgtgtacgtccagctctacctgcagcacctcacggctcgcaaccggccgccgctccccgccggcaccaacagcaaggggcccccggacttctccagtgacgaagagcgcgagcccaccccggtcctcggctctggggccgccgccgcgggccggagccgagcagccgtcggcaggaaagccacaaaaaaaactgataaacccagacaagaagataaagatgatctagatgtaacagagctcactaatgaagatcttttggatcagcttgtgaaatacggagtgaatcctggtcctattgtgggaacaaccaggaagctatatgagaaaaagcttttgaaactgagggaacaaggaacagaatcaagatcttctactcctctgccaacaatttcttcttcagcagaaaatacaaggcagaatggaagtaatgattctgacagatacagtgacaatgaagaagactctaaaatagagctcaagcttgagaagagagaaccactaaagggcagagcaaagactccagtaacactcaagcaaagaagagttgagcacaatcaggtgggagaaaaaacagaggaaagaagagtagaaagggatattcttaaggaaatgttcccctatgaagcatctacaccaacaggaattagtgctagttgccgcagaccaatcaaaggggctgcaggccggccattagaactcagtgatttcaggatggaggagtctttttcatctaaatatgttcctaagtatgttcccttggcagatgtcaagtcagaaaagacaaaaaagggacgctccattcccgtatggataaaaattttgctgtttgttgttgtggcagtttttttgtttttggtctatcaagctatggaaaccaaccaagtaaatcccttctctaattttcttcatgttgaccctagaaaatccaactgaatggtatctctttggcacgttcaacttggtctcctattttcaataactgttgaaaaacatttgtgtacacttgttgactccaagaactaaaaataatgtgatttcgcctcaataaatgtagtatttcattgaaaagcaaacaaaatatatataaatggacttcattaaaatgtttttgaactttggactagtaggagatca

SEQ ID NO: 289116 - DNA, 3660 bp, Homo sapiens
gcgaagcaggctgctcgcctcctgcctgtagtgtgtgggctggggttggtgcgagcttccagcttggccgcagttggttcgtagttcggctctggggtcttttgtgtccgggtctggcttggctttgtgtccgcgagtttttgttccgctccgcagcgctcttcccgggcaggagccgtgaggctcggaggcggcagcgcggtccccggccaggagcaagcgcgccggcgtgagcggcggcggcaaaggctgtggggagggggcttcgcagatccccgagatgccggagttcctggaagacccctcggtcctgacaaaagacaagttgaagagtgagttggtcgccaacaatgtgacgctgccggccggggagcagcgcaaagacgtgtacgtccagctctacctgcagcacctcacggctcgcaaccggccgccgctccccgccggcaccaacagcaaggggcccccggacttctccagtgacgaagagcgcgagcccaccccggtcctcggctctggggccgccgccgcgggccggagccgagcagccgtcggcaggaaagccacaaaaaaaactgataaacccagacaagaagataaagatgatctagatgtaacagagctcactaatgaagatcttttggatcagcttgtgaaatacggagtgaatcctggtcctattgtgggaacaaccaggaagctatatgagaaaaagcttttgaaactgagggaacaaggaacagaatcaagatcttctactcctctgccaacaatttcttcttcagcagaaaatacaaggcagaatggaagtaatgattctgacagatacagtgacaatgaagaaggaaagaagaaagaacacaagaaagtgaagtccactagggatattgttcctttttctgaacttggaactactccctctggtggtggattttttcagggtatttcttttcctgaaatctccacccgtcctcctttgggcagtaccgaactacaggcagctaagaaagtacatacttctaagggagacctacctagggagcctcttgttgccacaaacttgcctggcaggggacagttgcagaagttagcctctgaaaggaatttgtttatttcatgcaagtctagccatgataggtgtttagagaaaagttcttcgtcatcttctcagcctgaacacagtgccatgttggtctctactgcagcttctccttcactgattaaagaaaccaccactggttactataaagacatagtagaaaatatttgcggtagagagaaaagtggaattcaaccattatgtcctgagaggtcccatatttcagatcaatcgcctctctccagtaaaaggaaagcactagaagagtctgagagctcacaactaatttctccgccacttgcccaggcaatcagagattatgtcaattctctgttggtccagggtggggtaggtagtttgcctggaacttctaactctatgcccccactggatgtagaaaacatacagaagagaattgatcagtctaagtttcaagaaactgaattcctgtctcctccaagaaaagtccctagactgagtgagaagtcagtggaggaaagggattcaggttcctttgtggcatttcagaacatacctggatccgaactgatgtcttcttttgccaaaactgttgtctctcattcactcactaccttaggtctagaagtggctaagcaatcacagcatgataaaatagatgcctcagaactatcttttcccttccatgaatctattttaaaagtaattgaagaagaatggcagcaagttgacaggcagctgccttcactggcatgcaaatatccagtttcttccagggaggcaacacagatattatcagttccaaaagtagatgatgaaatcctagggtttatttctgaagccactccactaggaggtattcaagcagcctccactgagtcttgcaatcagcagttggacttagcactctgtagagcatatgaagctgcagcatcagcattgcagattgcaactcacactgcctttgtagctaaggctatgcaggcagacattagtcaagctgcacagattcttagctcagatcctagtcgtacccaccaagcgcttgggattctgagcaaaacatatgatgcagcctcatatatttgtgaagctgcatttgatgaagtgaagatggctgcccataccatgggaaatgccactgtaggtcgtcgatacctctggctgaaggattgcaaaattaatttagcttctaagaataagctggcttccactccctttaaaggtggaacattatttggaggagaagtatgcaaagtaattaaaaagcgtggaaataaacactagtaaaattaaggacaaaaagacatctatcttatctttcaggtactttatgccaacattttcttttctgttaaggttgttttagtttccagatagggctaattacaaaatgttaagcttctacccatcaaattacagtataaaagtaattgcctgtgtagaactacttgtcttttctaaagatttgcgtagataggaagcctggtacaaacaatttaacgctttctagatcacatattagtctctaagttgttttctgtttcctgctttacttatgtttttacaattctccaaaactaagaaaattctaattaggatataaggagtatttactgttcaatagaataatatgcatcctcctttatacctaggacagaattaaacatttgttacacattcagaacagtgatgttgttctttttgatacttttatctcagtatcttttcacgttccataacttgtccatatttttgctcatattttcttacttttctttgttatttattcatgtctgcaacatcaatcatagtagtctagatcaatgcaactcaaagcaccagtctacaaactgttacttatccacaggcaagataagcatgcacaagaatttaaatctagagatactttttaggtcaatgacaggatttgattttttagcaaaattttattaatagctaaagcaatgtattgatttacactctgatgcaagtaatttatctcttcattgactggtagcaaccaattcatggaccagtaccatggaccacactttgagaaacacttctttggataataatagatatcctgggatagtgcatgttcaccatctattttgtcagataatggggccttttaaaaaataatactttgctttcatgatatattgtattttgtggaaagttaagtttagcaatatagactctaaaagcaaattaaatttttttaagccataagaaattatactatatcccagtatctgtatgtctgtataaagcagtgtattatcatgttttcatttctgtgattgtaagttaagagtcttaactgcagaggtattgtggaaagtagtagccttaagcataataaaatatggtctcttgggtactccctctggccattaccacattcttagattatatgtgtccatctttgcagctttctgagagtaattttatttgttgtcttctgaaatgtacatgtatacatgtacctactgagtgctatgtgatttttaaaaatgtattactgtagaatgcttctgcaaattcaataaagttgttaaatttgaaaaaaaatg

SEQ ID NO: 289117 - DNA, 4173 bp, Homo sapiens
gcgaagcaggctgctcgcctcctgcctgtagtgtgtgggctggggttggtgcgagcttccagcttggccgcagttggttcgtagttcggctctggggtcttttgtgtccgggtctggcttggctttgtgtccgcgagtttttgttccgctccgcagcgctcttcccgggcaggagccgtgaggctcggaggcggcagcgcggtccccggccaggagcaagcgcgccggcgtgagcggcggcggcaaaggctgtggggagggggcttcgcagatccccgagatgccggagttcctggaagacccctcggtcctgacaaaagacaagttgaagagtgagttggtcgccaacaatgtgacgctgccggccggggagcagcgcaaagacgtgtacgtccagctctacctgcagcacctcacggctcgcaaccggccgccgctccccgccggcaccaacagcaaggggcccccggacttctccagtgacgaagagcgcgagcccaccccggtcctcggctctggggccgccgccgcgggccggagccgagcagccgtcggcaggaaagccacaaaaaaaactgataaacccagacaagaagataaagatgatctagatgtaacagagctcactaatgaagatcttttggatcagcttgtgaaatacggagtgaatcctggtcctattgtgggaacaaccaggaagctatatgagaaaaagcttttgaaactgagggaacaaggaacagaatcaagatcttctactcctctgccaacaatttcttcttcagcagaaaatacaaggcagaatggaagtaatgattctgacagatacagtgacaatgaagaagactctaaaatagagctcaagcttgagaagagagaaccactaaagggcagagcaaagactccagtaacactcaagcaaagaagagttgagcacaatcagagctattctcaagctggaataactgagactgaatggacaagtggatcttcaaaaggcggacctctgcaggcattaactagggaatctacaagagggtcaagaagaactccaaggaaaagggtggaaacttcagaacattttcgtatagatggtccagtaatttcagagagtactcccatagctgaaactataatggcttcaagcaacgaatccttagttgtcaatagggtgactggaaatttcaagcatgcatctcctattctgccaatcactgaattctcagacatacccagaagagcaccaaagaaaccattgacaagagctgaagtgggagaaaaaacagaggaaagaagagtagaaagggatattcttaaggaaatgttcccctatgaagcatctacaccaacaggaattagtgctagttgccgcagaccaatcaaaggggctgcaggccggccattagaactcagtgatttcaggatggaggagtctttttcatctaaatatgttcctaagtatgttcccttggcagatgtcaagtcagaaaagacaaaaaagggacgctccattcccgtatggataaaaattttgctgtttgttgttgtggcagtttttttgtttttggtctatcaagctatggaaaccaaccaagtaaatcccttctctaattttcttcatgttgaccctagaaaatccaactgaatggtatctctttggcacgttcaacttggtctcctattttcaataactgttgaaaaacatttgtgtacacttgttgactccaagaactaaaaataatgtgatttcgcctcaataaatgtagtatttcattgaaaagcaaacaaaatatatataaatggacttcattaaaatgtttttgaactttggactagtaggagatcactttgtgccatatgaataatcttttttagctctggaactttttgtaggctttatttttttaatgtgggcatcttatttcatttttgaaaaaatgtatatgttttttgtgtatttgggaaacgaagggtgaaacatggtagtataatgtgaagctacacatttaaatacttagaattcttacagaaaagattttaagaattattctctgctgaataaaaactgcaaatatgtgaaacataatgaaattcagtaagaggaaaagtaacttggttgtactttttgtaactgcaacaaagtttgatggtgtttatgaggaaaagtacagcaataatctcttctgtaacctttattaatagtaatgttgttgtagccctatcatactcactttttaagacacagtatcatgaaagtcctatttcagtaagacccatttacatacagtagatttttagcagagatcttttagtgtaacatacatattttagagaattgttggctagctgtacatgttttgaaaagctgtttagctagctataaggctataattggaaatttgtattttttatttacagcaaaacatttattcagtcatccagtttgctaccaaaatatgttttagataagtgtgtgtatgtttgtttagaagttagaaattgtaaacactggtcttatgtttcatttggattcattattgcattgtcttgttaccagaaacaaattttgccgagctttttttgccctatatttcccagcataatttgattagaaagtacaaaaagggccgggcgcggtggcttacgcctgtaatcccagcactttgggaggccagggcgggtggatcacgaggtcaggagatcgagaccatcctggccaacatggtgaaaccccgtctctactaaaaatacaaaaaaattacgctgggcgtgatgatgtgcgcctgtagtcctgtctactagggagactgaggcaggagaatcgtttgaacccaggaggcagaggttgcagtgagcagagattacgtcactgcactgtagcctggcgacagagcgagactccatctcaaaaaaaataaaaaagtacaaaaagtacttgcttttatattacatcataagcagtagttaataaagttgtatactcttaagaggtgggcattatgattattttttatttttttattttttatgagatggagtctcgctcttgtcacccagactgtagtgcagtggcacgatctgggctcggtgcaacctctgcctcccgggttcaagcaattttcctgcctcggcagagacggggtttcaccatgttggccaggctggtctcgaacccctgacctcaagtgatcagcccacctcagcttcccaaagtgctgggattacaggtgtgatccactgcacccggccggcattatgattttgtgtactcttgaaatggttatctttgtggatgatttttttttttaagctgaaacttacctcatgaataacttgattaaagtagtaggtgattaaaatttcaatagaatcaaatgagacaaaaattttaaactgactcatttgagtttcaactttacagtcattgaccataaagcacactaaaaatgtaagttatttttaaatacatctgaaataaaaatacttactaaaaaggaagaagccgaagatgtatatttagaccagcacacaattttgatttcaattagccttattctaatatttagcttttagatctttcatacacattttcacgtactttgcaattgagaccagaaagacttgtaggtctttctgcagaatgagtgggtccttgcaaagtgagtgggaaacttactcctagatcagaaatgtttgcctctctgagtaaaatgtttctttcagatgagccatagagggggcaccttttactcaacttttctttgttttgaaactttgtttcccatactgttttcagccttttgtttataattagaaattgtgagaagcttcatttagtgtttaaaaatgtggggagataaatcagacttaacatgtatgtaagatcaattcacttaaaagtatggtccaaatagcaaaaataggaccaggtgaaacatgtagtcattttttaaaaacatgtacttggtcttttgtgtgtgtctgttttattccattagaataaatgtgtccttgatgtaaatgcaaagcatttcttcctgattaaattgtagatgtagactttacaatataattcaataataaaaagtaattaacctctagttttgtcgttgcaataaatggttttcagatagcacaaactgtcgatttctggataacatttcttatgtaata

SEQ ID NO: 289118 - DNA, 4019 bp, Homo sapiens
gcgaagcaggctgctcgcctcctgcctgtagtgtgtgggctggggttggtgcgagcttccagcttggccgcagttggttcgtagttcggctctggggtcttttgtgtccgggtctggcttggctttgtgtccgcgagtttttgttccgctccgcagcgctcttcccgggcaggagccgtgaggctcggaggcggcagcgcggtccccggccaggagcaagcgcgccggcgtgagcggcggcggcaaaggctgtggggagggggcttcgcagatccccgagatgccggagttcctggaagacccctcggtcctgacaaaagacaagttgaagagtgagttggtcgccaacaatgtgacgctgccggccggggagcagcgcaaagacgtgtacgtccagctctacctgcagcacctcacggctcgcaaccggccgccgctccccgccggcaccaacagcaaggggcccccggacttctccagtgacgaagagcgcgagcccaccccggtcctcggctctggggccgccgccgcgggccggagccgagcagccgtcggcaggaaagccacaaaaaaaactgataaacccagacaagaagataaagatgatctagatgtaacagagctcactaatgaagatcttttggatcagcttgtgaaatacggagtgaatcctggtcctattgtgggaacaaccaggaagctatatgagaaaaagcttttgaaactgagggaacaaggaacagaatcaagatcttctactcctctgccaacaatttcttcttcagcagaaaatacaaggcagaatggaagtaatgattctgacagatacagtgacaatgaagaagactctaaaatagagctcaagcttgagaagagagaaccactaaagggcagagcaaagactccagtaacactcaagcaaagaagagttgagcacaatcagagctattctcaagctggaataactgagactgaatggacaagtggatcttcaaaaggcggacctctgcaggcattaactagggaatctacaagagggtcaagaagaactccaaggaaaagggtggaaacttcagaacattttcgtatagatggtccagtaatttcagagagtactcccatagctgaaactataatggcttcaagcaacgaatccttagttgtcaatagggtgactggaaatttcaagcatgcatctcctattctgccaatcactgaattctcagacatacccagaagagcaccaaagaaaccattgacaagagctgaagtgggagaaaaaacagaggaaagaagagtagaaagggatattcttaaggaaatgttcccctatgaagcatctacaccaacaggaattagtgctagttgccgcagaccaatcaaaggggctgcaggccggccattagaactcagtgatttcaggatggaggagtctttttcatctaaatatgttcctaagtatgttcccttggcagatgtcaagtcagaaaagacaaaaaagggacgctccattcccgtatggataaaaattttgctgtttgttgttgtggcagtttttttgtttttggtctatcaagctatggaaaccaaccaagtaaatcccttctctaattttcttcatgttgaccctagaaaatccaactgaatggtatctctttggcacgttcaacttggtctcctattttcaataactgttgaaaaacatttgtgtacacttgttgactccaagaactaaaaataatgtgatttcgcctcaataaatgtagtatttcattgaaaagcaaacaaaatatatataaatggacttcattaaaatgtttttgaactttggactagtaggagatcactttgtgccatatgaataatcttttttagctctggaactttttgtaggctttatttttttaatgtgggcatcttatttcatttttgaaaaaatgtatatgttttttgtgtatttgggaaacgaagggtgaaacatggtagtataatgtgaagctacacatttaaatacttagaattcttacagaaaagattttaagaattattctctgctgaataaaaactgcaaatatgtgaaacataatgaaattcagtaagaggaaaagtaacttggttgtactttttgtaactgcaacaaagtttgatggtgtttatgaggaaaagtacagcaataatctcttctgtaacctttattaatagtaatgttgttgtagccctatcatactcactttttaagacacagtatcatgaaagtcctatttcagtaagacccatttacatacagtagatttttagcagagatcttttagtgtaacatacatattttagagaattgttggctagctgtacatgttttgaaaagctgtttagctagctataaggctataattggaaatttgtattttttatttacagcaaaacatttattcagtcatccagtttgctaccaaaatatgttttagataagtgtgtgtatgtttgtttagaagttagaaattgtaaacactggtcttatgtttcatttggattcattattgcattgtcttgttaccagaaacaaattttgccgagctttttttgccctatatttcccagcataatttgattagaaagtacaaaaagggccgggcgcggtggcttacgcctgtaatcccagcactttgggaggccagggcgggtggatcacgaggtcaggagatcgagaccatcctggccaacatggtgaaaccccgtctctactaaaaatacaaaaaaattacgctgggcgtgatgatgtgcgcctgtagtcctgtctactagggagactgaggcaggagaatcgtttgaacccaggaggcagaggttgcagtgagcagagattacgtcactgcactgtagcctggcgacagagcgagactccatctcaaaaaaaataaaaaagtacaaaaagtacttgcttttatattacatcataagcagtagttaataaagttgtatactcttaagaggtgggcattatgattattttttatttttttattttttatgagatggagtctcgctcttgtcacccagactgtagtgcagtggcacgatctgggctcggtgcaacctctgcctcccgggttcaagcaattttcctgcctcggcagagacggggtttcaccatgttggccaggctggtctcgaacccctgacctcaagtgatcagcccacctcagcttcccaaagtgctgggattacaggtgtgatccactgcacccggccggcattatgattttgtgtactcttgaaatggttatctttgtggatgatttttttttttaagctgaaacttacctcatgaataacttgattaaagtagtaggtgattaaaatttcaatagaatcaaatgagacaaaaattttaaactgactcatttgagtttcaactttacagtcattgaccataaagcacactaaaaatgtaagttatttttaaatacatctgaaataaaaatacttactaaaaaggaagaagccgaagatgtatatttagaccagcacacaattttgatttcaattagccttattctaatatttagcttttagatctttcatacacattttcacgtactttgcaattgagaccagaaagacttgtaggtctttctgcagaatgagtgggtccttgcaaagtgagtgggaaacttactcctagatcagaaatgtttgcctctctgagtaaaatgtttctttcagatgagccatagagggggcaccttttactcaacttttctttgttttgaaactttgtttcccatactgttttcagccttttgtttataattagaaattgtgagaagcttcatttagtgtttaaaaatgtggggagataaatcagacttaacatgtatgtaagatcaattcacttaaaagtatggtccaaatagcaaaaataggaccaggtgaaacatgtagtcattttttaaaaacatgtacttggtcttttgtgtgtgtctgttttattccattagaataaatgtgtccttgatgta

SEQ ID NO: 289119 - DNA, 3521 bp, Homo sapiens
gcgaagcaggctgctcgcctcctgcctgtagtgtgtgggctggggttggtgcgagcttccagcttggccgcagttggttcgtagttcggctctggggtcttttgtgtccgggtctggcttggctttgtgtccgcgagtttttgttccgctccgcagcgctcttcccgggcaggagccgtgaggctcggaggcggcagcgcggtccccggccaggagcaagcgcgccggcgtgagcggcggcggcaaaggctgtggggagggggcttcgcagatccccgagatgccggagttcctggaagacccctcggtcctgacaaaagacaagttgaagagtgagttggtcgccaacaatgtgacgctgccggccggggagcagcgcaaagacgtgtacgtccagctctacctgcagcacctcacggctcgcaaccggccgccgctccccgccggcaccaacagcaaggggcccccggacttctccagtgacgaagagcgcgagcccaccccggtcctcggctctggggccgccgccgcgggccggagccgagcagccgtcggcaggaaagccacaaaaaaaactgataaacccagacaagaagataaagatgatctagatgtaacagagctcactaatgaagatcttttggatcagcttgtgaaatacggagtgaatcctggtcctattgtgggaacaaccaggaagctatatgagaaaaagcttttgaaactgagggaacaaggaacagaatcaagatcttctactcctctgccaacaatttcttcttcagcagaaaatacaaggcagaatggaagtaatgattctgacagatacagtgacaatgaagaagactctaaaatagagctcaagcttgagaagagagaaccactaaagggcagagcaaagactccagtaacactcaagcaaagaagagttgagcacaatcagagctattctcaagctggaataactgagactgaatggacaagtggatcttcaaaaggcggacctctgcaggcattaactagggaatctacaagagggtcaagaagaactccaaggaaaagggtggaaacttcagaacattttcgtatagatggtccagtaatttcagagagtactcccatagctgaaactataatggcttcaagcaacgaatccttagttgtcaatagggtgactggaaatttcaagcatgcatctcctattctgccaatcactgaattctcagacatacccagaagagcaccaaagaaaccattgacaagagctgaagtgggagaaaaaacagaggaaagaagagtagaaagggatattcttaaggaaatgttcccctatgaagcatctacaccaacaggaattagtgctagttgccgcagaccaatcaaaggggctgcaggccggccattagaactcagtgatttcaggatggaggagtctttttcatctaaatatgttcctaagtatgttcccttggcagatgtcaagtcagaaaagacaaaaaagggacgctccattcccgtatggataaaaattttgctgtttgttgttgtggcagtttttttgtttttggtctatcaagctatggaaaccaaccaagtaaatcccttctctaattttcttcatgttgaccctagaaaatccaactgaatggtatctctttggcacgttcaacttggtctcctattttcaataactgttgaaaaacatttgtgtacacttgttgactccaagaactaaaaataatgtgatttcgcctcaataaatgtagtatttcattgaaaagcaaacaaaatatatataaatggacttcattaaaatgtttttgaactttggactagtaggagatcactttgtgccatatgaataatcttttttagctctggaactttttgtaggctttatttttttaatgtgggcatcttatttcatttttgaaaaaatgtatatgttttttgtgtatttgggaaacgaagggtgaaacatggtagtataatgtgaagctacacatttaaatacttagaattcttacagaaaagattttaagaattattctctgctgaataaaaactgcaaatatgtgaaacataatgaaattcagtaagaggaaaagtaacttggttgtactttttgtaactgcaacaaagtttgatggtgtttatgaggaaaagtacagcaataatctcttctgtaacctttattaatagtaatgttgttgtagccctatcatactcactttttaagacacagtatcatgaaagtcctatttcagtaagacccatttacatacagtagatttttagcagagatcttttagtgtaacatacatattttagagaattgttggctagctgtacatgttttgaaaagctgtttagctagctataaggctataattggaaatttgtattttttatttacagcaaaacatttattcagtcatccagtttgctaccaaaatatgttttagataagtgtgtgtatgtttgtttagaagttagaaattgtaaacactggtcttatgtttcatttggattcattattgcattgtcttgttaccagaaacaaattttgccgagctttttttgccctatatttcccagcataatttgattagaaagtacaaaaagggccgggcgtgctgggattacaggtgtgatccactgcacccggccggcattatgattttgtgtactcttgaaatggttatctttgtggatgatttttttttttaagctgaaacttacctcatgaataacttgattaaagtagtaggtgattaaaatttcaatagaatcaaatgagacaaaaattttaaactgactcatttgagtttcaactttacagtcattgaccataaagcacactaaaaatgtaagttatttttaaatacatctgaaataaaaatacttactaaaaaggaagaagccgaagatgtatatttagaccagcacacaattttgatttcaattagccttattctaatatttagcttttagatctttcatacacattttcacgtactttgcaattgagaccagaaagacttgtaggtctttctgcagaatgagtgggtccttgcaaagtgagtgggaaacttactcctagatcagaaatgtttgcctctctgagtaaaatgtttctttcagatgagccatagagggggcaccttttactcaacttttctttgttttgaaactttgtttcccatactgttttcagccttttgtttataattagaaattgtgagaagcttcatttagtgtttaaaaatgtggggagataaatcagacttaacatgtatgtaagatcaattcacttaaaagtatggtccaaatagcaaaaataggaccaggtgaaacatgtagtcattttttaaaaacatgtacttggtcttttgtgtgtgtctgttttattccattagaataaatgtgtccttgatgtaaatgcaaagcatttcttcctgattaaattgtagatgtagactttacaatataattcaataataaaaagtaattaacctcta

SEQ ID NO: 289120 - DNA, 3186 bp, Homo sapiens
gactttttaatgtgttgatgcttgaatagagctattctcaagctggaataactgagactgaatggacaagtggatcttcaaaaggcggacctctgcaggcattaactagggaatctacaagagggtcaagaagaactccaaggaaaagggtggaaacttcagaacattttcgtatagatggtccagtaatttcagagagtactcccatagctgaaactataatggcttcaagcaacgaatccttagttgtcaatagggtgactggaaatttcaagcatgcatctcctattctgccaatcactgaattctcagacatacccagaagagcaccaaagaaaccattgacaagagctgaagtgggagaaaaaacagaggaaagaagagtagaaagggatattcttaaggaaatgttcccctatgaagcatctacaccaacaggaattagtgctagttgccgcagaccaatcaaaggggctgcaggccggccattagaactcagtgatttcaggatggaggagtctttttcatctaaatatgttcctaagtatgttcccttggcagatgtcaagtcagaaaagacaaaaaagggacgctccattcccgtatggataaaaattttgctgtttgttgttgtggcagtttttttgtttttggtctatcaagctatggaaaccaaccaagtaaatcccttctctaattttcttcatgttgaccctagaaaatccaactgaatggtatctctttggcacgttcaacttggtctcctattttcaataactgttgaaaaacatttgtgtacacttgttgactccaagaactaaaaataatgtgatttcgcctcaataaatgtagtatttcattgaaaagcaaacaaaatatatataaatggacttcattaaaatgtttttgaactttggactagtaggagatcactttgtgccatatgaataatcttttttagctctggaactttttgtaggctttatttttttaatgtgggcatcttatttcatttttgaaaaaatgtatatgttttttgtgtatttgggaaacgaagggtgaaacatggtagtataatgtgaagctacacatttaaatacttagaattcttacagaaaagattttaagaattattctctgctgaataaaaactgcaaatatgtgaaacataatgaaattcagtaagaggaaaagtaacttggttgtactttttgtaactgcaacaaagtttgatggtgtttatgaggaaaagtacagcaataatctcttctgtaacctttattaatagtaatgttgttgtagccctatcatactcactttttaagacacagtatcatgaaagtcctatttcagtaagacccatttacatacagtagatttttagcagagatcttttagtgtaacatacatattttagagaattgttggctagctgtacatgttttgaaaagctgtttagctagctataaggctataattggaaatttgtattttttatttacagcaaaacatttattcagtcatccagtttgctaccaaaatatgttttagataagtgtgtgtatgtttgtttagaagttagaaattgtaaacactggtcttatgtttcatttggattcattattgcattgtcttgttaccagaaacaaattttgccgagctttttttgccctatatttcccagcataatttgattagaaagtacaaaaagggccgggcgcggtggcttacgcctgtaatcccagcactttgggaggccagggcgggtggatcacgaggtcaggagatcgagaccatcctggccaacatggtgaaaccccgtctctactaaaaatacaaaaaaattacgctgggcgtgatgatgtgcgcctgtagtcctgtctactagggagactgaggcaggagaatcgtttgaacccaggaggcagaggttgcagtgagcagagattacgtcactgcactgtagcctggcgacagagcgagactccatctcaaaaaaaataaaaaagtacaaaaagtacttgcttttatattacatcataagcagtagttaataaagttgtatactcttaagaggtgggcattatgattattttttatttttttattttttatgagatggagtctcgctcttgtcacccagactgtagtgcagtggcacgatctgggctcggtgcaacctctgcctcccgggttcaagcaattttcctgcctcggcagagacggggtttcaccatgttggccaggctggtctcgaacccctgacctcaagtgatcagcccacctcagcttcccaaagtgctgggattacaggtgtgatccactgcacccggccggcattatgattttgtgtactcttgaaatggttatctttgtggatgatttttttttttaagctgaaacttacctcatgaataacttgattaaagtagtaggtgattaaaatttcaatagaatcaaatgagacaaaaattttaaactgactcatttgagtttcaactttacagtcattgaccataaagcacactaaaaatgtaagttatttttaaatacatctgaaataaaaatacttactaaaaaggaagaagccgaagatgtatatttagaccagcacacaattttgatttcaattagccttattctaatatttagcttttagatctttcatacacattttcacgtactttgcaattgagaccagaaagacttgtaggtctttctgcagaatgagtgggtccttgcaaagtgagtgggaaacttactcctagatcagaaatgtttgcctctctgagtaaaatgtttctttcagatgagccatagagggggcaccttttactcaacttttctttgttttgaaactttgtttcccatactgttttcagccttttgtttataattagaaattgtgagaagcttcatttagtgtttaaaaatgtggggagataaatcagacttaacatgtatgtaagatcaattcacttaaaagtatggtccaaatagcaaaaataggaccaggtgaaacatgtagtcattttttaaaaacatgtacttggtcttttgtgtgtgtctgttttattccattagaataaatgtgtccttgatgtaaatgcaaagcatttcttcctgattaaattgtagatgtagactttacaatataattcaataataaaaagtaattaacctcta

SEQ ID NO: 289121 - DNA, 2205 bp, Homo sapiens
gcgaagcaggctgctcgcctcctgcctgtagtgtgtgggctggggttggtgcgagcttccagcttggccgcagttggttcgtagttcggctctggggtcttttgtgtccgggtctggcttggctttgtgtccgcgagtttttgttccgctccgcagcgctcttcccgggcaggagccgtgaggctcggaggcggcagcgcggtccccggccaggagcaagcgcgccggcgtgagcggcggcggcaaaggctgtggggagggggcttcgcagatccccgagatgccggagttcctggaagacccctcggtcctgacaaaagacaagttgaagagtgagttggtcgccaacaatgtgacgctgccggccggggagcagcgcaaagacgtgtacgtccagctctacctgcagcacctcacggctcgcaaccggccgccgctccccgccggcaccaacagcaaggggcccccggacttctccagtgacgaagagcgcgagcccaccccggtcctcggctctggggccgccgccgcgggccggagccgagcagccgtcggcaggaaagccacaaaaaaaactgataaacccagacaagaagataaagatgatctagatgtaacagagctcactaatgaagatcttttggatcagcttgtgaaatacggagtgaatcctggtcctattgtgggaacaaccaggaagctatatgagaaaaagcttttgaaactgagggaacaaggaacagaatcaagatcttctactcctctgccaacaatttcttcttcagcagaaaatacaaggcagaatggaagtaatgattctgacagatacagtgacaatgaagaagactctaaaatagagctcaagcttgagaagagagaaccactaaagggcagagcaaagactccagtaacactcaagcaaagaagagttgagcacaatcagagctattctcaagctggaataactgagactgaatggacaagtggatcttcaaaaggcggacctctgcaggcattaactagggaatctacaagagggtcaagaagaactccaaggaaaagggtggaaacttcagaacattttcgtatagatggtccagtaatttcagagagtactcccatagctgaaactataatggcttcaagcaacgaatccttagttgtcaatagggtgactggaaatttcaagcatgcatctcctattcctcccgggttcaagcaattttcctgcctcggcagagacggggtttcaccatgttggccaggctggtctcgaacccctgacctcaagtgatcagcccacctcagcttcccaaagtgctgggattacaggtgtgatccactgcacccggccggcattatgattttgtgtactcttgaaatggttatctttgtggatgatttttttttttaagctgaaacttacctcatgaataacttgattaaagtagtaggtgattaaaatttcaatagaatcaaatgagacaaaaattttaaactgactcatttgagtttcaactttacagtcattgaccataaagcacactaaaaatgtaagttatttttaaatacatctgaaataaaaatacttactaaaaaggaagaagccgaagatgtatatttagaccagcacacaattttgatttcaattagccttattctaatatttagcttttagatctttcatacacattttcacgtactttgcaattgagaccagaaagacttgtaggtctttctgcagaatgagtgggtccttgcaaagtgagtgggaaacttactcctagatcagaaatgtttgcctctctgagtaaaatgtttctttcagatgagccatagagggggcaccttttactcaacttttctttgttttgaaactttgtttcccatactgttttcagccttttgtttataattagaaattgtgagaagcttcatttagtgtttaaaaatgtggggagataaatcagacttaacatgtatgtaagatcaattcacttaaaagtatggtccaaatagcaaaaataggaccaggtgaaacatgtagtcattttttaaaaacatgtacttggtcttttgtgtgtgtctgttttattccattagaataaatgtgtccttgatgtaaatgcaaagcatttcttcctgattaaattgtagatgtagactttacaatataattcaataataaaaagtaattaacctcta

SEQ ID NO: 289122 - DNA, 2419 bp, Homo sapiens
gcgaagcaggctgctcgcctcctgcctgtagtgtgtgggctggggttggtgcgagcttccagcttggccgcagttggttcgtagttcggctctggggtcttttgtgtccgggtctggcttggctttgtgtccgcgagtttttgttccgctccgcagcgctcttcccgggcaggagccgtgaggctcggaggcggcagcgcggtccccggccaggagcaagcgcgccggcgtgagcggcggcggcaaaggctgtggggagggggcttcgcagatccccgagatgccggagttcctggaagacccctcggtcctgacaaaagacaagttgaagagtgagttggtcgccaacaatgtgacgctgccggccggggagcagcgcaaagacgtgtacgtccagctctacctgcagcacctcacggctcgcaaccggccgccgctccccgccggcaccaacagcaaggggcccccggacttctccagtgacgaagagcgcgagcccaccccggtcctcggctctggggccgccgccgcgggccggagccgagcagccgtcggcaggaaagccacaaaaaaaactgataaacccagacaagaagataaagatgatctagatgtaacagagctcactaatgaagatcttttggatcagcttgtgaaatacggagtgaatcctggtcctattgtgggaacaaccaggaagctatatgagaaaaagcttttgaaactgagggaacaaggaacagaatcaagatcttctactcctctgccaacaatttcttcttcagcagaaaatacaaggcagaatggaagtaatgattctgacagatacagtgacaatgaagaagactctaaaatagagctcaagcttgagaagagagaaccactaaagggcagagcaaagactccagtaacactcaagcaaagaagagttgagcacaatcagagctattctcaagctggaataactgagactgaatggacaagtggatcttcaaaaggcggacctctgcaggcattaactagggaatctacaagagggtcaagaagaactccaaggaaaagggtggaaacttcagaacattttcgtatagatggtccagtaatttcagagagtactcccatagctgaaactataatggcttcaagcaacgaatccttagttgtcaatagggtgactggaaatttcaagcatgcatctcctattctgccaatcactgaattctcagacatacccagaagagcaccaaagaaaccattgacaagagctgaagtgggagaaaaaacagaggaaagaagagtagaaagggatattcttaaggaaatgttcccctatgaagcatctacaccaacaggaattagtgctagttgccgcagaccaatcaaaggggctgcaggccggccattagaactcagtgatttcaggatggaggagtctttttcatctaaatatgttcctaagtatgttcccttggcagatgtcaagtcagaaaagacaaaaaagggacgctccattcccgtatggataaaaattttgctgggattacaggtgtgatccactgcacccggccggcattatgattttgtgtactcttgaaatggttatctttgtggatgatttttttttttaagctgaaacttacctcatgaataacttgattaaagtagtaggtgattaaaatttcaatagaatcaaatgagacaaaaattttaaactgactcatttgagtttcaactttacagtcattgaccataaagcacactaaaaatgtaagttatttttaaatacatctgaaataaaaatacttactaaaaaggaagaagccgaagatgtatatttagaccagcacacaattttgatttcaattagccttattctaatatttagcttttagatctttcatacacattttcacgtactttgcaattgagaccagaaagacttgtaggtctttctgcagaatgagtgggtccttgcaaagtgagtgggaaacttactcctagatcagaaatgtttgcctctctgagtaaaatgtttctttcagatgagccatagagggggcaccttttactcaacttttctttgttttgaaactttgtttcccatactgttttcagccttttgtttataattagaaattgtgagaagcttcatttagtgtttaaaaatgtggggagataaatcagacttaacatgtatgtaagatcaattcacttaaaagtatggtccaaatagcaaaaataggaccaggtgaaacatgtagtcattttttaaaaacatgtacttggtcttttgtgtgtgtctgttttattccattagaataaatgtgtccttgatgtaaatgcaaagcatttcttcctgattaaattgtagatgtagactttacaatataattcaataataaaaagtaattaacctcta

SEQ ID NO: 289123 - DNA, 2618 bp, Homo sapiens
gttcggcacgagaaaacatacagaagagaattgatcagtctaagtttcaagaaactgaattcctgtctcctccaagaaaagtctagccatgataggtgtttagagaaaagttcttcgtcatcttctcagcctgaacacagtgccatgttggtctctactgcagcttctccttcactgattaaagaaaccaccactggttactataaagacatagtagaaaatatttgcggtagagagaaaagtggaattcaaccattatgtcctgagaggtcccatatttcagatcaatcgcctctctccagtaaaaggaaagcactagaagagtctgagagctcacaactaatttctccgccacttgcccaggcaatcagagattatgtcaattctctgttggtccagggtggggtaggtagtttgcctggaacttctaactctatgcccccactggatgtagaaaacatacagaagagaattgatcagtctaagtttcaagaaactgaattcctgtctcctccaagaaaagtccctagactgagtgagaagtcagtggaggaaagggattcaggttcctttgtggcatttcagaacatacctggatccgaactgatgtcttcttttgccaaaactgttgtctctcattcactcactaccttaggtctagaagtggctaagcaatcacagcatgataaaatagatgcctcagaactatcttttcccttccatgaatctattttaaaagtaattgaagaagaatggcagcaagttgacaggcagctgccttcactggcatgcaaatatccagtttcttccagggaggcaacacagatattatcagttccaaaagtagatgatgaaatcctagggtttatttctgaagccactccactaggaggtattcaagcagcctccactgagtcttgcaatcagcagttggacttagcactctgtagagcatatgaagctgcagcatcagcattgcagattgcaactcacactgcctttgtagctaaggctatgcaggcagacattagtcaagctgcacagattcttagctcagatcctagtcgtacccaccaagcgcttgggattctgagcaaaacatatgatgcagcctcatatatttgtgaagctgcatttgatgaagtgaagatggctgcccataccatgggaaatgccactgtaggtcgtcgatacctctggctgaaggattgcaaaattaatttagcttctaagaataagctggcttccactccctttaaaggtggaacattatttggaggagaagtatgcaaagtaattaaaaagcgtggaaataaacactagtaaaattaaggacaaaaagacatctatcttatctttcaggtactttatgccaacattttcttttctgttaaggttgttttagtttccagatagggctaattacaaaatgttaagcttctacccatcaaattacagtataaaagtaattgcctgtgtagaactacttgtcttttctaaagatttgcgtagataggaagcctggtacaaacaatttaacgctttctagatcacatattagtctctaagttgttttctgtttcctgctttacttatgtttttacaattctccaaaactaagaaaattctaattaggatataaggagtatttactgttcaatagaataatatgcatcctcctttatacctaggacagaattaaacatttgttacacattcagaacagtgatgttgttctttttgatacttttatctcagtatcttttcacgttccataacttgtccatatttttgctcatattttcttacttttctttgttatttattcatgtctgcaacatcaatcatagtagtctagatcaatgcaactcaaagcaccagtctacaaactgttacttatccacaggcaagataagcatgcacaagaatttaaatctagagatactttttaggtcaatgacaggatttgattttttagcaaaattttattaatagctaaagcaatgtattgatttacactctgatgcaagtaatttatctcttcattgactggtagcaaccaattcatggaccagtaccatggaccacactttgagaaacacttctttggataataatagatatcctgggatagtgcatgttcaccatctattttgtcagataatggggccttttaaaaaataatactttgctttcatgatatattgtattttgtggaaagttaagtttagcaatatagactctaaaagcaaattaaatttttttaagccataagaaattatactatatcccagtatctgtatgtctgtataaagcagtgtattatcatgttttcatttctgtgattgtaagttaagagtcttaactgcagaggtattgtggaaagtagtagccttaagcataataaaatatggtctcttgggtactccctctggccattaccacattcttagattatatgtgtccatctttgcagctttctgagagtaattttatttgttgtcttctgaaatgtacatgtatacatgtacctactgagtgctatgtgatttttaaaaatgtattactgtagaatgcttctgcaaattcaataaagttgttaaatttgaaaaaaaatg

SEQ ID NO: 289124 - DNA, 1846 bp, Homo sapiens
gcgaagcaggctgctcgcctcctgcctgtagtgtgtgggctggggttggtgcgagcttccagcttggccgcagttggttcgtagttcggctctggggtcttttgtgtccgggtctggcttggctttgtgtccgcgagtttttgttccgctccgcagcgctcttcccgggcaggagccgtgaggctcggaggcggcagcgcggtccccggccaggagcaagcgcgccggcgtgagcggcggcggcaaaggctgtggggagggggcttcgcagatccccgagatgccggagttcctggaagacccctcggtcctgacaaaagacaagttgaagagtgagttggtcgccaacaatgtgacgctgccggccggggagcagcgcaaagacgtgtacgtccagctctacctgcagcacctcacggctcgcaaccggccgccgctccccgccggcaccaacagcaaggggcccccggacttctccagtgacgaagagcgcgagcccaccccggtcctcggctctggggccgccgccgcgggccggagccgagcagccgtcggcaggaaagccacaaaaaaaactgataaacccagacaagaagataaagatgatctagatgtaacagagctcactaatgaagatcttttggatcagcttgtgaaatacggagtgaatcctggtcctattgtgggaacaaccaggaagctatatgagaaaaagcttttgaaactgagggaacaaggaacagaatcaagatcttctactcctctgccaacaatttcttcttcagcagaaaatacaaggcagaatggaagtaatgattctgacagatacagtgacaatgaagaagactctaaaatagagctcaagcttgagaagagagaaccactaaagggcagagcaaagactccagtaacactcaagcaaagaagagttgagcacaatcagagctattctcaagctggaataactgagactgaatggacaagtggatcttcaaaaggcggacctctgcaggcattaactagggaatctacaagagggtcaagaagaactccaaggaaaagggtggaaacttcagaacattttcgtatagatggtccagtaatttcagagagtactcccatagctgaaactataatggcttcaagcaacgaatccttagttgtcaatagggtgactggaaatttcaagcatgcatctcctattctgccaatcactgaattctcagacatacccagaagagcaccaaagaaaccattgacaagagctgaagtgggagaaaaaacagaggaaagaagagtagaaagggatattcttaaggaaatgttcccctatgaagcatctacaccaacaggaattagtgctagttgccgcagaccaatcaaaggggctgcaggccggccattagaactcagtgatttcaggatggaggagtctttttcatctaaatatgttcctaagtatgttcccttggcagatgtcaagtcagaaaagacaaaaaagggacgctccattcccgtatggataaaaattttgctgtttgttgttgtggcagtttttttgtttttggtctatcaagctatggaaaccaaccaagtaaatcccttctctaattttcttcatgttgaccctagaaaatccaactgaatggtatctctttggcacgttcaacttggtctcctattttcaataactgttgaaaaacatttgtgtacacttgttgactccaagaactaaaaataatgtgatttcgcctcaataaatgtagtatttcattgaaaagcaaacaaaatatatataaatggacttcattaaaatgtttttgaactttggactagtaggagatca

SEQ ID NO: 289125 - DNA, 1077 bp, Homo sapiens
gcgaagcaggctgctcgcctcctgcctgtagtgtgtgggctggggttggtgcgagcttccagcttggccgcagttggttcgtagttcggctctggggtcttttgtgtccgggtctggcttggctttgtgtccgcgagtttttgttccgctccgcagcgctcttcccgggcaggagccgtgaggctcggaggcggcagcgcggtccccggccaggagcaagcgcgccggcgtgagcggcggcggcaaaggctgtggggagggggcttcgcagatccccgagatgccggagttcctggaagacccctcggtcctgacaaaagacaagttgaagagtgagttggtcgccaacaatgtgacgctgccggccggggagcagcgcaaagacgtgtacgtccagctctacctgcagcacctcacggctcgcaaccggccgccgctccccgccggcaccaacagcaaggggcccccggacttctccagtgacgaagagcgcgagcccaccccggtcctcggctctggggccgccgccgcgggccggagccgagcagccgtcggcaggaaagccacaaaaaaaactgataaacccagacaagaagataaagatgatctagatgtaacagagctcactaatgaagatcttttggatcagcttgtgaaatacggagtgaatcctggtcctattgtgggaacaaccaggaagctatatgagaaaaagcttttgaaactgagggaacaaggaacagaatcaagatcttctactcctctgccaacaatttcttcttcagcagaaaatacaaggcagaatggaagtaatgattctgacagatacagtgacaatgaagaagactctaaaatagagctcaagcttgagaagagagaaccactaaagggcagagcaaagactccagtaacactcaagcaaagaagagttgagcacaatcaggtatctttagttttattaccaccgtgtacaggtataaataacctcctgacaacactaatccatgttttagcctttaatggttgacacccagattccagcacgctcaataaacttaattctgttgttaaatgata

SEQ ID NO: 289126 - DNA, 2382 bp, Homo sapiens
agcggcagtgctgcctgcccgctgggtggtactgctacctagtgggtcttggggaccttcgaaatcgccgccgctctcacaatggcttgggtccagactgcgccacagcctctcgggagacgtgggccctcggaacctttttagtgccggactccgggccgcaggcagtcccgcggcagcaggatcacagaacctctggatggactcttcctgggaagctttgctactttgcagcagctggaccatgttcctcattaacatctgtctgtccgcttagtcatcacatcatttcactgtggtggcagggactcagctcggaattctgtatagaaaaagcacctggatcccagtctttcaatggcttcaagacaaccagaagtgcctgaaactaaagttacagagtggagaggtaacaaaagaagagaggcagcctgcatcagcccagtccaccccaagcaccactccgcactcttcacctaagcagaggcccaggggctggttcacttctggttcttccacagccttacctggcccaaatcctagcaccatggactctggaagtggggataaggacagaaacttgtcagataagtggagcctctttggaccgagatcccttcagaagtacgattctggaagttttgccacccaggcctaccgaggagcccagaagccctctccattggaactgatacgtgcccaggccaaccgaatggctgaagatccagcagccttgaagccccccaagatggacatcccagtgatggaaggaaagaaacagccaccacgggcccataacctcaaaccccgtgacctgaatgtgctcacacccactggcttctagagccctctttccagggattctggtaaaggtggtttcttgcatcccactccccttttaccttggctttgacataggaaaggtatatttaaaaacttaatcagctgggcgtggtggctcacgcctgtaatcccagcactttgggaggccaaggtaggtggatacctgaggtcaggagttcaagaccagcctggccaacatggtgaaaccccgtctctactaaaaatacaaaaattagctgggcgtggtggtgggcgcctgtagtcccagctacttgggaggctgaggcaggagaatcgcctgaacccaggaagcagatgttgtaccgagctgagatcatgccattacactccagcctgggcgacagaacgagacgccatcaataaataaataaataaagtaaagtaaaaaacctattaaattgaggctagagctggagatgtaattggtttttgagaaacattagtataaagcttgcccttgttgtgtggaagaagccattttgtactgctttaaagttagactaatattctcagcacgggtgtatggggacctcattacctatttttttcatcatttaccctaggtaagaactttgatcactgcttactaggtaaagaatgtttgtactgttccaaaacccaggcttctttattcctttaccactatccatgtgagcattgacaaatcatggcttagaggtgctcactgactcgctaagacgactttggccctgttgatgactggtgctgtgctccagccttatcagttaggggacccaaggtttgtttgggacctgggtacaggtaaaagccagacttggcagggacccctctttctaggctgaaccttgagtccccctgctttttggcagacctaatggatcactgtcttgcagctagttcttcatgtggggcctcttaggccagtgccggaggaggcatgctcctctttctatgccacagaacaaacactactctagcagagcctttcttgcactttaaagtgagattaatttagctgtaatttggttaaaaacttcctaagagagaaaattaagtctactgatttggtataggtaaatggacattaaacttttttaaagtaaaggagatggtagataccgttagattatagtcttgaggttcatgtgaagccagtggtgttaacttactttgatttccttgttcaggtcagggcctggaacgcctgtgcggggaggtcactcaattcaaaattttctgtatgaaagcatttttcaccaaaatgagcctcatccctttatgcaacacataaccttactgagggagggaaatacggaagccacctttttatttctcttcactgtgtacaagttcacttgttgtcttgaacactgtctcaaatacctgctttttgttttggatagtaccttgtctgtataagaagctggcctttccatagagaggccctggagtctaaaattatgagaacaattaatttatttgtgtcttctattatgatctcgttttgacaataaaaatccttactactttctcaaa

SEQ ID NO: 289127 - DNA, 757 bp, Homo sapiens
agcggcagtgctgcctgcccgctgggtggtactgctacctagtgggtcttggggaccttcgaaatcgccgccgctctcacaatggcttgggtccagactgcgccacagcctctcgggagacgtgggccctcggaacctttttagtgccggactccgggccgcaggcagtcccgcggcagcaggatcacagaacctctggatggactcttcctgggaagctttgctactttgcagcagctggaccatgttcctcattaacatctgtctgtccgcttagtcatcacatcatttcactgtggtggcagggactcagctcggaattctgtatagaaaaagcacctggatcccagtctttcaatggcttcaagacaaccagaagtgcctgctcttgaggctagtgcgcctctaggcaagatgtccctgcccatcgggatataccgccgggcagtcagctatgatgataccctcgaggaccctgcgcccatgactcctcctccatcggacatgggcagcgtcccttggaagccagtgattccagagcgcaagtatcagcacctcgccagcctgagcaaggtatcaggtgtttcgattgcagaaggtggaggctgccagctcttgcaggttgaaaatgaggagctaagtagattttttttgtttgtttcaaaagaccattacttgaaccttgggagcagtggtcctcaaggtgtggtcttgggaccggcagcatcagtaacacctgggaatttattagaaagaa

SEQ ID NO: 289128 - DNA, 2705 bp, Homo sapiens
agcggcagtgctgcctgcccgctgggtggtactgctacctagtgggtcttggggaccttcgaaatcgccgccgctctcacaatggcttgggtccagactgcgccacagcctctcgggagacgtgggccctcggaacctttttagtgccggactccgggccgcaggcagtcccgcggcagcaggatcacaggtggcagggactcagctcggaattctgtatagaaaaagcacctggatcccagtctttcaatggcttcaagacaaccagaagtgcctgctcttgaggctagtgcgcctctaggcaagatgtccctgcccatcgggatataccgccgggcagtcagctatgatgataccctcgaggaccctgcgcccatgactcctcctccatcggacatgggcagcgtcccttggaagccagtgattccagagcgcaagtatcagcacctcgccaaggtggaggaaggagaggccagtctaccctcccctgccatgaccctgtcatcagccattgacagtgtggacaaggtcccagtggtgaaggctaaagctacccatgtcatcatgaattctctgatcacaaaacagacccaggaaagcattcagcattttgagcgacaggcagggctgagagatgctggctacacaccccacaagggcctcaccaccgaggagaccaagtaccttcgagtggccgaagcactccacaaactaaagttacagagtggagaggtaacaaaagaagagaggcagcctgcatcagcccagtccaccccaagcaccactccgcactcttcacctaagcagaggcccaggggctggttcacttctggttcttccacagccttacctggcccaaatcctagcaccatggactctggaagtggggataaggacagaaacttgtcagataagtggagcctctttggaccgagatcccttcagaagtacgattctggaagttttgccacccaggcctaccgaggagcccagaagccctctccattggaactgatacgtgcccaggccaaccgaatggctgaagatccagcagccttgaagccccccaagatggacatcccagtgatggaaggaaagaaacagccaccacgggcccataacctcaaaccccgtgacctgaatgtgctcacacccactggcttctagagccctctttccagggattctggtaaaggtggtttcttgcatcccactccccttttaccttggctttgacataggaaaggtatatttaaaaacttaatcagctgggcgtggtggctcacgcctgtaatcccagcactttgggaggccaaggtaggtggatacctgaggtcaggagttcaagaccagcctggccaacatggtgaaaccccgtctctactaaaaatacaaaaattagctgggcgtggtggtgggcgcctgtagtcccagctacttgggaggctgaggcaggagaatcgcctgaacccaggaagcagatgttgtaccgagctgagatcatgccattacactccagcctgggcgacagaacgagacgccatcaataaataaataaataaagtaaagtaaaaaacctattaaattgaggctagagctggagatgtaattggtttttgagaaacattagtataaagcttgcccttgttgtgtggaagaagccattttgtactgctttaaagttagactaatattctcagcacgggtgtatggggacctcattacctatttttttcatcatttaccctaggtaagaactttgatcactgcttactaggtaaagaatgtttgtactgttccaaaacccaggcttctttattcctttaccactatccatgtgagcattgacaaatcatggcttagaggtgctcactgactcgctaagacgactttggccctgttgatgactggtgctgtgctccagccttatcagttaggggacccaaggtttgtttgggacctgggtacaggtaaaagccagacttggcagggacccctctttctaggctgaaccttgagtccccctgctttttggcagacctaatggatcactgtcttgcagctagttcttcatgtggggcctcttaggccagtgccggaggaggcatgctcctctttctatgccacagaacaaacactactctagcagagcctttcttgcactttaaagtgagattaatttagctgtaatttggttaaaaacttcctaagagagaaaattaagtctactgatttggtataggtaaatggacattaaacttttttaaagtaaaggagatggtagataccgttagattatagtcttgaggttcatgtgaagccagtggtgttaacttactttgatttccttgttcaggtcagggcctggaacgcctgtgcggggaggtcactcaattcaaaattttctgtatgaaagcatttttcaccaaaatgagcctcatccctttatgcaacacataaccttactgagggagggaaatacggaagccacctttttatttctcttcactgtgtacaagttcacttgttgtcttgaacactgtctcaaatacctgctttttgttttggatagtaccttgtctgtataagaagctggcctttccatagagaggccctggagtctaaaattatgagaacaattaatttatttgtgtcttctattatgatctcgttttgacaataaaaatccttactactttctcaaa

SEQ ID NO: 289129 - DNA, 2274 bp, Homo sapiens
agcggcagtgctgcctgcccgctgggtggtactgctacctagtgggtcttggggaccttcgaaatcgccgccgctctcacaatggcttgggtccagactgcgccacagcctctcgggagacgtgggccctcggaacctttttagtgccggactccgggccgcaggcagtcccgcggcagcaggatcacaggtggcagggactcagctcggaattctgtatagaaaaagcacctggatcccagtctttcaatggcttcaagacaaccagaagtgcctgaaactaaagttacagagtggagaggtaacaaaagaagagaggcagcctgcatcagcccagtccaccccaagcaccactccgcactcttcacctaagcagaggcccaggggctggttcacttctggttcttccacagccttacctggcccaaatcctagcaccatggactctggaagtggggataaggacagaaacttgtcagataagtggagcctctttggaccgagatcccttcagaagtacgattctggaagttttgccacccaggcctaccgaggagcccagaagccctctccattggaactgatacgtgcccaggccaaccgaatggctgaagatccagcagccttgaagccccccaagatggacatcccagtgatggaaggaaagaaacagccaccacgggcccataacctcaaaccccgtgacctgaatgtgctcacacccactggcttctagagccctctttccagggattctggtaaaggtggtttcttgcatcccactccccttttaccttggctttgacataggaaaggtatatttaaaaacttaatcagctgggcgtggtggctcacgcctgtaatcccagcactttgggaggccaaggtaggtggatacctgaggtcaggagttcaagaccagcctggccaacatggtgaaaccccgtctctactaaaaatacaaaaattagctgggcgtggtggtgggcgcctgtagtcccagctacttgggaggctgaggcaggagaatcgcctgaacccaggaagcagatgttgtaccgagctgagatcatgccattacactccagcctgggcgacagaacgagacgccatcaataaataaataaataaagtaaagtaaaaaacctattaaattgaggctagagctggagatgtaattggtttttgagaaacattagtataaagcttgcccttgttgtgtggaagaagccattttgtactgctttaaagttagactaatattctcagcacgggtgtatggggacctcattacctatttttttcatcatttaccctaggtaagaactttgatcactgcttactaggtaaagaatgtttgtactgttccaaaacccaggcttctttattcctttaccactatccatgtgagcattgacaaatcatggcttagaggtgctcactgactcgctaagacgactttggccctgttgatgactggtgctgtgctccagccttatcagttaggggacccaaggtttgtttgggacctgggtacaggtaaaagccagacttggcagggacccctctttctaggctgaaccttgagtccccctgctttttggcagacctaatggatcactgtcttgcagctagttcttcatgtggggcctcttaggccagtgccggaggaggcatgctcctctttctatgccacagaacaaacactactctagcagagcctttcttgcactttaaagtgagattaatttagctgtaatttggttaaaaacttcctaagagagaaaattaagtctactgatttggtataggtaaatggacattaaacttttttaaagtaaaggagatggtagataccgttagattatagtcttgaggttcatgtgaagccagtggtgttaacttactttgatttccttgttcaggtcagggcctggaacgcctgtgcggggaggtcactcaattcaaaattttctgtatgaaagcatttttcaccaaaatgagcctcatccctttatgcaacacataaccttactgagggagggaaatacggaagccacctttttatttctcttcactgtgtacaagttcacttgttgtcttgaacactgtctcaaatacctgctttttgttttggatagtaccttgtctgtataagaagctggcctttccatagagaggccctggagtctaaaattatgagaacaattaatttatttgtgtcttctattatgatctcgttttgacaataaaaatccttactactttctcaaa

SEQ ID NO: 289130 - DNA, 2080 bp, Homo sapiens
gcactccaactctgtaactttagtgtgtggagtgcttcggccactcgaaggtacttggtctcctcggtggtgaggcccttcacaaactaaagttacagagtggagaggtaacaaaagaagagaggcagcctgcatcagcccagtccaccccaagcaccactccgcactcttcacctaagcagaggcccaggggctggttcacttctggttcttccacagccttacctggcccaaatcctagcaccatggactctggaagtggggataaggacagaaacttgtcagataagtggagcctctttggaccgagatcccttcagaagtacgattctggaagttttgccacccaggcctaccgaggagcccagaagccctctccattggaactgatacgtgcccaggccaaccgaatggctgaagatccagcagccttgaagccccccaagatggacatcccagtgatggaaggaaagaaacagccaccacgggcccataacctcaaaccccgtgacctgaatgtgctcacacccactggcttctagagccctctttccagggattctggtaaaggtggtttcttgcatcccactccccttttaccttggctttgacataggaaaggtatatttaaaaacttaatcagctgggcgtggtggctcacgcctgtaatcccagcactttgggaggccaaggtaggtggatacctgaggtcaggagttcaagaccagcctggccaacatggtgaaaccccgtctctactaaaaatacaaaaattagctgggcgtggtggtgggcgcctgtagtcccagctacttgggaggctgaggcaggagaatcgcctgaacccaggaagcagatgttgtaccgagctgagatcatgccattacactccagcctgggcgacagaacgagacgccatcaataaataaataaataaagtaaagtaaaaaacctattaaattgaggctagagctggagatgtaattggtttttgagaaacattagtataaagcttgcccttgttgtgtggaagaagccattttgtactgctttaaagttagactaatattctcagcacgggtgtatggggacctcattacctatttttttcatcatttaccctaggtaagaactttgatcactgcttactaggtaaagaatgtttgtactgttccaaaacccaggcttctttattcctttaccactatccatgtgagcattgacaaatcatggcttagaggtgctcactgactcgctaagacgactttggccctgttgatgactggtgctgtgctccagccttatcagttaggggacccaaggtttgtttgggacctgggtacaggtaaaagccagacttggcagggacccctctttctaggctgaaccttgagtccccctgctttttggcagacctaatggatcactgtcttgcagctagttcttcatgtggggcctcttaggccagtgccggaggaggcatgctcctctttctatgccacagaacaaacactactctagcagagcctttcttgcactttaaagtgagattaatttagctgtaatttggttaaaaacttcctaagagagaaaattaagtctactgatttggtataggtaaatggacattaaacttttttaaagtaaaggagatggtagataccgttagattatagtcttgaggttcatgtgaagccagtggtgttaacttactttgatttccttgttcaggtcagggcctggaacgcctgtgcggggaggtcactcaattcaaaattttctgtatgaaagcatttttcaccaaaatgagcctcatccctttatgcaacacataaccttactgagggagggaaatacggaagccacctttttatttctcttcactgtgtacaagttcacttgttgtcttgaacactgtctcaaatacctgctttttgttttggatagtaccttgtctgtataagaagctggcctttccatagagaggccctggagtctaaaattatgagaacaattaatttatttgtgtcttctattatgatctcgttttgacaataaaaatccttactactttctcaaa

SEQ ID NO: 289131 - DNA, 3282 bp, Homo sapiens
agcggcagtgctgcctgcccgctgggtggtactgctacctagtgggtcttggggaccttcgaaatcgccgccgctctcacaatggcttgggtccagactgcgccacagcctctcgggagacgtgggccctcggaacctttttagtgccggactccgggccgcaggcagtcccgcggcagcaggatcacagaacctctggatggactcttcctgggaagctttgctactttgcagcagctggaccatgttcctcattaacatctgtctgtccgcttagtcatcacatcatttcactgtggtggcagggactcagctcggaattctgtatagaaaaagcacctggatcccagtctttcaatggcttcaagacaaccagaagtgcctgctcttgaggctagtgcgcctctaggcaagatgtccctgcccatcgggatataccgccgggcagtcagctatgatgataccctcgaggaccctgcgcccatgactcctcctccatcggacatgggcagcgtcccttggaagccagtgattccagagcgcaagtatcagcacctcgccaaggtggaggaaggagaggccagtctaccctcccctgccatgaccctgtcatcagccattgacagtgtggacaaggtcccagtggtgaaggctaaagctacccatgtcatcatgaattctctgatcacaaaacagacccaggaaagcattcagcattttgagcgacaggcagggctgagagatgctggctacacaccccacaagggcctcaccaccgaggagaccaagtaccttcgagtggccgaagcactccacaaactaaagttacagagtggagaggtaacaaaagaagagaggcagcctgcatcagcccagtccaccccaagcaccactccgcactcttcacctaagcagaggcccaggggctggttcacttctggttcttccacagccttacctggcccaaatcctagcaccatggactctggaagtggggataaggacagaaacttgtcagataagtggagcctctttggaccgagatcccttcagaagtacgattctggaagttttgccacccaggcctaccgaggagcccagaagccctctccattggaactgatacgtgcccaggccaaccgaatggctgaagatccagcagccttgaagccccccaagatggacatcccagtgatggaaggaaagaaacagccaccacgggcccataacctcaaaccccgtgacctgaatgtgctcacacccactggcttctagagccctctttccagggattctggtaaaggtggtttcttgcatcccactccccttttaccttggctttgacataggaaaggtatatttaaaaacttaatcagctgggcgtggtggctcacgcctgtaatcccagcactttgggaggccaaggtaggtggatacctgaggtcaggagttcaagaccagcctggccaacatggtgaaaccccgtctctactaaaaatacaaaaattagctgggcgtggtggtgggcgcctgtagtcccagctacttgggaggctgaggcaggagaatcgcctgaacccaggaagcagatgttgtaccgagctgagatcatgccattacactccagcctgggcgacagaacgagacgccatcaataaataaataaataaagtaaagtaaaaaacctattaaattgaggctagagctggagatgtaattggtttttgagaaacattagtataaagcttgcccttgttgtgtggaagaagccattttgtactgctttaaagttagactaatattctcagcacgggtgtatggggacctcattacctatttttttcatcatttaccctaggtaagaactttgatcactgcttactaggtaaagaatgtttgtactgttccaaaacccaggcttctttattcctttaccactatccatgtgagcattgacaaatcatggcttagaggtgctcactgactcgctaagacgactttggccctgttgatgactggtgctgtgctccagccttatcagttaggggacccaaggtttgtttgggacctgggtacaggtaaaagccagacttggcagggacccctctttctaggctgaaccttgagtccccctgctttttggcagacctaatggatcactgtcttgcagctagttcttcatgtggggcctcttaggccagtgccggaggaggcatgctcctctttctatgccacagaacaaacactactctagcagagcctttcttgcactttaaagtgagattaatttagctgtaatttggttaaaaacttcctaagagagaaaattaagtctactgatttggtataggtaaatggacattaaacttttttaaagtaaaggagatggtagataccgttagattatagtcttgaggttcatgtgaagccagtggtgttaacttactttgatttccttgttcaggtcagggcctggaacgcctgtgcggggaggtcactcaattcaaaattttctgtatgaaagcatttttcaccaaaatgagcctcatccctttatgcaacacataaccttactgagggagggaaatacggaagccacctttttatttctcttcactgtgtacaagttcacttgttgtcttgaacactgtctcaaatacctgctttttgttttggatagtaccttgtctgtataagaagctggcctttccatagagaggccctggagtctaaaattatgagaacaattaatttatttgtgtcttctattatgatctcgttttgacaataaaaatccttactactttctcaaaaaaacaagaaggaaaaagaagaaaacaagaagaaagaaacagaaaaaagaaaacacacaggcagcaaagcaagaacacaagacgcacaaggagagaaagagaagagaagagagagaggagacaagcagggagagaggagagagcggcgagagagaggggggaggacagaacggggcgatctaacagagagcaggaggtggtgggcaaggacagaaccccgcgctccatggagagcgagcttttgtgcggaccgagaagagagacgtactagagaatgagtgacgagggatgtgacacaccatagagaagcgtgaggagagatagaagtataatgttgtcaacatcagtaagagccggggcgtcggcctgtaacgtgcacatgaggatagtggctctgactacgagagttcgtaagagcttgtgttgtctatacatacggaagttggagtatataatcgacatagaaggt

SEQ ID NO: 289132 - DNA, 1301 bp, Homo sapiens
  misc_feature (1)..(1): n is a, c, g, or t
  misc_feature (24)..(24): n is a, c, g, or t
nagaattacatcggggcaaccccntcccagctacttgggaggctgaggcaggagaatcgcctgaacccaggaagcagatgttgtaccgagctgagatcatgccattacactccagcctgggcgacagaacgagacgccatcaataaataaataaataaagtaaagtaaaaaacctattaaattgaggctagagctggagatgtaattggtttttgagaaacattagtataaagcttgcccttgttgtgtggaagaagccattttgtactgctttaaagttagactaatattctcagcacgggtgtatggggacctcattacctatttttttcatcatttaccctaggtaagaactttgatcactgcttactaggtaaagaatgtttgtactgttccaaaacccaggcttctttattcctttaccactatccatgtgagcattgacaaatcatggcttagaggtgctcactgactcgctaagacgactttggccctgttgatgactggtgctgtgctccagccttatcagttaggggacccaaggtttgtttgggacctgggtacaggtaaaagccagacttggcagggacccctctttctaggctgaaccttgagtccccctgctttttggcagacctaatggatcactgtcttgcagctagttcttcatgtggggcctcttaggccagtgccggaggaggcatgctcctctttctatgccacagaacaaacactactctagcagagcctttcttgcactttaaagtgagattaatttagctgtaatttggttaaaaacttcctaagagagaaaattaagtctactgatttggtataggtaaatggacattaaacttttttaaagtaaaggagatggtagataccgttagattatagtcttgaggttcatgtgaagccagtggtgttaacttactttgatttccttgttcaggtcagggcctggaacgcctgtgcggggaggtcactcaattcaaaattttctgtatgaaagcatttttcaccaaaatgagcctcatccctttatgcaacacataaccttactgagggagggaaatacggaagccacctttttatttctcttcactgtgtacaagttcacttgttgtcttgaacactgtctcaaatacctgctttttgttttggatagtaccttgtctgtataagaagctggcctttccatagagaggccctggagtctaaaattatgagaacaattaatttatttgtgtcttctattatgatctcgttttgacaataaaaatccttactactttctcaaa

SEQ ID NO: 289133 - DNA, 3105 bp, Homo sapiens
agcggcagtgctgcctgcccgctgggtggtactgctacctagtgggtcttggggaccttcgaaatcgccgccgctctcacaatggcttgggtccagactgcgccacagcctctcgggagacgtgggccctcggaacctttttagtgccggactccgggccgcaggcagtcccgcggcagcaggatcacagaacctctggatggactcttcctgggaagctttgctactttgcagcagctggaccatgttcctcattaacatctgtctgtccgcttagtcatcacatcatttcactgtggtggcagggactcagctcggaattctgtatagaaaaagcacctggatcccagtctttcaatggcttcaagacaaccagaagtgcctgctcttgaggctagtgcgcctctaggcaagatgtccctgcccatcgggatataccgccgggcagtcagctatgatgataccctcgaggaccctgcgcccatgactcctcctccatcggacatgggcagcgtcccttggaagccagtgattccagagcgcaagtatcagcacctcgccaaggtggaggaaggagaggccagtctaccctcccctgccatgaccctgtcatcagccattgacagtgtggacaaggtcccagtggtgaaggctaaagctacccatgtcatcatgaattctctgatcacaaaacagacccaggaaagcattcagcattttgagcgacaggcagggctgagagatgctggctacacaccccacaagggcctcaccaccgaggagaccaagtaccttcgagtggccgaagcactccacaaactaaagttacagagtggagaggtaacaaaagaagagaggcagcctgcatcagcccagtccaccccaagcaccactccgcactcttcacctaagcagaggcccaggggctggttcacttctggttcttccacagccttacctggcccaaatcctagcaccatggactctggaagtggggataaggacagaaacttgtcagataagtggagcctctttggaccgagatcccttcagaagtacgattctggaagttttgccacccaggcctaccgaggagcccagaagccctctccattggaactgatacgtgcccaggccaaccgaatggctgaagatccagcagccttgaagccccccaagatggacatcccagtgatggaaggaaagaaacagccaccacgggcccataacctcaaaccccgtgacctgaatgtgctcacacccactggcttctagagccctctttccagggattctggtaaaggtggtttcttgcatcccactccccttttaccttggctttgacataggaaaggtatatttaaaaacttaatcagctgggcgtggtggctcacgcctgtaatcccagcactttgggaggccaaggtaggtggatacctgaggtcaggagttcaagaccagcctggccaacatggtgaaaccccgtctctactaaaaatacaaaaattagctgggcgtggtggtgggcgcctgtagtcccagctacttgggaggctgaggcaggagaatcgcctgaacccaggaagcagatgttgtaccgagctgagatcatgccattacactccagcctgggcgacagaacgagacgccatcaataaataaataaataaagtaaagtaaaaaacctattaaattgaggctagagctggagatgtaattggtttttgagaaacattagtataaagcttgcccttgttgtgtggaagaagccattttgtactgctttaaagttagactaatattctcagcacgggtgtatggggacctcattacctatttttttcatcatttaccctaggtaagaactttgatcactgcttactaggtaaagaatgtttgtactgttccaaaacccaggcttctttattcctttaccactatccatgtgagcattgacaaatcatggcttagaggtgctcactgactcgctaagacgactttggccctgttgatgactggtgctgtgctccagccttatcagttaggggacccaaggtttgtttgggacctgggtacaggtaaaagccagacttggcagggacccctctttctaggctgaaccttgagtccccctgctttttggcagacctaatggatcactgtcttgcagctagttcttcatgtggggcctcttaggccagtgccggaggaggcatgctcctctttctatgccacagaacaaacactactctagcagagcctttcttgcactttaaagtgagattaatttagctgtaatttggttaaaaacttcctaagagagaaaattaagtctactgatttggtataggtaaatggacattaaacttttttaaagtaaaggagatggtagataccgttagattatagtcttgaggttcatgtgaagccagtggtgttaacttactttgatttccttgttcaggtcagggcctggaacgcctgtgcggggaggtcactcaattcaaaattttctgtatgaaagcatttttcaccaaaatgagcctcatccctttatgcaacacataaccttactgagggagggaaatacggaagccacctttttatttctcttcactgtgtacaagttcacttgttgtcttgaacactgtctcaaatacctgctttttgttttggatagtaccttgtctgtataagaagctggcctttccatagagaggccctggagtctaaaattatgagaacaattaatttatttgtgtcttctattatgatctcgttttgacaataaaaatccttactactttctcaaaaaaaaaaaaaaaaaaaaaaaaaaaggggggggggtaaaaagtttcccgggggggccaaagttaaggggtacccggtttccgggcacaaggggggccccaatgaggggaggcgttattaaaaggaaggcgacacggggccgccgtttcacaaccgccgtgacgggggcaacaccggtatctggagactggggaaaggaccctacctcccggggggcgacatcatgggcgcactcctcagaagttaaaggtccaggaaacatcaacctcaaggcgtacgcgtacctagcgcttg

SEQ ID NO: 289134 - DNA, 2759 bp, Homo sapiens
agcggcagtgctgcctgcccgctgggtggtactgctacctagtgggtcttggggaccttcgaaatcgccgccgctctcacaatggcttgggtccagactgcgccacagcctctcgggagacgtgggccctcggaacctttttagtgccggactccgggccgcaggcagtcccgcggcagcaggatcacagaacctctggatggactcttcctgggaagctttgctactttgcagcagctggaccatgttcctcattaacatctgtctgtccgcttagtcatcacatcatttcactgtggtggcagggactcagctcggaattctgtatagaaaaagcacctggatcccagtctttcaatggcttcaagacaaccagaagtgcctgctcttgaggctagtgcgcctctaggcaagatgtccctgcccatcgggatataccgccgggcagtcagctatgatgataccctcgaggaccctgcgcccatgactcctcctccatcggacatgggcagcgtcccttggaagccagtgattccagagcgcaagtatcagcacctcgccaaggtggaggaaggagaggccagtctaccctcccctgccatgaccctgtcatcagccattgacagtgtggacaaggtcccagtggtgaaggctaaagctacccatgtcatcatgaattctctgatcacaaaacagacccaggaaagcattcagcattttgagcgacaggcagggctgagagatgctggctacacaccccacaagggcctcaccaccgaggagaccaagtaccttcgagtggccgaagcactccacaaactaaagttacagagtggagaggtaacaaaagaagagaggcagcctgcatcagcccagtccaccccaagcaccactccgcactcttcacctaagcagaggcccaggggctggttcacttctggttcttccacagccttacctggcccaaatcctagcaccatggactctggaagtggggataaggacagaaacttgtcagataagtggagcctctttggaccgagatcccttcagaagtacgattctggaagttttgccacccaggcctaccgaggagcccagaagccctctccattggaactgatacgtgcccaggccaaccgaatggctgaagatccagcagccttgaagccccccaagatggacatcccagtgatggaaggaaagaaacagccaccacgggcccataacctcaaaccccgtgacctgaatgtgctcacacccactggcttctagagccctctttccagggattctggtaaaggtggtttcttgcatcccactccccttttaccttggctttgacataggaaaggtatatttaaaaacttaatcagctgggcgtggtggctcacgcctgtaatcccagcactttgggaggccaaggtaggtggatacctgaggtcaggagttcaagaccagcctggccaacatggtgaaaccccgtctctactaaaaatacaaaaattagctgggcgtggtggtgggcgcctgtagtcccagctacttgggaggctgaggcaggagaatcgcctgaacccaggaagcagatgttgtaccgagctgagatcatgccattacactccagcctgggcgacagaacgagacgccatcaataaataaataaataaagtaaagtaaaaaacctattaaattgaggctagagctggagatgtaattggtttttgagaaacattagtataaagcttgcccttgttgtgtggaagaagccattttgtactgctttaaagttagactaatattctcagcacgggtgtatggggacctcattacctatttttttcatcatttaccctaggtaagaactttgatcactgcttactaggtaaagaatgtttgtactgttccaaaacccaggcttctttattcctttaccactatccatgtgagcattgacaaatcatggcttagaggtgctcactgactcgctaagacgactttggccctgttgatgactggtgctgtgctccagccttatcagttaggggacccaaggtttgtttgggacctgggtacaggtaaaagccagacttggcagggacccctctttctaggctgaaccttgagtccccctgctttttggcagacctaatggatcactgtcttgcagctagttcttcatgtggggcctcttaggccagtgccggaggaggcatgctcctctttctatgccacagaacaaacactactctagcagagcctttcttgcactttaaagtgagattaatttagctgtaatttggttaaaaacttcctaagagagtaaaggagatggtagataccgttagattatagtcttgaggttcatgtgaagccagtggtgttaacttactttgatttccttgttcaggtcagggcctggaacgcctgtgcggggaggtcactcaattcaaaattttctgtatgaaagcatttttcaccaaaatgagcctcatccctttatgcaacacataaccttactgagggagggaaatacggaagccacctttttatttctcttcactgtgtacaagttcacttgttgtcttgaacactgtctcaaatacctgctttttgttttggatagtaccttgtctgtataagaagctggcctttccatagagaggccctggagtctaaaattatgagaacaattaatttatttgtgtcttctattatgatctcgttttgacaataaaaatccttactactttctcaaa

SEQ ID NO: 289135 - DNA, 677 bp, Homo sapiens
ggtggacaaaatggcgaagatcgccaagactcacgaagatattgaagcacagattcgagaaattcaaggcaagaaggcatgctcctctttctatgccacagaacaaacactactctagcagagcctttcttgcactttaaagtgagattaatttagctgtaatttggttaaaaacttcctaagagagaaaattaagtctactgatttggtataggtaaatggacattaaacttttttaaagtaaaggagatggtagataccgttagattatagtcttgaggttcatgtgaagccagtggtgttaacttactttgatttccttgttcaggtcagggcctggaacgcctgtgcggggaggtcactcaattcaaaattttctgtatgaaagcatttttcaccaaaatgagcctcatccctttatgcaacacataaccttactgagggagggaaatacggaagccacctttttatttctcttcactgtgtacaagttcacttgttgtcttgaacactgtctcaaatacctgctttttgttttggatagtaccttgtctgtataagaagctggcctttccatagagaggccctggagtctaaaattatgagaacaattaatttatttgtgtcttctattatgatctcgttttgacaataaaaatccttactactttctcaaa

SEQ ID NO: 289136 - DNA, 2857 bp, Homo sapiens
  misc_feature (2144)..(2144): n is a, c, g, or t
  misc_feature (2152)..(2152): n is a, c, g, or t
  misc_feature (2161)..(2161): n is a, c, g, or t
  misc_feature (2169)..(2169): n is a, c, g, or t
  misc_feature (2171)..(2171): n is a, c, g, or t
  misc_feature (2183)..(2184): n is a, c, g, or t
  misc_feature (2208)..(2209): n is a, c, g, or t
  misc_feature (2211)..(2211): n is a, c, g, or t
  misc_feature (2217)..(2217): n is a, c, g, or t
  misc_feature (2238)..(2238): n is a, c, g, or t
  misc_feature (2242)..(2242): n is a, c, g, or t
  misc_feature (2249)..(2251): n is a, c, g, or t
  misc_feature (2276)..(2276): n is a, c, g, or t
  misc_feature (2278)..(2279): n is a, c, g, or t
  misc_feature (2287)..(2288): n is a, c, g, or t
  misc_feature (2290)..(2290): n is a, c, g, or t
  misc_feature (2293)..(2293): n is a, c, g, or t
  misc_feature (2316)..(2316): n is a, c, g, or t
  misc_feature (2327)..(2327): n is a, c, g, or t
  misc_feature (2340)..(2340): n is a, c, g, or t
  misc_feature (2344)..(2344): n is a, c, g, or t
  misc_feature (2361)..(2361): n is a, c, g, or t
  misc_feature (2364)..(2364): n is a, c, g, or t
  misc_feature (2366)..(2366): n is a, c, g, or t
  misc_feature (2371)..(2371): n is a, c, g, or t
  misc_feature (2378)..(2378): n is a, c, g, or t
  misc_feature (2386)..(2386): n is a, c, g, or t
  misc_feature (2391)..(2391): n is a, c, g, or t
  misc_feature (2398)..(2398): n is a, c, g, or t
  misc_feature (2400)..(2400): n is a, c, g, or t
  misc_feature (2404)..(2404): n is a, c, g, or t
  misc_feature (2424)..(2424): n is a, c, g, or t
  misc_feature (2436)..(2436): n is a, c, g, or t
  misc_feature (2444)..(2444): n is a, c, g, or t
  misc_feature (2447)..(2449): n is a, c, g, or t
  misc_feature (2456)..(2456): n is a, c, g, or t
  misc_feature (2484)..(2485): n is a, c, g, or t
  misc_feature (2497)..(2497): n is a, c, g, or t
  misc_feature (2500)..(2500): n is a, c, g, or t
  misc_feature (2503)..(2503): n is a, c, g, or t
agcggcagtgctgcctgcccgctgggtggtactgctacctagtgggtcttggggaccttcgaaatcgccgccgctctcacaatggcttgggtccagactgcgccacagcctctcgggagacgtgggccctcggaacctttttagtgccggactccgggccgcaggcagtcccgcggcagcaggatcacagaacctctggatggactcttcctgggaagctttgctactttgcagcagctggaccatgttcctcattaacatctgtctgtccgcttagtcatcacatcatttcactgtggtggcagggactcagctcggaattctgtatagaaaaagcacctggatcccagtctttcaatggcttcaagacaaccagaagtgcctgctcttgaggctagtgcgcctctaggcaagatgtccctgcccatcgggatataccgccgggcagtcagctatgatgataccctcgaggaccctgcgcccatgactcctcctccatcggacatgggcagcgtcccttggaagccagtgattccagagcgcaagtatcagcacctcgccaaggtggaggaaggagaggccagtctaccctcccctgccatgaccctgtcatcagccattgacagtgtggacaaggtcccagtggtgaaggctaaagctacccatgtcatcatgaattctctgatcacaaaacagacccaggaaagcattcagcattttgagcgacaggcagggctgagagatgctggctacacaccccacaagggcctcaccaccgaggagaccaagtaccttcgagtggccgaagcactccacaaactaaagttacagagtggagaggtaacaaaagaagagaggcagcctgcatcagcccagtccaccccaagcaccactccgcactcttcacctaagcagaggcccaggggctggttcacttctggttcttccacagccttacctggcccaaatcctagcaccatggactctggaagtggggataaggacagaaacttgtcagataagtggagcctctttggaccgagatcccttcagaagtacgattctggaagttttgccacccaggcctaccgaggagcccagaagccctctccattggaactgatacgtgcccaggccaaccgaatggctgaagatccagcagccttgaagccccccaagatggacatcccagtgatggaaggaaagaaacagccaccacgggcccataacctcaaaccccgtgacctgaatgtgctcacacccactggcttctagagccctctttccagggattctggtaaaggtggtttcttgcatcccactccccttttaccttggctttgacataggaaaggtatatttaaaaacttaatcagctgggcgtggtggctcacgcctgtaatcccagcactttgggaggccaaggtaggtggatacctgaggtcaggagttcaagaccagcctggccaacatggtgaaaccccgtctctactaaaaatacaaaaattagctgggcgtggtggtgggcgcctgtagtcccagctacttgggaggctgaggcaggagaatcgcctgaacccaggaagcagatgttgtaccgagctgagatcatgccattacactccagcctgggcgacagaacgagacgccatcaataaataaataaataaagtaaagtaaaaaacctattaaattgaggctagagctggagatgtaattggtttttgagaaacattagtataaagcttgcccttgttgtgtggaagaagccattttgtactgctttaaagttagactaatattctcagcacgggtgtatggggacctcattacctatttttttcatcatttaccctaggtaagaactttgatcactgcttactaggtaaagaatgtttgtactgttccaaaacccaggcttctttattcctttaccactatccatgtgagcattgacaaatcatggcttagaggtgctcactgactcgctaagacgactttggccctgttgatgactggtgctgtgctccagccttatcagttaggggacccaaggtttgtttgggacctgggtacaggtaaaagccagacttggcagggacccctctttctaggctgaaccttgagtccccctgctttttggngggggcgnggggggggngcgggcgngngtggggcggggnngggggggcggggggggggggggcnngntggggngcgggggggggggggggcggngggngcgggtnnnggggcgggggggggggggcggcggngnnggcggggnngntgnggcgctgggaggggggggtggtntggggggggtngggttgagggctncgcnggggggggggggggggnggngngggtngggggangggtaggnggggngtggggngntggntgggggtgggggggggtggnggggggcgcggntggggtgnggnnntgggggngcgggggggggcgcggggggggggggcnnggctgtgggttnccntgnggcgggtcagggcctggaacgcctgtgcggggaggtcactcaattcaaaattttctgtatgaaagcatttttcaccaaaatgagcctcatccctttatgcaacacataaccttactgagggagggaaatacggaagccacctttttatttctcttcactgtgtacaagttcacttgttgtcttgaacactgtctcaaatacctgctttttgttttggatagtaccttgtctgtataagaagctggcctttccatagagaggccctggagtctaaaattatgagaacaattaatttatttgtgtcttctattatgatctcgttttgacaataaaaatccttactactttctcaaa

SEQ ID NO: 289137 - DNA, 3069 bp, Homo sapiens
agcggcagtgctgcctgcccgctgggtggtactgctacctagtgggtcttggggaccttcgaaatcgccgccgctctcacaatggcttgggtccagactgcgccacagcctctcgggagacgtgggccctcggaacctttttagtgccggactccgggccgcaggcagtcccgcggcagcaggatcacagaacctctggatggactcttcctgggaagctttgctactttgcagcagctggaccatgttcctcattaacatctgtctgtccgcttagtcatcacatcatttcactgtggtggcagggactcagctcggaattctgtatagaaaaagcacctggatcccagtctttcaatggcttcaagacaaccagaagtgcctgctcttgaggctagtgcgcctctaggcaagatgtccctgcccatcgggatataccgccgggcagtcagctatgatgataccctcgaggaccctgcgcccatgactcctcctccatcggacatgggcagcgtcccttggaagccagtgattccagagcgcaagtatcagcacctcgccaaggtggaggaaggagaggccagtctaccctcccctgccatgaccctgtcatcagccattgacagtgtggacaaggtcccagtggtgaaggctaaagctacccatgtcatcatgaattctctgatcacaaaacagacccaggaaagcattcagcattttgagcgacaggcagggctgagagatgctggctacacaccccacaagggcctcaccaccgaggagaccaagtaccttcgagtggccgaagcactccacaaactaaagttacagagtggagaggtaacaaaagaagagaggcagcctgcatcagcccagtccaccccaagcaccactccgcactcttcacctaagcagaggcccaggggctggttcacttctggttcttccacagccttacctggcccaaatcctagcaccatggactctggaagtggggataaggacagaaacttgtcagataagtggagcctctttggaccgagatcccttcagaagtacgattctggaagttttgccacccaggcctaccgaggagcccagaagccctctccattggaactgatacgtgcccaggccaaccgaatggctgaagatccagcagccttgaagccccccaagatggacatcccagtgatggaaggaaagaaacagccaccacgggcccataacctcaaaccccgtgacctgaatgtgctcacacccactggcttctagagccctctttccagggattctggtaaaggtggtttcttgcatcccactccccttttaccttggtttgatttccttgttcaggtcagggcctggaacgcctgtgcggggaggtcactcaattcaaaattttctgtatgaaagcatttttcaccaaaatgagcctcatccctttatgcaacacataaccttactgagggagggaaatacggaagccacctttttatttctcttcactgtgtacaagttcacttgttgtcttgaacactgtctcaaatacctgctttttgttttggatagtaccttgtctgtataagaagctggcctttccatagagaggccctggagtctaaaattatgagaacaattaatttatttgtgtcttctattatgatctcgttttgacaataaaaatccttactactttctcaaaaaatgtggctatttttttgtccttttaacaatagttattccactctgcccacccagagtcacactgaacttggtattttgaaaaaccattgcctttttattgtctccttttaacatcaaatgttttataacacacttgatccttttgtttctaccccctattcattacagtcaaattaacaggcaatataataggtctaacagaatgcttgcatttcattagggaaaaatgaacgtctctctcctgaaacaggttgtcggtaccttgaatgacataatattggtgtatagactaggttcagcagagggattttttccacatcttgaatgaaaatgttaaacatgtgatgcacagagtattaacctgtttcaaaaaagtatagataaataatttattaaaaaatatatataccttgtatatttaagccatatttgagaacaggctaggataggattatttaaaaaaagatatttactagagttagaaattacaacctactgattaaataatgcaggtttggtcctgtaagattttaaccacttttcatgcttttagagcttctgagcagttggagagagagttcaggaggtattcttggcattcagtgcttggcaggccctcaggagccgctccagcccttttgaaagggctctgcatcagggttcaagtccgcagcatagaagagcaggagcttcaacaagtgcactttgtcttggagttgggggacaagaggctcccccagcatctggatcaggcggctgcggaaggcctcaatctgcttctctacgtctaccactgtgatgtcatctccttgctggggtttgggcttaatccttttgattattaagtcctttcggtcgatcacggaactccttaagtgttctcttaaaacatgttgataactggacagcagaaactgcagatgctcaaccaattcgtcccaagtctgccactggcttttatctgactgacacttgagcagtgacgtagaattattcagaaagtagagggcctgggccagagacagaggcaggcgggtgggtgtctcacagctgtggaggaatatgatttctaacactttgcagcgcagaaggtggctttccatggtagtaaagaacatttctctctggctcctctcaggaatgtccagcacaaacccaaacatcatctcggcaattttattggagctgcaggtgggggtcctgtccacctctacggctatggagagcatcctctgaagctggcacacaatcagctgattggtgttctttgtcaggttgggctgggaagaagggtggctactgctggctttcaagattcctgttcctgaagacgtttgatttccatttgggggctgagtcaat

SEQ ID NO: 289138 - DNA, 1328 bp, Homo sapiens
agcggcagtgctgcctgcccgctgggtggtactgctacctagtgggtcttggggaccttcgaaatcgccgccgctctcacaatggcttgggtccagactgcgccacagcctctcgggagacgtgggccctcggaacctttttagtgccggactccgggccgcaggcagtcccgcggcagcaggatcacagaacctctggatggactcttcctgggaagctttgctactttgcagcagctggaccatgttcctcattaacatctgtctgtccgcttagtcatcacatcatttcactgtggtggcagggactcagctcggaattctgtatagaaaaagcacctggatcccagtctttcaatggcttcaagacaaccagaagtgcctgctcttgaggctagtgcgcctctaggcaagatgtccctgcccatcgggatataccgccgggcagtcagctatgatgataccctcgaggaccctgcgcccatgactcctcctccatcggacatgggcagcgtcccttggaagccagtgattccagagcgcaagtatcagcacctcgccaaggtggaggaaggagaggccagtctaccctcccctgccatgaccctgtcatcagccattgacagtgtggacaaggtcccagtggtgaaggctaaagctacccatgtcatcatgaattctctgatcacaaaacagacccaggaaagcattcagcattttgagcgacaggcagggctgagagatgctggctacacaccccacaagggcctcaccaccgaggagaccaagtaccttcgagtggccgaagcactccacgtaagctcttaggaactttgaaaaaacaaaaccttcagtgttcatggcttgaaatgtggctgtggttttgaagttaccagctcagttagttgggggctgtggagttagtctcgctcccgagctcttagccctcgtagtttttgcttatccacctatacagtggggtgtctgttttgctacttctggttagcagaatcaagtgagagcctcagcttacatatacataggagtactttatgaatcataaagcaaatgtggagtatcttggggagaactgggcagcctcaacagaggtaacagcttaactggaaaggaacaagttaaaatcaaatgtggaattggaatgtttttgctatttcatttctataagtgaagaattttggtaagggttaatttagtgatagccaagtatttgaatgaatagtttcaaatgactttctttcagtgaagaccgcttcatactggatagtgttttatgattgtgaagcacttgcattcatttcatcctcaca

SEQ ID NO: 289139 - DNA, 1749 bp, Homo sapiens
gctgtttgctccacaaaatgcctcttaatcgtgtatttatttctctctctgagtcgcttatctactttaataggtgttatgtttcgtgatctgttgtctattcagcaactatgtgagttttgtttcgttttcatttagataccagtcgtcctgtctttttgattgtgcctacttagtcggatctttatattatatactaccacgaggcgctggtcgtgtttgttttataacttatctggatttcgtagagtcgtctcgctttagtttccaaaatatacttatcgtctggttggtgctgtgtcgcgcccgtgggcgttctattagtggggtgtgcccccgtcctcttttttgttcgtttgttgtggtgttttcttttcttcttttttttttttttttttttttttttttttttttttttttttttttttttttttttttttttttttttttttttttggtattttgaaaaaccattgcctttttattgtctccttttaacatcaaatgttttataacacacttgatccttttgtttctaccccctattcattacagtcaaattaacaggcaatataataggtctaacagaatgcttgcatttcattagggaaaaatgaacgtctctctcctgaaacaggttgtcggtaccttgaatgacataatattggtgtatagactaggttcagcagagggattttttccacatcttgaatgaaaatgttaaacatgtgatgcacagagtattaacctgtttcaaaaaagtatagataaataatttattaaaaaatatatataccttgtatatttaagccatatttgagaacaggctaggataggattatttaaaaaaagatatttactagagttagaaattacaacctactgattaaataatgcaggtttggtcctgtaagattttaaccacttttcatgcttttagagcttctgagcagttggagagagagttcaggaggtattcttggcattcagtgcttggcaggccctcaggagccgctccagcccttttgaaagggctctgcatcagggttcaagtccgcagcatagaagagcaggagcttcaacaagtgcactttgtcttggagttgggggacaagaggctcccccagcatctggatcaggcggctgcggaaggcctcaatctgcttctctacgtctaccactgtgatgtcatctccttgctggggtttgggcttaatccttttgattattaagtcctttcggtcgatcacggaactccttaagtgttctcttaaaacatgttgataactggacagcagaaactgcagatgctcaaccaattcgtcccaagtctgccactggcttttatctgactgacacttgagcagtgacgtagaattattcagaaagtagagggcctgggccagagacagaggcaggcgggtgggtgtctcacagctgtggaggaatatgatttctaacactttgcagcgcagaaggtggctttccatggtagtaaagaacatttctctctggctcctctcaggaatgtccagcacaaacccaaacatcatctcggcaattttattggagctgcaggtgggggtcctgtccacctctacggctatggagagcatcctctgaagctggcacacaatcagctgattggtgttctttgtcaggttgggctgggaagaagggtggctactgctggctttcaagattcctgttcctgaagacgtttgatttccatttgggggctgagtcaat

SEQ ID NO: 289140 - DNA, 534 bp, Homo sapiens
tggataatacctatctagctgggtggagatgaccaactcctcccttcaatgatttcctcacttaccagattaatgttatttcagtaacttcctccccaaaggagtaagtttaggtgtgtgactcccctgccctgcctaagtgcttctgtactgtacctctcttgaacaggtggaggaaggagaggccagtctaccctcccctgccatgaccctgtcatcagccattgacagtgtggacaaggtcccagtggtgaaggctaaagctacccatgtcatcatgaattctctgatcacaaaacactcttcaccctcagagtagagtgccataggggcagggaagagttgaggcttcctacaagctgattggagatgatactgcaacacgctcgccttaccttatcctaaaaaatgtcagtttggctgctgaatcatgtcagtattgaagctccatttattaagtggaagatttgccaaatgttaagcatcttatctgatttaggtgcattcctgctgctttgttgatatgatctcatg

SEQ ID NO: 289141 - DNA, 2813 bp, Homo sapiens
agcggcagtgctgcctgcccgctgggtggtactgctacctagtgggtcttggggaccttcgaaatcgccgccgctctcacaatggcttgggtccagactgcgccacagcctctcgggagacgtgggccctcggaacctttttagtgccggactccgggccgcaggcagtcccgcggcagcaggatcacagaacctctggatggactcttcctgggaagctttgctactttgcagcagctggaccatgttcctcattaacatctgtctgtccgcttagtcatcacatcatttcactgtggtggcagggactcagctcggaattctgtatagaaaaagcacctggatcccagtctttcaatggcttcaagacaaccagaagtgcctgctcttgaggctagtgcgcctctaggcaagatgtccctgcccatcgggatataccgccgggcagtcagctatgatgataccctcgaggaccctgcgcccatgactcctcctccatcggacatgggcagcgtcccttggaagccagtgattccagagcgcaagtatcagcacctcgccaaggtggaggaaggagaggccagtctaccctcccctgccatgaccctgtcatcagccattgacagtgtggacaaggtcccagtggtgaaggctaaagctacccatgtcatcatgaattctctgatcacaaaacagacccaggaaagcattcagcattttgagcgacaggcagggctgagagatgctggctacacaccccacaagggcctcaccaccgaggagaccaagtaccttcgagtggccgaagcactccacaaactaaagttacagagtggagaggtaacaaaagaagagaggcagcctgcatcagcccagtccaccccaagcaccactccgcactcttcacctaagcagaggcccaggggctggttcacttctggttcttccacagccttacctggcccaaatcctagcaccatggactctggaagtggggataaggacagaaacttgtcagataagtggagcctctttggaccgagatcccttcagaagtacgattctggaagttttgccacccaggcctaccgaggagcccagaagccctctccattggaactgatacgtgcccaggccaaccgaatggctgaagatccagcagccttgaagccccccaagatggacatcccagtgatggaaggaaagaaacagccaccacgggcccataacctcaaaccccgtgacctgaatgtgctcacacccactggcttctagagccctctttccagggattctggtaaaggtggtttcttgcatcccactccccttttaccttggctttgacataggaaaggtatatttaaaaacttaatcagctgggcgtggtggctcacgcctgtaatcccagcactttgggaggccaaggtaggtggatacctgaggtcaggagttcaagaccagcctggccaacatggtgaaaccccgtctctactaaaaatacaaaaattagctgggcgtggtggtgggcgcctgtagtcccagctacttgggaggctgaggcaggagaatcgcctgaacccaggaagcagatgttgtaccgagctgagatcatgccattacactccagcctgggcgacagaacgagacgccatcaataaataaataaataaagtaaagtaaaaaacctattaaattgaggctagagctggagatgtaattggtttttgagaaacattagtataaagcttgcccttgttgtgtggaagaagccattttgtactgctttaaagttagactaatattctcagcacgggtgtatggggacctcattacctatttttttcatcatttaccctaggtaagaactttgatcactgcttactaggtaaagaatgtttgtactgttccaaaacccaggcttctttattcctttaccactatccatgtgagcattgacaaatcatggcttagaggtgctcactgactcgctaagacgactttggccctgttgatgactggtgctgtgctccagccttatcagttaggggacccaaggtttgtttgggacctgggtacaggtaaaagccagacttggcagggacccctctttctaggctgaaccttgagtccccctgctttttggcagacctaatggatcactgtcttgcagctagttcttcatgtggggcctcttaggccagtgccggaggaggcatgctcctctttctatgccacagaacaaacactactctagcagagcctttcttgcactttaaagtgagattaatttagctgtaatttggttaaaaacttcctaagagagaaaattaagtctactgatttggtataggtaaatggacattaaacttttttaaagtaaaggagatggtagataccgttagattatagtcttgaggttcatgtgaagccagtggtgttaacttactttgatttccttgttcaggtcagggcctggaacgcctgtgcggggaggtcactcaattcaaaattttctgtatgaaagcatttttcaccaaaatgagcctcatccctttatgcaacacataaccttactgagggagggaaatacggaagccacctttttatttctcttcactgtgtacaagttcacttgttgtcttgaacactgtctcaaatacctgctttttgttttggatagtaccttgtctgtataagaagctggcctttccatagagaggccctggagtctaaaattatgagaacaattaatttatttgtgtcttctattatgatctcgttttgacaataaaaatccttactactttctcaaa

SEQ ID NO: 289142 - DNA, 2295 bp, Homo sapiens
agcggcagtgctgcctgcccgctgggtggtactgctacctagtgggtcttggggaccttcgaaatcgccgccgctctcacaatggcttgggtccagactgcgccacagcctctcgggagacgtgggccctcggaacctttttagtgccggactccgggccgcaggcagtcccgcggcagcaggatcacagaacctctggatggactcttcctgggaagctttgctactttgcagcagctggaccatgttcctcattaacatctgtctgtccgcttagtcatcacatcatttcactgtgaaactaaagttacagagtggagaggtaacaaaagaagagaggcagcctgcatcagcccagtccaccccaagcaccactccgcactcttcacctaagcagaggcccaggggctggttcacttctggttcttccacagccttacctggcccaaatcctagcaccatggactctggaagtggggataaggacagaaacttgtcagataagtggagcctctttggaccgagatcccttcagaagtacgattctggaagttttgccacccaggcctaccgaggagcccagaagccctctccattggaactgatacgtgcccaggccaaccgaatggctgaagatccagcagccttgaagccccccaagatggacatcccagtgatggaaggaaagaaacagccaccacgggcccataacctcaaaccccgtgacctgaatgtgctcacacccactggcttctagagccctctttccagggattctggtaaaggtggtttcttgcatcccactccccttttaccttggctttgacataggaaaggtatatttaaaaacttaatcagctgggcgtggtggctcacgcctgtaatcccagcactttgggaggccaaggtaggtggatacctgaggtcaggagttcaagaccagcctggccaacatggtgaaaccccgtctctactaaaaatacaaaaattagctgggcgtggtggtgggcgcctgtagtcccagctacttgggaggctgaggcaggagaatcgcctgaacccaggaagcagatgttgtaccgagctgagatcatgccattacactccagcctgggcgacagaacgagacgccatcaataaataaataaataaagtaaagtaaaaaacctattaaattgaggctagagctggagatgtaattggtttttgagaaacattagtataaagcttgcccttgttgtgtggaagaagccattttgtactgctttaaagttagactaatattctcagcacgggtgtatggggacctcattacctatttttttcatcatttaccctaggtaagaactttgatcactgcttactaggtaaagaatgtttgtactgttccaaaacccaggcttctttattcctttaccactatccatgtgagcattgacaaatcatggcttagaggtgctcactgactcgctaagacgactttggccctgttgatgactggtgctgtgctccagccttatcagttaggggacccaaggtttgtttgggacctgggtacaggtaaaagccagacttggcagggacccctctttctaggctgaaccttgagtccccctgctttttggcagacctaatggatcactgtcttgcagctagttcttcatgtggggcctcttaggccagtgccggaggaggcatgctcctctttctatgccacagaacaaacactactctagcagagcctttcttgcactttaaagtgagattaatttagctgtaatttggttaaaaacttcctaagagagaaaattaagtctactgatttggtataggtaaatggacattaaacttttttaaagtaaaggagatggtagataccgttagattatagtcttgaggttcatgtgaagccagtggtgttaacttactttgatttccttgttcaggtcagggcctggaacgcctgtgcggggaggtcactcaattcaaaattttctgtatgaaagcatttttcaccaaaatgagcctcatccctttatgcaacacataaccttactgagggagggaaatacggaagccacctttttatttctcttcactgtgtacaagttcacttgttgtcttgaacactgtctcaaatacctgctttttgttttggatagtaccttgtctgtataagaagctggcctttccatagagaggccctggagtctaaaattatgagaacaattaatttatttgtgtcttctattatgatctcgttttgacaataaaaatccttactactttctcaaa

SEQ ID NO: 289143 - DNA, 2027 bp, Homo sapiens
agcggcagtgctgcctgcccgctgggtggtactgctacctagtgggtcttggggaccttcgaaatcgccgccgctctcacaatggcttgggtccagactgcgccacagcctctcgggagacgtgggccctcggaacctttttagtgccggactccgggccgcaggcagtcccgcggcagcaggatcacaggtggcagggactcagctcggaattctgtatagaaaaagcacctggatcccagtctttcaatggcttcaagacaaccagaagtgcctgctcttgaggctagtgcgcctctaggcaagatgtccctgcccatcgggatataccgccgggcagtcagctatgatgataccctcgaggaccctgcgcccatgactcctcctccatcggacatgggcagcgtcccttggaagccagtgattccagagcgcaagtatcagcacctcgccaaggtggaggaaggagaggccagtctaccctcccctgccatgaccctgtcatcagccattgacagtgtggacaaggtcccagtggtgaaggctaaagctacccatgtcatcatgaattctctgatcacaaaacagacccaggaaagcattcagcattttgagcgacaggcagggctgagagatgctggctacacaccccacaagggcctcaccaccgaggagaccaagtaccttcgagtggccgaagcactccacaaactaaagttacagagtggagaggtaacaaaagaagagaggcagcctgcatcagcccagtccaccccaagcaccactccgcactcttcacctaagcagaggcccaggggctggttcacttctggttcttccacagccttacctggcccaaatcctagcaccatggactctggaagtggggataaggacagaaacttgtcagataagtggagcctctttggaccgagatcccttcagaagtacgattctggaagttttgccacccaggcctaccgaggagcccagaagccctctccattggaactgatacgtgcccaggccaaccgaatggctgaagatccagcagccttgaagccccccaagatggacatcccagtgatggaaggaaagaaacagccaccacgggcccataacctcaaaccccgtgacctgaatgtgctcacacccactggcttctagagccctctttccagggattctggtaaaggtggtttcttgcatcccactccccttttaccttggctttgacataggaaaggtatatttaaaaacttaatcagctgggattacaggcatgagccaccgtgctcagccgcaaaattctttatgaattttacacttggcaaatgttaatgacggaagccatagtctgctcctaatacatgtccaaagcattgactgttgtgtcattagctgcctggttacattagctccctggcttcttgtttagaccactgctaatcccttaaaaacaagaggtctggcactagtagcacaacctaaggtggcattacagatctttgagcgagccacagcaacttttctgccaagtcagcttagtttagacttcagtgaatcaggctattgctatcctaatgtatgtctctatgagtgtatttagccacacatctgcccttggttgactttctgactcattgcttgcttgcttgtttccttgctttggaaaactattgaagattgctaaaaaataccactgcaaagtgatggaaaagggtggagaacaggggagtagccaggctggatggctcaaatataaatgaatgaggaattctttatgaagtatcagtcagattttatgattaagtgatgtaatataggaattatgtaaaagggaagaatgtctgatactgatctattagagaggtactttagaggcttcttgattggcataaagttcctaaggttatagattttccccccttttggctgtatagcaaagtgttttaatccacggttgtgccttattgttccattaaaattgtatcttcgatccatcaataaatacttgtggttgaaac

SEQ ID NO: 289144 - DNA, 2618 bp, Homo sapiens
agcggcagtgctgcctgcccgctgggtggtactgctacctagtgggtcttggggaccttcgaaatcgccgccgctctcacaatggcttgggtccagactgcgccacagcctctcgggagacgtgggccctcggaacctttttagtgccggactccgggccgcaggcagtcccgcggcagcaggatcacagctcttgaggctagtgcgcctctaggcaagatgtccctgcccatcgggatataccgccgggcagtcagctatgatgataccctcgaggaccctgcgcccatgactcctcctccatcggacatgggcagcgtcccttggaagccagtgattccagagcgcaagtatcagcacctcgccaaggtggaggaaggagaggccagtctaccctcccctgccatgaccctgtcatcagccattgacagtgtggacaaggtcccagtggtgaaggctaaagctacccatgtcatcatgaattctctgatcacaaaacagacccaggaaagcattcagcattttgagcgacaggcagggctgagagatgctggctacacaccccacaagggcctcaccaccgaggagaccaagtaccttcgagtggccgaagcactccacaaactaaagttacagagtggagaggtaacaaaagaagagaggcagcctgcatcagcccagtccaccccaagcaccactccgcactcttcacctaagcagaggcccaggggctggttcacttctggttcttccacagccttacctggcccaaatcctagcaccatggactctggaagtggggataaggacagaaacttgtcagataagtggagcctctttggaccgagatcccttcagaagtacgattctggaagttttgccacccaggcctaccgaggagcccagaagccctctccattggaactgatacgtgcccaggccaaccgaatggctgaagatccagcagccttgaagccccccaagatggacatcccagtgatggaaggaaagaaacagccaccacgggcccataacctcaaaccccgtgacctgaatgtgctcacacccactggcttctagagccctctttccagggattctggtaaaggtggtttcttgcatcccactccccttttaccttggctttgacataggaaaggtatatttaaaaacttaatcagctgggcgtggtggctcacgcctgtaatcccagcactttgggaggccaaggtaggtggatacctgaggtcaggagttcaagaccagcctggccaacatggtgaaaccccgtctctactaaaaatacaaaaattagctgggcgtggtggtgggcgcctgtagtcccagctacttgggaggctgaggcaggagaatcgcctgaacccaggaagcagatgttgtaccgagctgagatcatgccattacactccagcctgggcgacagaacgagacgccatcaataaataaataaataaagtaaagtaaaaaacctattaaattgaggctagagctggagatgtaattggtttttgagaaacattagtataaagcttgcccttgttgtgtggaagaagccattttgtactgctttaaagttagactaatattctcagcacgggtgtatggggacctcattacctatttttttcatcatttaccctaggtaagaactttgatcactgcttactaggtaaagaatgtttgtactgttccaaaacccaggcttctttattcctttaccactatccatgtgagcattgacaaatcatggcttagaggtgctcactgactcgctaagacgactttggccctgttgatgactggtgctgtgctccagccttatcagttaggggacccaaggtttgtttgggacctgggtacaggtaaaagccagacttggcagggacccctctttctaggctgaaccttgagtccccctgctttttggcagacctaatggatcactgtcttgcagctagttcttcatgtggggcctcttaggccagtgccggaggaggcatgctcctctttctatgccacagaacaaacactactctagcagagcctttcttgcactttaaagtgagattaatttagctgtaatttggttaaaaacttcctaagagagaaaattaagtctactgatttggtataggtaaatggacattaaacttttttaaagtaaaggagatggtagataccgttagattatagtcttgaggttcatgtgaagccagtggtgttaacttactttgatttccttgttcaggtcagggcctggaacgcctgtgcggggaggtcactcaattcaaaattttctgtatgaaagcatttttcaccaaaatgagcctcatccctttatgcaacacataaccttactgagggagggaaatacggaagccacctttttatttctcttcactgtgtacaagttcacttgttgtcttgaacactgtctcaaatacctgctttttgttttggatagtaccttgtctgtataagaagctggcctttccatagagaggccctggagtctaaaattatgagaacaattaatttatttgtgtcttctattatgatctcgttttgacaataaaaatccttactactttctcaaa

SEQ ID NO: 289145 - DNA, 2726 bp, Homo sapiens
agcggcagtgctgcctgcccgctgggtggtactgctacctagtgggtcttggggaccttcgaaatcgccgccgctctcacaatggcttgggtccagactgcgccacagcctctcgggagacgtgggccctcggaacctttttagtgccggactccgggccgcaggcagtcccgcggcagcaggatcacagaacctctggatggactcttcctgggaagctttgctactttgcagcagctggaccatgttcctcattaacatctgtctgtccgcttagtcatcacatcatttcactgtgctcttgaggctagtgcgcctctaggcaagatgtccctgcccatcgggatataccgccgggcagtcagctatgatgataccctcgaggaccctgcgcccatgactcctcctccatcggacatgggcagcgtcccttggaagccagtgattccagagcgcaagtatcagcacctcgccaaggtggaggaaggagaggccagtctaccctcccctgccatgaccctgtcatcagccattgacagtgtggacaaggtcccagtggtgaaggctaaagctacccatgtcatcatgaattctctgatcacaaaacagacccaggaaagcattcagcattttgagcgacaggcagggctgagagatgctggctacacaccccacaagggcctcaccaccgaggagaccaagtaccttcgagtggccgaagcactccacaaactaaagttacagagtggagaggtaacaaaagaagagaggcagcctgcatcagcccagtccaccccaagcaccactccgcactcttcacctaagcagaggcccaggggctggttcacttctggttcttccacagccttacctggcccaaatcctagcaccatggactctggaagtggggataaggacagaaacttgtcagataagtggagcctctttggaccgagatcccttcagaagtacgattctggaagttttgccacccaggcctaccgaggagcccagaagccctctccattggaactgatacgtgcccaggccaaccgaatggctgaagatccagcagccttgaagccccccaagatggacatcccagtgatggaaggaaagaaacagccaccacgggcccataacctcaaaccccgtgacctgaatgtgctcacacccactggcttctagagccctctttccagggattctggtaaaggtggtttcttgcatcccactccccttttaccttggctttgacataggaaaggtatatttaaaaacttaatcagctgggcgtggtggctcacgcctgtaatcccagcactttgggaggccaaggtaggtggatacctgaggtcaggagttcaagaccagcctggccaacatggtgaaaccccgtctctactaaaaatacaaaaattagctgggcgtggtggtgggcgcctgtagtcccagctacttgggaggctgaggcaggagaatcgcctgaacccaggaagcagatgttgtaccgagctgagatcatgccattacactccagcctgggcgacagaacgagacgccatcaataaataaataaataaagtaaagtaaaaaacctattaaattgaggctagagctggagatgtaattggtttttgagaaacattagtataaagcttgcccttgttgtgtggaagaagccattttgtactgctttaaagttagactaatattctcagcacgggtgtatggggacctcattacctatttttttcatcatttaccctaggtaagaactttgatcactgcttactaggtaaagaatgtttgtactgttccaaaacccaggcttctttattcctttaccactatccatgtgagcattgacaaatcatggcttagaggtgctcactgactcgctaagacgactttggccctgttgatgactggtgctgtgctccagccttatcagttaggggacccaaggtttgtttgggacctgggtacaggtaaaagccagacttggcagggacccctctttctaggctgaaccttgagtccccctgctttttggcagacctaatggatcactgtcttgcagctagttcttcatgtggggcctcttaggccagtgccggaggaggcatgctcctctttctatgccacagaacaaacactactctagcagagcctttcttgcactttaaagtgagattaatttagctgtaatttggttaaaaacttcctaagagagaaaattaagtctactgatttggtataggtaaatggacattaaacttttttaaagtaaaggagatggtagataccgttagattatagtcttgaggttcatgtgaagccagtggtgttaacttactttgatttccttgttcaggtcagggcctggaacgcctgtgcggggaggtcactcaattcaaaattttctgtatgaaagcatttttcaccaaaatgagcctcatccctttatgcaacacataaccttactgagggagggaaatacggaagccacctttttatttctcttcactgtgtacaagttcacttgttgtcttgaacactgtctcaaatacctgctttttgttttggatagtaccttgtctgtataagaagctggcctttccatagagaggccctggagtctaaaattatgagaacaattaatttatttgtgtcttctattatgatctcgttttgacaataaaaatccttactactttctcaaa

SEQ ID NO: 289146 - DNA, 2441 bp, Homo sapiens
agcggcagtgctgcctgcccgctgggtggtactgctacctagtgggtcttggggaccttcgaaatcgccgccgctctcacaatggcttgggtccagactgcgccacagcctctcgggagacgtgggccctcggaacctttttagtgccggactccgggccgcaggcagtcccgcggcagcaggatcacagaggtggaggaaggagaggccagtctaccctcccctgccatgaccctgtcatcagccattgacagtgtggacaaggtcccagtggtgaaggctaaagctacccatgtcatcatgaattctctgatcacaaaacagacccaggaaagcattcagcattttgagcgacaggcagggctgagagatgctggctacacaccccacaagggcctcaccaccgaggagaccaagtaccttcgagtggccgaagcactccacaaactaaagttacagagtggagaggtaacaaaagaagagaggcagcctgcatcagcccagtccaccccaagcaccactccgcactcttcacctaagcagaggcccaggggctggttcacttctggttcttccacagccttacctggcccaaatcctagcaccatggactctggaagtggggataaggacagaaacttgtcagataagtggagcctctttggaccgagatcccttcagaagtacgattctggaagttttgccacccaggcctaccgaggagcccagaagccctctccattggaactgatacgtgcccaggccaaccgaatggctgaagatccagcagccttgaagccccccaagatggacatcccagtgatggaaggaaagaaacagccaccacgggcccataacctcaaaccccgtgacctgaatgtgctcacacccactggcttctagagccctctttccagggattctggtaaaggtggtttcttgcatcccactccccttttaccttggctttgacataggaaaggtatatttaaaaacttaatcagctgggcgtggtggctcacgcctgtaatcccagcactttgggaggccaaggtaggtggatacctgaggtcaggagttcaagaccagcctggccaacatggtgaaaccccgtctctactaaaaatacaaaaattagctgggcgtggtggtgggcgcctgtagtcccagctacttgggaggctgaggcaggagaatcgcctgaacccaggaagcagatgttgtaccgagctgagatcatgccattacactccagcctgggcgacagaacgagacgccatcaataaataaataaataaagtaaagtaaaaaacctattaaattgaggctagagctggagatgtaattggtttttgagaaacattagtataaagcttgcccttgttgtgtggaagaagccattttgtactgctttaaagttagactaatattctcagcacgggtgtatggggacctcattacctatttttttcatcatttaccctaggtaagaactttgatcactgcttactaggtaaagaatgtttgtactgttccaaaacccaggcttctttattcctttaccactatccatgtgagcattgacaaatcatggcttagaggtgctcactgactcgctaagacgactttggccctgttgatgactggtgctgtgctccagccttatcagttaggggacccaaggtttgtttgggacctgggtacaggtaaaagccagacttggcagggacccctctttctaggctgaaccttgagtccccctgctttttggcagacctaatggatcactgtcttgcagctagttcttcatgtggggcctcttaggccagtgccggaggaggcatgctcctctttctatgccacagaacaaacactactctagcagagcctttcttgcactttaaagtgagattaatttagctgtaatttggttaaaaacttcctaagagagaaaattaagtctactgatttggtataggtaaatggacattaaacttttttaaagtaaaggagatggtagataccgttagattatagtcttgaggttcatgtgaagccagtggtgttaacttactttgatttccttgttcaggtcagggcctggaacgcctgtgcggggaggtcactcaattcaaaattttctgtatgaaagcatttttcaccaaaatgagcctcatccctttatgcaacacataaccttactgagggagggaaatacggaagccacctttttatttctcttcactgtgtacaagttcacttgttgtcttgaacactgtctcaaatacctgctttttgttttggatagtaccttgtctgtataagaagctggcctttccatagagaggccctggagtctaaaattatgagaacaattaatttatttgtgtcttctattatgatctcgttttgacaataaaaatccttactactttctcaaa

SEQ ID NO: 289147 - DNA, 2187 bp, Homo sapiens
agcggcagtgctgcctgcccgctgggtggtactgctacctagtgggtcttggggaccttcgaaatcgccgccgctctcacaatggcttgggtccagactgcgccacagcctctcgggagacgtgggccctcggaacctttttagtgccggactccgggccgcaggcagtcccgcggcagcaggatcacagaaactaaagttacagagtggagaggtaacaaaagaagagaggcagcctgcatcagcccagtccaccccaagcaccactccgcactcttcacctaagcagaggcccaggggctggttcacttctggttcttccacagccttacctggcccaaatcctagcaccatggactctggaagtggggataaggacagaaacttgtcagataagtggagcctctttggaccgagatcccttcagaagtacgattctggaagttttgccacccaggcctaccgaggagcccagaagccctctccattggaactgatacgtgcccaggccaaccgaatggctgaagatccagcagccttgaagccccccaagatggacatcccagtgatggaaggaaagaaacagccaccacgggcccataacctcaaaccccgtgacctgaatgtgctcacacccactggcttctagagccctctttccagggattctggtaaaggtggtttcttgcatcccactccccttttaccttggctttgacataggaaaggtatatttaaaaacttaatcagctgggcgtggtggctcacgcctgtaatcccagcactttgggaggccaaggtaggtggatacctgaggtcaggagttcaagaccagcctggccaacatggtgaaaccccgtctctactaaaaatacaaaaattagctgggcgtggtggtgggcgcctgtagtcccagctacttgggaggctgaggcaggagaatcgcctgaacccaggaagcagatgttgtaccgagctgagatcatgccattacactccagcctgggcgacagaacgagacgccatcaataaataaataaataaagtaaagtaaaaaacctattaaattgaggctagagctggagatgtaattggtttttgagaaacattagtataaagcttgcccttgttgtgtggaagaagccattttgtactgctttaaagttagactaatattctcagcacgggtgtatggggacctcattacctatttttttcatcatttaccctaggtaagaactttgatcactgcttactaggtaaagaatgtttgtactgttccaaaacccaggcttctttattcctttaccactatccatgtgagcattgacaaatcatggcttagaggtgctcactgactcgctaagacgactttggccctgttgatgactggtgctgtgctccagccttatcagttaggggacccaaggtttgtttgggacctgggtacaggtaaaagccagacttggcagggacccctctttctaggctgaaccttgagtccccctgctttttggcagacctaatggatcactgtcttgcagctagttcttcatgtggggcctcttaggccagtgccggaggaggcatgctcctctttctatgccacagaacaaacactactctagcagagcctttcttgcactttaaagtgagattaatttagctgtaatttggttaaaaacttcctaagagagaaaattaagtctactgatttggtataggtaaatggacattaaacttttttaaagtaaaggagatggtagataccgttagattatagtcttgaggttcatgtgaagccagtggtgttaacttactttgatttccttgttcaggtcagggcctggaacgcctgtgcggggaggtcactcaattcaaaattttctgtatgaaagcatttttcaccaaaatgagcctcatccctttatgcaacacataaccttactgagggagggaaatacggaagccacctttttatttctcttcactgtgtacaagttcacttgttgtcttgaacactgtctcaaatacctgctttttgttttggatagtaccttgtctgtataagaagctggcctttccatagagaggccctggagtctaaaattatgagaacaattaatttatttgtgtcttctattatgatctcgttttgacaataaaaatccttactactttctcaaa

SEQ ID NO: 289148 - DNA, 2026 bp, Homo sapiens
agtgtggcagatgaggttgtatttaagcctgtggtttcagagggagaagggatagttccctgttcttttggtgtgagacatttctaggggcgaaggaagaggtattttaggatatgttttgttctttctttcccaggggctggttcacttctggttcttccacagccttacctggcccaaatcctagcaccatggactctggaagtggggataaggacagaaacttgtcagataagtggagcctctttggaccgagatcccttcagaagtacgattctggaagttttgccacccaggcctaccgaggagcccagaagccctctccattggaactgatacgtgcccaggccaaccgaatggctgaagatccagcagccttgaagccccccaagatggacatcccagtgatggaaggaaagaaacagccaccacgggcccataacctcaaaccccgtgacctgaatgtgctcacacccactggcttctagagccctctttccagggattctggtaaaggtggtttcttgcatcccactccccttttaccttggctttgacataggaaaggtatatttaaaaacttaatcagctgggcgtggtggctcacgcctgtaatcccagcactttgggaggccaaggtaggtggatacctgaggtcaggagttcaagaccagcctggccaacatggtgaaaccccgtctctactaaaaatacaaaaattagctgggcgtggtggtgggcgcctgtagtcccagctacttgggaggctgaggcaggagaatcgcctgaacccaggaagcagatgttgtaccgagctgagatcatgccattacactccagcctgggcgacagaacgagacgccatcaataaataaataaataaagtaaagtaaaaaacctattaaattgaggctagagctggagatgtaattggtttttgagaaacattagtataaagcttgcccttgttgtgtggaagaagccattttgtactgctttaaagttagactaatattctcagcacgggtgtatggggacctcattacctatttttttcatcatttaccctaggtaagaactttgatcactgcttactaggtaaagaatgtttgtactgttccaaaacccaggcttctttattcctttaccactatccatgtgagcattgacaaatcatggcttagaggtgctcactgactcgctaagacgactttggccctgttgatgactggtgctgtgctccagccttatcagttaggggacccaaggtttgtttgggacctgggtacaggtaaaagccagacttggcagggacccctctttctaggctgaaccttgagtccccctgctttttggcagacctaatggatcactgtcttgcagctagttcttcatgtggggcctcttaggccagtgccggaggaggcatgctcctctttctatgccacagaacaaacactactctagcagagcctttcttgcactttaaagtgagattaatttagctgtaatttggttaaaaacttcctaagagagaaaattaagtctactgatttggtataggtaaatggacattaaacttttttaaagtaaaggagatggtagataccgttagattatagtcttgaggttcatgtgaagccagtggtgttaacttactttgatttccttgttcaggtcagggcctggaacgcctgtgcggggaggtcactcaattcaaaattttctgtatgaaagcatttttcaccaaaatgagcctcatccctttatgcaacacataaccttactgagggagggaaatacggaagccacctttttatttctcttcactgtgtacaagttcacttgttgtcttgaacactgtctcaaatacctgctttttgttttggatagtaccttgtctgtataagaagctggcctttccatagagaggccctggagtctaaaattatgagaacaattaatttatttgtgtcttctattatgatctcgttttgacaataaaaatccttactactttctcaaa

SEQ ID NO: 289149 - DNA, 4177 bp, Homo sapiens
agcggcagtgctgcctgcccgctgggtggtactgctacctagtgggtcttggggaccttcgaaatcgccgccgctctcacaatggcttgggtccagactgcgccacagcctctcgggagacgtgggccctcggaacctttttagtgccggactccgggccgcaggcagtcccgcggcagcaggatcacagaacctctggatggactcttcctgggaagctttgctactttgcagcagctggaccatgttcctcattaacatctgtctgtccgcttagtcatcacatcatttcactgtggtggcagggactcagctcggaattctgtatagaaaaagcacctggatcccagtctttcaatggcttcaagacaaccagaagtgcctgctcttgaggctagtgcgcctctaggcaagatgtccctgcccatcgggatataccgccgggcagtcagctatgatgataccctcgaggaccctgcgcccatgactcctcctccatcggacatgggcagcgtcccttggaagccagtgattccagagcgcaagtatcagcacctcgccaaggtggaggaaggagaggccagtctaccctcccctgccatgaccctgtcatcagccattgacagtgtggacaaggtcccagtggtgaaggctaaagctacccatgtcatcatgaattctctgatcacaaaacagacccaggaaagcattcagcattttgagcgacaggcagggctgagagatgctggctacacaccccacaagggcctcaccaccgaggagaccaagtaccttcgagtggccgaagcactccacaaactaaagttacagagtggagaggtaacaaaagaagagaggcagcctgcatcagcccagtccaccccaagcaccactccgcactcttcacctaagcagaggcccaggggctggttcacttctggttcttccacagccttacctggcccaaatcctagcaccatggactctggaagtggggataaggacagaaacttgtcagataagtggagcctctttggaccgagatcccttcagaagtacgattctggaagttttgccacccaggcctaccgaggagcccagaagccctctccattggaactgatacgtgcccaggccaaccgaatggctgaagatccagcagccttgaagccccccaagatggacatcccagtgatggaaggaaagaaacagccaccacgggcccataacctcaaaccccgtgacctgaatgtgctcacacccactggcttctagagccctctttccagggattctggtaaaggtggtttcttgcatcccactccccttttaccttggctttgacataggaaaggtatatttaaaaacttaatcagctgggcgtggtggctcacgcctgtaatcccagcactttgggaggccaaggtaggtggatacctgaggtcaggagttcaagaccagcctggccaacatggtgaaaccccgtctctactaaaaatacaaaaattagctgggcgtggtggtgggcgcctgtagtcccagctacttgggaggctgaggcaggagaatcgcctgaacccaggaagcagatgttgtaccgagctgagatcatgccattacactccagcctgggcgacagaacgagacgccatcaataaataaataaataaagtaaagtaaaaaacctattaaattgaggctagagctggagatgtaattggtttttgagaaacattagtataaagcttgcccttgttgtgtggaagaagccattttgtactgctttaaagttagactaatattctcagcacgggtgtatggggacctcattacctatttttttcatcatttaccctaggtaagaactttgatcactgcttactaggtaaagaatgtttgtactgttccaaaacccaggcttctttattcctttaccactatccatgtgagcattgacaaatcatggcttagaggtgctcactgactcgctaagacgactttggccctgttgatgactggtgctgtgctccagccttatcagttaggggacccaaggtttgtttgggacctgggtacaggtaaaagccagacttggcagggacccctctttctaggctgaaccttgagtccccctgctttttggcagacctaatggatcactgtcttgcagctagttcttcatgtggggcctcttaggccagtgccggaggaggcatgctcctctttctatgccacagaacaaacactactctagcagagcctttcttgcactttaaagtgagattaatttagctgtaatttggttaaaaacttcctaagagagaaaattaagtctactgatttggtataggtaaatggacattaaacttttttaaagtaaaggagatggtagataccgttagattatagtcttgaggttcatgtgaagccagtggtgttaacttactttgatttccttgttcaggtcagggcctggaacgcctgtgcggggaggtcactcaattcaaaattttctgtatgaaagcatttttcaccaaaatgagcctcatccctttatgcaacacataaccttactgagggagggaaatacggaagccacctttttatttctcttcactgtgtacaagttcacttgttgtcttgaacactgtctcaaatacctgctttttgttttggatagtaccttgtctgtataagaagctggcctttccatagagaggccctggagtctaaaattatgagaacaattaatttatttgtgtcttctattatgatctcgttttgacaataaaaatccttactactttctcaaaaaatgtggctatttttttgtccttttaacaatagttattccactctgcccacccagagtcacactgaacttggtattttgaaaaaccattgcctttttattgtctccttttaacatcaaatgttttataacacacttgatccttttgtttctaccccctattcattacagtcaaattaacaggcaatataataggtctaacagaatgcttgcatttcattagggaaaaatgaacgtctctctcctgaaacaggttgtcggtaccttgaatgacataatattggtgtatagactaggttcagcagagggattttttccacatcttgaatgaaaatgttaaacatgtgatgcacagagtattaacctgtttcaaaaaagtatagataaataatttattaaaaaatatatataccttgtatatttaagccatatttgagaacaggctaggataggattatttaaaaaaagatatttactagagttagaaattacaacctactgattaaataatgcaggtttggtcctgtaagattttaaccacttttcatgcttttagagcttctgagcagttggagagagagttcaggaggtattcttggcattcagtgcttggcaggccctcaggagccgctccagcccttttgaaagggctctgcatcagggttcaagtccgcagcatagaagagcaggagcttcaacaagtgcactttgtcttggagttgggggacaagaggctcccccagcatctggatcaggcggctgcggaaggcctcaatctgcttctctacgtctaccactgtgatgtcatctccttgctggggtttgggcttaatccttttgattattaagtcctttcggtcgatcacggaactccttaagtgttctcttaaaacatgttgataactggacagcagaaactgcagatgctcaaccaattcgtcccaagtctgccactggcttttatctgactgacacttgagcagtgacgtagaattattcagaaagtagagggcctgggccagagacagaggcaggcgggtgggtgtctcacagctgtggaggaatatgatttctaacactttgcagcgcagaaggtggctttccatggtagtaaagaacatttctctctggctcctctcaggaatgtccagcacaaacccaaacatcatctcggcaattttattggagctgcaggtgggggtcctgtccacctctacggctatggagagcatcctctgaagctggcacacaatcagctgattggtgttctttgtcaggttgggctgggaagaagggtggctactgctggctttcaagattcctgttcctgaagacgtttgatttccatttgggggctgagtcaat

SEQ ID NO: 289150 - DNA, 2832 bp, Homo sapiens
agcggcagtgctgcctgcccgctgggtggtactgctacctagtgggtcttggggaccttcgaaatcgccgccgctctcacaatggcttgggtccagactgcgccacagcctctcgggagacgtgggccctcggaacctttttagtgccggactccgggccgcaggcagtcccgcggcagcaggatcacagaacctctggatggactcttcctgggaagctttgctactttgcagcagctggaccatgttcctcattaacatctgtctgtccgcttagtcatcacatcatttcactgtggtggcagggactcagctcggaattctgtatagaaaaagcacctggatcccagtctttcaatggcttcaagacaaccagaagtgcctgctcttgaggctagtgcgcctctaggcaagatgtccctgcccatcgggatataccgccgggcagtcagctatgatgataccctcgaggaccctgcgcccatgactcctcctccatcggacatgggcagcgtcccttggaagccagtgattccagagcgcaagtatcagcacctcgccaaggtggaggaaggagaggccagtctaccctcccctgccatgaccctgtcatcagccattgacagtgtggacaaggtcccagtggtgaaggctaaagctacccatgtcatcatgaattctctgatcacaaaacagacccaggaaagcattcagcattttgagcgacaggcagggctgagagatgctggctacacaccccacaagggcctcaccaccgaggagaccaagtaccttcgagtggccgaagcactccacaaactaaagttacagagtggagaggtaacaaaagaagagaggcagcctgcatcagcccagtccaccccaagcaccactccgcactcttcacctaagcagaggcccaggggctggttcacttctggttcttccacagccttacctggcccaaatcctagcaccatggactctggaagtggggataaggacagaaacttgtcagataagtggagcctctttggaccgagatcccttcagaagtacgattctggaagttttgccacccaggcctaccgaggagcccagaagccctctccattggaactgatacgtgcccaggccaaccgaatggctgaagatccagcagccttgaagccccccaagatggacatcccagtgatggaaggaaagaaacagccaccacgggcccataacctcaaaccccgtgacctgaatgtgctcacacccactggcttctagagccctctttccagggattctggtaaaggtggtttcttgcatcccactccccttttaccttggctttgacataggaaaggtatatttaaaaacttaatcagctgggcgtggtggctcacgcctgtaatcccagcactttgggaggccaaggtaggtggatacctgaggtcaggagttcaagaccagcctggccaacatggtgaaaccccgtctctactaaaaatacaaaaattagctgggcgtggtggtgggcgcctgtagtcccagctacttgggaggctgaggcaggagaatcgcctgaacccaggaagcagatgttgtaccgagctgagatcatgccattacactccagcctgggcgacagaacgagacgccatcaataaataaataaataaagtaaagtaaaaaacctattaaattgaggctagagctggagatgtaattggtttttgagaaacattagtataaagcttgcccttgttgtgtggaagaagccattttgtactgctttaaagttagactaatattctcagcacgggtgtatggggacctcattacctatttttttcatcatttaccctaggtaagaactttgatcactgcttactaggtaaagaatgtttgtactgttccaaaacccaggcttctttattcctttaccactatccatgtgagcattgacaaatcatggcttagaggtgctcactgactcgctaagacgactttggccctgttgatgactggtgctgtgctccagccttatcagttaggggacccaaggtttgtttgggacctgggtacaggtaaaagccagacttggcagggacccctctttctaggctgaaccttgagtccccctgctttttggcagacctaatggatcactgtcttgcagctagttcttcatgtggggcctcttaggccagtgccggaggaggcatgctcctctttctatgccacagaacaaacactactctagcagagcctttcttgcactttaaagtgagattaatttagctgtaatttggttaaaaacttcctaagagagaaaattaagtctactgatttggtataggtaaatggacattaaacttttttaaagtaaaggagatggtagataccgttagattatagtcttgaggttcatgtaaggtgttcaataaagaacatgaaccaaaaaaaaaaaaaaaaaaaaaaaaaaaaaaaaaaaaaaaaagaaaaagaaaattatacaaaaaaatatgaatagaatagactatattcagaaaccaaaaagctagactatattcaaataggaggaaaaaaaaaaaccttggggggggccccggtcccaaattgcccttaagggggggcgtttaaaaattaatgggccccgttttaaaaacagcgattttggaaaacccttggggtcccaatttaaaacccttggaagaaaacccccttttttcaggtggggtaaaaggcaaaaggccccccacggtgggctttttaaaaatttggccaccttaatgggcaattggaaattgtaccgtgtaattttgttaaaaaatggggtaa

SEQ ID NO: 289151 - DNA, 770 bp, Homo sapiens
  misc_feature (31)..(31): n is a, c, g, or t
  misc_feature (42)..(42): n is a, c, g, or t
  misc_feature (44)..(44): n is a, c, g, or t
  misc_feature (50)..(50): n is a, c, g, or t
  misc_feature (54)..(54): n is a, c, g, or t
  misc_feature (57)..(57): n is a, c, g, or t
  misc_feature (59)..(60): n is a, c, g, or t
  misc_feature (79)..(79): n is a, c, g, or t
  misc_feature (90)..(90): n is a, c, g, or t
  misc_feature (94)..(94): n is a, c, g, or t
  misc_feature (110)..(110): n is a, c, g, or t
  misc_feature (114)..(114): n is a, c, g, or t
  misc_feature (129)..(130): n is a, c, g, or t
  misc_feature (134)..(134): n is a, c, g, or t
  misc_feature (136)..(137): n is a, c, g, or t
  misc_feature (143)..(143): n is a, c, g, or t
  misc_feature (156)..(156): n is a, c, g, or t
  misc_feature (162)..(162): n is a, c, g, or t
  misc_feature (169)..(169): n is a, c, g, or t
  misc_feature (196)..(198): n is a, c, g, or t
  misc_feature (207)..(207): n is a, c, g, or t
  misc_feature (213)..(213): n is a, c, g, or t
  misc_feature (227)..(227): n is a, c, g, or t
  misc_feature (232)..(233): n is a, c, g, or t
  misc_feature (237)..(237): n is a, c, g, or t
  misc_feature (240)..(240): n is a, c, g, or t
  misc_feature (242)..(243): n is a, c, g, or t
agtaacggctgctggcctcccaaagtgctgngagtgtaggcntnagccanctcnccngnntgctcagtgcttacctctntaacctcattnctanccatggtctcccttgntcancgtactccagccacnntgtncnntccgcnggtccttgaacanatcganttcattncttccttaagacattttctccagatgnnntctctgctntggctnctttcctttctttncattnngatngcntnnagacagctgtaatttggttaaaaacttcctaagagagaaaattaagtctactgatttggtataggtaaatggacattaaacttttttaaagtaaaggagatggtagataccgttagattatagtcttgaggttcatgtgaagccagtggtgttaacttactttgatttccttgttcaggtcagggcctggaacgcctgtgcggggaggtcactcaattcaaaattttctgtatgaaagcatttttcaccaaaatgagcctcatccctttatgcaacacataaccttactgagggagggaaatacggaagccacctttttatttctcttcactgtgtacaagttcacttgttgtcttgaacactgtctcaaatacctgctttttgttttggatagtaccttgtctgtataagaagctggcctttccatagagaggccctggagtctaaaattatgagaacaattaatttatttgtgtcttctattatgatctcgttttgacaataaaaatccttactactttctcaaa

SEQ ID NO: 289152 - DNA, 1840 bp, Homo sapiens
agcggcagtgctgcctgcccgctgggtggtactgctacctagtgggtcttggggaccttcgaaatcgccgccgctctcacaatggcttgggtccagactgcgccacagcctctcgggagacgtgggccctcggaacctttttagtgccggactccgggccgcaggcagtcccgcggcagcaggatcacagaacctctggatggactcttcctgggaagctttgctactttgcagcagctggaccatgttcctcattaacatctgtctgtccgcttagtcatcacatcatttcactgtggtggcagggactcagctcggaattctgtatagaaaaagcacctggatcccagtctttcaatggcttcaagacaaccagaagtgcctgctcttgaggctagtgcgcctctaggcaagatgtccctgcccatcgggatataccgccgggcagtcagctatgatgataccctcgaggaccctgcgcccatgactcctcctccatcggacatgggcagcgtcccttggaagccagtgattccagagcgcaagtatcagcacctcgccaaggtggaggaaggagaggccagtctaccctcccctgccatgaccctgtcatcagccattgacagtgtggacaaggtcccagtggtgaaggctaaagctacccatgtcatcatgaattctctgatcacaaaacagacccaggaaagcattcagcattttgagcgacaggcagggctgagagatgctggctacacaccccacaagggcctcaccaccgaggagaccaagtaccttcgagtggccgaagcactccacaaactaaagttacagagtggagaggtaacaaaagaagagaggcagcctgcatcagcccagtccaccccaagcaccactccgcactcttcacctaagcagaggcccaggggctggttcacttctggttcttccacagccttacctggcccaaatcctagcaccatggactctggaagtggggataaggacagaaacttgtcagataagtggagcctctttggaccgagatcccttcagaagtacgattctggaagttttgccacccaggcctaccgaggagcccagaagccctctccattggaactgatacgtgcccaggccaaccgaatggctgaagatccagcagccttgaagccccccaagatggacatcccagtgatggaaggaaagaaacagccaccacgggcccataacctcaaaccccgtgacctgaatgtgctcacacccactggcttctagagccctctttccagggattctggtaaaggtggtttcttgcatcccactccccttttaccttggctttgacataggaaaggtatatttaaaaacttaatcagctgggattacaggcatgagccaccgtgctcagcctggtattgataatttatattcagataatttgttatggctctttaatatcccacaaggggctctaaaaagcaaacattcaagagtatgtagtttttagacattaagttaattattttaaacagtgacagcaaaacacaagtgattaaatatagtttatttgttccaatgactaaattttacctcatttattaatctggtcattaaggaatatatttaataatattatgtaattattctttttatgcatgatacacctagaaaaatgccttttgtttctattgatggctttgttgtttggagctacttttgattacttattgcagtttcccaatttagtctttactttatctaactcacaaagtaaaattaactgatcacatggcaacctactgtatttaaatagttctggaaaaatgaaagtgctttttgc

SEQ ID NO: 289153 - DNA, 541 bp, Homo sapiens
attagggagataaggataagacaagcttggttatttattgataattattgaagatgggtgatggctagtggggtttttttaagctattctttctccttctgcctatgtttaaaatttttcaaaataagaagttaaaaaaaaccgttatcacaaactcatagtccacactcttccactaccgttaataaacaactagctaaaaatggtttagatgcctctcaaaaatggtgggatgctttcacaaaatttagaatatctggatactatgagacagcatttttaatctcaagcataaagcaatggccacatatggtggctcatgcctacaatcctagcaccttgagaagccaaagtgggaggatcacttgaggccaggagtttgagaccaacagggcaaaacagtaggacctcatctcaacaaaaattttaaaaaattagccaggtgtagtggtgcacacctgtagtcccagctacaaggcaggctgagattacaggtgtgagccatcgtgcctgaccttagatcctttttaaatcaaactgc

SEQ ID NO: 289154 - DNA, 278 bp, Homo sapiens
gaggtaccagagaataactggaatccagacctatggctgaggactcacttatactgagaaaggagtcccctttctgtacatatattctctgaatattgaagatcagatttcttctatcaataattagaactctatgaaagatttttaattctgcaatttatgttttaaatgctcattgtttcctataactttttcaaaaacaacttggttaaaactcttctgtcttaacttaaaatagattacctataacagtggcttcgctttctgtttcttatcag

SEQ ID NO: 289155 - DNA, 337 bp, Homo sapiens
ggtgtggggaatggacattgactttgtggggctggaaagtgatctttcaagaaaggattaaccaaaggaaatgggaaattgaggtcaggatggataaggaaaccatggggcaaattgggtggtaaaaaaaaaacgaggatggcctttaggttccaagagggccccagataaaagcctggattagaagaaagtaaaaagaaagatcagtgagaaatctccccctcccccaatccttgagaaacctcctgatgagcctatatcttcccagtcctccctgagaggccctagacctgtacaccaacactcattcccaaacactatgaacctcagtttgact

SEQ ID NO: 289156 - DNA, 502 bp, Homo sapiens
atcaccacacctggctgatttttgtggttttatttgttttgttttgttttgttttgttttgttttgttttgttttagtagagacaggttttcaccatgttgaccaggctggtctcgaactcctgactttgtgatctgcccacctcggcctccccaagcgctgggattacagacatgagccaccatgcccagccacaaagacatttcaaaatgcctcctgtaagcaaggcctaggcataaaagttacatcacctgagtgttaaacccagcaatatgtcacaatgccccaagtgggcaaatcacaggcagaagagtcacaaattatcagtgcagggcccagcaatatgtcacaatgttccctgaaggcaaacctaaaagaagaatcacataagctaggtgttgggtgtagcaatatgctacagtttccctgtaagcaaggaccaacagaagaagaggtcgacgcggccgcgaatttagtagtagtagtagtagtaggcagccgc

SEQ ID NO: 289157 - DNA, 814 bp, Homo sapiens
ctaggtatgagagtcaccacaccattacatctgtgtgcttggccaagttatatgtcacaattccacctgtgggtagagaacaagcacaagagtcacatcaactgtgtgctgagccagggttatgtcacaatcttccctgacagcatgcaccagcaaggagagtcacatcacagagttctcaaccagagatgttataatcctctcctgaaagcagggcataggaagaagagtatgatcacctgggtgtcacaaggctcactgtaggcaaagcccagaaaagatagacaaaacacctggttcctgggcccagcaatatatcacaatcttctctatgggaagaaggcaggtagaagtagagggtttcatctcccaggtgatggataaaaaaatatattccaaggccctctgtgggaggggctcaggcagaagccttccaacccctaggtgtttgtttcagtgatatgtcacaataaccaaaatatgcaggtctcaggcaagtgagaagagccacatcacctaggtgctaggtccagtgatctgccacaaatttttcttttggcagtgctcaagcggaacagaaaagtcaaatcgccaagataatgaatgaaaagatgtgttagaatagttctgtgtgagagcccacacaggaaagtctcatcataatgttgttggacccagagacatgttgaaatacatgatgccagccaggtgcggtggctcacaccggtaatcccagcactttaggaggctgaggtcggtggatcacctgaggttgggagttcgagaccagcctgaccaacatgaagaaacccca

SEQ ID NO: 289158 - DNA, 578 bp, Homo sapiens
atcaccacacctggctgatttttgtggttttatttgttttgttttgttttgttttgttttgttttgttttgttttagtagagacaggttttcaccatgttgaccaggctggtagaagtagagggtttcatctcccaggtgatggataaaaaaatatattccaaggccctctgtgggaggggctcaggcagaagccttccaacccctaggtgtttgtttcagtgatatgtcacaataaccaaaatatgcaggtctcaggcaagtgagaagagccacatcacctaggtgctaggtccagtgatctgccacaaatttttcttttggcagtgctcaagcggaacagaaaagtcaaatcgccaagataatgaatgaaaagatgtgttagaatagttctgtgtgagagcccacacaggaaagtctcatcataatgttgttggacccagagacatgttgaaatacatgatgccagccaggtgcggtggctcacaccggtaatcccagcactttaggaggctgaggtcggtggatcacctgaggttgggagttcgagaccagcctgaccaacatgaagaaacccca

SEQ ID NO: 289159 - DNA, 3439 bp, Homo sapiens
accgcccggagcagcggtgcaggacgcgcgtctccgccgcccgcggtgacttctgcctgcgctccttctctgaacgctcacttccgaggagacgccgacgatgaagacaccgtggaaggttcttctgggactgctgggtgctgctgcgcttgtcaccatcatcaccgtgcccgtggttctgctgaacaaaggcacagatgatgctacagctgacagtcgcaaaacttacactctaactgattacttaaaaaatacttatagactgaagttatactccttaagatggatttcagatcatgaatatctctacaaacaagaaaataatatcttggtattcaatgctgaatatggaaacagctcagttttcttggagaacagtacatttgatgagtttggacattctatcaatgattattcaatatctcctgatgggcagtttattctcttagaatacaactacgtgaagcaatggaggcattcctacacagcttcatatgacatttatgatttaaataaaaggcagctgattacagaagagaggattccaaacaacacacagtgggtcacatggtcaccagtgggtcataaattggcatatgtttggaacaatgacatttatgttaaaattgaaccaaatttaccaagttacagaatcacatggacggggaaagaagatataatatataatggaataactgactgggtttatgaagaggaagtcttcagtgcctactctgctctgtggtggtctccaaacggcacttttttagcatatgcccaatttaacgacacagaagtcccacttattgaatactccttctactctgatgagtcactgcagtacccaaagactgtacgggttccatatccaaaggcaggagctgtgaatccaactgtaaagttctttgttgtaaatacagactctctcagctcagtcaccaatgcaacttccatacaaatcactgctcctgcttctatgttgataggggatcactacttgtgtgatgtgacatgggcaacacaagaaagaatttctttgcagtggctcaggaggattcagaactattcggtcatggatatttgtgactatgatgaatccagtggaagatggaactgcttagtggcacggcaacacattgaaatgagtactactggctgggttggaagatttaggccttcagaacctcattttacccttgatggtaatagcttctacaagatcatcagcaatgaagaaggttacagacacatttgctatttccaaatagataaaaaagactgcacatttattacaaaaggcacctgggaagtcatcgggatagaagctctaaccagtgattatctatactacattagtaatgaatataaaggaatgccaggaggaaggaatctttataaaatccaacttagtgactatacaaaagtgacatgcctcagttgtgagctgaatccggaaaggtgtcagtactattctgtgtcattcagtaaagaggcgaagtattatcagctgagatgttccggtcctggtctgcccctctatactctacacagcagcgtgaatgataaagggctgagagtcctggaagacaattcagctttggataaaatgctgcagaatgtccagatgccctccaaaaaactggacttcattattttgaatgaaacaaaattttggtatcagatgatcttgcctcctcattttgataaatccaagaaatatcctctactattagatgtgtatgcaggcccatgtagtcaaaaagcagacactgtcttcagactgaactgggccacttaccttgcaagcacagaaaacattatagtagctagctttgatggcagaggaagtggttaccaaggagataagatcatgcatgcaatcaacagaagactgggaacatttgaagttgaagatcaaattgaagcagccagacaattttcaaaaatgggatttgtggacaacaaacgaattgcaatttggggctggtcatatggagggtacgtaacctcaatggtcctgggatcgggaagtggcgtgttcaagtgtggaatagccgtggcgcctgtatcccggtgggagtactatgactcagtgtacacagaacgttacatgggtctcccaactccagaagacaaccttgaccattacagaaattcaacagtcatgagcagagctgaaaattttaaacaagttgagtacctccttattcatggaacagcagatgataacgttcactttcagcagtcagctcagatctccaaagccctggtcgatgttggagtggatttccaggcaatgtggtatactgatgaagaccatggaatagctagcagcacagcacaccaacatatatatacccacatgagccacttcataaaacaatgtttctctttaccttagcacctcaaaataccatgccatttaaagcttattaaaactcatttttgttttcattatctcaaaactgcactgtcaagatgatgatgatctttaaaatacacactcaaatcaagaaacttaaggttacctttgttcccaaatttcatacctatcatcttaagtagggacttctgtcttcacaacagattattaccttacagaagtttgaattatccggtcgggttttattgtttaaaatcatttctgcatcagctgctgaaacaacaaataggaattgtttttatggaggctttgcatagattccctgagcaggattttaatctttttctaactggactggttcaaatgttgttctcttctttaaagggatggcaagatgtgggcagtgatgtcactagggcagggacaggataagagggattagggagagaagatagcagggcatggctgggaacccaagtccaagcataccaacacgagcaggctactgtcagctcccctcggagaagagctgttcacagccagactggcacagttttctgagaaagactattcaaacagtctcaggaaatcaaatatgcaaagcactgacttctaagtaaaaccacagcagttgaaaagactccaaagaaatgtaagggaaactgccagcaacgcaggcccccaggtgccagttatggctataggtgctacaaaaacacagcaagggtgatgggaaagcattgtaaatgtgcttttaaaaaaaaatactgatgttcctagtgaaagaggcagcttgaaactgagatgtgaacacatcagcttgccctgttaaaagatgaaaatatttgtatcacaaatcttaacttgaaggagtccttgcatcaatttttcttatttcatttctttgagtgtcttaattaaaagaatattttaacttccttggactcattttaaaaaatggaacataaaatacaatgttatgtattattattcccattctacatactatggaatttctcccagtcatttaataaatgtgccttcattttttcagaa

SEQ ID NO: 289160 - DNA, 2461 bp, Homo sapiens
accgcccggagcagcggtgcaggacgcgcgtctccgccgcccgcggtgacttctgcctgcgctccttctctgaacgctcacttccgaggagacgccgacgatgaagacaccgtggaaggttcttctgggactgctgggtgctgctgcgcttgtcaccatcatcaccgtgcccgtggttctgctgaacaaaggcacagatgatgctacagctgacagtcgcaaaacttacactctaactgattacttaaaaaatacttatagactgaagttatactccttaagatggatttcagatcatgaatatctctacaaacaagaaaataatatcttggtattcaatgctgaatatggaaacagctcagttttcttggagaacagtacatttgatgagtttggacattctatcaatgattattcaatatctcctgatgggcagtttattctcttagaatacaactacgtgaagcaatggaggcattcctacacagcttcatatgacatttatgatttaaataaaaggcagctgattacagaagagaggattccaaacaacacacagtgggtcacatggtcaccagtgggtcataaattggcatatgtttggaacaatgacatttatgttaaaattgaaccaaatttaccaagttacagaatcacatggacggggaaagaagatataatatataatggaataactgactgggtttatgaagaggaagtcttcagtgcctactctgctctgtggtggtctccaaacggcacttttttagcatatgcccaatttaacgacacagaagtcccacttattgaatactccttctactctgatgagtcactgcagtacccaaagactgtacgggttccatatccaaaggcaggagctgtgaatccaactgtaaagttctttgttgtaaatacagactctctcagctcagtcaccaatgcaacttccatacaaatcactgctcctgcttctatgttgataggggatcactacttgtgtgatgtgacatgggcaacacaagaaagaatttctttgcagtggctcaggaggattcagaactattcggtcatggatatttgtgactatgatgaatccagtggaagatggaactgcttagtggcacggcaacacattgaaatgagtactactggctgggttggaagatttaggccttcagaacctcattttacccttgatggtaatagcttctacaagatcatcagcaatgaagaaggttacagacacatttgctatttccaaatagataaaaaagactgcacatttattacaaaaggcacctgggaagtcatcgggatagaagctctaaccagtgattatctatactacattagtaatgaatataaaggaatgccaggaggaaggaatctttataaaatccaacttagtgactatacaaaagtgacatgcctcagttgtgagctgaatccggaaaggtgtcagtactattctgtgtcattcagtaaagaggcgaagtattatcagctgagatgttccggtcctggtctgcccctctatactctacacagcagcgtgaatgataaagggctgagagtcctggaagacaattcagctttggataaaatgctgcagaatgtccagatgccctccaaaaaactggacttcattattttgaatgaaacaaaattttggtatcagatgatcttgcctcctcattttgataaatccaagaaatatcctctactattagatgtgtatgcaggcccatgtagtcaaaaagcagacactgtcttcagactgaactgggccacttaccttgcaagcacagaaaacattatagtagctagctttgatggcagaggaagtggttaccaaggagataagatcatgcatgcaatcaacagaagactgggaacatttgaagttgaagatcaaattgaagcagccagacaattttcaaaaatgggatttgtggacaacaaacgaattgcaatttggggctggtcatatggagggtacgtaacctcaatggtcctgggatcgggaagtggcgtgttcaagtgtggaatagccgtggcgcctgtatcccggtgggagtactatgactcagtgtacacagaacgttacatgggtctcccaactccagaagacaaccttgaccattacagaaattcaacagtcatgagcagagctgaaaattttaaacaagttgagtacctccttattcatggaacagcagatgataacgttcactttcagcagtcagctcagatctccaaagccctggtcgatgttggagtggatttccaggcaatgtggtatactgatgaagaccatggaatagctagcagcacagcacaccaacatatatatacccacatgagccacttcataaaacaatgtttctctttaccttagcacctcaaaataccatgccatttaaagcttattaaaactcatttttgttttcattatctc

SEQ ID NO: 289161 - DNA, 3563 bp, Homo sapiens
  misc_feature (3451)..(3451): n is a, c, g, or t
  misc_feature (3453)..(3454): n is a, c, g, or t
  misc_feature (3461)..(3462): n is a, c, g, or t
  misc_feature (3465)..(3465): n is a, c, g, or t
  misc_feature (3468)..(3468): n is a, c, g, or t
  misc_feature (3478)..(3478): n is a, c, g, or t
  misc_feature (3484)..(3485): n is a, c, g, or t
  misc_feature (3563)..(3563): n is a, c, g, or t
accgcccggagcagcggtgcaggacgcgcgtctccgccgcccgcggtgacttctgcctgcgctccttctctgaacgctcacttccgaggagacgccgacgatgaagacaccgtggaaggttcttctgggactgctgggtgctgctgcgcttgtcaccatcatcaccgtgcccgtggttctgctgaacaaaggcacagatgatgctacagctgacagtcgcaaaacttacactctaactgattacttaaaaaatacttatagactgaagttatactccttaagatggatttcagatcatgaatatctctacaaacaagaaaataatatcttggtattcaatgctgaatatggaaacagctcagttttcttggagaacagtacatttgatgagtttggacattctatcaatgattattcaatatctcctgatgggcagtttattctcttagaatacaactacgtgaagcaatggaggcattcctacacagcttcatatgacatttatgatttaaataaaaggcagctgattacagaagagaggattccaaacaacacacagtgggtcacatggtcaccagtgggtcataaattggcatatgtttggaacaatgacatttatgttaaaattgaaccaaatttaccaagttacagaatcacatggacggggaaagaagatataatatataatggaataactgactgggtttatgaagaggaagtcttcagtgcctactctgctctgtggtggtctccaaacggcacttttttagcatatgcccaatttaacgacacagaagtcccacttattgaatactccttctactctgatgagtcactgcagtacccaaagactgtacgggttccatatccaaaggcaggagctgtgaatccaactgtaaagttctttgttgtaaatacagactctctcagctcagtcaccaatgcaacttccatacaaatcactgctcctgcttctatgttgataggggatcactacttgtgtgatgtgacatgggcaacacaagaaagaatttctttgcagtggctcaggaggattcagaactattcggtcatggatatttgtgactatgatgaatccagtggaagatggaactgcttagtggcacggcaacacattgaaatgagtactactggctgggttggaagatttaggccttcagaacctcattttacccttgatggtaatagcttctacaagatcatcagcaatgaagaaggttacagacacatttgctatttccaaatagataaaaaagactgcacatttattacaaaaggcacctgggaagtcatcgggatagaagctctaaccagtgattatctatactacattagtaatgaatataaaggaatgccaggaggaaggaatctttataaaatccaacttagtgactatacaaaagtgacatgcctcagttgtgagctgaatccggaaaggtgtcagtactattctgtgtcattcagtaaagaggcgaagtattatcagctgagatgttccggtcctggtctgcccctctatactctacacagcagcgtgaatgataaagggctgagagtcctggaagacaattcagctttggataaaatgctgcagaatgtccagatgccctccaaaaaactggacttcattattttgaatgaaacaaaattttggtatcagatgatcttgcctcctcattttgataaatccaagaaatatcctctactattagatgtgtatgcaggcccatgtagtcaaaaagcagacactgtcttcagactgaactgggccacttaccttgcaagcacagaaaacattatagtagctagctttgatggcagaggaagtggttaccaaggagataagatcatgcatgcaatcaacagaagactgggaacatttgaagttgaagatcaaattgaagcagccagacaattttcaaaaatgggatttgtggacaacaaacgaattgcaatttggggctggtcatatggagggtacgtaacctcaatggtcctgggatcgggaagtggcgtgttcaagtgtggaatagccgtggcgcctgtatcccggtgggagtactatgactcagtgtacacagaacgttacatgggtctcccaactccagaagacaaccttgaccattacagaaattcaacagtcatgagcagagctgaaaattttaaacaagttgagtacctccttattcatggaacagcagatgataacgttcactttcagcagtcagctcagatctccaaagccctggtcgatgttggagtggatttccaggcaatgtggtatactgatgaagaccatggaatagctagcagcacagcacaccaacatatatatacccacatgagccacttcataaaacaatgtttctctttaccttagcacctcaaaataccatgccatttaaagcttattaaaactcatttttgttttcattatctcaaaactgcactgtcaagatgatgatgatctttaaaatacacactcaaatcaagaaacttaaggttacctttgttcccaaatttcatacctatcatcttaagtagggacttctgtcttcacaacagattattaccttacagaagtttgaattatccggtcgggttttattgtttaaaatcatttctgcatcagctgctgaaacaacaaataggaattgtttttatggaggctttgcatagattccctgagcaggattttaatctttttctaactggactggttcaaatgttgttctcttctttaaagggatggcaagatgtgggcagtgatgtcactagggcagggacaggataagagggattagggagagaagatagcagggcatggctgggaacccaagtccaagcataccaacacgagcaggctactgtcagctcccctcggagaagagctgttcacagccagactggcacagttttctgagaaagactattcaaacagtctcaggaaatcaaatatgcaaagcactgacttctaagtaaaaccacagcagttgaaaagactccaaagaaatgtaagggaaactgccagcaacgcaggcccccaggtgccagttatggctataggtgctacaaaaacacagcaagggtgatgggaaagcattgtaaatgtgcttttaaaaaaaaatactgatgttcctagtgaaagaggcagcttgaaactgagatgtgaacacatcagcttgccctgttaaaagatgaaaatatttgtatcacaaatcttaacttgaaggagtccttgcatcaatttttcttatttcatttctttgagtgtcttaattaaaagaatattttaacttccttggactcattttaaaaaatggaacataaaatacaatgttatgtattattattcccattctacatactatggaatttctcccagtcatttaataaatgtgccttcattttttcagaaaaaaaaaaaaanannaaaaaannggnggncccccccccngggggnnttttttttttttttttttttttttttttttttttttttttttttttttttttttttttttataaaacaaaaatacacn

SEQ ID NO: 289162 - DNA, 3318 bp, Homo sapiens
  misc_feature (3308)..(3309): n is a, c, g, or t
accgcccggagcagcggtgcaggacgcgcgtctccgccgcccgcggtgacttctgcctgcgctccttctctgaacgctcacttccgaggagacgccgacgatgaagacaccgtggaaggttcttctgggactgctgggtgctgctgcgcttgtcaccatcatcaccgtgcccgtggttctgctgaacaaaggcacagatgatgctacagctgacagtcgcaaaacttacactctaactgattacttaaaaaatacttatagactgaagttatactccttaagatggatttcagatcatgaatatctctacaaacaagaaaataatatcttggtattcaatgctgaatatggaaacagctcagttttcttggagaacagtacatttgatgagtttggacattctatcaatgattattcaatatctcctgatgggcagtttattctcttagaatacaactacgtgaagcaatggaggcattcctacacagcttcatatgacatttatgatttaaataaaaggcagctgattacagaagagaggattccaaacaacacacagtgggtcacatggtcaccagtgggtcataaattggcatatgtttggaacaatgacatttatgttaaaattgaaccaaatttaccaagttacagaatcacatggacggggaaagaagatataatatataatggaataactgactgggtttatgaagaggaagtcttcagtgcctactctgctctgtggtggtctccaaacggcacttttttagcatatgcccaatttaacgacacagaagtcccacttattgaatactccttctactctgatgagtcactgcagtacccaaagactgtacgggttccatatccaaaggcaggagctgtgaatccaactgtaaagttctttgttgtaaatacagactctctcagctcagtcaccaatgcaacttccatacaaatcactgctcctgcttctatgttgataggggatcactacttgtgtgatgtgacatgggcaacacaagaaagaatttctttgcagtggctcaggaggattcagaactattcggtcatggatatttgtgactatgatgaatccagtggaagatggaactgcttagtggcacggcaacacattgaaatgagtactactggctgggttggaagatttaggccttcagaacctcattttacccttgatggtaatagcttctacaagatcatcagcaatgaagaaggttacagacacatttgctatttccaaatagataaaaaagactgcacatttattacaaaaggcacctgggaagtcatcgggatagaagctctaaccagtgattatctatactacattagtaatgaatataaaggaatgccaggaggaaggaatctttataaaatccaacttagtgactatacaaaagtgacatgcctcagttgtgagctgaatccggaaaggtgtcagtactattctgtgtcattcagtaaagaggcgaagtattatcagctgagatgttccggtcctggtctgcccctctatactctacacagcagcgtgaatgataaagggctgagagtcctggaagacaattcagctttggataaaatgctgcagaatgtccagatgccctccaaaaaactggacttcattattttgaatgaaacaaaattttggtatcagatgatcttgcctcctcattttgataaatccaagaaatatcctctactattagatgtgtatgcaggcccatgtagtcaaaaagcagacactgtcttcagactgaactgggccacttaccttgcaagcacagaaaacattatagtagctagctttgatggcagaggaagtggttaccaaggagataagatcatgcatgcaatcaacagaagactgggaacatttgaagttgaagatcaaattgaagcagccagacaattttcaaaaatgggatttgtggacaacaaacgaattgcaatttggggctggtcatatggagggtacgtaacctcaatggtcctgggatcgggaagtggcgtgttcaagtgtggaatagccgtggcgcctgtatcccggtgggagtactatgactcagtgtacacagaacgttacatgggtctcccaactccagaagacaaccttgaccattacagaaattcaacagtcatgagcagagctgaaaattttaaacaagttgagtacctccttattcatggaacagcagatgataacgttcactttcagcagtcagctcagatctccaaagccctggtcgatgttggagtggatttccaggcaatgtggtatactgatgaagaccatggaatagctagcagcacagcacaccaacatatatatacccacatgagccacttcataaaacaatgtttctctttaccttagcacctcaaaataccatgccatttaaagcttattaaaactcatttttgttttcattatctcaaaactgcactgtcaagatgatgatgatctttaaaatacacactcaaatcaagaaacttaaggttacctttgttcccaaatttcatacctatcatcttaagtagggacttctgtcttcacaacagattattaccttacagaagtttgaattatccggtcgggttttattgtttaaaatcatttctgcatcagctgctgaaacaacaaataggaattgtttttatggaggctttgcatagattccctgagcaggattttaatctttttctaactggactggttcaaatgttgttctcttctttaaagggatggcaagatgtgggcagtgatgtcactagggcagggacaggataagagggattagggagagaagatagcagggcatggctgggaacccaagtccaagcataccaacacgagcaggctactgtcagctcccctcggagaagagctgttcacagccagactggcacagttttctgagaaagactattcaaacagtctcaggaaatcaaatatgcaaagcactgacttctaagtaaaaccacagcagttgaaaagactccaaagaaatgtaagggaaactgccagcaacgcaggcccccaggtgccagttatggctataggtgctacaaaaacacagcaagggtgatgggaaagcattgtaaatgtgcttttaaaaaaaaatactgatgttcctagtgaaagaggcagcttgaaactgagatgtgaacacatcagcttgccctgttaaaagatgaaaatatttgtatcacaaatcttaacttgaaggagtccttgcatcaatttttcttatttcatttctttgagtgtgattctgccgggnnatcctaacg

SEQ ID NO: 289163 - DNA, 1291 bp, Homo sapiens
  misc_feature (1)..(1): n is a, c, g, or t
  misc_feature (62)..(62): n is a, c, g, or t
  misc_feature (71)..(72): n is a, c, g, or t
nctttgaggcaacgggatcaaccctgctgaggatttacaacacgttgagtacctccttattnatggaacannagatgataacgttcactttcagcagtcagctcagatctccaaagccctggtcgatgttggagtggatttccaggcaatgtggtatactgatgaagaccatggaatagctagcagcacagcacaccaacatatatatacccacatgagccacttcataaaacaatgtttctctttaccttagcacctcaaaataccatgccatttaaagcttattaaaactcatttttgttttcattatctcaaaactgcactgtcaagatgatgatgatctttaaaatacacactcaaatcaagaaacttaaggttacctttgttcccaaatttcatacctatcatcttaagtagggacttctgtcttcacaacagattattaccttacagaagtttgaattatccggtcgggttttattgtttaaaatcatttctgcatcagctgctgaaacaacaaataggaattgtttttatggaggctttgcatagattccctgagcaggattttaatctttttctaactggactggttcaaatgttgttctcttctttaaagggatggcaagatgtgggcagtgatgtcactagggcagggacaggataagagggattagggagagaagatagcagggcatggctgggaacccaagtccaagcataccaacacgagcaggctactgtcagctcccctcggagaagagctgttcacagccagactggcacagttttctgagaaagactattcaaacagtctcaggaaatcaaatatgcaaagcactgacttctaagtaaaaccacagcagttgaaaagactccaaagaaatgtaagggaaactgccagcaacgcaggcccccaggtgccagttatggctataggtgctacaaaaacacagcaagggtgatgggaaagcattgtaaatgtgcttttaaaaaaaaatactgatgttcctagtgaaagaggcagcttgaaactgagatgtgaacacatcagcttgccctgttaaaagatgaaaatatttgtatcacaaatcttaacttgaaggagtccttgcatcaatttttcttatttcatttctttgagtgtcttaattaaaagaatattttaacttccttggactcattttaaaaaatggaacataaaatacaatgttatgtattattattcccattctacatactatggaatttctcccagtcatttaataaatgtgccttcattttttcagaa

SEQ ID NO: 289164 - DNA, 3361 bp, Homo sapiens
accgcccggagcagcggtgcaggacgcgcgtctccgccgcccgcggtgacttctgcctgcgctccttctctgaacgctcacttccgaggagacgccgacgatgaagacaccgtggaaggttcttctgggactgctgggtgctgctgcgcttgtcaccatcatcaccgtgcccgtggttctgctgaacaaaggcacagatgatgctacagctgacagtcgcaaaacttacactctaactgattacttaaaaaatacttatagactgaagttatactccttaagatggatttcagatcatgaatatctctacaaacaagaaaataatatcttggtattcaatgctgaatatggaaacagctcagttttcttggagaacagtacatttgatgagtttggacattctatcaatgattattcaatatctcctgatgggcagtttattctcttagaatacaactacgtgaagcaatggaggcattcctacacagcttcatatgacatttatgatttaaataaaaggcagctgattacagaagagaggattccaaacaacacacagtgggtcacatggtcaccagtgggtcataaattggcatatgtttggaacaatgacatttatgttaaaattgaaccaaatttaccaagttacagaatcacatggacggggaaagaagatataatatataatggaataactgactgggtttatgaagaggaagtcttcagtgcctactctgctctgtggtggtctccaaacggcacttttttagcatatgcccaatttaacgacacagaagtcccacttattgaatactccttctactctgatgagtcactgcagtacccaaagactgtacgggttccatatccaaaggcaggagctgtgaatccaactgtaaagttctttgttgtaaatacagactctctcagctcagtcaccaatgcaacttccatacaaatcactgctcctgcttctatgttgataggggatcactacttgtgtgatgtgacatgggcaacacaagaaagaatttctttgcagtggctcaggaggattcagaactattcggtcatggatatttgtgactatgatgaatccagtggaagatggaactgcttagtggcacggcaacacattgaaatgagtactactggctgggttggaagatttaggccttcagaacctcattttacccttgatggtaatagcttctacaagatcatcagcaatgaagaaggttacagacacatttgctatttccaaatagataaaaaagactgcacatttattacaaaaggcacctgggaagtcatcgggatagaagctctaaccagtgattatctatactacattagtaatgaatataaaggaatgccaggaggaaggaatctttataaaatccaacttagtgactatacaaaagtgacatgcctcagttgtgagctgaatccggaaaggtgtcagtactattctgtgtcattcagtaaagaggcgaagtattatcagctgagatgttccggtcctggtctgcccctctatactctacacagcagcgtgaatgataaagggctgagagtcctggaagacaattcagctttggataaaatgctgcagaatgtccagatgccctccaaaaaactggacttcattattttgaatgaaacaaaattttggtatcagatgatcttgcctcctcattttgataaatccaagaaatatcctctactattagatgtgtatgcaggcccatgtagtcaaaaagcagacactgtcttcagactgaactgggccacttaccttgcaagcacagaaaacattatagtagctagctttgatggcagaggaagtggttaccaaggagataagatcatgcatgcaatcaacagaagactgggaacatttgaagttgaagatcaaattgaagcagccagacaattttcaaaaatgggatttgtggacaacaaacgaattgcaatttggggctggtcatatggagggtacgtaacctcaatggtcctgggatcgggaagtggcgtgttcaagtgtggaatagccgtggcgcctgtatcccggtgggagtactatgactcagtgtacacagaacgttacatgggtctcccaactccagaagacaaccttgaccattacagaaattcaacagtcatgagcagagctgaaaattttaaacaagttgagtacctccttattcatggaacagcagatgataacgttcactttcagcagtcagctcagatctccaaagccctggtcgatgttggagtggatttccaggcaatgtggtatactgatgaagaccatggaatagctagcagcacagcacaccaacatatatatacccacatgagccacttcataaaacaatgtttctctttaccttagcacctcaaaataccatgccatttaaagcttattaaaactcatttttgttttcattatctcaaaactgcactgtcaagatgatgatgatctttaaaatacacactcaaatcaagaaacttaaggttacctttgttcccaaatttcatacctatcatcttaagtagggacttctgtcttcacaacagattattaccttacagaagtttgaattatccggtcgggttttattgtttaaaatcatttctgcatcagctgctgaaacaacaaataggaattgtttttatggaggctttgcatagattccctgagcaggattttaatctttttctaactggactggttcaaatgttgttctcttctttaaagggatggcaagatgtgggcagtgatgtcactagggcagggacaggataagagggattagggagagaagatagcagggcatggctgggaacccaagtccaagcataccaacacgagcaggctactgtcagctcccctcggagaagagctgttcacagccagactggcacagttttctgagaaagactattcaaacagtctcaggaaatcaaatatgcaaagcactgacttctaagtaaaaccacagcagttgaaaagactccaagggtgatgggaaagcattgtaaatgtgcttttaaaaaaaaatactgatgttcctagtgaaagaggcagcttgaaactgagatgtgaacacatcagcttgccctgttaaaagatgaaaatatttgtatcacaaatcttaacttgaaggagtccttgcatcaatttttcttatttcatttctttgagtgtcttaattaaaagaatattttaacttccttggactcattttaaaaaatggaacataaaatacaatgttatgtattattattcccattctacatactatggaatttctcccagtcatttaataaatgtgccttcattttttcagaa

SEQ ID NO: 289165 - DNA, 1186 bp, Homo sapiens
ataccatgtatgctcgtgagagctcatttgaatttacgtatttttttttttaagaagagtactgacttcctaattctaacttcttttctttctctctctagtggtatactgatgaagaccatggaatagctagcagcacagcacaccaacatatatatacccacatgagccacttcataaaacaatgtttctctttaccttagcacctcaaaataccatgccatttaaagcttattaaaactcatttttgttttcattatctcaaaactgcactgtcaagatgatgatgatctttactatcatcttaagtagggacttctgtcttcacaacagattattaccttacagaagtttgaattatccggtcgggttttattgtttaaaatcatttctgcatcagctgctgaaacaacaaataggaattgtttttatggaggctttgcatagattccctgagcaggattttaatctttttctaactggactggttcaaatgttgttctcttctttaaagggatggcaagatgtgggcagtgatgtcactagggcagggacaggataagagggattagggagagaagatagcagggcatggctgggaacccaagtccaagcataccaacacgagcaggctactgtcagctcccctcggagaagagctgttcacagccagactggcacagttttctgagaaagactattcaaacagtctcaggaaatcaaatatgcaaagcactgacttctaagtaaaaccacagcagttgaaaagactccaaagaaatgtaagggaaactgccagcaacgcaggcccccaggtgccagttatggctataggtgctacaaaaacacagcaagggtgatgggaaagcattgtaaatgtgcttttaaaaaaaaatactgatgttcctagtgaaagaggcagcttgaaactgagatgtgaacacatcagcttgccctgttaaaagatgaaaatatttgtatcacaaatcttaacttgaaggagtccttgcatcaatttttcttatttcatttctttgagtgtcttaattaaaagaatattttaacttccttggactcattttaaaaaatggaacataaaatacaatgttatgtattattattcccattctacatactatggaatttctcccagtcatttaataaatgtgccttcattttttcagaa

SEQ ID NO: 289166 - DNA, 2982 bp, Homo sapiens
accgcccggagcagcggtgcaggacgcgcgtctccgccgcccgcggtgacttctgcctgcgctccttctctgaacgctcacttccgaggagacgccgacgatgaagacaccgtggaaggttcttctgggactgctgggtgctgctgcgcttgtcaccatcatcaccgtgcccgtggttctgctgaacaaaggcacagatgatgctacagctgacagtcgcaaaacttacactctaactgattacttaaaaaatacttatagactgaagttatactccttaagatggatttcagatcatgaatatctctacaaacaagaaaataatatcttggtattcaatgctgaatatggaaacagctcagttttcttggagaacagtacatttgatgagtttggacattctatcaatgattattcaatatctcctgatgggcagtttattctcttagaatacaactacgtgaagcaatggaggcattcctacacagcttcatatgacatttatgatttaaataaaaggcagctgattacagaagagaggattccaaacaacacacagtgggtcacatggtcaccagtgggtcataaattggcatatgtttggaacaatgacatttatgttaaaattgaaccaaatttaccaagttacagaatcacatggacggggaaagaagatataatatataatggaataactgactgggtttatgaagaggaagtcttcagtgcctactctgctctgtggtggtctccaaacggcacttttttagcatatgcccaatttaacgacacagaagtcccacttattgaatactccttctactctgatgagtcactgcagtacccaaagactgtacgggttccatatccaaaggcaggagctgtgaatccaactgtaaagttctttgttgtaaatacagactctctcagctcagtcaccaatgcaacttccatacaaatcactgctcctgcttctatgttgataggggatcactacttgtgtgatgtgacatgggcaacacaagaaagaatttctttgcagtggctcaggaggattcagaactattcggtcatggatatttgtgactatgatgaatccagtggaagatggaactgcttagtggcacggcaacacattgaaatgagtactactggctgggttggaagatttaggccttcagaacctcattttacccttgatggtaatagcttctacaagatcatcagcaatgaagaaggttacagacacatttgctatttccaaatagataaaaaagactgcacatttattacaaaaggcacctgggaagtcatcgggatagaagctctaaccagtgattatctatactacattagtaatgaatataaaggaatgccaggaggaaggaatctttataaaatccaacttagtgactatacaaaagtgacatgcctcagttgtgagctgaatccggaaaggtgtcagtactattctgtgtcattcagtaaagaggcgaagtattatcagctgagatgttccggtcctggtctgcccctctatactctacacagcagcgtgaatgataaagggctgagagtcctggaagacaattcagctttggataaaatgctgcagaatgtccagatgccctccaaaaaactggacttcattattttgaatgaaacaaaattttggtatcagatgatcttgcctcctcattttgataaatccaagaaatatcctctactattagatgtgtatgcaggcccatgtagtcaaaaagcagacactgtcttcagactgaactgggccacttaccttgcaagcacagaaaacattatagtagctagctttgatggcagaggaagtggttaccaaggagataagatcatgcatgcaatcaacagaagactgggaacatttgaagttgaagatcaaattgaagcagccagacaattttcaaaaatgggatttgtggacaacaaacgaattgcaatttggggctggtcatatggagggtacgtaacctcaatggtcctgggatcgggaagtggcgtgttcaagtgtggaatagccgtggcgcctgtatcccggtgggagtactatgactcagtgtacacagaacgttacatgggtctcccaactccagaagacaaccttgaccattacagaaattcaacagtcatgagcagagctgaaaattttaaacaagttgagtacctccttattcatggaacagcagatgataacgttcactttcagcagtcagctcagatctccaaagccctggtcgatgttggagtggatttccaggcaatgtggtatactgatgaagaccatggaatagctagcagcacagcacaccaacatatatatacccacatgagccacttcataaaacaatgtttctctttaccttagcacctcaaaataccatgccatttaaagcttattaaaactcatttttgttttcattatctcaaaactgcactgtcaagatgatgatgatctttactatcatcttaagtagggacttctgtcttcacaacagattattaccttacagaagtttgaattatccggtcgggttttattgtttaaaatcatttctgcatcagctgctgaaacaacaaataggaattgtttttatggaggctttgcatagattccctgagcaggattttaatctttttctaactggactggttcaaatgttgttctcttctttaaagggatggcaagatgtgggcagtgatgtcactagggcagggacaggataagatgaaaatatttgtatcacaaatcttaacttgaaggagtccttgcatcaatttttcttatttcatttctttgagtgtcttaattaaaagaatattttaacttccttggactcattttaaaaaatggaacataaaatacaatgttatgtattattattcccattctacatactatggaatttctcccagtcatttaataaatgtgccttcattttttcagaa

SEQ ID NO: 289167 - DNA, 301 bp, Homo sapiens
atactacattagtaatgaatataaaggaatgccaggaggaaggaatctttataagtaagagctctgtcaagttgttgacttgagtcattttagctgacgaacaatttctgaactctatttttattttttgccttgtcctaactaatattaaactggtattgctattgagcactttttattccttcataaatcaatctacatgtccacaagagagaatggctttattcgatgttttgtgatatttccaaacaatggaaggtttgaggttactattaattcatgtatttatttcatgctaaaa

SEQ ID NO: 289168 - DNA, 3061 bp, Homo sapiens
tgccggcattatcctcatttgtctaaaaagaaaatggaagcttagaaagaaacttgcttcatgttacacagtgaaagcctgaatccagcaatggaggcattcctacacagcttcatatgacatttatgatttaaataaaaggcagctgattacagaagagaggattccaaacaacacacagtgggtcacatggtcaccagtgggtcataaattggcatatgtttggaacaatgacatttatgttaaaattgaaccaaatttaccaagttacagaatcacatggacggggaaagaagatataatatataatggaataactgactgggtttatgaagaggaagtcttcagtgcctactctgctctgtggtggtctccaaacggcacttttttagcatatgcccaatttaacgacacagaagtcccacttattgaatactccttctactctgatgagtcactgcagtacccaaagactgtacgggttccatatccaaaggcaggagctgtgaatccaactgtaaagttctttgttgtaaatacagactctctcagctcagtcaccaatgcaacttccatacaaatcactgctcctgcttctatgttgataggggatcactacttgtgtgatgtgacatgggcaacacaagaaagaatttctttgcagtggctcaggaggattcagaactattcggtcatggatatttgtgactatgatgaatccagtggaagatggaactgcttagtggcacggcaacacattgaaatgagtactactggctgggttggaagatttaggccttcagaacctcattttacccttgatggtaatagcttctacaagatcatcagcaatgaagaaggttacagacacatttgctatttccaaatagataaaaaagactgcacatttattacaaaaggcacctgggaagtcatcgggatagaagctctaaccagtgattatctatactacattagtaatgaatataaaggaatgccaggaggaaggaatctttataaaatccaacttagtgactatacaaaagtgacatgcctcagttgtgagctgaatccggaaaggtgtcagtactattctgtgtcattcagtaaagaggcgaagtattatcagctgagatgttccggtcctggtctgcccctctatactctacacagcagcgtgaatgataaagggctgagagtcctggaagacaattcagctttggataaaatgctgcagaatgtccagatgccctccaaaaaactggacttcattattttgaatgaaacaaaattttggtatcagatgatcttgcctcctcattttgataaatccaagaaatatcctctactattagatgtgtatgcaggcccatgtagtcaaaaagcagacactgtcttcagactgaactgggccacttaccttgcaagcacagaaaacattatagtagctagctttgatggcagaggaagtggttaccaaggagataagatcatgcatgcaatcaacagaagactgggaacatttgaagttgaagatcaaattgaagcagccagacaattttcaaaaatgggatttgtggacaacaaacgaattgcaatttggggctggtcatatggagggtacgtaacctcaatggtcctgggatcgggaagtggcgtgttcaagtgtggaatagccgtggcgcctgtatcccggtgggagtactatgactcagtgtacacagaacgttacatgggtctcccaactccagaagacaaccttgaccattacagaaattcaacagtcatgagcagagctgaaaattttaaacaagttgagtacctccttattcatggaacagcagatgataacgttcactttcagcagtcagctcagatctccaaagccctggtcgatgttggagtggatttccaggcaatgtggtatactgatgaagaccatggaatagctagcagcacagcacaccaacatatatatacccacatgagccacttcataaaacaatgtttctctttaccttagcacctcaaaataccatgccatttaaagcttattaaaactcatttttgttttcattatctcaaaactgcactgtcaagatgatgatgatctttaaaatacacactcaaatcaagaaacttaaggttacctttgttcccaaatttcatacctatcatcttaagtagggacttctgtcttcacaacagattattaccttacagaagtttgaattatccggtcgggttttattgtttaaaatcatttctgcatcagctgctgaaacaacaaataggaattgtttttatggaggctttgcatagattccctgagcaggattttaatctttttctaactggactggttcaaatgttgttctcttctttaaagggatggcaagatgtgggcagtgatgtcactagggcagggacaggataagagggattagggagagaagatagcagggcatggctgggaacccaagtccaagcataccaacacgagcaggctactgtcagctcccctcggagaagagctgttcacagccagactggcacagttttctgagaaagactattcaaacagtctcaggaaatcaaatatgcaaagcactgacttctaagtaaaaccacagcagttgaaaagactccaaagaaatgtaagggaaactgccagcaacgcaggcccccaggtgccagttatggctataggtgctacaaaaacacagcaagggtgatgggaaagcattgtaaatgtgcttttaaaaaaaaatactgatgttcctagtgaaagaggcagcttgaaactgagatgtgaacacatcagcttgccctgttaaaagatgaaaatatttgtatcacaaatcttaacttgaaggagtccttgcatcaatttttcttatttcatttctttgagtgtcttaattaaaagaatattttaacttccttggactcattttaaaaaatggaacataaaatacaatgttatgtattattattcccattctacatactatggaatttctcccagtcatttaataaatgtgccttcattttttcagaa

SEQ ID NO: 289169 - DNA, 2252 bp, Homo sapiens
accgcccggagcagcggtgcaggacgcgcgtctccgccgcccgcggtgacttctgcctgcgctccttctctgaacgctcacttccgaggagacgccgacgatgaagacaccgtggaaggttcttctgggactgctgggtgctgctgcgcttgtcaccatcatcaccgtgcccgtggttctgctgaacaaaggcacagatgatgctacagctgacagtcgcaaaacttacactctaactgattacttaaaaaatacttatagactgaagttatactccttaagatggatttcagatcatgaatatctctacaaacaagaaaataatatcttggtattcaatgctgaatatggaaacagctcagttttcttggagaacagtacatttgatgagtttggacattctatcaatgattattcaatatctcctgatgggcagtttattctcttagaatacaactacgtgaagcaatggaggcattcctacacagcttcatatgacatttatgatttaaataaaaggcagctgattacagaagagaggattccaaacaacacacagtgggtcacatggtcaccagtgggtcataaattggcatatgtttggaacaatgacatttatgttaaaattgaaccaaatttaccaagttacagaatcacatggacggggaaagaagatataatatataatggaataactgactgggtttatgaagaggaagtcttcagtgcctactctgctctgtggtggtctccaaacggcacttttttagcatatgcccaatttaacgacacagaagtcccacttattgaatactccttctactctgatgagtcactgcagtacccaaagactgtacgggttccatatccaaaggcaggagctgtgaatccaactgtaaagttctttgttgtaaatacagactctctcagctcagtcaccaatgcaacttccatacaaatcactgctcctgcttctatgttgataggggatcactacttgtgtgatgtgacatgggcaacacaagaaagaatttctttgcagtggctcaggaggattcagaactattcggtcatggatatttgtgactatgatgaatccagtggaagatggaactgcttagtggcacggcaacacattgaaatgagtactactggctgggttggaagatttaggccttcagaacctcattttacccttgatggtaatagcttctacaagatcatcagcaatgaagaaggttacagacacatttgctatttccaaatagataaaaaagactgcacatttattacaaaaggcacctgggaagtcatcgggatagaagctctaaccagtgattatctatactacattagtaatgaatataaaggaatgccaggaggaaggaatctttataaaatccaacttagtgactatacaaaagtgacatgcctcagttgtgagctgaatccggaaaggtgtcagtactattctgtgtcattcagtaaagaggcgaagtattatcagctgagatgttccggtcctggtctgcccctctatactctacacagcagcgtgaatgataaagggctgagagtcctggaagacaattcagctttggataaaatgctgcagaatgtccagatgccctccaaaaaactggacttcattattttgaatgaaacaaaattttggtatcagatgatcttgcctcctcattttgataaatccaagaaatatcctctactattagatgtgtatgcaggcccatgtagtcaaaaagcagacactgtcttcagactgaactgggccacttaccttgcaagcacagaaaacattatagtagctagctttgatggcagaggaagtggttaccaaggagataagatcatgcatgcaatcaacagaagactgggaacatttgaagttgaagatcaaattgaagcagccagacaattttcaaaaatgggatttgtggacaacaaacgaattgcaatttggggctggtcatatggagggtacgtaacctcaatggtcctgggatcgggaagtggcgtgttcaagtgtggaatagccgtggcgcctgtatcccggtgggagtactatgactcagtgtacacagaacgttacatgggtctcccaactccagaagacaaccttgaccattacagagtaagagatgaggacctatacctattttataacctatttataagtggtttaagaaccttcttaattgtatctattctagaaaatacatatttttatttcc

SEQ ID NO: 289170 - DNA, 405 bp, Homo sapiens
ctgcagcacgccgagaaagaaaaaaatgtcaggcgatgacggcggaggaaggatgacttacccatgttgctccccgagggtggagtctcgctctgtcgcccaggctggagtgtaatggtgctatctcggctcactgcaagctctgcctcctgggttcacaccattctgctgcctcagcctcccgagtagctgggactacaggcgcccgccaccacgcctggctaattttttgtatttttagtagagaaggggtttctctgtgttagccaggatggtctccatctcctgacctcgtgatccacccgccttgtcctctcaaagtgctgggattacaggtgtgagccaccgcgcctggctggttccatgatgtaattttcaataaacatcattaacttgacccctgca

SEQ ID NO: 289171 - DNA, 1844 bp, Homo sapiens
tacatctggtttcgggttttattttagaatttataaaattccagtgtcatccatattcatgagcctttacacatgtttgcatataatctccaaattccaaagttaaggccaagggatggattgtagctatggaaacagatgatatggaagacatccaacaaggaggaaaagcacacgcacgcctcacccctgcctcatcttcatgcagatggggaagaggtgacagcccttccccactggcctcccccgtggaggtggagtagacagatcccgggaaaggcaggaaaagggccttgctttctttccctgtttcctaagccgtggtcaccctagcctatgaagctggaagctatattccttccaatcccaatttaccattcctgtaaacaggcccattcagggctgcctgagcaaatggggacttgccgaggcagctgcaactagacttgggctaagccgtctgggtctactcaagaattcgagtctgaagatgaccaagcttgagttattcaactgagagtgaggtgtcaaggcggaagcgactgtccccagggaagggctgtgagatggatgggcgtgagtcagcttttccaaaactcaagtacctgggacaggacaactcgctagcagctcagtcacctccgtggcggacacagataaggatgttaagaccagaaaaccagagactagggccccgtcctcagccctcacagcatgacacagatgcctccctcggagagcagggtctctcggcatccagcggcgtggtctgcattctgctctacctcatgctctaggccccatgccatcgtctcggccctagaccgtgaaaactgccagtcacccgggacctgctcctaggggctggcctgcacagccggatggcctgtgggcggggtggaagtgcccactcccactccagatgggcctgctggccactgacccacctgtgctgagggagagcgccagcctccagcttaggtacacggcgcccacccccagctccacgggaaacccataaccaccagaaacatctcaatcaagagacgggtgtgtggggtggcactaactgcacagagaccactccacgccggctgaggtagaaagaaggcaactgaacacacagcagctagggcaggggcagggaggggctgcaggtggtgtgaagaagagcccagctgtcatctaaggcaaactgcccccactgaggacaagcgtaaggccctacctcccccaacctgtgcgcatctcaatcacagcagacactgtgacggccacaggggacccagatggtgcctaccaccttgcctccaggctccactcaccagacctcaggctgagggtctggcagtggaggtaggggcagggacccttggtgctttcagaccccacggcaggtaaaatcaggactgcctgagaacccgtcaccctctgcctctcaggtcaccccccagctccaggaacctgcctcctgctgtccattgccaggtcttccttgcaccctgacacctgtgctgaggcgctctggcagctggaggaggctgattgcactccacaaacaggactgtctggaccaagggaaactggcaggagggaggtgggaaaggaagagggcaaacgtttggcttttataaagtcaaggacgtttatttcctgaggtcatgacacaggaagtggaatcctagccacggctgcggagctctcgtgatgaaggccagagtgctgactgacatgccgggtggaccaggagctggagtctgttatcttagcacgaatgctcatgaccttggtttagtgttaaacagtggagcaggtcctgagcgggcacggccaggcctggagga

SEQ ID NO: 289172 - DNA, 2149 bp, Homo sapiens
tacatctggtttcgggttttattttagaatttataaaattccagtgtcatccatattcatgagcctttacacatgtttgcatataatctccaaattccaaagttaaggccaagggatggattgtagctatggaaacagatgatatggaagacatccaacaaggaggaaaagcacacgcacgcctcacccctgcctcatctctgcccagggctgtcctgacagcacagacgcttcagggagacaggcctggggacagtcatgtcatcacccttgcaacaaccacccaaaggaaaagagagcgctgaacagtttaggaaagggctcgcgtctaagacatcaagcgacatacagagatgtgcaaaacttggtgagaattaaaattgacctttgggagagggtaggggcaggatgttttatgacactgtagaaaagacaggaggaacccgctgcgatggagattggggggagctggaagcaagcagccaacaggacagagttccagaactcatgcagatggggaagaggtgacagcccttccccactggcctcccccgtggaggtggagtagacagatcccgggaaaggcaggaaaagggccttgctttctttccctgtttcctaagccgtggtcaccctagcctatgaagctggaagctatattccttccaatcccaatttaccattcctgtaaacaggcccattcagggctgcctgagcaaatggggacttgccgaggcagctgcaactagacttgggctaagccgtctgggtctactcaagaattcgagtctgaagatgaccaagcttgagttattcaactgagagtgaggtgtcaaggcggaagcgactgtccccagggaagggctgtgagatggatgggcgtgagtcagcttttccaaaactcaagtacctgggacaggacaactcgctagcagctcagtcacctccgtggcggacacagataaggatgttaagaccagaaaaccagagactagggccccgtcctcagccctcacagcatgacacagatgcctccctcggagagcagggtctctcggcatccagcggcgtggtctgcattctgctctacctcatgctctaggccccatgccatcgtctcggccctagaccgtgaaaactgccagtcacccgggacctgctcctaggggctggcctgcacagccggatggcctgtgggcggggtggaagtgcccactcccactccagatgggcctgctggccactgacccacctgtgctgagggagagcgccagcctccagcttaggtacacggcgcccacccccagctccacgggaaacccataaccaccagaaacatctcaatcaagagacgggtgtgtggggtggcactaactgcacagagaccactccacgccggctgaggtagaaagaaggcaactgaacacacagcagctagggcaggggcagggaggggctgcaggtggtgtgaagaagagcccagctgtcatctaaggcaaactgcccccactgaggacaagcgtaaggccctacctcccccaacctgtgcgcatctcaatcacagcagacactgtgacggccacaggggacccagatggtgcctaccaccttgcctccaggctccactcaccagacctcaggctgagggtctggcagtggaggtaggggcagggacccttggtgctttcagaccccacggcaggtaaaatcaggactgcctgagaacccgtcaccctctgcctctcaggtcaccccccagctccaggaacctgcctcctgctgtccattgccaggtcttccttgcaccctgacacctgtgctgaggcgctctggcagctggaggaggctgattgcactccacaaacaggactgtctggaccaagggaaactggcaggagggaggtgggaaaggaagagggcaaacgtttggcttttataaagtcaaggacgtttatttcctgaggtcatgacacaggaagtggaatcctagccacggctgcggagctctcgtgatgaaggccagagtgctgactgacatgccgggtggaccaggagctggagtctgttatcttagcacgaatgctcatgaccttggtttagtgttaaacagtggagcaggtcctgagcgggcacggccaggcctggagga

SEQ ID NO: 289173 - DNA, 1821 bp, Homo sapiens
tacatctggtttcgggttttattttagaatttataaaattccagtgtcatccatattcatgagcctttacacatgtttgcatataatctccaaattccaaagttaaggccaagggatggattgtagctatggaaacagatgatatggaagacatccaacaaggaggaaaagcacacgcacgcctcacccctgcctcatctctgcccagggctgtcctgacagcacagacgcttcagggagacagatcccgggaaaggcaggaaaagggccttgctttctttccctgtttcctaagccgtggtcaccctagcctatgaagctggaagctatattccttccaatcccaatttaccattcctgtaaacaggcccattcagggctgcctgagcaaatggggacttgccgaggcagctgcaactagacttgggctaagccgtctgggtctactcaagaattcgagtctgaagatgaccaagcttgagttattcaactgagagtgaggtgtcaaggcggaagcgactgtccccagggaagggctgtgagatggatgggcgtgagtcagcttttccaaaactcaagtacctgggacaggacaactcgctagcagctcagtcacctccgtggcggacacagataaggatgttaagaccagaaaaccagagactagggccccgtcctcagccctcacagcatgacacagatgcctccctcggagagcagggtctctcggcatccagcggcgtggtctgcattctgctctacctcatgctctaggccccatgccatcgtctcggccctagaccgtgaaaactgccagtcacccgggacctgctcctaggggctggcctgcacagccggatggcctgtgggcggggtggaagtgcccactcccactccagatgggcctgctggccactgacccacctgtgctgagggagagcgccagcctccagcttaggtacacggcgcccacccccagctccacgggaaacccataaccaccagaaacatctcaatcaagagacgggtgtgtggggtggcactaactgcacagagaccactccacgccggctgaggtagaaagaaggcaactgaacacacagcagctagggcaggggcagggaggggctgcaggtggtgtgaagaagagcccagctgtcatctaaggcaaactgcccccactgaggacaagcgtaaggccctacctcccccaacctgtgcgcatctcaatcacagcagacactgtgacggccacaggggacccagatggtgcctaccaccttgcctccaggctccactcaccagacctcaggctgagggtctggcagtggaggtaggggcagggacccttggtgctttcagaccccacggcaggtaaaatcaggactgcctgagaacccgtcaccctctgcctctcaggtcaccccccagctccaggaacctgcctcctgctgtccattgccaggtcttccttgcaccctgacacctgtgctgaggcgctctggcagctggaggaggctgattgcactccacaaacaggactgtctggaccaagggaaactggcaggagggaggtgggaaaggaagagggcaaacgtttggcttttataaagtcaaggacgtttatttcctgaggtcatgacacaggaagtggaatcctagccacggctgcggagctctcgtgatgaaggccagagtgctgactgacatgccgggtggaccaggagctggagtctgttatcttagcacgaatgctcatgaccttggtttagtgttaaacagtggagcaggtcctgagcgggcacggccaggcctggagga

SEQ ID NO: 289174 - DNA, 2095 bp, Homo sapiens
tacatctggtttcgggttttattttagaatttataaaattccagtgtcatccatattcatgagcctttacacatgtttgcatataatctccaaattccaaagttaaggccaagggatggattgtagctatggaaacagatgatatggaagacatccaacaaggaggaaaagcacacgcacgcctcacccctgcctcatctctgcccagggctgtcctgacagcacagacgcttcagggagacaggcctggggacagtcatgtcatcacccttgcaacaaccacccaaaggaaaagagagcgctgaacagtttaggaaagggctcgcgtctaagacatcaagcgacatacagagatgtgcaaatgacactgtagaaaagacaggaggaacccgctgcgatggagattggggggagctggaagcaagcagccaacaggacagagttccagaactcatgcagatggggaagaggtgacagcccttccccactggcctcccccgtggaggtggagtagacagatcccgggaaaggcaggaaaagggccttgctttctttccctgtttcctaagccgtggtcaccctagcctatgaagctggaagctatattccttccaatcccaatttaccattcctgtaaacaggcccattcagggctgcctgagcaaatggggacttgccgaggcagctgcaactagacttgggctaagccgtctgggtctactcaagaattcgagtctgaagatgaccaagcttgagttattcaactgagagtgaggtgtcaaggcggaagcgactgtccccagggaagggctgtgagatggatgggcgtgagtcagcttttccaaaactcaagtacctgggacaggacaactcgctagcagctcagtcacctccgtggcggacacagataaggatgttaagaccagaaaaccagagactagggccccgtcctcagccctcacagcatgacacagatgcctccctcggagagcagggtctctcggcatccagcggcgtggtctgcattctgctctacctcatgctctaggccccatgccatcgtctcggccctagaccgtgaaaactgccagtcacccgggacctgctcctaggggctggcctgcacagccggatggcctgtgggcggggtggaagtgcccactcccactccagatgggcctgctggccactgacccacctgtgctgagggagagcgccagcctccagcttaggtacacggcgcccacccccagctccacgggaaacccataaccaccagaaacatctcaatcaagagacgggtgtgtggggtggcactaactgcacagagaccactccacgccggctgaggtagaaagaaggcaactgaacacacagcagctagggcaggggcagggaggggctgcaggtggtgtgaagaagagcccagctgtcatctaaggcaaactgcccccactgaggacaagcgtaaggccctacctcccccaacctgtgcgcatctcaatcacagcagacactgtgacggccacaggggacccagatggtgcctaccaccttgcctccaggctccactcaccagacctcaggctgagggtctggcagtggaggtaggggcagggacccttggtgctttcagaccccacggcaggtaaaatcaggactgcctgagaacccgtcaccctctgcctctcaggtcaccccccagctccaggaacctgcctcctgctgtccattgccaggtcttccttgcaccctgacacctgtgctgaggcgctctggcagctggaggaggctgattgcactccacaaacaggactgtctggaccaagggaaactggcaggagggaggtgggaaaggaagagggcaaacgtttggcttttataaagtcaaggacgtttatttcctgaggtcatgacacaggaagtggaatcctagccacggctgcggagctctcgtgatgaaggccagagtgctgactgacatgccgggtggaccaggagctggagtctgttatcttagcacgaatgctcatgaccttggtttagtgttaaacagtggagcaggtcctgagcgggcacggccaggcctggagga

SEQ ID NO: 289175 - DNA, 1258 bp, Homo sapiens
atctcggggttcagactctctgacctgaggtaggctccccaggggctgggagaggggtttgacggaatggaggatggaggacagcgggaagaagaaacgaggaggaatgcaacgtgtggggcggccgccaagagtgaaaatagagggaagcgccatgcaagtgctggaaagaagggggcaggtgggacgagccccacagccccctccacaaaaagaccacttccgggactcagtgctcctttgggggcaggctccgccagctctccgccactcagggctccggtcccacggtcggagtgcccgggacggagacggccagttctggcggccaggtccgacgctctagaatccagccccatttccctcccggccacgcccgtccggcggcctctcctgtcatattcagcccctactcacctggggaccccgggaggggcgcgagggcacctgcagggggagggcctaaggggtcaggggaagcccccggtgtggagggtacgacgggcgcttcccccagggtggacgcagcaggcagaggcccaggagcagggctccgcaacccgggccgggctgggggcacggcggggagtcggcactgcgtcgtggggctggacttgggcgacctgcgggcgaaagggagccaggaacagaaagaggagcgatgagcggccccgcccaccctaaggccccgccccagcccagtgccagccactcccatgcatgcaagccccttcctgaaggcccgaggcggtcaccggagcttaagccccgccgccagcggcgccaacctcccagatccaccccgccccgcagcccgcgctccacggcaagccccgccctctctaagctccgcctctcgcttcaagtaggcgccaccccgggatgggggcgcgccctgcctggtccggcacttcttccgcggcccaggctggggggctttggggccgtgggggccgaccctggtacctgcgtccgaccgggacgctctgcacctgcagccaggagtcatccacaggaccccgtgggtgtgctgacgatggtcgtcttgatgtcaccgatgatgctgggcgcctccctcagcacgtggtgcatgcgccgcatctcgttgcgcccctgtgcctgctctgccgactcccccatcagcgtgttctgttccccacgcgagtacaagttggccagcagctccgagaagatgaactccttggtctgagagcgggcaaagagggaaggagactgggacctgattgatgcttgtgct

SEQ ID NO: 289176 - DNA, 2260 bp, Homo sapiens
cccctccacaccttcccacttgaaccggcaccgacctgagggagagggggccgggaagcgctggacgcccggggtcgggggaacgggcgtgggaggcgtctggacctgctgcctccgctccagtgctgggcggggcttcccggcctcccatggggggagggagagacccagggggagggacccacggagggatgcgaggcgggcaggagtcagcccgttggagacctgggcgagggagacgccgagagctaggctcagtgggagggggcgggcgtagaggctgaggcaccgcccagagctcgctgagacagagactgagaacgcccccggccagattccccccggagagacccgggtagggacagggacagagagacgcctctaggggcagaggccctgggaggcaaagacccccaggagagatttacccaccccagacggaaagcgcggctcagagtcggacgaggggagactgtcagaggacaacgccccctaggtctcctgggagaccccgaagcgaccccgggggcagcccgggccgtgtccgggcgagggtgacctatccttggttgagagcgatggggacacaagccctgcagggcttcctctttctcctcttcctcccgctgctgcagccgcgtggggcctcggctgggagcctgcacagtccaggcctgtccgaatgcttccaggtgaatggggctgactaccgcggccaccagaaccgcactggcccgcgcggggcgggccgcccgtgcctcttctgggaccagacgcagcaacacagctacagcagcgccagcgacccccacggccgctgggggctgggcgcgcacaacttctgccgtaacccagacggtgacgtgcagccgtggtgctacgtggctgagacagaggagggcatctactggcgctactgcgacatcccctcctgtcacatgccaggctacctgggatgctttgtggactcaggggcacccccagccctcagcggccccagcggcacctccacgaagctcacggtccaggtgtgcctacgcttctgccgcatgaaggggtaccagctggcgggcgtggaggccggttacgcctgcttctgtggctctgaaagcgacctggcccggggacgcctggcccccgccaccgactgtgaccagatctgtttcggccaccctggacagctgtgtggcggcgatgggcggctgggcgtctatgaagtgtcggtgggctcctgccaggggaactggacagcgcctcagggcgtcatctactccccggacttcccggacgagtacgggccggaccggaactgcagctgggccctgggcccgccaggcgccgcgctggagctcaccttccgcctcttcgagctggccgacccgcgcgaccggctggagctgcgcgacgcggcttcgggcagcctgctccgcgccttcgatggcgcccgcccaccgccgtccgggccgctgcgcctgggcactgccgcgctgctgctcaccttccgaagcgacgcgcgcggccacgcgcaaggcttcgcgctcacctaccgcgggctgcaggacgccgctgaggacccagaggcccccgagggctcggcccagacccccgcggcgcccctcgacggggccaacgtgagctgcagccccaggcctggggctccgccggccgcgattgggggagctgtctgctggctccgggaaaagggcccccggcgctgggggcttccaggggccccaggagaagctgggctgtgtggtaccaacagccccgaggggtggccttgccctgctcccccggggacccccaggctgagggttctgccgcgggctaccggcctctgagtgcctccagccagagctccctgcgctcgctcatctccgctctctgactctgggccccgagggtccgctgggcccgccgccggcgagatggacacctgagatgctgtgctgcgccctgcctcggccttgcgcctgtgtaggggcagctcggcctctggtcgccttggggagaccaaaagtcggacaggaaacatctggtgctattatctgggacttggcctgaccgtgggggtccagatggtccaggccctctccatggacctgtatgtgggggtggtctctggtttcggaggtctttgaacccctctgggggtggtcctggactgccgtcctcagtgagaggtcacaggtcagcaaaaacagtcaaaaaacccccacagattttgaataaaggatctactttggtacgggcctcgaaa

SEQ ID NO: 289177 - DNA, 2338 bp, Homo sapiens
cccctccacaccttcccacttgaaccggcaccgacctgagggagagggggccgggaagcgctggacgcccggggtcgggggaacgggcgtgggaggcgtctggacctgctgcctccgctccagtgctgggcggggcttcccggcctcccatggggggagggagagacccagggggagggacccacggagggatgcgaggcgggcaggagtcagcccgttggagacctgggcgagggagacgccgagagctaggctcagtgggagggggcgggcgtagaggctgaggcaccgcccagagctcgctgagacagagactgagaacgcccccggccagattccccccggagagacccgggtagggacagggacagagagacgcctctaggggcagaggccctgggaggcaaagacccccaggagagatttacccaccccagacggaaagcgcggctcagagtcggacgaggggagactgtcagaggacaacgccccctaggtctcctgggagaccccgaagcgaccccgggggcagcccgggccgtgtccgggcgagggtgacctatccttggttgagagcgatggggacacaagccctgcagggcttcctctttctcctcttcctcccgctgctgcagccgcgtggggcctcggctgggagcctgcacagtccaggcctgtccgaatgcttccaggtgaatggggctgactaccgcggccaccagaaccgcactggcccgcgcggggcgggccgcccgtgcctcttctgggaccagacgcagcaacacagctacagcagcgccagcgacccccacggccgctgggggctgggcgcgcacaacttctgccgtaacccagacggtgacgtgcagccgtggtgctacgtggctgagacagaggagggcatctactggcgctactgcgacatcccctcctgtcacatgccaggctacctgggatgctttgtggactcaggggcacccccagccctcagcggccccagcggcacctccacgaagctcacggtccaggtgtgcctacgcttctgccgcatgaaggggtaccagctggcgggcgtggaggccggttacgcctgcttctgtggctctgaaagcgacctggcccggggacgcctggcccccgccaccgactgtgaccagatctgtttcggccaccctggacagctgtgtggcggcgatgggcggctgggcgtctatgaagtgtcggtgggctcctgccaggggaactggacagcgcctcagggcgtcatctactccccggacttcccggacgagtacgggccggaccggaactgcagctgggccctgggcccgccaggcgccgcgctggagctcaccttccgcctcttcgagctggccgacccgcgcgaccggctggagctgcgcgacgcggcttcgggcagcctgctccgcgccttcgatggcgcccgcccaccgccgtccgggccgctgcgcctgggcactgccgcgctgctgctcaccttccgaagcgacgcgcgcggccacgcgcaaggcttcgcgctcacctaccgcgggctgcaggacgccgctgaggacccagaggcccccgagggctcggcccagacccccgcggcgcccctcgacggggccaacgtgagctgcagccccaggcctggggctccgccggccgcgattggggcccgggtcttctcgacggtgacggctgtctcggtgctgctgctgctgctcctggggctgctgcgtccgtgcgccgacggagctgtctgctggctccgggaaaagggcccccggcgctgggggcttccaggggccccaggagaagctgggctgtgtggtaccaacagccccgaggggtggccttgccctgctcccccggggacccccaggctgagggttctgccgcgggctaccggcctctgagtgcctccagccagagctccctgcgctcgctcatctccgctctctgactctgggccccgagggtccgctgggcccgccgccggcgagatggacacctgagatgctgtgctgcgccctgcctcggccttgcgcctgtgtaggggcagctcggcctctggtcgccttggggagaccaaaagtcggacaggaaacatctggtgctattatctgggacttggcctgaccgtgggggtccagatggtccaggccctctccatggacctgtatgtgggggtggtctctggtttcggaggtctttgaacccctctgggggtggtcctggactgccgtcctcagtgagaggtcacaggtcagcaaaaacagtcaaaaaacccccacagattttgaataaaggatctactttggtacgggcctcgaaa

SEQ ID NO: 289178 - DNA, 1732 bp, Homo sapiens
cccctccacaccttcccacttgaaccggcaccgacctgagggagagggggccgggaagcgctggacgcccggggtcgggggaacgggcgtgggaggcgtctggacctgctgcctccgctccagtgctgggcggggcttcccggcctcccatggggggagggagagacccagggggagggacccacggagggatgcgaggcgggcaggagtcagcccgttggagacctgggcgagggagacgccgagagctaggctcagtgggagggggcgggcgtagaggctgaggcaccgcccagagctcgctgagacagagactgagaacgcccccggccagattccccccggagagacccgggtagggacagggacagagagacgcctctaggggcagaggccctgggaggcaaagacccccaggagagatttacccaccccagacggaaagcgcggctcagagtcggacgaggggagactgtcagaggacaacgccccctaggtctcctgggagaccccgaagcgaccccgggggcagcccgggccgtgtccgggcgagggtgacctatccttggttgagagcgatggggacacaagccctgcagggcttcctctttctcctcttcctcccgctgctgcagccgcgtggggcctcggctgggagcctgcacagtccaggcctgtccgaatgcttccaggtgaatggggctgactaccgcggccaccagaaccgcactggcccgcgcggggcgggccgcccgtgcctcttctgggaccagacgcagcaacacagctacagcagcgccagcgacccccacggccgctgggggctgggcgcgcacaacttctgccgtaacccagacggtgacgtgcagccgtggtgctacgtggctgagacagaggagggcatctactggcgctactgcgacatcccctcctgtcacatgccaggctacctgggatgctttgtggactcaggggcacccccagccctcagcggccccagcggcacctccacgaagctcacggtccaggtgtgcctacgcttctgccgcatgaaggggtaccagctggcgggcgtggaggccggttacgcctgcttctgtggctctgaaagcgacctggcccggggacgcctggcccccgccaccgactgtgaccagatctgtttcggccaccctggacagctgtgtggcggcgatgggcggctgggcgtctatgaagtgtcggtgggctcctgccaggggaactggacagcgcctcagggcgtcatctactccccggacttcccggacgagtacgggccggaccggaactgcagctgggccctgggcccgccaggcgccgcgctggagctcaccttccgcctcttcgagctggccgacccgcgcgaccggctggagctgcgcgacgcggcttcgggcagcctgctccgcgccttcgatggcgcccgcccaccgccgtccgggccgctgcgcctgggcactgccgcgctgctgctcaccttccgaagcgacgcgcgcggccacgcgcaaggcttcgcgctcacctaccgcgctgaggaaggcgtgaggaccagaggccccgaggtcggccagacccgggggcctcgagggcacgtgaggtgagccaggctgggtcgccggcggatgggccggtctcccgaagggacggtgctcgggcgggcggggcgggcggggacgtggcaagggggctgggaggcgagggacggggggcc

SEQ ID NO: 289179 - DNA, 202 bp, Homo sapiens
cggccccagcggcacctccacgaagctcacggtccaggtgtgcctacgcttctgccgcatgaaggggtaccaggtactgctcacgggcccagaccagtgacccctgacctggacctaaagaccacactcaactcccaacactcggttgccaaacccagacaccggtttctgaacctccagcccgattcccaccccgacccca

SEQ ID NO: 289180 - DNA, 2623 bp, Homo sapiens
cccctccacaccttcccacttgaaccggcaccgacctgagggagagggggccgggaagcgctggacgcccggggtcgggggaacgggcgtgggaggcgtctggacctgctgcctccgctccagtgctgggcggggcttcccggcctcccatggggggagggagagacccagggggagggacccacggagggatgcgaggcgggcaggagtcagcccgttggagacctgggcgagggagacgccgagagctaggctcagtgggagggggcgggcgtagaggctgaggcaccgcccagagctcgctgagacagagactgagaacgcccccggccagattccccccggagagacccgggtagggacagggacagagagacgcctctaggggcagaggccctgggaggcaaagacccccaggagagatttacccaccccagacggaaagcgcggctcagagtcggacgaggggagactgtcagaggacaacgccccctaggtctcctgggagaccccgaagcgaccccgggggcagcccgggccgtgtccgggcgagggtgacctatccttggttgagagcgatggggacacaagccctgcagggcttcctctttctcctcttcctcccgctgctgcagccgcgtggggcctcggctgggagcctgcacagtccaggcctgtccgaatgcttccaggtgaatggggctgactaccgcggccaccagaaccgcactggcccgcgcggggcgggccgcccgtgcctcttctgggaccagacgcagcaacacagctacagcagcgccagcgacccccacggccgctgggggctgggcgcgcacaacttctgccgtaacccagacggtgacgtgcagccgtggtgctacgtggctgagacagaggagggcatctactggcgctactgcgacatcccctcctgtcacatgccaggctacctgggatgctttgtggactcaggggcacccccagccctcagcggccccagcggcacctccacgaagctcacggtccaggtgtgcctacgcttctgccgcatgaaggggtaccagctggcgggcgtggaggccggttacgcctgcttctgtggctctgaaagcgacctggcccggggacgcctggcccccgccaccgactgtgaccagatctgtttcggccaccctggacagctgtgtggcggcgatgggcggctgggcgtctatgaagtgtcggtgggctcctgccaggggaactggacagcgcctcagggcgtcatctactccccggacttcccggacgagtacgggccggaccggaactgcagctgggccctgggcccgccaggcgccgcgctggagctcaccttccgcctcttcgagctggccgacccgcgcgaccggctggagctgcgcgacgcggcttcgggcagcctgctccgcgccttcgatggcgcccgcccaccgccgtccgggccgctgcgcctgggcactgccgcgctgctgctcaccttccgaagcgacgcgcgcggccacgcgcaaggcttcgcgctcacctaccgcgggctgcaggacgccgctgaggacccagaggcccccgagggctcggcccagacccccgcggcgcccctcgacggggccaacgtgagctgcagccccaggcctggggctccgccggccgcgattgggggtgaggcgggcgcgcgggacgggagtgagtcagggagccgccccctcgcgcccatcctcaccgcagccgtgtgcccgcagcccgggtcttctcgacggtgacggctgtctcggtgctgctgctgctgctcctggggctgctgcgtccgtgcgccgacggtgcggggcgctggggcagggcctgagggcggaccggtggtggggagctggagccccagaagggaacagagctaggaaggaactcctgggttcttaagggagcgaggctttgggtccacgcacaggatcgcgcgcgggatcgcaggtagagcaggacgctgcagcgggattggaccggctcggctgatgtctgctccctctctaggagctgtctgctggctccgggaaaagggcccccggcgctgggggcttccaggggccccaggagaagctgggctgtgtggtaccaacagccccgaggggtggccttgccctgctcccccggggacccccaggctgagggttctgccgcgggctaccggcctctgagtgcctccagccagagctccctgcgctcgctcatctccgctctctgactctgggccccgagggtccgctgggcccgccgccggcgagatggacacctgagatgctgtgctgcgccctgcctcggccttgcgcctgtgtaggggcagctcggcctctggtcgccttggggagaccaaaagtcggacaggaaacatctggtgctattatctgggacttggcctgaccgtgggggtccagatggtccaggccctctccatggacctgtatgtgggggtggtctctggtttcggaggtctttgaacccctctgggggtggtcctggactgccgtcctcagtgagaggtcacaggtcagcaaaaacagtcaaaaaacccccacagattttgaataaaggatctactttggtacgggcctcgaaa

SEQ ID NO: 289181 - DNA, 2543 bp, Homo sapiens
cccctccacaccttcccacttgaaccggcaccgacctgagggagagggggccgggaagcgctggacgcccggggtcgggggaacgggcgtgggaggcgtctggacctgctgcctccgctccagtgctgggcggggcttcccggcctcccatggggggagggagagacccagggggagggacccacggagggatgcgaggcgggcaggagtcagcccgttggagacctgggcgagggagacgccgagagctaggctcagtgggagggggcgggcgtagaggctgaggcaccgcccagagctcgctgagacagagactgagaacgcccccggccagattccccccggagagacccgggtagggacagggacagagagacgcctctaggggcagaggccctgggaggcaaagacccccaggagagatttacccaccccagacggaaagcgcggctcagagtcggacgaggggagactgtcagaggacaacgccccctaggtctcctgggagaccccgaagcgaccccgggggcagcccgggccgtgtccgggcgagggtgacctatccttggttgagagcgatggggacacaagccctgcagggcttcctctttctcctcttcctcccgctgctgcagccgcgtggggcctcggctgggagcctgcacagtccaggcctgtccgaatgcttccaggtgaatggggctgactaccgcggccaccagaaccgcactggcccgcgcggggcgggccgcccgtgcctcttctgggaccagacgcagcaacacagctacagcagcgccagcgacccccacggccgctgggggctgggcgcgcacaacttctgccgtaacccagacggtgacgtgcagccgtggtgctacgtggctgagacagaggagggcatctactggcgctactgcgacatcccctcctgtcacatgccaggctacctgggatgctttgtggactcaggggcacccccagccctcagcggccccagcggcacctccacgaagctcacggtccaggtgtgcctacgcttctgccgcatgaaggggtaccagctggcgggcgtggaggccggttacgcctgcttctgtggctctgaaagcgacctggcccggggacgcctggcccccgccaccgactgtgaccagatctgtttcggccaccctggacagctgtgtggcggcgatgggcggctgggcgtctatgaagtgtcggtgggctcctgccaggggaactggacagcgcctcagggcgtcatctactccccggacttcccggacgagtacgggccggaccggaactgcagctgggccctgggcccgccaggcgccgcgctggagctcaccttccgcctcttcgagctggccgacccgcgcgaccggctggagctgcgcgacgcggcttcgggcagcctgctccgcgccttcgatggcgcccgcccaccgccgtccgggccgctgcgcctgggcactgccgcgctgctgctcaccttccgaagcgacgcgcgcggccacgcgcaaggcttcgcgctcacctaccgcgggctgcaggacgccgctgaggacccagaggcccccgagggctcggcccagacccccgcggcgcccctcgacggggccaacgtgagctgcagccccaggcctggggctccgccggccgcgattggggcccgggtcttctcgacggtgacggctgtctcggtgctgctgctgctgctcctggggctgctgcgtccgtgcgccgacggtgcggggcgctggggcagggcctgagggcggaccggtggtggggagctggagccccagaagggaacagagctaggaaggaactcctgggttcttaagggagcgaggctttgggtccacgcacaggatcgcgcgcgggatcgcaggtagagcaggacgctgcagcgggattggaccggctcggctgatgtctgctccctctctaggagctgtctgctggctccgggaaaagggcccccggcgctgggggcttccaggggccccaggagaagctgggctgtgtggtaccaacagccccgaggggtggccttgccctgctcccccggggacccccaggctgagggttctgccgcgggctaccggcctctgagtgcctccagccagagctccctgcgctcgctcatctccgctctctgactctgggccccgagggtccgctgggcccgccgccggcgagatggacacctgagatgctgtgctgcgccctgcctcggccttgcgcctgtgtaggggcagctcggcctctggtcgccttggggagaccaaaagtcggacaggaaacatctggtgctattatctgggacttggcctgaccgtgggggtccagatggtccaggccctctccatggacctgtatgtgggggtggtctctggtttcggaggtctttgaacccctctgggggtggtcctggactgccgtcctcagtgagaggtcacaggtcagcaaaaacagtcaaaaaacccccacagattttgaataaaggatctactttggtacgggcctcgaaa

SEQ ID NO: 289182 - DNA, 2148 bp, Homo sapiens
cccctccacaccttcccacttgaaccggcaccgacctgagggagagggggccgggaagcgctggacgcccggggtcgggggaacgggcgtgggaggcgtctggacctgctgcctccgctccagtgctgggcggggcttcccggcctcccatggggggagggagagacccagggggagggacccacggagggatgcgaggcgggcaggagtcagcccgttggagacctgggcgagggagacgccgagagctaggctcagtgggagggggcgggcgtagaggctgaggcaccgcccagagctcgctgagacagagactgagaacgcccccggccagattccccccggagagacccgggtagggacagggacagagagacgcctctaggggcagaggccctgggaggcaaagacccccaggagagatttacccaccccagacggaaagcgcggctcagagtcggacgaggggagactgtcagaggacaacgccccctaggtctcctgggagaccccgaagcgaccccgggggcagcccgggccgtgtccgggcgagggtgacctatccttggttgagagcgatggggacacaagccctgcagggcttcctctttctcctcttcctcccgctgctgcagccgcgtggggcctcggctgggagcctgcacagtccaggcctgtccgaatgcttccaggtgaatggggctgactaccgcggccaccagaaccgcactggcccgcgcggggcgggccgcccgtgcctcttctgggaccagacgcagcaacacagctacagcagcgccacggccccagcggcacctccacgaagctcacggtccaggtgtgcctacgcttctgccgcatgaaggggtaccagctggcgggcgtggaggccggttacgcctgcttctgtggctctgaaagcgacctggcccggggacgcctggcccccgccaccgactgtgaccagatctgtttcggccaccctggacagctgtgtggcggcgatgggcggctgggcgtctatgaagtgtcggtgggctcctgccaggggaactggacagcgcctcagggcgtcatctactccccggacttcccggacgagtacgggccggaccggaactgcagctgggccctgggcccgccaggcgccgcgctggagctcaccttccgcctcttcgagctggccgacccgcgcgaccggctggagctgcgcgacgcggcttcgggcagcctgctccgcgccttcgatggcgcccgcccaccgccgtccgggccgctgcgcctgggcactgccgcgctgctgctcaccttccgaagcgacgcgcgcggccacgcgcaaggcttcgcgctcacctaccgcgggctgcaggacgccgctgaggacccagaggcccccgagggctcggcccagacccccgcggcgcccctcgacggggccaacgtgagctgcagccccaggcctggggctccgccggccgcgattggggcccgggtcttctcgacggtgacggctgtctcggtgctgctgctgctgctcctggggctgctgcgtccgtgcgccgacggagctgtctgctggctccgggaaaagggcccccggcgctgggggcttccaggggccccaggagaagctgggctgtgtggtaccaacagccccgaggggtggccttgccctgctcccccggggacccccaggctgagggttctgccgcgggctaccggcctctgagtgcctccagccagagctccctgcgctcgctcatctccgctctctgactctgggccccgagggtccgctgggcccgccgccggcgagatggacacctgagatgctgtgctgcgccctgcctcggccttgcgcctgtgtaggggcagctcggcctctggtcgccttggggagaccaaaagtcggacaggaaacatctggtgctattatctgggacttggcctgaccgtgggggtccagatggtccaggccctctccatggacctgtatgtgggggtggtctctggtttcggaggtctttgaacccctctgggggtggtcctggactgccgtcctcagtgagaggtcacaggtcagcaaaaacagtcaaaaaacccccacagattttgaataaaggatctactttggtacgggcctcgaaa

SEQ ID NO: 289183 - DNA, 699 bp, Homo sapiens
ggagccgccgtgtcctggtcctcaggatgctgactgccggccccgcccgcagtgtcggtgggctcctgccaggggaactggacagcgcctcagggcgtcatctactccccggacttcccggacgagtacgggccggaccggaactgcagctgggccctgggcccgccaggcgccgcgctggagctcaccttccgcctcttcgagctggccgacccgcgcgaccggctggagctgcgcgacgcggcttcgggcagcctgctccgcgccttcgatggcgcccgcccaccgccgtccgggccgctgcgcctgggcactgccgcgctgctgctcaccttccgaagcgacgcgcgcggccacgcgcaaggcttcgcgctcacctaccgcggtgagcctcagctcggcgcgccctgcccgctgttcccaccccgctctccccaccccgcctcacgcccctctccgcagggctgcaggacgccgctgaggacccagaggcccccgagggctcggcccagacccccgcggcgcccctcgacggggccaacgtgagctgcagccccaggcctggggctccgccggccgcgattgggggtgaggcgggcgcgcgggacgggagtgagtcagggagccgccccctcgcgcccatcctcaccgcagccgtgtgcccgcagcccgggtcttctcgacggtgacggctgtctc

SEQ ID NO: 289184 - DNA, 802 bp, Homo sapiens
caccaactctgttgtgtttgccttcattttcttaaggaaagtagttattgaccttctagttgcttatttctctaagctgttcttttattaatattccagaagcaatattgagatagatttatttcttatatacatgcaataactattattctcctaggttctgaaggagcttagactcatttaattggaattgttgaaatgttttaaattattcatcaaacatttatctagctgcgaggatattccaggcactctgttaaggtctagggatgtatacataactgagacatattattttctcttaagcaactcatggtacaatttgggaaaggaataaatgaacaattatggtattgtgctaaatagtattattttgataaatgccaggataaagtcaggctaaagatccccagcaagcacagggtagctcctaaatagctttatagccacttaaaatttcacatccataaagttttaaatatgtggtgggaattaagtgcttaatctgtagcactatatccgtttcctttgcaagaatatatttttgttcatcttattttggaaaaaaaagataccatattaaaatatcattttctgcagataaatgcaaatttaaaaaataaagcgtgttgaaaaactgttagaataaagattagattttataattatataaaatctttaccagtgatagttaattacttaatggtaatacttctaagaaaaattacctatagaattcagaaatagataagttggaatagtggatcttactgtgttttgttttcagggaaaataggataaa

SEQ ID NO: 289185 - DNA, 428 bp, Homo sapiens
tctccaagcgccaactatctttctctccaagccctggcctggctacctctccaagccccaggctgtccacctctccaagccccaactgtctacctctccaagccccggcctggctacctctccaagcccctggctacctctccatgcccggcctggctacctctcctcttgcctataggccctgaggggcaattccagcccaagggaatccatggctcctgctgctccaagaaaacctagttcatgttgtggctctgcagagcctggcctggtcttgtcctctgtgtttcacagaccttccgtagccagtcccacctgccctgctctctgctgcatgcgcaggggcctcctgtcagctcctcagagacccttattatcccagggctcgccatgcactgcctccttcgcctggagcctcttaccttcca

SEQ ID NO: 289186 - DNA, 595 bp, Homo sapiens
aatcttgctgctgctcactctttgggtccacactgcctttatgagctgtaacactcacggtgaaggtccgcagcttcactcctgagccggcgagaccacgaacccaccagaaggaagaaactccgaacatcagaaggaaccaactccggacatgccgcctttaagaactgtaacactcaccgcgaggagccacggcttcattctggaagtcagtgagaccgagaacccactgagtccggacacattaggatgttagagtcccaccttcaaagcatttttctcctggagtggactttgcacaaatggtaggccaattgtggagtcagtgaagaaccaggctaatccagcttgttttattggccccagtttttcttctcagggccgtaaaccagttattaccaggaaacaaaagcaaaactggagtgcagtggctcagtctcagctcactgcaacctctgcctcccagttcaagtaattctcctgcctcaggttcctgagtagctgcgactacagaggaccaagaacttcgctttattcctggcagtgtgcattgctcatggcagcatgaaaaaaacagagtcctgagtatgaagta

SEQ ID NO: 289187 - DNA, 565 bp, Homo sapiens
cccaccatttggcaagtcctaagttcttgtcctgcatccaggaagaatgaggtatgcggacaactggagggtgaacaaggtggaaaggagctttattgagtgacagaacagctcttgggagacccaaagtgggtggctcctatctgcaggcaggtcatcccagtgaatgtccagctctcagtggagaggagacccagagtgggcagctcctattcgcagagtcatgtggaagcaccaggatcccattcctaccactgaaattaaacaaatgaaaaaaaattagcatgaaattctttgtgcgtggacagtgacctgagaagacaataagacatttcaaagcattgagttaaggataatgaagtttataaaatctagtggcaagatatagctgactcttgacacagacagaggaaaggccatgtgagacacagcaagaaagtgaccatctgcaagccaggaaggagacgttttttggttttggttcctcaccaggaaccaaattaaatgccaccttgatcttggacttccaagcctccagaactgtgagaaataaatgtatgttgct

SEQ ID NO: 289188 - DNA, 398 bp, Homo sapiens
  misc_feature (17)..(17): n is a, c, g, or t
ttgggcgggggttgggngggcgtggtgttttgcgttgtttttatgttgcttgagtcatgtggaagcaccaggatcccattcctaccactgaaattaaacaaatgaaaaaaaattagcatgaaattctttgtgcgtggacagtgacctgagaagacaataagacatttcaaagcattgagttaaggataatgaagtttataaaatctagtggcaagatatagctgactcttgacacagacagaggaaaggccatgtgagacacagcaagaaagtgaccatctgcaagccaggaaggagacgttttttggttttggttcctcaccaggaaccaaattaaatgccaccttgatcttggacttccaagcctccagaactgtgagaaataaatgtatgttgct

SEQ ID NO: 289189 - DNA, 1364 bp, Homo sapiens
  misc_feature (1345)..(1345): n is a, c, g, or t
aacagtactgtattttcacccacctccccgaactcagctttatttgtgctagaagaggtgattttattcaactagttaatttcagtgcaggttgctgtaaacaggaaataatatgttatttatcatagtaagacaaaaaaaatttgaagtgaatgacttgttgggtctatgcaaacacctcatcctacctcagaagcaatcctaagaaattaatacttacttagctttctttttaggaaggccctaatacaaggcatctttctgtttttttgttttgttttgttttgttttgttttttgagtgttacagcctggactggccagcaagacagaaatttcttcttcctaaaaatgtgtaatgtcaaataaccattatcaaccctatctatgttaatgttcgcacactcatgaatggggaaatgtagggctcatggtaataaatcaataatgacaacaatgaacatttaagtccttattatgtgtcaaatagtttacattaattaactcggttctcacaacaacctaagaagtaataatggttagccactaaatatgataatgtagaagaaaataatggaaagtaaataaataatgtgaaatctataagatacacatccatgatctcacatccccaaaagtagctgtacctttttcagtttttttccttttacttccctggaatttgtaaatatcttttcagctctaaacagctaatacaataaacacttttaatctattttggcaggcactgtttttggtactatgggggacacaggaatgagtaagagaggtcctaaattccatgctgatactacatattgctgataatcagatcaatttcataaagtattacagttctggccatatagaaagggttctagttttatctatgaaatttctcttaattgtctatagcactgatacaatcttacaaagctgcctatgacatcttatcttgcacatgcactgcagcaagaaggctgatgctcagtatgtggaacgtctggagtgatcatctcaaagcctttgtcacataacttgctgagttttctgatattctgatagtagttataagatgcctgagtaactcatgaaatcttatggatttttatctcactttatagatttaatgacctccaccatctctaagaacaagcagctatttctgtagagaaagatcatctttggataacaatacatgattttaggctctaaaagttaaaacgtgtttgtaacgttgatattatgcagaggtcttgacagaacttggcagtctctgaggctacagagaagtgtgaaaaagagcatagagatttcagaaggaggcagattcagtcagacgtacntcggccacgaccacgctaa

SEQ ID NO: 289190 - DNA, 546 bp, Homo sapiens
  misc_feature (527)..(527): n is a, c, g, or t
ggttatggggtggctgtttttctacgtggaccaagcagggtcccagttcaagtttctgctgcctatctgataatcttgaggtatttatgaaggactcctttgaaagttctctactgagtttccttaaggaattggaatattattcagtccaggtttaagtccttcagcatctgacattctcctggcaactgtaattgaatcaatgatgactcatctgagatgagcaagttggtccagtcagaccaaacaaaagacattctataatcaggggagaagtcttctctatatctctcttatatgagcaaatttaatgacctccaccatctctaagaacaagcagctatttctgtagagaaagatcatctttggataacaatacatgattttaggctctaaaagttaaaacgtgtttgtaacgttgatattatgcagaggtcttgacagaacttggcagtctctgaggctacagagaagtgtgaaaaagagcatagagatttcagaaggaggcagattcagtcagacgtacntcggccacgaccacgctaa

SEQ ID NO: 289191 - DNA, 227 bp, Homo sapiens
cattctgtgggtggtggtgcatgcatgacttggtggggaaacttaaagatgcttcgaaaagcctggaaagagcaactcagttgtaacttggggaagttaacgatccgcccagtatgggggcacgaaggctcatcattcaaaataaaacaaaataaaaaagtattaaggcgaagattaaaaaaattttgcattacataattacacgacagctatgtatcacctcccga

SEQ ID NO: 289192 - DNA, 913 bp, Homo sapiens
gtacaggaagagaaaaagagagagaaagagagaagaatcaaatagacaccagaaacaatgatgaatggtcaacttcgacgtacaacgccttcacgcttctcctccgggcggcattccagagtctgctggacgcccaggcggacgaggccgtgttagatcatccagacttgaaacatatcgacccagtggttttaaaacattgtcatgcagcagctgcaacttacatactagaggcaggaaagcaccgagctgacaagtcaactctaagcacttatctagaagactgtaaatttgacagagagcgaatagaactgttttgcacggaatatcagaataataagaattccctagaaatcctactgggaagtataggcagatctctccctcatataacggatgtttcttggcgcttggaatatcagataaagaccaatcaacttcataggatgtacagacctgcatatttggtgaccttaagtgtacagaacactgattccccatcctatccagagattagttttagttgcagcatggaacaattacaggacttggtggggaaacttaaagatgcttcgaaaagcctggaaagagcaactcagttgtaacttggggaagttaacgatccgcccgagtgcagaggaaaaccagaaacgccttgccttcagctgaaccaccgtttgtgcgagctggatgtccttttcagtagaaaagaattttccttttgaatttataccattcatcaattttgacactttaaaaacgtgtgaaagggttaagagggaaagatactgcccaagtatttgaatcgtttagtagtaactgtccatttatcctattttgatctttttcaagtcttctgaaaggaagtagacagtattacaccctgaataaataaggtgttgttttccacaaa

SEQ ID NO: 289193 - DNA, 2242 bp, Homo sapiens
gtacaggaagagaaaaagagagagaaagagagaagaatcaaatagacaccagaaacaatgatgaatggtcaacttcgacgtacaacgccttcacgcttctcctccgggcggcattccagagtctgctggacgcccaggcggacgaggccgtgttagggtaagccgctcggctcggctcggagctggatccgccggggtggaggggcgctcggagaagaggagccggcggagcgagaaggggaaagccccgggaagaggaagtctccgggctttgcccttcgctccggacggagtgttggggacgtggctctgccaggactcggagcagactctgagcattgttttggccccacttggcacctgcatagagccaactccacgttcctggcccggtttccctcccagtctctttgttcttttgtaaagccggtgttcaagtcttgtttgtggcctaaacatctaaggtgtttagccttgtctgaggctgcggctgttttgacagttggacttcatctggggagctccctgcaattcaagcttccagggctaggctagcaaaggtttaagggtctgtttccgaagtaattactaggtcagacagtgttgacatttgccaacttagagcatacctcaagttgctatgatcactccagcgctctagttcagcatgtttacacaggttctacgcctagaaccttaaactatgatgcacaatactttgttccgccccagttaccaggatgcgagtgtcttttaagcgatccggtcagtgactgcggaggtgcagtgtcagtatggattgaagacatattttaagaccgatcgcttttagatgattttcttaaatataaatatcccaacaattcaaatttttgttttttttctgtagtttcatgaactaaacacttgtacaaaaagtatgaaagtggaagttcttaaacgaaaatagtaaccaccacctgggttaatctcaaaaaaaaaatgactgtcaaaccctgaaagtactaatataatttggaaatttgtatcttatattctgaactcatgccctaccttctacccccttgatgtatttgttcatggagccggttaccctaaactcatcatttttaggatggaagtttattctaaaattgacacaatgtaaaatatttatcttgtttttcctttgaatttactccagtgttagaatgaccattgcattgttatattttctttgggggctataatattttttaatagtaaaaatattaaggcaaaataagttaattgaagctagtaatagtagagttcttgttgtgttctttttattgtttttcacttgatcttgttgctcatctcatttacttataattgactgtccttatagttgatgtttttaatctgtgttaaagggtttttaaacccaaattaaaatatcctttttggaacatgactgtaaagaatttattatcataggcatcactggaagttaatttattttagatcatccagacttgaaacatatcgacccagtggttttaaaacattgtcatgcagcagctgcaacttacatactagaggcaggaaagcaccgagctgacaagtcaactctaagcacttatctagaagactgtaaatttgacagagagcgaatagaactgttttgcacggaatatcagaataataagaattccctagaaatcctactgggaagtataggcagatctctccctcatataacggatgtttcttggcgcttggaatatcagataaagaccaatcaacttcataggatgtacagacctgcatatttggtgaccttaagtgtacagaacactgattccccatcctatccagagattagttttagttgcagcatggaacaattacaggacttggtggggaaacttaaagatgcttcgaaaagcctggaaagagcaactcagttgtaacttggggaagttaacgatccgcccgagtgcagaggaaaaccagaaacgccttgccttcagctgaaccaccgtttgtgcgagctggatgtccttttcagtagaaaagaattttccttttgaatttataccattcatcaattttgacactttaaaaacgtgtgaaagggttaagagggaaagatactgcccaagtatttgaatcgtttagtagtaactgtccatttatcctattttgatctttttcaagtcttctgaaaggaagtagacagtattacaccctgaataaataaggtgttgttttccacaaa

SEQ ID NO: 289194 - DNA, 1325 bp, Homo sapiens
gtacaggaagagaaaaagagagagaaagagagaagaatcaaatagacaccagaaacaatgatgaatggtcaacttcgacgtacaacgccttcacgcttctcctccgggcggcattccagagtctgctggacgcccaggcggacgaggccgtgttagggtaagccgctcggctcggctcggagctggatccgccggggtggaggggcgctcggagaagaggagccggcggagcgagaaggggaaagccccgggaagaggaagtctccgggctttgcccttcgctccggacggagtgttggggacgtggctctgccaggactcggagcagactctgagcattgttttggccccacttggcacctgcatagagccaactccacgttcctggcccggtttccctcccagtctctttgttcttttgtaaagccggtgttcaagtcttgtttgtggcctaaacatctaaggtgtttagccttgtctgaggctgcggctgttttgacagttggacttcatctggggagctccctgcaattcaagcttccagggctaggctagcaaaggtttaaggatcatccagacttgaaacatatcgacccagtggttttaaaacattgtcatgcagcagctgcaacttacatactagaggcaggaaagcaccgagctgacaagtcaactctaagcacttatctagaagactgtaaatttgacagagagcgaatagaactgttttgcacggaatatcagaataataagaattccctagaaatcctactgggaagtataggcagatctctccctcatataacggatgtttcttggcgcttggaatatcagataaagaccaatcaacttcataggatgtacagacctgcatatttggtgaccttaagtgtacagaacactgattccccatcctatccagagattagttttagttgcagcatggaacaattacaggacttggtggggaaacttaaagatgcttcgaaaagcctggaaagagcaactcagttgtaacttggggaagttaacgatccgcccgagtgcagaggaaaaccagaaacgccttgccttcagctgaaccaccgtttgtgcgagctggatgtccttttcagtagaaaagaattttccttttgaatttataccattcatcaattttgacactttaaaaacgtgtgaaagggttaagagggaaagatactgcccaagtatttgaatcgtttagtagtaactgtccatttatcctattttgatctttttcaagtcttctgaaaggaagtagacagtattacaccctgaataaataaggtgttgttttccacaaa

SEQ ID NO: 289195 - DNA, 2350 bp, Homo sapiens
gtacaggaagagaaaaagagagagaaagagagaagaatcaaatagacaccagaaacaatgatgaatggtcaacttcgacgtacaacgccttcacgcttctcctccgggcggcattccagagtctgctggacgcccaggcggacgaggccgtgttagggtaagccgctcggctcggctcggagctggatccgccggggtggaggggcgctcggagaagaggagccggcggagcgagaaggggaaagccccgggaagaggaagtctccgggctttgcccttcgctccggacggagtgttggggacgtggctctgccaggactcggagcagactctgagcattgttttggccccacttggcacctgcatagagccaactccacgttcctggcccggtttccctcccagtctctttgttcttttgtaaagccggtgttcaagtcttgtttgtggcctaaacatctaaggtgtttagccttgtctgaggctgcggctgttttgacagttggacttcatctggggagctccctgcaattcaagcttccagggctaggctagcaaaggtttaagggtctgtttccgaagtaattactaggtcagacagtgttgacatttgccaacttagagcatacctcaagttgctatgatcactccagcgctctagttcagcatgtttacacaggttctacgcctagaaccttaaactatgatgcacaatactttgttccgccccagttaccaggatgcgagtgtcttttaagcgatccggtcagtgactgcggaggtgcagtgtcagtatggattgaagacatattttaagaccgatcgcttttagatgattttcttaaatataaatatcccaacaattcaaatttttgttttttttctgtagtttcatgaactaaacacttgtacaaaaagtatgaaagtggaagttcttaaacgaaaatagtaaccaccacctgggttaatctcaaaaaaaaaatgactgtcaaaccctgaaagtactaatataatttggaaatttgtatcttatattctgaactcatgccctaccttctacccccttgatgtatttgttcatggagccggttaccctaaactcatcatttttaggatggaagtttattctaaaattgacacaatgtaaaatatttatcttgtttttcctttgaatttactccagtgttagaatgaccattgcattgttatattttctttgggggctataatattttttaatagtaaaaatattaaggcaaaataagttaattgaagctagtaatagtagagttcttgttgtgttctttttattgtttttcacttgatcttgttgctcatctcatttacttataattgactgtccttatagttgatgtttttaatctgtgttaaagggtttttaaacccaaattaaaatatcctttttggaacatgactgtaaagaatttattatcataggcatcactggaagttaatttattttagatcatccagacttgaaacatatcgacccagtggttttaaaacattgtcatgcagcagctgcaacttacatactagaggcaggaaagcaccgagctgacaagtcaactctaaggtacaggatttatttaaatatccatttattttcaaatactaccttaatgatttcaatttcagttttaaaaatggagacagaactttggctttttttttctttcttctacacttatctagaagactgtaaatttgacagagagcgaatagaactgttttgcacggaatatcagaataataagaattccctagaaatcctactgggaagtataggcagatctctccctcatataacggatgtttcttggcgcttggaatatcagataaagaccaatcaacttcataggatgtacagacctgcatatttggtgaccttaagtgtacagaacactgattccccatcctatccagagattagttttagttgcagcatggaacaattacaggacttggtggggaaacttaaagatgcttcgaaaagcctggaaagagcaactcagttgtaacttggggaagttaacgatccgcccgagtgcagaggaaaaccagaaacgccttgccttcagctgaaccaccgtttgtgcgagctggatgtccttttcagtagaaaagaattttccttttgaatttataccattcatcaattttgacactttaaaaacgtgtgaaagggttaagagggaaagatactgcccaagtatttgaatcgtttagtagtaactgtccatttatcctattttgatctttttcaagtcttctgaaaggaagtagacagtattacaccctgaataaataaggtgttgttttccacaaa

SEQ ID NO: 289196 - DNA, 2801 bp, Homo sapiens
gtacaggaagagaaaaagagagagaaagagagaagaatcaaatagacaccagaaacaatgatgaatggtcaacttcgacgtacaacgccttcacgcttctcctccgggcggcattccagagtctgctggacgcccaggcggacgaggccgtgttagggtaagccgctcggctcggctcggagctggatccgccggggtggaggggcgctcggagaagaggagccggcggagcgagaaggggaaagccccgggaagaggaagtctccgggctttgcccttcgctccggacggagtgttggggacgtggctctgccaggactcggagcagactctgagcattgttttggccccacttggcacctgcatagagccaactccacgttcctggcccggtttccctcccagtctctttgttcttttgtaaagccggtgttcaagtcttgtttgtggcctaaacatctaaggtgtttagccttgtctgaggctgcggctgttttgacagttggacttcatctggggagctccctgcaattcaagcttccagggctaggctagcaaaggtttaagggtctgtttccgaagtaattactaggtcagacagtgttgacatttgccaacttagagcatacctcaagttgctatgatcactccagcgctctagttcagcatgtttacacaggttctacgcctagaaccttaaactatgatgcacaatactttgttccgccccagttaccaggatgcgagtgtcttttaagcgatccggtcagtgactgcggaggtgcagtgtcagtatggattgaagacatattttaagaccgatcgcttttagatgattttcttaaatataaatatcccaacaattcaaatttttgttttttttctgtagtttcatgaactaaacacttgtacaaaaagtatgaaagtggaagttcttaaacgaaaatagtaaccaccacctgggttaatctcaaaaaaaaaatgactgtcaaaccctgaaagtactaatataatttggaaatttgtatcttatattctgaactcatgccctaccttctacccccttgatgtatttgttcatggagccggttaccctaaactcatcatttttaggatggaagtttattctaaaattgacacaatgtaaaatatttatcttgtttttcctttgaatttactccagtgttagaatgaccattgcattgttatattttctttgggggctataatattttttaatagtaaaaatattaaggcaaaataagttaattgaagctagtaatagtagagttcttgttgtgttctttttattgtttttcacttgatcttgttgctcatctcatttacttataattgactgtccttatagttgatgtttttaatctgtgttaaagggtttttaaacccaaattaaaatatcctttttggaacatgactgtaaagaatttattatcataggcatcactggaagttaatttattttagatcatccagacttgaaacatatcgacccagtggttttaaaacattgtcatgcagcagctgcaacttacatactagaggcaggaaagcaccgagctgacaagtcaactctaaggtacaggatttatttaaatatccatttattttcaaatactaccttaatgatttcaatttcagttttaaaaatggagacagaactttggctttttttttctttcttctacacttatctagaagactgtaaatttgacagagagcgaatagaactgttttgcacggaatatcaggttacttactttaaaatttttaattaacagtactatttttcttttactttgtttgtaaagatgtttttttttctttctttcttgctttcttttttctctccagaataataagaattccctagaaatcctactgggaagaggtaggtactgtataaggtgtcaagctgaggcacttttcacttgcaggtatgaatggagagtgttggtgtgaaacaagatcttcgggatcttgacccaaagaaaaggagccaaagggcatgtcaagcaattgaagttaagctcatgtttttaaagatcgtttattgagatgattttgaaatgctcctttaccattcataatttaaaaataaagtttaacaatggtttaaattcagaatggattaaaatggagttgggggtggaaagtagagccattcttagtaaatataaataactgaaaagttcttctgaggagactatgtacgaagttatcattgcatctttcagtataggcagatctctccctcatataacggatgtttcttggcgcttggaatatcagataaagaccaatcaacttcataggatgtacagacctgcatatttggtgaccttaagtgtacagaacactgattccccatcctatccagagattagttttagttgcagcatggaacaattacaggacttggtggggaaacttaaagatgcttcgaaaagcctggaaagagcaactcagttgtaacttggggaagttaacgatccgcccgagtgcagaggaaaaccagaaacgccttgccttcagctgaaccaccgtttgtgcgagctggatgtccttttcagtagaaaagaattttccttttgaatttataccattcatcaattttgacactttaaaaacgtgtgaaagggttaagagggaaagatactgcccaagtatttgaatcgtttagtagtaactgtccatttatcctattttgatctttttcaagtcttctgaaaggaagtagacagtattacaccctgaataaataaggtgttgttttccacaaa

SEQ ID NO: 289197 - DNA, 2693 bp, Homo sapiens
gtacaggaagagaaaaagagagagaaagagagaagaatcaaatagacaccagaaacaatgatgaatggtcaacttcgacgtacaacgccttcacgcttctcctccgggcggcattccagagtctgctggacgcccaggcggacgaggccgtgttagggtaagccgctcggctcggctcggagctggatccgccggggtggaggggcgctcggagaagaggagccggcggagcgagaaggggaaagccccgggaagaggaagtctccgggctttgcccttcgctccggacggagtgttggggacgtggctctgccaggactcggagcagactctgagcattgttttggccccacttggcacctgcatagagccaactccacgttcctggcccggtttccctcccagtctctttgttcttttgtaaagccggtgttcaagtcttgtttgtggcctaaacatctaaggtgtttagccttgtctgaggctgcggctgttttgacagttggacttcatctggggagctccctgcaattcaagcttccagggctaggctagcaaaggtttaagggtctgtttccgaagtaattactaggtcagacagtgttgacatttgccaacttagagcatacctcaagttgctatgatcactccagcgctctagttcagcatgtttacacaggttctacgcctagaaccttaaactatgatgcacaatactttgttccgccccagttaccaggatgcgagtgtcttttaagcgatccggtcagtgactgcggaggtgcagtgtcagtatggattgaagacatattttaagaccgatcgcttttagatgattttcttaaatataaatatcccaacaattcaaatttttgttttttttctgtagtttcatgaactaaacacttgtacaaaaagtatgaaagtggaagttcttaaacgaaaatagtaaccaccacctgggttaatctcaaaaaaaaaatgactgtcaaaccctgaaagtactaatataatttggaaatttgtatcttatattctgaactcatgccctaccttctacccccttgatgtatttgttcatggagccggttaccctaaactcatcatttttaggatggaagtttattctaaaattgacacaatgtaaaatatttatcttgtttttcctttgaatttactccagtgttagaatgaccattgcattgttatattttctttgggggctataatattttttaatagtaaaaatattaaggcaaaataagttaattgaagctagtaatagtagagttcttgttgtgttctttttattgtttttcacttgatcttgttgctcatctcatttacttataattgactgtccttatagttgatgtttttaatctgtgttaaagggtttttaaacccaaattaaaatatcctttttggaacatgactgtaaagaatttattatcataggcatcactggaagttaatttattttagatcatccagacttgaaacatatcgacccagtggttttaaaacattgtcatgcagcagctgcaacttacatactagaggcaggaaagcaccgagctgacaagtcaactctaagcacttatctagaagactgtaaatttgacagagagcgaatagaactgttttgcacggaatatcaggttacttactttaaaatttttaattaacagtactatttttcttttactttgtttgtaaagatgtttttttttctttctttcttgctttcttttttctctccagaataataagaattccctagaaatcctactgggaagaggtaggtactgtataaggtgtcaagctgaggcacttttcacttgcaggtatgaatggagagtgttggtgtgaaacaagatcttcgggatcttgacccaaagaaaaggagccaaagggcatgtcaagcaattgaagttaagctcatgtttttaaagatcgtttattgagatgattttgaaatgctcctttaccattcataatttaaaaataaagtttaacaatggtttaaattcagaatggattaaaatggagttgggggtggaaagtagagccattcttagtaaatataaataactgaaaagttcttctgaggagactatgtacgaagttatcattgcatctttcagtataggcagatctctccctcatataacggatgtttcttggcgcttggaatatcagataaagaccaatcaacttcataggatgtacagacctgcatatttggtgaccttaagtgtacagaacactgattccccatcctatccagagattagttttagttgcagcatggaacaattacaggacttggtggggaaacttaaagatgcttcgaaaagcctggaaagagcaactcagttgtaacttggggaagttaacgatccgcccgagtgcagaggaaaaccagaaacgccttgccttcagctgaaccaccgtttgtgcgagctggatgtccttttcagtagaaaagaattttccttttgaatttataccattcatcaattttgacactttaaaaacgtgtgaaagggttaagagggaaagatactgcccaagtatttgaatcgtttagtagtaactgtccatttatcctattttgatctttttcaagtcttctgaaaggaagtagacagtattacaccctgaataaataaggtgttgttttccacaaa

SEQ ID NO: 289198 - DNA, 1210 bp, Homo sapiens
gtaggatccccgtgacagcactgcgctaacaatggttttaaaacattgtcatgcagcagctgcaacttacatactagaggcaggaaagcaccgagctgacaagtcaactctaagcacttatctagaagactgtaaatttgacagagagcgaatagaactgttttgcacggaatatcaggttacttactttaaaatttttaattaacagtactatttttcttttactttgtttgtaaagatgtttttttttctttctttcttgctttcttttttctctccagaataataagaattccctagaaatcctactgggaagaggtaggtactgtataaggtgtcaagctgaggcacttttcacttgcaggtatgaatggagagtgttggtgtgaaacaagatcttcgggatcttgacccaaagaaaaggagccaaagggcatgtcaagcaattgaagttaagctcatgtttttaaagatcgtttattgagatgattttgaaatgctcctttaccattcataatttaaaaataaagtttaacaatggtttaaattcagaatggattaaaatggagttgggggtggaaagtagagccattcttagtaaatataaataactgaaaagttcttctgaggagactatgtacgaagttatcattgcatctttcagtataggcagatctctccctcatataacggatgtttcttggcgcttggaatatcagataaagaccaatcaacttcataggatgtacagacctgcatatttggtgaccttaagtgtacagaacactgattccccatcctatccagagattagttttagttgcagcatggaacaattacaggacttggtggggaaacttaaagatgcttcgaaaagcctggaaagagcaactcagttgtaacttggggaagttaacgatccgcccgagtgcagaggaaaaccagaaacgccttgccttcagctgaaccaccgtttgtgcgagctggatgtccttttcagtagaaaagaattttccttttgaatttataccattcatcaattttgacactttaaaaacgtgtgaaagggttaagagggaaagatactgcccaagtatttgaatcgtttagtagtaactgtccatttatcctattttgatctttttcaagtcttctgaaaggaagtagacagtattacaccctgaataaataaggtgttgttttccacaaa

SEQ ID NO: 289199 - DNA, 1085 bp, Homo sapiens
  misc_feature (889)..(889): n is a, c, g, or t
  misc_feature (891)..(891): n is a, c, g, or t
  misc_feature (968)..(968): n is a, c, g, or t
  misc_feature (971)..(972): n is a, c, g, or t
aaggctagtagaggccggtgttgaatcggccgagaacgccttcacgcttctcctccgggcggcattccagagtctgctggacgcccaggcggacgaggccgtgttagatcatccagacttgaaacatatcgacccagtggttttaaaacattgtcatgcagcagctgcaacttacatactagaggcaggaaagcaccgagctgacaagtcaactctaagcacttatctagaagactgtaaatttgacagagagcgaatagaactgttttgcacggaatatcagaataataagaattccctagaaatcctactgggaagtataggcagatctctccctcatataacggatgtttcttggcgcttggaatatcagataaagaccaatcaacttcataggatgtacagacctgcatatttggtgaccttaagtgtacagaacactgattccccatcctatccagagattagttttagttgcagcatggaacaattacaggacttggtggggaaacttaaagatgcttcgaaaagcctggaaagagcaactcagttgtaacttggggaagttaacgatccgcccgagtgcagaggaaaaccagaaacgccttgccttcagctgaaccaccgtttgtgcgagctggatgtccttttcagtagaaaagaattttccttttgaatttataccattcatcaattttgacactttaaaaacgtgtgaaagggttaagagggaaagatactgcccaagtatttgaatcgtttagtagtaactgtccatttatcctattttgatctttttcaagtcttctgaaaggaagtagacagtattacaccctgaataaataaggtgttgttttccacaaaaaaaaaaaaaaaaaactcgagtttntntttttttttttttttttttttttttttttttttttttttttttttttttttatttattttttttttttttttttttnttnnccccccctaaatttttttttaaaagggtttccccccccttttaaaaaaccccccttgggcgggggtggaaaaaacaaatgttttctggcccagaaaggggtcccaaaaatcta

SEQ ID NO: 289200 - DNA, 2682 bp, Homo sapiens
gtacaggaagagaaaaagagagagaaagagagaagaatcaaatagacaccagaaacaatgatgaatggtcaacttcgacgtacaacgccttcacgcttctcctccgggcggcattccagagtctgctggacgcccaggcggacgaggccgtgttagggtaagccgctcggctcggctcggagctggatccgccggggtggaggggcgctcggagaagaggagccggcggagcgagaaggggaaagccccgggaagaggaagtctccgggctttgcccttcgctccggacggagtgttggggacgtggctctgccaggactcggagcagactctgagcattgttttggccccacttggcacctgcatagagccaactccacgttcctggcccggtttccctcccagtctctttgttcttttgtaaagccggtgttcaagtcttgtttgtggcctaaacatctaaggtgtttagccttgtctgaggctgcggctgttttgacagttggacttcatctggggagctccctgcaattcaagcttccagggctaggctagcaaaggtttaagggtctgtttccgaagtaattactaggtcagacagtgttgacatttgccaacttagagcatacctcaagttgctatgatcactccagcgctctagttcagcatgtttacacaggttctacgcctagaaccttaaactatgatgcacaatactttgttccgccccagttaccaggatgcgagtgtcttttaagcgatccggtcagtgactgcggaggtgcagtgtcagtatggattgaagacatattttaagaccgatcgcttttagatgattttcttaaatataaatatcccaacaattcaaatttttgttttttttctgtagtttcatgaactaaacacttgtacaaaaagtatgaaagtggaagttcttaaacgaaaatagtaaccaccacctgggttaatctcaaaaaaaaaatgactgtcaaaccctgaaagtactaatataatttggaaatttgtatcttatattctgaactcatgccctaccttctacccccttgatgtatttgttcatggagccggttaccctaaactcatcatttttaggatggaagtttattctaaaattgacacaatgtaaaatatttatcttgtttttcctttgaatttactccagtgttagaatgaccattgcattgttatattttctttgggggctataatattttttaatagtaaaaatattaaggcaaaataagttaattgaagctagtaatagtagagttcttgttgtgttctttttattgtttttcacttgatcttgttgctcatctcatttacttataattgactgtccttatagttgatgtttttaatctgtgttaaagggtttttaaacccaaattaaaatatcctttttggaacatgactgtaaagaatttattatcataggcatcactggaagttaatttattttagatcatccagacttgaaacatatcgacccagtggttttaaaacattgtcatgcagcagctgcaacttacatactagaggcaggaaagcaccgagctgacaagtcaactctaagcacttatctagaagactgtaaatttgacagagagcgaatagaactgttttgcacggaatatcagaataataagaattccctagaaatcctactgggaagaggtaggtactgtataaggtgtcaagctgaggcacttttcacttgcaggtatgaatggagagtgttggtgtgaaacaagatcttcgggatcttgacccaaagaaaaggagccaaagggcatgtcaagcaattgaagttaagctcatgtttttaaagatcgtttattgagatgattttgaaatgctcctttaccattcataatttaaaaataaagtttaacaatggtttaaattcagaatggattaaaatggagttgggggtggaaagtagagccattcttagtaaatataaataactgaaaagttcttctgaggagactatgtacgaagttatcattgcatctttcagtataggcagatctctccctcatataacggatgtttcttggcgcttggaatatcagataaaggtaaagtttaagaaacttctctagcgggggatttagggaacttcttaaaacctagagttaaaagctgttgcgtgtttgttgtgttattttagaccaatcaacttcataggatgtacagacctgcatatttggtgaccttaagtgtacagaacactgattccccatcctatccagagattagttttagttgcagcatggaacaattacaggacttggtggggaaacttaaagatgcttcgaaaagcctggaaagagcaactcagttgtaacttggggaagttaacgatccgcccgagtgcagaggaaaaccagaaacgccttgccttcagctgaaccaccgtttgtgcgagctggatgtccttttcagtagaaaagaattttccttttgaatttataccattcatcaattttgacactttaaaaacgtgtgaaagggttaagagggaaagatactgcccaagtatttgaatcgtttagtagtaactgtccatttatcctattttgatctttttcaagtcttctgaaaggaagtagacagtattacaccctgaataaataaggtgttgttttccacaaa

SEQ ID NO: 289201 - DNA, 3144 bp, Homo sapiens
gtacaggaagagaaaaagagagagaaagagagaagaatcaaatagacaccagaaacaatgatgaatggtcaacttcgacgtacaacgccttcacgcttctcctccgggcggcattccagagtctgctggacgcccaggcggacgaggccgtgttagggtaagccgctcggctcggctcggagctggatccgccggggtggaggggcgctcggagaagaggagccggcggagcgagaaggggaaagccccgggaagaggaagtctccgggctttgcccttcgctccggacggagtgttggggacgtggctctgccaggactcggagcagactctgagcattgttttggccccacttggcacctgcatagagccaactccacgttcctggcccggtttccctcccagtctctttgttcttttgtaaagccggtgttcaagtcttgtttgtggcctaaacatctaaggtgtttagccttgtctgaggctgcggctgttttgacagttggacttcatctggggagctccctgcaattcaagcttccagggctaggctagcaaaggtttaagggtctgtttccgaagtaattactaggtcagacagtgttgacatttgccaacttagagcatacctcaagttgctatgatcactccagcgctctagttcagcatgtttacacaggttctacgcctagaaccttaaactatgatgcacaatactttgttccgccccagttaccaggatgcgagtgtcttttaagcgatccggtcagtgactgcggaggtgcagtgtcagtatggattgaagacatattttaagaccgatcgcttttagatgattttcttaaatataaatatcccaacaattcaaatttttgttttttttctgtagtttcatgaactaaacacttgtacaaaaagtatgaaagtggaagttcttaaacgaaaatagtaaccaccacctgggttaatctcaaaaaaaaaatgactgtcaaaccctgaaagtactaatataatttggaaatttgtatcttatattctgaactcatgccctaccttctacccccttgatgtatttgttcatggagccggttaccctaaactcatcatttttaggatggaagtttattctaaaattgacacaatgtaaaatatttatcttgtttttcctttgaatttactccagtgttagaatgaccattgcattgttatattttctttgggggctataatattttttaatagtaaaaatattaaggcaaaataagttaattgaagctagtaatagtagagttcttgttgtgttctttttattgtttttcacttgatcttgttgctcatctcatttacttataattgactgtccttatagttgatgtttttaatctgtgttaaagggtttttaaacccaaattaaaatatcctttttggaacatgactgtaaagaatttattatcataggcatcactggaagttaatttattttagatcatccagacttgaaacatatcgacccagtggttttaaaacattgtcatgcagcagctgcaacttacatactagaggcaggaaagcaccgagctgacaagtcaactctaagcacttatctagaagactgtaaatttgacagagagcgaatagaactgttttgcacggaatatcagaataataagaattccctagaaatcctactgggaagaggtaggtactgtataaggtgtcaagctgaggcacttttcacttgcaggtatgaatggagagtgttggtgtgaaacaagatcttcgggatcttgacccaaagaaaaggagccaaagggcatgtcaagcaattgaagttaagctcatgtttttaaagatcgtttattgagatgattttgaaatgctcctttaccattcataatttaaaaataaagtttaacaatggtttaaattcagaatggattaaaatggagttgggggtggaaagtagagccattcttagtaaatataaataactgaaaagttcttctgaggagactatgtacgaagttatcattgcatctttcagtataggcagatctctccctcatataacggatgtttcttggcgcttggaatatcagataaaggtaaagtttaagaaacttctctagcgggggatttagggaacttcttaaaacctagagttaaaagctgttgcgtgtttgttgtgttattttagaccaatcaacttcataggatgtacagacctgcatatttggtgaccttaagtgtacaggtatttatagataagtcttatccaataatgaaatttataatttcattgatttaaataaacagcgtttcttgttgcgtgttttttttcctgccctagaacactgattccccatcctatccagagattagttttagttgcagcatggaacaattacaggacttggtggggaaacttaaagatgcttcgaaaagcctggaaagagcaactcagttgtaacttggggaagttaacgatccgcccgagtgcagaggaaaaccagaaacgccttgccttcagctgaaccaccgtttgtgcgagctggatgtccttttcagtagaaaagaattttccttttgaatttataccattcatcaattttgacactttaaaaacgtgtgaaagggttaagagggaaagatactgcccaagtatttgaatcgtttagtagtaactgtccatttatcctattttgatctttttcaagtcttctgaaaggaagtagacagtattacaccctgaataaataaggtgttgttttccacaaaaaaaaaaaaagaaaaagagagtaaaaaaaagcaaacacaacaataaaaacaaacaaaaacacacaaacacacaaaaccacaacaagaaacgaacacaaaaagagggcgggcgcgcagccatgcataatcaccacgcaccgccgaggacgacgcgacacaagacaagcagacaccgcacacaccattgtatcaatagaagcgcgcacgccagcacagaagcgcataatcatgacaaaaagacgaacacgcgcgcgccgaataaaacacaacaaacgacaaggagagagagcacacaacacacagcagaacatgtagagagaaaccaacacagtacgggaagaaaactactgacaaacccaaaccaac

SEQ ID NO: 289202 - DNA, 2950 bp, Homo sapiens
gtacaggaagagaaaaagagagagaaagagagaagaatcaaatagacaccagaaacaatgatgaatggtcaacttcgacgtacaacgccttcacgcttctcctccgggcggcattccagagtctgctggacgcccaggcggacgaggccgtgttagggtaagccgctcggctcggctcggagctggatccgccggggtggaggggcgctcggagaagaggagccggcggagcgagaaggggaaagccccgggaagaggaagtctccgggctttgcccttcgctccggacggagtgttggggacgtggctctgccaggactcggagcagactctgagcattgttttggccccacttggcacctgcatagagccaactccacgttcctggcccggtttccctcccagtctctttgttcttttgtaaagccggtgttcaagtcttgtttgtggcctaaacatctaaggtgtttagccttgtctgaggctgcggctgttttgacagttggacttcatctggggagctccctgcaattcaagcttccagggctaggctagcaaaggtttaagggtctgtttccgaagtaattactaggtcagacagtgttgacatttgccaacttagagcatacctcaagttgctatgatcactccagcgctctagttcagcatgtttacacaggttctacgcctagaaccttaaactatgatgcacaatactttgttccgccccagttaccaggatgcgagtgtcttttaagcgatccggtcagtgactgcggaggtgcagtgtcagtatggattgaagacatattttaagaccgatcgcttttagatgattttcttaaatataaatatcccaacaattcaaatttttgttttttttctgtagtttcatgaactaaacacttgtacaaaaagtatgaaagtggaagttcttaaacgaaaatagtaaccaccacctgggttaatctcaaaaaaaaaatgactgtcaaaccctgaaagtactaatataatttggaaatttgtatcttatattctgaactcatgccctaccttctacccccttgatgtatttgttcatggagccggttaccctaaactcatcatttttaggatggaagtttattctaaaattgacacaatgtaaaatatttatcttgtttttcctttgaatttactccagtgttagaatgaccattgcattgttatattttctttgggggctataatattttttaatagtaaaaatattaaggcaaaataagttaattgaagctagtaatagtagagttcttgttgtgttctttttattgtttttcacttgatcttgttgctcatctcatttacttataattgactgtccttatagttgatgtttttaatctgtgttaaagggtttttaaacccaaattaaaatatcctttttggaacatgactgtaaagaatttattatcataggcatcactggaagttaatttattttagatcatccagacttgaaacatatcgacccagtggttttaaaacattgtcatgcagcagctgcaacttacatactagaggcaggaaagcaccgagctgacaagtcaactctaagcacttatctagaagactgtaaatttgacagagagcgaatagaactgttttgcacggaatatcagaataataagaattccctagaaatcctactgggaagaggtaggtactgtataaggtgtcaagctgaggcacttttcacttgcaggtatgaatggagagtgttggtgtgaaacaagatcttcgggatcttgacccaaagaaaaggagccaaagggcatgtcaagcaattgaagttaagctcatgtttttaaagatcgtttattgagatgattttgaaatgctcctttaccattcataatttaaaaataaagtttaacaatggtttaaattcagaatggattaaaatggagttgggggtggaaagtagagccattcttagtaaatataaataactgaaaagttcttctgaggagactatgtacgaagttatcattgcatctttcagtataggcagatctctccctcatataacggatgtttcttggcgcttggaatatcagataaaggtaaagtttaagaaacttctctagcgggggatttagggaacttcttaaaacctagagttaaaagctgttgcgtgtttgttgtgttattttagaccaatcaacttcataggatgtacagacctgcatatttggtgaccttaagtgtacaggtatttatagataagtcttatccaataatgaaatttataatttcattgatttaaataaacagcgtttcttgttgcgtgttttttttcctgccctagaacactgattccccatcctatccagagattagttttagttgcagcatggaacaattacaggacttggtggggaaacttaaagatgcttcgaaaagcctggaaagagcaactcagttgtaacttggggaagttaacgatccgcccgagtgcagaggaaaaccagaaacgccttgccttcagctgaaccaccgtttgtgcgagctggatgtccttttcagtagaaaagaattttccttttgaatttataccattcatcaattttgacactttaaaaacgtgtgaaagggttaagagggaaagatactgcccaagtatttgaatcgtttagtagtaactgtccatttatcctattttgatctttttcaagtcttctgaaaggaagtagacagtattacaccctgaataaataaggtgttgttttccacaaaagacaacacgaaaagagcacaaagaacagcaaaaaaaaagagaacaaaacaacgaaaacgaacaaaagaaaaagaaagacacaaaaaagagggggggcgggcccacaaaaagcccccggggggcgcaccaaagaagcgacgaccccccgtacggaaaaggggccgccccaga

SEQ ID NO: 289203 - DNA, 864 bp, Homo sapiens
aaggctagtagaggccggtgttgaatcggccgagaacgccttcacgcttctcctccgggcggcattccagagtctgctggacgcccaggcggacgaggccgtgttagatcatccagacttgaaacatatcgacccagtggttttaaaacattgtcatgcagcagctgcaacttacatactagaggcaggaaagcaccgagctgacaagtcaactctaagcacttatctagaagactgtaaatttgacagagagcgaatagaactgttttgcacggaatatcagaataataagaattccctagaaatcctactgggaagtataggcagatctctccctcatataacggatgtttcttggcgcttggaatatcagataaagaccaatcaacttcataggatgtacagacctgcatatttggtgaccttaagtgtacagaacactgattccccatcctatccagagattagttttagttgcagcatggaacaattacaggacttggtggggaaacttaaagatgcttcgaaaagcctggaaagagcaactcagttgtaacttggggaagttaacgatccgcccgagtgcagaggaaaaccagaaacgccttgccttcagctgaaccaccgtttgtgcgagctggatgtccttttcagtagaaaagaattttccttttgaatttataccattcatcaattttgacactttaaaaacgtgtgaaagggttaagagggaaagatactgcccaagtatttgaatcgtttagtagtaactgtccatttatcctattttgatctttttcaagtcttctgaaaggaagtagacagtattacaccctgaataaataaggtgttgttttccacaaa

SEQ ID NO: 289204 - DNA, 1900 bp, Homo sapiens
gtacaggaagagaaaaagagagagaaagagagaagaatcaaatagacaccagaaacaatgatgaatggtcaacttcgacgtacaacgccttcacgcttctcctccgggcggcattccagagtctgctggacgcccaggcggacgaggccgtgttagggtaagccgctcggctcggctcggagctggatccgccggggtggaggggcgctcggagaagaggagccggcggagcgagaaggggaaagccccgggaagaggaagtctccgggctttgcccttcgctccggacggagtgttggggacgtggctctgccaggactcggagcagactctgagcattgttttggccccacttggcacctgcatagagccaactccacgttcctggcccggtttccctcccagtctctttgttcttttgtaaagccggtgttcaagtcttgtttgtggcctaaacatctaaggtgtttagccttgtctgaggctgcggctgttttgacagttggacttcatctggggagctccctgcaattcaagcttccagggctaggctagcaaaggtttaagggtctgtttccgaagtaattactaggtcagacagtgttgacatttgccaacttagagcatacctcaagttgctatgatcactccagcgctctagttcagcatgtttacacaggttctacgcctagaaccttaaactatgatgcacaatactttgttccgccccagttaccaggatgcgagtgtcttttaagcgatccggtcagtgactgcggaggtgcagtgtcagtatggattgaagacatattttaagaccgatcgcttttagatgattttcttaaatataaatatcccaacaattcaaatttttgttttttttctgtagtttcatgaactaaacacttgtacaaaaagtatgaaagtggaagttcttaaacgaaaatagtaaccaccacctgggttaatctcaaaaaaaaaatgactgtcaaaccctgaaagtactaatataatttggaaatttgtatcttatattctgaactcatgccctaccttctacccccttgatgtatttgttcatggagccggttaccctaaactcatcatttttaggatggaagtttattctaaaattgacacaatatcatccagacttgaaacatatcgacccagtggttttaaaacattgtcatgcagcagctgcaacttacatactagaggcaggaaagcaccgagctgacaagtcaactctaagcacttatctagaagactgtaaatttgacagagagcgaatagaactgttttgcacggaatatcagaataataagaattccctagaaatcctactgggaagtataggcagatctctccctcatataacggatgtttcttggcgcttggaatatcagataaagaccaatcaacttcataggatgtacagacctgcatatttggtgaccttaagtgtacagaacactgattccccatcctatccagagattagttttagttgcagcatggaacaattacaggacttggtggggaaacttaaagatgcttcgaaaagcctggaaagagcaactcagttgtaacttggggaagttaacgatccgcccgagtgcagaggaaaaccagaaacgccttgccttcagctgaaccaccgtttgtgcgagctggatgtccttttcagtagaaaagaattttccttttgaatttataccattcatcaattttgacactttaaaaacgtgtgaaagggttaagagggaaagatactgcccaagtatttgaatcgtttagtagtaactgtccatttatcctattttgatctttttcaagtcttctgaaaggaagtagacagtattacaccctgaataaataaggtgttgttttccacaaa

SEQ ID NO: 289205 - DNA, 834 bp, Homo sapiens
tggcggcagaggatccccgtcggatgcaaggtcctcggatgcaaggtccgcggacgccaggggacgaggccggttagatcatccagacttgaaacatatcgacccagtggttttaaaacattgtcatgcagcagctgcaacttacatactagaggcaggaaagcaccgagctgacaagtcaactctaagcacttatctagaagactgtaaatttgacagagagcgaatagaactgttttgcacggaatatcagaataataagaattccctagaaatcctactgggaagtataggcagatctctccctcatataacggatgtttcttggcgcttggaatatcagataaagaccaatcaacttcataggatgtacagacctgcatatttggtgaccttaagtgtacagaacactgattccccatcctatccagagattagttttagttgcagcatggaacaattacaggacttggtggggaaacttaaagatgcttcgaaaagcctggaaagagcaactcagttgtaacttggggaagttaacgatccgcccgagtgcagaggaaaaccagaaacgccttgccttcagctgaaccaccgtttgtgcgagctggatgtccttttcagtagaaaagaattttccttttgaatttataccattcatcaattttgacactttaaaaacgtgtgaaagggttaagagggaaagatactgcccaagtatttgaatcgtttagtagtaactgtccatttatcctattttgatctttttcaagtcttctgaaaggaagtagacagtattacaccctgaataaataaggtgttgttttccacaaa

SEQ ID NO: 289206 - DNA, 2590 bp, Homo sapiens
gtacaggaagagaaaaagagagagaaagagagaagaatcaaatagacaccagaaacaatgatgaatggtcaacttcgacgtacaacgccttcacgcttctcctccgggcggcattccagagtctgctggacgcccaggcggacgaggccgtgttagggtaagccgctcggctcggctcggagctggatccgccggggtggaggggcgctcggagaagaggagccggcggagcgagaaggggaaagccccgggaagaggaagtctccgggctttgcccttcgctccggacggagtgttggggacgtggctctgccaggactcggagcagactctgagcattgttttggccccacttggcacctgcatagagccaactccacgttcctggcccggtttccctcccagtctctttgttcttttgtaaagccggtgttcaagtcttgtttgtggcctaaacatctaaggtgtttagccttgtctgaggctgcggctgttttgacagttggacttcatctggggagctccctgcaattcaagcttccagggctaggctagcaaaggtttaagggtctgtttccgaagtaattactaggtcagacagtgttgacatttgccaacttagagcatacctcaagttgctatgatcactccagcgctctagttcagcatgtttacacaggttctacgcctagaaccttaaactatgatgcacaatactttgttccgccccagttaccaggatgcgagtgtcttttaagcgatccggtcagtgactgcggaggtgcagtgtcagtatggattgaagacatattttaagaccgatcgcttttagatgattttcttaaatataaatatcccaacaattcaaatttttgttttttttctgtagtttcatgaactaaacacttgtacaaaaagtatgaaagtggaagttcttaaacgaaaatagtaaccaccacctgggttaatctcaaaaaaaaaatgactgtcaaaccctgaaagtactaatataatttggaaatttgtatcttatattctgaactcatgccctaccttctacccccttgatgtatttgttcatggagccggttaccctaaactcatcatttttaggatggaagtttattctaaaattgacacaatgtaaaatatttatcttgtttttcctttgaatttactccagtgttagaatgaccattgcattgttatattttctttgggggctataatattttttaatagtaaaaatattaaggcaaaataagttaattgaagctagtaatagtagagttcttgttgtgttctttttattgtttttcacttgatcttgttgctcatctcatttacttataattgactgtccttatagttgatgtttttaatctgtgttaaagggtttttaaacccaaattaaaatatcctttttggaacatgactgtaaagaatttattatcataggcatcactggaagttaatttattttagatcatccagacttgaaacatatcgacccagtggttttaaaacattgtcatgcagcagctgcaacttacatactagaggcaggaaagcaccgagctgacaagtcaactctaagcacttatctagaagactgtaaatttgacagagagcgaatagaactgttttgcacggaatatcagaataataagaattccctagaaatcctactgggaagaggtaggtactgtataaggtgtcaagctgaggcacttttcacttgcaggtatgaatggagagtgttggtgtgaaacaagatcttcgggatcttgacccaaagaaaaggagccaaagggcatgtcaagcaattgaagttaagctcatgtttttaaagatcgtttattgagatgattttgaaatgctcctttaccattcataatttaaaaataaagtttaacaatggtttaaattcagaatggattaaaatggagttgggggtggaaagtagagccattcttagtaaatataaataactgaaaagttcttctgaggagactatgtacgaagttatcattgcatctttcagtataggcagatctctccctcatataacggatgtttcttggcgcttggaatatcagataaagaccaatcaacttcataggatgtacagacctgcatatttggtgaccttaagtgtacagaacactgattccccatcctatccagagattagttttagttgcagcatggaacaattacaggacttggtggggaaacttaaagatgcttcgaaaagcctggaaagagcaactcagttgtaacttggggaagttaacgatccgcccgagtgcagaggaaaaccagaaacgccttgccttcagctgaaccaccgtttgtgcgagctggatgtccttttcagtagaaaagaattttccttttgaatttataccattcatcaattttgacactttaaaaacgtgtgaaagggttaagagggaaagatactgcccaagtatttgaatcgtttagtagtaactgtccatttatcctattttgatctttttcaagtcttctgaaaggaagtagacagtattacaccctgaataaataaggtgttgttttccacaaa

SEQ ID NO: 289207 - DNA, 1364 bp, Homo sapiens
gtacaggaagagaaaaagagagagaaagagagaagaatcaaatagacaccagaaacaatgatgaatggtcaacttcgacgtacaacgccttcacgcttctcctccgggcggcattccagagtctgctggacgcccaggcggacgaggccgtgttagatcatccagacttgaaacatatcgacccagtggttttaaaacattgtcatgcagcagctgcaacttacatactagaggcaggaaagcaccgagctgacaagtcaactctaagcacttatctagaagactgtaaatttgacagagagcgaatagaactgttttgcacggaatatcaggttacttactttaaaatttttaattaacagtactatttttcttttactttgtttgtaaagatgtttttttttctttctttcttgctttcttttttctctccagaataataagaattccctagaaatcctactgggaagaggtaggtactgtataaggtgtcaagctgaggcacttttcacttgcaggtatgaatggagagtgttggtgtgaaacaagatcttcgggatcttgacccaaagaaaaggagccaaagggcatgtcaagcaattgaagttaagctcatgtttttaaagatcgtttattgagatgattttgaaatgctcctttaccattcataatttaaaaataaagtttaacaatggtttaaattcagaatggattaaaatggagttgggggtggaaagtagagccattcttagtaaatataaataactgaaaagttcttctgaggagactatgtacgaagttatcattgcatctttcagtataggcagatctctccctcatataacggatgtttcttggcgcttggaatatcagataaagaccaatcaacttcataggatgtacagacctgcatatttggtgaccttaagtgtacagaacactgattccccatcctatccagagattagttttagttgcagcatggaacaattacaggacttggtggggaaacttaaagatgcttcgaaaagcctggaaagagcaactcagttgtaacttggggaagttaacgatccgcccgagtgcagaggaaaaccagaaacgccttgccttcagctgaaccaccgtttgtgcgagctggatgtccttttcagtagaaaagaattttccttttgaatttataccattcatcaattttgacactttaaaaacgtgtgaaagggttaagagggaaagatactgcccaagtatttgaatcgtttagtagtaactgtccatttatcctattttgatctttttcaagtcttctgaaaggaagtagacagtattacaccctgaataaataaggtgttgttttccacaaa

SEQ ID NO: 289208 - DNA, 3163 bp, Homo sapiens
gtacaggaagagaaaaagagagagaaagagagaagaatcaaatagacaccagaaacaatgatgaatggtcaacttcgacgtacaacgccttcacgcttctcctccgggcggcattccagagtctgctggacgcccaggcggacgaggccgtgttagggtaagccgctcggctcggctcggagctggatccgccggggtggaggggcgctcggagaagaggagccggcggagcgagaaggggaaagccccgggaagaggaagtctccgggctttgcccttcgctccggacggagtgttggggacgtggctctgccaggactcggagcagactctgagcattgttttggccccacttggcacctgcatagagccaactccacgttcctggcccggtttccctcccagtctctttgttcttttgtaaagccggtgttcaagtcttgtttgtggcctaaacatctaaggtgtttagccttgtctgaggctgcggctgttttgacagttggacttcatctggggagctccctgcaattcaagcttccagggctaggctagcaaaggtttaagggtctgtttccgaagtaattactaggtcagacagtgttgacatttgccaacttagagcatacctcaagttgctatgatcactccagcgctctagttcagcatgtttacacaggttctacgcctagaaccttaaactatgatgcacaatactttgttccgccccagttaccaggatgcgagtgtcttttaagcgatccggtcagtgactgcggaggtgcagtgtcagtatggattgaagacatattttaagaccgatcgcttttagatgattttcttaaatataaatatcccaacaattcaaatttttgttttttttctgtagtttcatgaactaaacacttgtacaaaaagtatgaaagtggaagttcttaaacgaaaatagtaaccaccacctgggttaatctcaaaaaaaaaatgactgtcaaaccctgaaagtactaatataatttggaaatttgtatcttatattctgaactcatgccctaccttctacccccttgatgtatttgttcatggagccggttaccctaaactcatcatttttaggatggaagtttattctaaaattgacacaatgtaaaatatttatcttgtttttcctttgaatttactccagtgttagaatgaccattgcattgttatattttctttgggggctataatattttttaatagtaaaaatattaaggcaaaataagttaattgaagctagtaatagtagagttcttgttgtgttctttttattgtttttcacttgatcttgttgctcatctcatttacttataattgactgtccttatagttgatgtttttaatctgtgttaaagggtttttaaacccaaattaaaatatcctttttggaacatgactgtaaagaatttattatcataggcatcactggaagttaatttattttagatcatccagacttgaaacatatcgacccagtggttttaaaacattgtcatgcagcagctgcaacttacatactagaggcaggaaagcaccgagctgacaagtcaactctaagcacttatctagaagactgtaaatttgacagagagcgaatagaactgttttgcacggaatatcagaataataagaattccctagaaatcctactgggaagtataggcagatctctccctcatataacggatgtttcttggcgcttggaatatcagataaagaccaatcaacttcataggatgtacagacctgcatatttggtgaccttaagtgtacagaacactgattccccatcctatccagagattagttttagttgcagcatggaacaattacaggtacagtattaggatctataaatattcctgtctttttataaatgtttacttgagagttatactcttgggaagttcaaaagaaaattaatctaaccatttgtcagcagataatgaagattggttaaggatttaatgggaaaggggcatcaaaagtagtattttaagataggcttcacttgaaattaagatgttattaatagagaattggtctgtatttgctgttcttgctgattgaaataaacttctgtagtgtttagtgtaaatttcttctattcatgatgagtttggtccaataagataaacaaaattaagagcatggctttgaaaatgtctttgctttcagaaattgaattaaactgtcaaaattggattttgaaactttttaaatgactttataaagggggaagtatacataacattctaaaactgtttatattgcccatttaagactgggaaaattcaaaactacatttattagtggatatgacaacgaatttatttcatagtttttaaaaaatgaagctcattactggaaatttaagtgaaattgaatttttcaaaggcatcttctgcagagtcgttttaatgtaactatgaatcaaactttcaactttcagaaaatgtgtatacagcataacctttgttagataacttgagaaaattcagatgtatctgggcggttaaggatccggttagaaatcatgtttcagtgtgagggcaaataaccgatttgaacatgaggtatttccgaggaaacgctttttttgcccgatagtagtttgtcaaaagttaaaatcttgttgaattttaaacttgtttgggaaggtgtgtcctgattttttttcttgcatctttcttgagcttggatacttctttccatgttttatcctaaaaacgtggtattgtatacacgtcttttaggacttggtggggaaacttaaagatgcttcgaaaagcctggaaagagcaactcagttgtaacttggggaagttaacgatccgcccgagtgcagaggaaaaccagaaacgccttgccttcagctgaaccaccgtttgtgcgagctggatgtccttttcagtagaaaagaattttccttttgaatttataccattcatcaattttgacactttaaaaacgtgtgaaagggttaagagggaaagatactgcccaagtatttgaatcgtttagtagtaactgtccatttatcctattttgatctttttcaagtcttctgaaaggaagtagacagtattacaccctgaataaataaggtgttgttttccacaaa

SEQ ID NO: 289209 - DNA, 443 bp, Homo sapiens
gattatttagtttcctgcttggggaaatgttcacacccccttgtggatacattgtccagcccagagtttgtcctccctggatatgttttgaattaatgacggccgcacctcctttcctgtatttatttggaattgcctggtggaaggaggactctgctgcactcactgactgtgtgatctttggtaaatatcttaccctctctgggcttagtttccctagtggtaaagtggaaatagtgataactatcttagatagctgttgtgatgcccacatgagatagcatctggctttacccttccctcgtctggcaataacggttaccttgcaggattggcagaagccttagagtatggtgctttgcagatgttcaccgtgtgattaatgtggttgagttccatgagagaaatggtctactgtctccctttcaggctgcccttctccg

SEQ ID NO: 289210 - DNA, 819 bp, Homo sapiens
gctgcagccgctggcccgaaaatgctgctcgggcgagcaggggtcaggcgggaaaagaagactccaaatccactctctgctcgcccccagggcaatgctgccaggagagggagtgggttcccccgcaggctatcccaccgatggggctgagagcttaatttggggttttatttgaattggagacattgttccctcttcgctcctctaccccataaaattccctacaaatgcaaaaattcgagatagaagaagccgtccctgaaagtaagttctgaaggattcctttcatgcggtgaaggaacaacaacaatattcaacttcaccttgttgctgtctaacattcaccggaaacctctccataaacaaggagaaacgaatgcacacgcatttttgctaagaagcccgggattaagatttaaggatacaagctgaaagaaaaaatgaaaaatgcttctccgcgcgtcaatcgaggggtggatgcgccacgcagctgagcccagctcacagccacgcgtaagaccaaaagctgccatgggttctgcgcgcggagacctcagagccgaagagagaagtccccgcgtcagaaacgctgcggatgccaggtcttgaaaatgctgacttctgaggctaagaattatttcaaagacaaaaagaaaagactggtgaggaggccttccggtgcaagggcgcctatccgctaattttggatggggaagtagggattattcgtttaaattcaatcgcgagcaccaagtcggactggccggggatggagaagggcaacccccacctttagaaaaataaaagatctcgaaggcc

SEQ ID NO: 289211 - DNA, 756 bp, Homo sapiens
gctgcagccgctggcccgaaaatgctgctcgggcgagcaggggtcaggcgggaaaagaagactccaaatccactctctgctcgcccccagggcaatgctgccaggagagggagtgggttcccccgcaggctatcccaccgatggggctgagagcttaatttggggttttatttgaattggagacattgttccctcttcgctcctctaccccataaaattccctacaaatgcaaaaattcgagatagaagaagccgtccctgaaattgctgtctaacattcaccggaaacctctccataaacaaggagaaacgaatgcacacgcatttttgctaagaagcccgggattaagatttaaggatacaagctgaaagaaaaaatgaaaaatgcttctccgcgcgtcaatcgaggggtggatgcgccacgcagctgagcccagctcacagccacgcgtaagaccaaaagctgccatgggttctgcgcgcggagacctcagagccgaagagagaagtccccgcgtcagaaacgctgcggatgccaggtcttgaaaatgctgacttctgaggctaagaattatttcaaagacaaaaagaaaagactggtgaggaggccttccggtgcaagggcgcctatccgctaattttggatggggaagtagggattattcgtttaaattcaatcgcgagcaccaagtcggactggccggggatggagaagggcaacccccacctttagaaaaataaaagatctcgaaggcc

SEQ ID NO: 289212 - DNA, 292 bp, Homo sapiens
aaaaatatctttatttctggattggctttgattgctgtgattttaggacacggactatagttgtagatgttgccctggctgcgtatcaacaatgacttcttttccttgatgtttcttcacaggaaggatcagaatgttctctctccagtcaactgctggaatctcctcttaaaccaggtgaagcgggaaagcagggaccataccaccctgagtgacatctacctgaataatatcattcctcgatttgtacaagtcagcgaggactcaggaagactctttaaaaaggtacaga

SEQ ID NO: 289213 - DNA, 1337 bp, Homo sapiens
  misc_feature (40)..(40): n is a, c, g, or t
tacctcttccaaattcgaattgtgaattgatagatccacnggaaaatccaaccacaaaaaaccgcgaagcacgcccagccctcccccggcaccccgaaaagcacccactccctcccggggacacagctgggcgcgtccacacccccgcagccccacaccatgttgtgcggaaggacttccactccccgcctgtgtcgttgatgtcagaccccaggccagcctccgggcgctgcagttctcccggctaatgctgaggctgcggctccggctctagcacaggcaccagccgccgccgcacccggcctcagcgcccaccgtctgcatgtgcccgccgtagccgtctgcccagcccgcagcccgcgctccacggagcgctggagaccaccgtggggggccccttctgccctcgagagaagcggtcttggaggtattgatttaggtggttggattttttccgtggatctatcaattcacaattcgaatttggaagaaagaaggaaaacatgacgtctccagccaaattcaaaaaggataaggagatcatagcagagtacgatactcaggtcaaagagatccgtgctcagctcacagagcagatgaaatgcctggaccagcagtgtgagcttcgggtgcaactgttgcaggacctccaggacttcttccgaaagaaggcagagattgagatggactactcccgcaacctggagaagctggcagaacgcttcctggccaagacacgcagcaccaaggaccagcaattcaagtaggggctctgtggctattactctctgagaccttggaatatggggtccagggtggaggggggcagggtatgccacttagatccagctgaattcaggagcccctggcttcagattggttgaaagccctcaaggacttctcattttccagatcagtcttatgtgcaattcaacatttcgtagagatgagagtagatgatgaaccatgctaataataacagcaaacttgtttatagctctgttgccaggcatgctactaagggctttacatatatgttagtttgcttaatcccaacaactccatatgatggttattgttattatccccaatttatagatgaggaaactgaggcatatctctctcacacacacacacacacacacacacacacactcacactcacacacccctagtaaatagtagagctggaattcaaacccacagtctggctgcagggtctatatttttaaccatttcaccaaactgtctttaattagaagaaataatgatgttgaggccattatatctaaatccctgtctaggtagctgctaaggtctatttcttctacatttag

SEQ ID NO: 289214 - DNA, 1069 bp, Homo sapiens
cagatctgcgtagaaacgggtggcggggaagagaggggaggagagctctgagtgggaagcggagccgggggcctgggacccgtcgcgtcagagccaggcaagtgaaccggagcaaacgacttccgatccagtctgcgctgttgcggctcccgtttgggatttgatttgcagcatctttgagcctctacgacaaaaaaccgcgaagcacgcccagccctcccccggcaccccgaaaagcacccactccctcccggggacacagctgggcgcgtccacacccccgcagccccacaccatgttgtgcggaaggacttccactccccgcctgtgtcgttgatgtcagaccccaggccagcctccgggcgctgcagttctcccggctaatgctgaggctgcggctccggctctagcacaggcaccagccgccgccgcacccggcctcagcgcccaccgtctgcatgtgcccgccgtagccgtctgcccagcccgcagcccgcgctccacggagcgctggagaccaccgtggggggccccttctgccctcgagagaagcggtcttggaggtattgatttaggtggttggattttttccgtggatctatcaattcacaattcgaatttggaagaaagaaggaaaacatgacgtctccagccaaattcaaaaaggataaggagatcatagcagagtacgatactcaggtcaaagagatccgtgctcagctcacagagcagatgaaatgcctggaccagcagtgtgagcttcgggtgcaactgttgcaggacctccaggacttcttccgaaagaaggcagagattgagatggactactcccgcaacctggagaagctggcagaacgcttcctggccaagacacgcagcaccaaggaccagcaattcaagaaggatcagaatgttctctctccagtcaactgctggaatctcctcttaaaccaggtgaagcgggaaagcagggaccataccaccctgagtgacatctacctgaataatatcattcctcgatttgtacaagtcagcgaggactcaggaagactctttaaaaaggtacaga

SEQ ID NO: 289215 - DNA, 1473 bp, Homo sapiens
cagatctgcgtagaaacgggtggcggggaagagaggggaggagagctctgagtgggaagcggagccgggggcctgggacccgtcgcgtcagagccaggcaagtgaaccggagcaaacgacttccgatccagtctgcgctgttgcggctcccgtttgggatttgatttgcagcatctttgagcctctacgacaaaaaaccgcgaagcacgcccagccctcccccggcaccccgaaaagcacccactccctcccggggacacagctgggcgcgtccacacccccgcagccccacaccatgttgtgcggaaggacttccactccccgcctgtgtcgttgatgtcagaccccaggccagcctccgggcgctgcagttctcccggctaatgctgaggctgcggctccggctctagcacaggcaccagccgccgccgcacccggcctcagcgcccaccgtctgcatgtgcccgccgtagccgtctgcccagcccgcagcccgcgctccacggagcgctggagaccaccgtggggggccccttctgccctcgagagaagcggtcttggaggtattgatttaggtggttggattttttccgtggatctatcaattcacaattcgaatttggaagaaagaaggaaaacatgacgtctccagccaaattcaaaaaggataaggagatcatagcagagtacgatactcaggtcaaagagatccgtgctcagctcacagagcagatgaaatgcctggaccagcagtgtgagcttcgggtgcaactgttgcaggacctccaggacttcttccgaaagaaggcagagattgagatggactactcccgcaacctggagaagctggcagaacgcttcctggccaagacacgcagcaccaaggaccagcaattcaagtaggggctctgtggctattactctctgagaccttggaatatggggtccagggtggaggggggcagggtatgccacttagatccagctgaattcaggagcccctggcttcagattggttgaaagccctcaaggacttctcattttccagatcagtcttatgtgcaattcaacatttcgtagagatgagagtagatgatgaaccatgctaataataacagcaaacttgtttatagctctgttgccaggcatgctactaagggctttacatatatgttagtttgcttaatcccaacaactccatatgatggttattgttattatccccaatttatagatgaggaaactgaggcatatctctctcacacacacacacacacacacacacacacactcacactcacacacccctagtaaatagtagagctggaattcaaacccacagtctggctgcagggtctatatttttaaccatttcaccaaactgtctttaattagaagaaataatgatgttgaggccattatatctaaatccctgtctaggtagctgctaaggtctatttcttctacatttag

SEQ ID NO: 289216 - DNA, 396 bp, Homo sapiens
gaaagtgagtccttggaaaagcaaggggtcactgtggctggggagagcagagattgaacgaggaggtggtactagggccacagtgtgaggaatgatgagggtctgataggtggcaatgcagggagaaggtgttgtttggggagggaactgcctgggcaaaggtaagatggcgggaaagcttgtctggggagaaatgggggaggtaagggcgccaggggccagcagagaggaaaagagaagaggtggatagaggccaaaggctgtagactggaattaacgggtggatcttcactcaagccctgggatacagaagcctgaagttagtggttatcaggcatctagggcctcacatcttctgtcgtcttaaattgtgccgtgagaatcttcatggacgct

SEQ ID NO: 289217 - DNA, 1218 bp, Homo sapiens
gctctggagattgcatcccacgcaggcagcccccttccgtacaagagaggctggcggttacctttcttggggagacgcgtccgactgcttcattgtgggggcctcaggagcggaggatcgggtcccgcccgaggtgacgcgtaaacccagactctcagcaacgcgggtaggaaggacccttgaagttccgcggcgaccacggaactgtgccttcgatctccacagtcggctgaaaccagcagcccaggacaagtggaccagccagcaagacccagaccatccaaaccggctgatcctacgacaggacccagatgccagtgaaagtgaccacagccctgctctagtcaccccggaagctgaccagtctacgcacggccgaagcttcgtcaaggaagtaaatgtagttagaaatcttaagcccagtaattttccttgtcatcttaattgttttactattaacctgtcgctttgctcaaccccctcctctgggcaaacatctcttgtccatcctaggtacaaacatgctactcttccctttgttcttgctgctctcgctagatctatgtcagaaggagggatatgcggagagtttaatttaactaattgttgcctaaaaatcgatgacaatgaggaggacgtcatgaattaattgcgagaatgcgagacttagctcatgttccaacacaaacctggaaaccggaatggtctccaggttccccccgcccccccccgtggttggttttcgtccctcgggggatttaaaaccttactaggagtagttctggccatactgggagtccgcctcgtactcttgtctcttcccctccttgtcaagaatatcgacaaagccagagacgctcgtgtggacaggccgagtaccaccgagctcatcccataactacgtgtccacccctgccaggaaaagagctacttccccctgtagaagtaaataaaaaatagtgatgctttctattaaaccttatttataaaaagcatcaaggagggaataaagcggaaattgaagaaacggaaaatacctttttcgtataaagctgactcgccccaaagccagcaacaggcaaagcccccaggcaaggccttgaaaacaccatttaaaaagccagaaccccaaggaatgccgcccagacgcctcccagcactgcactccccccgtgcaaagataagaaccagactcctccttccgtttcccgctccccg

SEQ ID NO: 289218 - DNA, 1269 bp, Homo sapiens
gtggctcacgtctgtactcccagagccttgggaggtcgaggcgggaagatcgcttgagcccgggagctcgagaccagacgcggcaacatggcgagacgcacatctctgcctttaaaaatgagaggctggcggttacctttcttggggagacgcgtccgactgcttcattgtgggggcctcaggagcggaggatcgggtcccgcccgaggtgacgcgtaaacccagactctcagcaacgcgggtaggaaggacccttgaagttccgcggcgaccacgtcggctgaaaccagcagcccaggacaagtggaccagccagcaagacccagaccatccaaaccggctgatcctacgacaggacccagatgccagtgaaagtgaccacagccctgctctagtcaccccggaagctgaccagtctacgcacggccgaagcttcgtcaaggaagtaaatgtagttagaaatcttaagcccagtaattttccttgtcatcttaattgttttactattaacctgtcgctttgctcaaccccctcctctgggcaaacatctcttgtccatcctaggtacaaacatgctactcttccctttgttcttgctgctctcgctagatctatgtcagaaggagggatatgcggagagtttaatttaactaattgttgcctaaaaatcgatgacaatgaggaggacgtcatgaattaattgcgagaatgcgagacttagctcatgttccaacacaaacctggaaaccggaatggtctccaggttccccccgcccccccccgtggttggttttcgtccctcgggggatttaaaaccttactaggagtagttctggccatactgggagtccgcctcgtactcttgtctcttcccctccttgtcaagaatatcgacaaagccagagacgctcgtgtggacaggccgagtaccaccgagctcatcccataactacgtgtccacccctgccaggaaaagagctacttccccctgtagaagtaaataaaaaatagtgatgctttctattaaaccttatttataaaaagcatcaaggagggaataaagcggaaattgaagaaacggaaaatacctttttcgtataaagctgactcgccccaaagccagcaacaggcaaagcccccaggcaaggccttgaaaacaccatttaaaaagccagaaccccaaggaatgccgcccagacgcctcccagcactgcactccccccgtgcaaagataagaaccagactcctccttccgtttcccgctccccg

SEQ ID NO: 289219 - DNA, 1195 bp, Homo sapiens
catgatacgaatcgaggctataccccctaagcggtcatggcgacgggcactgggcggacgcgtttcgaggaccccgggcgtccgactgcttcattgtgggggcctcaggagcggaggatcgggtcccgcccgaggtgacgcgtaaacccagactctcagcaacgcgggtaggaaggacccttgaagttccgcggcgaccacgtcggctgaaaccagcagcccaggacaagtggaccagccagcaagacccagaccatccaaaccggctgatcctacgacaggacccagatgccagtgaaagtgaccacagccctgctctagtcaccccggaagctgaccagtctacgcacggccgaagcttcgtcaaggaagtaaatgtagttagaaatcttaagcccagtaattttccttgtcatcttaattgttttactattaacctgtcgctttgctcaaccccctcctctgggcaaacatctcttgtccatcctaggtacaaacatgctactcttccctttgttcttgctgctctcgctagatctatgtcagaaggagggatatgcggagagtttaatttaactaattgttgcctaaaaatcgatgacaatgaggaggacgtcatgaattaattgcgagaatgcgagacttagctcatgttccaacacaaacctggaaaccggaatggtctccaggttccccccgcccccccccgtggttggttttcgtccctcgggggatttaaaaccttactaggagtagttctggccatactgggagtccgcctcgtactcttgtctcttcccctccttgtcaagaatatcgacaaagccagagacgctcgtgtggacaggccgagtaccaccgagctcatcccataactacgtgtccacccctgccaggaaaagagctacttccccctgtagaagtaaataaaaaatagtgatgctttctattaaaccttatttataaaaagcatcaaggagggaataaagcggaaattgaagaaacggaaaatacctttttcgtataaagctgactcgccccaaagccagcaacaggcaaagcccccaggcaaggccttgaaaacaccatttaaaaagccagaaccccaaggaatgccgcccagacgcctcccagcactgcactccccccgtgcaaagataagaaccagactcctccttccgtttcccgctccccg

SEQ ID NO: 289220 - DNA, 1318 bp, Homo sapiens
gctctggagattgcatcccacgcaggcagcccccttccgtacaagtaaagtggtctcgctgagaaattttctaagtgctggtttctctttgcgggaccgactcgccgcccccaaatatcccatttggatcccattctgtttcaggagaggctggcggttacctttcttggggagacgcgtccgactgcttcattgtgggggcctcaggagcggaggatcgggtcccgcccgaggtgacgcgtaaacccagactctcagcaacgcgggtaggaaggacccttgaagttccgcggcgaccacggaactgtgccttcgatctccacagtcggctgaaaccagcagcccaggacaagtggaccagccagcaagacccagaccatccaaaccggctgatcctacgacaggacccagatgccagtgaaagtgaccacagccctgctctagtcaccccggaagctgaccagtctacgcacggccgaagcttcgtcaaggaagtaaatgtagttagaaatcttaagcccagtaattttccttgtcatcttaattgttttactattaacctgtcgctttgctcaaccccctcctctgggcaaacatctcttgtccatcctaggtacaaacatgctactcttccctttgttcttgctgctctcgctagatctatgtcagaaggagggatatgcggagagtttaatttaactaattgttgcctaaaaatcgatgacaatgaggaggacgtcatgaattaattgcgagaatgcgagacttagctcatgttccaacacaaacctggaaaccggaatggtctccaggttccccccgcccccccccgtggttggttttcgtccctcgggggatttaaaaccttactaggagtagttctggccatactgggagtccgcctcgtactcttgtctcttcccctccttgtcaagaatatcgacaaagccagagacgctcgtgtggacaggccgagtaccaccgagctcatcccataactacgtgtccacccctgccaggaaaagagctacttccccctgtagaagtaaataaaaaatagtgatgctttctattaaaccttatttataaaaagcatcaaggagggaataaagcggaaattgaagaaacggaaaatacctttttcgtataaagctgactcgccccaaagccagcaacaggcaaagcccccaggcaaggccttgaaaacaccatttaaaaagccagaaccccaaggaatgccgcccagacgcctcccagcactgcactccccccgtgcaaagataagaaccagactcctccttccgtttcccgctccccg

SEQ ID NO: 289221 - DNA, 1194 bp, Homo sapiens
gctctggagattgcatcccacgcaggcagcccccttccgtacaagagaggctggcggttacctttcttggggagacgcgtccgactgcttcattgtgggggcctcaggagcggaggatcgggtcccgcccgaggtgacgcgtaaacccagactctcagcaacgcgggtaggaaggacccttgaagttccgcggcgaccacgtcggctgaaaccagcagcccaggacaagtggaccagccagcaagacccagaccatccaaaccggctgatcctacgacaggacccagatgccagtgaaagtgaccacagccctgctctagtcaccccggaagctgaccagtctacgcacggccgaagcttcgtcaaggaagtaaatgtagttagaaatcttaagcccagtaattttccttgtcatcttaattgttttactattaacctgtcgctttgctcaaccccctcctctgggcaaacatctcttgtccatcctaggtacaaacatgctactcttccctttgttcttgctgctctcgctagatctatgtcagaaggagggatatgcggagagtttaatttaactaattgttgcctaaaaatcgatgacaatgaggaggacgtcatgaattaattgcgagaatgcgagacttagctcatgttccaacacaaacctggaaaccggaatggtctccaggttccccccgcccccccccgtggttggttttcgtccctcgggggatttaaaaccttactaggagtagttctggccatactgggagtccgcctcgtactcttgtctcttcccctccttgtcaagaatatcgacaaagccagagacgctcgtgtggacaggccgagtaccaccgagctcatcccataactacgtgtccacccctgccaggaaaagagctacttccccctgtagaagtaaataaaaaatagtgatgctttctattaaaccttatttataaaaagcatcaaggagggaataaagcggaaattgaagaaacggaaaatacctttttcgtataaagctgactcgccccaaagccagcaacaggcaaagcccccaggcaaggccttgaaaacaccatttaaaaagccagaaccccaaggaatgccgcccagacgcctcccagcactgcactccccccgtgcaaagataagaaccagactcctccttccgtttcccgctccccg

SEQ ID NO: 289222 - DNA, 1206 bp, Homo sapiens
agttttagccaaccgggatcagcttagattgtgggcgtccaaccccagccaacagggagaggctggcggttacctttcttggggagacgcgtccgactgcttcattgtgggggcctcaggagcggaggatcgggtcccgcccgaggtgacgcgtaaacccagactctcagcaacgcgggtaggaaggacccttgaagttccgcggcgaccacgtcggctgaaaccagcagcccaggacaagtggaccagccagcaagacccagaccatccaaaccggctgatcctacgacaggacccagatgccagtgaaagtgaccacagccctgctctagtcaccccggaagctgaccagtctacgcacggccgaagcttcgtcaaggaagtaaatgtagttagaaatcttaagcccagtaattttccttgtcatcttaattgttttactattaacctgtcgctttgctcaaccccctcctctgggcaaacatctcttgtccatcctaggtacaaacatgctactcttccctttgttcttgctgctctcgctagatctatgtcagaaggagggatatgcggagagtttaatttaactaattgttgcctaaaaatcgatgacaatgaggaggacgtcatgaattaattgcgagaatgcgagacttagctcatgttccaacacaaacctggaaaccggaatggtctccaggttccccccgcccccccccgtggttggttttcgtccctcgggggatttaaaaccttactaggagtagttctggccatactgggagtccgcctcgtactcttgtctcttcccctccttgtcaagaatatcgacaaagccagagacgctcgtgtggacaggccgagtaccaccgagctcatcccataactacgtgtccacccctgccaggaaaagagctacttccccctgtagaagtaaataaaaaatagtgatgctttctattaaaccttatttataaaaagcatcaaggagggaataaagcggaaattgaagaaacggaaaatacctttttcgtataaagctgactcgccccaaagccagcaacaggcaaagcccccaggcaaggccttgaaaacaccatttaaaaagccagaaccccaaggaatgccgcccagacgcctcccagcactgcactccccccgtgcaaagataagaaccagactcctccttccgtttcccgctccccg

SEQ ID NO: 289223 - DNA, 480 bp, Homo sapiens
ggagaaagtcttgctctgtcacccaggttagagtgcagtggcacaatcacggctcacagaagccttgacttcccgggcttaggtgattctcccacctcagcatcctgagcagctgggaccacaggaatacaccgcacaccaccatgcccaactaattttctttttgtattttttgtagagatgggatttcaccatgatgtccaggctggtctagaactcctgagctcaagcaatccaccctccttggcctcccaaagtgctaatattacaggcgtcagctaccgcatatggccaattttctaaattcttaaatgcgattctttggcagtgttgttttgtgaccaaaaataaaatggttcctagaaataaacacatcacctatttcataataaaaaggaggaataataattcgatctacagatacttgtgattctcatctaccccgaaaacgagatcattgcatacattaaatagcatatc

SEQ ID NO: 289224 - DNA, 480 bp, Homo sapiens
aagtcccagctcctttgaatctgaggacacccttctccatgaacaatgcatcagcaagtctttcagattctgtctccaaagtcaatcacaaatccatcttcttctctccatctccagtgccactcctttgaaggttatgattacctctggcttagactattacaacacctcccaaatgagatgggatttcaccatgatgtccaggctggtctagaactcctgagctcaagcaatccaccctccttggcctcccaaagtgctaatattacaggcgtcagctaccgcatatggccaattttctaaattcttaaatgcgattctttggcagtgttgttttgtgaccaaaaataaaatggttcctagaaataaacacatcacctatttcataataaaaaggaggaataataattcgatctacagatacttgtgattctcatctaccccgaaaacgagatcattgcatacattaaatagcatatc

SEQ ID NO: 289225 - DNA, 1508 bp, Homo sapiens
  misc_feature (676)..(676): n is a, c, g, or t
cttgtcgccctggacctcacagctgctggaagagcacacagagcgagcaccccgcatcagccaggagtttggggagcggatggcccactgctgcctaggcgggctggcagagttcctgcagagcttccagcagcgtgtggagcgattccatgagaacccagcagtccgggagatgctacctgacacctatatcagcaagaccatcgccctggtcaactgcggccccccactgagagctctggccgagcgcctggcccgggtggggcccccagaaagcgagccggcccgggaagcatctgctagtgctctggaccatgtgacccggctctgccaccgtgtcgtggccaacctgctgttccaggagctgcagccacacttcaacaagctgatgcgccggaagtggctgagcagcccggaggccctggatggcatcgtgggcacgctgggtgcccaggccctggccctgcgcagaatgcaggacgagccttaccaggcgctggtagccgagctacaccggcgggcgctggtcgagtacgtgcggcccctgctccgtgggcgcctgcgctgcagctcggcgcggacccgcagccgcgtggccggcaggctccgggaggacgcggcgcaactgcagaggctgttccggcggctggagtcccaggcctcgtggctggatgcngtggtgccccatttggctgaagtcatgcagctggaagacacgcccagcatccaggtggaggtgggagtgttggtgcgcgactacccagacatcaggcagaagcacgtggcagccctcctcgacatccgtggcctgcgcaacacagccgcccgccaggagatcctggccgtggcccgggacctggaactctctgaggagggagccctgtcaccccctcgggaccgtgccttctttgcagacatccctgtgccccgcccatctttctgtctcagcctccctctcttcctgggccgcctccccctctcccggctggccaggcccagtttggcctgtctgcctcggccccggcctccgtctctagcgcgacctcgggcccagcgctgagggtcacccaaccgccggccttagtgaccccatctatgctgctgacaagccaacctcccgtacggcgcccctcctgactccctgcctgggaccacacacccctgggatagaaagacccttagatgtcttttcacccaaccccaaactccctgtacagaagggaaacaaacgccaggcacggtggctcatgcctgtaatcccaacactttgggaggctgaggccggaggattgcttgagcccaggagttcaagaccagcctgggcaacatagtgagacctgccccctatctctacaaaaaataaaaaattagctgggcacggtggtgtgtgcctgtagtcccagctactggtgaggctgaggctggaggatcactggagttcgaggctgcagtgagctatgactgtgccactgcactccagcctggtcaacaaagcaagaccctttctc

SEQ ID NO: 289226 - DNA, 1396 bp, Homo sapiens
  misc_feature (564)..(564): n is a, c, g, or t
ggcacgagggtggagtgaaagttacaccgtggcggattgacttctaaggactcttggtacatgaggaagaaacccggaaggggaagaggaaagcaaaggcgtcaggaatggttcttcctcagagctctggccgagcgcctggcccgggtggggcccccagaaagcgagccggcccgggaagcatctgctagtgctctggaccatgtgacccggctctgccaccgtgtcgtggccaacctgctgttccaggagctgcagccacacttcaacaagctgatgcgccggaagtggctgagcagcccggaggccctggatggcatcgtgggcacgctgggtgcccaggccctggccctgcgcagaatgcaggacgagccttaccaggcgctggtagccgagctacaccggcgggcgctggtcgagtacgtgcggcccctgctccgtgggcgcctgcgctgcagctcggcgcggacccgcagccgcgtggccggcaggctccgggaggacgcggcgcaactgcagaggctgttccggcggctggagtcccaggcctcgtggctggatgcngtggtgccccatttggctgaagtcatgcagctggaagacacgcccagcatccaggtggaggtgggagtgttggtgcgcgactacccagacatcaggcagaagcacgtggcagccctcctcgacatccgtggcctgcgcaacacagccgcccgccaggagatcctggccgtggcccgggacctggaactctctgaggagggagccctgtcaccccctcgggaccgtgccttctttgcagacatccctgtgccccgcccatctttctgtctcagcctccctctcttcctgggccgcctccccctctcccggctggccaggcccagtttggcctgtctgcctcggccccggcctccgtctctagcgcgacctcgggcccagcgctgagggtcacccaaccgccggccttagtgaccccatctatgctgctgacaagccaacctcccgtacggcgcccctcctgactccctgcctgggaccacacacccctgggatagaaagacccttagatgtcttttcacccaaccccaaactccctgtacagaagggaaacaaacgccaggcacggtggctcatgcctgtaatcccaacactttgggaggctgaggccggaggattgcttgagcccaggagttcaagaccagcctgggcaacatagtgagacctgccccctatctctacaaaaaataaaaaattagctgggcacggtggtgtgtgcctgtagtcccagctactggtgaggctgaggctggaggatcactggagttcgaggctgcagtgagctatgactgtgccactgcactccagcctggtcaacaaagcaagaccctttctc

SEQ ID NO: 289227 - DNA, 782 bp, Homo sapiens
gaaagctcagggcccttgttcactagaagcaaggagtcccctgacccccttcttcaaaacatactcttcagtctttgtctttattcccgccttggtcctcctttgttcagtccagcaaggtccacagcaaagtgctgcccgaaaacagggtcttgaggacatgaacaaagaaggtctgctggagcagaggaagtgaaattgaccagatgaacagggaccctgggatgaatctgctggcagtggatataaggggcaaagccaggatctgaacccagacggcccggctccggagtccatgctcctgagcaccacacagtgctgctcccttggaaattcagaaaggctggacccagtgctccagggcagcaggaggagggcacatgccaaggatgtcactggaaagggagcagaggtgaggctgtgaagcctttatacccaagagaaactcagctggacaccagtaacagaagtgctattcattgaaaagagcaaagcaagagcgctgaccccttacggacaggatgaaacaaaacaagctctgcaagtctgcctcctgctcagcatacaggcttgttgccccactgggccatcttgttgttgatgggcatcttgcagaactgatcagacttgaatagccatggagctcctaaaaagaatgggacctttcacttgacctcccttctctcccttgcctactgcccctgagcgagtgcttcagctacagtctgggagccgaagatgcctgtgtttgatgcctccagcaccctgtctctgcatcttga

SEQ ID NO: 289228 - DNA, 484 bp, Homo sapiens
tacccactctcagggcttgggcatgaacctacagcccttgaactcagttggggagtagggaaatgccagtatcgcagcgattcaattcatatcttgatgattctccacatatcctttttcccttttagcctttatacccaagagaaactcagctggacaccagtaacagaagtgctattcattgaaaagagcaaagcaagagcgctgaccccttacggacaggatgaaacaaaacaagctctgcaagtctgcctcctgctcagcatacaggcttgttgccccactgggccatcttgttgttgatgggcatcttgcagaactgatcagacttgaatagccatggagctcctaaaaagaatgggacctttcacttgacctcccttctctcccttgcctactgcccctgagcgagtgcttcagctacagtctgggagccgaagatgcctgtgtttgatgcctccagcaccctgtctctgcatcttga

SEQ ID NO: 289229 - DNA, 1992 bp, Homo sapiens
cactacgcccggctaatttttttgtattttttgtagagatggggtttcaccgtgttagccaggatgatctcggtctcctgacctcgtgatccgcccgtctcggcctcccaaagtgctgggattacaggcatgagccaccgcgcccagctgttttgcatttttgtatgatttccatccttcactttatgaaggacattatttatcacattaatgatcaaatatatttatcacaataatgataatagaaaattaaatatttacatttttgtatgtgtgtcttttgggagaaagatacatattctgcattatcttactagtatgaagccttctttatctatgtctgctgattgtgtacacctcggtgccagacataaggaaaaccagcataggccccagagcctgatgtgtaagttctggtcccagatccatcgaaggccatttaaagtctctgaaaatccactctctcatatgtaaaatgtgatcattaagaattgttatgcctacctcataaagttttggttagaatcacatgagatacatgtgaaaatgctttgtcaactaagaacgtgttacacaaagacaagatatgtattattatggttattttctatttctctagtttgactagtttcattctttgcaggacattttcatttttagatgttcttagctattttgcctgtggtgatcagaaggcagatgaaccatggggttctatttctctgactctagatccttttaaaaagctggtgacctttttgtctttcttttcttgttttatcgtttttttttttttttttttgaaaagtggaaaaatattctcagggtatattgaattgattgagcctcccttggatttctttgacttatttgacttactctatatcttgcttctttactcctctaatttaacattttcctctaaaccatcatcagaatgtttttgcactatcattattcatttttttcagttacagaatgtgggaaaaaggagagaagggggctgttgaagaggaggcttcatagaataatgaatctggaagaattcaaggagaaagcgtgtttgttgtggttcacgttaaaagagagagatcgttgcagaaactgtatgctgagcccttatctgggtcgatcacagcaccagctttctctattcttggcctggttgttatgagaaagttgctcatctgggctggctgttcccgaccaaaatttatgctgatgacctcaactaggacctttctgaagtgcaataatatttttagccttttctaactgtccatgaatcatccatagctttccactgtccttagacactacccctaccatcgtcactgtctgcctcttctcaccttgcagcccgagttctactgaatccagaaaacccacttacaatcctgtaccacaatctgtcttccttttctttctcattaatattcttgaggtctagttccattttttaaaataaatgttttattttagaatattttagatttacagaaaagttacaaagatagtacaagacactcctatgtaccccacagctggttgccactattattatcttacattagtatggtacacttgtcacaattaatgatccaatattgatatgctattattaactagaatccatgctttatcatatttccttagtttttgcctgttttttcccttccgggatttaatattacatttagtggtcatgtgtccttaggctcccctgacttgtgacaatttctctgactctgtttttgatgaccatgacagttttgaggaatatcgatcaggtattttgtagaatggcctctgttgtgattttcctgatgtttttctaattataagcttcgggttgtgggtttgcgggaggaagatcacaaaagtaaagaaccattttcatcaaaagacatacggtgagcacgacttaccactactggtgttgacctggatgaactggctgaggtcgtacttgccaagtttctccaccataca

SEQ ID NO: 289230 - DNA, 419 bp, Homo sapiens
cagctccccggcacgggcccgccgtcagcacgtcacgtcaccgcccgggagagagacccaggaaaatgcggaagggtagacaggccccctcctccgcccgagcttgggagcctgtgaaatgtaagactggtgtcatcgtttcataaatcatgaattttccacattccttaatagagaggagcccaattgggtccttgagccagaaacgatagaaggcctttcaatcatttttccagagaaagattagtcagaaaagaagctgttgattttcactccacatcggagactgatgggaattcaaataagaagcaataaattattggcttatgagaaaatgtagaccttcttgaataaagttgtggtaattctttttttttttttgtatcccaaacattaaaaaatatttatcttcccctaga

SEQ ID NO: 289231 - DNA, 1072 bp, Homo sapiens
tgcctgctgcgtccaccctgggggaagcgcccgtcgtaccctccacaccgggggcttcccctgaccccttaggccctccccctgcaggtgccctcgcgcccctcccggggtccccagggacagtggattcggggccccggcctccctggaatgagagatgcacagactgggccgtgatctcccaccgtgtcctcacagccccaagacagaatgccatgcggattggcaggagacctcactgtggggttcttggagccaaccctccaggccatgtagggtccagccctacgggacttagtgggtgttctccccgtgtgcggagacgagagattgtaataaataaagacacaagacaaagagataaagggaaaacagctgggcccaggggaccactaccatcaagacgcggagaccggtagtggccccaaacagctgcgcccgctgatatttattgcatgcaagacaagggggcagggtaaggagggtgaatcttctaagtgattgacaaggtgaagcaagtcacgtgatcacagaacagggggcccttccctcttaggtagccgaagcagggagagagaaggcagcatacgtcagcgttttcttctatgcacttataagaaagatcaaagactttaagactttcactattccttctaccactgtctactacaaacttcaaagaggaaccaggagtacaggaggaacatgaaagtggacaaggagcgtgaccattgaagcacagcaccacagggaggggtttaggcctccggatgactgcgggcaggcctggatactatccagcctcccacaagaagctggtggagcagagtgttccctgactcctccaaggaaagggagactccctttcgcggtctgctaagtaacgggtgccttcccagacactggcgttaccacttgaccaaggagccctcaagcggaccttatgcgggcatgacagggctcacctcttgccttctacatcacttctcacaatgtcccttcagcacctgaccctatacccgcaggttattcctaggttatattagtaattaaaagctaatgattaataatg

SEQ ID NO: 289232 - DNA, 643 bp, Homo sapiens
gggcttttcaatggacggggtgttgaagcagccagatggtaaggtcttcctgatgtcctccagattgcgaatgtccttcatgatctcctcgatatctcggttatagtccatgatggcagcctcctgcttcttggcttcattctccagggtttcgctctgttgcccagggtggagtgcagtggcacgataacagctcactatcacctcaaactcaagtgatgcacctgcttcagtctcccgggtagctaggactacaggcgtgtagcaccacacccagctaatttttaaaataatttgaagagacgagatactgccagcaagatgagttaagaaaaatcactgtttagttgtacaatgatactggaccataaatgctaccctagctggcaatatatcttcaaaatataaaaagaaactcctcagaccacagtgttctacttagggcaaggtccacagaaggcacctaatgaaaatgacccacactgagggactatgttttctggcagcagtgaacgacggcctcttctttgccactgaaagtgagcaagtaaccacaagttcgtgtatgtcattaccgtgattgctacacccaactggaaaaagaatattcctactgtgactccattaaagtcttttcaaagca

SEQ ID NO: 289233 - DNA, 698 bp, Homo sapiens
tgttctttttcgttttttaaattgagacagggtttcgctctgttgcccagggtggagtgcagtggcacgataacagctcactatcacctcaaactcaagtgatgcacctgcttcagtctcccgggtagctaggactacaggcgtgtagcaccacacccagctaatttttaaaataatttgaagagacgaggtgagatctcgctatgttgcctaggctggtctcaaactcctggcctcaagctatcctccttgcatggcttcttaaagtactgggattaccagtgtgagccatcacacccagcctgtgattctactattcttttattctactattgaaatcctttactttaaatcccttaaagatactgccagcaagatgagttaagaaaaatcactgtttagttgtacaatgatactggaccataaatgctaccctagctggcaatatatcttcaaaatataaaaagaaactcctcagaccacagtgttctacttagggcaaggtccacagaaggcacctaatgaaaatgacccacactgagggactatgttttctggcagcagtgaacgacggcctcttctttgccactgaaagtgagcaagtaaccacaagttcgtgtatgtcattaccgtgattgctacacccaactggaaaaagaatattcctactgtgactccattaaagtcttttcaaagca

SEQ ID NO: 289234 - DNA, 1754 bp, Homo sapiens
gaaatatcttttaataagatatgcaatgcaaggaacaatcaatggattattttttatatgtttggggatggaaaatggaagggaagaaagtatacctgttatttttcctcagtgccagccatataaattgtacatttttcactagcaaggaataaaaagtcattttcctttaaaaataataaattgcctagggacatttgtggattgtgagtgtcttaaaaatgaaaacactaaatatttattaactggacaatggattgtttctttccagactacatcaaagaatcagagaattatctagccctacatttaacagcatgtcttaaactctttctagaccatccacaatattgtttgaacatctgaagacatggggaacttgccatctgatatctgataacagacttcctgtaaagcaggactggtagtttcctgataacaaattcttcaatatgaaggatatagctgtgtcctttacaactggtagcatggaaagaaagagaagtctgcaaagattgaacaaacagcatgcactgtggtatcctttatttaaaaattgtgagctgactacagttgtagtgttctcatttaccattctgatggcataataaaccaagagaacattaacacaattccaagaaggcattaacctgtaacacacatatacgccacacatgcacacacacaacatacacgcacacaaaggttatattctgaacacaaaagtgatagaaaaaagctttgaatgcgctaaatcaaataaaaaccctttattataataaactgtggcaatactgtggctatcatgaaaaatattgtaactattttaaaagcaaaaggaaaaatactggcagtttgaaactagcagcaaaaagcagataaaaatagaatggaagataacataagactaatatcaaaattctaatgttgatactgtgtaggattgcactgaagtaattttaaattggttcttaaggaactcttaaaaagtcccttaaaaatattaaattgttgcaccttacaaacagtggaaaagaaaaaaaaagtatttggaatgttacacacacacacagaggaaatgtattaggtctatcatcaattatggtctttgtttatgaccttcaaaaagctttataaagaaaaaatttaagtgccaatgtagtgaaagaaagttaaaaattcctaaagacgcaagtctgagtgcatttaccaggtctaagaatatatttaaaggttgggggcaaggcatgattgatgcacatttaagaagaaaaatatggaacccataaggtaggtcaagttctttggagagtgttgagaatgaagatgtattaaactctggctatcttggaggagattccaaagtacatggagttctccagctctttatcagttgaaatctgtttcatcgtggccaatagataattaagactaacttttcagcaaactgatttctcctatattcaaacacaaaaatctttaccacacgttcagagctgatattctataacagcacaaataagaatcctggtttacaaaggaaaccacattagcaaggatttttttttttcccatgggttcttaaccaaatgtctgaagctgctagacatctgcaaagaggggataagtttagatttcctactgattttggaagaaaaatattttcctaaggaagccagagtcatccatgagcagggacctgtcttcaggaatctaagaagcataatgtccttaatgcttacactcatgacaag

SEQ ID NO: 289235 - DNA, 1245 bp, Homo sapiens
gactttcttttttttttttttgcactgtggtatcctttatttaaaaattgtgagctgactacagttgtagtgttctcatttaccattctgatggcataataaaccaagagaacattaacacaattccaagaaggcattaacctgtaacacacatatacgccacacatgcacacacacaacatacacgcacacaaaggttatattctgaacacaaaagtgatagaaaaaagctttgaatgcgctaaatcaaataaaaaccctttattataataaactgtggcaatactgtggctatcatgaaaaatattgtaactattttaaaagcaaaaggaaaaatactggcagtttgaaactagcagcaaaaagcagataaaaatagaatggaagataacataagactaatatcaaaattctaatgttgatactgtgtaggattgcactgaagtaattttaaattggttcttaaggaactcttaaaaagtcccttaaaaatattaaattgttgcaccttacaaacagtggaaaagaaaaaaaaagtatttggaatgttacacacacacacagaggaaatgtattaggtctatcatcaattatggtctttgtttatgaccttcaaaaagctttataaagaaaaaatttaagtgccaatgtagtgaaagaaagttaaaaattcctaaagacgcaagtctgagtgcatttaccaggtctaagaatatatttaaaggttgggggcaaggcatgattgatgcacatttaagaagaaaaatatggaacccataaggtaggtcaagttctttggagagtgttgagaatgaagatgtattaaactctggctatcttggaggagattccaaagtacatggagttctccagctctttatcagttgaaatctgtttcatcgtggccaatagataattaagactaacttttcagcaaactgatttctcctatattcaaacacaaaaatctttaccacacgttcagagctgatattctataacagcacaaataagaatcctggtttacaaaggaaaccacattagcaaggatttttttttttcccatgggttcttaaccaaatgtctgaagctgctagacatctgcaaagaggggataagtttagatttcctactgattttggaagaaaaatattttcctaaggaagccagagtcatccatgagcagggacctgtcttcaggaatctaagaagcataatgtccttaatgcttacactcatgacaag

SEQ ID NO: 289236 - DNA, 1700 bp, Homo sapiens
gaaatatcttttaataagatatgcaatgcaaggaacaatcaatggattattttttatatgtttggggatggaaaatggaagggaagaaagtatacctgttatttttcctcagtgccagccatataaattgtacatttttcactagcaaggaataaaaagtcattttcctttaaaaataataaattgcctagggacatttgtggattgtgagtgtcttaaaaatgaaaacactaaatatttattaactggacaatggattgtttctttccagactacatcaaagaatcagagaattatctagccctacatttaacagcatgtcttaaactctttctagaccatccacaatattgtttgaacatctgaagacatggggaacttgccatctgatatctgataacagacttcctgtaaagcaggactggtagtttcctgataacaaattcttcaatatgaaggatatagctgtgtcctttacaactggtagcatggaaagaaagagaagtctgcaaagattgaacaaacagcatgcactgtggtatcctttatttaaaaattgtgagctgactacagttgtagtgttctcatttaccattctgatggcataataaaccaagagaacattaacacaattccaagaaggcattaacctgtaacacacatatacgccacacatgcacacacacaacatacacgcacacaaaggttatattctgaacacaaaagtgatagaaaaaagctttgaatgcgctaaatcaaataaaaaccctttattataataaactgtggcaatactgtggctatcatgaaaaatattgtaactattttaaaagcaaaaggaaaaatactggcagtttgaaactagcagcaaaaagcagataaaaatagaatggaagataacataagaaaattggttcttaaggaactcttaaaaagtcccttaaaaatattaaattgttgcaccttacaaacagtggaaaagaaaaaaaaagtatttggaatgttacacacacacacagaggaaatgtattaggtctatcatcaattatggtctttgtttatgaccttcaaaaagctttataaagaaaaaatttaagtgccaatgtagtgaaagaaagttaaaaattcctaaagacgcaagtctgagtgcatttaccaggtctaagaatatatttaaaggttgggggcaaggcatgattgatgcacatttaagaagaaaaatatggaacccataaggtaggtcaagttctttggagagtgttgagaatgaagatgtattaaactctggctatcttggaggagattccaaagtacatggagttctccagctctttatcagttgaaatctgtttcatcgtggccaatagataattaagactaacttttcagcaaactgatttctcctatattcaaacacaaaaatctttaccacacgttcagagctgatattctataacagcacaaataagaatcctggtttacaaaggaaaccacattagcaaggatttttttttttcccatgggttcttaaccaaatgtctgaagctgctagacatctgcaaagaggggataagtttagatttcctactgattttggaagaaaaatattttcctaaggaagccagagtcatccatgagcagggacctgtcttcaggaatctaagaagcataatgtccttaatgcttacactcatgacaag

SEQ ID NO: 289237 - DNA, 1207 bp, Homo sapiens
gaaatatcttttaataagatatgcaatgcaaggaacaatcaatggattattttttatatgtttggggatggaaaatggaagggaagaaagtatacctgttatttttcctcagtgccagccatataaattgtacatttttcactagcaaggaataaaaagtcattttcctttaaaaataataaattgcctagggacatttgtggattgtgagtgtcttaaaaatgaaaacactaaatatttattaactggacaatggattgtttctttccagactacatcaaagaatcagagaattatctagccctacatttaacagcatgtcttaaactctttctagaccatccacaatattgtttgaacatctgaagacatggggaacttgccatctgatatctgataacagacttcctgtaaagcaggactggtagtttcctgataacaaattcttcaatatgaaggatatagctgtgtcctttacaactggtagcatggaaagaaagagaagtctgcaaagattgaacaaacagcatgcactgtggtatcctttatttaaaaattgtgagctgactacagttgtagtgttctcatttaccattctgatggcataataaaccaagagaacattaacacaattccaagaaggcattaacctgtaacacacatatacgccacacatgcacacacacaacatacacgcacacaaaggttatattctgaacacaaaagtgatagaaaaaagctttgaatgcgctaaatcaaataaaaaccctttattataataaactgtggcaatactgtggctatcatgaaaaatattgtaactattttaaaagcaaaaggaaaaatactggcagtttgaaactagcagcaaaaagcagataaaaatagaatggaagataacataagaaaattggttcttaaggaactcttaaaaagtcccttaaaaatattaaattgttgcaccttacaaacagtggaaaagaaaaaaaaagtatttggaatgttacacacacacacagaggaaatgtattaggtctatcatcaattatggtctttgtttatgaccttcaaaaagctttataaagaaaaaatttaagtgccaatgtagtgaaagaaagttaaaaattcctaaagacgcaagtctgagtgcatttaccaggtctaagaatatatttaaaggttgctgtgccgaattcctgcagcccgg

SEQ ID NO: 289238 - DNA, 841 bp, Homo sapiens
gactacatcaaagaatcagagaattatctagccctacatttaacagcatgtcttaaactctttctagaccatccacaatattgtttgaacatctgaagacatggggaacttgccatctgatatctgataacagacttcctgtaaagcaggactggtagtttcctgataacaaattcttcaatatgaaggtatggataaagcatttggctgccaataatgaactgcaccaaagtcaccaattcaaaccatgccctggtaaatagtatcatcagtgatgatgatgatgatgatgatgatgatgataatgtcacatgttaaaaatgtcatatagattttagcatcttgaggacctgatactctgtaacagtggtccctaacctttttggcaccagggaccactttcatggaagacagtttttccatggaccaggagagggggtggttttgggattattcaagcacattacatgtattgtgcattttatttctattattattacattgtaataatatattttattataatataaaataagtatacaactcatcataatgtagaatcagtggaagccctgagcttgttttcctgcaactagactgtcccatctaggggtgatgggagacagtgacagatcatcaggtgttagattctcataaggagcgtgaaacctagatccctcacatgagcagttcacaatagagttcgttcctgagagaacctgatgccgccgctgatctgacaggaggcagagctcaggcggtaatgcgagcaatggggatcggctgtaaatatagatgatgctttgctcacttgcccactgctaacctccttatgtgtgac

SEQ ID NO: 289239 - DNA, 1917 bp, Homo sapiens
cctactggtagatcttcacagactggatgttaagcaagtggaaaggcagaacagcctccactcgcggtgcacggggaagagtgggcggcggacgtggttttgggcctgggacccaggtgttcctctaggcccagggcgggcatcgctgcccatccgtcccacaggtggttctgaggcgtctctcaacagccatatggcggacaccagaacccgggtgtaacagtgacccgtttctgtgtgggtccccactcccagggagggcaggagagcgccgggggcgtaacccccctcccccacgctggcaccagagtgtgagcagaatcggcttaaggcagctcccagtccccatcgcccccaaggtcgaaagaatcgggacaggaaatgggtcgggggaccgagtttgggccggaatgttcagagcgtgtccgtcctgctctttaaagcccctctctccatcccagaaccaaagccgggcgcccccagcgctcgctgcggtctcgcgcccgggtaacggccgatggccgcccccgccccagccgcagccggggaggaaatcccgcgcctcggaagaggcgcttcgggctcgggcgggttccggaagccgaggggccgggagtaggtgggcgcataggggctcctgggaggcgggaccaagacgcgcgttaccgggaggccaggcccggcgctgcaccctccgcggcccggggcctgaggccgggctcccgcgacttcccggcccaaagcagcgcagcgcccgggcggcccagccccgcagcggccacagcagcatagccgggcgagcggatccagaggcccgggcttccttcctgtgcgagtcggcgcggacgactgctagtccagccgttgggcgccgcctggatctcggcgcctggcccttaaagagacccggtcgcatttcatctcagcgagaggagaaatactcgaagggagaggttcgccgctggcagccagaagccttaccactgctaggacgctggcagaacgcacccataacttggcaacactcggaggatggatggcaaataataccagcgactgaagggttaattaatgattgcagattaattgaacaccttccgtaatcagacacctggcacacactcatgatgtcacttattcctcccaacaaccctgcaaatagataactgtctctcccattctccgagcttgtcctcagagaattaggtaacttgttcaaaatggtcagaagcaacagatataactccttgctctactctttccccccttctcactactgcacttgactagtctttttaaaacataatttttttggccaggcacggtggctcacgcctgtaatcccagcactttgggaggccaaggaaggcagatcacctgaggccagaagttcgagaccagccttggccaacatggcgaaaccccatcgctactaaaaatgcaaaaattagctgggtgtggtggggggcacccgtattcccagctactcagaggctgaggcaggaaaatcgcttgaacctggaggcagagattgcagtgagccgagatcattgcattgcactccagcttgagcaacagagggacacttcgttccccccgccaaaaaaaaaattttttttttaatgatcagaagcggctgggcgcggtggctcgggcctgtaatcccagcactttcggaggccgaggaaggtagatcacttgaggtcatgagttcaagaccagcctgaccaacatggccaaaaactgtctctactaaaaatacaaaaattagccgggcgtggtagcgcacgcctgtaatcccagctactcaggaggctcaggcacgagaatcgcttgagtctgggaggcggaggttgcagtgagctgagatcgtggccactgcaatccagcctgggcgatagagtgagactacgtctc

SEQ ID NO: 289240 - DNA, 1158 bp, Homo sapiens
ttcctctctccaacgaagtcttatattttaccattctgcgtgtattagaaagctaaatttaaacagcaacaataagaaatcttccccagtggatccctcgagcctttcgggaaaatgcaggtttctggctgacaggaagaagaaacagcatccaatcggcacttgtgtctcaatgaccaatcaaatttcgccttacattgcatcgctgggataaacggagctggacgactcagtctcttggtctgtggctgctgcggttacctggatgggcgagcacctctgaggctggctttgttacctgggcaataagggactagcagttcagccgttttctatgcctgctggatttgtttgtatttgttcccagccactgctcatgtaatgtactcccttaaccaggaaattaaagcattctcccggaataatctcaggaagcaatgcaccagggtgacaacgctaactggaaagaaaattatagaaacatggaaagatgccagaattcatgttgtggaagaagtagagccgagcagtgggggtggttgtggttatgtgcaggaccttagctcggacctgcaagttggcgttattaagccatggttgctcctagggtcacaagatgctgctcatgatttggatacactgaaaaagaataagaatgttttgaatttattgaagaagcaaaaagaaaagatggagtggttcttgttcattgtaatgcaggcgtttccagggctgctgcaattgtaataggtttcctgatgaattctgaacaaacctcatttaccagtgctttttctttggtgaaaaatgcaagaccttccatatgtccaaattctggcttcatggagcagcttcgtacatatcaagagggcaaagaaagcaataagtgtgacagaatacaggagaacagttcatgagttgcattgtagcagacaatggacaactgtagtttctgaattgacttctatagccatcttttcccttttttggagagtagactagcaaaattcccttttttctcttgccttttttatgcataaatggaggtcaatttgattgtcctgacctactgtataagtaaatttcaaatgtcattactttctctttgttattataatgtgtgattaaatgcttttttaaattgctaagggaaaaaaa

SEQ ID NO: 289241 - DNA, 1276 bp, Homo sapiens
ttcctctctccaacgaagtcttatattttaccattctgcgtgtattagaaagctaaatttaaacagcaacaataagaaatcttccccagtggatccctcgagcctttcgggaaaatgcaggtttctggctgacaggaagaagaaacagcatccaatcggcacttgtgtctcaatgaccaatcaaatttcgccttacattgcatcgctgggataaacggagctggacgactcagtctcttggtctgtggctgctgcggttacctggatgggcgagcacctctgaggctggctttgttacctgggcaataagggactagcagttcagccgttttctatgcctgctggatttgtttgtatttgttcccagccactgctcatgtaatgtactcccttaaccaggaaattaaagcattctcccggaataatctcaggaagcaatgcaccagggtgacaacgctaactggaaagaaaattatagaaacatggaaagatgccagaattcatgttgtggaagaagtagagccgagcagtgggggtggttgtggttatgtgcaggaccttagctcggacctgcaagttggcgttattaagccatggttgctcctagggtcacaagatgctgctcatgatttggatacactgaaaaagaataaggtgactcatattcttaatgttgcatatggagttgaaaatgctttcctcagtgactttacatataagagcatttctatattggatctgcctgaaaccaacatcctgtcttattttccagaatgttttgaatttattgaagaagcaaaaagaaaagatggagtggttcttgttcattgtaatgcaggcgtttccagggctgctgcaattgtaataggtttcctgatgaattctgaacaaacctcatttaccagtgctttttctttggtgaaaaatgcaagaccttccatatgtccaaattctggcttcatggagcagcttcgtacatatcaagagggcaaagaaagcaataagtgtgacagaatacaggagaacagttcatgagttgcattgtagcagacaatggacaactgtagtttctgaattgacttctatagccatcttttcccttttttggagagtagactagcaaaattcccttttttctcttgccttttttatgcataaatggaggtcaatttgattgtcctgacctactgtataagtaaatttcaaatgtcattactttctctttgttattataatgtgtgattaaatgcttttttaaattgctaagggaaaaaaa

SEQ ID NO: 289242 - DNA, 375 bp, Homo sapiens
agcggtaagtggccgagcctgggctgtgtgtggctttttgcgatgagcagaaagaagtaaatgtacttgacatagtgtttactctccagctggacctgtgcaaatgacctggtcttaggatacagttttttgttagatgtaatggattttcacctcagccccacattggggccctggcatcaagggctctctagttactagccagcatttcctttcatcctggcattttccagacgtgaagagaaacatctcgaatctttatcattgcagttttactgtgaaagaattgatctttttttttttttttaagagctagtgtcaggacttggagttggcagtccgcaggctgtgtttaatttttgtgactatgggtgg

SEQ ID NO: 289243 - DNA, 657 bp, Homo sapiens
tgtagagatgagatcttgcttatgttgcccaggttggtcttgaactcctcagctatagcagtcctcccacctcagcttcccaaagtgttgggattataggtgtaagccaccacacctggccacttatttatttttcttttttctttttttttttttttgagatggagtctcactctgtcacccaggctggaaatctctaaaacagtggtgctcaacttgcctggctgttcaatcttgcctttcttcctggataaaggagagaatgaggccacttggtagtggtcaagccctggggaccaagccttccatggaggggttcttggtaagttttaggttgtattacctgccctttaagcaggagtgaattacagtaacccatgcctttgtaaatgcctagaatttacaggattccgatgagcgcttcctgaatgcacagtgttctccagggcagttgattttttaacttagtctaaggcagtggttctcagctgggggtaattctgcccaccagggcacgcttggcaactactgaagacatttttgactgtcatgatcaacactagattgtgtagttgcatccagtgggcagaagccagggatgctactaaacatcctatagcccctcacagaaaaaaaataacctggccaaacacgata

SEQ ID NO: 289244 - DNA, 940 bp, Homo sapiens
tgcagagcatccctgtgccccgcggatatagactggcgcgcctctgttgcgcaggcgcagaactacaacttcagggttttccccaacggcctcttttttgcacgttaggagaaactacatttcccataatcctttgttccagggctggagcggctctgggctccggaatcgcccgcagccggtactgcgggacccactgcggatatggctgtcttggctggatccctgttgggccccacgagtaggtcggcagcgttgctgggtggcaggtggctccagccccgggcctggctggggttcccagacgcctggggcctccccaccccgcagcaggcccggggcaaggctcgcgggaatgagtatcagccgagcaacatcaaacgcaagaacaagcacggctgggtccggcgcctgagcacgccggccggcgtgcaggtcatccttcgccgaatgctcaagggccgcaagtcgctgagccattgaggatcgcgacgcagtcggcgggaccctcatggaagcatcgccctcgcctcggaccttgcctggcgctatttttgcagggagctggggagcaggaacgcctcggacctgagtgctctccatattgtggggttgaagtctggatgggagcttgccaagtccctttttaggctttttaattaggaagcatttcgaacctgcgcaacagaccaaagaacagtacaaagaacatccgtgtacccagtaccctgactaccgactacctacaacccgtccctgccccatcctgagttcttttgaagctgatctcaggcatcggattatttcttctgtaaatatttcagaatgtatctctccaagatgagagctcattaaaagacaattacaaagcttatcacatccaaaagaattatcaataattttgaaatattattaaacgtgtaataaatgttcaaagttc

SEQ ID NO: 289245 - DNA, 986 bp, Homo sapiens
accaagcgatgccccgccggcccagcggctacttcttgtcttctggaggcgccggcagtggctccggtagagccttgggcgagggctcgggctcccagagcaggaattcgtggagcagcgtgttgaccgtctcagggcattccagcatcaccatgtggctgccctcgtcgatgagcttcaggaatgccaggagcaggatctgcagaagacgcagggctcaaggagagaatgaggccacttggtagtggtcaagccctggggaccaagccttccatggaggggttcttgggctggagcggctctgggctccggaatcgcccgcagccggtactgcgggacccactgcggatatggctgtcttggctggatccctgttgggccccacgagtaggctcgcgggaatgagtatcagccgagcaacatcaaacgcaagaacaagcacggctgggtccggcgcctgagcacgccggccggcgtgcaggtcatccttcgccgaatgctcaagggccgcaagtcgctgagccattgaggatcgcgacgcagtcggcgggaccctcatggaagcatcgccctcgcctcggaccttgcctggcgctatttttgcagggagctggggagcaggaacgcctcggacctgagtgctctccatattgtggggttgaagtctggatgggagcttgccaagtccctttttaggctttttaattaggaagcatttcgaacctgcgcaacagaccaaagaacagtacaaagaacatccgtgtacccagtaccctgactaccgactacctacaacccgtccctgccccatcctgagttcttttgaagctgatctcaggcatcggattatttcttctgtaaatatttcagaatgtatctctccaagatgagagctcattaaaagacaattacaaagcttatcacatccaaaagaattatcaataattttgaaatattattaaacgtgtaataaatgttcaaagttc

SEQ ID NO: 289246 - DNA, 1176 bp, Homo sapiens
accaagcgatgccccgccggcccagcggctacttcttgtcttctggaggcgccggcagtggctccggtagagccttgggcgagggctcgggctcccagagcaggaattcgtggagcagcgtgttgaccgtctcagggcattccagcatcaccatgtggctgccctcgtcgatgagcttcaggaatgccaggagcaggatctgcagaagacgcagggctcaaggagagaatgaggccacttggtagtggtcaagccctggggaccaagccttccatggaggggttcttgggctggagcggctctgggctccggaatcgcccgcagccggtactgcgggacccactgcggatatggctgtcttggctggatccctgttgggccccacgagtaggtcggcagcgttgctgggtggcaggtggctccagccccgggcctggctggggttcccagacgcctggggcctccccaccccgcagcaggcccggggcaaggctcgcgggaatgagtatcagccgagcaacatcaaacgcaagaacaagcacggctgggtccggcgcctgagcacgccggccggcgtgcaggtcatccttcgccgaatgctcaagggccgcaagtcgctgagccattgaggatcgcgacgcagtcggcgggaccctcatggaagcatcgccctcgcctcggaccttgcctggcgctatttttgcagggagctggggagcaggaacgcctcggacctgagtgctctccatattgtggggttgaagtctggatgggagcttgccaagtccctttttaggctttttaattaggaagcatttcgaacctgcgcaacagaccaaagaacagtacaaagaacatccgtgtacccagtaccctgactaccgactacctacaacccgtccctgccccatcctgagttcttttgaagctgatctcaggcatcggattatttcttctgtaaatatttcagaatgtatctctccaagatgagagctcattaaaagacaattacaaagcttatcacatccaaaagaattatcaataattttgaaatattattaaacgtgtaataaatgttcaaagttcacacacacacaacaaaaaccccgggcccaatccgggggccgggacacacgggatgcacggggcccggcaaagggtcccgcgacccctttg

SEQ ID NO: 289247 - DNA, 1161 bp, Homo sapiens
accaagcgatgccccgccggcccagcggctacttcttgtcttctggaggcgccggcagtggctccggtagagccttgggcgagggctcgggctcccagagcaggaattcgtggagcagcgtgttgaccgtctcagggcattccagcatcaccatgtggctgccctcgtcgatgagcttcaggaatgccaggagcaggatctgcagaagacgcagggctcaaggagagaatgaggccacttggtagtggtcaagccctggggaccaagccttccatggaggggttcttgggctggagcggctctgggctccggaatcgcccgcagccggtactgcgggacccactgcggatatggctgtcttggctggatccctgttgggccccacgagtaggtcggcagcgttgctgggtggcaggtggctccagccccgggcctggctggggttcccagacgcctggggcctccccaccccgcagcaggcccggggcaaggctcgcgggaatgagtatcagccgagcaacatcaaacgcaagaacaagcacggctgggtccggcgcctgagcacgccggccggcgtgcaggtcatccttcgccgaatgctcaagggccgcaagtcgctgagccattgaggatcgcgacgcagtcggcgggaccctcatggaagcatcgccctcgcctcggaccttgcctggcgctatttttgcagggagctggggagcaggaacgcctcggacctgagtgctctccatattgtggggttgaagtctggatgggagcttgccaagtccctttttaggctttttaattaggaagcatttcgaacctgcgcaacagaccaaagaacagtacaaagaacatccgtgtacccagtaccctgactaccgactacctacaacccgtccctgccccatcctgagttcttttgaagctgatctcaggcatcggattatttcttctgtaaatatttcagaatgtatctctccaagatgagagctcattaaaagacaattacaaagcttatcacatccaaaagaattatcaataattttgaaatattattaaacgtgtaataaatgttcaaagttcttacaaaaaaaaaatctccgggggaccgacaaggcaactcaagggggcggaccttgcctagaggaacaccgcgga

SEQ ID NO: 289248 - DNA, 1020 bp, Homo sapiens
accaagcgatgccccgccggcccagcggctacttcttgtcttctggaggcgccggcagtggctccggtagagccttgggcgagggctcgggctcccagagcaggaattcgtggagcagcgtgttgaccgtctcagggcattccagcatcaccatgtggctgccctcgtcgatgagcttcaggaatgccaggagcaggatctgcagaagacgcagggctcaaggagagaatgaggccacttggtagtggtcaagccctggggaccaagccttccatggaggggttcttgggctggagcggctctgggctccggaatcgcccgcagccggtactgcgggacccactgcggatatggctgtcttggctggatccctgttgggccccacgagtaggtcggcagcgttgctgggtggcaggtggctccagccccgggcctggctggggttcccagacgcctggggcctccccaccccgcagcaggcccggggcaaggctcgcgggaatgagtatcagccgagcaacatcaaacgcaagaacaagcacggctgggtccggcgcctgagcacgccggccggcgtgcaggtcatccttcgccgaatgctcaagggccgcaagtcgctgagccattgaggatcgcgacgcagtcggcgggaccctcatggaagcatcgccctcgcctcggaccttgcctggcgctatttttgcagggagctggggagcaggaacgcctcggacctgagtgctctccatattgtggggttgaagtctggatgggagcttgccaagtccctttttaggctttttaattaggaagcatttcgaacctgcgcaacagaccaaagaacagtacaaagaacatccgtgtacccagtaccctgactaccgactacctacaacccgtccctgccccatcctgagttcttttgaagctgatctcaggcatcggattatttcttctgtaaatatttcagaatgtatctctccaagatgagagctcattaaaagacaattacaaagctta

SEQ ID NO: 289249 - DNA, 712 bp, Homo sapiens
ccagcgccccgtctgacctttctcgccgtccctctacccacgcaggtggctccagccccgggcctggctggggttcccagacgcctggggcctccccaccccgcagcaggcccggggcaaggctcgcgggaatgagtatcagccgagcaacatcaaacgcaagaacaagcacggctgggtccggcgcctgagcacgccggccggcgtgcaggtcatccttcgccgaatgctcaagggccgcaagtcgctgagccattgaggatcgcgacgcagtcggcgggaccctcatggaagcatcgccctcgcctcggaccttgcctggcgctatttttgcagggagctggggagcaggaacgcctcggacctgagtgctctccatattgtggggttgaagtctggatgggagcttgccaagtccctttttaggctttttaattaggaagcatttcgaacctgcgcaacagaccaaagaacagtacaaagaacatccgtgtacccagtaccctgactaccgactacctacaacccgtccctgccccatcctgagttcttttgaagctgatctcaggcatcggattatttcttctgtaaatatttcagaatgtatctctccaagatgagagctcattaaaagacaattacaaagcttatcacatccaaaagaattatcaataattttgaaatattattaaacgtgtaataaatgttcaaa

SEQ ID NO: 289250 - DNA, 1086 bp, Homo sapiens
accaagcgatgccccgccggcccagcggctacttcttgtcttctggaggcgccggcagtggctccggtagagccttgggcgagggctcgggctcccagagcaggaattcgtggagcagcgtgttgaccgtctcagggcattccagcatcaccatgtggctgccctcgtcgatgagcttcaggaatgccaggagcaggatctgcagaagacgcagggctcaaggagagaatgaggccacttggtagtggtcaagccctggggaccaagccttccatggaggggttcttgggctggagcggctctgggctccggaatcgcccgcagccggtactgcgggacccactgcggatatggctgtcttggctggatccctgttgggccccacgagtaggtcggcagcgttgctgggtggcaggtggctccagccccgggcctggctggggttcccagacgcctggggcctccccaccccgcagcaggcccggggcaaggctcgcgggaatgagtatcagccgagcaacatcaaacgcaagaacaagcacggctgggtccggcgcctgagcacgccggccggcgtgcaggtcatccttcgccgaatgctcaagggccgcaagtcgctgagccattgaggatcgcgacgcagtcggcgggaccctcatggaagcatcgccctcgcctcggaccttgcctggcgctatttttgcagggagctggggagcaggaacgcctcggacctgagtgctctccatattgtggggttgaagtctggatgggagcttgccaagtccctttttaggctttttaattaggaagcatttcgaacctgcgcaacagaccaaagaacagtacaaagaacatccgtgtacccagtaccctgactaccgactacctacaacccgtccctgccccatcctgagttcttttgaagctgatctcaggcatcggattatttcttctgtaaatatttcagaatgtatctctccaagatgagagctcattaaaagacaattacaaagcttatcacatccaaaagaattatcaataattttgaaatattattaaacgtgtaataaatgttcaaagttc

SEQ ID NO: 289251 - DNA, 874 bp, Homo sapiens
attgtcgaggtgtctagggcctggagatgggaccagctgcctgcctgccccctaccccaggttgggcgccgctaagggctggagcggctctgggctccggaatcgcccgcagccggtactgcgggacccactgcggatatggctgtcttggctggatccctgttgggccccacgagtaggtcggcagcgttgctgggtggcaggtggctccagccccgggcctggctggggttcccagacgcctggggcctccccaccccgcagcaggcccggggcaaggctcgcgggaatgagtatcagccgagcaacatcaaacgcaagaacaagcacggctgggtccggcgcctgagcacgccggccggcgtgcaggtcatccttcgccgaatgctcaagggccgcaagtcgctgagccattgaggatcgcgacgcagtcggcgggaccctcatggaagcatcgccctcgcctcggaccttgcctggcgctatttttgcagggagctggggagcaggaacgcctcggacctgagtgctctccatattgtggggttgaagtctggatgggagcttgccaagtccctttttaggctttttaattaggaagcatttcgaacctgcgcaacagaccaaagaacagtacaaagaacatccgtgtacccagtaccctgactaccgactacctacaacccgtccctgccccatcctgagttcttttgaagctgatctcaggcatcggattatttcttctgtaaatatttcagaatgtatctctccaagatgagagctcattaaaagacaattacaaagcttatcacatccaaaagaattatcaataattttgaaatattattaaacgtgtaataaatgttcaaagttc

SEQ ID NO: 289252 - DNA, 818 bp, Homo sapiens
accgtcagatcgcgtgagaattcagttactatcacgagaacaacacgggaaaactgtccccataatcaagtcatttctctccctaacaagtgaggattacaattcaagatgaggtttgggtaggaacacaaagcctgaccctatcccacagcatgtccaggctgccctagcaccacccaatagaagggaaaatggcagagggaaagtcctagtggaaagagacctcagtctcagctaattgtggtgacaatatattgcttttgcaaattgtacataaacatatgaccaggtgaatgtatcgccaaggctcctgccaaggcctgggatggaggcctagagaagatgcccgaaagtttatgctgtgtgagcttcacagaagacctgccttccatgtatacccattttacaggtgtctgtgcggtgcagaaactgtacaactgtatacagtgaccatttctactctgggtctctaaacaagggctggtatcgttacagagactgaagactgaggaagaccatctctgtaggatgccaaggattgactggagaaagtctggaattttccacaaatgagttcatttataaagagaaaggcaagctttgatgacaacaccttcacaaaatggaggcctttgaaaacattggtctggattgaggagttggagaagaatgaagtgcacatcaaccaaacagaagagaagcaatttggaggaggaaaaaatcagttcttcatgaaaggatcacattgatcttggggttcatcccagtgcctcctctgcagacaatcttgtcctcagtctttcaattgttttcttccc

SEQ ID NO: 289253 - DNA, 867 bp, Homo sapiens
accgtcagatcgcgtgagaattcagttactatcacgagaacaacacgggaaaactgtccccataatcaagtcatttctctccctaacaagtgaggattacaattcaagatgaggtttgggtaggaacacaaagcctgaccctatcccacagcatgtccaggctgccctagcaccacccaatagaagggaaaatggcagagggaaagtcctagtggaaagagacctcagtctcagctaattgtggtgacaatatattgcttttgcaaattgtacataaacatatgaccaggtgaatgtatcgccaaggctcctgccaaggcctgggatggaggcctagagaagatgcccgaaagtttatgctgtgtgagcttcacagaagacctgccttccatgtatacccattttacaggactctccagaactctaagatgtcagaacaaactttgggacatagctggtcttgtagcaaaggatacaaagaatagacgaactacacctggctcttcgagtgtctgatagaagaaacacaccttacccacagccatgttacattggccaaaacaggtcacgtggccacacttggggccagtgaagtagagaaggataatatttctacagaaaagggataccacagggaggagcagccaacattttgaacagaaatataatctgctatataggacatttcataaagtaggtcaaatatttttggaaaaaaaaaagaggggagtctatgtatggtcagttaagtttaggaactcctacataatacccatctctagagctatgcaatgtaaaccagcacaccgaaggctctcagaagtcctgcaatagaaaaataaaatcaagattgtttaaccccaagtt

SEQ ID NO: 289254 - DNA, 646 bp, Homo sapiens
accgtcagatcgcgtgagaattcagttactatcacgagaacaacacgggaaaactgtccccataatcaagtcatttctctccctaacaagtgaggattacaattcaagatgaggtttgggtaggaacacaaagcctgaccctatcccacagcatgtccaggctgccctagcaccacccaatagaagggaaaatggcagagggaaagtcctagtggaaagagacctcagtctcagctaattgtggtgacaatatattgcttttgcaaattgtacataaacatatgaccaggtgaatgtatcgccaaggctcctgccaaggcctgggatggaggcctagagaagatgcccgaaagtttatgctgtgtgagcttcacagaagacctgccttccatgtatacccattttacaggtaagaaatttagggatttgccagcttctaaggaacaccacattccttacaccatactgaggtacaatttgaagagttgcggtatacgcactgtttcgtgaggaaaaacggagtttctgtaacaaagcaagagctttaaaaatatgttagcaatatttgaccaggccataacccagcttggggcacctgactgctgtctgtgctgtcaagaataaatttttcttatctgttgtataa

SEQ ID NO: 289255 - DNA, 502 bp, Homo sapiens
cttcctctaggtttccacagagcagcttcaggcattcatcttggtgagcagtgtgcaagctggattttcctaaccacttgctctcttcctcaggtgtctgtgcggtgcagaaactgtacaactgtatacagtgaccatttctactctgggtctctaaacaagggctggtatcgttacagagactgaagactgaggaagaccatctctgtaggatgccaaggattgactggagaaagtctggaattttccacaaatgagttcatttataaagagaaaggcaagctttgatgacaacaccttcacaaaatggaggcctttgaaaacattggtctggattgaggagttggagaagaatgaagtgcacatcaaccaaacagaagagaagcaatttggaggaggaaaaaatcagttcttcatgaaaggatcacattgatcttggggttcatcccagtgcctcctctgcagacaatcttgtcctcagtctttcaattgttttcttccc

SEQ ID NO: 289256 - DNA, 924 bp, Homo sapiens
gcggccgcgacccggtcgggcgcctgcgaccaatgggctcgcggaagccgggcggagcgagggcctggccaatgcggagctgcgctgccccgagcagcccaatagacgcaggagccgcggatttgccgtcccgcccaccccgcctaccacgagagcagtgctgcggcgagtgcggggcgagaggttcgcgctggtggagcaccccagcttgcaggttcagcgtgggtgtctctcccgggcacatcgagctgtctagaggaaccctcttcccctggcttcacggcccagaggacgcacggctctctcccctcgagagcgtgtttcgtcgcccgcgcggggaacgcaaagtgctagggtagtcacggccacttcacgccgagggacatctcatctcgccctccaggtcgtgagcgcacccattccgctcactgaggccgaaagcttcggacctccgtgggccctgagacttcagcgttccatgtctgctgtgctgtggaacccagagtgctcttgcctggatggctgagaatcccttggaccctggaagcacctactccatgatggcccgcaggaggaccaaactggagacagtcctggctctgaggaaacaggaaggaaggagggtgaaaggaacgtccacctgcacacaaaggaaagatgaaaaagagtcacctaccatgggacctggcaaagtacttcagaacttttattccttccagaagcagtgtatcacaatagattgaatcaagaagtgacattaaggccagcgcggtggctcacgcctgtaatcccaccactttgggaggccgaggcgggcggatcacgagatcaggagatcagaccatcctggctaacatggtgaaccccatgtctactaacaatacaaaattagccgggcatggtggcgggcgcctgtagtcccag

SEQ ID NO: 289257 - DNA, 597 bp, Homo sapiens
ccacagtagcgatcacatagtatcctagaagtgagatggtaaatgcagtataatatttatgtaaatgaggggcagggcagtgagtctaaaaggatgtggatgctcacatctgctcttacaatcatgctacagttcatttattgagtggaaacagttccctacttattgacaattcatttactgaataggtaatcagtaaatacattttgtatcaatctaacaattaggcataaactacagcctcctacacccaatatctgaggtgttctaagatttaactactcaaatgtttgatatttgataaattgtttaagttctctgcaattcagttccacctcctataacagcacttctgaaaatgtggtctgtgaacctctgaggggttcctgagacactgtcagggagcaagtgagacatggctatttttataatattaaactattagcctttgtcactgtgttgtcatttacctaggataggtacaactgctggcacctgagcacagatcaaggcactgaccctaagctctactagttgttattgcatttttcaccactgtacactcataatttaggagaaaagagcaaaaactctaga

SEQ ID NO: 289258 - DNA, 594 bp, Homo sapiens
atagttatgaagctaagtcctaggccaggaacaaggcagccagtccagccagcatagttgacccctctatggactggggccagtgcagccacagcattccagtgctcagcccctcagctgggagatcagcgactgctgccacgtgcccagaaatggctcgtcctttcactacagcggaatgcaatgagggtgggtgagaagatgatgggtcggttatttcattccttttctttttacaacttcactttcagagacttcagcgttccatgtctgctgtgctgtggaacccagagtgctcttgcctggatggctgagaatcccttggaccctggaagcacctactccatgatggcccgcaggaggaccaaactggagacagtcctggctctgaggaaacaggaaggaaggagggtgaaaggaacgtccacctgcacacaaaggtaactgtcctctactcagggaagagtgaaccaggacaaagtaactgttttagagagcaaggcagctctctgggctgaaaaatgttaacagttaaagaccttgctaagtcaaagtctgcccctatctctgccctctcctgcttctaggtgacca

SEQ ID NO: 289259 - DNA, 370 bp, Homo sapiens
atagttatgaagctaagtcctaggccaggaacaaggcagccagtccagccagcatagttgacccctctatggactggggccagtgcagccacagcattccagtgctcagcccttggaccacttccccttcagcaggaggaccaaactggagacagtcctggctctgaggaaacaggaaggaaggagggtgaaaggaacgtccacctgcacacaaaggtaactgtcctctactcagggaagagtgaaccaggacaaagtaactgttttagagagcaaggcagctctctgggctgaaaaatgttaacagttaaagaccttgctaagtcaaagtctgcccctatctctgccctctcctgcttctaggtgacca

SEQ ID NO: 289260 - DNA, 1398 bp, Homo sapiens
gcggccgcgacccggtcgggcgcctgcgaccaatgggctcgcggaagccgggcggagcgagggcctggccaatgcggagctgcgctgccccgagcagcccaatagacgcaggagccgcggatttgccgtcccgcccaccccgcctaccacgagagcagtgctgcggcgagtgcggggcgagaggttcgcgctggtggagcaccccagcttgcaggttcagcgtgggtgtctctcccgggcacatcgagctgtctagaggaaccctcttcccctggcttcacggcccagaggacgcacggctctctcccctcgagagcgtgtttcgtcgcccgcgcggggaacgcaaagtgctagggtagtcacggccacttcacgccgagggacatctcatctcgccctccaggtcgtgagcgcacccattccgctcactgaggccgaaagcttcggacctccgtgggccctgagacttcagcgttccatgtctgctgtgctgtggaacccagagtgctcttgcctggatggctgagaatcccttggaccctggaagcacctactccatgatggcccgcaggaggaccaaactggagacagtcctggctctgaggaaacaggaaggaaggagggtgaaaggaacgtccacctgcacacaaaggaaagatgaaaaagagtcacctaccatgggacctggcaaagtacttcagaacttttattccttccagaagcaggtaagtaccccaagtcctcatcgtattcccagcatagggcttggtatacggggggatatttcattcagcatattggctgaatgaaaggtctgataggtatacctgggagaaggtccttagggacatggcttaaaaaatgagagaggggcagggcagtgagtctaaaaggatgtggatgctcacatctgctcttacaatcatgctacagttcatttattgagtggaaacagttccctacttattgacaattcatttactgaataggtaatcagtaaatacattttgtatcaatctaacaattaggcataaactacagcctcctacacccaatatctgaggtgttctaagatttaactactcaaatgtttgatatttgataaattgtttaagttctctgcaattcagttccacctcctataacagcacttctgaaaatgtggtctgtgaacctctgaggggttcctgagacactgtcagggagcaagtgagacatggctatttttataatattaaactattagcctttgtcactgtgttgtcatttacctaggataggtacaactgctggcacctgagcacagatcaaggcactgaccctaagctctactagttgttattgcatttttcaccactgtacactcataatttaggagaaaagagcaaaaactctaga

SEQ ID NO: 289261 - DNA, 319 bp, Homo sapiens
gaactttggatacctggtacatttggatagggtgggaggccacaaacttggctccatagacttggccgtctgtccatctcacttggaccacttccccttcagcaggaggaccaaactggagacagtcctggctctgaggaaacaggaaggaaggagggtgaaaggaacgtccacctgcacacaaaggtaactgtcctctactcagggaagagtgaaccaggacaaagtaactgttttagagagcaaggcagctctctgggctgaaaaatgttaacagttaaagaccttgctaagtcaaagtctgcccctatctctgccc

SEQ ID NO: 289262 - DNA, 597 bp, Homo sapiens
gcggccgcgacccggtcgggcgcctgcgaccaatgggctcgcggaagccgggcggagcgagggcctggccaatgcggagctgcgctgccccgagcagcccaatagacgcaggagccgcggatttgccgtcccgcccaccccgcctaccacgagagcagtgctgcggcgagtgcggggcgagaggttcgcgctggtggagcaccccagcttgcaggttcagcgtgggtgtctctcccgggcacatcgagctgtctagaggaaccctcttcccctggcttcacggcccagaggacgcacggctctctcccctcgagagcgtgtttcgtcgcccgcgcggggaacgcaaagtgctagggtagtcacggccacttcacgccgagggacatctcatctcgccctccaggtcgtgagcgcacccattccgctcactgaggccgaaagcttcggacctccgtgggccctggtgggtaagggggcacgggggtgagcgttaagagactcgtagaacatttttagtccgcgcgtggcacaaggcctccaagccccacgtacactttgcagccctcccactcctttttcattcctgcggctgagccc

SEQ ID NO: 289263 - DNA, 827 bp, Homo sapiens
ataacatctggtgtaaacacttgtggagctggttggagattctccggggacccttccgtatctgcctaggcatttgctgtctcctcctaatacgtttgataatcttatggcggagaaggaagctgtatcttcaaaatgtgtcaatttggctaaagagaatcaagtttttcaacaggagttatctatgaaaaaagcacaacaggaatgtgaaaaatttgaggaggataaaagatgttggaagaagaaatattaaatcttaagacacatatggaaaacagtatggtagaacttagtaaactacaagaatataaatcagagctagatgaaagggcaatgcaggcagtagaaaaattagacgaaatacatttacagatcgaataagaaaatagcaatgatcagtatcagctctttatggagaaagagcaggtgaaatattttctcagcactcttcctgcaaggcgaggtcgagagtcaccttgtgttgaaaatcttactagtataggactcaacgaaaatatattccccaaatgcccgtaagaattcctacttcaagcctcagacttcaaataattgccagaactacttgactgaggttagttatatgaccgtttctctttagggtttcatttctctagcgtaattcttgtttataatttggtgaaatactgagttgttctgttgacttttgcatgtgaagtaaagatcataattagctgtgttaacacagaaaggaaatgggaactttacattttttaattccctggagctctcattttcaagagatatccatttgctaactttattcaataaatgtgactaaactgaga

SEQ ID NO: 289264 - DNA, 1082 bp, Homo sapiens
ataacatctggtgtaaacacttgtggagctggttggagattctccggggacccttccgtatctgcctaggcatttgctgtctcctcctaatacgtttgataatcttatggcggagaaggaagctgtatcttcaaaatgtgtcaatttggctaaagagaatcaagtttttcaacaggagttatctatgaaaaaagcacaacaggaatgtgaaaaatttgaggaggataaaagatgttggaagaagaaatattaaatcttaagacacatatggaaaacagtatggtagaacttagtaaactacaagaatataaatcagagctagatgaaagggcaatgcaggcagtagaaaaattagacgaaatacatttacagatcgaataagaaaatagcaatgatcagtatcagctctttatggagaaagagcaggtgaaatattttctcagcactcttcctgcaaggcgaggtcgagagtcaccttgtgttgaaaatcttactagtataggactcaacgaaaatatattccccaaatgcccgtaagaattcctacttcaagcctcagacttcaaataattgccagaactacttgactgaggatgttccagcataagaagatatattctactcaagtccttgttccaccttttcaaatctcactggtctatttcccagtgggtttctaaaccaaacaccaataaactcagaaaatacagtgtaaaacaaagtgaagaacaaataaacaactcaccagagatttattcgtttcctgttgctcttggaaacacccagaggacactggaaacatagctgggatagaaggcaaatgacgtgggttaaggagagaactggtgtggtgtggtcccagattcttctgcccaacactctagacacattacttgggaaagccctcctccctcctgaaaaagaaaaacttccccatgggagaagggtccttcatgccccattaggggcaacaaagactcaagttaagataagatacatctacaagtacattaattggtagacattagatgcacaatttatttttgaataaaaacatgtattacctactaatttagtaacaa

SEQ ID NO: 289265 - DNA, 549 bp, Homo sapiens
cttatgaagaggttacaactgagttagaagaatataaggaagcctttgcagcagcattgaaagctaacagttccatgttaaaaaaattaactaaatcgaataagaaaatagcaatgatcagtatcagctctttatggagaaagagcaggtgaaatattttctcagcactcttcctgcaaggcgaggtcgagagtcaccttgtgttgaaaatcttactagtataggactcaacgaaaatatattccccaaatgcccgtaagaattcctacttcaagcctcagacttcaaataattgccagaactacttgactgaggttagttatatgaccgtttctctttagggtttcatttctctagcgtaattcttgtttataatttggtgaaatactgagttgttctgttgacttttgcatgtgaagtaaagatcataattagctgtgttaacacagaaaggaaatgggaactttacattttttaattccctggagctctcattttcaagagatatccatttgctaactttattcaataaatgtgactaaactgaga

SEQ ID NO: 289266 - DNA, 475 bp, Homo sapiens
aaaaatggagattctccagggacccttccgtatctgcctaggcattttgctgtctcctcctaatacgctgttgctgtactggacacttgctcccatctactctcttctctggaatccacgggggattcctaaggatgtcaccacagtgttggccagatgcacaggtcacaggggactgaatctcatcaccccacaaacataccattcaggttttgccaagaatgacactgtaaatgtaacaaagcttccgtgcttgttagtgaacaccaactcagctcctctcctgtattcagaaatcaggatgagatgaaaacaacaagcaggccaggtacggtggctcacgcctgtaatcccagcactttgggaggatgaggcaggtggatcacctgaggtcgggagtttgagaccaccctgatcaaaacagagaaaccccatctctactgaaaatacaaaattagccaggcatggtggcaaa

SEQ ID NO: 289267 - DNA, 1128 bp, Homo sapiens
agacaacttcaacaagaagcggctgacagcctaaaaaaattaactacgttagagtctccactggaaggtataaatgacaataaataagtgaaatgtatttggaaatgaagactttggttgccatggagacttaaaaacagatcaactgaaaatggatattctgattaagtttgataatcttatggcggagaaggaagctgtatcttcaaaatgtgtcaatttggctaaagagaatcaagtttttcaacaggacacaacaggaatgtgaaaaatttgaggaggataaaagatgttggaagaagaaatattaaatcttaagacacatatggaaaacagtatggtagaacttagtaaactacaagaatataaatcagagctagatgaaagggcaatgcaggcagtagaaaaattagacgaaatacatttacagatcgaataagaaaatagcaatgatcagtatcagctctttatggagaaagagcaggtgaaatattttctcagcactcttcctgcaaggcgaggtcgagagtcaccttgtgttgaaaatcttactagtataggactcaacgaaaatatattccccaaatgcccgtaagaattcctacttcaagcctcagacttcaaataattgccagaactacttgactgaggatgttccagcataagaagatatattctactcaagtccttgttccaccttttcaaatctcactggtctatttcccagtgggtttctaaaccaagtaagtacatttgcaatggtaatagtgacaccagtgactgaagttttggccaatctctcaaaattgagaaaataaccaaagggaaggcattgttaaagtgaactaagtatggcctgagaaggactccataattctatatatgagtccttgtggatgaactgcaacctaccttaataggtatacaagaatgaaaaactaacttgagagtatgcacctggaacaacagctacatcttggccaatcccagtggccaaacttcaaccactcaggcactgccaaatgttcaaaatgtgttcaaagaaggcaaacgctgagttgtttctgtacctcacttctgatttcggtatgccatttcccttttgtctataaatcttcttccaccaca

SEQ ID NO: 289268 - DNA, 585 bp, Homo sapiens
gccggtccgcgagcgcgtgtggtgtctgccttgtgagcactgcgggttcgctggaccccgcggccagggccgcgccccgcaccgcagctgtcggattacccaccgttcggttttccgctgtggctgaacacagcggctctgcccttgccagtctccatctcacctcggggatcggcaaatgcacacatcatggattctccggatgctccaacccgcggactccaatgggcgccccaagacgcccccagacccagcgcggcgccccaagcacatgggaccctctcaaggcaactcgccgcgcagtcagcggccgactagcagacccagagcagcgaggtcacggtgtccgcggcctcagcaggaaggaccccgcgatggttcttcacaattcacccccgcgaacaacgcacccgagcctgcgcgcacggagggctgccgcgcgtggaactgagcgggtcctgggttggtttgcggccctcttccctccgcccactcacatccctgccgggtgcgtccgcgctcacctgtcagtgcggcgggtcctcggggcctgcgctttcgacgcgtggcgctgagtgcggccgc

SEQ ID NO: 289269 - DNA, 347 bp, Homo sapiens
ctccttctccaaaaggttggtacttcactgatagacctttagttttaggatttgtactgacgtaaataatgctgggaccttttaagggccatagctcctgtaactggcagtagttaaatcctcttccttgtgaatttctattaatgaagttactttttcccttcttaggcaactaaagcagaggcagtggcccctacgtaaacccaaaaccaatcctaagaataagagatcaacaaatatttggagaaattacagctatggaaagatctgtgtcacaagcttgatgtttgaacaaattaggatcctactctaaacttgaatatatcagagttaaagttttagggatt

SEQ ID NO: 289270 - DNA, 401 bp, Homo sapiens
cgatcactgtccacgtgttaacaaaaaccagagccgccaccaccccatcactggccttgcggggcaggagtgactgtccccaggttgtcctgcagatgaagaagccaattcagagcaggtgaatgatctgcccaggggcgcacagccagtcagcggcagggcccagaggacatccaggtgcactcagctcccaagccaatggtgtttatgacacccttcttcccccaactaaagtccgcaagtggccaagcgcggtggttcacgcctgtaatcccagcactttgggaggccaaggcaggcagatcacctgaggtcaggagttcgagacctggccaacatgacaaagcgagacaccatctctacaacaaatacaaaaattagccaggcgtggtggcatgcac

SEQ ID NO: 289271 - DNA, 2448 bp, Homo sapiens
  misc_feature (257)..(257): n is a, c, g, or t
  misc_feature (307)..(307): n is a, c, g, or t
  misc_feature (322)..(322): n is a, c, g, or t
  misc_feature (330)..(330): n is a, c, g, or t
  misc_feature (2448)..(2448): n is a, c, g, or t
tgagcagtagcaagatttattgcaaagaatgaaagaacaaagctgccacagtgtggaaagggacctgagggggttgccaatgctggctcgggcagcctgcttttattctcttatctgacccaacccacatcctgctgattggtagagccgaggggtgtgttttgacagagcactgattggtgcgtttacaatccctgagctagatacaaaagttctccatgtccccatcagattagttagatacagagtatggacanaaaggttctccaaggccccaccagagcagctagatacagagtgtcattgntgcactcacaaaccntgagctanacacagggtgctgattggtgtgtgtacaaaccttgagttagatacagagtgccgattggtgtatttacaatccctgagctatatataaaggttctccatgtccccaccagactcaggagactagctggcttcacccatggatcgcgcactggggctgcaggtggagctgcctaccagtcccacgccatgcgcttgcactcctcagaccttgggtggtcgatgagactgggcgccgtggagtagggggcggcgctcctgagggaggctcgggccgcacaggagcccacggagggggtggggggctcaggcatggagggctgcagttacggacccctgccccgcggaaaggcagctaaggcccggcgagaaattgagcacagcgccggtgggctggtactgctggaggacccagtacaccctccgcagccactggcccgggtgctaagcccctcattgcacgcggctggcagggccggcaggctgctctgagggcagggcccgccaagcccacgcccacctggaactccagctggcccgcaagcgccgcgcgcagcccgggttcccactcgcgcctctccctccatacctccctgcaagctgagggagccggctacggccttggccagcccagaaaggggctcccacagtgcagtggtgggccgaagggcttctcaagtgccgccaaagtgggagcccaggcagaggaggcacggagagcgagcgagggctgtgaggactgccagcacgctgtcacctctcacagggaaacaccctgcaactttgcaagagcacggagagtgtggggcagggctaccccgcaggcctttggtctggcaccctcccttcctggtcctctgtctggtgttggcgggcaccttcgcagctgtggtggtcttggcggcgggtggaggcaggccaagacagcctgctctgaccagggacaggcacagaaaaagtggggaggggattgccggcggggtgttgtggtgtgaggcagctacttgctcagggttcctgagctgtgggaggccctcatgtgctgggtgctggacaggctctgctgctgtccgtgtgtgcggtgtcctcttctcttggtctcactgaggggtgggcgtgtccacccgagggaaccgctgtgaatagaagtagctgcagggctgtgcctgactctctccatgagactctagtggtttcatgggaggttgtatatgctcatggcctaaacatccttggatgcagcactggcagagggaagaaatcgtgtctgaggagctggtgcctgccttgcagaggacagcagccccgtgcacggtgaacccgagtattgagcaccttgtgtttctaggataagcctgctggacacaggtaccgggagcaggggtatttccatggctggcctgggcgcgcagattccccttcctccagggattttcccagtgaaatgtgtccttcaactttctgctgtttatgaagggtcctttgaggtgctattctcccttgtgagtgctgtgcttggctttctgtccctataacgtgccctcagggtgcccgcaattaagctgcccttctatctgcatgaatctgtccttggttcccctcgttgtcccccatgtcctgaatcctggctgagccccggtgcctaccaccttgtttcccccaaccccgctcctgggagctcggcgcccacccacctgtcagccatcccgaattggcagctgcaaggatatggctctgacccagaagccgtggatgccctgcggcctgggacattcactggagcccagctccaagtgaaggacgtccagcgagttggttgctggccggggcgtcctggggccagggccaggctgtgcctgcgggtcctcctgctgccgctccacattggcctcctccttggccaccacctctatctctgccatgatgtcatcccccactagccactagcatgcctcctcccccagggttgcctccctgctctgcgcacaggctgccctttcctgcagcacctcccccttaacatggtgccctccttgaggctcccacagactaaggcctacactgcccatctcatgtccttggcacccctagactctagaggaagctcccggaagggccccn

SEQ ID NO: 289272 - DNA, 1217 bp, Homo sapiens
ttcagggaactcaaaataggtgtgtggcctctagtcaccaaatggcttcttggctctgctttaaatttaggcccactcagccacttaagatccatcttgaaggactggctctttcagggtcacatttgttcatgcaaactattgatattgcatgctatttaccactatttcagatgaaattgccacaggatataaatcattggactatttaagagagcaaaggcttttggaagctgccacagtttcattcccaggtcctccacttaccagcaatgagacttcatgtgacctcaggtgctcctgctcaccttcatatttttttaagtatacatctgtgtatcatgaacaattcttatctcaaaatttaaaaatgaagtacacattataacagcattacaatcatgaacacatgtgctatgttctctgggagacaaagagaaactatttaccctactttccagaaaaggacactgacacttagagggaacacaagtgttgaaaccaggtctgaaatccaagacccaagatgcttttttgctgctaaagcattcattatccagactctgcctgcatgaaggtgatgcataggaaatgatgaacctggtaaaagcttccagtcttaaaaatactccaagtaaggctctttaaggcttctggtagggacattttattttttggtaaagccacaatagatagaaatgccataaaaacaaacatgtaaacaaggtatcagaactttggttcactgaaacatctcacacctaaaacacctgaggtacaaaggcaccttgctaggcgctagacagctaactctgctgcagccactttgatcctagccttggggccagggatggcacaggctgaatggaagggctgggacttcagtcacacaggagtcgccctagtatggtctccctctgctccagacaaacattcatttctccaaaaatcagcctgataggaacatacaaaggaacatacaaaggtgtctgtcacgttgacatgggctgaaggaccaggaaggggaaggacagaaaaggatgtcagtcaacttctgttgatccacaaggtctcaagaactcctgtcctcgttcatggaaccacttattggagacccacttgcagcccacaagcacagggcaggcagcatgtcttgttcggtagtcaccttccccgctccgcaagaggttgtaccagaacacagctgtaccctggga

SEQ ID NO: 289273 - DNA, 201 bp, Homo sapiens
ctcggcttcccaaaatgttgggattacaggtgggagccaccatgcccggcctgtaaccctaattattaaataatttgctgtggaatggattctaatattcaataatagaagttgtaattctgaacccttggaaatggaggaaggctagaggatatgataaaggagtccaaggagcatggcggacaccgacctgttcatgga

SEQ ID NO: 289274 - DNA, 384 bp, Homo sapiens
atttgtcacggtaagaaaaatctgtgagccttcttaacactgagcgtaaagaactcttgagagactcttaggacagaaaaccttaaagagggcaggtctttcacagttgctctgatgactgcatactttcgggatcatagtaagccagtcatgatctagtgtgatctgatgtgacagcagttgagatttataccaagatccatgtctttgtctgacctatgataaactttgtatggagatacatagtttcctttttccagaaggattggtaaggctgacattgggttgttgcatgattttggaggggaaacattaagctctggtcatagcttttcaccccaaggtcgacttggaattaatgaaaactttgctatcatgaccaag

SEQ ID NO: 289275 - DNA, 592 bp, Homo sapiens
cacaatttactgtccaatcttctttctttatgcagttgaacatatccagtttggaaatattatgaataaagatatttcgaacacttatgtgcgtgtatcttgatgcacataagcgtacatttttgtgggggaatatacctaggagtggattcatgggtcatgcatatctttaacttcagcagataagcagaaagcatttgacaaagtggttgagaaggtaatgagaattcctgttgctccacgttctaataaaaaacacttggattttctttcttttttttcaaatgacagggctctataatgggatcattgcatttctctgattactaatgagagtgagtactccttcatatgtttagtagatatttgaattgtatttgtttttgttgttgttgtagctcttcatgaaaagtactttctaaacagcatttttgagcaccctttagggagccaaaggccaaataagttagagtatttgtcacaacatggcaataagagaggcgaattcatccattaattgcttgccatatgcttatcactggaatatattttgcagcatctcctgacatcactatttatcccttttaccaaa

SEQ ID NO: 289276 - DNA, 6673 bp, Homo sapiens
  misc_feature (46)..(47): n is a, c, g, or t
  misc_feature (81)..(81): n is a, c, g, or t
  misc_feature (109)..(109): n is a, c, g, or t
  misc_feature (4106)..(4106): n is a, c, g, or t
  misc_feature (4320)..(4320): n is a, c, g, or t
gaattccctggatacagcctttttatgacttttacttcctttatanncaaattccaacgtcttctcattcctccaccaggnctgtgccaacctgggcccaacccaaggncctcactaaaccatccaatcagtaggagccatagactactttatttagccaaagcaaaaatgagtcaactgaattctgtttttccatttacttctgtctgtttttccttcctcttgccaccctcagtgccacaagaggggacccctctcggtagccctgaggctctggcgccttcaagtgagaagctaagcaccagcctctgctgggctgcagaagcggcggcggcggcagcagcagcagcagcatcaggaaggctctcgggccagcgcggtgaacccgggctgggcagcaggtcgcggagccgcgagccaggatggaggcagagggcagcagcgcgccggcccgggcgggcagcggagagggcagcgacagcgccggcggggccacgctcaaagcccccaagcatctctggaggcacgagcagcaccaccagtacccgctccggcagccccagttccgcctcctgcatccccatcaccacctgcccccgccgccgccaccctcgccccagccccagccccagtgtccgctacagccgccgccgccgccccccctgccgccgcccccgccgccgcccggggctgcccgcggccgctacgcctcgagcggggccaccggccgcgtccggcatcgcggctactcggacaccgagcgctacctgtactgtcgcgccatggaccgcacctcctacgcggtggagaccggccaccggcccggcctgaagaaatccaggatgtcctggccctcctcgttccagggactcaggcgttttgatgtggacaatggcacatctgcgggacggagtcccttggatcccatgaccagcccaggatccgggctaattctccaagcaaattttgtccacagtcaacgacgggagtccttcctgtatcgatccgacagcgattatgacctctctccaaagtctatgtcccggaactcctccattgccagtgatatacacggagatgacttgattgtgactccatttgctcaggtcttggccagtctgcgaactgtacgaaacaactttgctgcattaactaatttgcaagatcgagcacctagcaaaagatcacccatgtgcaaccaaccatccatcaacaaagccaccataacagaggaggcctaccagaaactggccagcgagaccctggaggagctggactggtgtctggaccagctagagaccctacagaccaggcactccgtcagtgagatggcctccaacaagtttaaaaggatgcttaatcgggagctcacccatctctctgaaatgagtcggtctggaaatcaagtgtcagagtttatatcaaacacattcttagataagcaacatgaagtggaaattccttctccaactcagaaggaaaaggagaaaaagaaaagaccaatgtctcagatcagtggagtcaagaaattgatgcacagctctagtctgactaattcaagtatcccaaggtttggagttaaaactgaacaagaagatgtccttgccaaggaactagaagatgtgaacaaatggggtcttcatgttttcagaatagcagagttgtctggtaaccggcccttgactgttatcatgcacaccatttttcaggaacgggatttattaaaaacatttaaaattccagtagatactttaattacatatcttatgactctcgaagaccattaccatgctgatgtggcctatcacaacaatatccatgctgcagatgttgtccagtctactcatgtgctattatctacacctgctttggaggctgtgtttacagatttggagattcttgcagcaatttttgccagtgcaatacatgatgtagatcatcctggtgtgtccaatcaatttctgatcaatacaaactctgaacttgccttgatgtacaatgattcctcagtcttagagaaccatcatttggctgtgggctttaaattgcttcaggaagaaaactgtgacattttccagaatttgaccaaaaaacaaagacaatctttaaggaaaatggtcattgacatcgtacttgcaacagatatgtcaaaacacatgaatctactggctgatttgaagactatggttgaaactaagaaagtgacaagctctggagttcttcttcttgataattattccgataggattcaggttcttcagaatatggtgcactgtgcagatctgagcaacccaacaaagcctctccagctgtaccgccagtggacggaccggataatggaggagttcttccgccaaggagaccgagagagggaacgtggcatggagataagccccatgtgtgacaagcacaatgcttccgtggaaaaatcacaggtgggcttcatagactatattgttcatcccctctgggagacatgggcagacctcgtccaccctgacgcccaggatattttggacactttggaggacaatcgtgaatggtaccagagcacaatccctcagagcccctctcctgcacctgatgacccagaggagggccggcagggtcaaactgagaaattccagtttgaactaactttagaggaagatggtgagtcagacacggaaaaggacagtggcagtcaagtggaagaagacactagctgcagtgactccaagactctttgtactcaagactcagagtctactgaaattccccttgatgaacaggttgaagaggaggcagtaggggaagaagaggaaagccagcctgaagcctgtgtcatagatgatcgttctcctgacacgtaacagtgcaaaaactttcatgccttttttttttttaagtagaaaaattgtttccaaagtgcatgtcacatgccacaaccacggtcacacctcactgtcatctgccaggacgtttgttgaacaaaactgaccttgactactcagtccagcgctcaggaatatcgtaaccagttttttcacctccatgttcatccgagcaaggtggacatcttcacgaacagcgtttttaacaagatttcagcttggtagagctgacaaagcagataaaatctactccaaattattttcaagagagtgtgactcatcaggcagcccaaaagtttattggacttggggtttctattcctttttatttgtttgcaatattttcagaagaaaggcattgcacagagtgaacttaatggacgaagcaacaaatatgtcaagaacaggacatagcacgaatctgttaccagtaggaggaggatgagccacagaaattgcataattttctaatttcaagtcttcctgatacatgactgaatagtgtggttcagtgagctgcactgacctctacattttgtatgatatgtaaaacagattttttgtagagcttacttttattattaaatgtattgaggtattatatttaaaaaaaactatgttcagaacttcatctgccactggttatttttttctaaggagtaacttgcaagttttcagtacaaatctgtgctacactggataaaaatctaatttatgaattttacttgcaccttatagttcatagcaattaactgatttgtagtgattcattgtttgttttatataccaatgacttccatattttaaaagagaaaaacaactttatgttgcaggaaaccctttttgtaagtctttattatttactttgcattttgtttcactctttccagataagcagagttgctcttcaccagtgtttttcttcatgtgcaaagtgactatttgttctataatacttttatgtgtgttatatcaaatgtgtcttaagcttcatgcaaactcagtcatcagttcgtgttgtctgaagcaagtgggagatatataaatacccagtagctaaaatggtcagtcttttttagatgttttcctacttagtatctcctaataacgttttgctgtgtcactagatgttcatttcacaagtgcatgtctttctaataatccacacatttcatgctctaataatccacacatttcatgctcatttttattgtttttacagccagttatagnaagaaaaaggtttttccccttgtgctgctttataatttagcgtgtgtctgaaccttatccatgtttgctagatgaggtcttgtcaaatatatcactaccattgtcaccggtgaaaagaaacaggtagttaagttagggttaacattcatttcaaccacgaggttgtatatcatgactagcttttactcttggtttacagagaaaagttaaacanccaactaggcagtttttaagaatattaacaatatattaacaaacaccaatacaactaatcctatttggttttaatgatttcaccatgggattaagaactatatcaggaacatccctgagaaacggttttaagtgtagcaactactcttccttaatggacagccacataacgtgtaggaagtcctttatcacttatcctcgatccataagcatatcttgcagaggggaactacttctttaaacacatggagggaaagaagatgatgccactggcaccagagggttagtactgtgatgcatcctaaaatatttattatattggtaaaaattctggttaaataaaaaattagagatcactcttggctgatttcagcaccaggaactgtattacagttttagagattaattcctagtgtttacctgattatagcagttggcatcatggggcatttaattctgactttatccccacgtcagccttaataaagtcttctttaccttctctatgaagactttaaagcccaaataatcatttttcacattgatattcaagaattgagatagatagaagccaaagtgggtatctgacaagtggaaaatcaaacgtttaagaagaattacaactctgaaaagcatttatatgtggaacttctcaaggagcctcctggggactggaaagtaagtcatcagccaggcaaatgactcatgctgaagagagtccccatttcagtcccctgagatctagctgatgcttagatcctttgaaataaaaattatgtctttataactctgatcttttacataaagcagaagaggaatcaactagttaattgcaaggtttctactctgtttcctctgtaaagatcagatggtaatctttcaaataagaaaaaaataaagacgtatgtttgaccaagtagtttcacaagaatatttgggaacttgtttcttttaattttatttgtccctgagtgaagtctagaaagaaaggtaaagagtctagagtttattcctctttccaaaacattctcattcctctcctccctactcttagtatttcccccacagagtgcctagaatcttaataatgaataaaataaaaagcagcaatatgtcattaacaaatccagacctgaaagggtaaagggtttataactgcactaataaagagaggctctttttttttcttccagtttgttggtttttaatggtaccgtgttgtaaagatacccactaatggacaatcaaattgcagaaaaggctcaatatccaagagacagggactaatgcactgtacaatcggcttatccttgcccttctctcttgccaaagtgtgcttcagaaatatatactgctttaaaaaagaataaaagaatatccttttacaagtggctttacatttcctaaaatgccataagaaaatgcaatatctgggtactgtatggggaaaaaaatgtccaagtttgtataaaaccagtgcatttcagcttgcaagttactgaacacaataatgctgttttaattttgttttatatcagttaaaattcacaataatgtagatagaacaaattacagacaaggaaagaaaaaacttgaatgaaatggattttacagaaagctttatgataatttttgaatgcattatttattttttgtgccatgcattttttttctcaccaaatgaccttacctgtaatacagtcttgtttgtctgtttacaaccatgtatttattgcaatgtacatactgtaatgttaattgtaaattatctgttcttattaaaacatcatcccatgatgggatggtgttgatatatttggaaactcttggtgagagaatgaatggtgtgtatacatactctgtacatttttcttttctcctgtaatatagtcttgtcaccttagagcttgtttatggaagattcaagaaaactataaaatacttaaagatatataaatttaaaaaaacatagctgcaggtctttggtcccagggctgtgccttaactttaaccaatattttcttctgttttgctgcatttgaaaggtaacagtggagctagggctgggcattttacatccaggcttttaattgattagaattctgccaataggtggattttacaaaaccacagacaacctctgaaagattctgagacccttttgagacagaagctcttaagtacttcttgccagggagcagcactgcatgtgtgatggttgtttgccatctgttgatcaggaactacttcagctacttggcatttgattatttcctttttttttttttttaactcggaaacacaactgggggaaatatattctttcccagtgattataaacaatctttttcttt

SEQ ID NO: 289277 - DNA, 5972 bp, Homo sapiens
  misc_feature (2)..(2): n is a, c, g, or t
  misc_feature (3405)..(3405): n is a, c, g, or t
  misc_feature (3619)..(3619): n is a, c, g, or t
gnattcaatacttgttgcaataattgcccacgatagctgctcaaacaagagagttggaattcatctgtaaaaatcactacatgtaacgtaggagacaagaaaaatattaatgacagaagatctgcgaacatgatgcacgtgaataattttccctttagaaggcattcctggatatgttttgatgtggacaatggcacatctgcgggacggagtcccttggatcccatgaccagcccaggatccgggctaattctccaagcaaattttgtccacagtcaacgacgggagtccttcctgtatcgatccgacagcgattatgacctctctccaaagtctatgtcccggaactcctccattgccagtgatatacacggagatgacttgattgtgactccatttgctcaggtcttggccagtctgcgaactgtacgaaacaactttgctgcattaactaatttgcaagatcgagcacctagcaaaagatcacccatgtgcaaccaaccatccatcaacaaagccaccataacagaggaggcctaccagaaactggccagcgagaccctggaggagctggactggtgtctggaccagctagagaccctacagaccaggcactccgtcagtgagatggcctccaacaagtttaaaaggatgcttaatcgggagctcacccatctctctgaaatgagtcggtctggaaatcaagtgtcagagtttatatcaaacacattcttagataagcaacatgaagtggaaattccttctccaactcagaaggaaaaggagaaaaagaaaagaccaatgtctcagatcagtggagtcaagaaattgatgcacagctctagtctgactaattcaagtatcccaaggtttggagttaaaactgaacaagaagatgtccttgccaaggaactagaagatgtgaacaaatggggtcttcatgttttcagaatagcagagttgtctggtaaccggcccttgactgttatcatgcacaccatttttcaggaacgggatttattaaaaacatttaaaattccagtagatactttaattacatatcttatgactctcgaagaccattaccatgctgatgtggcctatcacaacaatatccatgctgcagatgttgtccagtctactcatgtgctattatctacacctgctttggaggctgtgtttacagatttggagattcttgcagcaatttttgccagtgcaatacatgatgtagatcatcctggtgtgtccaatcaatttctgatcaatacaaactctgaacttgccttgatgtacaatgattcctcagtcttagagaaccatcatttggctgtgggctttaaattgcttcaggaagaaaactgtgacattttccagaatttgaccaaaaaacaaagacaatctttaaggaaaatggtcattgacatcgtacttgcaacagatatgtcaaaacacatgaatctactggctgatttgaagactatggttgaaactaagaaagtgacaagctctggagttcttcttcttgataattattccgataggattcaggttcttcagaatatggtgcactgtgcagatctgagcaacccaacaaagcctctccagctgtaccgccagtggacggaccggataatggaggagttcttccgccaaggagaccgagagagggaacgtggcatggagataagccccatgtgtgacaagcacaatgcttccgtggaaaaatcacaggtgggcttcatagactatattgttcatcccctctgggagacatgggcagacctcgtccaccctgacgcccaggatattttggacactttggaggacaatcgtgaatggtaccagagcacaatccctcagagcccctctcctgcacctgatgacccagaggagggccggcagggtcaaactgagaaattccagtttgaactaactttagaggaagatggtgagtcagacacggaaaaggacagtggcagtcaagtggaagaagacactagctgcagtgactccaagactctttgtactcaagactcagagtctactgaaattccccttgatgaacaggttgaagaggaggcagtaggggaagaagaggaaagccagcctgaagcctgtgtcatagatgatcgttctcctgacacgtaacagtgcaaaaactttcatgccttttttttttttaagtagaaaaattgtttccaaagtgcatgtcacatgccacaaccacggtcacacctcactgtcatctgccaggacgtttgttgaacaaaactgaccttgactactcagtccagcgctcaggaatatcgtaaccagttttttcacctccatgttcatccgagcaaggtggacatcttcacgaacagcgtttttaacaagatttcagcttggtagagctgacaaagcagataaaatctactccaaattattttcaagagagtgtgactcatcaggcagcccaaaagtttattggacttggggtttctattcctttttatttgtttgcaatattttcagaagaaaggcattgcacagagtgaacttaatggacgaagcaacaaatatgtcaagaacaggacatagcacgaatctgttaccagtaggaggaggatgagccacagaaattgcataattttctaatttcaagtcttcctgatacatgactgaatagtgtggttcagtgagctgcactgacctctacattttgtatgatatgtaaaacagattttttgtagagcttacttttattattaaatgtattgaggtattatatttaaaaaaaactatgttcagaacttcatctgccactggttatttttttctaaggagtaacttgcaagttttcagtacaaatctgtgctacactggataaaaatctaatttatgaattttacttgcaccttatagttcatagcaattaactgatttgtagtgattcattgtttgttttatataccaatgacttccatattttaaaagagaaaaacaactttatgttgcaggaaaccctttttgtaagtctttattatttactttgcattttgtttcactctttccagataagcagagttgctcttcaccagtgtttttcttcatgtgcaaagtgactatttgttctataatacttttatgtgtgttatatcaaatgtgtcttaagcttcatgcaaactcagtcatcagttcgtgttgtctgaagcaagtgggagatatataaatacccagtagctaaaatggtcagtcttttttagatgttttcctacttagtatctcctaataacgttttgctgtgtcactagatgttcatttcacaagtgcatgtctttctaataatccacacatttcatgctctaataatccacacatttcatgctcatttttattgtttttacagccagttatagnaagaaaaaggtttttccccttgtgctgctttataatttagcgtgtgtctgaaccttatccatgtttgctagatgaggtcttgtcaaatatatcactaccattgtcaccggtgaaaagaaacaggtagttaagttagggttaacattcatttcaaccacgaggttgtatatcatgactagcttttactcttggtttacagagaaaagttaaacanccaactaggcagtttttaagaatattaacaatatattaacaaacaccaatacaactaatcctatttggttttaatgatttcaccatgggattaagaactatatcaggaacatccctgagaaacggttttaagtgtagcaactactcttccttaatggacagccacataacgtgtaggaagtcctttatcacttatcctcgatccataagcatatcttgcagaggggaactacttctttaaacacatggagggaaagaagatgatgccactggcaccagagggttagtactgtgatgcatcctaaaatatttattatattggtaaaaattctggttaaataaaaaattagagatcactcttggctgatttcagcaccaggaactgtattacagttttagagattaattcctagtgtttacctgattatagcagttggcatcatggggcatttaattctgactttatccccacgtcagccttaataaagtcttctttaccttctctatgaagactttaaagcccaaataatcatttttcacattgatattcaagaattgagatagatagaagccaaagtgggtatctgacaagtggaaaatcaaacgtttaagaagaattacaactctgaaaagcatttatatgtggaacttctcaaggagcctcctggggactggaaagtaagtcatcagccaggcaaatgactcatgctgaagagagtccccatttcagtcccctgagatctagctgatgcttagatcctttgaaataaaaattatgtctttataactctgatcttttacataaagcagaagaggaatcaactagttaattgcaaggtttctactctgtttcctctgtaaagatcagatggtaatctttcaaataagaaaaaaataaagacgtatgtttgaccaagtagtttcacaagaatatttgggaacttgtttcttttaattttatttgtccctgagtgaagtctagaaagaaaggtaaagagtctagagtttattcctctttccaaaacattctcattcctctcctccctactcttagtatttcccccacagagtgcctagaatcttaataatgaataaaataaaaagcagcaatatgtcattaacaaatccagacctgaaagggtaaagggtttataactgcactaataaagagaggctctttttttttcttccagtttgttggtttttaatggtaccgtgttgtaaagatacccactaatggacaatcaaattgcagaaaaggctcaatatccaagagacagggactaatgcactgtacaatcggcttatccttgcccttctctcttgccaaagtgtgcttcagaaatatatactgctttaaaaaagaataaaagaatatccttttacaagtggctttacatttcctaaaatgccataagaaaatgcaatatctgggtactgtatggggaaaaaaatgtccaagtttgtataaaaccagtgcatttcagcttgcaagttactgaacacaataatgctgttttaattttgttttatatcagttaaaattcacaataatgtagatagaacaaattacagacaaggaaagaaaaaacttgaatgaaatggattttacagaaagctttatgataatttttgaatgcattatttattttttgtgccatgcattttttttctcaccaaatgaccttacctgtaatacagtcttgtttgtctgtttacaaccatgtatttattgcaatgtacatactgtaatgttaattgtaaattatctgttcttattaaaacatcatcccatgatgggatggtgttgatatatttggaaactcttggtgagagaatgaatggtgtgtatacatactctgtacatttttcttttctcctgtaatatagtcttgtcaccttagagcttgtttatggaagattcaagaaaactataaaatacttaaagatatataaatttaaaaaaacatagctgcaggtctttggtcccagggctgtgccttaactttaaccaatattttcttctgttttgctgcatttgaaaggtaacagtggagctagggctgggcattttacatccaggcttttaattgattagaattctgccaataggtggattttacaaaaccacagacaacctctgaaagattctgagacccttttgagacagaagctcttaagtacttcttgccagggagcagcactgcatgtgtgatggttgtttgccatctgttgatcaggaactacttcagctacttggcatttgattatttcctttttttttttttttaactcggaaacacaactgggggaaatatattctttcccagtgattataaacaatctttttcttt

SEQ ID NO: 289278 - DNA, 6187 bp, Homo sapiens
  misc_feature (3620)..(3620): n is a, c, g, or t
  misc_feature (3834)..(3834): n is a, c, g, or t
ggaggcaggcgactgaatgcactaacagcagcaggctcagacctgcttccctggacatttccgggaccgtgagcgagggaaccacgttgccctggattcttgccagctgtacaaagttgaccaggaaaatggctcagcagacaagcccggacactttaacagtacctgaagtggataatccgcattgtccaaacccgtggctgaacgaagaccttgtgaaatccttgcgagaaaacctgttgcagcatgagaagtccaagacagcgaggaaatcggtttctcccaagctctctccagtgatctctccgagaaattcccccaggcttctgcgcagaatgcttctcagcagcaacatccccaaacagcggcgtttcacggtggcacatacatgttttgatgtggacaatggcacatctgcgggacggagtcccttggatcccatgaccagcccaggatccgggctaattctccaagcaaattttgtccacagtcaacgacgggagtccttcctgtatcgatccgacagcgattatgacctctctccaaagtctatgtcccggaactcctccattgccagtgatatacacggagatgacttgattgtgactccatttgctcaggtcttggccagtctgcgaactgtacgaaacaactttgctgcattaactaatttgcaagatcgagcacctagcaaaagatcacccatgtgcaaccaaccatccatcaacaaagccaccataacagaggaggcctaccagaaactggccagcgagaccctggaggagctggactggtgtctggaccagctagagaccctacagaccaggcactccgtcagtgagatggcctccaacaagtttaaaaggatgcttaatcgggagctcacccatctctctgaaatgagtcggtctggaaatcaagtgtcagagtttatatcaaacacattcttagataagcaacatgaagtggaaattccttctccaactcagaaggaaaaggagaaaaagaaaagaccaatgtctcagatcagtggagtcaagaaattgatgcacagctctagtctgactaattcaagtatcccaaggtttggagttaaaactgaacaagaagatgtccttgccaaggaactagaagatgtgaacaaatggggtcttcatgttttcagaatagcagagttgtctggtaaccggcccttgactgttatcatgcacaccatttttcaggaacgggatttattaaaaacatttaaaattccagtagatactttaattacatatcttatgactctcgaagaccattaccatgctgatgtggcctatcacaacaatatccatgctgcagatgttgtccagtctactcatgtgctattatctacacctgctttggaggctgtgtttacagatttggagattcttgcagcaatttttgccagtgcaatacatgatgtagatcatcctggtgtgtccaatcaatttctgatcaatacaaactctgaacttgccttgatgtacaatgattcctcagtcttagagaaccatcatttggctgtgggctttaaattgcttcaggaagaaaactgtgacattttccagaatttgaccaaaaaacaaagacaatctttaaggaaaatggtcattgacatcgtacttgcaacagatatgtcaaaacacatgaatctactggctgatttgaagactatggttgaaactaagaaagtgacaagctctggagttcttcttcttgataattattccgataggattcaggttcttcagaatatggtgcactgtgcagatctgagcaacccaacaaagcctctccagctgtaccgccagtggacggaccggataatggaggagttcttccgccaaggagaccgagagagggaacgtggcatggagataagccccatgtgtgacaagcacaatgcttccgtggaaaaatcacaggtgggcttcatagactatattgttcatcccctctgggagacatgggcagacctcgtccaccctgacgcccaggatattttggacactttggaggacaatcgtgaatggtaccagagcacaatccctcagagcccctctcctgcacctgatgacccagaggagggccggcagggtcaaactgagaaattccagtttgaactaactttagaggaagatggtgagtcagacacggaaaaggacagtggcagtcaagtggaagaagacactagctgcagtgactccaagactctttgtactcaagactcagagtctactgaaattccccttgatgaacaggttgaagaggaggcagtaggggaagaagaggaaagccagcctgaagcctgtgtcatagatgatcgttctcctgacacgtaacagtgcaaaaactttcatgccttttttttttttaagtagaaaaattgtttccaaagtgcatgtcacatgccacaaccacggtcacacctcactgtcatctgccaggacgtttgttgaacaaaactgaccttgactactcagtccagcgctcaggaatatcgtaaccagttttttcacctccatgttcatccgagcaaggtggacatcttcacgaacagcgtttttaacaagatttcagcttggtagagctgacaaagcagataaaatctactccaaattattttcaagagagtgtgactcatcaggcagcccaaaagtttattggacttggggtttctattcctttttatttgtttgcaatattttcagaagaaaggcattgcacagagtgaacttaatggacgaagcaacaaatatgtcaagaacaggacatagcacgaatctgttaccagtaggaggaggatgagccacagaaattgcataattttctaatttcaagtcttcctgatacatgactgaatagtgtggttcagtgagctgcactgacctctacattttgtatgatatgtaaaacagattttttgtagagcttacttttattattaaatgtattgaggtattatatttaaaaaaaactatgttcagaacttcatctgccactggttatttttttctaaggagtaacttgcaagttttcagtacaaatctgtgctacactggataaaaatctaatttatgaattttacttgcaccttatagttcatagcaattaactgatttgtagtgattcattgtttgttttatataccaatgacttccatattttaaaagagaaaaacaactttatgttgcaggaaaccctttttgtaagtctttattatttactttgcattttgtttcactctttccagataagcagagttgctcttcaccagtgtttttcttcatgtgcaaagtgactatttgttctataatacttttatgtgtgttatatcaaatgtgtcttaagcttcatgcaaactcagtcatcagttcgtgttgtctgaagcaagtgggagatatataaatacccagtagctaaaatggtcagtcttttttagatgttttcctacttagtatctcctaataacgttttgctgtgtcactagatgttcatttcacaagtgcatgtctttctaataatccacacatttcatgctctaataatccacacatttcatgctcatttttattgtttttacagccagttatagnaagaaaaaggtttttccccttgtgctgctttataatttagcgtgtgtctgaaccttatccatgtttgctagatgaggtcttgtcaaatatatcactaccattgtcaccggtgaaaagaaacaggtagttaagttagggttaacattcatttcaaccacgaggttgtatatcatgactagcttttactcttggtttacagagaaaagttaaacanccaactaggcagtttttaagaatattaacaatatattaacaaacaccaatacaactaatcctatttggttttaatgatttcaccatgggattaagaactatatcaggaacatccctgagaaacggttttaagtgtagcaactactcttccttaatggacagccacataacgtgtaggaagtcctttatcacttatcctcgatccataagcatatcttgcagaggggaactacttctttaaacacatggagggaaagaagatgatgccactggcaccagagggttagtactgtgatgcatcctaaaatatttattatattggtaaaaattctggttaaataaaaaattagagatcactcttggctgatttcagcaccaggaactgtattacagttttagagattaattcctagtgtttacctgattatagcagttggcatcatggggcatttaattctgactttatccccacgtcagccttaataaagtcttctttaccttctctatgaagactttaaagcccaaataatcatttttcacattgatattcaagaattgagatagatagaagccaaagtgggtatctgacaagtggaaaatcaaacgtttaagaagaattacaactctgaaaagcatttatatgtggaacttctcaaggagcctcctggggactggaaagtaagtcatcagccaggcaaatgactcatgctgaagagagtccccatttcagtcccctgagatctagctgatgcttagatcctttgaaataaaaattatgtctttataactctgatcttttacataaagcagaagaggaatcaactagttaattgcaaggtttctactctgtttcctctgtaaagatcagatggtaatctttcaaataagaaaaaaataaagacgtatgtttgaccaagtagtttcacaagaatatttgggaacttgtttcttttaattttatttgtccctgagtgaagtctagaaagaaaggtaaagagtctagagtttattcctctttccaaaacattctcattcctctcctccctactcttagtatttcccccacagagtgcctagaatcttaataatgaataaaataaaaagcagcaatatgtcattaacaaatccagacctgaaagggtaaagggtttataactgcactaataaagagaggctctttttttttcttccagtttgttggtttttaatggtaccgtgttgtaaagatacccactaatggacaatcaaattgcagaaaaggctcaatatccaagagacagggactaatgcactgtacaatcggcttatccttgcccttctctcttgccaaagtgtgcttcagaaatatatactgctttaaaaaagaataaaagaatatccttttacaagtggctttacatttcctaaaatgccataagaaaatgcaatatctgggtactgtatggggaaaaaaatgtccaagtttgtataaaaccagtgcatttcagcttgcaagttactgaacacaataatgctgttttaattttgttttatatcagttaaaattcacaataatgtagatagaacaaattacagacaaggaaagaaaaaacttgaatgaaatggattttacagaaagctttatgataatttttgaatgcattatttattttttgtgccatgcattttttttctcaccaaatgaccttacctgtaatacagtcttgtttgtctgtttacaaccatgtatttattgcaatgtacatactgtaatgttaattgtaaattatctgttcttattaaaacatcatcccatgatgggatggtgttgatatatttggaaactcttggtgagagaatgaatggtgtgtatacatactctgtacatttttcttttctcctgtaatatagtcttgtcaccttagagcttgtttatggaagattcaagaaaactataaaatacttaaagatatataaatttaaaaaaacatagctgcaggtctttggtcccagggctgtgccttaactttaaccaatattttcttctgttttgctgcatttgaaaggtaacagtggagctagggctgggcattttacatccaggcttttaattgattagaattctgccaataggtggattttacaaaaccacagacaacctctgaaagattctgagacccttttgagacagaagctcttaagtacttcttgccagggagcagcactgcatgtgtgatggttgtttgccatctgttgatcaggaactacttcagctacttggcatttgattatttcctttttttttttttttaactcggaaacacaactgggggaaatatattctttcccagtgattataaacaatctttttcttt

SEQ ID NO: 289279 - DNA, 6455 bp, Homo sapiens
  misc_feature (3888)..(3888): n is a, c, g, or t
  misc_feature (4102)..(4102): n is a, c, g, or t
ttgtttgtgaaacttcgcaggaagcagccggtcgtggagtcgcagaggctccagcggtctgggcaacctggagggcagtggctcggcggggcgcgcggggttctagcgagacaggtgcgcggccgtgcgcgcctgcgtgccggtccctcctgagccccgcggcgggcgcgaccccggacggcggactgcaggcgctccacgccgggttttccgccgctctcctagcacagacagtcccacagcagccccacagacacacacgctcgcgcccgcgcctcctcgtctgcacttcaaagcgagtggcgcccggctgcgccggggggatggcactgcgaggtggcggggcccccggggcagagctcgaggggaaggacgcggcgggtggcacggacagggacaggcttttgcaattcggaatcttttcgtaagggggttgaggaggagccaggcagcgccgagggccgagaggggcgtgagggggagtgttcccggaaagctgcggcgttggagccgcgctgcgcctgccgcccgaggagttgagaaagaaaacaggaaacgtggtggccgcgcacccggccgcggctgattcattcacttcaagtgccgtgcagaaggctcggcaggcggggcgggcgtggggccgcggctccgggttggggaccgaggagatccggctgtggaccagacgctcctctgcggggcgggcacccaagcgcgctcgccaccccctcgccatccgctagagccgggctcctggactgggactcgggcccgccgcacagttgaaaagtcgcatagtggtttttccgctcgcgtcgctgtgtgaaagttggctcgccgctctttgcacgccctccctggaggccgacccgagacgccaagctggagagaccgtgcctccccgaggccggccgccccgcgagcacagcctccgcccccgttgcactgccgggctgggcaatatgaaggagcagccctcatgtgccggcaccgggcatccgagcatggcgggaggaggcctaccagaaactggccagcgagaccctggaggagctggactggtgtctggaccagctagagaccctacagaccaggcactccgtcagtgagatggcctccaacaagtttaaaaggatgcttaatcgggagctcacccatctctctgaaatgagtcggtctggaaatcaagtgtcagagtttatatcaaacacattcttagataagcaacatgaagtggaaattccttctccaactcagaaggaaaaggagaaaaagaaaagaccaatgtctcagatcagtggagtcaagaaattgatgcacagctctagtctgactaattcaagtatcccaaggtttggagttaaaactgaacaagaagatgtccttgccaaggaactagaagatgtgaacaaatggggtcttcatgttttcagaatagcagagttgtctggtaaccggcccttgactgttatcatgcacaccatttttcaggaacgggatttattaaaaacatttaaaattccagtagatactttaattacatatcttatgactctcgaagaccattaccatgctgatgtggcctatcacaacaatatccatgctgcagatgttgtccagtctactcatgtgctattatctacacctgctttggaggctgtgtttacagatttggagattcttgcagcaatttttgccagtgcaatacatgatgtagatcatcctggtgtgtccaatcaatttctgatcaatacaaactctgaacttgccttgatgtacaatgattcctcagtcttagagaaccatcatttggctgtgggctttaaattgcttcaggaagaaaactgtgacattttccagaatttgaccaaaaaacaaagacaatctttaaggaaaatggtcattgacatcgtacttgcaacagatatgtcaaaacacatgaatctactggctgatttgaagactatggttgaaactaagaaagtgacaagctctggagttcttcttcttgataattattccgataggattcaggttcttcagaatatggtgcactgtgcagatctgagcaacccaacaaagcctctccagctgtaccgccagtggacggaccggataatggaggagttcttccgccaaggagaccgagagagggaacgtggcatggagataagccccatgtgtgacaagcacaatgcttccgtggaaaaatcacaggtgggcttcatagactatattgttcatcccctctgggagacatgggcagacctcgtccaccctgacgcccaggatattttggacactttggaggacaatcgtgaatggtaccagagcacaatccctcagagcccctctcctgcacctgatgacccagaggagggccggcagggtcaaactgagaaattccagtttgaactaactttagaggaagatggtgagtcagacacggaaaaggacagtggcagtcaagtggaagaagacactagctgcagtgactccaagactctttgtactcaagactcagagtctactgaaattccccttgatgaacaggttgaagaggaggcagtaggggaagaagaggaaagccagcctgaagcctgtgtcatagatgatcgttctcctgacacgtaacagtgcaaaaactttcatgccttttttttttttaagtagaaaaattgtttccaaagtgcatgtcacatgccacaaccacggtcacacctcactgtcatctgccaggacgtttgttgaacaaaactgaccttgactactcagtccagcgctcaggaatatcgtaaccagttttttcacctccatgttcatccgagcaaggtggacatcttcacgaacagcgtttttaacaagatttcagcttggtagagctgacaaagcagataaaatctactccaaattattttcaagagagtgtgactcatcaggcagcccaaaagtttattggacttggggtttctattcctttttatttgtttgcaatattttcagaagaaaggcattgcacagagtgaacttaatggacgaagcaacaaatatgtcaagaacaggacatagcacgaatctgttaccagtaggaggaggatgagccacagaaattgcataattttctaatttcaagtcttcctgatacatgactgaatagtgtggttcagtgagctgcactgacctctacattttgtatgatatgtaaaacagattttttgtagagcttacttttattattaaatgtattgaggtattatatttaaaaaaaactatgttcagaacttcatctgccactggttatttttttctaaggagtaacttgcaagttttcagtacaaatctgtgctacactggataaaaatctaatttatgaattttacttgcaccttatagttcatagcaattaactgatttgtagtgattcattgtttgttttatataccaatgacttccatattttaaaagagaaaaacaactttatgttgcaggaaaccctttttgtaagtctttattatttactttgcattttgtttcactctttccagataagcagagttgctcttcaccagtgtttttcttcatgtgcaaagtgactatttgttctataatacttttatgtgtgttatatcaaatgtgtcttaagcttcatgcaaactcagtcatcagttcgtgttgtctgaagcaagtgggagatatataaatacccagtagctaaaatggtcagtcttttttagatgttttcctacttagtatctcctaataacgttttgctgtgtcactagatgttcatttcacaagtgcatgtctttctaataatccacacatttcatgctctaataatccacacatttcatgctcatttttattgtttttacagccagttatagnaagaaaaaggtttttccccttgtgctgctttataatttagcgtgtgtctgaaccttatccatgtttgctagatgaggtcttgtcaaatatatcactaccattgtcaccggtgaaaagaaacaggtagttaagttagggttaacattcatttcaaccacgaggttgtatatcatgactagcttttactcttggtttacagagaaaagttaaacanccaactaggcagtttttaagaatattaacaatatattaacaaacaccaatacaactaatcctatttggttttaatgatttcaccatgggattaagaactatatcaggaacatccctgagaaacggttttaagtgtagcaactactcttccttaatggacagccacataacgtgtaggaagtcctttatcacttatcctcgatccataagcatatcttgcagaggggaactacttctttaaacacatggagggaaagaagatgatgccactggcaccagagggttagtactgtgatgcatcctaaaatatttattatattggtaaaaattctggttaaataaaaaattagagatcactcttggctgatttcagcaccaggaactgtattacagttttagagattaattcctagtgtttacctgattatagcagttggcatcatggggcatttaattctgactttatccccacgtcagccttaataaagtcttctttaccttctctatgaagactttaaagcccaaataatcatttttcacattgatattcaagaattgagatagatagaagccaaagtgggtatctgacaagtggaaaatcaaacgtttaagaagaattacaactctgaaaagcatttatatgtggaacttctcaaggagcctcctggggactggaaagtaagtcatcagccaggcaaatgactcatgctgaagagagtccccatttcagtcccctgagatctagctgatgcttagatcctttgaaataaaaattatgtctttataactctgatcttttacataaagcagaagaggaatcaactagttaattgcaaggtttctactctgtttcctctgtaaagatcagatggtaatctttcaaataagaaaaaaataaagacgtatgtttgaccaagtagtttcacaagaatatttgggaacttgtttcttttaattttatttgtccctgagtgaagtctagaaagaaaggtaaagagtctagagtttattcctctttccaaaacattctcattcctctcctccctactcttagtatttcccccacagagtgcctagaatcttaataatgaataaaataaaaagcagcaatatgtcattaacaaatccagacctgaaagggtaaagggtttataactgcactaataaagagaggctctttttttttcttccagtttgttggtttttaatggtaccgtgttgtaaagatacccactaatggacaatcaaattgcagaaaaggctcaatatccaagagacagggactaatgcactgtacaatcggcttatccttgcccttctctcttgccaaagtgtgcttcagaaatatatactgctttaaaaaagaataaaagaatatccttttacaagtggctttacatttcctaaaatgccataagaaaatgcaatatctgggtactgtatggggaaaaaaatgtccaagtttgtataaaaccagtgcatttcagcttgcaagttactgaacacaataatgctgttttaattttgttttatatcagttaaaattcacaataatgtagatagaacaaattacagacaaggaaagaaaaaacttgaatgaaatggattttacagaaagctttatgataatttttgaatgcattatttattttttgtgccatgcattttttttctcaccaaatgaccttacctgtaatacagtcttgtttgtctgtttacaaccatgtatttattgcaatgtacatactgtaatgttaattgtaaattatctgttcttattaaaacatcatcccatgatgggatggtgttgatatatttggaaactcttggtgagagaatgaatggtgtgtatacatactctgtacatttttcttttctcctgtaatatagtcttgtcaccttagagcttgtttatggaagattcaagaaaactataaaatacttaaagatatataaatttaaaaaaacatagctgcaggtctttggtcccagggctgtgccttaactttaaccaatattttcttctgttttgctgcatttgaaaggtaacagtggagctagggctgggcattttacatccaggcttttaattgattagaattctgccaataggtggattttacaaaaccacagacaacctctgaaagattctgagacccttttgagacagaagctcttaagtacttcttgccagggagcagcactgcatgtgtgatggttgtttgccatctgttgatcaggaactacttcagctacttggcatttgattatttcctttttttttttttttaactcggaaacacaactgggggaaatatattctttcccagtgattataaacaatctttttcttt

SEQ ID NO: 289280 - DNA, 6541 bp, Homo sapiens
  misc_feature (3974)..(3974): n is a, c, g, or t
  misc_feature (4188)..(4188): n is a, c, g, or t
ttgtttgtgaaacttcgcaggaagcagccggtcgtggagtcgcagaggctccagcggtctgggcaacctggagggcagtggctcggcggggcgcgcggggttctagcgagacaggtgcgcggccgtgcgcgcctgcgtgccggtccctcctgagccccgcggcgggcgcgaccccggacggcggactgcaggcgctccacgccgggttttccgccgctctcctagcacagacagtcccacagcagccccacagacacacacgctcgcgcccgcgcctcctcgtctgcacttcaaagcgagtggcgcccggctgcgccggggggatggcactgcgaggtggcggggcccccggggcagagctcgaggggaaggacgcggcgggtggcacggacagggacaggcttttgcaattcggaatcttttcgtaagggggttgaggaggagccaggcagcgccgagggccgagaggggcgtgagggggagtgttcccggaaagctgcggcgttggagccgcgctgcgcctgccgcccgaggagttgagaaagaaaacaggaaacgtggtggccgcgcacccggccgcggctgattcattcacttcaagtgccgtgcagaaggctcggcaggcggggcgggcgtggggccgcggctccgggttggggaccgaggagatccggctgtggaccagacgctcctctgcggggcgggcacccaagcgcgctcgccaccccctcgccatccgctagagccgggctcctggactgggactcgggcccgccgcacagttgaaaagtcgcatagtggtttttccgctcgcgtcgctgtgtgaaagttggctcgccgctctttgcacgccctccctggaggccgacccgagacgccaagctggagagaccgtgcctccccgaggccggccgccccgcgagcacagcctccgcccccgttgcactgccgggctgggcaatatgaaggagcagccctcatgtgccggcaccgggcatccgagcatggcggggtatggcaggatggccccctttgaactcgctagcggacccgtgaagcgcttgagaactgagtccccctttccctgtctcttcgcagaggaggcctaccagaaactggccagcgagaccctggaggagctggactggtgtctggaccagctagagaccctacagaccaggcactccgtcagtgagatggcctccaacaagtttaaaaggatgcttaatcgggagctcacccatctctctgaaatgagtcggtctggaaatcaagtgtcagagtttatatcaaacacattcttagataagcaacatgaagtggaaattccttctccaactcagaaggaaaaggagaaaaagaaaagaccaatgtctcagatcagtggagtcaagaaattgatgcacagctctagtctgactaattcaagtatcccaaggtttggagttaaaactgaacaagaagatgtccttgccaaggaactagaagatgtgaacaaatggggtcttcatgttttcagaatagcagagttgtctggtaaccggcccttgactgttatcatgcacaccatttttcaggaacgggatttattaaaaacatttaaaattccagtagatactttaattacatatcttatgactctcgaagaccattaccatgctgatgtggcctatcacaacaatatccatgctgcagatgttgtccagtctactcatgtgctattatctacacctgctttggaggctgtgtttacagatttggagattcttgcagcaatttttgccagtgcaatacatgatgtagatcatcctggtgtgtccaatcaatttctgatcaatacaaactctgaacttgccttgatgtacaatgattcctcagtcttagagaaccatcatttggctgtgggctttaaattgcttcaggaagaaaactgtgacattttccagaatttgaccaaaaaacaaagacaatctttaaggaaaatggtcattgacatcgtacttgcaacagatatgtcaaaacacatgaatctactggctgatttgaagactatggttgaaactaagaaagtgacaagctctggagttcttcttcttgataattattccgataggattcaggttcttcagaatatggtgcactgtgcagatctgagcaacccaacaaagcctctccagctgtaccgccagtggacggaccggataatggaggagttcttccgccaaggagaccgagagagggaacgtggcatggagataagccccatgtgtgacaagcacaatgcttccgtggaaaaatcacaggtgggcttcatagactatattgttcatcccctctgggagacatgggcagacctcgtccaccctgacgcccaggatattttggacactttggaggacaatcgtgaatggtaccagagcacaatccctcagagcccctctcctgcacctgatgacccagaggagggccggcagggtcaaactgagaaattccagtttgaactaactttagaggaagatggtgagtcagacacggaaaaggacagtggcagtcaagtggaagaagacactagctgcagtgactccaagactctttgtactcaagactcagagtctactgaaattccccttgatgaacaggttgaagaggaggcagtaggggaagaagaggaaagccagcctgaagcctgtgtcatagatgatcgttctcctgacacgtaacagtgcaaaaactttcatgccttttttttttttaagtagaaaaattgtttccaaagtgcatgtcacatgccacaaccacggtcacacctcactgtcatctgccaggacgtttgttgaacaaaactgaccttgactactcagtccagcgctcaggaatatcgtaaccagttttttcacctccatgttcatccgagcaaggtggacatcttcacgaacagcgtttttaacaagatttcagcttggtagagctgacaaagcagataaaatctactccaaattattttcaagagagtgtgactcatcaggcagcccaaaagtttattggacttggggtttctattcctttttatttgtttgcaatattttcagaagaaaggcattgcacagagtgaacttaatggacgaagcaacaaatatgtcaagaacaggacatagcacgaatctgttaccagtaggaggaggatgagccacagaaattgcataattttctaatttcaagtcttcctgatacatgactgaatagtgtggttcagtgagctgcactgacctctacattttgtatgatatgtaaaacagattttttgtagagcttacttttattattaaatgtattgaggtattatatttaaaaaaaactatgttcagaacttcatctgccactggttatttttttctaaggagtaacttgcaagttttcagtacaaatctgtgctacactggataaaaatctaatttatgaattttacttgcaccttatagttcatagcaattaactgatttgtagtgattcattgtttgttttatataccaatgacttccatattttaaaagagaaaaacaactttatgttgcaggaaaccctttttgtaagtctttattatttactttgcattttgtttcactctttccagataagcagagttgctcttcaccagtgtttttcttcatgtgcaaagtgactatttgttctataatacttttatgtgtgttatatcaaatgtgtcttaagcttcatgcaaactcagtcatcagttcgtgttgtctgaagcaagtgggagatatataaatacccagtagctaaaatggtcagtcttttttagatgttttcctacttagtatctcctaataacgttttgctgtgtcactagatgttcatttcacaagtgcatgtctttctaataatccacacatttcatgctctaataatccacacatttcatgctcatttttattgtttttacagccagttatagnaagaaaaaggtttttccccttgtgctgctttataatttagcgtgtgtctgaaccttatccatgtttgctagatgaggtcttgtcaaatatatcactaccattgtcaccggtgaaaagaaacaggtagttaagttagggttaacattcatttcaaccacgaggttgtatatcatgactagcttttactcttggtttacagagaaaagttaaacanccaactaggcagtttttaagaatattaacaatatattaacaaacaccaatacaactaatcctatttggttttaatgatttcaccatgggattaagaactatatcaggaacatccctgagaaacggttttaagtgtagcaactactcttccttaatggacagccacataacgtgtaggaagtcctttatcacttatcctcgatccataagcatatcttgcagaggggaactacttctttaaacacatggagggaaagaagatgatgccactggcaccagagggttagtactgtgatgcatcctaaaatatttattatattggtaaaaattctggttaaataaaaaattagagatcactcttggctgatttcagcaccaggaactgtattacagttttagagattaattcctagtgtttacctgattatagcagttggcatcatggggcatttaattctgactttatccccacgtcagccttaataaagtcttctttaccttctctatgaagactttaaagcccaaataatcatttttcacattgatattcaagaattgagatagatagaagccaaagtgggtatctgacaagtggaaaatcaaacgtttaagaagaattacaactctgaaaagcatttatatgtggaacttctcaaggagcctcctggggactggaaagtaagtcatcagccaggcaaatgactcatgctgaagagagtccccatttcagtcccctgagatctagctgatgcttagatcctttgaaataaaaattatgtctttataactctgatcttttacataaagcagaagaggaatcaactagttaattgcaaggtttctactctgtttcctctgtaaagatcagatggtaatctttcaaataagaaaaaaataaagacgtatgtttgaccaagtagtttcacaagaatatttgggaacttgtttcttttaattttatttgtccctgagtgaagtctagaaagaaaggtaaagagtctagagtttattcctctttccaaaacattctcattcctctcctccctactcttagtatttcccccacagagtgcctagaatcttaataatgaataaaataaaaagcagcaatatgtcattaacaaatccagacctgaaagggtaaagggtttataactgcactaataaagagaggctctttttttttcttccagtttgttggtttttaatggtaccgtgttgtaaagatacccactaatggacaatcaaattgcagaaaaggctcaatatccaagagacagggactaatgcactgtacaatcggcttatccttgcccttctctcttgccaaagtgtgcttcagaaatatatactgctttaaaaaagaataaaagaatatccttttacaagtggctttacatttcctaaaatgccataagaaaatgcaatatctgggtactgtatggggaaaaaaatgtccaagtttgtataaaaccagtgcatttcagcttgcaagttactgaacacaataatgctgttttaattttgttttatatcagttaaaattcacaataatgtagatagaacaaattacagacaaggaaagaaaaaacttgaatgaaatggattttacagaaagctttatgataatttttgaatgcattatttattttttgtgccatgcattttttttctcaccaaatgaccttacctgtaatacagtcttgtttgtctgtttacaaccatgtatttattgcaatgtacatactgtaatgttaattgtaaattatctgttcttattaaaacatcatcccatgatgggatggtgttgatatatttggaaactcttggtgagagaatgaatggtgtgtatacatactctgtacatttttcttttctcctgtaatatagtcttgtcaccttagagcttgtttatggaagattcaagaaaactataaaatacttaaagatatataaatttaaaaaaacatagctgcaggtctttggtcccagggctgtgccttaactttaaccaatattttcttctgttttgctgcatttgaaaggtaacagtggagctagggctgggcattttacatccaggcttttaattgattagaattctgccaataggtggattttacaaaaccacagacaacctctgaaagattctgagacccttttgagacagaagctcttaagtacttcttgccagggagcagcactgcatgtgtgatggttgtttgccatctgttgatcaggaactacttcagctacttggcatttgattatttcctttttttttttttttaactcggaaacacaactgggggaaatatattctttcccagtgattataaacaatctttttcttt

SEQ ID NO: 289281 - DNA, 6231 bp, Homo sapiens
  misc_feature (3664)..(3664): n is a, c, g, or t
  misc_feature (3878)..(3878): n is a, c, g, or t
ggaggcaggcgactgaatgcactaacagcagcaggctcagacctgcttccctggacatttccgggaccgtgagcgagggaaccacgttgccctggattcttgccagctgtacaaagttgaccaggaaaatggctcagcagacaagcccggacactttaacagtacctgaagtggataatccgcattgtccaaacccgtggctgaacgaagaccttgtgaaatccttgcgagaaaacctgttgcagcatgagaagtccaagacagcgaggaaatcggtttctcccaagctctctccagtgatctctccgagaaattcccccaggcttctgcgcagaatgcttctcagcagcaacatccccaaacagcggcgtttcacggtggcacatacatgttttgatgtggacaatggcacatctgcgggacggagtcccttggatcccatgaccagcccaggatccgggctaattctccaagcaaattttgtccacagtcaacgacgggagtccttcctgtatcgatccgacagcgattatgacctctctccaaagtctatgtcccggaactcctccattgccagtgatatacacggagatgacttgattgtgactccatttgctcaggtcttggccagtctgcgaactgtacgaaacaactttgctgcattaactaatttgcaagatcgagcacctagcaaaagatcacccatgtgcaaccaaccatccatcaacaaagccaccataacagggctctataatgggatcattgcatttctctgattactaatgagaaggaggcctaccagaaactggccagcgagaccctggaggagctggactggtgtctggaccagctagagaccctacagaccaggcactccgtcagtgagatggcctccaacaagtttaaaaggatgcttaatcgggagctcacccatctctctgaaatgagtcggtctggaaatcaagtgtcagagtttatatcaaacacattcttagataagcaacatgaagtggaaattccttctccaactcagaaggaaaaggagaaaaagaaaagaccaatgtctcagatcagtggagtcaagaaattgatgcacagctctagtctgactaattcaagtatcccaaggtttggagttaaaactgaacaagaagatgtccttgccaaggaactagaagatgtgaacaaatggggtcttcatgttttcagaatagcagagttgtctggtaaccggcccttgactgttatcatgcacaccatttttcaggaacgggatttattaaaaacatttaaaattccagtagatactttaattacatatcttatgactctcgaagaccattaccatgctgatgtggcctatcacaacaatatccatgctgcagatgttgtccagtctactcatgtgctattatctacacctgctttggaggctgtgtttacagatttggagattcttgcagcaatttttgccagtgcaatacatgatgtagatcatcctggtgtgtccaatcaatttctgatcaatacaaactctgaacttgccttgatgtacaatgattcctcagtcttagagaaccatcatttggctgtgggctttaaattgcttcaggaagaaaactgtgacattttccagaatttgaccaaaaaacaaagacaatctttaaggaaaatggtcattgacatcgtacttgcaacagatatgtcaaaacacatgaatctactggctgatttgaagactatggttgaaactaagaaagtgacaagctctggagttcttcttcttgataattattccgataggattcaggttcttcagaatatggtgcactgtgcagatctgagcaacccaacaaagcctctccagctgtaccgccagtggacggaccggataatggaggagttcttccgccaaggagaccgagagagggaacgtggcatggagataagccccatgtgtgacaagcacaatgcttccgtggaaaaatcacaggtgggcttcatagactatattgttcatcccctctgggagacatgggcagacctcgtccaccctgacgcccaggatattttggacactttggaggacaatcgtgaatggtaccagagcacaatccctcagagcccctctcctgcacctgatgacccagaggagggccggcagggtcaaactgagaaattccagtttgaactaactttagaggaagatggtgagtcagacacggaaaaggacagtggcagtcaagtggaagaagacactagctgcagtgactccaagactctttgtactcaagactcagagtctactgaaattccccttgatgaacaggttgaagaggaggcagtaggggaagaagaggaaagccagcctgaagcctgtgtcatagatgatcgttctcctgacacgtaacagtgcaaaaactttcatgccttttttttttttaagtagaaaaattgtttccaaagtgcatgtcacatgccacaaccacggtcacacctcactgtcatctgccaggacgtttgttgaacaaaactgaccttgactactcagtccagcgctcaggaatatcgtaaccagttttttcacctccatgttcatccgagcaaggtggacatcttcacgaacagcgtttttaacaagatttcagcttggtagagctgacaaagcagataaaatctactccaaattattttcaagagagtgtgactcatcaggcagcccaaaagtttattggacttggggtttctattcctttttatttgtttgcaatattttcagaagaaaggcattgcacagagtgaacttaatggacgaagcaacaaatatgtcaagaacaggacatagcacgaatctgttaccagtaggaggaggatgagccacagaaattgcataattttctaatttcaagtcttcctgatacatgactgaatagtgtggttcagtgagctgcactgacctctacattttgtatgatatgtaaaacagattttttgtagagcttacttttattattaaatgtattgaggtattatatttaaaaaaaactatgttcagaacttcatctgccactggttatttttttctaaggagtaacttgcaagttttcagtacaaatctgtgctacactggataaaaatctaatttatgaattttacttgcaccttatagttcatagcaattaactgatttgtagtgattcattgtttgttttatataccaatgacttccatattttaaaagagaaaaacaactttatgttgcaggaaaccctttttgtaagtctttattatttactttgcattttgtttcactctttccagataagcagagttgctcttcaccagtgtttttcttcatgtgcaaagtgactatttgttctataatacttttatgtgtgttatatcaaatgtgtcttaagcttcatgcaaactcagtcatcagttcgtgttgtctgaagcaagtgggagatatataaatacccagtagctaaaatggtcagtcttttttagatgttttcctacttagtatctcctaataacgttttgctgtgtcactagatgttcatttcacaagtgcatgtctttctaataatccacacatttcatgctctaataatccacacatttcatgctcatttttattgtttttacagccagttatagnaagaaaaaggtttttccccttgtgctgctttataatttagcgtgtgtctgaaccttatccatgtttgctagatgaggtcttgtcaaatatatcactaccattgtcaccggtgaaaagaaacaggtagttaagttagggttaacattcatttcaaccacgaggttgtatatcatgactagcttttactcttggtttacagagaaaagttaaacanccaactaggcagtttttaagaatattaacaatatattaacaaacaccaatacaactaatcctatttggttttaatgatttcaccatgggattaagaactatatcaggaacatccctgagaaacggttttaagtgtagcaactactcttccttaatggacagccacataacgtgtaggaagtcctttatcacttatcctcgatccataagcatatcttgcagaggggaactacttctttaaacacatggagggaaagaagatgatgccactggcaccagagggttagtactgtgatgcatcctaaaatatttattatattggtaaaaattctggttaaataaaaaattagagatcactcttggctgatttcagcaccaggaactgtattacagttttagagattaattcctagtgtttacctgattatagcagttggcatcatggggcatttaattctgactttatccccacgtcagccttaataaagtcttctttaccttctctatgaagactttaaagcccaaataatcatttttcacattgatattcaagaattgagatagatagaagccaaagtgggtatctgacaagtggaaaatcaaacgtttaagaagaattacaactctgaaaagcatttatatgtggaacttctcaaggagcctcctggggactggaaagtaagtcatcagccaggcaaatgactcatgctgaagagagtccccatttcagtcccctgagatctagctgatgcttagatcctttgaaataaaaattatgtctttataactctgatcttttacataaagcagaagaggaatcaactagttaattgcaaggtttctactctgtttcctctgtaaagatcagatggtaatctttcaaataagaaaaaaataaagacgtatgtttgaccaagtagtttcacaagaatatttgggaacttgtttcttttaattttatttgtccctgagtgaagtctagaaagaaaggtaaagagtctagagtttattcctctttccaaaacattctcattcctctcctccctactcttagtatttcccccacagagtgcctagaatcttaataatgaataaaataaaaagcagcaatatgtcattaacaaatccagacctgaaagggtaaagggtttataactgcactaataaagagaggctctttttttttcttccagtttgttggtttttaatggtaccgtgttgtaaagatacccactaatggacaatcaaattgcagaaaaggctcaatatccaagagacagggactaatgcactgtacaatcggcttatccttgcccttctctcttgccaaagtgtgcttcagaaatatatactgctttaaaaaagaataaaagaatatccttttacaagtggctttacatttcctaaaatgccataagaaaatgcaatatctgggtactgtatggggaaaaaaatgtccaagtttgtataaaaccagtgcatttcagcttgcaagttactgaacacaataatgctgttttaattttgttttatatcagttaaaattcacaataatgtagatagaacaaattacagacaaggaaagaaaaaacttgaatgaaatggattttacagaaagctttatgataatttttgaatgcattatttattttttgtgccatgcattttttttctcaccaaatgaccttacctgtaatacagtcttgtttgtctgtttacaaccatgtatttattgcaatgtacatactgtaatgttaattgtaaattatctgttcttattaaaacatcatcccatgatgggatggtgttgatatatttggaaactcttggtgagagaatgaatggtgtgtatacatactctgtacatttttcttttctcctgtaatatagtcttgtcaccttagagcttgtttatggaagattcaagaaaactataaaatacttaaagatatataaatttaaaaaaacatagctgcaggtctttggtcccagggctgtgccttaactttaaccaatattttcttctgttttgctgcatttgaaaggtaacagtggagctagggctgggcattttacatccaggcttttaattgattagaattctgccaataggtggattttacaaaaccacagacaacctctgaaagattctgagacccttttgagacagaagctcttaagtacttcttgccagggagcagcactgcatgtgtgatggttgtttgccatctgttgatcaggaactacttcagctacttggcatttgattatttcctttttttttttttttaactcggaaacacaactgggggaaatatattctttcccagtgattataaacaatctttttcttt

SEQ ID NO: 289282 - DNA, 5619 bp, Homo sapiens
  misc_feature (2)..(2): n is a, c, g, or t
  misc_feature (3052)..(3052): n is a, c, g, or t
  misc_feature (3266)..(3266): n is a, c, g, or t
gnattcaatacttgttgcaataattgcccacgatagctgctcaaacaagagagttggaattcatctgtaaaaatcactacatgtaacgtaggagacaagaaaaatattaatgacagaagatctgcgaacatgatgcacgtgaataattttccctttagaaggcattcctggatatgaggaggcctaccagaaactggccagcgagaccctggaggagctggactggtgtctggaccagctagagaccctacagaccaggcactccgtcagtgagatggcctccaacaagtttaaaaggatgcttaatcgggagctcacccatctctctgaaatgagtcggtctggaaatcaagtgtcagagtttatatcaaacacattcttagataagcaacatgaagtggaaattccttctccaactcagaaggaaaaggagaaaaagaaaagaccaatgtctcagatcagtggagtcaagaaattgatgcacagctctagtctgactaattcaagtatcccaaggtttggagttaaaactgaacaagaagatgtccttgccaaggaactagaagatgtgaacaaatggggtcttcatgttttcagaatagcagagttgtctggtaaccggcccttgactgttatcatgcacaccatttttcaggaacgggatttattaaaaacatttaaaattccagtagatactttaattacatatcttatgactctcgaagaccattaccatgctgatgtggcctatcacaacaatatccatgctgcagatgttgtccagtctactcatgtgctattatctacacctgctttggaggctgtgtttacagatttggagattcttgcagcaatttttgccagtgcaatacatgatgtagatcatcctggtgtgtccaatcaatttctgatcaatacaaactctgaacttgccttgatgtacaatgattcctcagtcttagagaaccatcatttggctgtgggctttaaattgcttcaggaagaaaactgtgacattttccagaatttgaccaaaaaacaaagacaatctttaaggaaaatggtcattgacatcgtacttgcaacagatatgtcaaaacacatgaatctactggctgatttgaagactatggttgaaactaagaaagtgacaagctctggagttcttcttcttgataattattccgataggattcaggttcttcagaatatggtgcactgtgcagatctgagcaacccaacaaagcctctccagctgtaccgccagtggacggaccggataatggaggagttcttccgccaaggagaccgagagagggaacgtggcatggagataagccccatgtgtgacaagcacaatgcttccgtggaaaaatcacaggtgggcttcatagactatattgttcatcccctctgggagacatgggcagacctcgtccaccctgacgcccaggatattttggacactttggaggacaatcgtgaatggtaccagagcacaatccctcagagcccctctcctgcacctgatgacccagaggagggccggcagggtcaaactgagaaattccagtttgaactaactttagaggaagatggtgagtcagacacggaaaaggacagtggcagtcaagtggaagaagacactagctgcagtgactccaagactctttgtactcaagactcagagtctactgaaattccccttgatgaacaggttgaagaggaggcagtaggggaagaagaggaaagccagcctgaagcctgtgtcatagatgatcgttctcctgacacgtaacagtgcaaaaactttcatgccttttttttttttaagtagaaaaattgtttccaaagtgcatgtcacatgccacaaccacggtcacacctcactgtcatctgccaggacgtttgttgaacaaaactgaccttgactactcagtccagcgctcaggaatatcgtaaccagttttttcacctccatgttcatccgagcaaggtggacatcttcacgaacagcgtttttaacaagatttcagcttggtagagctgacaaagcagataaaatctactccaaattattttcaagagagtgtgactcatcaggcagcccaaaagtttattggacttggggtttctattcctttttatttgtttgcaatattttcagaagaaaggcattgcacagagtgaacttaatggacgaagcaacaaatatgtcaagaacaggacatagcacgaatctgttaccagtaggaggaggatgagccacagaaattgcataattttctaatttcaagtcttcctgatacatgactgaatagtgtggttcagtgagctgcactgacctctacattttgtatgatatgtaaaacagattttttgtagagcttacttttattattaaatgtattgaggtattatatttaaaaaaaactatgttcagaacttcatctgccactggttatttttttctaaggagtaacttgcaagttttcagtacaaatctgtgctacactggataaaaatctaatttatgaattttacttgcaccttatagttcatagcaattaactgatttgtagtgattcattgtttgttttatataccaatgacttccatattttaaaagagaaaaacaactttatgttgcaggaaaccctttttgtaagtctttattatttactttgcattttgtttcactctttccagataagcagagttgctcttcaccagtgtttttcttcatgtgcaaagtgactatttgttctataatacttttatgtgtgttatatcaaatgtgtcttaagcttcatgcaaactcagtcatcagttcgtgttgtctgaagcaagtgggagatatataaatacccagtagctaaaatggtcagtcttttttagatgttttcctacttagtatctcctaataacgttttgctgtgtcactagatgttcatttcacaagtgcatgtctttctaataatccacacatttcatgctctaataatccacacatttcatgctcatttttattgtttttacagccagttatagnaagaaaaaggtttttccccttgtgctgctttataatttagcgtgtgtctgaaccttatccatgtttgctagatgaggtcttgtcaaatatatcactaccattgtcaccggtgaaaagaaacaggtagttaagttagggttaacattcatttcaaccacgaggttgtatatcatgactagcttttactcttggtttacagagaaaagttaaacanccaactaggcagtttttaagaatattaacaatatattaacaaacaccaatacaactaatcctatttggttttaatgatttcaccatgggattaagaactatatcaggaacatccctgagaaacggttttaagtgtagcaactactcttccttaatggacagccacataacgtgtaggaagtcctttatcacttatcctcgatccataagcatatcttgcagaggggaactacttctttaaacacatggagggaaagaagatgatgccactggcaccagagggttagtactgtgatgcatcctaaaatatttattatattggtaaaaattctggttaaataaaaaattagagatcactcttggctgatttcagcaccaggaactgtattacagttttagagattaattcctagtgtttacctgattatagcagttggcatcatggggcatttaattctgactttatccccacgtcagccttaataaagtcttctttaccttctctatgaagactttaaagcccaaataatcatttttcacattgatattcaagaattgagatagatagaagccaaagtgggtatctgacaagtggaaaatcaaacgtttaagaagaattacaactctgaaaagcatttatatgtggaacttctcaaggagcctcctggggactggaaagtaagtcatcagccaggcaaatgactcatgctgaagagagtccccatttcagtcccctgagatctagctgatgcttagatcctttgaaataaaaattatgtctttataactctgatcttttacataaagcagaagaggaatcaactagttaattgcaaggtttctactctgtttcctctgtaaagatcagatggtaatctttcaaataagaaaaaaataaagacgtatgtttgaccaagtagtttcacaagaatatttgggaacttgtttcttttaattttatttgtccctgagtgaagtctagaaagaaaggtaaagagtctagagtttattcctctttccaaaacattctcattcctctcctccctactcttagtatttcccccacagagtgcctagaatcttaataatgaataaaataaaaagcagcaatatgtcattaacaaatccagacctgaaagggtaaagggtttataactgcactaataaagagaggctctttttttttcttccagtttgttggtttttaatggtaccgtgttgtaaagatacccactaatggacaatcaaattgcagaaaaggctcaatatccaagagacagggactaatgcactgtacaatcggcttatccttgcccttctctcttgccaaagtgtgcttcagaaatatatactgctttaaaaaagaataaaagaatatccttttacaagtggctttacatttcctaaaatgccataagaaaatgcaatatctgggtactgtatggggaaaaaaatgtccaagtttgtataaaaccagtgcatttcagcttgcaagttactgaacacaataatgctgttttaattttgttttatatcagttaaaattcacaataatgtagatagaacaaattacagacaaggaaagaaaaaacttgaatgaaatggattttacagaaagctttatgataatttttgaatgcattatttattttttgtgccatgcattttttttctcaccaaatgaccttacctgtaatacagtcttgtttgtctgtttacaaccatgtatttattgcaatgtacatactgtaatgttaattgtaaattatctgttcttattaaaacatcatcccatgatgggatggtgttgatatatttggaaactcttggtgagagaatgaatggtgtgtatacatactctgtacatttttcttttctcctgtaatatagtcttgtcaccttagagcttgtttatggaagattcaagaaaactataaaatacttaaagatatataaatttaaaaaaacatagctgcaggtctttggtcccagggctgtgccttaactttaaccaatattttcttctgttttgctgcatttgaaaggtaacagtggagctagggctgggcattttacatccaggcttttaattgattagaattctgccaataggtggattttacaaaaccacagacaacctctgaaagattctgagacccttttgagacagaagctcttaagtacttcttgccagggagcagcactgcatgtgtgatggttgtttgccatctgttgatcaggaactacttcagctacttggcatttgattatttcctttttttttttttttaactcggaaacacaactgggggaaatatattctttcccagtgattataaacaatctttttcttt

SEQ ID NO: 289283 - DNA, 1027 bp, Homo sapiens
ggaggcaggcgactgaatgcactaacagcagcaggctcagacctgcttccctggacatttccgggaccgtgagcgagggaaccacgttgccctggattcttgccagctgtacaaagttgaccaggaaaatggctcagcagacaagcccggacactttaacagtacctgaagtggataatccgcattgtccaaacccgtggctgaacgaagaccttgtgaaatccttgcgagaaaacctgttgcagcatgagaagtccaagacagcgaggaaatcggtttctcccaagctctctccagtgatctctccgagaaattcccccaggcttctgcgcagaatgcttctcagcagcaacatccccaaacagcggcgtttcacggtggcacatacatgttttgatgtggacaatggcacatctgcgggacggagtcccttggatcccatgaccagcccaggatccgggctaattctccaagcaaattttgtccacagtcaacgacgggagtccttcctgtatcgatccgacagcgattatgacctctctccaaagtctatgtcccggaactcctccattgccagtgatatacacggagatgacttgattgtgactccatttgctcaggtcttggccagtctgcgaactgtacgaaacaactttgctgcattaactaatttgcaagatcgagcacctagcaaaagatcacccatgtgcaaccaaccatccatcaacaaagccaccataacaggatcctggatggaattgaacccatatacgttacttgacatgtgaaacacgtgtgaccctggcagatgatttggctgaccttgaaaactacagctgtttagtcactttgaaaacaatgcaatacaagtgatttactaggcttcagttttaaccattttatgctgactggtggaaattctaacccttcagaaagaaaaaaaaattgtgaagcaatggaaatgtaccatcctgggtattaatgtcattaattttcaatacattttctcacaaaaagtataaagaag

SEQ ID NO: 289284 - DNA, 845 bp, Homo sapiens
tagatggtcaagggttctctcactgaagtcactgcattgctggttccttccacagcaccccttactaatatctacagtaagaggccaaaagtaaaactcaggccccactgctggaacaccatttctactattgcatatcctgtgtgcctaaaaagcaacagtgaccctggctgatgatcaagaagcccctctttttacccagggagttggacaattgttaacatcccagaagacatatttttaacccagttgctgggaagaacatgtgctgaagtataaggatggaatcactgtaattctctatgggaactcatgaaagtggaacttgccgtttaatattgaacgacactgagcacagagttattgatgatttctaatgcgggatttggtttatttttcagacacggagatgacttgattgtgactccatttgctcaggtcttggccagtctgcgaactgtacgaaacaactttgctgcattaactaatttgcaagatcgagcacctagcaaaagatcacccatgtgcaaccaaccatccatcaacaaagccaccataacaggatcctggatggaattgaacccatatacgttacttgacatgtgaaacacgtgtgaccctggcagatgatttggctgaccttgaaaactacagctgtttagtcactttgaaaacaatgcaatacaagtgatttactaggcttcagttttaaccattttatgctgactggtggaaattctaacccttcagaaagaaaaaaaaattgtgaagcaatggaaatgtaccatcctgggtattaatgtcattaattttcaatacattttctcacaaaaagtataaagaag

SEQ ID NO: 289285 - DNA, 6014 bp, Homo sapiens
  misc_feature (3447)..(3447): n is a, c, g, or t
  misc_feature (3661)..(3661): n is a, c, g, or t
actgcacaaaggaaatgccctcactcagctacaagtgcctcctgctccgtgcggggcctcagggccccagagccccgcaccagctctgacttctcgtggttcctggggatcttggcatcgtccttaaaaatggcttttgtttgggatcctctgggagccacggtgccaggaccatctacaagagccaaatcaagattgcgtttctcaaagtcctacagttttgatgtggacaatggcacatctgcgggacggagtcccttggatcccatgaccagcccaggatccgggctaattctccaagcaaattttgtccacagtcaacgacgggagtccttcctgtatcgatccgacagcgattatgacctctctccaaagtctatgtcccggaactcctccattgccagtgatatacacggagatgacttgattgtgactccatttgctcaggtcttggccagtctgcgaactgtacgaaacaactttgctgcattaactaatttgcaagatcgagcacctagcaaaagatcacccatgtgcaaccaaccatccatcaacaaagccaccataacagaggaggcctaccagaaactggccagcgagaccctggaggagctggactggtgtctggaccagctagagaccctacagaccaggcactccgtcagtgagatggcctccaacaagtttaaaaggatgcttaatcgggagctcacccatctctctgaaatgagtcggtctggaaatcaagtgtcagagtttatatcaaacacattcttagataagcaacatgaagtggaaattccttctccaactcagaaggaaaaggagaaaaagaaaagaccaatgtctcagatcagtggagtcaagaaattgatgcacagctctagtctgactaattcaagtatcccaaggtttggagttaaaactgaacaagaagatgtccttgccaaggaactagaagatgtgaacaaatggggtcttcatgttttcagaatagcagagttgtctggtaaccggcccttgactgttatcatgcacaccatttttcaggaacgggatttattaaaaacatttaaaattccagtagatactttaattacatatcttatgactctcgaagaccattaccatgctgatgtggcctatcacaacaatatccatgctgcagatgttgtccagtctactcatgtgctattatctacacctgctttggaggctgtgtttacagatttggagattcttgcagcaatttttgccagtgcaatacatgatgtagatcatcctggtgtgtccaatcaatttctgatcaatacaaactctgaacttgccttgatgtacaatgattcctcagtcttagagaaccatcatttggctgtgggctttaaattgcttcaggaagaaaactgtgacattttccagaatttgaccaaaaaacaaagacaatctttaaggaaaatggtcattgacatcgtacttgcaacagatatgtcaaaacacatgaatctactggctgatttgaagactatggttgaaactaagaaagtgacaagctctggagttcttcttcttgataattattccgataggattcaggttcttcagaatatggtgcactgtgcagatctgagcaacccaacaaagcctctccagctgtaccgccagtggacggaccggataatggaggagttcttccgccaaggagaccgagagagggaacgtggcatggagataagccccatgtgtgacaagcacaatgcttccgtggaaaaatcacaggtgggcttcatagactatattgttcatcccctctgggagacatgggcagacctcgtccaccctgacgcccaggatattttggacactttggaggacaatcgtgaatggtaccagagcacaatccctcagagcccctctcctgcacctgatgacccagaggagggccggcagggtcaaactgagaaattccagtttgaactaactttagaggaagatggtgagtcagacacggaaaaggacagtggcagtcaagtggaagaagacactagctgcagtgactccaagactctttgtactcaagactcagagtctactgaaattccccttgatgaacaggttgaagaggaggcagtaggggaagaagaggaaagccagcctgaagcctgtgtcatagatgatcgttctcctgacacgtaacagtgcaaaaactttcatgccttttttttttttaagtagaaaaattgtttccaaagtgcatgtcacatgccacaaccacggtcacacctcactgtcatctgccaggacgtttgttgaacaaaactgaccttgactactcagtccagcgctcaggaatatcgtaaccagttttttcacctccatgttcatccgagcaaggtggacatcttcacgaacagcgtttttaacaagatttcagcttggtagagctgacaaagcagataaaatctactccaaattattttcaagagagtgtgactcatcaggcagcccaaaagtttattggacttggggtttctattcctttttatttgtttgcaatattttcagaagaaaggcattgcacagagtgaacttaatggacgaagcaacaaatatgtcaagaacaggacatagcacgaatctgttaccagtaggaggaggatgagccacagaaattgcataattttctaatttcaagtcttcctgatacatgactgaatagtgtggttcagtgagctgcactgacctctacattttgtatgatatgtaaaacagattttttgtagagcttacttttattattaaatgtattgaggtattatatttaaaaaaaactatgttcagaacttcatctgccactggttatttttttctaaggagtaacttgcaagttttcagtacaaatctgtgctacactggataaaaatctaatttatgaattttacttgcaccttatagttcatagcaattaactgatttgtagtgattcattgtttgttttatataccaatgacttccatattttaaaagagaaaaacaactttatgttgcaggaaaccctttttgtaagtctttattatttactttgcattttgtttcactctttccagataagcagagttgctcttcaccagtgtttttcttcatgtgcaaagtgactatttgttctataatacttttatgtgtgttatatcaaatgtgtcttaagcttcatgcaaactcagtcatcagttcgtgttgtctgaagcaagtgggagatatataaatacccagtagctaaaatggtcagtcttttttagatgttttcctacttagtatctcctaataacgttttgctgtgtcactagatgttcatttcacaagtgcatgtctttctaataatccacacatttcatgctctaataatccacacatttcatgctcatttttattgtttttacagccagttatagnaagaaaaaggtttttccccttgtgctgctttataatttagcgtgtgtctgaaccttatccatgtttgctagatgaggtcttgtcaaatatatcactaccattgtcaccggtgaaaagaaacaggtagttaagttagggttaacattcatttcaaccacgaggttgtatatcatgactagcttttactcttggtttacagagaaaagttaaacanccaactaggcagtttttaagaatattaacaatatattaacaaacaccaatacaactaatcctatttggttttaatgatttcaccatgggattaagaactatatcaggaacatccctgagaaacggttttaagtgtagcaactactcttccttaatggacagccacataacgtgtaggaagtcctttatcacttatcctcgatccataagcatatcttgcagaggggaactacttctttaaacacatggagggaaagaagatgatgccactggcaccagagggttagtactgtgatgcatcctaaaatatttattatattggtaaaaattctggttaaataaaaaattagagatcactcttggctgatttcagcaccaggaactgtattacagttttagagattaattcctagtgtttacctgattatagcagttggcatcatggggcatttaattctgactttatccccacgtcagccttaataaagtcttctttaccttctctatgaagactttaaagcccaaataatcatttttcacattgatattcaagaattgagatagatagaagccaaagtgggtatctgacaagtggaaaatcaaacgtttaagaagaattacaactctgaaaagcatttatatgtggaacttctcaaggagcctcctggggactggaaagtaagtcatcagccaggcaaatgactcatgctgaagagagtccccatttcagtcccctgagatctagctgatgcttagatcctttgaaataaaaattatgtctttataactctgatcttttacataaagcagaagaggaatcaactagttaattgcaaggtttctactctgtttcctctgtaaagatcagatggtaatctttcaaataagaaaaaaataaagacgtatgtttgaccaagtagtttcacaagaatatttgggaacttgtttcttttaattttatttgtccctgagtgaagtctagaaagaaaggtaaagagtctagagtttattcctctttccaaaacattctcattcctctcctccctactcttagtatttcccccacagagtgcctagaatcttaataatgaataaaataaaaagcagcaatatgtcattaacaaatccagacctgaaagggtaaagggtttataactgcactaataaagagaggctctttttttttcttccagtttgttggtttttaatggtaccgtgttgtaaagatacccactaatggacaatcaaattgcagaaaaggctcaatatccaagagacagggactaatgcactgtacaatcggcttatccttgcccttctctcttgccaaagtgtgcttcagaaatatatactgctttaaaaaagaataaaagaatatccttttacaagtggctttacatttcctaaaatgccataagaaaatgcaatatctgggtactgtatggggaaaaaaatgtccaagtttgtataaaaccagtgcatttcagcttgcaagttactgaacacaataatgctgttttaattttgttttatatcagttaaaattcacaataatgtagatagaacaaattacagacaaggaaagaaaaaacttgaatgaaatggattttacagaaagctttatgataatttttgaatgcattatttattttttgtgccatgcattttttttctcaccaaatgaccttacctgtaatacagtcttgtttgtctgtttacaaccatgtatttattgcaatgtacatactgtaatgttaattgtaaattatctgttcttattaaaacatcatcccatgatgggatggtgttgatatatttggaaactcttggtgagagaatgaatggtgtgtatacatactctgtacatttttcttttctcctgtaatatagtcttgtcaccttagagcttgtttatggaagattcaagaaaactataaaatacttaaagatatataaatttaaaaaaacatagctgcaggtctttggtcccagggctgtgccttaactttaaccaatattttcttctgttttgctgcatttgaaaggtaacagtggagctagggctgggcattttacatccaggcttttaattgattagaattctgccaataggtggattttacaaaaccacagacaacctctgaaagattctgagacccttttgagacagaagctcttaagtacttcttgccagggagcagcactgcatgtgtgatggttgtttgccatctgttgatcaggaactacttcagctacttggcatttgattatttcctttttttttttttttaactcggaaacacaactgggggaaatatattctttcccagtgattataaacaatctttttcttt

SEQ ID NO: 289286 - DNA, 6560 bp, Homo sapiens
  misc_feature (46)..(47): n is a, c, g, or t
  misc_feature (81)..(81): n is a, c, g, or t
  misc_feature (109)..(109): n is a, c, g, or t
  misc_feature (3993)..(3993): n is a, c, g, or t
  misc_feature (4207)..(4207): n is a, c, g, or t
gaattccctggatacagcctttttatgacttttacttcctttatanncaaattccaacgtcttctcattcctccaccaggnctgtgccaacctgggcccaacccaaggncctcactaaaccatccaatcagtaggagccatagactactttatttagccaaagcaaaaatgagtcaactgaattctgtttttccatttacttctgtctgtttttccttcctcttgccaccctcagtgccacaagaggggacccctctcggtagccctgaggctctggcgccttcaagtgagaagctaagcaccagcctctgctgggctgcagaagcggcggcggcggcagcagcagcagcagcatcaggaaggctctcgggccagcgcggtgaacccgggctgggcagcaggtcgcggagccgcgagccaggatggaggcagagggcagcagcgcgccggcccgggcgggcagcggagagggcagcgacagcgccggcggggccacgctcaaagcccccaagcatctctggaggcacgagcagcaccaccagtacccgctccggcagccccagttccgcctcctgcatccccatcaccacctgcccccgccgccgccaccctcgccccagccccagccccagtgtccgctacagccgccgccgccgccccccctgccgccgcccccgccgccgcccggggctgcccgcggccgctacgcctcgagcggggccaccggccgcgtccggcatcgcggctactcggacaccgagcgctacctgtactgtcgcgccatggaccgcacctcctacgcggtggagaccggccaccggcccggcctgaagaaatccaggatgtcctggccctcctcgttccagggactcaggcgttttgatgtggacaatggcacatctgcgggacggagtcccttggatcccatgaccagcccaggatccgggctaattctccaagcaaattttgtccacagtcaacgacgggagtccttcctgtatcgatccgacagcgattatgacctctctccaaagtctatgtcccggaactcctccattgccagtgatatacacggagatgacttgattgtgactccatttgctcaggtcttggccagtctgcgaactgtacgaaacaactttgctgcattaactaatttgcaagatcgagcacctagcaaaagatcacccatgtgcaaccaaccatccatcaacaaagccaccataacagtttaaaaggatgcttaatcgggagctcacccatctctctgaaatgagtcggtctggaaatcaagtgtcagagtttatatcaaacacattcttagataagcaacatgaagtggaaattccttctccaactcagaaggaaaaggagaaaaagaaaagaccaatgtctcagatcagtggagtcaagaaattgatgcacagctctagtctgactaattcaagtatcccaaggtttggagttaaaactgaacaagaagatgtccttgccaaggaactagaagatgtgaacaaatggggtcttcatgttttcagaatagcagagttgtctggtaaccggcccttgactgttatcatgcacaccatttttcaggaacgggatttattaaaaacatttaaaattccagtagatactttaattacatatcttatgactctcgaagaccattaccatgctgatgtggcctatcacaacaatatccatgctgcagatgttgtccagtctactcatgtgctattatctacacctgctttggaggctgtgtttacagatttggagattcttgcagcaatttttgccagtgcaatacatgatgtagatcatcctggtgtgtccaatcaatttctgatcaatacaaactctgaacttgccttgatgtacaatgattcctcagtcttagagaaccatcatttggctgtgggctttaaattgcttcaggaagaaaactgtgacattttccagaatttgaccaaaaaacaaagacaatctttaaggaaaatggtcattgacatcgtacttgcaacagatatgtcaaaacacatgaatctactggctgatttgaagactatggttgaaactaagaaagtgacaagctctggagttcttcttcttgataattattccgataggattcaggttcttcagaatatggtgcactgtgcagatctgagcaacccaacaaagcctctccagctgtaccgccagtggacggaccggataatggaggagttcttccgccaaggagaccgagagagggaacgtggcatggagataagccccatgtgtgacaagcacaatgcttccgtggaaaaatcacaggtgggcttcatagactatattgttcatcccctctgggagacatgggcagacctcgtccaccctgacgcccaggatattttggacactttggaggacaatcgtgaatggtaccagagcacaatccctcagagcccctctcctgcacctgatgacccagaggagggccggcagggtcaaactgagaaattccagtttgaactaactttagaggaagatggtgagtcagacacggaaaaggacagtggcagtcaagtggaagaagacactagctgcagtgactccaagactctttgtactcaagactcagagtctactgaaattccccttgatgaacaggttgaagaggaggcagtaggggaagaagaggaaagccagcctgaagcctgtgtcatagatgatcgttctcctgacacgtaacagtgcaaaaactttcatgccttttttttttttaagtagaaaaattgtttccaaagtgcatgtcacatgccacaaccacggtcacacctcactgtcatctgccaggacgtttgttgaacaaaactgaccttgactactcagtccagcgctcaggaatatcgtaaccagttttttcacctccatgttcatccgagcaaggtggacatcttcacgaacagcgtttttaacaagatttcagcttggtagagctgacaaagcagataaaatctactccaaattattttcaagagagtgtgactcatcaggcagcccaaaagtttattggacttggggtttctattcctttttatttgtttgcaatattttcagaagaaaggcattgcacagagtgaacttaatggacgaagcaacaaatatgtcaagaacaggacatagcacgaatctgttaccagtaggaggaggatgagccacagaaattgcataattttctaatttcaagtcttcctgatacatgactgaatagtgtggttcagtgagctgcactgacctctacattttgtatgatatgtaaaacagattttttgtagagcttacttttattattaaatgtattgaggtattatatttaaaaaaaactatgttcagaacttcatctgccactggttatttttttctaaggagtaacttgcaagttttcagtacaaatctgtgctacactggataaaaatctaatttatgaattttacttgcaccttatagttcatagcaattaactgatttgtagtgattcattgtttgttttatataccaatgacttccatattttaaaagagaaaaacaactttatgttgcaggaaaccctttttgtaagtctttattatttactttgcattttgtttcactctttccagataagcagagttgctcttcaccagtgtttttcttcatgtgcaaagtgactatttgttctataatacttttatgtgtgttatatcaaatgtgtcttaagcttcatgcaaactcagtcatcagttcgtgttgtctgaagcaagtgggagatatataaatacccagtagctaaaatggtcagtcttttttagatgttttcctacttagtatctcctaataacgttttgctgtgtcactagatgttcatttcacaagtgcatgtctttctaataatccacacatttcatgctctaataatccacacatttcatgctcatttttattgtttttacagccagttatagnaagaaaaaggtttttccccttgtgctgctttataatttagcgtgtgtctgaaccttatccatgtttgctagatgaggtcttgtcaaatatatcactaccattgtcaccggtgaaaagaaacaggtagttaagttagggttaacattcatttcaaccacgaggttgtatatcatgactagcttttactcttggtttacagagaaaagttaaacanccaactaggcagtttttaagaatattaacaatatattaacaaacaccaatacaactaatcctatttggttttaatgatttcaccatgggattaagaactatatcaggaacatccctgagaaacggttttaagtgtagcaactactcttccttaatggacagccacataacgtgtaggaagtcctttatcacttatcctcgatccataagcatatcttgcagaggggaactacttctttaaacacatggagggaaagaagatgatgccactggcaccagagggttagtactgtgatgcatcctaaaatatttattatattggtaaaaattctggttaaataaaaaattagagatcactcttggctgatttcagcaccaggaactgtattacagttttagagattaattcctagtgtttacctgattatagcagttggcatcatggggcatttaattctgactttatccccacgtcagccttaataaagtcttctttaccttctctatgaagactttaaagcccaaataatcatttttcacattgatattcaagaattgagatagatagaagccaaagtgggtatctgacaagtggaaaatcaaacgtttaagaagaattacaactctgaaaagcatttatatgtggaacttctcaaggagcctcctggggactggaaagtaagtcatcagccaggcaaatgactcatgctgaagagagtccccatttcagtcccctgagatctagctgatgcttagatcctttgaaataaaaattatgtctttataactctgatcttttacataaagcagaagaggaatcaactagttaattgcaaggtttctactctgtttcctctgtaaagatcagatggtaatctttcaaataagaaaaaaataaagacgtatgtttgaccaagtagtttcacaagaatatttgggaacttgtttcttttaattttatttgtccctgagtgaagtctagaaagaaaggtaaagagtctagagtttattcctctttccaaaacattctcattcctctcctccctactcttagtatttcccccacagagtgcctagaatcttaataatgaataaaataaaaagcagcaatatgtcattaacaaatccagacctgaaagggtaaagggtttataactgcactaataaagagaggctctttttttttcttccagtttgttggtttttaatggtaccgtgttgtaaagatacccactaatggacaatcaaattgcagaaaaggctcaatatccaagagacagggactaatgcactgtacaatcggcttatccttgcccttctctcttgccaaagtgtgcttcagaaatatatactgctttaaaaaagaataaaagaatatccttttacaagtggctttacatttcctaaaatgccataagaaaatgcaatatctgggtactgtatggggaaaaaaatgtccaagtttgtataaaaccagtgcatttcagcttgcaagttactgaacacaataatgctgttttaattttgttttatatcagttaaaattcacaataatgtagatagaacaaattacagacaaggaaagaaaaaacttgaatgaaatggattttacagaaagctttatgataatttttgaatgcattatttattttttgtgccatgcattttttttctcaccaaatgaccttacctgtaatacagtcttgtttgtctgtttacaaccatgtatttattgcaatgtacatactgtaatgttaattgtaaattatctgttcttattaaaacatcatcccatgatgggatggtgttgatatatttggaaactcttggtgagagaatgaatggtgtgtatacatactctgtacatttttcttttctcctgtaatatagtcttgtcaccttagagcttgtttatggaagattcaagaaaactataaaatacttaaagatatataaatttaaaaaaacatagctgcaggtctttggtcccagggctgtgccttaactttaaccaatattttcttctgttttgctgcatttgaaaggtaacagtggagctagggctgggcattttacatccaggcttttaattgattagaattctgccaataggtggattttacaaaaccacagacaacctctgaaagattctgagacccttttgagacagaagctcttaagtacttcttgccagggagcagcactgcatgtgtgatggttgtttgccatctgttgatcaggaactacttcagctacttggcatttgattatttcctttttttttttttttaactcggaaacacaactgggggaaatatattctttcccagtgattataaacaatctttttcttt

SEQ ID NO: 289287 - DNA, 1412 bp, Homo sapiens
aagctggtacggtcccgaattatggaatccagctgggcggggcttcgccgtgttaccttctcaacatggcgagcttgctggacgtcacgtcgccttcgccttttccgctgcggactctgctcaccgacctcctcagtagagccggccctgctcactaccgcgcccacgtgtcctgttgtgcttcattcccacaggccgcataagatattcactgagcacctaatattgccaggctgtgctcaaggcagtgggattcatcagtgaacaatacagacaaaaatcactgacctaaatggagcttgaagtttatatctaaatcattcaaagattctgtggtggaaaagaagttagaaatctttcagctgcaaaacataagccaaaatacaactcacctttggaatcagagaacttacaggttcataaaattgcgaagcccagatgtgcacctgaggtgagacttcgtccagcttctgtctgtgtcactaatctttcctgctttcagcggcatccctcgcaggcccgtgttgttcccaactggtgttcccacctggcggcaaactggtgactgtagttacagatcttcaacatcacactcaggagaagaaggagattgcttttcaggagctcctgcaagccggagaataaaagctcttatttattcagaagccctaaaacataccaccttggctgtagacatatttggacatttctaagcaaatctgtctgcaaaggtgctgagctgtgttgatcaactgaagcccgtgacgtctcatccttgcagttggagcaaatctcaaaggcaaagccagtgttaaggagagggaaatcagacttcatctttcgatgggagaagaaaagagtttgcaactgtctctattctgccactggcagagaatccataggtttgctaaggatacagagccacattgaaaagataaaccttgctatgctggagattacttaggtgggccaggatttcttgaaaccaaaactttactgaatcacctcttcaccatctgtatgccgtgcatttgctgagagataaaaacattcctgtgaaagatgcccttccctgcaccgggagaaaagaagcattctgcgaccaggagccatagcgaagataattctgtagaaacagaccgtggtaaaataatgcctatcttcctgcagcctccccacgtaatttagttacttttccacagctgcttctttttgctcaacctaatatcaaagcagttaggtattgccatttctttgggtcttcattttcttattcaggctcctgtgccatgtaaaacctctattaaatttgtatgattttctcctgataacctacctatgtcaacttcactctcagatccagcctgggcgacagaacgagactgtgtcttaaaaacaaaaacaaaaacaaa

SEQ ID NO: 289288 - DNA, 1937 bp, Homo sapiens
aagctggtacggtcccgaattatggaatccagctgggcggggcttcgccgtgttaccttctcaacatggcgagcttgctggacgtcacgtcgccttcgccttttccgctgcggactctgctcaccgacctcctcagtagagccggccctgctcactaccgcgcccacgtgtcctgttgtgcttcattcccacaggccgcataagaagtgggtgccgaggctcccttcccactgccattccactggcccagaggaagcttctgttgtgttcagatgggcaggcactcttcctcgagaagttaagtagccggaatatctaaatgcctctccttggcgattactcgatgagcgcctgtccttcctccactcttccagcagacctgccttttggggctgatggaaatatgcatattagattatctgcagaaactggctcagcactacaaggaggctgccaacatgaagacactggatgcggaatcaggaggagatgtatacagctcagtctccaaagccaggacaagccagctccaacacactactggctgaatctcaccaatcgttatagttttgttttttgtttttttaaatgtatttaagcatttttaggtgttttaaattttatgtgtgtattctaggaatatgtactcagattctttcattaggcatgtgttattaacaacattcatcttcttaaaggctgaaccaactttgcgcgttttatcaacagatattcactgagcacctaatattgccaggctgtgctcaaggcagtgggattcatcagtgaacaatacagacaaaaatcactgacctaaatggagcttgaagtttatatctaaatcattcaaagattctgtggtggaaaagaagttagaaatctttcagctgcaaaacataagccaaaatacaactcacctttggaatcagagaacttacaggttcataaaattgcgaagcccagatgtgcacctgaggtgagacttcgtccagcttctgtctgtgtcactaatctttcctgctttcagcggcatccctcgcaggcccgtgttgttcccaactggtgttcccacctggcggcaaactggtgactgtagttacagatcttcaacatcacactcaggagaagaaggagattgcttttcaggagctcctgcaagccggagaataaaagctcttatttattcagaagccctaaaacataccaccttggctgtagacatatttggacatttctaagcaaatctgtctgcaaaggtgctgagctgtgttgatcaactgaagcccgtgacgtctcatccttgcagttggagcaaatctcaaaggcaaagccagtgttaaggagagggaaatcagacttcatctttcgatgggagaagaaaagagtttgcaactgtctctattctgccactggcagagaatccataggtttgctaaggatacagagccacattgaaaagataaaccttgctatgctggagattacttaggtgggccaggatttcttgaaaccaaaactttactgaatcacctcttcaccatctgtatgccgtgcatttgctgagagataaaaacattcctgtgaaagatgcccttccctgcaccgggagaaaagaagcattctgcgaccaggagccatagcgaagataattctgtagaaacagaccgtggtaaaataatgcctatcttcctgcagcctccccacgtaatttagttacttttccacagctgcttctttttgctcaacctaatatcaaagcagttaggtattgccatttctttgggtcttcattttcttattcaggctcctgtgccatgtaaaacctctattaaatttgtatgattttctcctgataacctacctatgtcaacttcactctcagatccagcctgggcgacagaacgagactgtgtcttaaaaacaaaaacaaaaacaaa

SEQ ID NO: 289289 - DNA, 1692 bp, Homo sapiens
aagctggtacggtcccgaattatggaatccagctgggcggggcttcgccgtgttaccttctcaacatggcgagcttgctggacgtcacgtcgccttcgccttttccgctgcggactctgctcaccgacctcctcagtagagccggccctgctcactaccgcgcccacgtgtcctgttgtgcttcattcccacaggccgcataaggctgccaacatgaagacactggatgcggaatcaggaggagatgtatacagctcagtctccaaagccaggacaagccagctccaacacactactggctgaatctcaccaatcgttatagttttgttttttgtttttttaaatgtatttaagcatttttaggtgttttaaattttatgtgtgtattctaggaatatgtactcagattctttcattaggcatgtgttattaacaacattcatcttcttaaaggctgaaccaactttgcgcgttttatcaacagatattcactgagcacctaatattgccaggctgtgctcaaggcagtgggattcatcagtgaacaatacagacaaaaatcactgacctaaatggagcttgaagtttatatctaaatcattcaaagattctgtggtggaaaagaagttagaaatctttcagctgcaaaacataagccaaaatacaactcacctttggaatcagagaacttacaggttcataaaattgcgaagcccagatgtgcacctgaggtgagacttcgtccagcttctgtctgtgtcactaatctttcctgctttcagcggcatccctcgcaggcccgtgttgttcccaactggtgttcccacctggcggcaaactggtgactgtagttacagatcttcaacatcacactcaggagaagaaggagattgcttttcaggagctcctgcaagccggagaataaaagctcttatttattcagaagccctaaaacataccaccttggctgtagacatatttggacatttctaagcaaatctgtctgcaaaggtgctgagctgtgttgatcaactgaagcccgtgacgtctcatccttgcagttggagcaaatctcaaaggcaaagccagtgttaaggagagggaaatcagacttcatctttcgatgggagaagaaaagagtttgcaactgtctctattctgccactggcagagaatccataggtttgctaaggatacagagccacattgaaaagataaaccttgctatgctggagattacttaggtgggccaggatttcttgaaaccaaaactttactgaatcacctcttcaccatctgtatgccgtgcatttgctgagagataaaaacattcctgtgaaagatgcccttccctgcaccgggagaaaagaagcattctgcgaccaggagccatagcgaagataattctgtagaaacagaccgtggtaaaataatgcctatcttcctgcagcctccccacgtaatttagttacttttccacagctgcttctttttgctcaacctaatatcaaagcagttaggtattgccatttctttgggtcttcattttcttattcaggctcctgtgccatgtaaaacctctattaaatttgtatgattttctcctgataacctacctatgtcaacttcactctcagatccagcctgggcgacagaacgagactgtgtcttaaaaacaaaaacaaaaacaaa

SEQ ID NO: 289290 - DNA, 1790 bp, Homo sapiens
aagctggtacggtcccgaattatggaatccagctgggcggggcttcgccgtgttaccttctcaacatggcgagcttgctggacgtcacgtcgccttcgccttttccgctgcggactctgctcaccgacctcctcagtagagccggccctgctcactaccgcgcccacgtgtcctgttgtgcttcattcccacaggccgcataagaagtgggtgccgaggctcccttcccactgccattccactggcccagaggaagcttctgttgtgttcagatgggcaggcactcttcctcgagaagttaagtagccggaatatctaaatgcctctccttggcgattactcgatgagcgcctgtccttcctccactcttccagcagacctgccttttggggctgatggaaatatgcatattagattatctgcagaaactggctcagcactacaaggaggctgccaacatgaagacactggatgcggaatcaggaggagatgtatacagctcagtctccaaagccaggacaagccagctccaacacactactggctgaatctcaccaatcgttatagttttgttttttgtttttttaaatgtatttaagcatttttaggtgttttaaattttatgtgtgtattctaggaatatgtactcagattctttcattaggcatgtgttattaacaacattcatcttcttaaaggctgaaccaactttgcgcgttttatcaacagatattcactgagcacctaatattgccaggctgtgctcaaggcagtgggattcatcagtgaacaatacagacaaaaatcactgacctaaatggagcttgaagtttatatctaaatcattcaaagattctgtggtggaaaagaagttagaaatctttcagctgcaaaacataagccaaaatacaactcacctttggaatcagagaacttacaggttcataaaattgcgaagcccagatgtgcacctgaggtgagacttcgtccagcttctgtctgtgtcactaatctttcctgctttcagcggcatccctcgcaggcccgtgttgttcccaactggtgttcccacctggcggcaaactggtgactgtagttacagatcttcaacatcacactcaggagaagaaggagattgcttttcaggagctcctgcaagccggagaataaaagctcttatttattcagaagccctaaaacataccaccttggctgtagacatatttggacatttctaagcaaatctgtctgcaaaggtgctgagctgtgttgatcaactgaagcccgtgacgtctcatccttgcagttggagataaaccttgctatgctggagattacttaggtgggccaggatttcttgaaaccaaaactttactgaatcacctcttcaccatctgtatgccgtgcatttgctgagagataaaaacattcctgtgaaagatgcccttccctgcaccgggagaaaagaagcattctgcgaccaggagccatagcgaagataattctgtagaaacagaccgtggtaaaataatgcctatcttcctgcagcctccccacgtaatttagttacttttccacagctgcttctttttgctcaacctaatatcaaagcagttaggtattgccatttctttgggtcttcattttcttattcaggctcctgtgccatgtaaaacctctattaaatttgtatgattttctcctgataacctacctatgtcaacttcactctcagatccagcctgggcgacagaacgagactgtgtcttaaaaacaaaaacaaaaacaaa

SEQ ID NO: 289291 - DNA, 568 bp, Homo sapiens
cctgggccgacttcggtactacagaattatcttcgctatggctctggtcgcagaatgcttcttttctcccggtgccagaatgtgcaccccaaaatatgtcactttggcataaggattattttgagttagaaacacttgaaaaacagcagatagaagaagtgcatgtcattctccccttttctcctcaaaaacaggagataaaaacattcctgtgaaagatgcccttccctgcaccgggagaaaagaagcattctgcgaccaggagccatagcgaagataattctgtagaaacagaccgtggtaaaataatgcctatcttcctgcagcctccccacgtaatttagttacttttccacagctgcttctttttgctcaacctaatatcaaagcagttaggtattgccatttctttgggtcttcattttcttattcaggctcctgtgccatgtaaaacctctattaaatttgtatgattttctcctgataacctacctatgtcaacttcactctcagatccagcctgggcgacagaacgagactgtgtcttaaaaacaaaaacaaaaacaaa

SEQ ID NO: 289292 - DNA, 977 bp, Homo sapiens
aagctggtacggtcccgaattatggaatccagctgggcggggcttcgccgtgttaccttctcaacatggcgagcttgctggacgtcacgtcgccttcgccttttccgctgcggactctgctcaccgacctcctcagtagagccggccctgctcactaccgcgcccacgtgtcctgttgtgcttcattcccacaggccgcataagactctcatgctaacagctattggatggaaagagatgtttgggcttctgtggttgtttactgtgtacgccagatagaaccgtgggtctccagctgctgttccacacagatgtttggctaactccagctaggctgaaatattggcagattcattttactgaaggatttcagtttccgtgacttcttggtgggacctgaatgctctgaaaagctttgagcattttcacctcaaccttgggtgtgaacagtcttgtattttcttgcctttggaaagtagttcttagtgactggaagcctgaggcttgggtgatattgtcaggaaccaggatgaacctgaggggcctggacaccgctgaaatgtgtttgattctagtccttaatcatttcccaaccagcctggctaaacaattgtgtgggccactataaccatcggtacttcttctctttctgctttttcatgactctgggctgtgtctactgcagtatggaagttgggacctttccgggagggctatgctggccatgagaacattgaaccagctcgacaagaacaaactacggggtgccaaccagaatatcaacagacccacaacccacttccttcgacaaggtgactcccagatctgctacccggtccgggcatctggcactccggggccaacggtggatggctcaaggaggaatgctaggcactcacaggagctgcagcaggagtaatcaccggcgacgagcccggcacagctcgccacccagaagccccgccggggcccccgtg

SEQ ID NO: 289293 - DNA, 547 bp, Homo sapiens
aagctggtacggtcccgaattatggaatccagctgggcggggcttcgccgtgttaccttctcaacatggcgagcttgctggacgtcacgtcgccttcgccttttccgctgcggactctgctcaccgacctcctcagtagagccggccctgctcactaccgcgcccacgtgtcctgttgtgcttcattcccacaggccgcataagcaattctacatctggactttatcctacaaatgttcctgcgtgtgtatgaaagagggaaagattgaaaacaacccaagtgtccgtccacggggactctggttaaatgaagtgtggaatccctgcagtgaacaccagccttccataatggacagaggcagcccttctctacgcatcagaaataacccaagatagaggaagctctctcggtacccatcagaaatatccccagacagagagagccctctgcgtgtcaatcagaagtgtgcccagacagaacttttcatctttcatcgaacaaatctatttatggtggcttcttttaccagttcttctgcctgatccc

SEQ ID NO: 289294 - DNA, 5533 bp, Homo sapiens
  misc_feature (31)..(31): n is a, c, g, or t
  misc_feature (69)..(69): n is a, c, g, or t
gtgaaggcacccatctggcagggggcagggngctcttgcaggttccgccgtgcagagaagaagccacanggaccgagggaggcctgaaggagatgtctaacctgagccgtagaacgtaagaagttgccagcataaagacaggtagctgcaatcaacccaaatcaccctcttgctcagatgcctttgcctccgtcgatgaaaaactgcatccagctggcagcctgcgaggccaccgagctgctgcccatgatccccgacctcccggctgacctattcacctcctgcctcaccacccccatcaagatcgccctgcgctggttttgcatgcagaaatgtgtcagtctggtgcctggcgtcacactggatttgatagaaaagatccctggccgcctgaacgacaggaggacgcccctgggtgaactgaactggatcttcacagccatcacagacaccatcgcgtggaacgtgctcccccgggatctcttccaaaagctcttcagacaggacttgctggtggctagtctgtttcgaaattttttattggcggaaaggattatgaggtcgtataactgcactcccgtcagcagcccgcgtctgccgcccacgtacatgcacgccatgtggcaagcctgggacctggctgttgacatctgtctgtctcagctgccgacgatcatcgaggaaggcactgcgtttcggcacagcccgttcttcgccgagcagctgaccgcattccaggtgtggctcaccatgggcgtggagaaccgaaacccacccgaacagctgcccatcgtcctgcaggtgctgttaagccaagtgcaccggctgagagcattggacttgcttggaagatttttggacctgggtccctgggcagtgagcctggccttgtctgtcggcatcttcccctacgtgctgaagctgctccagagctcggcccgagagctgcggccacttctcgttttcatctgggccaagatcctcgcagtggacagctcgtgccaagcggacctcgtgaaggacaacggccacaagtacttcctgtcggtcctggcggacccctacatgccagctgaacaccggaccatgacggctttcattctcgccgtgatcgtcaacagctatcacacggggcaggaagcctgccttcagggaaacctcattgccatctgcctggagcagctcaacgacccgcaccccttgctgcgccagtgggtggccatctgcctcggcaggatctggcagaacttcgactcggcgaggtggtgcggcgtgagggacagcgctcatgagaagctctacagcctcctctccgaccccattcccgaggtccgctgcgcagcggtcttcgcccttggcacgttcgtgggcaactctgcagagaggacggaccactccaccaccatcgaccacaacgtggccatgatgctggcccagctggtcagcgacgggagccccatggtccggaaggagctggtggtggctctgagtcatcttgtggttcagtatgaaagcaatttctgcaccgtggccctgcagttcatagaagaggaaaagaactacgccttgccttctccagcaaccacagagggagggagtttgaccccagtgcgagacagcccgtgcacccccagacttcgttctgtgagctcctatggaaacatccgtgctgtcgccacagccaggagcctcaacaaatctttgcagaacctgagtttgacagaggaatctggtggcgcggtggcgttctcccccggaaacctcagcaccagcagcagcgccagcagcaccctgggcagccccgagaatgaggagcatatcctgtccttcgagaccatcgacaagatgcgccgcgccagctcctactcctccctcaactccctcatcggagtttcctttaacagtgtttacactcagatttggagagtcctgctgcacctggctgctgacccctatccagaggtctcggacgtggccatgaaagtactcaacagcatcgcctacaaggccaccgtgaacgcccggccgcagcgcgtcctggacacctcctccctcacgcagtcggcccccgccagccccaccaacaagggcgtgcacatccaccaggcggggggctcccctccggcgtccagcaccagcagctccagcctgaccaacgatgtggccaagcagccggtcagccgagacttgccttctggccggccgggcaccacaggccccgctggggcgcagtacacccctcactcccaccagttcccccggacacggaagatgttcgacaagggcccagagcagactgcggacgacgcggacgatgctgctggacacaaaagtttcatctccgccacggtgcagacggggttctgcgactggagcgcccgctattttgcccagcccgtcatgaagatcccagaagagcacgacctggagagtcagatccgcaaggagcgggagtggcggttcctgcgaaacagccgtgtcaggaggcaggcccagcaagtcattcagaagggcattacgagattggacgaccaaatatttctgaacaggaaccccggcgtcccctctgtggtgaaattccaccccttcacgccgtgcatcgctgtagccgacaaggacagcatctgcttttgggactgggagaaaggggagaagctggattatttccacaatgggaaccctcggtacacgagggtcactgccatggagtatctgaacggccaggactgctcgcttctgctgacggccacagacgatggtgccatcagggtctggaagaattttgctgatttggaaaagaacccagagatggtgaccgcgtggcaggggctctcggacatgctgccaacgacgcgaggagctgggatggtggtggactgggagcaggagaccggcctcctcatgagctcaggagacgtgcggatcgtccggatctgggacacagaccgtgagatgaaggtgcaggacatccctacgggcgcagacagctgtgtgacgagtctgtcctgtgattcccaccgctcactcatcgtggctggcctcggtgacggctccatccgcgtctacgacagaaggatggcactcagcgaatgccgcgtcatgacgtaccgggagcacacagcctgggtggtgaaggcctccctgcagaagcgtcccgacggccacatcgtgagtgtgagcgtcaatggagatgtgcgcatctttgatccccggatgcctgagtcggtaaatgtgcttcagatcgtgaaggggctgacggccctggacatccacccccaggcggacctgatcgcatgtggctccgtcaatcagttcaccgccatctacaacagcagcggagagctcatcaacaacatcaagtactacgacggcttcatgggccagcgggtcggcgccatcagctgcctggccttccacccgcactggcctcacctggccgtgggaagcaacgactactacatctccgtgtactcggtggagaagcgtgtcagatagcggcgtgacccgggcccaccaggccacggccgcctgctgtacatagtgaagctgtcactcgccggggcacggggcgtcggctgctgcggccccgcagtgtgaacgttggctgctgccttagctgctgatgacggcaggagggccctgctactcgcttttgtctgtcttcgctgtcgtgtctggaatgtcagggaaggggagggctcgggttgacggtggcttcccactgagcaccagcatccaggtgcacccccgcggccacggcgcctctgtccctctcctgttctgtgtttctctgagacgctgaaaggggaaacacctcactttatttccatgtaatcagagcattagctgcagaaaaaccccccgacagagccctggcggagaggcaggcgctggggctcctacgggtccctggggcagctgtccccatcaggccaagagcgagcgagaggcgctgccccagccaggcccaccacctctcacagtcagtgcacgcaagcagggacatttcctagccagctgggggacactggaaattcgggaaaccaagagagaggaagaaggagacgcccctccaactggcgggtgtgaaggaagccgcccaggggtccgggctgtccttggccgctggcagcatcactgagcaggaagcgcacagcccaccctccccgcacctccaggtctctggactccagttttggcccctctcacacagagctgtcagcaggggccgctgtggcggtgcacaggggaggcaggtccttggcgaggtagcccctgccttaatccacggggctcctttccctccgaagggctgctcttccccacaggcgcggggacagcagcccgacctgtggtctccatgcctgtgccctcacacaggtgtagcacacgcatgtgcagatggcaccacggccggcacctgggggcacacacatgcaggcggcgtggtctccctgctctgtccccacacgttcctcacatacaggcaagaggcactgccgggtcccggacggctccgggtgacaccagccccgtctccagccttgagccgcccatgctgatgcgacctcggctgacagctgggcctgtggtgcagacaggagctgtgtggacagtcccgcccaggaggggccgcagggcgtgtatgagcagttttgcaaacagaacacaaccacaatgatggtattttgaaaagtgttctttccgtgttcgtcgggaatcaggattattgagaggtgaaggagccaggtggcttcattctggcggtgagaggcccatgaccacgggagtgagagctggtgtggcgaggcccggctctcctgcggtgtggctggtggcctgccgtggccaagagcatcttctgggtggatggaaccctgcctggtcacatttggccagagacacacctggccctcagggggctgagctggagactgagctggggctggccgggacgtgacaaggcaggacagaggcggcccctccgctgctcctttttggaatgcgagctcccaccagaagaaggttccggcacgaatcccatccccacgtctgggccgagaaagcagcccgggtccggaaggtgtagagagtcccggcctcactcagctcacagggcgtgccaggcggcaacaccagaatcttccagaagcccagctccacccgcacacgcagcttcccatccagtccttcaactcaattcttacccaacacgcgtttctgtttgttttgagacaaaatcaccacctgtcaaaaggcaggtggctccagaggggtcaagacccccccccgcccccgctccaccctggagcccacccccatgggcaccgcgtgccgcctgcacgtgggctgtcttcacaggtctgatgtgaaaattcaatcacgacgttaaccggctcgagagagcgccggcctagaggctcattatctatttattttaccaaacgcgaattgagacggactttgacaaaacacgaaatggtaatgtgaagctaagagcagagagtgaccaacagtaaacaacacgcgcaga

SEQ ID NO: 289295 - DNA, 6208 bp, Homo sapiens
  misc_feature (13)..(13): n is a, c, g, or t
  misc_feature (102)..(102): n is a, c, g, or t
tcagacttttgcntgagtaagggtctccgcactctttatccatttggttttcgatttcccgtttttgtttcttatttcaccaattctggtacacgctagttnttaaggctggaggttctcgagcgcttgctgccaaggactcccccaccccctcccccactgatggagtccgaaatgctgcaatcgcctcttctgggcctgggggaggaagatgaggctgatcttacagactggaacctacctttggctttcatgaaaaagaggcactgtgagaaaattgaaggctccaaatccttagctcagagctggaggatgaaggatcggatgaagacagtcagtgttgccttagttttgtgcctgaatgttggtgtggaccctcccgatgtggtgaagaccacgccctgtgcacgcttggaatgctggatcgatcctctgtcgatgggtcctcagaaagctctggaaaccatcggtgcaaatttacagaagcagtacgagaactggcagccaagggcccggtacaagcagagccttgacccaactgtggatgaagtcaagaagctctgcacgtccttacgtcgcaacgccaaggaggagcgagtcctctttcactacaatggccacggggtgccccggcccacagtcaacggggaggtctgggtcttcaacaagaactacacgcagtacatccctctgtccatatatgacctgcagacgtggatgggcagcccgtcgatcttcgtctacgactgctccaatgctggcttgatcgtcaagtccttcaagcagttcgcactacagcgggagcaggagctggaggtagctgcaatcaacccaaatcaccctcttgctcagatgcctttgcctccgtcgatgaaaaactgcatccagctggcagcctgcgaggccaccgagctgctgcccatgatccccgacctcccggctgacctattcacctcctgcctcaccacccccatcaagatcgccctgcgctggttttgcatgcagaaatgtgtcagtctggtgcctggcgtcacactggatttgatagaaaagatccctggccgcctgaacgacaggaggacgcccctgggtgaactgaactggatcttcacagccatcacagacaccatcgcgtggaacgtgctcccccgggatctcttccaaaagctcttcagacaggacttgctggtggctagtctgtttcgaaattttttattggcggaaaggattatgaggtcgtataactgcactcccgtcagcagcccgcgtctgccgcccacgtacatgcacgccatgtggcaagcctgggacctggctgttgacatctgtctgtctcagctgccgacgatcatcgaggaaggcactgcgtttcggcacagcccgttcttcgccgagcagctgaccgcattccaggtgtggctcaccatgggcgtggagaaccgaaacccacccgaacagctgcccatcgtcctgcaggtgctgttaagccaagtgcaccggctgagagcattggacttgcttggaagatttttggacctgggtccctgggcagtgagcctggccttgtctgtcggcatcttcccctacgtgctgaagctgctccagagctcggcccgagagctgcggccacttctcgttttcatctgggccaagatcctcgcagtggacagctcgtgccaagcggacctcgtgaaggacaacggccacaagtacttcctgtcggtcctggcggacccctacatgccagctgaacaccggaccatgacggctttcattctcgccgtgatcgtcaacagctatcacacggggcaggaagcctgccttcagggaaacctcattgccatctgcctggagcagctcaacgacccgcaccccttgctgcgccagtgggtggccatctgcctcggcaggatctggcagaacttcgactcggcgaggtggtgcggcgtgagggacagcgctcatgagaagctctacagcctcctctccgaccccattcccgaggtccgctgcgcagcggtcttcgcccttggcacgttcgtgggcaactctgcagagaggacggaccactccaccaccatcgaccacaacgtggccatgatgctggcccagctggtcagcgacgggagccccatggtccggaaggagctggtggtggctctgagtcatcttgtggttcagtatgaaagcaatttctgcaccgtggccctgcagttcatagaagaggaaaagaactacgccttgccttctccagcaaccacagagggagggagtttgaccccagtgcgagacagcccgtgcacccccagacttcgttctgtgagctcctatggaaacatccgtgctgtcgccacagccaggagcctcaacaaatctttgcagaacctgagtttgacagaggaatctggtggcgcggtggcgttctcccccggaaacctcagcaccagcagcagcgccagcagcaccctgggcagccccgagaatgaggagcatatcctgtccttcgagaccatcgacaagatgcgccgcgccagctcctactcctccctcaactccctcatcggagtttcctttaacagtgtttacactcagatttggagagtcctgctgcacctggctgctgacccctatccagaggtctcggacgtggccatgaaagtactcaacagcatcgcctacaaggccaccgtgaacgcccggccgcagcgcgtcctggacacctcctccctcacgcagtcggcccccgccagccccaccaacaagggcgtgcacatccaccaggcggggggctcccctccggcgtccagcaccagcagctccagcctgaccaacgatgtggccaagcagccggtcagccgagacttgccttctggccggccgggcaccacaggccccgctggggcgcagtacacccctcactcccaccagttcccccggacacggaagatgttcgacaagggcccagagcagactgcggacgacgcggacgatgctgctggacacaaaagtttcatctccgccacggtgcagacggggttctgcgactggagcgcccgctattttgcccagcccgtcatgaagatcccagaagagcacgacctggagagtcagatccgcaaggagcgggagtggcggttcctgcgaaacagccgtgtcaggaggcaggcccagcaagtcattcagaagggcattacgagattggacgaccaaatatttctgaacaggaaccccggcgtcccctctgtggtgaaattccaccccttcacgccgtgcatcgctgtagccgacaaggacagcatctgcttttgggactgggagaaaggggagaagctggattatttccacaatgggaaccctcggtacacgagggtcactgccatggagtatctgaacggccaggactgctcgcttctgctgacggccacagacgatggtgccatcagggtctggaagaattttgctgatttggaaaagaacccagagatggtgaccgcgtggcaggggctctcggacatgctgccaacgacgcgaggagctgggatggtggtggactgggagcaggagaccggcctcctcatgagctcaggagacgtgcggatcgtccggatctgggacacagaccgtgagatgaaggtgcaggacatccctacgggcgcagacagctgtgtgacgagtctgtcctgtgattcccaccgctcactcatcgtggctggcctcggtgacggctccatccgcgtctacgacagaaggatggcactcagcgaatgccgcgtcatgacgtaccgggagcacacagcctgggtggtgaaggcctccctgcagaagcgtcccgacggccacatcgtgagtgtgagcgtcaatggagatgtgcgcatctttgatccccggatgcctgagtcggtaaatgtgcttcagatcgtgaaggggctgacggccctggacatccacccccaggcggacctgatcgcatgtggctccgtcaatcagttcaccgccatctacaacagcagcggagagctcatcaacaacatcaagtactacgacggcttcatgggccagcgggtcggcgccatcagctgcctggccttccacccgcactggcctcacctggccgtgggaagcaacgactactacatctccgtgtactcggtggagaagcgtgtcagatagcggcgtgacccgggcccaccaggccacggccgcctgctgtacatagtgaagctgtcactcgccggggcacggggcgtcggctgctgcggccccgcagtgtgaacgttggctgctgccttagctgctgatgacggcaggagggccctgctactcgcttttgtctgtcttcgctgtcgtgtctggaatgtcagggaaggggagggctcgggttgacggtggcttcccactgagcaccagcatccaggtgcacccccgcggccacggcgcctctgtccctctcctgttctgtgtttctctgagacgctgaaaggggaaacacctcactttatttccatgtaatcagagcattagctgcagaaaaaccccccgacagagccctggcggagaggcaggcgctggggctcctacgggtccctggggcagctgtccccatcaggccaagagcgagcgagaggcgctgccccagccaggcccaccacctctcacagtcagtgcacgcaagcagggacatttcctagccagctgggggacactggaaattcgggaaaccaagagagaggaagaaggagacgcccctccaactggcgggtgtgaaggaagccgcccaggggtccgggctgtccttggccgctggcagcatcactgagcaggaagcgcacagcccaccctccccgcacctccaggtctctggactccagttttggcccctctcacacagagctgtcagcaggggccgctgtggcggtgcacaggggaggcaggtccttggcgaggtagcccctgccttaatccacggggctcctttccctccgaagggctgctcttccccacaggcgcggggacagcagcccgacctgtggtctccatgcctgtgccctcacacaggtgtagcacacgcatgtgcagatggcaccacggccggcacctgggggcacacacatgcaggcggcgtggtctccctgctctgtccccacacgttcctcacatacaggcaagaggcactgccgggtcccggacggctccgggtgacaccagccccgtctccagccttgagccgcccatgctgatgcgacctcggctgacagctgggcctgtggtgcagacaggagctgtgtggacagtcccgcccaggaggggccgcagggcgtgtatgagcagttttgcaaacagaacacaaccacaatgatggtattttgaaaagtgttctttccgtgttcgtcgggaatcaggattattgagaggtgaaggagccaggtggcttcattctggcggtgagaggcccatgaccacgggagtgagagctggtgtggcgaggcccggctctcctgcggtgtggctggtggcctgccgtggccaagagcatcttctgggtggatggaaccctgcctggtcacatttggccagagacacacctggccctcagggggctgagctggagactgagctggggctggccgggacgtgacaaggcaggacagaggcggcccctccgctgctcctttttggaatgcgagctcccaccagaagaaggttccggcacgaatcccatccccacgtctgggccgagaaagcagcccgggtccggaaggtgtagagagtcccggcctcactcagctcacagggcgtgccaggcggcaacaccagaatcttccagaagcccagctccacccgcacacgcagcttcccatccagtccttcaactcaattcttacccaacacgcgtttctgtttgttttgagacaaaatcaccacctgtcaaaaggcaggtggctccagaggggtcaagacccccccccgcccccgctccaccctggagcccacccccatgggcaccgcgtgccgcctgcacgtgggctgtcttcacaggtctgatgtgaaaattcaatcacgacgttaaccggctcgagagagcgccggcctagaggctcattatctatttattttaccaaacgcgaattgagacggactttgacaaaacacgaaatggtaatgtgaagctaagagcagagagtgaccaacagtaaacaacacgcgcaga

SEQ ID NO: 289296 - DNA, 3124 bp, Homo sapiens
cctgggcgacagagcgagactccatctcaaaaaaaataaataaataaataagggggaaaagatgctggctcctggatccactcttgtgtgtttcttttgacaggcattacgagattggacgaccaaatatttctgaacaggaaccccggcgtcccctctgtggtgaaattccaccccttcacgccgtgcatcgctgtagccgacaaggacagcatctgcttttgggactgggagaaaggggagaagctggattatttccacaatgggaaccctcggtacacgagggtcactgccatggagtatctgaacggccaggactgctcgcttctgctgacggccacagacgatggtgccatcagggtctggaagaattttgctgatttggaaaagaacccagagatggtgaccgcgtggcaggggctctcggacatgctgccaacgacgcgaggagctgggatggtggtggactgggagcaggagaccggcctcctcatgagctcaggagacgtgcggatcgtccggatctgggacacagaccgtgagatgaaggtgcaggacatccctacgggcgcagacagctgtgtgacgagtctgtcctgtgattcccaccgctcactcatcgtggctggcctcggtgacggctccatccgcgtctacgacagaaggatggcactcagcgaatgccgcgtcatgacgtaccgggagcacacagcctgggtggtgaaggcctccctgcagaagcgtcccgacggccacatcgtgagtgtgagcgtcaatggagatgtgcgcatctttgatccccggatgcctgagtcggtaaatgtgcttcagatcgtgaaggggctgacggccctggacatccacccccaggcggacctgatcgcatgtggctccgtcaatcagttcaccgccatctacaacagcagcggagagctcatcaacaacatcaagtactacgacggcttcatgggccagcgggtcggcgccatcagctgcctggccttccacccgcactggcctcacctggccgtgggaagcaacgactactacatctccgtgtactcggtggagaagcgtgtcagatagcggcgtgacccgggcccaccaggccacggccgcctgctgtacatagtgaagctgtcactcgccggggcacggggcgtcggctgctgcggccccgcagtgtgaacgttggctgctgccttagctgctgatgacggcaggagggccctgctactcgcttttgtctgtcttcgctgtcgtgtctggaatgtcagggaaggggagggctcgggttgacggtggcttcccactgagcaccagcatccaggtgcacccccgcggccacggcgcctctgtccctctcctgttctgtgtttctctgagacgctgaaaggggaaacacctcactttatttccatgtaatcagagcattagctgcagaaaaaccccccgacagagccctggcggagaggcaggcgctggggctcctacgggtccctggggcagctgtccccatcaggccaagagcgagcgagaggcgctgccccagccaggcccaccacctctcacagtcagtgcacgcaagcagggacatttcctagccagctgggggacactggaaattcgggaaaccaagagagaggaagaaggagacgcccctccaactggcgggtgtgaaggaagccgcccaggggtccgggctgtccttggccgctggcagcatcactgagcaggaagcgcacagcccaccctccccgcacctccaggtctctggactccagttttggcccctctcacacagagctgtcagcaggggccgctgtggcggtgcacaggggaggcaggtccttggcgaggtagcccctgccttaatccacggggctcctttccctccgaagggctgctcttccccacaggcgcggggacagcagcccgacctgtggtctccatgcctgtgccctcacacaggtgtagcacacgcatgtgcagatggcaccacggccggcacctgggggcacacacatgcaggcggcgtggtctccctgctctgtccccacacgttcctcacatacaggcaagaggcactgccgggtcccggacggctccgggtgacaccagccccgtctccagccttgagccgcccatgctgatgcgacctcggctgacagctgggcctgtggtgcagacaggagctgtgtggacagtcccgcccaggaggggccgcagggcgtgtatgagcagttttgcaaacagaacacaaccacaatgatggtattttgaaaagtgttctttccgtgttcgtcgggaatcaggattattgagaggtgaaggagccaggtggcttcattctggcggtgagaggcccatgaccacgggagtgagagctggtgtggcgaggcccggctctcctgcggtgtggctggtggcctgccgtggccaagagcatcttctgggtggatggaaccctgcctggtcacatttggccagagacacacctggccctcagggggctgagctggagactgagctggggctggccgggacgtgacaaggcaggacagaggcggcccctccgctgctcctttttggaatgcgagctcccaccagaagaaggttccggcacgaatcccatccccacgtctgggccgagaaagcagcccgggtccggaaggtgtagagagtcccggcctcactcagctcacagggcgtgccaggcggcaacaccagaatcttccagaagcccagctccacccgcacacgcagcttcccatccagtccttcaactcaattcttacccaacacgcgtttctgtttgttttgagacaaaatcaccacctgtcaaaaggcaggtggctccagaggggtcaagacccccccccgcccccgctccaccctggagcccacccccatgggcaccgcgtgccgcctgcacgtgggctgtcttcacaggtctgatgtgaaaattcaatcacgacgttaaccggctcgagagagcgccggcctagaggctcattatctatttattttaccaaacgcgaattgagacggactttgacaaaacacgaaatggtaatgtgaagctaagagcagagagtgaccaacagtaaacaacacgcgcaga

SEQ ID NO: 289297 - DNA, 6153 bp, Homo sapiens
  misc_feature (13)..(13): n is a, c, g, or t
  misc_feature (102)..(102): n is a, c, g, or t
tcagacttttgcntgagtaagggtctccgcactctttatccatttggttttcgatttcccgtttttgtttcttatttcaccaattctggtacacgctagttnttaaggctggaggttctcgagcgcttgctgccaaggactcccccaccccctcccccactgatggagtccgaaatgctgcaatcgcctcttctgggcctgggggaggaagatgaggctgatcttacagactggaacctacctttggctttcatgaaaaagaggcactgtgagaaaattgaaggctccaaatccttagctcagagctggaggatgaaggatcggatgaagacagtcagtgttgccttagttttgtgcctgaatgttggtgtggaccctcccgatgtggtgaagaccacgccctgtgcacgcttggaatgctggatcgatcctctgtcgatgggtcctcagaaagctctggaaaccatcggtgcaaatttacagaagcagtacgagaactggcagccaagggcccggtacaagcagagccttgacccaactgtggatgaagtcaagaagctctgcacgtccttacgtcgcaacgccaaggaggagcgagtcctctttcactacaatggccacggggtgccccggcccacagtcaacggggaggtctgggtcttcaacaagaactacacgcagtacatccctctgtccatatatgacctgcagacgtggatgggcagcccgtcgatcttcgtctacgactgctccaatgctggcttgatcgtcaagtccttcaagcagttcgcactacagcgggagcaggagctggaggtagctgcaatcaacccaaatcaccctcttgctcagatgcctttgcctccgtcgatgaaaaactgcatccagctggcagcctgcgaggccaccgagctgctgcccatgatccccgacctcccggctgacctattcacctcctgcctcaccacccccatcaagatcgccctgcgctggttttgcatgcagaaatgtgtcagtctggtgcctggcgtcacactggatttgatagaaaagatccctggccgcctgaacgacaggaggacgcccctgggtgaactgaactggatcttcacagccatcacagacaccatcgcgtggaacgtgctcccccgggatctcttccaaaagctcttcagacaggacttgctggtggctagtctgtttcgaaattttttattggcggaaaggattatgaggtcgtataactgcactcccgtcagcagcccgcgtctgccgcccacgtacatgcacgccatgtggcaagcctgggacctggctgttgacatctgtctgtctcagctgccgacgatcatcgaggaaggcactgcgtttcggcacagcccgttcttcgccgagcagctgaccgcattccaggtgtggctcaccatgggcgtggagaaccgaaacccacccgaacagctgcccatcgtcctgcaggtgctgttaagccaagtgcaccggctgagagcattggacttgcttggaagatttttggacctgggtccctgggcagtgagcctggccttgtctgtcggcatcttcccctacgtgctgaagctgctccagagctcggcccgagagctgcggccacttctcgttttcatctgggccaagatcctcgcagtggacagctcgtgccaagcggacctcgtgaaggacaacggccacaagtacttcctgtcggtcctggcggacccctacatgccagctgaacaccggaccatgacggctttcattctcgccgtgatcgtcaacagctatcacacggggcaggaagcctgccttcagggaaacctcattgccatctgcctggagcagctcaacgacccgcaccccttgctgcgccagtgggtggccatctgcctcggcaggatctggcagaacttcgactcggcgaggtggtgcggcgtgagggacagcgctcatgagaagctctacagcctcctctccgaccccattcccgaggtccgctgcgcagcggtcttcgcccttggcacgttcgtgggcaactctgcagagaggacggaccactccaccaccatcgaccacaacgtggccatgatgctggcccagctggtcagcgacgggagccccatggtccggaaggagctggtggtggctctgagtcatcttgtggttcagtatgaaagcaatttctgcaccgtggccctgcagttcatagaagaggaaaagaactacgccttgccttctccagcaaccacagagggagggagtttgaccccagtgcgagacagcccgtgcacccccagacttcgttctgtgagctcctatggaaacatccgtgctgtcgccacagccaggagcctcaacaaatctttgcagaacctgagtttgacagaggaatctggtggcgcggtggcgttctcccccggaaacctcagcaccagcagcagcgccagcagcaccctgggcagccccgagaatgaggagcatatcctgtccttcgagaccatcgacaagatgcgccgcgccagctcctactcctccctcaactccctcatcggagtttcctttaacagtgtttacactcagatttggagagtcctgctgcacctggctgctgacccctatccagaggtctcggacgtggccatgaaagtactcaacagcatcgcctacaaggccaccgtgaacgcccggccgcagcgcgtcctggacacctcctccctcacgcagtcggcccccgccagccccaccaacaagggcgtgcacatccaccaggcggggggctcccctccggcgtccagcaccagcagctccagcctgaccaacgatgtggccaagcagccggtcagccgagacttgccttctggccggccgggcaccacaggccccgctggggcgcagtacacccctcactcccaccagttcccccggacacggaagatgttcgacaagggcccagagcagactgcggacgacgcggacgatgctgctggacacaaaagtttcatctccgccacggtgcagacggggttctgcgactggagcgcccgctattttgcccagcccgtcatgaagatcccagaagagcacgacctggagagtcagatccgcaaggagcgggagtggcggttcctgcgaaacagccgtgtcaggaggcaggcccagcaagtcattcagaagggcattacgagattggacgaccaaatatttctgaacaggaaccccggcgtcccctctgtggtgaaattccaccccttcacgccgtgcatcgctgtagccgacaaggacagcatctgcttttgggactgggagaaaggggagaagctggattatttccacaatgggaaccctcggtacacgagggtcactgccatggagtatctgaacggccaggactgctcgcttctgctgacggccacagacgatggtgccatcagggtctggaagaattttgctgatttggaaaagaacccagagatggtgaccgcgtggcaggggctctcggacatgctgccaacgacgcgaggagctgggatggtggtggactgggagcaggagaccggcctcctcatgagctcaggagacgtgcggatcgtccggatctgggacacagaccgtgagatgaaggtgcaggacatccctacgggcgcagacagctgtgtgacgagtctgtcctgtgattcccaccgctcactcatcgtggctggcctcggtgacggctccatccgcgtctacgacagaaggatggcactcagcgaatgccgcgtcatgacgtaccgggagcacacagcctgggtggtgaaggcctccctgcagaagcgtcccgacggccacatcgtgagtgtgagcgtcaatggagatgtgcgcatctttgatccccggatgcctgagtcggtaaatgtgcttcagatcgtgaaggggctgacggccctggacatccacccccaggcggacctgatcgcatgtggctccgtcaatcagttcaccgccatctacaacagcagcggagagctcatcaacaacatcaagtactacgacggcttcatgggccagcgggtcggcgccatcagctgcctggccttccacccgcactggcctcacctggccgtgggaagcaacgactactacatctccgtgtactcggtggagaagcgtgtcagatagcggcgtgacccgggcccaccaggccacggccgcctgctgtacatagtgaagctgtcactcgccggggcacggggcgtcggctgctgcggccccgcagtgtgaacgttggctgctgccttagctgctgatgacggcaggagggccctgctactcgcttttgtctgtcttcgctgtcgtgtctggaatgtcagggaaggggagggctcgggttgacggtggcttcccactgagcaccagcatccaggtgcacccccgcggccacggcgcctctgtccctctcctgttctgtgtttctctgagacgctgaaaggggaaacacctcactttatttccatgtaatcagagcattagctgcagaaaaaccccccgacagagccctggcggagaggcaggcgctggggctcctacgggtccctggggcagctgtccccatcaggccaagagcgagcgagaggcgctgccccagccaggcccaccacctctcacagtcagtgcacgcaagcagggacatttcctagccagctgggggacactggaaattcgggaaaccaagagagaggaagaaggagacgcccctccaactggcgggtgtgaaggaagccgcccaggggtccgggctgtccttggccgctggcagcatcactgagcaggaagcgcacagcccaccctccccgcacctccaggtctctggactccagttttggcccctctcacacagagctgtcagcaggggccgctgtggcggtgcacaggggaggcaggtccttggcgaggtagcccctgccttaatccacggggctcctttccctccgaagggctgctcttccccacaggcgcggggacagcagcccgacctgtggtctccatgcctgtgccctcacacaggtgtagcacacgcatgtgcagatggcaccacggccggcacctgggggcacacacatgcaggcggcgtggtctccctgctctgtccccacacgttcctcacatacaggcaagaggcactgccgggtcccggacggctccgggtgacaccagccccgtctccagccttgagccgcccatgctgatgcgacctcggctgacagctgggcctgtggtgcagacaggagctgtgtggacagtcccgcccaggaggggccgcagggcgtgtatgagcagttttgcaaacagaacacaaccacaatgatggtattttgaaaagtgttctttccgtgttcgtcgggaatcaggattattgagaggtgaaggagccaggtggcttcattctggcggtgagaggcccatgaccacgggagtgagagctggtgtggcgaggcccggctctcctgcggtgtggctggtggcctgccgtggccaagagcatcttctgggtggatggaaccctgcctggtcacatttggccagagacacacctggccctcagggggctgagctggagactgagctggggctggccgggacgtgacaaggcaggacagaggcggcccctccgctgctcctttttggaatgcgagctcccaccagaagaaggttccggcacgaatcccatccccacgtctgggccgagaaagcagcccgggtccggaaggtgtagagagtcccggcctcactcagctcacagggcgtgccaggcggcaacaccagaatcttccagaagcccagctccacccgcacacgcagcttcccatccagtccttcaactcaattcttacccaacacgcgtttctgtttgttttgagacaaaatcaccacctcctggagcccacccccatgggcaccgcgtgccgcctgcacgtgggctgtcttcacaggtctgatgtgaaaattcaatcacgacgttaaccggctcgagagagcgccggcctagaggctcattatctatttattttaccaaacgcgaattgagacggactttgacaaaacacgaaatggtaatgtgaagctaagagcagagagtgaccaacagtaaacaacacgcgcaga

SEQ ID NO: 289298 - DNA, 1477 bp, Homo sapiens
cttggcacgaggtggcacgagtggcgggtgtgaaggaagccgcccaggggtccgggctgtccttggccgctggcagcatcactgagcaggaagcgcacagcccaccctccccgcacctccaggtctctggactccagttttggcccctctcacacagagctgtcagcaggggccgctgtggcggtgcacaggggaggcaggtccttggcgaggtagcccctgccttaatccacggggctcctttccctccgaagggctgctcttccccacaggcgcggggacagcagcccgacctgtggtctccatgcctgtgccctcacacaggtgtagcacacgcatgtgcagatggcaccacggccggcacctgggggcacacacatgcaggcggcgtggtctccctgctctgtccccacacgttcctcacatacaggcaagaggcactgccgggtcccggacggctccgggtgacaccagccccgtctccagccttgagccgcccatgctgatgcgacctcggctgacagctgggcctgtggtgcagacaggagctgtgtggacagtcccgcccaggaggggccgcagggcgtgtatgagcagttttgcaaacagaacacaaccacaatgatggtattttgaaaagtgttctttccgtgttcgtcgggaatcaggattattgagaggtgaaggagccaggtggcttcattctggcggtgagaggcccatgaccacgggagtgagagctggtgtggcgaggcccggctctcctgcggtgtggctggtggcctgccgtggccaagagcatcttctgggtggatggaaccctgcctggtcacatttggccagagacacacctggccctcagggggctgagctggagactgagctggggctggccgggacgtgacaaggcaggacagaggcggcccctccgctgctcctttttggaatgcgagctcccaccagaagaaggttccggcacgaatcccatccccacgtctgggccgagaaagcagcccgggtccggaaggtgtagagagtcccggcctcactcagctcacagggcgtgccaggcggcaacaccagaatcttccagaagcccagctccacccgcacacgcagcttcccatccagtccttcaactcaattcttacccaacacgcgtttctgtttgttttgagacaaaatcaccacctgtcaaaaggcaggtggctccagaggggtcaagacccccccccgcccccgctccaccctggagcccacccccatgggcaccgcgtgccgcctgcacgtgggctgtcttcacaggtctgatgtgaaaattcaatcacgacgttaaccggctcgagagagcgccggcctagaggctcattatctatttattttaccaaacgcgaattgagacggactttgacaaaacacgaaatggtaatgtgaagctaagagcagagagtgaccaacagtaaacaacacgcgcaga

SEQ ID NO: 289299 - DNA, 1444 bp, Homo sapiens
cacgagggggctgtgcgcttcctgctcagtgatgctgccagcggccaaggacagcccggacccctgggcggcttccttcacacccgccagttggaggggcgtctccttcttccctctcacacagagctgtcagcaggggccgctgtggcggtgcacaggggaggcaggtccttggcgaggtagcccctgccttaatccacggggctcctttccctccgaagggctgctcttccccacaggcgcggggacagcagcccgacctgtggtctccatgcctgtgccctcacacaggtgtagcacacgcatgtgcagatggcaccacggccggcacctgggggcacacacatgcaggcggcgtggtctccctgctctgtccccacacgttcctcacatacaggcaagaggcactgccgggtcccggacggctccgggtgacaccagccccgtctccagccttgagccgcccatgctgatgcgacctcggctgacagctgggcctgtggtgcagacaggagctgtgtggacagtcccgcccaggaggggccgcagggcgtgtatgagcagttttgcaaacagaacacaaccacaatgatggtattttgaaaagtgttctttccgtgttcgtcgggaatcaggattattgagaggtgaaggagccaggtggcttcattctggcggtgagaggcccatgaccacgggagtgagagctggtgtggcgaggcccggctctcctgcggtgtggctggtggcctgccgtggccaagagcatcttctgggtggatggaaccctgcctggtcacatttggccagagacacacctggccctcagggggctgagctggagactgagctggggctggccgggacgtgacaaggcaggacagaggcggcccctccgctgctcctttttggaatgcgagctcccaccagaagaaggttccggcacgaatcccatccccacgtctgggccgagaaagcagcccgggtccggaaggtgtagagagtcccggcctcactcagctcacagggcgtgccaggcggcaacaccagaatcttccagaagcccagctccacccgcacacgcagcttcccatccagtccttcaactcaattcttacccaacacgcgtttctgtttgttttgagacaaaatcaccacctgtcaaaaggcaggtggctccagaggggtcaagacccccccccgcccccgctccaccctggagcccacccccatgggcaccgcgtgccgcctgcacgtgggctgtcttcacaggtctgatgtgaaaattcaatcacgacgttaaccggctcgagagagcgccggcctagaggctcattatctatttattttaccaaacgcgaattgagacggactttgacaaaacacgaaatggtaatgtgaagctaagagcagagagtgaccaacagtaaacaacacgcgcaga

SEQ ID NO: 289300 - DNA, 2008 bp, Homo sapiens
  misc_feature (13)..(13): n is a, c, g, or t
  misc_feature (102)..(102): n is a, c, g, or t
tcagacttttgcntgagtaagggtctccgcactctttatccatttggttttcgatttcccgtttttgtttcttatttcaccaattctggtacacgctagttnttaaggctggaggttctcgagcgcttgctgccaaggactcccccaccccctcccccactgatggagtccgaaatgctgcaatcgcctcttctgggcctgggggaggaagatgaggctgatcttacagactggaacctacctttggctttcatgaaaaagaggcactgtgagaaaattgaaggctccaaatccttagctcagagctggaggatgaaggatcggatgaagacagtcagtgttgccttagttttgtgcctgaatgttggtgtggaccctcccgatgtggtgaagaccacgccctgtgcacgcttggaatgctggatcgatcctctgtcgatgggtcctcagaaagctctggaaaccatcggtgcaaatttacagaagcagtacgagaactggcagccaagggcccggtacaagcagagccttgacccaactgtggatgaagtcaagaagctctgcacgtccttacgtcgcaacgccaaggaggagcgagtcctctttcactacaatggccacggggtgccccggcccacagtcaacggggaggtctgggtcttcaacaagaactacacgcagtacatccctctgtccatatatgacctgcagacgtggatgggcagcccgtcgatcttcgtctacgactgctccaatgctggcttgatcgtcaagtccttcaagcagttcgcactacagcgggagcaggagctggaggtagctgcaatcaacccaaatcaccctcttgctcagatgcctttgcctccgtcgatgaaaaactgcatccagctggcagcctgcgaggccaccgagctgctgcccatgatccccgacctcccggctgacctattcacctcctgcctcaccacccccatcaagatcgccctgcgctggtgagtggcccctgctgtgcccctgggacccactcaactgggctctcccgcagggaccccaacccatgtgggccccaggcattcacctggtcccaggagcccacgtgacagacatgagtgtccccgccttctttttgtgtcattcgggattccaggtggaggtttgggttctactctttgagagctcaagatccttcttccttctgatctgttcgtgggcagctcactgctttgcgatttccaagaacaccctctccttacctttgttcactgcggaggcgtcttagtaccaggataggtcatactggaaactggactttctttcaggggaagaaaaggctgttatgaaaaaggaagtcatttaattccttgcttgagttgaagcgtaatctttcaatgtatttttagcaatgaaaaaagagccatgatttttctgtctccatcctttttaagttatagccgtcgggaacataactgaagaaatgtgtgtgatattccaagatggtagaagccgcatttcagccccaacatccccagcagaacgcacagtgggatatgtgtgtttcctgcctccaaatccaatattctcccctagaccatcttgccagtctttaatatctcctttcccattttatgttttgctgaaaagcttatatgtcgtggctgttaccggctagtagataaatacctctcccttgaggtgccgtgcgaatggtgcagctgtgcagcagacaccgtgctgtcggccgaggacactcttgaggcttctgtcaagatggcctaacactctagacaagtctcctgccttctcacccacagccctgggcggacacggggagctaacagcacagcaaagtaagggcccccagggacaccctgggaggggccagaggggcagggcagcctgaggggggaggaaaacttggccttcctgctctgcctctgcagccaagtccaaattgatcccagaccccagggctgggggttcatgatgttggggtgactgcagcgcagcc

SEQ ID NO: 289301 - DNA, 1695 bp, Homo sapiens
  misc_feature (13)..(13): n is a, c, g, or t
  misc_feature (102)..(102): n is a, c, g, or t
tcagacttttgcntgagtaagggtctccgcactctttatccatttggttttcgatttcccgtttttgtttcttatttcaccaattctggtacacgctagttnttaaggctggaggttctcgagcgcttgctgccaaggactcccccaccccctcccccactgatggagtccgaaatgctgcaatcgcctcttctgggcctgggggaggaagatgaggctgatcttacagactggaacctacctttggctttcatgaaaaagaggcactgtgagaaaattgaaggctccaaatccttagctcagagctggaggatgaaggatcggatgaagacagtcagtgttgccttagttttgtgcctgaatgttggtgtggaccctcccgatgtggtgaagaccacgccctgtgcacgcttggaatgctggatcgatcctctgtcgatgggtcctcagaaagctctggaaaccatcggtgcaaatttacagaagcagtacgagaactggcagccaagggcccggtacaagcagagccttgacccaactgtggatgaagtcaagaagctctgcacgtccttacgtcgcaacgccaaggaggagcgagtcctctttcactacaatggccacggggtgccccggcccacagtcaacggggaggtctgggtcttcaacaagaactacacgcagtacatccctctgtccatatatgacctgcagacgtggatgggcagcccgtcgatcttcgtctacgactgctccaatgctggcttgatcgtcaagtccttcaagcagttcgcactacagcgggagcaggagctggaggtagctgcaatcaacccaaatcaccctcttgctcagatgcctttgcctccgtcgatgaaaaactgcatccagctggcagcctgcgaggccaccgagctgctgcccatgatccccgacctcccggctgacctattcacctcctgcctcaccacccccatcaagatcgccctgcgctggttttgcatgcagaaatgtgtcagtctggtgcctggcgtcacactggatttgatagaaaagatccctggccgcctgaacgacaggaggacgcccctgggtgaactgaactggatcttcacagccatcacagacaccatcgcgtggaacgtgctcccccgggatctcttccaaaagctcttcagacaggacttgctggtggctagtctgtttcgaaattttttattggcggaaaggattatgaggtcgtataactgcactcccgtcagcagcccgcgtctgccgcccacgtacatgcacgccatgtggtgagtgtttcaggatcctccaggtgccgtgctcccccgccctccgtggcactgtgatgtcatggaattgcacggagctgggcagggaggccccacacctaacttggggaccccgtgtagcattaacaagtgaagctaaatgcagggctcccagagatctccacacagaggagtgggggtctccttcagagggcagaagccttggagggccttttaggactgcacgggagcagcggccggctgaagcctcacagctctgcaactcgggagggtagcactttgcaagagagtttctaaccttttagaaaccagtagtgagaaaataacttgctgacttgaatttatgaagcacatgcaagatcgctctggagaattaaactgttgggctcatgatcaa

SEQ ID NO: 289302 - DNA, 882 bp, Homo sapiens
  misc_feature (13)..(13): n is a, c, g, or t
  misc_feature (102)..(102): n is a, c, g, or t
tcagacttttgcntgagtaagggtctccgcactctttatccatttggttttcgatttcccgtttttgtttcttatttcaccaattctggtacacgctagttnttaaggctggaggttctcgagcgcttgctgccaaggactcccccaccccctcccccactgatggagtccgaaatgctgcaatcgcctcttctgggcctgggggaggaagatgaggctgatcttacagactggaacctacctttggctttcatgaaaaagaggcactgtgagaaaattgaaggctccaaatccttagctcagagctggaggatgaaggatcggatgaagacagtcagtgttgccttagttttgtgcctgaatgttggtgtggaccctcccgatgtggtgaagaccacgccctgtgcacgcttggaatgctggatcgatcctctgtcgatgggtcctcagaaagctctggaaaccatcggtgcaaatttacagaagcagtacgagaactggcagccaagggcccggtacaagcagagccttgacccaactgtggatgaagtcaagaagctctgcacgtccttacgtcgcaacgccaaggaggagcgagtcctctttcactacaatggccacggggtgccccggcccacagtcaacggggaggtctgggtcttcaacaagaactacacgcagtacatccctctgtccatatatgacctgcagacgtggatgggcagcccgtcgatcttcgtctacgactgctccaatgctggcttgatcgtcaagtccttcaagcagttcgcactacagcgggagcaggagctggagagctgcaatcaacccaaatcaccctcttgttgaagacccagacctccgtgactgtgggccgggcac

SEQ ID NO: 289303 - DNA, 596 bp, Homo sapiens
tggagcaggtcacctggagggggctctgaccctgcgtgagcactagcccctcgtggggagcggacgggcgagggcctgcggacccgctggcacaggcagacctgggcagctcccggtgagagccccgaagggtggggacgtccttcagggaagccccacgctgagcgtgccccctcccctacagccgcgtcatgacgtaccgggagcacacagcctgggtggtgaaggcctccctgcagaagcgtcccgacggccacatcgtgagtgtgaggtgaggagcgccgatatttagcagccgttctgctgtaaaaacattattttcccctccatttaaaatacgtccttggtatttaaacagctggaaggggatggcatttcgggcagtaattaactcctgccctggaactggccagaaagatcaggcgcagcccgtaggggcccaggggccacagctgctcccctgctgggggacacctgacctgcaggcgctttgggaactttcctgggctgccaactgcggagggttccggggggagttgggcagctgctctccctccacgggcaggggtggcagggtggcaggggcggcgcgtctg

SEQ ID NO: 289304 - DNA, 340 bp, Homo sapiens
tctggctaacacctcacttacagccttgggagagattctgagtcagaggcatccagctaaattgacccacagacacgttcaaattctggatgagaattcgcttctgcaaattagaagcaattcatctaagataatgaacacagaagcgaagcagaagccattttcctacatcctttcgactgttttaactgcaaacaaagataaagaaatgcaaggtgttagcagtgctttttgtggcactttccaattttctgggtgtcaagaggcaattgtgactacagcattagcagtgtaactctggcttcctgattactggattgcagcaagaggagtatattca

SEQ ID NO: 289305 - DNA, 1819 bp, Homo sapiens
gctaggactaagtgagcttctcccttcttgttgtagaggaaatccgaaaaactgcctggtttgccacctcaccctacctcccccacgagcgaaggagtgcgtgcggctttactcccagcccgactggtccactcccagaaaagcctcggtgggactccgacgtctagggagttgtagccgctaccagaaatatcgatgagcctttaccctgaggtttagaaaggcagctctttctggggcaaatacaaagagcgtgtttcttcctacaaattagtggcatcctcccgctgtatggattcagctggcaaagtaactcaagccttgtcctgactgcaagggtgggcggggtggacggctcggtgttctgcccgttgtgtcttacgctccaggtgctggtctacgcgggcctggacagtcaggggtaggagcgggagccgagaggaggcggaggagatggcgtcccagccgccacctccccccaaaccctgggagacccgccgaattccgggagccggaccgggaccaggaccgggccccactttccaatctgctgatttgggtcctactttaatgacaagacctggacaaccagcacttaccagagtgcccccacctattcttccaaggccatcacagcagacaggaagtagcagtgtgaacacttttagacctgcttacagttcattttcttctggatatggtgcctatggaaattcattttatggaggctatagtccttatagttatggatataatgggctgggctacaaccgcctccgtgtagatgatcttccacccagtagatttgttcagcaagctgaagaaagcagcaggggtgcatttcagtccattgaaagtattgtgcatgcatttgcctctgtcagtatgatgatggatgctaccttttcagctgtctataacagtttcagggctgtattggatgtagcaaatcacttttcccgattgaaaatacactttacaaaagtgttttcagcttttgcattggttaggactatacggtatctttacagacggctacagcggatgttaggtttaagaagaggctctgagaatgaagacctctgggcagagagtgaaggaactgtggcatgccttggtgctgaggaccgagcagctacctcagcaaaatcttggccaatattcttgttctttgctgttatccttggtggtccttacctcatttggaaactattgtctactcacagtgatgaagtaacagacagcatcaactgggcaagtggtgaggatgaccatgtagttgccagagcagaatatgattttgctgccgtatctgaagaagaaatttctttccgggctggtgatatgctgaacttagctctcaaagaacaacaacccaaagtgcgtggttggcttctggctagccttgatggccaaacaacaggacttatacctgcgaattatgtcaaaattcttggcaaaagaaaaggtaggaaaacggtggaatcaagtaaagtttccaagcagcaacaatcttttaccaacccaacactaactaaaggagccacggttgctgattctttggatgaacaggaagctgcctttgaatctgtttttgttgaaactaataaggttccagttgcacctgattccattgggaaagatggagaaaagcaagatctttgatatctttcatgtttgcctgcagttgaacaatactttagagtactttttaaaattatttctcacaaagaaatgaatgtacaatccaatgaaaacatttgttattggctatttcaggtgttttgctgctagaaattattaaagttacacactagta

SEQ ID NO: 289306 - DNA, 1463 bp, Homo sapiens
gctaggactaagtgagcttctcccttcttgttgtagaggaaatccgaaaaactgcctggtttgccacctcaccctacctcccccacgagcgaaggagtgcgtgcggctttactcccagcccgactggtccactcccagaaaagcctcggtgggactccgacgtctagggagttgtagccgctaccagaaatatcgatgagcctttaccctgaggtttagaaaggcagctctttctggggcaaatacaaagagcgtgtttcttcctacaaattagtggcatcctcccgctgtatggattcagctggcaaagtaactcaagccttgtcctgactgcaagggtgggcggggtggacggctcggtgttctgcccgttgtgtcttacgctccaggtgctggtctacgcgggcctggacagtcaggggtaggagcgggagccgagaggaggcggaggagatggcgtcccagccgccacctccccccaaaccctgggagacccgccgaattccgggagccggaccgggaccaggaccgggccccactttccaaatggcttctctatctttaaagcgtagactttggtctgtagcagttgagagcggcatttgtccagccacggcatcgacagggagcaaagtctctccttaaaggtgttaacctctcgagaagttgctgaaagccggaaaggttttacgcaacaggaactcaagccccgtacactttgcattcttttccagcataactcagccagtgtttcggatcgagattggagaagcaactttaaagcaggagttctagatctgaggcctatggatggactttgtgtgcaaaatagtgtatttttctgaggcctgtattttttttttggtttggtttttaatcagtatcagttggtttctaggactttaaaaaggctaaaacatgcagagttgggagtgtttcgtggcctcgtgtggcttttgtttggtagtgctggacatcttaattcagataggtgtgattcaaatgtcaaatcacctactattgtaggttttcctaagcgtaaaaaccccaacatattggaatgtatttctgctgtattctgaaatcttttatttaaacactaaaatgctttaacacagtaacgacttagtttaataaggatatatacataacaagtaataagtttgattaggctggtaagccacggtgacattatctgctaccttttttttgagtgggttcttttttccccatttaggctgcttgtcgaatgagagaggttttattttttgcatctgttaaagttctttttatgtaaaattaaccattttcccactttatcgtgaaatattttaaacacagagaccagtagagagtaagataatacctatatattcactactcaactttaaacagtgttaacatttgccagacttatgtcgaatttttcaaaataaaagacggctaaactctcccattcttct

SEQ ID NO: 289307 - DNA, 1441 bp, Homo sapiens
gctaggactaagtgagcttctcccttcttgttgtagaggaaatccgaaaaactgcctggtttgccacctcaccctacctcccccacgagcgaaggagtgcgtgcggctttactcccagcccgactggtccactcccagaaaagcctcggtgggactccgacgtctagggagttgtagccgctaccagaaatatcgatgagcctttaccctgaggtttagaaaggcagctctttctggggcaaatacaaagagcgtgtttcttcctacaaattagtggcatcctcccgctgtatggattcagctggcaaagtaactcaagccttgtcctgactgcaagggtgggcggggtggacggctcggtgttctgcccgttgtgtcttacgctccaggtgctggtctacgcgggcctggacagtcaggggtaggagcgggagccgagaggaggcggaggagatggcgtcccagccgccacctccccccaaaccctgggagacccgccgaattccgggagccggaccgggaccaggaccgggccccactttccacgtagactttggtctgtagcagttgagagcggcatttgtccagccacggcatcgacagggagcaaagtctctccttaaaggtgttaacctctcgagaagttgctgaaagccggaaaggttttacgcaacaggaactcaagccccgtacactttgcattcttttccagcataactcagccagtgtttcggatcgagattggagaagcaactttaaagcaggagttctagatctgaggcctatggatggactttgtgtgcaaaatagtgtatttttctgaggcctgtattttttttttggtttggtttttaatcagtatcagttggtttctaggactttaaaaaggctaaaacatgcagagttgggagtgtttcgtggcctcgtgtggcttttgtttggtagtgctggacatcttaattcagataggtgtgattcaaatgtcaaatcacctactattgtaggttttcctaagcgtaaaaaccccaacatattggaatgtatttctgctgtattctgaaatcttttatttaaacactaaaatgctttaacacagtaacgacttagtttaataaggatatatacataacaagtaataagtttgattaggctggtaagccacggtgacattatctgctaccttttttttgagtgggttcttttttccccatttaggctgcttgtcgaatgagagaggttttattttttgcatctgttaaagttctttttatgtaaaattaaccattttcccactttatcgtgaaatattttaaacacagagaccagtagagagtaagataatacctatatattcactactcaactttaaacagtgttaacatttgccagacttatgtcgaatttttcaaaataaaagacggctaaactctcccattcttct

SEQ ID NO: 289308 - DNA, 514 bp, Homo sapiens
  misc_feature (20)..(20): n is a, c, g, or t
  misc_feature (52)..(52): n is a, c, g, or t
ccgggcgaggcgccgtctgngaggaattcccggctgtgatatgctgaacttngctctcaagaacaacaacccaaagtgcgtggttggcttctggctagccttgatggccaaacaacaggacttatacctgcgaattatgtcaaaattcttggcaaaagaaaaggtaggaaaacggtggaatcaagtaaagtttccaagcagcaacaatcttttaccaacccaacactaactaaaggagccacggttgctgattctttggatgaacaggaagctgcctttgaatctgtttttgttgaaactaataaggttccagttgcacctgattccattgggaaagatggagaaaagcaagatctttgatatctttcatgtttgcctgcagttgaacaatactttagagtactttttaaaattatttctcacaaagaaatgaatgtacaatccaatgaaaacatttgttattggctatttcaggtgttttgctgctagaaattattaaagttacacactagta

SEQ ID NO: 289309 - DNA, 1308 bp, Homo sapiens
gctaggactaagtgagcttctcccttcttgttgtagaggaaatccgaaaaactgcctggtttgccacctcaccctacctcccccacgagcgaaggagtgcgtgcggctttactcccagcccgactggtccactcccagaaaagcctcggtgggactccgacgtctagggagttgtagccgctaccagaaatatcgatgagcctttaccctgaggtttagaaaggcagctctttctggggcaaatacaaagagcgtgtttcttcctacaaattagtggcatcctcccgctgtatggattcagctggcaaagtaactcaagccttgtcctgactgcaagggtgggcggggtggacggctcggtgttctgcccgttgtgtcttacgctccaggtgctggtctacgcgggcctggacagtcaggggtaggagcgggagccgagaggaggcggaggagatggcgtcccagccgccacctccccccaaaccctgggagacccgccgaattccgggagccggaccgggaccaggaccgggccccactttccatatgaaaatgtgggaataggaacagctctggtctgcagctcccagcgtgattgacgcacaggacgggtgatttctgtgtttccaactgaggtacctggttcatctcactgggactggttgaacactggtcgcaccccatggagggtgagccaaatcgaggcggggcatcacctcacccaggaagcgcaagggattgggggatttccctttcctaaccaagggatgccgtgacagactatacctggaaaaatgggacacttctgcccaaatagtgggctttttccacagtcttagcaacaagcagaccaggagattctctcccatgcctggcttgacggatcctatacccatggagccttgctcagtgctagcacagcagtctgagatcaatctgcgaggcagcagcctggcagggggaggggaatccaccattgctgaggcttgagtaggtaaacagagcgcccaggaagcttgaactgggaggagcccactgcagctcagcaaggcctactgcctccatagacttcagctctgtgggcagggcatagctgagcaaaaggcagcagaaacttctgtggacttaaacgtccctgtctgatagctctgaagagagcagtggttctcccagcatggtgtttgagctctgagaacggacagacggcctcctcaagtgggtccctgacccccgtgtagcctgactgggaaacacctcccagtaggggctgaaagaaacctcaaacaggcaggtgtccctctgggacaa

SEQ ID NO: 289310 - DNA, 1079 bp, Homo sapiens
ttttaatttggcttatagacagcatcaactgggcaagtggtgaggatgaccatgtagttgccagagcagaatatgattttgctgccgtatctgaagaagaaatttctttccgggctggtgatatgctgaacttagctctcaaagaacaacaacccaaagtgcgtggttggcttctggctagccttgatggccaaacaacaggacttatacctgcgaattatgtcaaaattcttggcaaaagaaaaggtaggaaaacggtggaatcaagtaaagtttccaagcagcaacaatcttacaaatctctttttaccaaaccactatactacgtaagctataaggtagcacacaggtttgcctgatttcatgttgagattgatacaagagaagcgttgcacagtgtatggaagtctgtgttgtgtgtgctgtgtataaggctgaactaaagggtttcactagcttggcagccgtgtatttgccaagttgcggagaagtagtcggatgaaagagcacaagtagtcctgttgtagtattcgtgttacactgttttggccatgcaagggttggaagcagagtagcgtgtgtatgaggtagcgtgtgttgtaagagagttagttgtgctcaggcagaaggagaagtgagagtgtgacaatagtgcgcaaggtgagagaagcagttgtggttagttgggcgtagtgttgcaaggtgttttgctgctagaaattattaaagttacacactagtatgttggtctggtgacctggttacattttattatacacattattggaccataaggacatttgtttcacctagattttaagattatggagactgctgtcatttttatcttatttaaatctctaggtttattggaagagtaagattgatgaactatagcatgcacagtttggtacagtagagatcattaatacttttaaaagttctacattaattgacttggaatccttagaaatggagtggtgacatgtcagtatgagaacaggcaaaaggtaaatttttttttttttttacaaccttaagtaatctcaataataaaattttctgatctgtattaaaac

SEQ ID NO: 289311 - DNA, 1087 bp, Homo sapiens
ctcatggcaacctctacctcctgggttcaagtgattctcctgcctcagtctcccggacagttgagactacaggcgcgtgccactccgcccagctaatttttgtatttttaatagagatggggtttcactatgttggccaggctggtcttgaactcctgacctcaggtgatctgcccacctaggcctcccaaagtgctgagattacaggtgtgagtcactatgcccagcccttaccttgctcagatttttattgtgaagaaatattaaattttatgaatggcttttctgcatctgttgagaccattgtatgtattttcgctttagtatgaaaatgtgggaataggaacagctctggtctgcagctcccagcgtgattgacgcacaggacgggtgatttctgtgtttccaactgaggtacctggttcatctcactgggactggttgaacactggtcgcaccccatggagggtgagccaaatcgaggcggggcatcacctcacccaggaagcgcaagggattgggggatttccctttcctaaccaagggatgccgtgacagactatacctggaaaaatgggacacttctgcccaaatagtgggctttttccacagtcttagcaacaagcagaccaggagattctctcccatgcctggcttgacggatcctatacccatggagccttgctcagtgctagcacagcagtctgagatcaatctgcgaggcagcagcctggcagggggaggggaatccaccattgctgaggcttgagtaggtaaacagagcgcccaggaagcttgaactgggaggagcccactgcagctcagcaaggcctactgcctccatagacttcagctctgtgggcagggcatagctgagcaaaaggcagcagaaacttctgtggacttaaacgtccctgtctgatagctctgaagagagcagtggttctcccagcatggtgtttgagctctgagaacggacagacggcctcctcaagtgggtccctgacccccgtgtagcctgactgggaaacacctcccagtaggggctgaaagaaacctcaaacaggcaggtgtccctctgggacaa

SEQ ID NO: 289312 - DNA, 476 bp, Homo sapiens
acccctgcaagggaaacggcatgcacgtctagtctgagcacagacagcacagcagagtgcagactggagaacgttaagaataacaaaaccagtttcagtctatcagtaggccagtagctactcttcagtttccacaatagtatctattatggggaggtgttggggataacatcactgatgttatcgcttaccaacccaacactaactaaaggagccacggttgctgattctttggatgaacaggaagctgcctttgaatctgtttttgttgaaactaataaggttccagttgcacctgattccattgggaaagatggagaaaagcaagatctttgatatctttcatgtttgcctgcagttgaacaatactttagagtactttttaaaattatttctcacaaagaaatgaatgtacaatccaatgaaaacatttgttattggctatttcagggtgggggataagggggatcctctag

SEQ ID NO: 289313 - DNA, 2156 bp, Homo sapiens
gctaggactaagtgagcttctcccttcttgttgtagaggaaatccgaaaaactgcctggtttgccacctcaccctacctcccccacgagcgaaggagtgcgtgcggctttactcccagcccgactggtccactcccagaaaagcctcggtgggactccgacgtctagggagttgtagccgctaccagaaatatcgatgagcctttaccctgaggtttagaaaggcagctctttctggggcaaatacaaagagcgtgtttcttcctacaaattagtggcatcctcccgctgtatggattcagctggcaaagtaactcaagccttgtcctgactgcaagggtgggcggggtggacggctcggtgttctgcccgttgtgtcttacgctccaggtgctggtctacgcgggcctggacagtcaggggtaggagcgggagccgagaggaggcggaggagatggcgtcccagccgccacctccccccaaaccctgggagacccgccgaattccgggagccggaccgggaccaggaccgggccccactttccaatctgctgatttgggtcctactttaatgacaagacctggacaaccagcacttaccagagtgcccccacctattcttccaaggccatcacagcagacaggaagtagcagtgtgaacacttttagacctgcttacagttcattttcttctggatatggtgcctatggaaattcattttatggaggctatagtccttatagttatggatataatgggctgggctacaaccgcctccgtgtagatgatcttccacccagtagatttgttcagcaagctgaagaaagcagcaggggtgcatttcagtccattgaaagtattgtgcatgcatttgcctctgtcagtatgatgatggatgctaccttttcagctgtctataacagtttcagggctgtattggatgtagcaaatcacttttcccgattgaaaatacactttacaaaagtgttttcagcttttgcattggttaggactatacggtatctttacagacggctacagcggatgttaggtttaagaagaggctctgagaatgaagacctctgggcagagagtgaaggaactgtggcatgccttggtgctgaggaccgagcagctacctcagcaaaatcttggccaatattcttgttctttgctgttatccttggtggtccttacctcatttggaaactattgtctactcacagtgatgaagtaacagacagcatcaactgggcaagtggtgaggatgaccatgtagttgccagagcagaatatgattttgctgccgtatctgaagaagaaatttctttccgggctggtgatatgctgaacttagctctcaaagaacaacaacccaaagtgcgtggttggcttctggctagccttgatggccaaacaacaggacttatacctgcgaattatgtcaaaattcttggcaaaagaaaaggtaggaaaacggtggaatcaagtaaagtttccaagcagcaacaatcttttaccaacccaacactaactaaaggagccacggttgctgattctttggatgaacaggaagctgcctttgaatctgtttttgttgaaactaataaggttccagttgcacctgattccattgggaaagatggagaaaagcaagatctttgatatctttcatgtttgcctgcagttgaacaatactttagagtactttttaaaattatttctcacaaagaaatgaatgtacaatccaatgaaaacatttgttattggctatttcaggtgttttgctgctagaaattattaaagttacacactagtatgttggtctggtgacctggttacattttattatacacattattggaccataaggacatttgtttcacctagattttaagattatggagactgctgtcatttttatcttatttaaatctctaggtttattggaagagtaagattgatgaactatagcatgcacagtttggtacagtagagatcattaatacttttaaaagttctacattaattgacttggaatccttagaaatggagtggtgacatgtcagtatgagaacaggcaaaaggtaaatttttttttttttttacaaccttaagtaatctcaataataaaattttctgatctgtattaaaac

SEQ ID NO: 289314 - DNA, 2605 bp, Homo sapiens
gcgcacgtacacacgaagggcctgctgactacatctgccggaaagcatcgggccaagcctttctccattttgcggtctaggaagtagcagaggccccttcctgtagggagttgccatggagacgcggtggggcaccgacggagttctaatgacggccgtgattggtgcaggatcctgctaatctcaggaaggcccgtagagaagggcagacactggcctcagatacctgacctggtaccctctatgaggcctgcggtgctgggctccccagaccgagcacccccagaagatgaggggcctgtcatggtgaagctagaggactctgaggaggagggtgaggctgccttatgggacccaggccctgaagctgcacgcctgcgtttccggtgcttccactatgaggaggccacagggccccaagaggccctggcccagctccgagagctgtgtcgccagtggctgcgtccagaggtacgctccaaggagcagatgctggagctgttggtgctggagcagttcctgggcgcactgccccctgagatccaggcccgtgtgcaggggcagcggccaggcagccccgaggaggctgctgccctagtagatgggctgcgccgggagccgggcggaccccggagatgggtcacagtccaggtgcagggccaggaggtcctatcagagaagatggagccctccagtttccagcccctacctgaaactgagcctccaactccagagcctgggcccaagacacctcctaggactatgcaggaatcaccactgggcctgcaggtgaaagaggagtcagaggttacagaggactcagatttcctggagtctgggcctctagctgccacccaggagtctgtacccaccctcctgcctgaggaggcccagagatgtgggaccgtgctggaccagatctttccccacagcaagactgggcctgagggtccctcatggagggagcaccccagggccctgtggcatgaggaagctgggggcatcttctccccagggttcgcgctgcagctaggcagcatctccgcaggtccaggtagtgtaagccctcacctccacgtcccctgggacctcggcatggctggcctttctggccagatccaatcaccctcccgcgaaggtggctttgcgcatgcgcttctgctccccagcgatctgaggagtgaacaggaccccacggacgaggatccctgccggggtgtgggccctgctctgatcaccacccgctggcgctcccccaggggccggagccggggccgccccagcactgggggcggggtggttaggggcggccgttgcgatgtatgtggcaaggtgttcagccaacgcagcaacctgctgaggcaccagaagatccacacgggtgagcgaccattcgtgtgcagcgagtgcggccgcagcttcagccgcagctcgcacctgctgcgccaccagcttacgcacaccgaggagcggccgttcgtgtgcggcgactgtggccagggcttcgtgcgcagcgcgcgcctggaagagcatcggagagtgcacacgggcgaacagcctttccgttgcgctgagtgcggccagagcttccggcagcgctccaatctgctgcagcaccagcgcatccacggcgatcccccgggccctggcgctaagcccccggcccctcctggtgcgcccgagcctcccggcccctttccgtgcagcgagtgccgcgagagcttcgcgcggcgcgccgtgctgctggagcaccaggcggtacacacgggcgacaagtcctttggctgcgtcgagtgcggcgagcgcttcggccgccgctcagtgctgctgcagcaccggcgcgtgcacagtggcgagcggcccttcgcctgtgccgagtgcggccagagcttccggcagcgctccaacctgacgcagcaccggcgcatccacaccggggagcggcccttcgcctgcgccgagtgtggcaaggccttccgccagcggcctacgctcacgcagcatctccgcgtacacacgggcgagaaaccctttgcctgccccgagtgtggccagcgcttcagccagcgcctcaagctcacgcgtcatcagaggacacacaccggcgaaaagccctaccactgcggtgagtgcggcctgggcttcacgcaggtctcgcggctcaccgagcaccagcgcatccacacgggcgaacggcccttcgcctgccccgagtgcggccagagctttcggcagcacgccaacctcacccagcaccggcgcatccacacgggtgaacggccctacgcatgccctgagtgtggcaaggccttccgccagcggcccacgctcacgcagcatctgcgcacccaccgacgagagaagcccttcgcctgccaggactgtggccgccgcttccaccagagcaccaagctcattcagcaccagcgcgtccacagcgccgagtagctccagccgggacgcactgtgtccgccatggtcagaacacctacctcccctggttattgtgaggctggcgattacataagtataagcaggtccgcccagggcttggctactgtaggtgtccaataaacagtagatggaaactgggtctccacccaat

SEQ ID NO: 289315 - DNA, 2923 bp, Homo sapiens
gcgcacgtacacacgaagggcctgctgactacatctgccggaaagcatcgggccaagcctttctccattttgcggtctaggaagtagcagaggccccttcctgtagggagttgccatggagacgcggtggggcaccgacggagttctaatgacggccgtgattggtgcaggatcctgctaatctcaggaaggcccgtagagaagtgaggaaaacgtggtggggggcatgcgcgatctggtaggcggtgctgccgtctgttgtacctgagaggcttgcgcatgccgacgcacggattcgaggcggggagcatgggaagaagcggccaggagtatgacctgatcattgcgaccaccgctaggggaagggaggagagggtgtagaaacggggacgagggtgggggaagggcaaggaggcgctcgagctggtgcgcggagcatcctgggagacgtagtccagcgggagggggaagtcgaagactgcgcgtgctcaggagcgcggagcggcccgctgagcgcagaggggcagacactggcctcagatacctgacctggtaccctctatgaggcctgcggtgctgggctccccagaccgagcacccccagaagatgaggggcctgtcatggtgaagctagaggactctgaggaggagggtgaggctgccttatgggacccaggccctgaagctgcacgcctgcgtttccggtgcttccactatgaggaggccacagggccccaagaggccctggcccagctccgagagctgtgtcgccagtggctgcgtccagaggtacgctccaaggagcagatgctggagctgttggtgctggagcagttcctgggcgcactgccccctgagatccaggcccgtgtgcaggggcagcggccaggcagccccgaggaggctgctgccctagtagatgggctgcgccgggagccgggcggaccccggagatgggtcacagtccaggtgcagggccaggaggtcctatcagagaagatggagccctccagtttccagcccctacctgaaactgagcctccaactccagagcctgggcccaagacacctcctaggactatgcaggaatcaccactgggcctgcaggtgaaagaggagtcagaggttacagaggactcagatttcctggagtctgggcctctagctgccacccaggagtctgtacccaccctcctgcctgaggaggcccagagatgtgggaccgtgctggaccagatctttccccacagcaagactgggcctgagggtccctcatggagggagcaccccagggccctgtggcatgaggaagctgggggcatcttctccccagggttcgcgctgcagctaggcagcatctccgcaggtccaggtagtgtaagccctcacctccacgtcccctgggacctcggcatggctggcctttctggccagatccaatcaccctcccgcgaaggtggctttgcgcatgcgcttctgctccccagcgatctgaggagtgaacaggaccccacggacgaggatccctgccggggtgtgggccctgctctgatcaccacccgctggcgctcccccaggggccggagccggggccgccccagcactgggggcggggtggttaggggcggccgttgcgatgtatgtggcaaggtgttcagccaacgcagcaacctgctgaggcaccagaagatccacacgggtgagcgaccattcgtgtgcagcgagtgcggccgcagcttcagccgcagctcgcacctgctgcgccaccagcttacgcacaccgaggagcggccgttcgtgtgcggcgactgtggccagggcttcgtgcgcagcgcgcgcctggaagagcatcggagagtgcacacgggcgaacagcctttccgttgcgctgagtgcggccagagcttccggcagcgctccaatctgctgcagcaccagcgcatccacggcgatcccccgggccctggcgctaagcccccggcccctcctggtgcgcccgagcctcccggcccctttccgtgcagcgagtgccgcgagagcttcgcgcggcgcgccgtgctgctggagcaccaggcggtacacacgggcgacaagtcctttggctgcgtcgagtgcggcgagcgcttcggccgccgctcagtgctgctgcagcaccggcgcgtgcacagtggcgagcggcccttcgcctgtgccgagtgcggccagagcttccggcagcgctccaacctgacgcagcaccggcgcatccacaccggggagcggcccttcgcctgcgccgagtgtggcaaggccttccgccagcggcctacgctcacgcagcatctccgcgtacacacgggcgagaaaccctttgcctgccccgagtgtggccagcgcttcagccagcgcctcaagctcacgcgtcatcagaggacacacaccggcgaaaagccctaccactgcggtgagtgcggcctgggcttcacgcaggtctcgcggctcaccgagcaccagcgcatccacacgggcgaacggcccttcgcctgccccgagtgcggccagagctttcggcagcacgccaacctcacccagcaccggcgcatccacacgggtgaacggccctacgcatgccctgagtgtggcaaggccttccgccagcggcccacgctcacgcagcatctgcgcacccaccgacgagagaagcccttcgcctgccaggactgtggccgccgcttccaccagagcaccaagctcattcagcaccagcgcgtccacagcgccgagtagctccagccgggacgcactgtgtccgccatggtcagaacacctacctcccctggttattgtgaggctggcgattacataagtataagcaggtccgcccagggcttggctactgtaggtgtccaataaacagtagatggaaactgggtctccacccaat

SEQ ID NO: 289316 - DNA, 926 bp, Homo sapiens
gggatgcctcttacttggctattggcatctgggatgggtcctttaatgttcttatcttttcactccaattttccattcctttgtctttctactctattttcctggaaattttctcacttgtatctttcagaccttctgttaagattttcatttctggtagctttttttttggtggggggagggggtctcactatttcacacagactagagcacagtggtgccatcatagcttactgtaaccttgaactcctgggctcaagtgatcctctcgcctcagcctcccaagtatctgggactgcaggcatgtgtcactgtacctgactcatttttaatttttttatttttttgtagaaacaggttctcactatgttgccagggctggtcttaaattcctggcttcaagtgatgctcccacctcagcctcccagagtgctgggattacaggcatgagctacttcatctggtctcttgtagcatatttttactttccaagagtgtttttattctctgaatgttcatctttttagctgtctcctgttgttctttcatttacaatgtctttccttatttctctgagaacagcagtaactttttaaaaaaaaacagtgtgttctctattctctcctagttgttggcttatatgcaagagaggggcaccacaaatctggctgacagctctgagcaggtagatgtggggcttactggctggaagggacataggggaaccccactccccaaggagacccttttcttagggtatgtgagcaagcagcttgagtatgagtggatgctgcaaacagatccatagggcaatgtggctaggcattttgggggcactcttcctccaagcatgtttcgttccatcgtctgaatcctgcaagaaggtaacttcagcctcctgccagcatccttgggaaagagattaa

SEQ ID NO: 289317 - DNA, 481 bp, Homo sapiens
gggatgcctcttacttggctattggcatctgggatgggtcctttaatgttcttatcttttcactccaattttccattcctttgtctttctactctattttcctggaaattttctcacttgtatctttcagaccttctgttaagattttcatttctggtagctttttttttggtggggggagggggtctcactatttcacacagactagagcacagtggtgccatcatagcttactgtaaccttgaactcctgggctcaagtgatcctctcgcctcagcctcccaagtatctgggactgcaggcatgtgtcactgtacctgactcatttttaatttttttatttttttgtagaaacaggttctcactatgttgccagggctgaggtgggagaatcacccaagccagggaagtcaaggctgcagtgagctgagatggtgccagtgcacaccagtctgggcaatgggggtgagacccagtctca

SEQ ID NO: 289318 - DNA, 364 bp, Homo sapiens
gcctcatcctatttcttcaccaggggcagacactggcctcagatacctgacctggtaccctctatgaggcctgcggtgctgggctccccagaccgagcacccccagaagatgaggggcctgtcatggtgaagctagaggactctgaggaggagggtgaggctgccttatgggacccaggccctgaagctgcacgcctgcgtttccggtgcttccactatgaggaggccacagggccccaagaggccctggcccagctccgagagctgtgtcgccagtggctgcgtccagaggtacgctccaaggagcagatgctggagctgttgtgcacaccagtctgggcaatgggggtgagacccagtctca

SEQ ID NO: 289319 - DNA, 417 bp, Homo sapiens
cacagcagcagccctgcccagcatctgcttctgaaacagcctctccagcctggctggtgccctgctcattcacttgcatggccagaagtaccaggtacctccaactcctgagtttttagaatcttcttagccaggcgcagccgctcatgcctgtaatcccagcactttgggaggcggaggcaggtggattgtttgagtccaagagttcgagaccatcctgggcaacatggcaaaaccctgtctctactaaaaaataatacaaaaaactagctgggcatggtggcacgtacttgtagtcccagctacttgggaggctgaggtgggagaatcacccaagccagggaagtcaaggctgcagtgagctgagatggtgccagtgcacaccagtctgggcaatgggggtgagacccagtctca

SEQ ID NO: 289320 - DNA, 411 bp, Homo sapiens
gcgcacgtacacacgaagggcctgctgactacatctgccggaaagcatcgggccaagcctttctccattttgcggtctaggaagtagcagaggccccttcctgtagggagttgccatggagacgcggtggggcaccgacggagttctaatgacggccgtgattggtgcaggatcctgctaatctcaggaaggcccgtagagaagtgaggaaaacgtggtggggggcatgcgcgatctggtaggcggtgctgccgtctgttgtacctgagaggcttgcgcatgccgacgcacggattcgaggcggggagcatgggaagaagcggccaggagtatgacctgatcattgcgaccaccgctagggggcagggacttgtgtcgacccgcccgcgaatttagtagtagtagtcgacc

SEQ ID NO: 289321 - DNA, 2978 bp, Homo sapiens
tttgcttattctccaccctgttccacatctggcattttttgtgcatcttccaacttaagtacacagcagcaagtgctctacatctttgggtagctacacagaaccccactgtggctcactgtggacacaccattgaaaaccttgtatgtaggtcacttagtacaaggaggaacacaactgttgaagaagtacctaaaaattgaattacttgaacaaagtgtgggacatttgctgttttgatggattttaccacactgtcttcccatttatgcttaccagcaatacataggaacacttgggtccctgcagtcagggtgtggaaatggcagatgagttcagccctaaggtgcatttttcttactaggaggagatggagtgtattttatgggatataagcattagctacatttcctgtcctgttcacatcctttgcccatgtgtctatgaggttattgatctttcttactgatttattgtagctctttacttaggaggttaattagccttttgcctgtggagagttttttggtttgccatttgtccttttttaattttttttgttttttggccatttgtcttttgactctgatgtggtttttgctgatttcctttgatgtattctagtttatctgacttttctttggcgacttatggactttctctcaccactaaaagccctcactgctctctcagtcttcttgatttaacctcctccaggcttccgccttctccaggccctgattctcagttggagttgctggtgcctcctccttcacccagcgtctgacgctggagtgctcacagtgtggctgggacccacttctctcctctgtagatacccacccctgtgttgatcacttgcaggcccgggttctgtgtgccatgtgtatgccctagagcccttgctcacgtttccccacagccttcatgaagtctgtgttcctcagatgccccacagacatcacaagcaaggcacatccaaaccccagaccactatccaggagcctgcaccctctttctgttggctccacctccagcctccgagacccacccacttccctgcatttgctgagaccatcattttccacctagacaatgcccccacgcttgccctacagcccttccaaaaacgattttttccaacctaaatcagacctagaaagctttttcacatagcccagtcttcctccttgtgctgggttctgtctcattatcacctcatcagggaagtctgtacagatagaatccctacccctgcatttgtcgcctccgtctgcctctttggtcagtttcaggtccctgtagttcacactgtgtccccagggatgaagtgggtcccggcacggtgggcattctgtcatgaatgaatggtccccttgtgtatgcagggttcgcgctgcagctaggcagcatctccgcaggtccaggtagtgtaagccctcacctccacgtcccctgggacctcggcatggctggcctttctggccagatccaatcaccctcccgcgaaggtggctttgcgcatgcgcttctgctccccagcgatctgaggagtgaacaggaccccacggacgaggatccctgccggggtgtgggccctgctctgatcaccacccgctggcgctcccccaggggccggagccggggccgccccagcactgggggcggggtggttaggggcggccgttgcgatgtatgtggcaaggtgttcagccaacgcagcaacctgctgaggcaccagaagatccacacgggtgagcgaccattcgtgtgcagcgagtgcggccgcagcttcagccgcagctcgcacctgctgcgccaccagcttacgcacaccgaggagcggccgttcgtgtgcggcgactgtggccagggcttcgtgcgcagcgcgcgcctggaagagcatcggagagtgcacacgggcgaacagcctttccgttgcgctgagtgcggccagagcttccggcagcgctccaatctgctgcagcaccagcgcatccacggcgatcccccgggccctggcgctaagcccccggcccctcctggtgcgcccgagcctcccggcccctttccgtgcagcgagtgccgcgagagcttcgcgcggcgcgccgtgctgctggagcaccaggcggtacacacgggcgacaagtcctttggctgcgtcgagtgcggcgagcgcttcggccgccgctcagtgctgctgcagcaccggcgcgtgcacagtggcgagcggcccttcgcctgtgccgagtgcggccagagcttccggcagcgctccaacctgacgcagcaccggcgcatccacaccggggagcggcccttcgcctgcgccgagtgtggcaaggccttccgccagcggcctacgctcacgcagcatctccgcgtacacacgggcgagaaaccctttgcctgccccgagtgtggccagcgcttcagccagcgcctcaagctcacgcgtcatcagaggacacacaccggcgaaaagccctaccactgcggtgagtgcggcctgggcttcacgcaggtctcgcggctcaccgagcaccagcgcatccacacgggcgaacggcccttcgcctgccccgagtgcggccagagctttcggcagcacgccaacctcacccagcaccggcgcatccacacgggtgaacggccctacgcatgccctgagtgtggcaaggccttccgccagcggcccacgctcacgcagcatctgcgcacccaccgacgagagaagcccttcgcctgccaggactgtggccgccgcttccaccagagcaccaagctcattcagcaccagcgcgtccacagcgccgagtagctccagccgggacgcactgtgtccgccatggtcagaacacctacctcccctggttattgtgaggctggcgattacataagtataagcaggtccgcccagggcttggctactgtaggtgtccaataaacagtagatggaaactgggtctccacccaat

SEQ ID NO: 289322 - DNA, 2936 bp, Homo sapiens
tttgcttattctccaccctgttccacatctggcattttttgtgcatcttccaacttaagtacacagcagcaagtgctctacatctttgggtagctacacagaaccccactgtggctcactgtggacacaccattgaaaaccttgtatgtaggtcacttagtacaaggaggaacacaactgttgaagaagtacctaaaaattgaattacttgaacaaagtgtgggacatttgctgttttgatggattttaccacactgtcttcccatttatgcttaccagcaatacataggaacacttgggtccctgcagtcagggtgtggaaatggcagatgagttcagccctaaggtgcatttttcttactaggaggagatggagtgtattttatgggatataagcattagctacatttcctgtcctgttcacatcctttgcccatgtgtctatgaggttattgatctttcttactgatttattgtagctctttacttaggaggttaattagccttttgcctgtggagagttttttggtttgccatttgtccttttttaattttttttgttttttggccatttgtcttttgactctgatgtggtttttgctgatttcctttgatgtattctagtttatctgacttttctttggcgacttatggactttctctcaccactaaaagccctcactgctctctcagtcttcttgatttaacctcctccaggcttccgccttctccaggccctgattctcagttggagttgctggtgcctcctccttcacccagcgtctgacgctggagtgctcacagtgtggctgggacccacttctctcctctgtagatacccacccctgtgttgatcacttgcaggcccgggttctgtgtgccatgtgtatgccctagagcccttgctcacgtttccccacagccttcatgaagtctgtgttcctcagatgccccacagacatcacaagcaaggcacatccaaaccccagaccactatccaggagcctgcaccctctttctgttggctccacctccagcctccgagacccacccacttccctgcatttgctgagaccatcattttccacctagacaatgcccccacgcttgccctacagcccttccaaaaacgattttttccaacctaaatcagacctagaaagctttttcacatagcccagtcttcctccttgtgctgggttctgtctcattatcacctcatcagggaagtctgtacagatagaatccctacccctgcatttgtcgcctccgtctgcctctttggtcagtttcaggtccctgtagttcacactgtgtccccagggatgaagtgggtcccggcacggtgggcattctgtcatgaatgaatggtccccttgtgtatgcagggttcgcgctgcagctaggcagcatctccgcaggtccaggtagtgtaagccctcacctccacgtcccctgggacctcggcatggctggcctttctggccagatccaatcaccctcccgcgaaggtggctttgcgcatgcgcttctgctccccagcgatctgaggagtgaacaggaccccacggacgaggatccctgccggggtgtgggccctgctctgatcaccacccgctggcgctcccccaggggccggagccggggccgccccagcactgggggcggggtggttaggggcggccgttgcgatgtatgtggcaaggtgttcagccaacgcagcaacctgctgaggcaccagaagatccacacgggtgagcgaccattcgtgtgcagcgagtgcggccgcagcttcagccgcagctcgcacctgctgcgccaccagcttacgcacaccgaggagcggccgttcgtgtgcggcgactgtggccagggcttcgtgcgcagcgcgcgcctggaagagcatcggagagtgcacacgggcgaacagcctttccgttgcgctgagtgcggccagagcttccggcagcgctccaatctgctgcagcaccagcgcatccacggcgatcccccgggccctggcgctaagcccccggcccctcctggtgcgcccgagcctcccggcccctttccgtgcagcgagtgccgcgagagcttcgcgcggcgcgccgtgctgctggagcaccaggcggtacacacgggcgacaagtcctttggctgcgtcgagtgcggcgagcgcttcggccgccgctcagtgctgctgcagcaccggcgcgtgcacagtggcgagcggcccttcgcctgtgccgagtgcggccagagcttccggcagcgctccaacctgacgcagcaccggcgcatccacaccggggagcggcccttcgcctgcgccgagtgtggcaaggccttccgccagcggcctacgctcacgcagcatctccgcgtacacacgggcgagaaaccctttgcctgccccgagtgtggccagcgcttcagccagcgcctcaagctcacgcgtcatcagaggacacacaccggcgaaaagccctaccactgcggtgagtgcggcctgggcttcacgcaggtctcgcggctcaccgagcaccagcgcatccacacgggcgaacggcccttcgcctgccccgagtgcggccagagctttcggcagcacgccaacctcacccagcaccggcgcatccacacgggtgaacggccctacgcatgccctgagtgtggcaaggccttccgccagcggcccacgctcacgcagcatctgcgcacccaccgacaccagagcaccaagctcattcagcaccagcgcgtccacagcgccgagtagctccagccgggacgcactgtgtccgccatggtcagaacacctacctcccctggttattgtgaggctggcgattacataagtataagcaggtccgcccagggcttggctactgtaggtgtccaataaacagtagatggaaactgggtctccacccaat

SEQ ID NO: 289323 - DNA, 2507 bp, Homo sapiens
tttgcttattctccaccctgttccacatctggcattttttgtgcatcttccaacttaagtacacagcagcaagtgctctacatctttgggtagctacacagaaccccactgtggctcactgtggacacaccattgaaaaccttgtatgtaggtcacttagtacaaggaggaacacaactgttgaagaagtacctaaaaattgaattacttgaacaaagtgtgggacatttgctgttttgatggattttaccacactgtcttcccatttatgcttaccagcaatacataggaacacttgggtccctgcagtcagggtgtggaaatggcagatgagttcagccctaaggtgcatttttcttactaggaggagatggagtgtattttatgggatataagcattagctacatttcctgtcctgttcacatcctttgcccatgtgtctatgaggttattgatctttcttactgatttattgtagctctttacttaggaggttaattagccttttgcctgtggagagttttttggtttgccatttgtccttttttaattttttttgttttttggccatttgtcttttgactctgatgtggtttttgctgatttcctttgatgtattctagtttatctgacttttctttggcgacttatggactttctctcaccactaaaagccctcactgctctctcagtcttcttgatttaacctcctccaggcttccgccttctccaggccctgattctcagttggagttgctggtgcctcctccttcacccagcgtctgacgctggagtgctcacagtgtggctgggacccacttctctcctctgtagatacccacccctgtgttgatcacttgcaggcccgggttctgtgtgccatgtgtatgccctagagcccttgctcacgtttccccacagccttcatgaagtctgtgttcctcagatgccccacagacatcacaagcaaggcacatccaaaccccagaccactatccaggagcctgcaccctctttctgttggctccacctccagcctccgagacccacccacttccctgcatttgctgagaccatcattttccacctagacaatgcccccacgcttgccctacagcccttccaaaaacgattttttccaacctaaatcagacctagaaagctttttcacatagcccagtcttcctccttgtgctgggttctgtctcattatcacctcatcagggaagtctgtacagatagaatccctacccctgcatttgtcgcctccgtctgcctctttggtcagtttcaggtccctgtagttcacactgtgtccccagggatgaagtgggtcccggcacggtgggcattctgtcatgaatgaatggtccccttgtgtatgcagggttcgcgctgcagctaggcagcatctccgcaggtccaggtagtgtaagccctcacctccacgtcccctgggacctcggcatggctggcctttctggccagatccaatcaccctcccgcgaaggtggctttgcgcatgcgcttctgctccccagcgatctgaggagtgaacaggaccccacggacgaggatccctgccggggtgtgggccctgctctgatcaccacccgctggcgctcccccaggggccggagccggggccgccccagcactgggggcggggtggttaggggcggccgttgcgatgtatgtggcaaggtgttcagccaacgcagcaacctgctgaggcaccagaagatccacacgggtgagcgaccattcgtgtgcagcgagtgcggccgcagcttcagccgcagctcgcacctgctgcgccaccagcttacgcacaccgaggagcggccgttcgtgtgcggcgactgtggccagggcttcgtgcgcagcgcgcgcctggaagagcatcggagagtgcacacgggcgagaaaccctttgcctgccccgagtgtggccagcgcttcagccagcgcctcaagctcacgcgtcatcagaggacacacaccggcgaaaagccctaccactgcggtgagtgcggcctgggcttcacgcaggtctcgcggctcaccgagcaccagcgcatccacacgggcgaacggcccttcgcctgccccgagtgcggccagagctttcggcagcacgccaacctcacccagcaccggcgcatccacacgggtgaacggccctacgcatgccctgagtgtggcaaggccttccgccagcggcccacgctcacgcagcatctgcgcacccaccgacgagagaagcccttcgcctgccaggactgtggccgccgcttccaccagagcaccaagctcattcagcaccagcgcgtccacagcgccgagtagctccagccgggacgcactgtgtccgccatggtcagaacacctacctcccctggttattgtgaggctggcgattacataagtataagcaggtccgcccagggcttggctactgtaggtgtccaataaacagtagatggaaactgggtctccacccaat

SEQ ID NO: 289324 - DNA, 2581 bp, Homo sapiens
tttgcttattctccaccctgttccacatctggcattttttgtgtctatgaggttattgatctttcttactgatttattgtagctctttacttaggaggttaattagccttttgcctgtggagagttttttggtttgccatttgtccttttttaattttttttgttttttggccatttgtcttttgactctgatgtggtttttgctgatttcctttgatgtattctagtttatctgacttttctttggcgacttatggactttctctcaccactaaaagccctcactgctctctcagtcttcttgatttaacctcctccaggcttccgccttctccaggccctgattctcagttggagttgctggtgcctcctccttcacccagcgtctgacgctggagtgctcacagtgtggctgggacccacttctctcctctgtagatacccacccctgtgttgatcacttgcaggcccgggttctgtgtgccatgtgtatgccctagagcccttgctcacgtttccccacagccttcatgaagtctgtgttcctcagatgccccacagacatcacaagcaaggcacatccaaaccccagaccactatccaggagcctgcaccctctttctgttggctccacctccagcctccgagacccacccacttccctgcatttgctgagaccatcattttccacctagacaatgcccccacgcttgccctacagcccttccaaaaacgattttttccaacctaaatcagacctagaaagctttttcacatagcccagtcttcctccttgtgctgggttctgtctcattatcacctcatcagggaagtctgtacagatagaatccctacccctgcatttgtcgcctccgtctgcctctttggtcagtttcaggtccctgtagttcacactgtgtccccagggatgaagtgggtcccggcacggtgggcattctgtcatgaatgaatggtccccttgtgtatgcagggttcgcgctgcagctaggcagcatctccgcaggtccaggtagtgtaagccctcacctccacgtcccctgggacctcggcatggctggcctttctggccagatccaatcaccctcccgcgaaggtggctttgcgcatgcgcttctgctccccagcgatctgaggagtgaacaggaccccacggacgaggatccctgccggggtgtgggccctgctctgatcaccacccgctggcgctcccccaggggccggagccggggccgccccagcactgggggcggggtggttaggggcggccgttgcgatgtatgtggcaaggtgttcagccaacgcagcaacctgctgaggcaccagaagatccacacgggtgagcgaccattcgtgtgcagcgagtgcggccgcagcttcagccgcagctcgcacctgctgcgccaccagcttacgcacaccgaggagcggccgttcgtgtgcggcgactgtggccagggcttcgtgcgcagcgcgcgcctggaagagcatcggagagtgcacacgggcgaacagcctttccgttgcgctgagtgcggccagagcttccggcagcgctccaatctgctgcagcaccagcgcatccacggcgatcccccgggccctggcgctaagcccccggcccctcctggtgcgcccgagcctcccggcccctttccgtgcagcgagtgccgcgagagcttcgcgcggcgcgccgtgctgctggagcaccaggcggtacacacgggcgacaagtcctttggctgcgtcgagtgcggcgagcgcttcggccgccgctcagtgctgctgcagcaccggcgcgtgcacagtggcgagcggcccttcgcctgtgccgagtgcggccagagcttccggcagcgctccaacctgacgcagcaccggcgcatccacaccggggagcggcccttcgcctgcgccgagtgtggcaaggccttccgccagcggcctacgctcacgcagcatctccgcgtacacacgggcgagaaaccctttgcctgccccgagtgtggccagcgcttcagccagcgcctcaagctcacgcgtcatcagaggacacacaccggcgaaaagccctaccactgcggtgagtgcggcctgggcttcacgcaggtctcgcggctcaccgagcaccagcgcatccacacgggcgaacggcccttcgcctgccccgagtgcggccagagctttcggcagcacgccaacctcacccagcaccggcgcatccacacgggtgaacggccctacgcatgccctgagtgtggcaaggccttccgccagcggcccacgctcacgcagcatctgcgcacccaccgacgagagaagcccttcgcctgccaggactgtggccgccgcttccaccagagcaccaagctcattcagcaccagcgcgtccacagcgccgagtagctccagccgggacgcactgtgtccgccatggtcagaacacctacctcccctggttattgtgaggctggcgattacataagtataagcaggtccgcccagggcttggctactgtaggtgtccaataaacagtagatggaaactgggtctccacccaat

SEQ ID NO: 289325 - DNA, 2052 bp, Homo sapiens
ctgaggaacacagacttcatgaaggctgtggggaaacgtgagcaaggcacatccaaaccccagaccactatccaggagcctgcaccctctttctgttggctccacctccagcctccgagacccacccacttccctgcatttgctgagaccatcattttccacctagacaatgcccccacgcttgccctacagcccttccaaaaacgattttttccaacctaaatcagacctagaaagctttttcacatagcccagtcttcctccttgtgctgggttctgtctcattatcacctcatcagggaagtctgtacagatagaatccctacccctgcatttgtcgcctccgtctgcctctttggtcagtttcaggtccctgtagttcacactgtgtccccagggatgaagtgggtcccggcacggtgggcattctgtcatgaatgaatggtccccttgtgtatgcagggttcgcgctgcagctaggcagcatctccgcaggtccaggtagtgtaagccctcacctccacgtcccctgggacctcggcatggctggcctttctggccagatccaatcaccctcccgcgaaggtggctttgcgcatgcgcttctgctccccagcgatctgaggagtgaacaggaccccacggacgaggatccctgccggggtgtgggccctgctctgatcaccacccgctggcgctcccccaggggccggagccggggccgccccagcactgggggcggggtggttaggggcggccgttgcgatgtatgtggcaaggtgttcagccaacgcagcaacctgctgaggcaccagaagatccacacgggtgagcgaccattcgtgtgcagcgagtgcggccgcagcttcagccgcagctcgcacctgctgcgccaccagcttacgcacaccgaggagcggccgttcgtgtgcggcgactgtggccagggcttcgtgcgcagcgcgcgcctggaagagcatcggagagtgcacacgggcgaacagcctttccgttgcgctgagtgcggccagagcttccggcagcgctccaatctgctgcagcaccagcgcatccacggcgatcccccgggccctggcgctaagcccccggcccctcctggtgcgcccgagcctcccggcccctttccgtgcagcgagtgccgcgagagcttcgcgcggcgcgccgtgctgctggagcaccaggcggtacacacgggcgacaagtcctttggctgcgtcgagtgcggcgagcgcttcggccgccgctcagtgctgctgcagcaccggcgcgtgcacagtggcgagcggcccttcgcctgtgccgagtgcggccagagcttccggcagcgctccaacctgacgcagcaccggcgcatccacaccggggagcggcccttcgcctgcgccgagtgtggcaaggccttccgccagcggcctacgctcacgcagcatctccgcgtacacacgggcgagaaaccctttgcctgccccgagtgtggccagcgcttcagccagcgcctcaagctcacgcgtcatcagaggacacacaccggcgaaaagccctaccactgcggtgagtgcggcctgggcttcacgcaggtctcgcggctcaccgagcaccagcgcatccacacgggcgaacggcccttcgcctgccccgagtgcggccagagctttcggcagcacgccaacctcacccagcaccggcgcatccacacgggtgaacggccctacgcatgccctgagtgtggcaaggccttccgccagcggcccacgctcacgcagcatctgcgcacccaccgacgagagaagcccttcgcctgccaggactgtggccgccgcttccaccagagcaccaagctcattcagcaccagcgcgtccacagcgccgagtagctccagccgggacgcactgtgtccgccatggtcagaacacctacctcccctggttattgtgaggctggcgattacataagtataagcaggtccgcccagggcttggctactgtaggtgtccaataaacagtagatggaaactgggtctccacccaat

SEQ ID NO: 289326 - DNA, 2875 bp, Homo sapiens
gcgcacgtacacacgaagggcctgctgactacatctgccggaaagcatcgggccaagcctttctccattttgcggtctaggaagtagcagaggccccttcctgtagggagttgccatggagacgcggtggggcaccgacggagttctaatgacggccgtgattggtgcaggatcctgctaatctcaggaaggcccgtagagaagtgaggaaaacgtggtggggggcatgcgcgatctggtaggcggtgctgccgtctgttgtacctgagaggcttgcgcatgccgacgcacggattcgaggcggggagcatgggaagaagcggccaggagtatgacctgatcattgcgaccaccgctaggggaagggaggagagggtgtagaaacggggacgagggtgggggaagggcaaggaggcgctcgagctggtgcgcggagcatcctgggagacgtagtccagcgggagggggaagtcgaagactgcgcgtgctcaggagcgcggagcggcccgctgagcgcagaggggcagacactggcctcagatacctgacctggtaccctctatgaggcctgcggtgctgggctccccagaccgagcacccccagaagatgaggggcctgtcatggtgaagctagaggactctgaggaggagggtgaggctgccttatgggacccaggccctgaagctgcacgcctgcgtttccggtgcttccactatgaggaggccacagggccccaagaggccctggcccagctccgagagctgtgtcgccagtggctgcgtccagaggtacgctccaaggagcagatgctggagctgttggtgctggagcagttcctgggcgcactgccccctgagatccaggcccgtgtgcaggggcagcggccaggcagccccgaggaggctgctgccctagtagatgggctgcgccgggagccgggcggaccccggagatgggtcacagtccaggtgcagggccaggaggtcctatcagagaagatggagccctccagtttccagcccctacctgaaactgagcctccaactccagagcctgggcccaagacacctcctaggactatgcaggaatcaccactgggcctgcaggtgaaagaggagtcagaggttacagaggactcagatttcctggagtctgggcctctagctgccacccaggagtctgtacccaccctcctgcctgaggaggcccagagatgtgggaccgtgctggaccagatctttccccacagcaagactgggcctgagggtccctcatggagggagcaccccagggccctgtggcatgaggaagctgggggcatcttctccccagggttcgcgctgcagctaggcagcatctccgcaggtccaggtagtgtaagccctcacctccacgtcccctgggacctcggcatggctggcctttctggccagatccaatcaccctcccgcgaaggtggctttgcgcatgcgcttctgctccccagcgatctgaggagtgaacaggaccccacggacgaggatccctgccggggtgtgggccctgctctgatcaccacccgctggcgctcccccaggggccgttgcgatgtatgtggcaaggtgttcagccaacgcagcaacctgctgaggcaccagaagatccacacgggtgagcgaccattcgtgtgcagcgagtgcggccgcagcttcagccgcagctcgcacctgctgcgccaccagcttacgcacaccgaggagcggccgttcgtgtgcggcgactgtggccagggcttcgtgcgcagcgcgcgcctggaagagcatcggagagtgcacacgggcgaacagcctttccgttgcgctgagtgcggccagagcttccggcagcgctccaatctgctgcagcaccagcgcatccacggcgatcccccgggccctggcgctaagcccccggcccctcctggtgcgcccgagcctcccggcccctttccgtgcagcgagtgccgcgagagcttcgcgcggcgcgccgtgctgctggagcaccaggcggtacacacgggcgacaagtcctttggctgcgtcgagtgcggcgagcgcttcggccgccgctcagtgctgctgcagcaccggcgcgtgcacagtggcgagcggcccttcgcctgtgccgagtgcggccagagcttccggcagcgctccaacctgacgcagcaccggcgcatccacaccggggagcggcccttcgcctgcgccgagtgtggcaaggccttccgccagcggcctacgctcacgcagcatctccgcgtacacacgggcgagaaaccctttgcctgccccgagtgtggccagcgcttcagccagcgcctcaagctcacgcgtcatcagaggacacacaccggcgaaaagccctaccactgcggtgagtgcggcctgggcttcacgcaggtctcgcggctcaccgagcaccagcgcatccacacgggcgaacggcccttcgcctgccccgagtgcggccagagctttcggcagcacgccaacctcacccagcaccggcgcatccacacgggtgaacggccctacgcatgccctgagtgtggcaaggccttccgccagcggcccacgctcacgcagcatctgcgcacccaccgacgagagaagcccttcgcctgccaggactgtggccgccgcttccaccagagcaccaagctcattcagcaccagcgcgtccacagcgccgagtagctccagccgggacgcactgtgtccgccatggtcagaacacctacctcccctggttattgtgaggctggcgattacataagtataagcaggtccgcccagggcttggctactgtaggtgtccaataaacagtagatggaaactgggtctccacccaat

SEQ ID NO: 289327 - DNA, 3093 bp, Homo sapiens
gcgcacgtacacacgaagggcctgctgactacatctgccggaaagcatcgggccaagcctttctccattttgcggtctaggaagtagcagaggccccttcctgtagggagttgccatggagacgcggtggggcaccgacggagttctaatgacggccgtgattggtgcaggatcctgctaatctcaggaaggcccgtagagaagtgaggaaaacgtggtggggggcatgcgcgatctggtaggcggtgctgccgtctgttgtacctgagaggcttgcgcatgccgacgcacggattcgaggcggggagcatgggaagaagcggccaggagtatgacctgatcattgcgaccaccgctaggggaagggaggagagggtgtagaaacggggacgagggtgggggaagggcaaggaggcgctcgagctggtgcgcggagcatcctgggagacgtagtccagcgggagggggaagtcgaagactgcgcgtgctcaggagcgcggagcggcccgctgagcgcagagggtttcaggttgacttggcaccttgaagagtggaggcttggcccccaggatgaggcggccctcgaaatcgatgccacccacgggggaatgattctgcggtgccatccccttcataaacgcagattccttcctaaagccgcagctgcagaaggaacagcgcgaggagggaggggcagacactggcctcagatacctgacctggtaccctctatgaggcctgcggtgctgggctccccagaccgagcacccccagaagatgaggggcctgtcatggtgaagctagaggactctgaggaggagggtgaggctgccttatgggacccaggccctgaagctgcacgcctgcgtttccggtgcttccactatgaggaggccacagggccccaagaggccctggcccagctccgagagctgtgtcgccagtggctgcgtccagaggtacgctccaaggagcagatgctggagctgttggtgctggagcagttcctgggcgcactgccccctgagatccaggcccgtgtgcaggggcagcggccaggcagccccgaggaggctgctgccctagtagatgggctgcgccgggagccgggcggaccccggagatgggtcacagtccaggtgcagggccaggaggtcctatcagagaagatggagccctccagtttccagcccctacctgaaactgagcctccaactccagagcctgggcccaagacacctcctaggactatgcaggaatcaccactgggcctgcaggtgaaagaggagtcagaggttacagaggactcagatttcctggagtctgggcctctagctgccacccaggagtctgtacccaccctcctgcctgaggaggcccagagatgtgggaccgtgctggaccagatctttccccacagcaagactgggcctgagggtccctcatggagggagcaccccagggccctgtggcatgaggaagctgggggcatcttctccccagggttcgcgctgcagctaggcagcatctccgcaggtccaggtagtgtaagccctcacctccacgtcccctgggacctcggcatggctggcctttctggccagatccaatcaccctcccgcgaaggtggctttgcgcatgcgcttctgctccccagcgatctgaggagtgaacaggaccccacggacgaggatccctgccggggtgtgggccctgctctgatcaccacccgctggcgctcccccaggggccggagccggggccgccccagcactgggggcggggtggttaggggcggccgttgcgatgtatgtggcaaggtgttcagccaacgcagcaacctgctgaggcaccagaagatccacacgggtgagcgaccattcgtgtgcagcgagtgcggccgcagcttcagccgcagctcgcacctgctgcgccaccagcttacgcacaccgaggagcggccgttcgtgtgcggcgactgtggccagggcttcgtgcgcagcgcgcgcctggaagagcatcggagagtgcacacgggcgaacagcctttccgttgcgctgagtgcggccagagcttccggcagcgctccaatctgctgcagcaccagcgcatccacggcgatcccccgggccctggcgctaagcccccggcccctcctggtgcgcccgagcctcccggcccctttccgtgcagcgagtgccgcgagagcttcgcgcggcgcgccgtgctgctggagcaccaggcggtacacacgggcgacaagtcctttggctgcgtcgagtgcggcgagcgcttcggccgccgctcagtgctgctgcagcaccggcgcgtgcacagtggcgagcggcccttcgcctgtgccgagtgcggccagagcttccggcagcgctccaacctgacgcagcaccggcgcatccacaccggggagcggcccttcgcctgcgccgagtgtggcaaggccttccgccagcggcctacgctcacgcagcatctccgcgtacacacgggcgagaaaccctttgcctgccccgagtgtggccagcgcttcagccagcgcctcaagctcacgcgtcatcagaggacacacaccggcgaaaagccctaccactgcggtgagtgcggcctgggcttcacgcaggtctcgcggctcaccgagcaccagcgcatccacacgggcgaacggcccttcgcctgccccgagtgcggccagagctttcggcagcacgccaacctcacccagcaccggcgcatccacacgggtgaacggccctacgcatgccctgagtgtggcaaggccttccgccagcggcccacgctcacgcagcatctgcgcacccaccgacgagagaagcccttcgcctgccaggactgtggccgccgcttccaccagagcaccaagctcattcagcaccagcgcgtccacagcgccgagtagctccagccgggacgcactgtgtccgccatggtcagaacacctacctcccctggttattgtgaggctggcgattacataagtataagcaggtccgcccagggcttggctactgtaggtgtccaataaacagtagatggaaactgggtctccacccaat

SEQ ID NO: 289328 - DNA, 1070 bp, Homo sapiens
  misc_feature (1063)..(1063): n is a, c, g, or t
tttgcttattctccaccctgttccacatctggcattttttgtgcatcttccaacttaagtacacagcagcaagtgctctacatctttgggtagctacacagaaccccactgtggctcactgtggacacaccattgaaaaccttgtatgtaggtcacttagtacaaggaggaacacaactgttgaagaagtacctaaaaattgaattacttgaacaaagtgtgggacatttgctgttttgatggattttaccacactgtcttcccatttatgcttaccagcaatacataggaacacttgggtccctgcagtcagggtgtggaaatggcagatgagttcagccctaaggtgcatttttcttactaggaggagatggagtgtattttatgggatataagcattagctacatttcctgtcctgttcacatcctttgcccatgtgtctatgaggttattgatctttcttactgatttattgtagctctttacttaggaggttaattagccttttgcctgtggagagttttttggtttgccatttgtccttttttaattttttttgttttttggccatttgtcttttgactctgatgtggtttttgctgatttcctttgatgtattctagtttatctgacttttctttggcgacttatggactttctctcaccactaaaagccctcactgctctctcagtcttcttgatttaacctcctccaggcttccgccttctccaggccctgattctcagttggagttgctggtgcctcctccttcacccagcgtctgacgctggagtgctcacagtgtggctgggacccacttctctcctctgtagatacccacccctgtgttgatcacttgcaggcccgggttctgtgtgccatgtgtatgccctagagcccttgctcacgtttccccacagccttcatgaagtctgtgttcctcagatgccccacagacatcacaagcaaggcacatccaaaccccagaccactatccaggagcctgcaccctctttctgttggctccacctccaacccatcacccgttcgggatcctctanaatctag

SEQ ID NO: 289329 - DNA, 1011 bp, Homo sapiens
tttgcttattctccaccctgttccacatctggcattttttgtgcatcttccaacttaagtacacagcagcaagtgctctacatctttgggtagctacacagaaccccactgtggctcactgtggacacaccattgaaaaccttgtatgtaggtcacttagtacaaggaggaacacaactgttgaagaagtacctaaaaattgaattacttgaacaaagtgtgggacatttgctgttttgatggattttaccacactgtcttcccatttatgcttaccagcaatacataggaacacttgggtccctgcagtcagggtgtggaaatggcagatgagttcagccctaaggtgcatttttcttactaggaggagatggagtgtattttatgggatataagcattagctacatttcctgtcctgttcacatcctttgcccatgtgtctatgaggttattgatctttcttactgatttattgtagctctttacttaggaggttaattagccttttgcctgtggagagttttttggtttgccatttgtccttttttaattttttttgttttttggccatttgtcttttgactctgatgtggtttttgctgatttcctttgatgtattctagtttatctgacttttctttggcgacttatggactttctctcaccactaaaagccctcactgctctctcagtcttcttgatttaacctcctccaggcttccgccttctccaggccctgattctcagttggagttgctggtgcctcctccttcacccagcgtctgacgctggagtgctcacagtgtggctgggacccacttctctcctctgtagatacccacccctgtgttgatcacttgcaggcccgggttctgtgtgccatgtgtatgccctagagcccttgctcacgtttccccacagccttcatgaagtctgtgttcctcagatgccccacagacatcacaagcaaggcacatccaaaccccagagaagccggaattccccaaaga

SEQ ID NO: 289330 - DNA, 1777 bp, Homo sapiens
gcgcacgtacacacgaagggcctgctgactacatctgccggaaagcatcgggccaagcctttctccattttgcggtctaggaagtagcagaggccccttcctgtagggagttgccatggagacgcggtggggcaccgacggagttctaatgacggccgtgattggtgcaggatcctgctaatctcaggaaggcccgtagagaagtgaggaaaacgtggtggggggcatgcgcgatctggtaggcggtgctgccgtctgttgtacctgagaggcttgcgcatgccgacgcacggattcgaggcggggagcatgggaagaagcggccaggagtatgacctgatcattgcgaccaccgctaggggaagggaggagagggtgtagaaacggggacgagggtgggggaagggcaaggaggcgctcgagctggtgcgcggagcatcctgggagacgtagtccagcgggagggggaagtcgaagactgcgcgtgctcaggagcgcggagcggcccgctgagcgcagaggggcagacactggcctcagatacctgacctggtaccctctatgaggcctgcggtgctgggctccccagaccgagcacccccagaagatgaggggcctgtcatggtgaagctagaggactctgaggaggagggtgaggctgccttatgggacccaggccctgaagctgcacgcctgcgtttccggtgcttccactatgaggaggccacagggccccaagaggccctggcccagctccgagagctgtgtcgccagtggctgcgtccagaggtacgctccaaggagcagatgctggagctgttggtgctggagcagttcctgggcgcactgccccctgagatccaggcccgtgtgcaggggcagcggccaggcagccccgaggaggctgctgccctagtagatgggctgcgccgggagccgggcggaccccggagatgggtcacagtccaggtgcagggccaggaggtcctatcagagaagatggagccctccagtttccagcccctacctgaaactgagcctccaactccagagcctgggcccaagacacctcctaggactatgcaggaatcaccactgggcctgcaggtgaaagaggagtcagaggttacagaggactcagatttcctggagtctgggcctctagctgccacccaggagtctgtacccaccctcctgcctgaggaggcccagagatgtgggaccgtgctggaccagatctttccccacagcaagactgggcctgagggtccctcatggagggagcaccccagggccctgtggcatgaggaagctgggggcatcttctccccaggtaagtgagatggggtgtggtgggactaggccttccgcatggacagcaccatctctgccgaccccactcctggccctacgcaggcagccctcttactccagcatccccaagttcccccattccctagatcatcccctataaggttcaacctcctctagcatcttctgccctcaaaaaaagccacccaccactaccactgatcccacagcccctctactttctagaaactccccaccctagtaaaaccttttgcaagcagggcgagtattccccgtacccacattctctcccagtcctggtatcctggatggcctcctgggcttgcatcctgctggtcaggcatcaggacaggtagggctgggacctgacaaggacagcaggttagtagacagagcaggtgggcaggagggaccttgacacaggatagggatcctgcccaatcat

SEQ ID NO: 289331 - DNA, 693 bp, Homo sapiens
tttgcttattctccaccctgttccacatctggcattttttgtgcatcttccaacttaagtacacagcagcaagtgctctacatctttgggtagctacacagaaccccactgtggctcactgtggacacaccattgaaaaccttgtatgtaggtcacttagtacaaggaggaacacaactgttgaagaagtacctaaaaattgaattacttgaacaaagtgtgggacatttgctgttttgatggattttaccacactgtcttcccatttatgcttaccagcaatacataggaacacttgggtccctgcagtcagggtgtggaaatggcagatgagttcagccctaaggtgcatttttcttactaggaggagatggagtgtattttatgggatataagcattagctacatttcctgtcctgttcacatcctttgcccatgtgtctatgaggttattgatctttcttactgatttattgtagctctttacttaggaggttaattagccttttgcctgtggagagttttttggtttgccatttgtcctttttttaatttttgtattttttgtagagacagggttttgtaacgttgcccaggctggtctcaaactcctgtgctcaagtgatccacctgccttggcttcccaaagtgctggtcttacaggcatcatgagccaccacacccagccataat

SEQ ID NO: 289332 - DNA, 878 bp, Homo sapiens
gcgcacgtacacacgaagggcctgctgactacatctgccggaaagcatcgggccaagcctttctccattttgcggtctaggaagtagcagaggccccttcctgtagggagttgccatggagacgcggtggggcaccgacggagttctaatgacggccgtgattggtgcaggatcctgctaatctcaggaaggcccgtagagaagtgaggaaaacgtggtggggggcatgcgcgatctggtaggcggtgctgccgtctgttgtacctgagaggcttgcgcatgccgacgcacggattcgaggcggggagcatgggaagaagcggccaggagtatgacctgatcattgcgaccaccgctaggggaagggaggagagggtgtagaaacggggacgagggtgggggaagggcaaggaggcgctcgagctggtgcgcggagcatcctgggagacgtagtccagcgggagggggaagtcgaagactgcgcgtgctcaggagcgcggagcggcccgctgagcgcagagggtttcaggttgacttggcaccttgaagagtggaggcttggcccccaggatgaggcggccctcgaaatcgatgccacccacgggggaatgattctgcggtgccatccccttcataaacgcagattccttcctaaagccgcagctgcagaaggaacagcgcgaggagggaggtcagccccacttgcaaatggggaaacaagttctcgaaggcacagtgatctgaagatgggcggaatcagagtctcgggacttccttgcaggctcctgttccggcagtcttggagcctttgccgcccccccacccattgcgaagctcccccatccccttccaaccccagctaaatcaggaagctgaga

SEQ ID NO: 289333 - DNA, 414 bp, Homo sapiens
tttgcttattctccaccctgttccacatctggcattttttgtgcatcttccaacttaagtacacagcagcaagtgctctacatctttgggtagctacacagaaccccactgtggctcactgtggacacaccattgaaaaccttgtatgtaggtcacttagtacaaggaggaacacaactgttgaagaagtacctaaaaattgaattacttgaacaaagtgtgggacatttgctgttttgatggattttaccacactgtcttcccatttatgcttaccagcaatacataggaacacttgggtccctgcagtcagggtgtggaaatgtagactaatgcgttatatcccatgcaatacacttccatctcctcctatgtaagaaaatgcaccttagggcgtgactcatctgccattcc

SEQ ID NO: 289334 - DNA, 636 bp, Homo sapiens
gcctcagatacctgacctggtaccctctatgaggcctgcggtgctgggctccccagaccgagcacccccagaagatgaggggcctgtcatggtgaagctagaggactctgaggaggagggtgaggctgccttatgggacccaggccctgaagctgcacgcctgcgtttccggtgcttccactatgaggaggccacagggccccaagaggccctggcccagctccgagagctgtgtcgccagtggctgcgtccagaggtacgctccaaggagcagatgctggagctgttggtgctggagcagttcctgggcgcactgccccctgagatccaggcccgtgtgcaggggcagcggccaggcagccccgaggaggctgctgccctagtagatgggctgcgccgggagccgggcggaccccggagatgggtgagtgagtgtccacgagtggggttcaggactggagcatcatccagctcggcctcaccctgggcagcaccacgctttgccagacacacgttctcccttgtggtacagaagtggccacctgcaacagagaccctgtgcaaggctgcccagggcagagggattccagggccagactccccagcccattcctgcatcacctgcagtcacgtgga

SEQ ID NO: 289335 - DNA, 814 bp, Homo sapiens
aagcatcgggccaagcctttctccattttgcggtctaggaagtagcagaggccccttcctgtagggagttgccatggagacgcggtggggcaccgacggagttctaatgacggccgtgattggtgcaggatcctgctaatctcaggaaggcccgtagagaagtgaggaaaacgtggtggggggcatgcgcgatctggtaggcggtgctgccgtctgttgtacctgagaggcttgcgcatgccgacgcacggattcgaggcggggagcatgggaagaagcggccaggagtatgacctgatcattgcgaccaccgctaggggaagggaggagagggtgtagaaacggggacgagggtgggggaagggcaaggaggcgctcgagctggtgcgcggagcatcctgggagacgtagtccagcgggagggggaagtcgaagactgcgcgtgctcaggagcgcggagcggcccgctgagcgcagaggtgagggcggggtcctcttaaccgggagggctatcgtgtggacgggggcggtggctgcagactcggggattccggctccccagtgagaccggaagcgcggggaacgaatccgggcagtccttgcgggagcgcccagggctagagcgagaggcttgtcaatcactactcgttgccacgacgacaggctttgggagccccgcccccggttgcctaggcgtcgtctggacctaccttggcaccctggagcggaagttgccgcctggacttctgggaagtgtatttcgggaccctccgtaggtacctgccatcttggctatgacccaagtctctcccag

SEQ ID NO: 289336 - DNA, 1344 bp, Homo sapiens
  misc_feature (6)..(6): n is a, c, g, or t
  misc_feature (851)..(851): n is a, c, g, or t
  misc_feature (1206)..(1206): n is a, c, g, or t
ggacgngcggcacccagagagggtcctgtactgggccggcttggggcttggttctatgtccctgcgggtcggtgcgagggcgaagaggaacccgtgggtctcgggggatcccggggggccggaccagtgttccctagttgtgggagcagatgcgtgggcgcatcagcgggcgggcagggcctgaagtgcaggtgcgggccgtggaccctggcgggggctgggatgacaggcgtgtggtcctggcagtgaagcgggttctagaggcgcaggaacgggtaggcgaggccggtggccctgggcccggagtctgcaggccaagctcctgtcctgccgcttagggacccggttaccaaccctcatgtcgctcagtttgcccatgtgtcccggtgctaacacacagttctcgggagatgttccccattcccagaggagtagtgcgaaatgcgtgctcctctagtcttaaacttggcgtttgtattagttgggtttcctggtgtctctttagcaagtgaaatttctggttccctccttcactgtgtgacctgcctagtcctcctgggtcgcatttacagaagtttatacgagacctagtttccagggaagaactcactgattccgcgagggagatggtgtaatgggtgatggtagtcagccttaagggtacttcagtcttaactgtgtgttacaaagtttgaaagggagggttccctatgaataagaagtgcacttgaaagaacagccatctggtctaacctctcactggtgcttcagaggaggaaaaaaggtcacagctatgtttccagtgtcctctgggtgtttccaagagcaacaggaaacgaataaatctctgngaccgggtctcaccatattgctctggctggtttcaaactcctgggctcaagcgatcctcctgcctcagccttccaaaaccaggtgtttaacttgggactaacatgaagcacttagaagactacgtggaacatagcaatgactatatatgtactacaacgtaaacagcacctcctggattgaatagaacataactgacatgaccagcagagacaggctaaagacactgagctgaaaaccctggactctattgctaaattgaggctcctgaatccgttcgctctgagcaactgttgctgtggtgctgccttcacaagcactctgctgagcactcagatagaggggctgtgctatccntcaacagacaagctgcagccagaactgctcagctgacaaactggtagaggtccagaaacacagttctgctgcatagtgaaaaaaggccaatttagattctttttcatagagagaaaaacataaacatgtgattgaacg

SEQ ID NO: 289337 - DNA, 458 bp, Homo sapiens
  misc_feature (6)..(6): n is a, c, g, or t
  misc_feature (387)..(387): n is a, c, g, or t
  misc_feature (444)..(444): n is a, c, g, or t
ggacgngcggcacccagagagggtcctgtactgggccggcttggggcttggttctatgtccctgcgggtcggtgcgagggcgaagaggaacccgtgggtctcgggggatcccggggggccggaccagtgttccctagttgtgggagcagatgcgtgggcgcatcagcgggcgggcagggcctgaagtgcagctatgtttccagtgtcctctgggtgtttccaagagcaacaggaaacgaataaatctctgatggagtctcactctgtcacccaggctggagtgcagtggcagattctccgcttcacttgcaagctccacctcccaggtttcacaccatccttcctgccttcagcctcccgagtttgcagggattacagggcacccgncacaattgcccggctatttttttttgttgttttttagtaggagatgggggttttcantatgttagccagga

SEQ ID NO: 289338 - DNA, 473 bp, Homo sapiens
  misc_feature (6)..(6): n is a, c, g, or t
ggacgngcggcacccagagagggtcctgtactgggccggcttggggcttggttctatgtccctgcgggtcggtgcgagggcgaagaggaacccgtgggtctcgggggatcccggggggccggaccagtgttccctagttgtgggagcagatgcgtgggcgcatcagcgggcgggcagggcctgaagtgcagctatgtttccagtgtcctctgggtgtttccaagagcaacaggaaacgaataaatctctgccataggagttttagccaattcagaggccttgctccccacaatttggaaaattcctttggatttgaccaagtcgggaagagacaggagaaaagtgaaacaacaccaataaagccccaagcataaacaaacaaaaagagttaagcaaaacaacaaatgcccaattcatatgattactgagtgttctaatggtaaggagaaactaaaagccgaaatttaaagcca

SEQ ID NO: 289339 - DNA, 741 bp, Homo sapiens
caagagcaacaggaaacgaataaatctctggtgagttgtttatttgttcttcactttgttttacactgtattttctgagtttattggtgtctgtgaattaaaaaggaaaagtagaaataagtaaaactcaggttgaaggaaatatacataaataagataaagctgacctgtagatataggcaggttgtaagagcttagagttgtctaagttgggtgcaaattttcctctgatctttctgatgccgagacaaaaaaggcagtcatatttgttacgtgattggaatggaatccgagaagagagcatgctgtgttcttgtgggacaggaaagcttctgtgcaccaagtcagaaccaccaccttcattggtgacatagattatgtgctggaacatatttcacaccggcctggcagtaaccacttgtagtgttgtgcagtggaaacggtcatcttccgctaaagcacggcgtttagtgcagtggaaatggtcatctgccagtaaagcacagcttccatcgtaaggtatgctccttgctcaaagagtgtggtcccaaacagcttttgggaggtcctccttgattcatggatgaaacctggaacatcttgaggactgagttaaccataggtccttaaataactctccacacctttttcttagtttatctctacatgcagggtgtgcagcagcctgttcaaagtcatattttctgggaaatatttccagtgtttatttgcactttagcc

SEQ ID NO: 289340 - DNA, 550 bp, Homo sapiens
gtttacagaattccggcatcataagctatcatatgagaagcaagatttcagaaccttttttaaacacaagtgcttgagattgtttgaacaatgtgtgtcaagacagactactaacacagaaacacctcactgaaagaaacaacaaaaataacaacaaagaggtttgatgactggcttacagagaagaataaggaaatgtacctctaagaatcgtttgaaatgagtcttcatatcctcccaaatatttttcaagaacgtttggcattacttcaaaaattaactttaggaaaggaactattatcacattttaagaggggaattgcagttgcacttaaactagaaacttccacttggtgaattgaattattaaggaataatggcagaagaaagagtaagtcgtttataggcaataataagcaataaaaatatatgtatatgtgcatgcaaaaagttatggcaaaactaataagattttaaaaaatcattgtgttcctgaagaaacaaagaactggttttcttctaaggaattaaagagttttgtttctttggc

SEQ ID NO: 289341 - DNA, 968 bp, Homo sapiens
  misc_feature (783)..(783): n is a, c, g, or t
  misc_feature (793)..(794): n is a, c, g, or t
  misc_feature (809)..(809): n is a, c, g, or t
acaaacattcattgtctaggataccatgatgggtgctggggtggcagctgtgtggtgcagccctgttggcagtgggcatctgggtgtcaatcgatggggcatcctttctgaagatcttcgggccactgtcgtccagtgccatgcagtttgtcaacgtgggctacttcctcatcgcagccggcgttgtggtctttgctcttggtttcctgggctgctatggtgctaagactgagagcaagtgtgccctcgtgacggtgtgtgaaacccagctccacaggctgatgaccaagagtcccctcgcccttgacaccaggccctgggattcccaaaccctgctttggacccccctaggctcaggcttctgtctcacttttccgggggggggattagggcaaggagggcatgagggactgtctctccctaaaacccagacccctgttccccactcagttcttcttcatcctcctcctcatcttcattgctgaggttgcagctgctgtggtcgccttggtgtacaccacaatggctgagcacttcctgacgttgctggtagtgcctgccatcaagaaagattatggttcccaggaagacttcactcaagtgtggaacaccaccatgaaagggctcaagtgctgtggcttcaccaactatacggattttgaggactcaccctacttcaaagagaacagtgcctttcccccattctgttgcaatgacaacgtcaccaacacagccaatgaaacctgcaccaagcaaaaggctcacgaccaaaaagtagaggtngctcaatcannttgttgacatcgaantatgcatcccgggtggggggcagtggaatggggcccggctgggccagatggtccgtttctgtcggactcaaaagtcctttgcttgaatgggcaggaatggaaggccgccagagtggggggcgaaagtggcaagacttcaaggaaagaccaacgccgggg

SEQ ID NO: 289342 - DNA, 476 bp, Homo sapiens
ctggttgaggacaatgacatggatgccccggccctgctcccgggcctcatcctccagcacctacacagtggcagagacaaagtccagcttttcactctggcattcaaggtgtctctgtcttaggggtacttaaaacaccagctgcttgaaacatcacctcctgcctatgtttctgttcacacagttcttttccaactcagctcgaaggccacctcttccagaaagcctctatagcactcccatcagaagagatcacgtctttctacaaccctcccctccatgactttcatggctcttagagcctctgctgtctctgcttcatcctggaagtatcacaatcctccaccacactgaacccctcaaggtagggccaggtctgattactttcaggtccccagtgcccagcacaaggctgaggccaaagaaaggaccaggggatggttataaaataaatcaatgaattgactgcctactat

SEQ ID NO: 289343 - DNA, 400 bp, Homo sapiens
ctgtggaagacgggtaggctgtggaagaagggggcctcgagctggctgccatgattgtgtccatgtatctgtactgcaatctacaataagtccacttctgcctctgccactactgctgccacatgggaactgtgaagaggcaccctggcaagcagcagtgattgggggaggggacaggatctaacaatgtcacttgggccagaatggacctgccctttctgctccagacttggggctagatagggaccactccttttaggcgatgcctgactttccttccattggtgggtggatgggtggggggcattccagagcctctaaggtagccagttctgttgcccgtctcacagcctacccgtcttccacacactacccgtcttccaggtaccggctgatatta

SEQ ID NO: 289344 - DNA, 1329 bp, Homo sapiens
caggcgtacggtctgagacttatgatcctgcctgcaggtgagcagtggtgtgtgagagccaggcgtccctctgcctgcccactcagtggcaacacccgggagctgttttgtcctttgtggagcctcagcagttccctctttcagaactcactgccaagagccctgaacaggagccaccatgcagtgcttcagcttcattaagaccatgatgatcctcttcaatttgctcatctttctgtgtggtgcagccctgttggcagtgggcatctgggtgtcaatcgatggggcatcctttctgaagatcttcgggccactgtcgtccagtgccatgcagtttgtcaacgtgggctacttcctcatcgcagccggcgttgtggtctttgctcttggtttcctgggctgctatggtgctaagactgagagcaagtgtgccctcgtgacgttcttcttcatcctcctcctcatcttcattgctgaggttgcagctgctgtggtcgccttggtgtacaccacaatggctgagcacttcctgacgttgctggtagtgcctgccatcaagaaagattatggttcccaggaagacttcactcaagtgtggaacaccaccatgaaagggctcaagtgctgtggcttcaccaactatacggattttgaggactcaccctacttcaaagagaacagtgcctttcccccattctgttgcaatgacaacgtcaccaacacagccaatgaaacctgcaccaagcaaaaggctcacgaccaaaaagtagagggttgcttcaatcagcttttgtatgacatccgaactaatgcagtcaccgtgggtggtgtggcagctggaattgggggcctcgagctggctgccatgattgtgtccatgtatctgtactgcaatctacaataagtccacttctgcctctgccactactgctgccacatgggaactgtgaagaggcaccctggcaagcagcagtgattgggggaggggacaggatctaacaatgtcacttgggccagaatggacctgccctttctgctccagacttggggctagatagggaccactccttttaggcgatgcctgactttccttccattggtgggtggatgggtggggggcattccagagcctctaaggtagccagttctgttgcccattcccccagtctattaaacccttgatatgccccctaggcctagtggtgatcccagtgctctactgggggatgagagaaaggcattttatagcctgggcataagtgaaatcagcagagcctctgggtggatgtgtagaaggcacttcaaaatgcataaacctgttacaatgtt

SEQ ID NO: 289345 - DNA, 1532 bp, Homo sapiens
gtggagggcacgcagacattctgggaagccacttgccccacccctgggctgcttcttcttgagatcaggaggggcgttgcccagggctggtgttgccaggtggaggcctgctgaggcagtggttgtggggatcggtctccaggcagcagggggcagcagggtcaaggagaggctaactggccacgggtggggccagcaggcgggcagaaggaggctttaaagcgcctaccctgcctgcaggtgagcagtggtgtgtgagagccaggcgtccctctgcctgcccactcagtggcaacacccgggagctgttttgtcctttgtggagcctcagcagttccctctttcagaactcactgccaagagccctgaacaggagccaccatgcagtgcttcagcttcattaagaccatgatgatcctcttcaatttgctcatctttctgtgtggtgcagccctgttggcagtgggcatctgggtgtcaatcgatggggcatcctttctgaagatcttcgggccactgtcgtccagtgccatgcagtttgtcaacgtgggctacttcctcatcgcagccggcgttgtggtctttgctcttggtttcctgggctgctatggtgctaagactgagagcaagtgtgccctcgtgacgttcttcttcatcctcctcctcatcttcattgctgaggttgcagctgctgtggtcgccttggtgtacaccacaatggctgagcacttcctgacgttgctggtagtgcctgccatcaagaaagattatggttcccaggaagacttcactcaagtgtggaacaccaccatgaaagggctcaagtgctgtggcttcaccaactatacggattttgaggactcaccctacttcaaagagaacagtgcctttcccccattctgttgcaatgacaacgtcaccaacacagccaatgaaacctgcaccaagcaaaaggctcacgaccaaaaagtagagggttgcttcaatcagcttttgtatgacatccgaactaatgcagtcaccgtgggtggtgtggcagctggaattgggggcctcgagctggctgccatgattgtgtccatgtatctgtactgcaatctacaataagtccacttctgcctctgccactactgctgccacatgggaactgtgaagaggcaccctggcaagcagcagtgattgggggaggggacaggatctaacaatgtcacttgggccagaatggacctgccctttctgctccagacttggggctagatagggaccactccttttaggcgatgcctgactttccttccattggtgggtggatgggtggggggcattccagagcctctaaggtagccagttctgttgcccattcccccagtctattaaacccttgatatgccccctaggcctagtggtgatcccagtgctctactgggggatgagagaaaggcattttatagcctgggcataagtgaaatcagcagagcctctgggtggatgtgtagaaggcacttcaaaatgcataaacctgttacaatgtt

SEQ ID NO: 289346 - DNA, 1945 bp, Homo sapiens
caggcgtacggtctgagacttatgatcctgcctgcaggtgagcagtggtgtgtgagagccaggcgtccctctgcctgcccactcagtggcaacacccgggagctgttttgtcctttgtggagcctcagcagttccctctttcagaactcactgccaagagccctgaacaggagccaccatgcagtgcttcagcttcattaagaccatgatgatcctcttcaatttgctcatctttctgtgtggtgcagccctgttggcagtgggcatctgggtgtcaatcgatggggcatcctttctgaagatcttcgggccactgtcgtccagtgccatgcagtttgtcaacgtgggctacttcctcatcgcagccggcgttgtggtctttgctcttggtttcctgggctgctatggtgctaagactgagagcaagtgtgccctcgtgacgttcttcttcatcctcctcctcatcttcattgctgaggttgcagctgctgtggtcgccttggtgtacaccacaatggctgagcacttcctgacgttgctggtagtgcctgccatcaagaaagattatggttcccaggaagacttcactcaagtgtggaacaccaccatgaaagggctcaagtgctgtggcttcaccaactatacggattttgaggactcaccctacttcaaagagaacagtgcctttcccccattctgttgcaatgacaacgtcaccaacacagccaatgaaacctgcaccaagcaaaaggctcacgaccaaaaagtagagggttgcttcaatcagcttttgtatgacatccgaactaatgcagtcaccgtgggtggtgtggcagctggaattgggggcctcgagctggctgccatgattgtgtccatgtatctgtactgcaatctacaataagtccacttctgcctctgccactactgctgccacatgggaactgtgaagaggcaccctggcaagcagcagtgattgggggaggggacaggatctaacaatgtcacttgggccagaatggacctgccctttctgctccagacttggggctagatagggaccactccttttaggcgatgcctgactttccttccattggtgggtggatgggtggggggcattccagagcctctaaggtagccagttctgttgcccattcccccagtctattaaacccttgatatgccccctaggcctagtggtgatcccagtgctctactgggggatgagagaaaggcattttatagcctgggcataagtgaaatcagcagagcctctgggtggatgtgtagaaggcacttcaaaatgcataaacctgttacaatgttaaaaaaaaaaaaaaaaaaacaaaaacaaaaaaaaaaaaaaaaaaaaaaaaaaaaaagcaaaacaaaacgactgggtgggaggcccagcgaatacagtggtacacactagtgagtggcggcggacgacaagagaaggcaacaacgtacgattggacggggacagacgaggggggccacaacacagagacagagaccaatataacaagagagcggcgtaagcagggcagctggctcggatcctacgcaggcaccttcgagggagaggagcaacgccacacgtcgacgcggaagcgaacacagacgggagcagacagcagccacaacaaccgacgggagagggagggagctcagacgaagcggcgggcgcacggaatctgaccgactgacaagagtacggcagggagaaccgaccaaccgccactcagaaggggcggacagcagcgccaagtgaacagacgagggtggcgcgcgcgagcacggcacgcccaaaaagcacgcagggccatgcgagcaccggccagcgcagcgagcgagcagcggagacgcaccagagagaagcaagcagacgagggagcggaggcgacgacgcggccgaacagcacccacgaccgagaga

SEQ ID NO: 289347 - DNA, 1919 bp, Homo sapiens
aaatggctagacgaggcctgggttaatcggcagcaggcgtccctctgcctgcccactcagtggcaacacccgggagctgttttgtcctttgtggagcctcagcagttccctctttcagaactcactgccaagagccctgaacaggagccaccatgcagtgcttcagcttcattaagaccatgatgatcctcttcaatttgctcatctttctgtgtggtgcagccctgttggcagtgggcatctgggtgtcaatcgatggggcatcctttctgaagatcttcgggccactgtcgtccagtgccatgcagtttgtcaacgtgggctacttcctcatcgcagccggcgttgtggtctttgctcttggtttcctgggctgctatggtgctaagactgagagcaagtgtgccctcgtgacgttcttcttcatcctcctcctcatcttcattgctgaggttgcagctgctgtggtcgccttggtgtacaccacaatggctgagcacttcctgacgttgctggtagtgcctgccatcaagaaagattatggttcccaggaagacttcactcaagtgtggaacaccaccatgaaagggctcaagtgctgtggcttcaccaactatacggattttgaggactcaccctacttcaaagagaacagtgcctttcccccattctgttgcaatgacaacgtcaccaacacagccaatgaaacctgcaccaagcaaaaggctcacgaccaaaaagtagagggttgcttcaatcagcttttgtatgacatccgaactaatgcagtcaccgtgggtggtgtggcagctggaattgggggcctcgagctggctgccatgattgtgtccatgtatctgtactgcaatctacaataagtccacttctgcctctgccactactgctgccacatgggaactgtgaagaggcaccctggcaagcagcagtgattgggggaggggacaggatctaacaatgtcacttgggccagaatggacctgccctttctgctccagacttggggctagatagggaccactccttttaggcgatgcctgactttccttccattggtgggtggatgggtggggggcattccagagcctctaaggtagccagttctgttgcccattcccccagtctattaaacccttgatatgccccctaggcctagtggtgatcccagtgctctactgggggatgagagaaaggcattttatagcctgggcataagtgaaatcagcagagcctctgggtggatgtgtagaaggcacttcaaaatgcataaacctgttacaatgttaaaaaaaaaaaaaaaaaaacaaaaacaaaaaaaaaaaaaaaaaaaaaaaaaaaaaagcaaaacaaaacgactgggtgggaggcccagcgaatacagtggtacacactagtgagtggcggcggacgacaagagaaggcaacaacgtacgattggacggggacagacgaggggggccacaacacagagacagagaccaatataacaagagagcggcgtaagcagggcagctggctcggatcctacgcaggcaccttcgagggagaggagcaacgccacacgtcgacgcggaagcgaacacagacgggagcagacagcagccacaacaaccgacgggagagggagggagctcagacgaagcggcgggcgcacggaatctgaccgactgacaagagtacggcagggagaaccgaccaaccgccactcagaaggggcggacagcagcgccaagtgaacagacgagggtggcgcgcgcgagcacggcacgcccaaaaagcacgcagggccatgcgagcaccggccagcgcagcgagcgagcagcggagacgcaccagagagaagcaagcagacgagggagcggaggcgacgacgcggccgaacagcacccacgaccgagaga

SEQ ID NO: 289348 - DNA, 1912 bp, Homo sapiens
  misc_feature (10)..(10): n is a, c, g, or t
cctgttacgncctggattatgggatgcaggcgtccctctgcctgcccactcagtggcaacacccgggagctgttttgtcctttgtggagcctcagcagttccctctttcagaactcactgccaagagccctgaacaggagccaccatgcagtgcttcagcttcattaagaccatgatgatcctcttcaatttgctcatctttctgtgtggtgcagccctgttggcagtgggcatctgggtgtcaatcgatggggcatcctttctgaagatcttcgggccactgtcgtccagtgccatgcagtttgtcaacgtgggctacttcctcatcgcagccggcgttgtggtctttgctcttggtttcctgggctgctatggtgctaagactgagagcaagtgtgccctcgtgacgttcttcttcatcctcctcctcatcttcattgctgaggttgcagctgctgtggtcgccttggtgtacaccacaatggctgagcacttcctgacgttgctggtagtgcctgccatcaagaaagattatggttcccaggaagacttcactcaagtgtggaacaccaccatgaaagggctcaagtgctgtggcttcaccaactatacggattttgaggactcaccctacttcaaagagaacagtgcctttcccccattctgttgcaatgacaacgtcaccaacacagccaatgaaacctgcaccaagcaaaaggctcacgaccaaaaagtagagggttgcttcaatcagcttttgtatgacatccgaactaatgcagtcaccgtgggtggtgtggcagctggaattgggggcctcgagctggctgccatgattgtgtccatgtatctgtactgcaatctacaataagtccacttctgcctctgccactactgctgccacatgggaactgtgaagaggcaccctggcaagcagcagtgattgggggaggggacaggatctaacaatgtcacttgggccagaatggacctgccctttctgctccagacttggggctagatagggaccactccttttaggcgatgcctgactttccttccattggtgggtggatgggtggggggcattccagagcctctaaggtagccagttctgttgcccattcccccagtctattaaacccttgatatgccccctaggcctagtggtgatcccagtgctctactgggggatgagagaaaggcattttatagcctgggcataagtgaaatcagcagagcctctgggtggatgtgtagaaggcacttcaaaatgcataaacctgttacaatgttaaaaaaaaaaaaaaaaaaacaaaaacaaaaaaaaaaaaaaaaaaaaaaaaaaaaaagcaaaacaaaacgactgggtgggaggcccagcgaatacagtggtacacactagtgagtggcggcggacgacaagagaaggcaacaacgtacgattggacggggacagacgaggggggccacaacacagagacagagaccaatataacaagagagcggcgtaagcagggcagctggctcggatcctacgcaggcaccttcgagggagaggagcaacgccacacgtcgacgcggaagcgaacacagacgggagcagacagcagccacaacaaccgacgggagagggagggagctcagacgaagcggcgggcgcacggaatctgaccgactgacaagagtacggcagggagaaccgaccaaccgccactcagaaggggcggacagcagcgccaagtgaacagacgagggtggcgcgcgcgagcacggcacgcccaaaaagcacgcagggccatgcgagcaccggccagcgcagcgagcgagcagcggagacgcaccagagagaagcaagcagacgagggagcggaggcgacgacgcggccgaacagcacccacgaccgagaga

SEQ ID NO: 289349 - DNA, 1901 bp, Homo sapiens
ttacggtctaaggagcgaggaccgcgtgaatcggccgatcagtggcaacacccgggagctgttttgtcctttgtggagcctcagcagttccctctttcagaactcactgccaagagccctgaacaggagccaccatgcagtgcttcagcttcattaagaccatgatgatcctcttcaatttgctcatctttctgtgtggtgcagccctgttggcagtgggcatctgggtgtcaatcgatggggcatcctttctgaagatcttcgggccactgtcgtccagtgccatgcagtttgtcaacgtgggctacttcctcatcgcagccggcgttgtggtctttgctcttggtttcctgggctgctatggtgctaagactgagagcaagtgtgccctcgtgacgttcttcttcatcctcctcctcatcttcattgctgaggttgcagctgctgtggtcgccttggtgtacaccacaatggctgagcacttcctgacgttgctggtagtgcctgccatcaagaaagattatggttcccaggaagacttcactcaagtgtggaacaccaccatgaaagggctcaagtgctgtggcttcaccaactatacggattttgaggactcaccctacttcaaagagaacagtgcctttcccccattctgttgcaatgacaacgtcaccaacacagccaatgaaacctgcaccaagcaaaaggctcacgaccaaaaagtagagggttgcttcaatcagcttttgtatgacatccgaactaatgcagtcaccgtgggtggtgtggcagctggaattgggggcctcgagctggctgccatgattgtgtccatgtatctgtactgcaatctacaataagtccacttctgcctctgccactactgctgccacatgggaactgtgaagaggcaccctggcaagcagcagtgattgggggaggggacaggatctaacaatgtcacttgggccagaatggacctgccctttctgctccagacttggggctagatagggaccactccttttaggcgatgcctgactttccttccattggtgggtggatgggtggggggcattccagagcctctaaggtagccagttctgttgcccattcccccagtctattaaacccttgatatgccccctaggcctagtggtgatcccagtgctctactgggggatgagagaaaggcattttatagcctgggcataagtgaaatcagcagagcctctgggtggatgtgtagaaggcacttcaaaatgcataaacctgttacaatgttaaaaaaaaaaaaaaaaaaacaaaaacaaaaaaaaaaaaaaaaaaaaaaaaaaaaaagcaaaacaaaacgactgggtgggaggcccagcgaatacagtggtacacactagtgagtggcggcggacgacaagagaaggcaacaacgtacgattggacggggacagacgaggggggccacaacacagagacagagaccaatataacaagagagcggcgtaagcagggcagctggctcggatcctacgcaggcaccttcgagggagaggagcaacgccacacgtcgacgcggaagcgaacacagacgggagcagacagcagccacaacaaccgacgggagagggagggagctcagacgaagcggcgggcgcacggaatctgaccgactgacaagagtacggcagggagaaccgaccaaccgccactcagaaggggcggacagcagcgccaagtgaacagacgagggtggcgcgcgcgagcacggcacgcccaaaaagcacgcagggccatgcgagcaccggccagcgcagcgagcgagcagcggagacgcaccagagagaagcaagcagacgagggagcggaggcgacgacgcggccgaacagcacccacgaccgagaga

SEQ ID NO: 289350 - DNA, 1757 bp, Homo sapiens
acaaacattcattgtctaggataccatgatgggtgctggggtggcagctgtgtggtgcagccctgttggcagtgggcatctgggtgtcaatcgatggggcatcctttctgaagatcttcgggccactgtcgtccagtgccatgcagtttgtcaacgtgggctacttcctcatcgcagccggcgttgtggtctttgctcttggtttcctgggctgctatggtgctaagactgagagcaagtgtgccctcgtgacgttcttcttcatcctcctcctcatcttcattgctgaggttgcagctgctgtggtcgccttggtgtacaccacaatggctgagcacttcctgacgttgctggtagtgcctgccatcaagaaagattatggttcccaggaagacttcactcaagtgtggaacaccaccatgaaagggctcaagtgctgtggcttcaccaactatacggattttgaggactcaccctacttcaaagagaacagtgcctttcccccattctgttgcaatgacaacgtcaccaacacagccaatgaaacctgcaccaagcaaaaggctcacgaccaaaaagtagagggttgcttcaatcagcttttgtatgacatccgaactaatgcagtcaccgtgggtggtgtggcagctggaattgggggcctcgagctggctgccatgattgtgtccatgtatctgtactgcaatctacaataagtccacttctgcctctgccactactgctgccacatgggaactgtgaagaggcaccctggcaagcagcagtgattgggggaggggacaggatctaacaatgtcacttgggccagaatggacctgccctttctgctccagacttggggctagatagggaccactccttttaggcgatgcctgactttccttccattggtgggtggatgggtggggggcattccagagcctctaaggtagccagttctgttgcccattcccccagtctattaaacccttgatatgccccctaggcctagtggtgatcccagtgctctactgggggatgagagaaaggcattttatagcctgggcataagtgaaatcagcagagcctctgggtggatgtgtagaaggcacttcaaaatgcataaacctgttacaatgttaaaaaaaaaaaaaaaaaaacaaaaacaaaaaaaaaaaaaaaaaaaaaaaaaaaaaagcaaaacaaaacgactgggtgggaggcccagcgaatacagtggtacacactagtgagtggcggcggacgacaagagaaggcaacaacgtacgattggacggggacagacgaggggggccacaacacagagacagagaccaatataacaagagagcggcgtaagcagggcagctggctcggatcctacgcaggcaccttcgagggagaggagcaacgccacacgtcgacgcggaagcgaacacagacgggagcagacagcagccacaacaaccgacgggagagggagggagctcagacgaagcggcgggcgcacggaatctgaccgactgacaagagtacggcagggagaaccgaccaaccgccactcagaaggggcggacagcagcgccaagtgaacagacgagggtggcgcgcgcgagcacggcacgcccaaaaagcacgcagggccatgcgagcaccggccagcgcagcgagcgagcagcggagacgcaccagagagaagcaagcagacgagggagcggaggcgacgacgcggccgaacagcacccacgaccgagaga

SEQ ID NO: 289351 - DNA, 1795 bp, Homo sapiens
cgggagtgcgttccagagggtccccggagggtgtgatatcattggcatgagagcatgaggatcctgattcaatattgtcatctttctgtgtggtgcagccctgttggcagtgggcatctgggtgtcaatcgatggggcatcctttctgaagatcttcgggccactgtcgtccagtgccatgcagtttgtcaacgtgggctacttcctcatcgcagccggcgttgtggtctttgctcttggtttcctgggctgctatggtgctaagactgagagcaagtgtgccctcgtgacgttcttcttcatcctcctcctcatcttcattgctgaggttgcagctgctgtggtcgccttggtgtacaccacaatggctgagcacttcctgacgttgctggtagtgcctgccatcaagaaagattatggttcccaggaagacttcactcaagtgtggaacaccaccatgaaagggctcaagtgctgtggcttcaccaactatacggattttgaggactcaccctacttcaaagagaacagtgcctttcccccattctgttgcaatgacaacgtcaccaacacagccaatgaaacctgcaccaagcaaaaggctcacgaccaaaaagtagagggttgcttcaatcagcttttgtatgacatccgaactaatgcagtcaccgtgggtggtgtggcagctggaattgggggcctcgagctggctgccatgattgtgtccatgtatctgtactgcaatctacaataagtccacttctgcctctgccactactgctgccacatgggaactgtgaagaggcaccctggcaagcagcagtgattgggggaggggacaggatctaacaatgtcacttgggccagaatggacctgccctttctgctccagacttggggctagatagggaccactccttttaggcgatgcctgactttccttccattggtgggtggatgggtggggggcattccagagcctctaaggtagccagttctgttgcccattcccccagtctattaaacccttgatatgccccctaggcctagtggtgatcccagtgctctactgggggatgagagaaaggcattttatagcctgggcataagtgaaatcagcagagcctctgggtggatgtgtagaaggcacttcaaaatgcataaacctgttacaatgttaaaaaaaaaaaaaaaaaaacaaaaacaaaaaaaaaaaaaaaaaaaaaaaaaaaaaagcaaaacaaaacgactgggtgggaggcccagcgaatacagtggtacacactagtgagtggcggcggacgacaagagaaggcaacaacgtacgattggacggggacagacgaggggggccacaacacagagacagagaccaatataacaagagagcggcgtaagcagggcagctggctcggatcctacgcaggcaccttcgagggagaggagcaacgccacacgtcgacgcggaagcgaacacagacgggagcagacagcagccacaacaaccgacgggagagggagggagctcagacgaagcggcgggcgcacggaatctgaccgactgacaagagtacggcagggagaaccgaccaaccgccactcagaaggggcggacagcagcgccaagtgaacagacgagggtggcgcgcgcgagcacggcacgcccaaaaagcacgcagggccatgcgagcaccggccagcgcagcgagcgagcagcggagacgcaccagagagaagcaagcagacgagggagcggaggcgacgacgcggccgaacagcacccacgaccgagaga

SEQ ID NO: 289352 - DNA, 1989 bp, Homo sapiens
  misc_feature (10)..(10): n is a, c, g, or t
  misc_feature (14)..(14): n is a, c, g, or t
  misc_feature (16)..(16): n is a, c, g, or t
aagtaaggcngggntnatcggccgaggggctgattcatccactgaagccctgggccgggaggctttcctctaagatctgtgggaactgcgcagggccctcctcaatctaggcctcagaattccccctgaggtttggagttgagctagacagcctttaagagaagctctggctgtattcccactggtacctcactttcctcttgtgaggcaaggaggtcttgtctacatgaggggcgggcctgaagttggattctggaggggagccaaatggggcctcagctgtgtggtgcagccctgttggcagtgggcatctgggtgtcaatcgatggggcatcctttctgaagatcttcgggccactgtcgtccagtgccatgcagtttgtcaacgtgggctacttcctcatcgcagccggcgttgtggtctttgctcttggtttcctgggctgctatggtgctaagactgagagcaagtgtgccctcgtgacgttcttcttcatcctcctcctcatcttcattgctgaggttgcagctgctgtggtcgccttggtgtacaccacaatggctgagcacttcctgacgttgctggtagtgcctgccatcaagaaagattatggttcccaggaagacttcactcaagtgtggaacaccaccatgaaagggctcaagtgctgtggcttcaccaactatacggattttgaggactcaccctacttcaaagagaacagtgcctttcccccattctgttgcaatgacaacgtcaccaacacagccaatgaaacctgcaccaagcaaaaggctcacgaccaaaaagtagagggttgcttcaatcagcttttgtatgacatccgaactaatgcagtcaccgtgggtggtgtggcagctggaattgggggcctcgagctggctgccatgattgtgtccatgtatctgtactgcaatctacaataagtccacttctgcctctgccactactgctgccacatgggaactgtgaagaggcaccctggcaagcagcagtgattgggggaggggacaggatctaacaatgtcacttgggccagaatggacctgccctttctgctccagacttggggctagatagggaccactccttttaggcgatgcctgactttccttccattggtgggtggatgggtggggggcattccagagcctctaaggtagccagttctgttgcccattcccccagtctattaaacccttgatatgccccctaggcctagtggtgatcccagtgctctactgggggatgagagaaaggcattttatagcctgggcataagtgaaatcagcagagcctctgggtggatgtgtagaaggcacttcaaaatgcataaacctgttacaatgttaaaaaaaaaaaaaaaaaaacaaaaacaaaaaaaaaaaaaaaaaaaaaaaaaaaaaagcaaaacaaaacgactgggtgggaggcccagcgaatacagtggtacacactagtgagtggcggcggacgacaagagaaggcaacaacgtacgattggacggggacagacgaggggggccacaacacagagacagagaccaatataacaagagagcggcgtaagcagggcagctggctcggatcctacgcaggcaccttcgagggagaggagcaacgccacacgtcgacgcggaagcgaacacagacgggagcagacagcagccacaacaaccgacgggagagggagggagctcagacgaagcggcgggcgcacggaatctgaccgactgacaagagtacggcagggagaaccgaccaaccgccactcagaaggggcggacagcagcgccaagtgaacagacgagggtggcgcgcgcgagcacggcacgcccaaaaagcacgcagggccatgcgagcaccggccagcgcagcgagcgagcagcggagacgcaccagagagaagcaagcagacgagggagcggaggcgacgacgcggccgaacagcacccacgaccgagaga

SEQ ID NO: 289353 - DNA, 2185 bp, Homo sapiens
  misc_feature (10)..(10): n is a, c, g, or t
  misc_feature (14)..(14): n is a, c, g, or t
  misc_feature (16)..(16): n is a, c, g, or t
aagtaaggcngggntnatcggccgaggggctgattcatccactgaagccctgggccgggaggctttcctctaagatctgtgggaactgcgcagggccctcctcaatctaggcctcagaattccccctgaggtttggagttgagctagacagcctttaagagaagctctggctgtattcccactggtacctcactttcctcttgtgaggcaaggaggtcttgtctacatgaggggcgggcctgaagttggattctggaggggagccaaatggggcctcagctgtgtggtgcagccctgttggcagtgggcatctgggtgtcaatcgatggggcatcctttctgaagatcttcgggccactgtcgtccagtgccatgcagtttgtcaacgtgggctacttcctcatcgcagccggcgttgtggtctttgctcttggtttcctgggctgctatggtgctaagactgagagcaagtgtgccctcgtgacggtgtgtgaaacccagctccacaggctgatgaccaagagtcccctcgcccttgacaccaggccctgggattcccaaaccctgctttggacccccctaggctcaggcttctgtctcacttttccgggggggggattagggcaaggagggcatgagggactgtctctccctaaaacccagacccctgttccccactcagttcttcttcatcctcctcctcatcttcattgctgaggttgcagctgctgtggtcgccttggtgtacaccacaatggctgagcacttcctgacgttgctggtagtgcctgccatcaagaaagattatggttcccaggaagacttcactcaagtgtggaacaccaccatgaaagggctcaagtgctgtggcttcaccaactatacggattttgaggactcaccctacttcaaagagaacagtgcctttcccccattctgttgcaatgacaacgtcaccaacacagccaatgaaacctgcaccaagcaaaaggctcacgaccaaaaagtagagggttgcttcaatcagcttttgtatgacatccgaactaatgcagtcaccgtgggtggtgtggcagctggaattgggggcctcgagctggctgccatgattgtgtccatgtatctgtactgcaatctacaataagtccacttctgcctctgccactactgctgccacatgggaactgtgaagaggcaccctggcaagcagcagtgattgggggaggggacaggatctaacaatgtcacttgggccagaatggacctgccctttctgctccagacttggggctagatagggaccactccttttaggcgatgcctgactttccttccattggtgggtggatgggtggggggcattccagagcctctaaggtagccagttctgttgcccattcccccagtctattaaacccttgatatgccccctaggcctagtggtgatcccagtgctctactgggggatgagagaaaggcattttatagcctgggcataagtgaaatcagcagagcctctgggtggatgtgtagaaggcacttcaaaatgcataaacctgttacaatgttaaaaaaaaaaaaaaaaaaacaaaaacaaaaaaaaaaaaaaaaaaaaaaaaaaaaaagcaaaacaaaacgactgggtgggaggcccagcgaatacagtggtacacactagtgagtggcggcggacgacaagagaaggcaacaacgtacgattggacggggacagacgaggggggccacaacacagagacagagaccaatataacaagagagcggcgtaagcagggcagctggctcggatcctacgcaggcaccttcgagggagaggagcaacgccacacgtcgacgcggaagcgaacacagacgggagcagacagcagccacaacaaccgacgggagagggagggagctcagacgaagcggcgggcgcacggaatctgaccgactgacaagagtacggcagggagaaccgaccaaccgccactcagaaggggcggacagcagcgccaagtgaacagacgagggtggcgcgcgcgagcacggcacgcccaaaaagcacgcagggccatgcgagcaccggccagcgcagcgagcgagcagcggagacgcaccagagagaagcaagcagacgagggagcggaggcgacgacgcggccgaacagcacccacgaccgagaga

SEQ ID NO: 289354 - DNA, 1953 bp, Homo sapiens
acaaacattcattgtctaggataccatgatgggtgctggggtggcagctgtgtggtgcagccctgttggcagtgggcatctgggtgtcaatcgatggggcatcctttctgaagatcttcgggccactgtcgtccagtgccatgcagtttgtcaacgtgggctacttcctcatcgcagccggcgttgtggtctttgctcttggtttcctgggctgctatggtgctaagactgagagcaagtgtgccctcgtgacggtgtgtgaaacccagctccacaggctgatgaccaagagtcccctcgcccttgacaccaggccctgggattcccaaaccctgctttggacccccctaggctcaggcttctgtctcacttttccgggggggggattagggcaaggagggcatgagggactgtctctccctaaaacccagacccctgttccccactcagttcttcttcatcctcctcctcatcttcattgctgaggttgcagctgctgtggtcgccttggtgtacaccacaatggctgagcacttcctgacgttgctggtagtgcctgccatcaagaaagattatggttcccaggaagacttcactcaagtgtggaacaccaccatgaaagggctcaagtgctgtggcttcaccaactatacggattttgaggactcaccctacttcaaagagaacagtgcctttcccccattctgttgcaatgacaacgtcaccaacacagccaatgaaacctgcaccaagcaaaaggctcacgaccaaaaagtagagggttgcttcaatcagcttttgtatgacatccgaactaatgcagtcaccgtgggtggtgtggcagctggaattgggggcctcgagctggctgccatgattgtgtccatgtatctgtactgcaatctacaataagtccacttctgcctctgccactactgctgccacatgggaactgtgaagaggcaccctggcaagcagcagtgattgggggaggggacaggatctaacaatgtcacttgggccagaatggacctgccctttctgctccagacttggggctagatagggaccactccttttaggcgatgcctgactttccttccattggtgggtggatgggtggggggcattccagagcctctaaggtagccagttctgttgcccattcccccagtctattaaacccttgatatgccccctaggcctagtggtgatcccagtgctctactgggggatgagagaaaggcattttatagcctgggcataagtgaaatcagcagagcctctgggtggatgtgtagaaggcacttcaaaatgcataaacctgttacaatgttaaaaaaaaaaaaaaaaaaacaaaaacaaaaaaaaaaaaaaaaaaaaaaaaaaaaaagcaaaacaaaacgactgggtgggaggcccagcgaatacagtggtacacactagtgagtggcggcggacgacaagagaaggcaacaacgtacgattggacggggacagacgaggggggccacaacacagagacagagaccaatataacaagagagcggcgtaagcagggcagctggctcggatcctacgcaggcaccttcgagggagaggagcaacgccacacgtcgacgcggaagcgaacacagacgggagcagacagcagccacaacaaccgacgggagagggagggagctcagacgaagcggcgggcgcacggaatctgaccgactgacaagagtacggcagggagaaccgaccaaccgccactcagaaggggcggacagcagcgccaagtgaacagacgagggtggcgcgcgcgagcacggcacgcccaaaaagcacgcagggccatgcgagcaccggccagcgcagcgagcgagcagcggagacgcaccagagagaagcaagcagacgagggagcggaggcgacgacgcggccgaacagcacccacgaccgagaga

SEQ ID NO: 289355 - DNA, 2460 bp, Homo sapiens
gtggagggcacgcagacattctgggaagccacttgccccacccctgggctgcttcttcttgagatcaggaggggcgttgcccagggctggtgttgccaggtggaggcctgctgaggcagtggttgtggggatcggtctccaggcagcagggggcagcagggtcaaggagaggctaactggccacgggtggggccagcaggcgggcagaaggaggctttaaagcgcctaccctgcctgcaggtgagcagtggtgtgtgagagccaggcgtccctctgcctgcccactcagtggcaacacccgggagctgttttgtcctttgtggagcctcagcagttccctctttcagaactcactgccaagagccctgaacaggagccaccatgcagtgcttcagcttcattaagaccatgatgatcctcttcaatttgctcatctttctgtgtggtgcagccctgttggcagtgggcatctgggtgtcaatcgatggggcatcctttctgaagatcttcgggccactgtcgtccagtgccatgcagtttgtcaacgtgggctacttcctcatcgcagccggcgttgtggtctttgctcttggtttcctgggctgctatggtgctaagactgagagcaagtgtgccctcgtgacggtgtgtgaaacccagctccacaggctgatgaccaagagtcccctcgcccttgacaccaggccctgggattcccaaaccctgctttggacccccctaggctcaggcttctgtctcacttttccgggggggggattagggcaaggagggcatgagggactgtctctccctaaaacccagacccctgttccccactcagttcttcttcatcctcctcctcatcttcattgctgaggttgcagctgctgtggtcgccttggtgtacaccacaatggtgagacactgggatggaggaagggaagaagattgggcaaaaccctgggagtgggctgtggcctgtgaatgggcaccttctgtaccagcccctaaacactggcctgcctcacccaggctgagcacttcctgacgttgctggtagtgcctgccatcaagaaagattatggttcccaggaagacttcactcaagtgtggaacaccaccatgaaagggctcaagtgctgtggcttcaccaactatacggattttgaggactcaccctacttcaaagagaacagtgcctttcccccattctgttgcaatgacaacgtcaccaacacagccaatgaaacctgcaccaagcaaaaggctcacgaccaaaaagtagagggttgcttcaatcagcttttgtatgacatccgaactaatgcagtcaccgtgggtggtgtggcagctggaattgggggcctcgagctggctgccatgattgtgtccatgtatctgtactgcaatctacaataagtccacttctgcctctgccactactgctgccacatgggaactgtgaagaggcaccctggcaagcagcagtgattgggggaggggacaggatctaacaatgtcacttgggccagaatggacctgccctttctgctccagacttggggctagatagggaccactccttttaggcgatgcctgactttccttccattggtgggtggatgggtggggggcattccagagcctctaaggtagccagttctgttgcccattcccccagtctattaaacccttgatatgccccctaggcctagtggtgatcccagtgctctactgggggatgagagaaaggcattttatagcctgggcataagtgaaatcagcagagcctctgggtggatgtgtagaaggcacttcaaaatgcataaacctgttacaatgttaaaaaaaaaaaaaaaaaaacaaaaacaaaaaaaaaaaaaaaaaaaaaaaaaaaaaagcaaaacaaaacgactgggtgggaggcccagcgaatacagtggtacacactagtgagtggcggcggacgacaagagaaggcaacaacgtacgattggacggggacagacgaggggggccacaacacagagacagagaccaatataacaagagagcggcgtaagcagggcagctggctcggatcctacgcaggcaccttcgagggagaggagcaacgccacacgtcgacgcggaagcgaacacagacgggagcagacagcagccacaacaaccgacgggagagggagggagctcagacgaagcggcgggcgcacggaatctgaccgactgacaagagtacggcagggagaaccgaccaaccgccactcagaaggggcggacagcagcgccaagtgaacagacgagggtggcgcgcgcgagcacggcacgcccaaaaagcacgcagggccatgcgagcaccggccagcgcagcgagcgagcagcggagacgcaccagagagaagcaagcagacgagggagcggaggcgacgacgcggccgaacagcacccacgaccgagaga

SEQ ID NO: 289356 - DNA, 2089 bp, Homo sapiens
ctcagctgtgtggtagtaagctacttgccagcactgtttaaggcctgcctgacctctctctccccagctgtgtggtgcagccctgttggcagtgggcatctgggtgtcaatcgatggggcatcctttctgaagatcttcgggccactgtcgtccagtgccatgcagtttgtcaacgtgggctacttcctcatcgcagccggcgttgtggtctttgctcttggtttcctgggctgctatggtgctaagactgagagcaagtgtgccctcgtgacggtgtgtgaaacccagctccacaggctgatgaccaagagtcccctcgcccttgacaccaggccctgggattcccaaaccctgctttggacccccctaggctcaggcttctgtctcacttttccgggggggggattagggcaaggagggcatgagggactgtctctccctaaaacccagacccctgttccccactcagttcttcttcatcctcctcctcatcttcattgctgaggttgcagctgctgtggtcgccttggtgtacaccacaatggtgagacactgggatggaggaagggaagaagattgggcaaaaccctgggagtgggctgtggcctgtgaatgggcaccttctgtaccagcccctaaacactggcctgcctcacccaggctgagcacttcctgacgttgctggtagtgcctgccatcaagaaagattatggttcccaggaagacttcactcaagtgtggaacaccaccatgaaagggctcaagtgctgtggcttcaccaactatacggattttgaggactcaccctacttcaaagagaacagtgcctttcccccattctgttgcaatgacaacgtcaccaacacagccaatgaaacctgcaccaagcaaaaggctcacgaccaaaaagtagagggttgcttcaatcagcttttgtatgacatccgaactaatgcagtcaccgtgggtggtgtggcagctggaattgggggcctcgagctggctgccatgattgtgtccatgtatctgtactgcaatctacaataagtccacttctgcctctgccactactgctgccacatgggaactgtgaagaggcaccctggcaagcagcagtgattgggggaggggacaggatctaacaatgtcacttgggccagaatggacctgccctttctgctccagacttggggctagatagggaccactccttttaggcgatgcctgactttccttccattggtgggtggatgggtggggggcattccagagcctctaaggtagccagttctgttgcccattcccccagtctattaaacccttgatatgccccctaggcctagtggtgatcccagtgctctactgggggatgagagaaaggcattttatagcctgggcataagtgaaatcagcagagcctctgggtggatgtgtagaaggcacttcaaaatgcataaacctgttacaatgttaaaaaaaaaaaaaaaaaaacaaaaacaaaaaaaaaaaaaaaaaaaaaaaaaaaaaagcaaaacaaaacgactgggtgggaggcccagcgaatacagtggtacacactagtgagtggcggcggacgacaagagaaggcaacaacgtacgattggacggggacagacgaggggggccacaacacagagacagagaccaatataacaagagagcggcgtaagcagggcagctggctcggatcctacgcaggcaccttcgagggagaggagcaacgccacacgtcgacgcggaagcgaacacagacgggagcagacagcagccacaacaaccgacgggagagggagggagctcagacgaagcggcgggcgcacggaatctgaccgactgacaagagtacggcagggagaaccgaccaaccgccactcagaaggggcggacagcagcgccaagtgaacagacgagggtggcgcgcgcgagcacggcacgcccaaaaagcacgcagggccatgcgagcaccggccagcgcagcgagcgagcagcggagacgcaccagagagaagcaagcagacgagggagcggaggcgacgacgcggccgaacagcacccacgaccgagaga

SEQ ID NO: 289357 - DNA, 2224 bp, Homo sapiens
gtggagggcacgcagacattctgggaagccacttgccccacccctgggctgcttcttcttgagatcaggaggggcgttgcccagggctggtgttgccaggtggaggcctgctgaggcagtggttgtggggatcggtctccaggcagcagggggcagcagggtcaaggagaggctaactggccacgggtggggccagcaggcgggcagaaggaggctttaaagcgcctaccctgcctgcaggtgagcagtggtgtgtgagagccaggcgtccctctgcctgcccactcagtggcaacacccgggagctgttttgtcctttgtggagcctcagcagttccctctttcagaactcactgccaagagccctgaacaggagccaccatgcagtgcttcagcttcattaagaccatgatgatcctcttcaatttgctcatctttctgtgtggtgcagccctgttggcagtgggcatctgggtgtcaatcgatggggcatcctttctgaagatcttcgggccactgtcgtccagtgccatgcagtttgtcaacgtgggctacttcctcatcgcagccggcgttgtggtctttgctcttggtttcctgggctgctatggtgctaagactgagagcaagtgtgccctcgtgacgttcttcttcatcctcctcctcatcttcattgctgaggttgcagctgctgtggtcgccttggtgtacaccacaatggctgagcacttcctgacgttgctggtagtgcctgccatcaagaaagattatggttcccaggaagacttcactcaagtgtggaacaccaccatgaaaggggtaaggttggctgggggaggttttagggtggagagaaagaagcaaggccccacctccaccctcatcttgtctccagctcaagtgctgtggcttcaccaactatacggattttgaggactcaccctacttcaaagagaacagtgcctttcccccattctgttgcaatgacaacgtcaccaacacagccaatgaaacctgcaccaagcaaaaggctcacgaccaaaaagtagagggttgcttcaatcagcttttgtatgacatccgaactaatgcagtcaccgtgggtggtgtggcagctggaattgggggcctcgagctggctgccatgattgtgtccatgtatctgtactgcaatctacaataagtccacttctgcctctgccactactgctgccacatgggaactgtgaagaggcaccctggcaagcagcagtgattgggggaggggacaggatctaacaatgtcacttgggccagaatggacctgccctttctgctccagacttggggctagatagggaccactccttttaggcgatgcctgactttccttccattggtgggtggatgggtggggggcattccagagcctctaaggtagccagttctgttgcccattcccccagtctattaaacccttgatatgccccctaggcctagtggtgatcccagtgctctactgggggatgagagaaaggcattttatagcctgggcataagtgaaatcagcagagcctctgggtggatgtgtagaaggcacttcaaaatgcataaacctgttacaatgttaaaaaaaaaaaaaaaaaaacaaaaacaaaaaaaaaaaaaaaaaaaaaaaaaaaaaagcaaaacaaaacgactgggtgggaggcccagcgaatacagtggtacacactagtgagtggcggcggacgacaagagaaggcaacaacgtacgattggacggggacagacgaggggggccacaacacagagacagagaccaatataacaagagagcggcgtaagcagggcagctggctcggatcctacgcaggcaccttcgagggagaggagcaacgccacacgtcgacgcggaagcgaacacagacgggagcagacagcagccacaacaaccgacgggagagggagggagctcagacgaagcggcgggcgcacggaatctgaccgactgacaagagtacggcagggagaaccgaccaaccgccactcagaaggggcggacagcagcgccaagtgaacagacgagggtggcgcgcgcgagcacggcacgcccaaaaagcacgcagggccatgcgagcaccggccagcgcagcgagcgagcagcggagacgcaccagagagaagcaagcagacgagggagcggaggcgacgacgcggccgaacagcacccacgaccgagaga

SEQ ID NO: 289358 - DNA, 2119 bp, Homo sapiens
gtggagggcacgcagacattctgggaagccacttgccccacccctgggctgcttcttcttgagatcaggaggggcgttgcccagggctggtgttgccaggtggaggcctgctgaggcagtggttgtggggatcggtctccaggcagcagggggcagcagggtcaaggagaggctaactggccacgggtggggccagcaggcgggcagaaggaggctttaaagcgcctaccctgcctgcaggtgagcagtggtgtgtgagagccaggcgtccctctgcctgcccactcagtggcaacacccgggagctgttttgtcctttgtggagcctcagcagttccctctttcagaactcactgccaagagccctgaacaggagccaccatgcagtgcttcagcttcattaagaccatgatgatcctcttcaatttgctcatctttctgtgtggtgcagccctgttggcagtgggcatctgggtgtcaatcgatggggcatcctttctgaagatcttcgggccactgtcgtccagtgccatgcagtttgtcaacgtgggctacttcctcatcgcagccggcgttgtggtctttgctcttggtttcctgggctgctatggtgctaagactgagagcaagtgtgccctcgtgacgttcttcttcatcctcctcctcatcttcattgctgaggttgcagctgctgtggtcgccttggtgtacaccacaatggctgagcacttcctgacgttgctggtagtgcctgccatcaagaaagattatggttcccaggaagacttcactcaagtgtggaacaccaccatgaaagggggattttgaggactcaccctacttcaaagagaacagtgcctttcccccattctgttgcaatgacaacgtcaccaacacagccaatgaaacctgcaccaagcaaaaggctcacgaccaaaaagtagagggttgcttcaatcagcttttgtatgacatccgaactaatgcagtcaccgtgggtggtgtggcagctggaattgggggcctcgagctggctgccatgattgtgtccatgtatctgtactgcaatctacaataagtccacttctgcctctgccactactgctgccacatgggaactgtgaagaggcaccctggcaagcagcagtgattgggggaggggacaggatctaacaatgtcacttgggccagaatggacctgccctttctgctccagacttggggctagatagggaccactccttttaggcgatgcctgactttccttccattggtgggtggatgggtggggggcattccagagcctctaaggtagccagttctgttgcccattcccccagtctattaaacccttgatatgccccctaggcctagtggtgatcccagtgctctactgggggatgagagaaaggcattttatagcctgggcataagtgaaatcagcagagcctctgggtggatgtgtagaaggcacttcaaaatgcataaacctgttacaatgttaaaaaaaaaaaaaaaaaaacaaaaacaaaaaaaaaaaaaaaaaaaaaaaaaaaaaagcaaaacaaaacgactgggtgggaggcccagcgaatacagtggtacacactagtgagtggcggcggacgacaagagaaggcaacaacgtacgattggacggggacagacgaggggggccacaacacagagacagagaccaatataacaagagagcggcgtaagcagggcagctggctcggatcctacgcaggcaccttcgagggagaggagcaacgccacacgtcgacgcggaagcgaacacagacgggagcagacagcagccacaacaaccgacgggagagggagggagctcagacgaagcggcgggcgcacggaatctgaccgactgacaagagtacggcagggagaaccgaccaaccgccactcagaaggggcggacagcagcgccaagtgaacagacgagggtggcgcgcgcgagcacggcacgcccaaaaagcacgcagggccatgcgagcaccggccagcgcagcgagcgagcagcggagacgcaccagagagaagcaagcagacgagggagcggaggcgacgacgcggccgaacagcacccacgaccgagaga

SEQ ID NO: 289359 - DNA, 2340 bp, Homo sapiens
gtggagggcacgcagacattctgggaagccacttgccccacccctgggctgcttcttcttgagatcaggaggggcgttgcccagggctggtgttgccaggtggaggcctgctgaggcagtggttgtggggatcggtctccaggcagcagggggcagcagggtcaaggagaggctaactggccacgggtggggccagcaggcgggcagaaggaggctttaaagcgcctaccctgcctgcaggtgagcagtggtgtgtgagagccaggcgtccctctgcctgcccactcagtggcaacacccgggagctgttttgtcctttgtggagcctcagcagttccctctttcagaactcactgccaagagccctgaacaggagccaccatgcagtgcttcagcttcattaagaccatgatgatcctcttcaatttgctcatctttctgtgtggtgcagccctgttggcagtgggcatctgggtgtcaatcgatggggcatcctttctgaagatcttcgggccactgtcgtccagtgccatgcagtttgtcaacgtgggctacttcctcatcgcagccggcgttgtggtctttgctcttggtttcctgggctgctatggtgctaagactgagagcaagtgtgccctcgtgacgttcttcttcatcctcctcctcatcttcattgctgaggttgcagctgctgtggtcgccttggtgtacaccacaatggtgagacactgggatggaggaagggaagaagattgggcaaaaccctgggagtgggctgtggcctgtgaatgggcaccttctgtaccagcccctaaacactggcctgcctcacccaggctgagcacttcctgacgttgctggtagtgcctgccatcaagaaagattatggttcccaggaagacttcactcaagtgtggaacaccaccatgaaaggggtaaggttggctgggggaggttttagggtggagagaaagaagcaaggccccacctccaccctcatcttgtctccagctcaagtgctgtggcttcaccaactatacggattttgaggactcaccctacttcaaagagaacagtgcctttcccccattctgttgcaatgacaacgtcaccaacacagccaatgaaacctgcaccaagcaaaaggctcacgaccaaaaagtagagggttgcttcaatcagcttttgtatgacatccgaactaatgcagtcaccgtgggtggtgtggcagctggaattgggggcctcgagctggctgccatgattgtgtccatgtatctgtactgcaatctacaataagtccacttctgcctctgccactactgctgccacatgggaactgtgaagaggcaccctggcaagcagcagtgattgggggaggggacaggatctaacaatgtcacttgggccagaatggacctgccctttctgctccagacttggggctagatagggaccactccttttaggcgatgcctgactttccttccattggtgggtggatgggtggggggcattccagagcctctaaggtagccagttctgttgcccattcccccagtctattaaacccttgatatgccccctaggcctagtggtgatcccagtgctctactgggggatgagagaaaggcattttatagcctgggcataagtgaaatcagcagagcctctgggtggatgtgtagaaggcacttcaaaatgcataaacctgttacaatgttaaaaaaaaaaaaaaaaaaacaaaaacaaaaaaaaaaaaaaaaaaaaaaaaaaaaaagcaaaacaaaacgactgggtgggaggcccagcgaatacagtggtacacactagtgagtggcggcggacgacaagagaaggcaacaacgtacgattggacggggacagacgaggggggccacaacacagagacagagaccaatataacaagagagcggcgtaagcagggcagctggctcggatcctacgcaggcaccttcgagggagaggagcaacgccacacgtcgacgcggaagcgaacacagacgggagcagacagcagccacaacaaccgacgggagagggagggagctcagacgaagcggcgggcgcacggaatctgaccgactgacaagagtacggcagggagaaccgaccaaccgccactcagaaggggcggacagcagcgccaagtgaacagacgagggtggcgcgcgcgagcacggcacgcccaaaaagcacgcagggccatgcgagcaccggccagcgcagcgagcgagcagcggagacgcaccagagagaagcaagcagacgagggagcggaggcgacgacgcggccgaacagcacccacgaccgagaga

SEQ ID NO: 289360 - DNA, 1065 bp, Homo sapiens
caggcgtacggtctgagacttatgatcctgcctgcaggtgagcagtggtgtgtgagagccaggcgtccctctgcctgcccactcagtggcaacacccgggagctgttttgtcctttgtggagcctcagcagttccctctttcagaactcactgccaagagccctgaacaggagccaccatgcagtgcttcagcttcattaagaccatgatgatcctcttcaatttgctcatctttctgtgtggtgcagccctgttggcagtgggcatctgggtgtcaatcgatggggcatcctttctgaagatcttcgggccactgtcgtccagtgccatgcagtttgtcaacgtgggctacttcctcatcgcagccggcgttgtggtctttgctcttggtttcctgggctgctatggtgctaagactgagagcaagtgtgccctcgtgacgttcttcttcatcctcctcctcatcttcattgctgaggttgcagctgctgtggtcgccttggtgtacaccacaatggctgagcacttcctgacgttgctggtagtgcctgccatcaagaaagattatggttcccaggaagacttcactcaagtgtggaacaccaccatgaaagggctcaagtgctgtggcttcaccaactatacggattttgaggactcaccctacttcaaagagaacagtgcctttcccccattctgttgcaatgacaacgtcaccaacacagccaatgaaacctgcaccaagcaaaaggctcacgaccaaaaagtagagggttgcttcaatcagcttttgtatgacatccgaactaatgcagtcaccgtgggtggtgtggcagctggaattgggggcctcgagctggctgccatgattgtgtccatgtatctgttgcccattcccccagtctattaaacccttgatatgccccctaggcctagtggtgatcccagtgctctactgggggatgagagaaaggcattttatagcctgggcataagtgaaatcagcagagcctctgggtggatgtgtagaaggcacttcaaaatgcataaacctgttacaatgtt

SEQ ID NO: 289361 - DNA, 973 bp, Homo sapiens
caggcgtacggtctgagacttatgatcctgcctgcaggtgagcagtggtgtgtgagagccaggcgtccctctgcctgcccactcagtggcaacacccgggagctgttttgtcctttgtggagcctcagcagttccctctttcagaactcactgccaagagccctgaacaggagccaccatgcagtgcttcagcttcattaagaccatgatgatcctcttcaatttgctcatctttctgtgtggtgcagccctgttggcagtgggcatctgggtgtcaatcgatggggcatcctttctgaagatcttcgggccactgtcgtccagtgccatgcagtttgtcaacgtgggctacttcctcatcgcagccggcgttgtggtctttgctcttggtttcctgggctgctatggtgctaagactgagagcaagtgtgccctcgtgacgttcttcttcatcctcctcctcatcttcattgctgaggttgcagctgctgtggtcgccttggtgtacaccacaatggctgagcacttcctgacgttgctggtagtgcctgccatcaagaaagattatggttcccaggaagacttcactcaagtgtggaacaccaccatgaaagggctcaagtgctgtggcttcaccaactatacggattttgaggactcaccctacttcaaagagaacagtgcctttcccccattctgttgcaatgacaacgtcaccaacacagccaatgaaacctgcaccaagcaaaaggctcacgaccaaaaagtagagggttgcttcaatcagcttttgtatgacatccgaactaatgcagtcaccgtgggtggtgtggcagctggaattgggggcctcgagctggctgccatgattgtgtccatgtatctgtactgcaatctacaataatgaaatcagcagagcctctgggtggatgtgtagaaggcacttcaaaatgcataaacctgttacaatgtt

SEQ ID NO: 289362 - DNA, 2156 bp, Homo sapiens
  misc_feature (10)..(10): n is a, c, g, or t
  misc_feature (14)..(14): n is a, c, g, or t
  misc_feature (16)..(16): n is a, c, g, or t
aagtaaggcngggntnatcggccgaggggctgattcatccactgaagccctgggccgggaggctttcctctaagatctgtgggaactgcgcagggccctcctcaatctaggcctcagaattccccctgaggtttggagttgagctagacagcctttaagagaagctctggctgtattcccactggtacctcactttcctcttgtgaggcaaggaggtcttgtctacatgaggggcgggcctgaagttggattctggaggggagccaaatggggcctcagctgtgtggtgcagccctgttggcagtgggcatctgggtgtcaatcgatggggcatcctttctgaagatcttcgggccactgtcgtccagtgccatgcagtttgtcaacgtgggctacttcctcatcgcagccggcgttgtggtctttgctcttggtttcctgggctgctatggtgctaagactgagagcaagtgtgccctcgtgacggtgtgtgaaacccagctccacaggctgatgaccaagagtcccctcgcccttgacaccaggccctgggattcccaaaccctgctttggacccccctaggctcaggcttctgtctcacttttccgggggggggattagggcaaggagggcatgagggactgtctctccctaaaacccagacccctgttccccactcagttcttcttcatcctcctcctcatcttcattgctgaggttgcagctgctgtggtcgccttggtgtacaccacaatggctgagcacttcctgacgttgctggtagtgcctgccatcaagaaagattatggttcccaggaagacttcactcaagtgtggaacaccaccatgaaagggggattttgaggactcaccctacttcaaagagaacagtgcctttcccccattctgttgcaatgacaacgtcaccaacacagccaatgaaacctgcaccaagcaaaaggctcacgaccaaaaagtagagggttgcttcaatcagcttttgtatgacatccgaactaatgcagtcaccgtgggtggtgtggcagctggaattgggggcctcgagctggctgccatgattgtgtccatgtatctgtactgcaatctacaataagtccacttctgcctctgccactactgctgccacatgggaactgtgaagaggcaccctggcaagcagcagtgattgggggaggggacaggatctaacaatgtcacttgggccagaatggacctgccctttctgctccagacttggggctagatagggaccactccttttaggcgatgcctgactttccttccattggtgggtggatgggtggggggcattccagagcctctaaggtagccagttctgttgcccattcccccagtctattaaacccttgatatgccccctaggcctagtggtgatcccagtgctctactgggggatgagagaaaggcattttatagcctgggcataagtgaaatcagcagagcctctgggtggatgtgtagaaggcacttcaaaatgcataaacctgttacaatgttaaaaaaaaaaaaaaaaaaacaaaaacaaaaaaaaaaaaaaaaaaaaaaaaaaaaaagcaaaacaaaacgactgggtgggaggcccagcgaatacagtggtacacactagtgagtggcggcggacgacaagagaaggcaacaacgtacgattggacggggacagacgaggggggccacaacacagagacagagaccaatataacaagagagcggcgtaagcagggcagctggctcggatcctacgcaggcaccttcgagggagaggagcaacgccacacgtcgacgcggaagcgaacacagacgggagcagacagcagccacaacaaccgacgggagagggagggagctcagacgaagcggcgggcgcacggaatctgaccgactgacaagagtacggcagggagaaccgaccaaccgccactcagaaggggcggacagcagcgccaagtgaacagacgagggtggcgcgcgcgagcacggcacgcccaaaaagcacgcagggccatgcgagcaccggccagcgcagcgagcgagcagcggagacgcaccagagagaagcaagcagacgagggagcggaggcgacgacgcggccgaacagcacccacgaccgagaga

SEQ ID NO: 289363 - DNA, 1375 bp, Homo sapiens
cggccgcctactactactaaattcgcggtcgagtcgactgagagggctcaagtgctgtggcttcaccaactatacggattttgaggactcaccctacttcaaagagaacagtgcctttcccccattctgttgcaatgacaacgtcaccaacacagccaatgaaacctgcaccaagcaaaaggctcacgaccaaaaagtagagggttgcttcaatcagcttttgtatgacatccgaactaatgcagtcaccgtgggtggtgtggcagctggaattgggggcctcgagctggctgccatgattgtgtccatgtatctgtactgcaatctacaataagtccacttctgcctctgccactactgctgccacatgggaactgtgaagaggcaccctggcaagcagcagtgattgggggaggggacaggatctaacaatgtcacttgggccagaatggacctgccctttctgctccagacttggggctagatagggaccactccttttaggcgatgcctgactttccttccattggtgggtggatgggtggggggcattccagagcctctaaggtagccagttctgttgcccattcccccagtctattaaacccttgatatgccccctaggcctagtggtgatcccagtgctctactgggggatgagagaaaggcattttatagcctgggcataagtgaaatcagcagagcctctgggtggatgtgtagaaggcacttcaaaatgcataaacctgttacaatgttaaaaaaaaaaaaaaaaaaacaaaaacaaaaaaaaaaaaaaaaaaaaaaaaaaaaaagcaaaacaaaacgactgggtgggaggcccagcgaatacagtggtacacactagtgagtggcggcggacgacaagagaaggcaacaacgtacgattggacggggacagacgaggggggccacaacacagagacagagaccaatataacaagagagcggcgtaagcagggcagctggctcggatcctacgcaggcaccttcgagggagaggagcaacgccacacgtcgacgcggaagcgaacacagacgggagcagacagcagccacaacaaccgacgggagagggagggagctcagacgaagcggcgggcgcacggaatctgaccgactgacaagagtacggcagggagaaccgaccaaccgccactcagaaggggcggacagcagcgccaagtgaacagacgagggtggcgcgcgcgagcacggcacgcccaaaaagcacgcagggccatgcgagcaccggccagcgcagcgagcgagcagcggagacgcaccagagagaagcaagcagacgagggagcggaggcgacgacgcggccgaacagcacccacgaccgagaga

SEQ ID NO: 289364 - DNA, 1148 bp, Homo sapiens
caggcgtacggtctgagacttatgatcctgcctgcaggtgagcagtggtgtgtgagagccaggcgtccctctgcctgcccactcagtggcaacacccgggagctgttttgtcctttgtggagcctcagcagttccctctttcagaactcactgccaagagccctgaacaggagccaccatgcagtgcttcagcttcattaagaccatgatgatcctcttcaatttgctcatctttctgtgtggtgcagccctgttggcagtgggcatctgggtgtcaatcgatggggcatcctttctgaagatcttcgggccactgtcgtccagtgccatgcagtttgtcaacgtgggctacttcctcatcgcagccggcgttgtggtctttgctcttggtttcctgggctgctatggtgctaagactgagagcaagtgtgccctcgtgacgttcttcttcatcctcctcctcatcttcattgctgaggttgcagctgctgtggtcgccttggtgtacaccacaatggctgagcacttcctgacgttgctggtagtgcctgccatcaagaaagattatggttcccaggaagacttcactcaagtgtggaacaccaccatgaaagggctcaagtgctgtggcttcaccaactatacggattttgaggactcaccctacttcaaagagaacagtgcctttcccccattctgttgcaatgacaacgtcaccaacacagccaatgaaacctgcaccaagcaaaaggctcacgaccaaaaagtagagggttgcttcaatcagcttttgtatgacatccgaactaatgcagtcaccgtgggtggtgtggcagctggaattgggggcctcgagttcttttccaactcagctcgaaggccacctcttccagaaagcctctatagcactcccatcagaagagatcacgtctttctacaaccctcccctccatgactttcatggctcttagagcctctgctgtctctgcttcatcctggaagtatcacaatcctccaccacactgaacccctcaaggtagggccaggtctgattactttcaggtccccagtgcccagcacaaggctgaggccaaagaaaggaccaggggatggttataaaataaatcaatgaattgactgcctactat

SEQ ID NO: 289365 - DNA, 1013 bp, Homo sapiens
gtggagggcacgcagacattctgggaagccacttgccccacccctgggctgcttcttcttgagatcaggaggggcgttgcccagggctggtgttgccaggtggaggcctgctgaggcagtggttgtggggatcggtctccaggcagcagggggcagcagggtcaaggagaggctaactggccacgggtggggccagcaggcgggcagaaggaggctttaaagcgcctaccctgcctgcaggtgagcagtggtgtgtgagagccaggcgtccctctgcctgcccactcagtggcaacacccgggagctgttttgtcctttgtggagcctcagcagttccctctttcagaactcactgccaagagccctgaacaggagccaccatgcagtgcttcagcttcattaagaccatgatgatcctcttcaatttgctcatctttctgtgtggtgcagccctgttggcagtgggcatctgggtgtcaatcgatggggcatcctttctgaagatcttcgggccactgtcgtccagtgccatgcagtttgtcaacgtgggctacttcctcatcgcagccggcgttgtggtctttgctcttggtttcctgggctgctatggtgctaagactgagagcaagtgtgccctcgtgacgttcttcttcatcctcctcctcatcttcattgctgaggttgcagctgctgtggtcgccttggtgtacaccacaatggctgagcacttcctgacgttgctggtagtgcctgccatcaagaaagattatggttcccaggaagacttcactcaagtgtggaacaccaccatgaaagggctcaagtgctgtggcttcaccaactatacggattttgaggactcaccctacttcaaagagaacagtgcctttcccccattctgttgcaatgacaacgtcaccaacacagccatgtactcgcaagaggttcttacaagtcacgaccttgtaagtacgagggtctgcttcaaatcagctgatgtatgccaagctgt

SEQ ID NO: 289366 - DNA, 1200 bp, Homo sapiens
  misc_feature (10)..(10): n is a, c, g, or t
  misc_feature (14)..(14): n is a, c, g, or t
  misc_feature (16)..(16): n is a, c, g, or t
  misc_feature (1015)..(1015): n is a, c, g, or t
  misc_feature (1025)..(1026): n is a, c, g, or t
  misc_feature (1041)..(1041): n is a, c, g, or t
aagtaaggcngggntnatcggccgaggggctgattcatccactgaagccctgggccgggaggctttcctctaagatctgtgggaactgcgcagggccctcctcaatctaggcctcagaattccccctgaggtttggagttgagctagacagcctttaagagaagctctggctgtattcccactggtacctcactttcctcttgtgaggcaaggaggtcttgtctacatgaggggcgggcctgaagttggattctggaggggagccaaatggggcctcagctgtgtggtgcagccctgttggcagtgggcatctgggtgtcaatcgatggggcatcctttctgaagatcttcgggccactgtcgtccagtgccatgcagtttgtcaacgtgggctacttcctcatcgcagccggcgttgtggtctttgctcttggtttcctgggctgctatggtgctaagactgagagcaagtgtgccctcgtgacggtgtgtgaaacccagctccacaggctgatgaccaagagtcccctcgcccttgacaccaggccctgggattcccaaaccctgctttggacccccctaggctcaggcttctgtctcacttttccgggggggggattagggcaaggagggcatgagggactgtctctccctaaaacccagacccctgttccccactcagttcttcttcatcctcctcctcatcttcattgctgaggttgcagctgctgtggtcgccttggtgtacaccacaatggctgagcacttcctgacgttgctggtagtgcctgccatcaagaaagattatggttcccaggaagacttcactcaagtgtggaacaccaccatgaaagggctcaagtgctgtggcttcaccaactatacggattttgaggactcaccctacttcaaagagaacagtgcctttcccccattctgttgcaatgacaacgtcaccaacacagccaatgaaacctgcaccaagcaaaaggctcacgaccaaaaagtagaggtngctcaatcannttgttgacatcgaantatgcatcccgggtggggggcagtggaatggggcccggctgggccagatggtccgtttctgtcggactcaaaagtcctttgcttgaatgggcaggaatggaaggccgccagagtggggggcgaaagtggcaagacttcaaggaaagaccaacgccgggg

SEQ ID NO: 289367 - DNA, 830 bp, Homo sapiens
ccgcgagccccctgcgcgccgctttggggctgcgctcactcgtgtgcgcgctcgtccgcccgccagtcctctcaacgcgcgcttggccgcccgacgacgcgggagccgcacgcgccggacgaggctcgctgcgctccctgttgcccagcgcgggcccgttgaggcggagccctcagttcccggccaggacacggtctgggccgccgaatctccggccgaagagcggcggcggcagcggcgggaaaaaaatgaagaatgaaattgctgccgttgtcttctttttcacaaggctagttcgaaaacatgataagttgaaaaaagaggcagttgagaggtttgctgagaaattgaccctaatacttcaagaaaaatataaaaatcactggtatccagaaaaaccatcgaaaggacaggcctacaggtaaaggattagattggattaagcagaggctgatcaacccctgaggtgggttcaaggccggatgattgaagggtgtgcagaccatgcctacaggtgtttcatctgcaaaatatagaactctggggtgtttgtatattttctccttactcattttaaaacaagtatttgttggcggagtggtggagtcccactgcctggacacaggaggccaatgctatggggtcaaaggagttagtcttttgtggttatagcctggctcctaacagtgcatttctgtttatcacaaatacttagggattttcacaattctagaggacccctaataacacattaatgggcatggtaggagttgaaagaagtgaatcttgcatctaaaagtaaattacatgttatatgttctttgaaaaaa

SEQ ID NO: 289368 - DNA, 1579 bp, Homo sapiens
ccgcgagccccctgcgcgccgctttggggctgcgctcactcgtgtgcgcgctcgtccgcccgccagtcctctcaacgcgcgcttggccgcccgacgacgcgggagccgcacgcgccggacgaggctcgctgcgctccctgttgcccagcgcgggcccgttgaggcggagccctcagttcccggccaggacacggtctgggccgccgaatctccggccgaagagcggcggcggcagcggcgggaaaaaaatgaagaatgaaattgctgccgttgtcttctttttcacaaggctagttcgaaaacatgataagttgaaaaaagaggcagttgagaggtttgctgagaaattgaccctaatacttcaagaaaaatataaaaatcactggtatccagaaaaaccatcgaaaggacaggcctacagatgtattcgtgtcaataaatttcagagagttgatcctgatgtcctgaaagcctgtgaaaacagctgcatcttgtatagtgacctgggcttgccaaaggagctcactctctgggtggacccatgtgaggtgtgctgtcgtagagatggggtttcaccatgttggccagactgctctcaaactcctgacctcgtgatccgcccgccttggcctcccaaagcgctggattacaggcgtgagccactgcgcccggcctcctcctttttgattatgtatggagagaaaaacaatgcattcattgttgccagctttgaaaataaagatgagaacaaggatgagatctccaggaaagttaccagggcccttgataaggttacctctgattatcattcaggatcctcttcttcagatgaagaaacaagtaaggaaatggaagtgaaacccagttcggtgactgcagccgcaagtcctgtgtaccagatttcagaacttatatttccacctcttccaatgtggcaccctttgcccagaaaaaagccaggaatgtatcgagggaatggccatcagaatcactatcctcctcctgttccatttggttatccaaatcagggaagaaaaaataaaccatatcgcccaattccagtgacatgggtacctcctcctggaatgcattgtgaccggaatcactggattaatcctcacatgttagcacctcactaacttcgtttttgattgtgttggtgtcatgttgagaaaaaggtagaataaaccttactacacattaaaagttaaaagttcttactaatagtagtgaagttagatgggccaaaccatcaaacttatttttatagaagttattgagaataatctttcttaaaaaatatatgcactttagatattgatatagtttgagaaattttattaaagttagtcaagtgcctaagtttttaatattggacttgagtatttatatattgtgcatcaactctgttggatacgagaacactgtagaagtggacgatttgttctagcacctttgagaatttactttatggagcgtatgtaagttatttatatacaaggaaatctattttatgtcgttgtttaagagaattgtgtgaaatcatgtagttgcaaataaaaaatagtttgaggcatga

SEQ ID NO: 289369 - DNA, 2384 bp, Homo sapiens
gtgaatggcctcatttatgatcagaggaatgcagattaaatccatatgaaacactagttcttccagaactgcacaatttaaaagcctgacagcatgaaatgttagcaaggatgtgaagcagctagattcataaacttgctagtcatgtaaaatagtaccactactttggaaaactggaactttttaacgttaaatgtgtaactcttctattactcagcagttccactcctaagtattaaatatttaccaaaagaaacgaaaatatgcctataaagccttctattagaattaactgtgctgttattcattgcagcattgttttgttcgttgtgtatccattgtttttttaatagtaagagactgaaaacagcctcaatgtcccattactaggagaccatttaatttatagtcattgctatactatctagctgtggaaaaatgagaaggatctttatgtattgatatgtttctgaaatgtattattatgaaatgtaaaaagcaggatacaatccagtatacatatatatttttaaagtgtgtatagatgtggatagaatatctctaaaggtatatttaaaaaaatgtttggtgtcagttgcccttgagaagggttaagataaagaagataaagggtgagataaaaaaagagggactttccacagtttacccttttgtactttttgaattttctatcatgaatgcaatgctatacacaatataatttttttaaaaaaatcctatacttagaaatgcagatttgagatcagcaaaatcagaaatttaagaagatgtggcattctaagcagagaggtctaaaactgctgataagaacactttgaataatgtgaacctgacgtgcccacctgatttatgggataatctaaaactattattcccaaatactaaactggctacatcagaatcacctggggagctttgtcaaaatacctggcctctagttctgagattttattattgttcattagaccagtgctagggcatgaatgttttgtgtttatctttttttttttttaacttttattttaggtttagggatacacatgaaggtttgttccataggtaaacatgtgtcacagggatttgttgtacatattatttcatcacccaggtgtgaagcccagtactcaatagttatcttttctgctccttttccttctcccaccctcccctctcaaatagactccaatgtctattgtttccttctttgtgttcataagttcttatcattacctcccacttataagtgagaacatgcggtagttgattttctgtttctgcattagtttgctaaggataatggcctccagctccaatgttttgtatttaaaagcctccaagtgactcctggcttagccagctgtggaaaccactggactaaaacaagcatgtccttacaagcttccattcgttccatgttttggtcttttttggttgaagttgtttaggaagtactgtgtttgagtttattcatttctttatgcattcagaaaacattggtcacctgttatacattatacgcctattacacatgaggtttttaatgtatttagacctgacaataggagtgtcacttagatgtgatctcagtgttgtgggtaactttgtttgtctttaatgagaaatctggaacatagatgatgattttttcctttgaattaacttaatgtgttctcttccctacagatttcagaacttatatttccacctcttccaatgtggcaccctttgcccagaaaaaagccaggaatgtatcgagggaatggccatcagaatcactatcctcctcctgttccatttggttatccaaatcagggaagaaaaaataaaccatatcgcccaattccagtgacatgggtacctcctcctggaatgcattgtgaccggaatcactggattaatcctcacatgttagcacctcactaacttcgtttttgattgtgttggtgtcatgttgagaaaaaggtagaataaaccttactacacattaaaagttaaaagttcttactaatagtagtgaagttagatgggccaaaccatcaaacttatttttatagaagttattgagaataatctttcttaaaaaatatatgcactttagatattgatatagtttgagaaattttattaaagttagtcaagtgcctaagtttttaatattggacttgagtatttatatattgtgcatcaactctgttggatacgagaacactgtagaagtggacgatttgttctagcacctttgagaatttactttatggagcgtatgtaagttatttatatacaaggaaatctattttatgtcgttgtttaagagaattgtgtgaaatcatgtagttgcaaataaaaaatagtttgaggcatga

SEQ ID NO: 289370 - DNA, 4778 bp, Homo sapiens
  misc_feature (4777)..(4778): n is a, c, g, or t
gtgaatggcctcatttatgatcagaggaatgcagattaaatccatatgaaacactagttcttccagaactgcacaatttaaaagcctgacagcatgaaatgttagcaaggatgtgaagcagctagattcataaacttgctagtcatgtaaaatagtaccactactttggaaaactggaactttttaacgttaaatgtgtaactcttctattactcagcagttccactcctaagtattaaatatttaccaaaagaaacgaaaatatgcctataaagccttctattagaattaactgtgctgttattcattgcagcattgttttgttcgttgtgtatccattgtttttttaatagtaagagactgaaaacagcctcaatgtcccattactaggagaccatttaatttatagtcattgctatactatctagctgtggaaaaatgagaaggatctttatgtattgatatgtttctgaaatgtattattatgaaatgtaaaaagcaggatacaatccagtatacatatatatttttaaagtgtgtatagatgtggatagaatatctctaaaggtatatttaaaaaaatgtttggtgtcagttgcccttgagaagggttaagataaagaagataaagggtgagataaaaaaagagggactttccacagtttacccttttgtactttttgaattttctatcatgaatgcaatgctatacacaatataatttttttaaaaaaatcctatacttagaaatgcagatttgagatcagcaaaatcagaaatttaagaagatgtggcattctaagcagagaggtctaaaactgctgataagaacactttgaataatgtgaacctgacgtgcccacctgatttatgggataatctaaaactattattcccaaatactaaactggctacatcagaatcacctggggagctttgtcaaaatacctggcctctagttctgagattttattattgttcattagaccagtgctagggcatgaatgttttgtgtttatctttttttttttttaacttttattttaggtttagggatacacatgaaggtttgttccataggtaaacatgtgtcacagggatttgttgtacatattatttcatcacccaggtgtgaagcccagtactcaatagttatcttttctgctccttttccttctcccaccctcccctctcaaatagactccaatgtctattgtttccttctttgtgttcataagttcttatcattacctcccacttataagtgagaacatgcggtagttgattttctgtttctgcattagtttgctaaggataatggcctccagctccaatgttttgtatttaaaagcctccaagtgactcctggcttagccagctgtggaaaccactggactaaaacaagcatgtccttacaagcttccattcgttccatgttttggtcttttttggttgaagttgtttaggaagtactgtgtttgagtttattcatttctttatgcattcagaaaacattggtcacctgttatacattatacgcctattacacatgaggtttttaatgtatttagacctgacaataggagtgtcacttagatgtgatctcagtgttgtgggtaactttgtttgtctttaatgagaaatctggaacatagatgatgattttttcctttgaattaacttaatgtgttctcttccctacagatttcagaacttatatttccacctcttccaatgtggcaccctttgcccagaaaaaagccaggaatgtatcgagggaatggccatcagaatcactatcctcctcctgttccatttggttatccaaatcagggaagaaaaaataaaccatatcgcccaattccagtgacatgggtacctcctcctggaatgcattgtgaccggaatcactggattaatcctcacatgttagcacctcactaacttcgtttttgattgtgttggtgtcatgttgagaaaaaggtagaataaaccttactacacattaaaagttaaaagttcttactaatagtagtgaagttagatgggccaaaccatcaaacttatttttatagaagttattgagaataatctttcttaaaaaatatatgcactttagatattgatatagtttgagaaattttattaaagttagtcaagtgcctaagtttttaatattggacttgagtatttatatattgtgcatcaactctgttggatacgagaacactgtagaagtggacgatttgttctagcacctttgagaatttactttatggagcgtatgtaagttatttatatacaaggaaatctattttatgtcgttgtttaagagaattgtgtgaaatcatgtagttgcaaataaaaaatagtttgaggcatgacaacgcgtgtttctgttgtgtgcataaaaggggaaaagaacgggtatttcccttcaatgtatttaactaaatagcaaaaacattaaacagaacgtaagaattttaaaatttcctttgaaaaatcaactattaaccatacttttcctaaaagaccacatatcagaatatgcatatgaaaagttaaaaatttgttagtggtagttattgaaaatataataaaacatcttttaactatcagtgtcactatacatagggttttttaacaaagaatttggctcgtactaattttgacatgacatctgacttacatgtctaatgccattgcataaagtagatgtgttcttacagctgctctaatctctgtgccttgtgctttttttaaaaaacatttaagtctttactagaggcctaaaataaagtcaaataatacaatacttcagattcttcagtagtccatatttatacaactgtaattccatcagtcttgtaagggtacttgaactacaaaaagaaaaaaagagatatctctataagagttttgatttttctccaaaggtaaatttttaaaaactaagatcagcaatactttttccatcaccttcatctttaaatttgcagtcttaaattatttgacttaccagaaaaatcacaacttgctaataaatcattgaatggccatggctattccacaaattattgttatttttaggaagataaattctgttgaaatacaaaactgcacaaatcataaaggtatagctcaatagtatgaaaatgtcagtttttaaagtttgcaacttcagaaaactcatttttaaaccttagagacttttctagctttaatattgtactctttaagccatacacaattttaacatctctctaaaccatatctactcttttcctgaaatctagtgactgcctattcaaacatgagcatgtttgtttattagtgtcacaagggagatgcgttttatcaattttttttaaccaaagttattgaaagaaaaaaaggaaaaaaaaattactttcagagtcatcacactgcttccttatgggtccttgagagttttgtggtgataatgacagatttgtaggtgattggcgtaaagttggaaagtttcaagtatttttatcatgaagttagcagacagaatttatttattgctttgcttatgagcaaattggtcctcatctgtaggtttttcatctgtatttaaccatgtatggaaaatactcaaaaattaaaaaaatacaaattttaaaatataactacattgcattaggtattatctagatttaaaggatgtacataggttatatgcaaatacgaagccattttatataaggcacttgagcatctgaggattttggtatccaggagggtcctggaacaaatcctccaaggatactgagggatgactatataggtttgttgggaaaatcagaagcataatagtgtaaagaaggaagtgttatttttggcacatacctagtagccagaacattccacgttactacaaaatctccttaattagttctgacgattaaatgacagggcctcttggggaaaccactagttttgaattcaactgcatacaggtagatgttattactcatagaagattctgccagtgtttcgactacccatcctccaccttgtcctgaaacttatttagagcaaaagaaagctctcataaatatggcttttccaatctattcctaatgaaataaaactgtcactcagcaactgggtcttaagttctagcaagcatggggtacaaaagtttgccaaacccttttttagtagtaattatgactctaggtgctttgttctcttaagtttgtctcccttagacaactccaaggtggctcttaaaacatgactacataatttcagcttgaaagccttatcgggctatttcaagcaggagtggtttatcactgaacaataatttgtttaaattctccattttatttttgtatttgtaggcataactgcaaagctctaaattttataggttaaacttggatatttgaaaaaaaaagttttagtaagttctatcacattaatactaaagcagtgcttatttctggtttattagtataatatttatctcaaagtatttaactttttagtaaacttctgtggttccaagttaagataataaagcatttatgttgacttctcagctaacagaggtatgtgttaatttcttattttatgattaggaagagggaaaaatacaaacacctaccatgtacagtttattgtgtagccattctgtccattttacagataatagtaaataatttttttaatttttattactacatggcaacaacttatttaatcatcacagcctcagggggtatgtaccattatcatcccnn

SEQ ID NO: 289371 - DNA, 1447 bp, Homo sapiens
ccgcgagccccctgcgcgccgctttggggctgcgctcactcgtgtgcgcgctcgtccgcccgccagtcctctcaacgcgcgcttggccgcccgacgacgcgggagccgcacgcgccggacgaggctcgctgcgctccctgttgcccagcgcgggcccgttgaggcggagccctcagttcccggccaggacacggtctgggccgccgaatctccggccgaagagcggcggcggcagcggcgggaaaaaaatgaagaatgaaattgctgccgttgtcttctttttcacaaggctagttcgaaaacatgataagttgaaaaaagaggcagttgagaggtttgctgagaaattgaccctaatacttcaagaaaaatataaaaatcactggtatccagaaaaaccatcgaaaggacaggcctacagatgtattcgtgtcaataaatttcagagagttgatcctgatgtcctgaaagcctgtgaaaacagctgcatcttgtatagtgacctgggcttgccaaaggagctcactctctgggtggacccatgtgaggtgtgctgtcggtatggagagaaaaacaatgcattcattgttgccagctttgaaaataaagatgagaacaaggatgagatctccaggaaagttaccagggcccttgataaggttacctctgattatcattcaggatcctcttcttcagatgaagaaacaagtaaggaaatggaagtgaaacccagttcggtgactgcagccgcaagtcctgtgtaccagatttcagaacttatatttccacctcttccaatgtggcaccctttgcccagaaaaaagccaggaatgtatcgagggaatggccatcagaatcactatcctcctcctgttccatttggttatccaaatcagggaagaaaaaataaaccatatcgcccaattccagtgacatgggtacctcctcctggaatgcattgtgaccggaatcactggattaatcctcacatgttagcacctcactaacttcgtttttgattgtgttggtgtcatgttgagaaaaaggtagaataaaccttactacacattaaaagttaaaagttcttactaatagtagtgaagttagatgggccaaaccatcaaacttatttttatagaagttattgagaataatctttcttaaaaaatatatgcactttagatattgatatagtttgagaaattttattaaagttagtcaagtgcctaagtttttaatattggacttgagtatttatatattgtgcatcaactctgttggatacgagaacactgtagaagtggacgatttgttctagcacctttgagaatttactttatggagcgtatgtaagttatttatatacaaggaaatctattttatgtcgttgtttaagagaattgtgtgaaatcatgtagttgcaaataaaaaatagtttgaggcatga

SEQ ID NO: 289372 - DNA, 3841 bp, Homo sapiens
  misc_feature (3840)..(3841): n is a, c, g, or t
ccgcgagccccctgcgcgccgctttggggctgcgctcactcgtgtgcgcgctcgtccgcccgccagtcctctcaacgcgcgcttggccgcccgacgacgcgggagccgcacgcgccggacgaggctcgctgcgctccctgttgcccagcgcgggcccgttgaggcggagccctcagttcccggccaggacacggtctgggccgccgaatctccggccgaagagcggcggcggcagcggcgggaaaaaaatgaagaatgaaattgctgccgttgtcttctttttcacaaggctagttcgaaaacatgataagttgaaaaaagaggcagttgagaggtttgctgagaaattgaccctaatacttcaagaaaaatataaaaatcactggtatccagaaaaaccatcgaaaggacaggcctacagatgtattcgtgtcaataaatttcagagagttgatcctgatgtcctgaaagcctgtgaaaacagctgcatcttgtatagtgacctgggcttgccaaaggagctcactctctgggtggacccatgtgaggtgtgctgtcggtatggagagaaaaacaatgcattcattgttgccagctttgaaaataaagatgagaacaaggatgagatctccaggaaagttaccagggcccttgataaggttacctctgattatcattcaggatcctcttcttcagatgaagaaacaagtaaggaaatggaagtgaaacccagttcggtgactgcagccgcaagtcctgtgtaccagatttcagaacttatatttccacctcttccaatgtggcaccctttgcccagaaaaaagccaggaatgtatcgagggaatggccatcagaatcactatcctcctcctgttccatttggttatccaaatcagggaagaaaaaataaaccatatcgcccaattccagtgacatgggtacctcctcctggaatgcattgtgaccggaatcactggattaatcctcacatgttagcacctcactaacttcgtttttgattgtgttggtgtcatgttgagaaaaaggtagaataaaccttactacacattaaaagttaaaagttcttactaatagtagtgaagttagatgggccaaaccatcaaacttatttttatagaagttattgagaataatctttcttaaaaaatatatgcactttagatattgatatagtttgagaaattttattaaagttagtcaagtgcctaagtttttaatattggacttgagtatttatatattgtgcatcaactctgttggatacgagaacactgtagaagtggacgatttgttctagcacctttgagaatttactttatggagcgtatgtaagttatttatatacaaggaaatctattttatgtcgttgtttaagagaattgtgtgaaatcatgtagttgcaaataaaaaatagtttgaggcatgacaacgcgtgtttctgttgtgtgcataaaaggggaaaagaacgggtatttcccttcaatgtatttaactaaatagcaaaaacattaaacagaacgtaagaattttaaaatttcctttgaaaaatcaactattaaccatacttttcctaaaagaccacatatcagaatatgcatatgaaaagttaaaaatttgttagtggtagttattgaaaatataataaaacatcttttaactatcagtgtcactatacatagggttttttaacaaagaatttggctcgtactaattttgacatgacatctgacttacatgtctaatgccattgcataaagtagatgtgttcttacagctgctctaatctctgtgccttgtgctttttttaaaaaacatttaagtctttactagaggcctaaaataaagtcaaataatacaatacttcagattcttcagtagtccatatttatacaactgtaattccatcagtcttgtaagggtacttgaactacaaaaagaaaaaaagagatatctctataagagttttgatttttctccaaaggtaaatttttaaaaactaagatcagcaatactttttccatcaccttcatctttaaatttgcagtcttaaattatttgacttaccagaaaaatcacaacttgctaataaatcattgaatggccatggctattccacaaattattgttatttttaggaagataaattctgttgaaatacaaaactgcacaaatcataaaggtatagctcaatagtatgaaaatgtcagtttttaaagtttgcaacttcagaaaactcatttttaaaccttagagacttttctagctttaatattgtactctttaagccatacacaattttaacatctctctaaaccatatctactcttttcctgaaatctagtgactgcctattcaaacatgagcatgtttgtttattagtgtcacaagggagatgcgttttatcaattttttttaaccaaagttattgaaagaaaaaaaggaaaaaaaaattactttcagagtcatcacactgcttccttatgggtccttgagagttttgtggtgataatgacagatttgtaggtgattggcgtaaagttggaaagtttcaagtatttttatcatgaagttagcagacagaatttatttattgctttgcttatgagcaaattggtcctcatctgtaggtttttcatctgtatttaaccatgtatggaaaatactcaaaaattaaaaaaatacaaattttaaaatataactacattgcattaggtattatctagatttaaaggatgtacataggttatatgcaaatacgaagccattttatataaggcacttgagcatctgaggattttggtatccaggagggtcctggaacaaatcctccaaggatactgagggatgactatataggtttgttgggaaaatcagaagcataatagtgtaaagaaggaagtgttatttttggcacatacctagtagccagaacattccacgttactacaaaatctccttaattagttctgacgattaaatgacagggcctcttggggaaaccactagttttgaattcaactgcatacaggtagatgttattactcatagaagattctgccagtgtttcgactacccatcctccaccttgtcctgaaacttatttagagcaaaagaaagctctcataaatatggcttttccaatctattcctaatgaaataaaactgtcactcagcaactgggtcttaagttctagcaagcatggggtacaaaagtttgccaaacccttttttagtagtaattatgactctaggtgctttgttctcttaagtttgtctcccttagacaactccaaggtggctcttaaaacatgactacataatttcagcttgaaagccttatcgggctatttcaagcaggagtggtttatcactgaacaataatttgtttaaattctccattttatttttgtatttgtaggcataactgcaaagctctaaattttataggttaaacttggatatttgaaaaaaaaagttttagtaagttctatcacattaatactaaagcagtgcttatttctggtttattagtataatatttatctcaaagtatttaactttttagtaaacttctgtggttccaagttaagataataaagcatttatgttgacttctcagctaacagaggtatgtgttaatttcttattttatgattaggaagagggaaaaatacaaacacctaccatgtacagtttattgtgtagccattctgtccattttacagataatagtaaataatttttttaatttttattactacatggcaacaacttatttaatcatcacagcctcagggggtatgtaccattatcatcccnn

SEQ ID NO: 289373 - DNA, 1161 bp, Homo sapiens
atatgctcctaggttctctaccagggtatttttttattactattttattactcaccttggcaagtatgaatagatattacggcgtttatgattaaattcatttaaatccattaacgtaactccactttgttgtagatgtattcgtgtcaataaatttcagagagttgatcctgatgtcctgaaagcctgtgaaaacagctgcatcttgtatagtgacctgggcttgccaaaggagctcactctctgggtggacccatgtgaggtgtgctgtcggtatggagagaaaaacaatgcattcattgttgccagctttgaaaataaagatgagaacaaggatgagatctccaggaaagttaccagggcccttgataaggttacctctgattatcattcaggatcctcttcttcagatgaagaaacaagtaaggaaatggaagtgaaacccagttcggtgactgcagccgcaagtcctgtgtaccagatttcagaacttatatttccacctcttccaatgtggcaccctttgcccagaaaaaagccaggaatgtatcgagggaatggccatcagaatcactatcctcctcctgttccatttggttatccaaatcagggaagaaaaaataaaccatatcgcccaattccagtgacatgggtacctcctcctggaatgcattgtgaccggaatcactggattaatcctcacatgttagcacctcactaacttcgtttttgattgtgttggtgtcatgttgagaaaaaggtagaataaaccttactacacattaaaagttaaaagttcttactaatagtagtgaagttagatgggccaaaccatcaaacttatttttatagaagttattgagaataatctttcttaaaaaatatatgcactttagatattgatatagtttgagaaattttattaaagttagtcaagtgcctaagtttttaatattggacttgagtatttatatattgtgcatcaactctgttggatacgagaacactgtagaagtggacgatttgttctagcacctttgagaatttactttatggagcgtatgtaagttatttatatacaaggaaatctattttatgtcgttgtttaagagaattgtgtgaaatcatgtagttgcaaataaaaaatagtttgaggcatga

SEQ ID NO: 289374 - DNA, 846 bp, Homo sapiens
ctctttctgagggtggtgatcccccatcacggagtgtcctggtggcggtgtacggtttcgaacacttcagtccacaaggataacaaccaacattttcagagcacttggcaatttacaaaatacatctgcctgaaggtacagcactaccagcctcattttacgtgtgtgaaaactgaagcacagaagaattgggtgacttgtcagacgctgcataggtggtcagcattatggtcttcatccctccatcaaccttaatcacatactgcatgtgaccagcaggaagaggggtcttgagaataggaggggagatcaaagaagacatcgtcgtctatttgacatcaaaactggccagtaagtgcacaagaaatgagctgggttacctggaacctaaccttgggaagatgatctgtcaatggagctgtatgtctgtgtgagactggattttcctcatatactgtgaacaaaacaacatataacagattgactgcagaaacaggtcaagcttgtctaccaataaggagaggcacaggtacgggacacttttgaagggtttgttcgccttcagacaaacagcagacacctccacgctttgttttccacggcagagatggctagactctctttttggtcccagggagtggagctggctcgctctacacgctgcttctcacctgaggatatcagtggaaaagccccagtcctgggcacaggcatggctgtggacatgggcatgagctttatggggctgccactagctggccagaaacactgccctaagagtggacagatggaggccatggtaatgacctgctcattgtgccatcaggacctgccaggtatgggctc

SEQ ID NO: 289375 - DNA, 882 bp, Homo sapiens
ctctttctgagggtggtgatcccccatcacggagtgtcctggtggcggtgtacggtttcgaacacttcagtccacaaggataacaaccaacattttcagagcacttggcaatttacaaaatacatctgcctgaaggtacagcactaccagcctcattttacgtgtgtgaaaactgaagcacagaagaattgggtgacttgtcagacgctgcataggtggtcagcattatggtcttcatccctccatcaaccttaatcacatactgcatgtgaccagcaggaagaggggtcttgagaataggaggggagatcaaagaagacatcgtcgtctatttgacatcaaaactggccagtaagtgcacaagaaatgagctgggttacctggaacctaaccttgggaagatgatctgtcaatggaggataaattcccagaagtgagactgctggattatatgctgtatgtctgtgtgagactggattttcctcatatactgtgaacaaaacaacatataacagattgactgcagaaacaggtcaagcttgtctaccaataaggagaggcacaggtacgggacacttttgaagggtttgttcgccttcagacaaacagcagacacctccacgctttgttttccacggcagagatggctagactctctttttggtcccagggagtggagctggctcgctctacacgctgcttctcacctgaggatatcagtggaaaagccccagtcctgggcacaggcatggctgtggacatgggcatgagctttatggggctgccactagctggccagaaacactgccctaagagtggacagatggaggccatggtaatgacctgctcattgtgccatcaggacctgccaggtatgggctc

SEQ ID NO: 289376 - DNA, 2348 bp, Homo sapiens
tgtttcatctttattcattatcctttgttctttaaaatctgatatattggcataaaagtaattgtacatatatatatgaatgtgatttattttcctttacatctttttgttgtgtacagcagggcatatacttctcttgtcttggttggatgcacaaatctgtgtgcagtgctttttgcccgttgcctagacgatcacttggtttctctgaggatgtctggttctcgtaaagagtttgatgtgaaacagattttgaaaatcagatggaggtggtttggtcatcaagcatcatctcctaattctacagttgacagccagcagggagaattttggaaccgaggacagactggagcaaacggtgggagaaagtttttagatccatgtagcctacaattgcctttggcttcaattggttaccgaaggtccagccaactggattttcagaattcaccttcttggccaatggcatccacctctgaagtccctgcatttgagtttacagcagaagattgtggcggtgcacattggctggatagaccagaagtggatgatggcactagtgaagaagaaaatgaatctgattccagttcatgcaggacttccaatagtagtcagacattatcatcctgtcatactatggagccatgtacatcagatgaatttttccaagcccttaatcatgccgagcaaacatttaaaaaaatggaaaactatttgagacataaacagttgtgtgatgtaattttagtcgctggtgatcgcagaattccagctcacagattggtgctctcctctgtctcagactattttgctgccatgtttactaatgatgtcagagaggcaagacaagaagaaataaaaatggaaggtgtagaaccaaattcgttgtggtccttgatccagtatgcttatacaggccgccttgaattaaaagaagataatattgagtgcctgttatctacagcttgccttcttcagctttcacaggttgtagaagcatgctgtaagtttttaatgaaacagcttcatccatccaactgtcttggaattcgttcttttgctgatgcccaaggttgtacagatttgcataaagtggctcacaattatactatggagcatttcatggaagtaatcagaaaccaggaatttgtattattaccagccagcgaaattgcaaagctcttggctagtgatgacatgaacattcctaatgaggagacaatattgaatgcacttcttacttgggtccgtcatgatttggaacagagacggaaagatctaagtaaacttttggcttatattaggctacctcttcttgcaccacagttcctggcagacatggaaaataatgtactttttcgggatgatatagaatgtcagaaactcattatggaagcaatgaagtaccatttattaccagagagacgacccatgttacaaagtcctcggacaaaacctaggaagtcaactgttggtacattatttgcagttgggggaatggattcaacaaaaggagcaacaagcattgaaaagtatgatctccgtacaaatatgtggactccagtagcaaatatgaatgggaggaggctacagttcggtgttgcagtgctagatgacaaactgtatgtggttggaggaagagatggactgaagactttgaatactgtagagtgctacaaccccaaaacaaaaacttggagtgtgatgccacctatgtccacacatagacatggccttggtgtggctgtactggaaggtcccatgtatgccgtaggaggacatgatggctggagctatctgaacacagtggaaagatgggaccctcaggctcgccagtggaattttgttgccactatgtctacccctaggagtacagtaggtgtggcagtactaagtggaaaactttatgcagttggtggtcgtgatggaagttcttgtctcaaatcagtagaatgttttgatcctcatactaataagtggacactgtgtgcacagatgtcaaaaaggagaggtggcgtaggagtgacgacctggaatggactgctgtatgctataggggggcacgatgctcccgcatccaacttgacttccagactctcagactgtgtggaaagatatgatcccaaaacagacatgtggactgcagtagcatccatgagcatcagcagagatgcagtgggggtctgtttacttggtgataagttatatgctgttggggggtatgatggacaggcataccttaataccgtggaggcttatgatccccagacaaatgagtggacccaggtatggcattcatgtttcattattacactgactctctttttattaaaacaattcttatggta

SEQ ID NO: 289377 - DNA, 802 bp, Homo sapiens
gcatagtagtgttgacattttaacctacagatccaatacatatctctttttcctttttaggttgctccactgtgcctaggaagagctggagcttgtgttgtgactgtaaaattataatttagtgccccgttttctacatgaagacaccgtcttcctttattaatttagtataattattctatcaatggatacatttttagtaaatgtgcattgtcacaatcctgggcacaaagtgcctgatgtcaaaatgaagatagtaaaacaagggaggaagcagtggatggaccaggattaattcctttcatttcttagtaaattaaaacctgcagctggtggattgtgatcacacattcccgaagtaataagtgaggacgaatgcactgctctggaacataacccagtgctaactgggggtttcatttattcagtcaagcacatcttactcacatccagatttattttcctacagtgcaaacacaccagatgaaactttaaaatgttactttttgtaagcttatcataaatgagttgcagtaatttgtttgcttgtttgtttaaccacaaccactattttaatgatatactaaagataacactatttagttttttcagaaacatctgcattatatgtgtgttggttgtggattttgtttctaaaattggcttagtccaataaataaagaaaagcattaaggacttaaagcaacaataaccaaataaaactggtagactggagctattaaattctccttctcttgacccgaactctgttttgttgtggtgacagagttgctccataagc

SEQ ID NO: 289378 - DNA, 1351 bp, Homo sapiens
tgtttcatctttattcattatcctttgttctttaaaatctgatatattggcataaaagtaattgtacatatatatatgaatgtgatttattttcctttacatctttttgttgtgtacagcagggcatatacttctcttgtcttggttggatgcacaaatctgtgtgcagtgctttttgcccgttgcctagacgatcacttggtttctctgaggatgtctggttctcgtaaagagtttgatgtgaaacagattttgaaaatcagatggaggtggtttggtcatcaagcatcatctcctaattctacagttgacagccagcagggagaattttggaaccgaggacagactggagcaaacggtgggagaaagtttttagatccatgtagcctacaattgcctttggcttcaattggttaccgaaggtccagccaactggattttcagaattcaccttcttggccaatggcatccacctctgaagtccctgcatttgagtttacagcagaagattgtggcggtgcacattggctggatagaccagaagtggatgatggcactagtgaagaagaaaatgaatctgattccagttcatgcaggttgattattttcttactgttagaaaaggggtgtgggggtatggctctataatgtttttaaataatttagtatttattatttaaaatctgattatatatgtacatctgcatacatatatataatatcttggtatgaacatgtgatacttctgctagggtttttttaatgttctaatagtctgtaaaattacaaagacaacaaatagcattcattttgaaatatcttgtgttctatatttagatctggctcagctttgaaaataatatatagtagcaatttcatgtatcattgcctgtggtttgcttcattcattaaccttctatattcaaatcaaaactatagaagatatttctatagtatgaaattttatgtgacattttagtttataacagatgatagagtcattttttaatttaatgaaaaggaaaggttttacaaagagatgcacattatagtcaccaattttttgacacaattgtagttgtcaataatatttttcttatggttatttctctttgtcctgtctgtgttacagctctccagactaatatagagaatactaagtaacatgtctctaagatgacagctactaattcctgttaccttcactttcactgaaatgtgtgctatttagggaaatgaaggacattcctccaggagagtttaagggaatgtagaggggctagatgtgattatctggtgaaaaggggacaggaagaaggggaaatcagttagaagaaagaaaataaggaaa

SEQ ID NO: 289379 - DNA, 6682 bp, Homo sapiens
tgtttcatctttattcattatcctttgttctttaaaatctgatatattggcataaaagtaattgtacatatatatatgaatgtgatttattttcctttacatctttttgttgtgtacagcagggcatatacttctcttgtcttggttggatgcacaaatctgtgtgcagtgctttttgcccgttgcctagacgatcacttggtttctctgaggatgtctggttctcgtaaagagtttgatgtgaaacagattttgaaaatcagatggaggtggtttggtcatcaagcatcatctcctaattctacagttgacagccagcagggagaattttggaaccgaggacagactggagcaaacggtgggagaaagtttttagatccatgtagcctacaattgcctttggcttcaattggttaccgaaggtccagccaactggattttcagaattcaccttcttggccaatggcatccacctctgaagtccctgcatttgagtttacagcagaagattgtggcggtgcacattggctggatagaccagaagtggatgatggcactagtgaagaagaaaatgaatctgattccagttcatgcaggacttccaatagtagtcagacattatcatcctgtcatactatggagccatgtacatcagatgaatttttccaagcccttaatcatgccgagcaaacatttaaaaaaatggaaaactatttgagacataaacagttgtgtgatgtaattttagtcgctggtgatcgcagaattccagctcacagattggtgctctcctctgtctcagactattttgctgccatgtttactaatgatgtcagagaggcaagacaagaagaaataaaaatggaaggtgtagaaccaaattcgttgtggtccttgatccagtatgcttatacaggccgccttgaattaaaagaagataatattgagtgcctgttatctacagcttgccttcttcagctttcacaggttgtagaagcatgctgtaagtttttaatgaaacagcttcatccatccaactgtcttggaattcgttcttttgctgatgcccaaggttgtacagatttgcataaagtggctcacaattatactatggagcatttcatggaagtaatcagaaaccaggaatttgtattattaccagccagcgaaattgcaaagctcttggctagtgatgacatgaacattcctaatgaggagacaatattgaatgcacttcttacttgggtccgtcatgatttggaacagagacggaaagatctaagtaaacttttggcttatattaggctacctcttcttgcaccacagttcctggcagacatggaaaataatgtactttttcgggatgatatagaatgtcagaaactcattatggaagcaatgaagtaccatttattaccagagagacgacccatgttacaaagtcctcggacaaaacctaggaagtcaactgttggtacattatttgcagttgggggaatggattcaacaaaaggagcaacaagcattgaaaagtatgatctccgtacaaatatgtggactccagtagcaaatatgaatgggaggaggctacagttcggtgttgcagtgctagatgacaaactgtatgtggttggaggaagagatggactgaagactttgaatactgtagagtgctacaaccccaaaacaaaaacttggagtgtgatgccacctatgtccacacatagacatggccttggtgtggctgtactggaaggtcccatgtatgccgtaggaggacatgatggctggagctatctgaacacagtggaaagatgggaccctcaggctcgccagtggaattttgttgccactatgtctacccctaggagtacagtaggtgtggcagtactaagtggaaaactttatgcagttggtggtcgtgatggaagttcttgtctcaaatcagtagaatgttttgatcctcatactaataagtggacactgtgtgcacagatgtcaaaaaggagaggtggcgtaggagtgacgacctggaatggactgctgtatgctataggggggcacgatgctcccgcatccaacttgacttccagactctcagactgtgtggaaagatatgatcccaaaacagacatgtggactgcagtagcatccatgagcatcagcagagatgcagtgggggtctgtttacttggtgataagttatatgctgttggggggtatgatggacaggcataccttaataccgtggaggcttatgatccccagacaaatgagtggacccaggttgctccactgtgcctaggaagagctggagcttgtgttgtgactgtaaaattataatttagtgccccgttttctacatgaagacaccgtcttcctttattaatttagtataattattctatcaatggatacatttttagtaaatgtgcattgtcacaatcctgggcacaaagtgcctgatgtcaaaatgaagatagtaaaacaagggaggaagcagtggatggaccaggattaattcctttcatttcttagtaaattaaaacctgcagctggtggattgtgatcacacattcccgaagtaataagtgaggacgaatgcactgctctggaacataacccagtgctaactgggggtttcatttattcagtcaagcacatcttactcacatccagatttattttcctacagtgcaaacacaccagatgaaactttaaaatgttactttttgtaagcttatcataaatgagttgcagtaatttgtttgcttgtttgtttaaccacaaccactattttaatgatatactaaagataacactatttagttttttcagaaacatctgcattatatgtgtgttggttgtggattttgtttctaaaattggcttagtccaataaataaagaaaagcattaaggacttaaagcaacaataaccaaataaaaacttgataggatctttgaagtctatttaaatattcattccattacatctagactcaccaagaactacatgttatgatgttaagttgaagttgaaacatgatgttttgcattaaatttaagatatgcaaatttatgtagagaaaataaatgttatataccctataatctttcacctaattagtatttaattatatggatttgttttatattataaaagatgttttgattttgtcttttgatattgacaaaattgtttggatatccttatgttctcaagtctgtatctgcctcccctgccttatttcttatgttttgccacagttaacccattgtgcttctttgtaatcaaacagtttgtgggagaatgggcttattgaatgtctaaaaaataagtttaaagtgtttgttaccctaagttttttacatttttaaactctaattacatatgtgaatgttattactctcagtgaattgttattgtttgcaaaaatgcactgggcagtaacattttgtgataaatcctataagatataagtcattgagatgtctaagatgctttttattttaaccccagttaataaccaccttacggaaaataatatttgctaatattgtttattgtgaactaggaatcaaagtttttgtatgcatcaatgcacttaatccttataacaaccttatgaggtagttctattccctttttatagctaaggaaattggggtacagagaagttagccccaaggttatatattgcaagtaagtggcagagcagggattcatacaaagaccttctcactcagcagtcttcactcttactattcctgccactaggtagaaaaagaaagatttcggccgggcacagtggctcacgcctataattcccagcactttgggaggctgaggtgggcggatcacgaggtcaggagatggagaccatcctggctaacacagtgaaaccccgtctctactaaaaataaaaaataaaaaaaaattagccaggcgtggtggcgggtgcctgtacgcccagctactcgggaggctgaggcgggagaatggcgtgaacccaggaggaggagcttgcagtgtgccaagatcgcaccactgcactccagcctgggtgacagagcgagactccatcaaaaaaaaataaataaataaaaaataaaagatttcattttatgtgaggaattattttaataaaaaaaagagggtttatgctctatagtaataaaatttaccagtaacacccaatcagaaaattttggttccttagtatttagggaagacttttgtttaaatctcttatggaattttacatgttttgatttagaaaagtagatgcaatataatatatttcaagttttatacatattagatgaattgcatggtattttaggcaacttaactataaacaaatttattcatagaagcattgttgccaacaatttagatgacctcgatgaaaaaacacaccaattgacaaaactggctcaaaaggaaataaaaaatccaaacagacctgtaacaagtaaagagattgaaccagtaatcaaaaatctcccaacaaagaaagtccaggactaaatgagtttactggcaaactatgccaaacatataaagaagaattaacactaatccttctcgaactctcccaaaaaatggaagagaaaggagcaccctgtgacattctataaggcggacattaccttaacaccaaagccagacaaagacctcacagggaagctacagaccaatatcccttatgaatatagatgcaaaaaaacttcaaaatactagcaggccaaatccagcagcttattaaaatgatcacacagcatgaccaagtgagatttatcaaagaaatgcagggatggttctacatacaaatgtcaatcgatgtaataatataccatattaatagaatgaaggggaaaaaacagcatgatcacctcaattgataagaaaaagcatttgacaaaaatccaacaccctttcatggtaaaaacactctgcaaactaggaagaaaagggaactttcttaacctgataaagacatccataaaaacccacagctaacaacataatagcaaaacattgaaaatttttcccctaatatcatgaaaattcctgatttccccactgctattcaacattatactagaaggtctagccagagcaattaggcaagaaaaagaaataaaatgaatcccaaataggaagaagtaaaactacatttgcagaaaacatggtcctatatattaaaaatcctaaagaatccacaaaatgattccggctgattttaaaaattcagcaatgttgcaggttgcaagatcaacacacaaaagtctaagaaaaacctgaggggaaattaaaacaatttcatttacaataacatgaaaaagaataaaatacttagaaataaatttgaccaagaaagtgcaagacttggacactgaaaagtacaaaacgttgctgaaagaaattaaagaagacctaaataaatggaagacatcctgtgctggcaggttggaagacttaacattgttaagatggcattactcccaaaattagtctatagatttaatacaatccccattaaaattccagtgacccttttacagaaactgaaaagctgaccctagaatttatatgggattgcaagttactgaaggtactcaagtctgttcaaaacaatcttgaacaagaataaagttgaaggactcacattttccaatttcaaaatttactgcaaagctacttcaatcaaaacagtgttgtgctggtataaaaatatataaagcaatagagtagaatggaaagtccagaaacaaattacgccaatacactatggtcaattgatttttgacaagggttccaggaccattcaatgaagaaagaacagtgtcttcaactaatagtgctaagacaagtgaatattcacatgcaaaagaatgaatttgtacctgtacttcataccatatataaaaattaattcaaaatagatcaaagacctaaatgtaagagctaaaaccataaaactttgagaagaaaatacaggaataaatcttcatgaccttggatttggcaatggtttcttagatatggcaccaaaagcacaagcaacaacagcaaaaaaaaaaaaaaaaaaaaaaaatcaaaattaaaagcttctacatatcaagggacactatgaagaaagtgaaaagacaacccacagaatgggagaaaatatttgtaaatcttacatatctggtaaggaactaatacctagaatatataaggaactccgatgctcgacaacaaaaagacaaaccaattttaaaatgggcaaaggacttaaatagacatttctctaatgaagatatacaaatggccgacaagcacatggaaagcactcaacctcatcagtcattatgcaaatcagcgccacaagaagataccacttcacacctattagaatgacgaaatagacctaggatctaaacctacaggaaaaaaaaatgaataatagagaaaataaatgttagagaggatgtggagaaattgaaaaccttcattcgttgttggtgggaatgttaaatggtgtagccactgtggaaaacagtttggcagttcctcaagttaaaaaaaagaattaccatatgacccagcaagtccactcctggggacatatgactagaaatgaaaacaggtgttcaagcaaaaactttcacgcaaatattcattgcagcac

SEQ ID NO: 289380 - DNA, 6111 bp, Homo sapiens
acggccgcctccggagcccgacgcggacttccaatagtagtcagacattatcatcctgtcatactatggagccatgtacatcagatgaatttttccaagcccttaatcatgccgagcaaacatttaaaaaaatggaaaactatttgagacataaacagttgtgtgatgtaattttagtcgctggtgatcgcagaattccagctcacagattggtgctctcctctgtctcagactattttgctgccatgtttactaatgatgtcagagaggcaagacaagaagaaataaaaatggaaggtgtagaaccaaattcgttgtggtccttgatccagtatgcttatacaggccgccttgaattaaaagaagataatattgagtgcctgttatctacagcttgccttcttcagctttcacaggttgtagaagcatgctgtaagtttttaatgaaacagcttcatccatccaactgtcttggaattcgttcttttgctgatgcccaaggttgtacagatttgcataaagtggctcacaattatactatggagcatttcatggaagtaatcagaaaccaggaatttgtattattaccagccagcgaaattgcaaagctcttggctagtgatgacatgaacattcctaatgaggagacaatattgaatgcacttcttacttgggtccgtcatgatttggaacagagacggaaagatctaagtaaacttttggcttatattaggctacctcttcttgcaccacagttcctggcagacatggaaaataatgtactttttcgggatgatatagaatgtcagaaactcattatggaagcaatgaagtaccatttattaccagagagacgacccatgttacaaagtcctcggacaaaacctaggaagtcaactgttggtacattatttgcagttgggggaatggattcaacaaaaggagcaacaagcattgaaaagtatgatctccgtacaaatatgtggactccagtagcaaatatgaatgggaggaggctacagttcggtgttgcagtgctagatgacaaactgtatgtggttggaggaagagatggactgaagactttgaatactgtagagtgctacaaccccaaaacaaaaacttggagtgtgatgccacctatgtccacacatagacatggccttggtgtggctgtactggaaggtcccatgtatgccgtaggaggacatgatggctggagctatctgaacacagtggaaagatgggaccctcaggctcgccagtggaattttgttgccactatgtctacccctaggagtacagtaggtgtggcagtactaagtggaaaactttatgcagttggtggtcgtgatggaagttcttgtctcaaatcagtagaatgttttgatcctcatactaataagtggacactgtgtgcacagatgtcaaaaaggagaggtggcgtaggagtgacgacctggaatggactgctgtatgctataggggggcacgatgctcccgcatccaacttgacttccagactctcagactgtgtggaaagatatgatcccaaaacagacatgtggactgcagtagcatccatgagcatcagcagagatgcagtgggggtctgtttacttggtgataagttatatgctgttggggggtatgatggacaggcataccttaataccgtggaggcttatgatccccagacaaatgagtggacccaggttgctccactgtgcctaggaagagctggagcttgtgttgtgactgtaaaattataatttagtgccccgttttctacatgaagacaccgtcttcctttattaatttagtataattattctatcaatggatacatttttagtaaatgtgcattgtcacaatcctgggcacaaagtgcctgatgtcaaaatgaagatagtaaaacaagggaggaagcagtggatggaccaggattaattcctttcatttcttagtaaattaaaacctgcagctggtggattgtgatcacacattcccgaagtaataagtgaggacgaatgcactgctctggaacataacccagtgctaactgggggtttcatttattcagtcaagcacatcttactcacatccagatttattttcctacagtgcaaacacaccagatgaaactttaaaatgttactttttgtaagcttatcataaatgagttgcagtaatttgtttgcttgtttgtttaaccacaaccactattttaatgatatactaaagataacactatttagttttttcagaaacatctgcattatatgtgtgttggttgtggattttgtttctaaaattggcttagtccaataaataaagaaaagcattaaggacttaaagcaacaataaccaaataaaaacttgataggatctttgaagtctatttaaatattcattccattacatctagactcaccaagaactacatgttatgatgttaagttgaagttgaaacatgatgttttgcattaaatttaagatatgcaaatttatgtagagaaaataaatgttatataccctataatctttcacctaattagtatttaattatatggatttgttttatattataaaagatgttttgattttgtcttttgatattgacaaaattgtttggatatccttatgttctcaagtctgtatctgcctcccctgccttatttcttatgttttgccacagttaacccattgtgcttctttgtaatcaaacagtttgtgggagaatgggcttattgaatgtctaaaaaataagtttaaagtgtttgttaccctaagttttttacatttttaaactctaattacatatgtgaatgttattactctcagtgaattgttattgtttgcaaaaatgcactgggcagtaacattttgtgataaatcctataagatataagtcattgagatgtctaagatgctttttattttaaccccagttaataaccaccttacggaaaataatatttgctaatattgtttattgtgaactaggaatcaaagtttttgtatgcatcaatgcacttaatccttataacaaccttatgaggtagttctattccctttttatagctaaggaaattggggtacagagaagttagccccaaggttatatattgcaagtaagtggcagagcagggattcatacaaagaccttctcactcagcagtcttcactcttactattcctgccactaggtagaaaaagaaagatttcggccgggcacagtggctcacgcctataattcccagcactttgggaggctgaggtgggcggatcacgaggtcaggagatggagaccatcctggctaacacagtgaaaccccgtctctactaaaaataaaaaataaaaaaaaattagccaggcgtggtggcgggtgcctgtacgcccagctactcgggaggctgaggcgggagaatggcgtgaacccaggaggaggagcttgcagtgtgccaagatcgcaccactgcactccagcctgggtgacagagcgagactccatcaaaaaaaaataaataaataaaaaataaaagatttcattttatgtgaggaattattttaataaaaaaaagagggtttatgctctatagtaataaaatttaccagtaacacccaatcagaaaattttggttccttagtatttagggaagacttttgtttaaatctcttatggaattttacatgttttgatttagaaaagtagatgcaatataatatatttcaagttttatacatattagatgaattgcatggtattttaggcaacttaactataaacaaatttattcatagaagcattgttgccaacaatttagatgacctcgatgaaaaaacacaccaattgacaaaactggctcaaaaggaaataaaaaatccaaacagacctgtaacaagtaaagagattgaaccagtaatcaaaaatctcccaacaaagaaagtccaggactaaatgagtttactggcaaactatgccaaacatataaagaagaattaacactaatccttctcgaactctcccaaaaaatggaagagaaaggagcaccctgtgacattctataaggcggacattaccttaacaccaaagccagacaaagacctcacagggaagctacagaccaatatcccttatgaatatagatgcaaaaaaacttcaaaatactagcaggccaaatccagcagcttattaaaatgatcacacagcatgaccaagtgagatttatcaaagaaatgcagggatggttctacatacaaatgtcaatcgatgtaataatataccatattaatagaatgaaggggaaaaaacagcatgatcacctcaattgataagaaaaagcatttgacaaaaatccaacaccctttcatggtaaaaacactctgcaaactaggaagaaaagggaactttcttaacctgataaagacatccataaaaacccacagctaacaacataatagcaaaacattgaaaatttttcccctaatatcatgaaaattcctgatttccccactgctattcaacattatactagaaggtctagccagagcaattaggcaagaaaaagaaataaaatgaatcccaaataggaagaagtaaaactacatttgcagaaaacatggtcctatatattaaaaatcctaaagaatccacaaaatgattccggctgattttaaaaattcagcaatgttgcaggttgcaagatcaacacacaaaagtctaagaaaaacctgaggggaaattaaaacaatttcatttacaataacatgaaaaagaataaaatacttagaaataaatttgaccaagaaagtgcaagacttggacactgaaaagtacaaaacgttgctgaaagaaattaaagaagacctaaataaatggaagacatcctgtgctggcaggttggaagacttaacattgttaagatggcattactcccaaaattagtctatagatttaatacaatccccattaaaattccagtgacccttttacagaaactgaaaagctgaccctagaatttatatgggattgcaagttactgaaggtactcaagtctgttcaaaacaatcttgaacaagaataaagttgaaggactcacattttccaatttcaaaatttactgcaaagctacttcaatcaaaacagtgttgtgctggtataaaaatatataaagcaatagagtagaatggaaagtccagaaacaaattacgccaatacactatggtcaattgatttttgacaagggttccaggaccattcaatgaagaaagaacagtgtcttcaactaatagtgctaagacaagtgaatattcacatgcaaaagaatgaatttgtacctgtacttcataccatatataaaaattaattcaaaatagatcaaagacctaaatgtaagagctaaaaccataaaactttgagaagaaaatacaggaataaatcttcatgaccttggatttggcaatggtttcttagatatggcaccaaaagcacaagcaacaacagcaaaaaaaaaaaaaaaaaaaaaaaatcaaaattaaaagcttctacatatcaagggacactatgaagaaagtgaaaagacaacccacagaatgggagaaaatatttgtaaatcttacatatctggtaaggaactaatacctagaatatataaggaactccgatgctcgacaacaaaaagacaaaccaattttaaaatgggcaaaggacttaaatagacatttctctaatgaagatatacaaatggccgacaagcacatggaaagcactcaacctcatcagtcattatgcaaatcagcgccacaagaagataccacttcacacctattagaatgacgaaatagacctaggatctaaacctacaggaaaaaaaaatgaataatagagaaaataaatgttagagaggatgtggagaaattgaaaaccttcattcgttgttggtgggaatgttaaatggtgtagccactgtggaaaacagtttggcagttcctcaagttaaaaaaaagaattaccatatgacccagcaagtccactcctggggacatatgactagaaatgaaaacaggtgttcaagcaaaaactttcacgcaaatattcattgcagcac

SEQ ID NO: 289381 - DNA, 3486 bp, Homo sapiens
tgtttcatctttattcattatcctttgttctttaaaatctgatatattggcataaaagtaattgtacatatatatatgaatgtgatttattttcctttacatctttttgttgtgtacagcagggcatatacttctcttgtcttggttggatgcacaaatctgtgtgcagtgctttttgcccgttgcctagacgatcacttggtttctctgaggatgtctggttctcgtaaagagtttgatgtgaaacagattttgaaaatcagatggaggtggtttggtcatcaagcatcatctcctaattctacagttgacagccagcagggagaattttggaaccgaggacagactggagcaaacggtgggagaaagtttttagatccatgtagcctacaattgcctttggcttcaattggttaccgaaggtccagccaactggattttcagaattcaccttcttggccaatggcatccacctctgaagtccctgcatttgagtttacagcagaagattgtggcggtgcacattggctggatagaccagaagtggatgatggcactagtgaagaagaaaatgaatctgattccagttcatgcaggacttccaatagtagtcagacattatcatcctgtcatactatggagccatgtacatcagatgaatttttccaagcccttaatcatgccgagcaaacatttaaaaaaatggaaaactatttgagacataaacagttgtgtgatgtaattttagtcgctggtgatcgcagaattccagctcacagattggtgctctcctctgtctcagactattttgctgccatgtttactaatgatgtcagagaggcaagacaagaagaaataaaaatggaaggtgtagaaccaaattcgttgtggtccttgatccagtatgcttatacaggccgccttgaattaaaagaagataatattgagtgcctgttatctacagcttgccttcttcagctttcacaggttgtagaagcatgctgtaagtttttaatgaaacagcttcatccatccaactgtcttggaattcgttcttttgctgatgcccaaggttgtacagatttgcataaagtggctcacaattatactatggagcatttcatggaagtaatcagaaaccaggaatttgtattattaccagccagcgaaattgcaaagctcttggctagtgatgacatgaacattcctaatgaggagacaatattgaatgcacttcttacttgggtccgtcatgatttggaacagagacggaaagatctaagtaaacttttggcttatattaggctacctcttcttgcaccacagttcctggcagacatggaaaataatgtactttttcgggatgatatagaatgtcagaaactcattatggaagcaatgaagtaccatttattaccagagagacgacccatgttacaaagtcctcggacaaaacctaggaagtcaactgttggtacattatttgcagttgggggaatggattcaacaaaaggagcaacaagcattgaaaagtatgatctccgtacaaatatgtggactccagtagcaaatatgaatgggaggaggctacagttcggtgttgcagtgctagatgacaaactgtatgtggttggaggaagagatggactgaagactttgaatactgtagagtgctacaaccccaaaacaaaaacttggagtgtgatgccacctatgtccacacatagacatggccttggtgtggctgtactggaaggtcccatgtatgccgtaggaggacatgatggctggagctatctgaacacagtggaaagatgggaccctcaggctcgccagtggaattttgttgccactatgtctacccctaggagtacagtaggtgtggcagtactaagtggaaaactttatgcagttggtggtcgtgatggaagttcttgtctcaaatcagtagaatgttttgatcctcatactaataagtggacactgtgtgcacagatgtcaaaaaggagaggtggcgtaggagtgacgacctggaatggactgctgtatgctataggggggcacgatgctcccgcatccaacttgacttccagactctcagactgtgtggaaagatatgatcccaaaacagacatgtggactgcagtagcatccatgagcatcagcagagatgcagtgggggtctgtttacttggtgataagttatatgctgttggggggtatgatggacaggcataccttaataccgtggaggcttatgatccccagacaaatgagtggacccaggttgctccactgtgcctaggaagagctggagcttgtgttgtgactgtaaaattataatttagtgccccgttttctacatgaagacaccgtcttcctttattaatttagtataattattctatcaatggatacatttttagtaaatgtgcattgtcacaatcctgggcacaaagtgcctgatgtcaaaatgaagatagtaaaacaagggaggaagcagtggatggaccaggattaattcctttcatttcttagtaaattaaaacctgcagctggtggattgtgatcacacattcccgaagtaataagtgaggacgaatgcactgctctggaacataacccagtgctaactgggggtttcatttattcagtcaagcacatcttactcacatccagatttattttcctacagtgcaaacacaccagatgaaactttaaaatgttactttttgtaagcttatcataaatgagttgcagtaatttgtttgcttgtttgtttaaccacaaccactattttaatgatatactaaagataacactatttagttttttcagaaacatctgcattatatgtgtgttggttgtggattttgtttctaaaattggcttagtccaataaataaagaaaagcattaaggacttaaagcaacaataaccaaataaaaacttgataggatctttgaagtctatttaaatattcattccattacatctagactcaccaagaactacatgttatgatgttaagttgaagttgaaacatgatgttttgcattaaatttaagatatgcaaatttatgtagagaaaataaatgttatataccctataatctttcacctaattagtatttaattatatggatttgttttatattataaaagatgttttgattttgtcttttgatattgacaaaattgtttggatatccttatgttctcaagtctgtatctgcctcccctgccttatttcttatgttttgccacagttaacccattgtgcttctttgtaatcaaacagtttgtgggagaatgggcttattgaatgtctaaaaaataagtttaaagtgtttgttaccctaagttttttacatttttaaactctaattacatatgtgaatgttattactctcagtgaattgttattgtttgcaaaaatgcactgggcagtaacattttgtgataaatcctataagatataagtca

SEQ ID NO: 289382 - DNA, 4456 bp, Homo sapiens
gcatagtagtgttgacattttaacctacagatccaatacatatctctttttcctttttaggttgctccactgtgcctaggaagagctggagcttgtgttgtgactgtaaaattataatttagtgccccgttttctacatgaagacaccgtcttcctttattaatttagtataattattctatcaatggatacatttttagtaaatgtgcattgtcacaatcctgggcacaaagtgcctgatgtcaaaatgaagatagtaaaacaagggaggaagcagtggatggaccaggattaattcctttcatttcttagtaaattaaaacctgcagctggtggattgtgatcacacattcccgaagtaataagtgaggacgaatgcactgctctggaacataacccagtgctaactgggggtttcatttattcagtcaagcacatcttactcacatccagatttattttcctacagtgcaaacacaccagatgaaactttaaaatgttactttttgtaagcttatcataaatgagttgcagtaatttgtttgcttgtttgtttaaccacaaccactattttaatgatatactaaagataacactatttagttttttcagaaacatctgcattatatgtgtgttggttgtggattttgtttctaaaattggcttagtccaataaataaagaaaagcattaaggacttaaagcaacaataaccaaataaaaacttgataggatctttgaagtctatttaaatattcattccattacatctagactcaccaagaactacatgttatgatgttaagttgaagttgaaacatgatgttttgcattaaatttaagatatgcaaatttatgtagagaaaataaatgttatataccctataatctttcacctaattagtatttaattatatggatttgttttatattataaaagatgttttgattttgtcttttgatattgacaaaattgtttggatatccttatgttctcaagtctgtatctgcctcccctgccttatttcttatgttttgccacagttaacccattgtgcttctttgtaatcaaacagtttgtgggagaatgggcttattgaatgtctaaaaaataagtttaaagtgtttgttaccctaagttttttacatttttaaactctaattacatatgtgaatgttattactctcagtgaattgttattgtttgcaaaaatgcactgggcagtaacattttgtgataaatcctataagatataagtcattgagatgtctaagatgctttttattttaaccccagttaataaccaccttacggaaaataatatttgctaatattgtttattgtgaactaggaatcaaagtttttgtatgcatcaatgcacttaatccttataacaaccttatgaggtagttctattccctttttatagctaaggaaattggggtacagagaagttagccccaaggttatatattgcaagtaagtggcagagcagggattcatacaaagaccttctcactcagcagtcttcactcttactattcctgccactaggtagaaaaagaaagatttcggccgggcacagtggctcacgcctataattcccagcactttgggaggctgaggtgggcggatcacgaggtcaggagatggagaccatcctggctaacacagtgaaaccccgtctctactaaaaataaaaaataaaaaaaaattagccaggcgtggtggcgggtgcctgtacgcccagctactcgggaggctgaggcgggagaatggcgtgaacccaggaggaggagcttgcagtgtgccaagatcgcaccactgcactccagcctgggtgacagagcgagactccatcaaaaaaaaataaataaataaaaaataaaagatttcattttatgtgaggaattattttaataaaaaaaagagggtttatgctctatagtaataaaatttaccagtaacacccaatcagaaaattttggttccttagtatttagggaagacttttgtttaaatctcttatggaattttacatgttttgatttagaaaagtagatgcaatataatatatttcaagttttatacatattagatgaattgcatggtattttaggcaacttaactataaacaaatttattcatagaagcattgttgccaacaatttagatgacctcgatgaaaaaacacaccaattgacaaaactggctcaaaaggaaataaaaaatccaaacagacctgtaacaagtaaagagattgaaccagtaatcaaaaatctcccaacaaagaaagtccaggactaaatgagtttactggcaaactatgccaaacatataaagaagaattaacactaatccttctcgaactctcccaaaaaatggaagagaaaggagcaccctgtgacattctataaggcggacattaccttaacaccaaagccagacaaagacctcacagggaagctacagaccaatatcccttatgaatatagatgcaaaaaaacttcaaaatactagcaggccaaatccagcagcttattaaaatgatcacacagcatgaccaagtgagatttatcaaagaaatgcagggatggttctacatacaaatgtcaatcgatgtaataatataccatattaatagaatgaaggggaaaaaacagcatgatcacctcaattgataagaaaaagcatttgacaaaaatccaacaccctttcatggtaaaaacactctgcaaactaggaagaaaagggaactttcttaacctgataaagacatccataaaaacccacagctaacaacataatagcaaaacattgaaaatttttcccctaatatcatgaaaattcctgatttccccactgctattcaacattatactagaaggtctagccagagcaattaggcaagaaaaagaaataaaatgaatcccaaataggaagaagtaaaactacatttgcagaaaacatggtcctatatattaaaaatcctaaagaatccacaaaatgattccggctgattttaaaaattcagcaatgttgcaggttgcaagatcaacacacaaaagtctaagaaaaacctgaggggaaattaaaacaatttcatttacaataacatgaaaaagaataaaatacttagaaataaatttgaccaagaaagtgcaagacttggacactgaaaagtacaaaacgttgctgaaagaaattaaagaagacctaaataaatggaagacatcctgtgctggcaggttggaagacttaacattgttaagatggcattactcccaaaattagtctatagatttaatacaatccccattaaaattccagtgacccttttacagaaactgaaaagctgaccctagaatttatatgggattgcaagttactgaaggtactcaagtctgttcaaaacaatcttgaacaagaataaagttgaaggactcacattttccaatttcaaaatttactgcaaagctacttcaatcaaaacagtgttgtgctggtataaaaatatataaagcaatagagtagaatggaaagtccagaaacaaattacgccaatacactatggtcaattgatttttgacaagggttccaggaccattcaatgaagaaagaacagtgtcttcaactaatagtgctaagacaagtgaatattcacatgcaaaagaatgaatttgtacctgtacttcataccatatataaaaattaattcaaaatagatcaaagacctaaatgtaagagctaaaaccataaaactttgagaagaaaatacaggaataaatcttcatgaccttggatttggcaatggtttcttagatatggcaccaaaagcacaagcaacaacagcaaaaaaaaaaaaaaaaaaaaaaaatcaaaattaaaagcttctacatatcaagggacactatgaagaaagtgaaaagacaacccacagaatgggagaaaatatttgtaaatcttacatatctggtaaggaactaatacctagaatatataaggaactccgatgctcgacaacaaaaagacaaaccaattttaaaatgggcaaaggacttaaatagacatttctctaatgaagatatacaaatggccgacaagcacatggaaagcactcaacctcatcagtcattatgcaaatcagcgccacaagaagataccacttcacacctattagaatgacgaaatagacctaggatctaaacctacaggaaaaaaaaatgaataatagagaaaataaatgttagagaggatgtggagaaattgaaaaccttcattcgttgttggtgggaatgttaaatggtgtagccactgtggaaaacagtttggcagttcctcaagttaaaaaaaagaattaccatatgacccagcaagtccactcctggggacatatgactagaaatgaaaacaggtgttcaagcaaaaactttcacgcaaatattcattgcagcac

SEQ ID NO: 289383 - DNA, 5881 bp, Homo sapiens
tgtttcatctttattcattatcctttgttctttaaaatctgatatattggcataaaagtaattgtacatatatatatgaatgtgatttattttcctttacatctttttgttgtgtacagcagggcatatacttctcttgtcttggttggatgcacaaatctgtgtgcagtgctttttgcccgttgcctagacgatcacttggtttctctgaggatgtctggttctcgtaaagagtttgatgtgaaacagattttgaaaatcagatggaggtggtttggtcatcaagcatcatctcctaattctacagttgacagccagcagggagaattttggaaccgaggacagactggagcaaacggtgggagaaagtttttagatccatgtagcctacaattgcctttggcttcaattggttaccgaaggtccagccaactggattttcagaattcaccttcttggccaatggcatccacctctgaagtccctgcatttgagtttacagcagaagattgtggcggtgcacattggctggatagaccagaagtggatgatggcactagtgaagaagaaaatgaatctgattccagttcatgcaggacttccaatagtagtcagacattatcatcctgtcatactatggagccatgtacatcagatgaatttttccaagcccttaatcatgccgagcaaacatttaaaaaaatggaaaactatttgagacataaacagttgtgtgatgtaattttagtcgctggtgatcgcagaattccagctcacagattggtgctctcctctgtctcagactattttgctgccatgtttactaatgatgtcagagaggcaagacaagaagaaataaaaatggaaggtgtagaaccaaattcgttgtggtccttgatccagtatgcttatacaggccgccttgaattaaaagaagataatattgagtgcctgttatctacagcttgccttcttcagctttcacaggttgtagaagcatgctgtaagtttttaatgaaacagcttcatccatccaactgtcttggaattcgttcttttgctgatgcccaaggttgtacagatttgcataaagtggctcacaattatactatggagcatttcatggaagtaatcagaaaccaggaatttgtattattaccagccagcgaaattgcaaagctcttggctagtgatgacatgaacattcctaatgaggagacaatattgaatgcacttcttacttgggtccgtcatgatttggaacagagacggaaagatctaagtaaacttttggcttatattaggctacctcttcttgcaccacagttcctggcagacatggaaaataatgtactttttcgggatgatatagaatgtcagaaactcattatggaagcaatgaagtaccatttattaccagagagacgacccatgttacaaagtcctcggacaaaacctaggaagtcaactgttggtacattatttgcagttgggggaatggattcaacaaaaggagcaacaagcattgaaaagtatgatctccgtacaaatatgtggactccagtagcaaatatgaatgggaggaggctacagttcggtgttgcagtgctagatgacaaactgtatgtggttggaggaagagatggactgaagactttgaatactgtagagtgctacaaccccaaaacaaaaacttggagtgtgatgccacctatgtccacacatagacatggccttggtgtggctgtactggaaggtcccatgtatgccgtaggaggacatgatggctggagctatctgaacacagtggaaagatgggaccctcaggctcgccagtggaattttgttgccactatgtctacccctaggagtacagtaggtgtggcagtactaagtggaaaactttatgcagttggtggtcgtgatggaagttcttgtctcaaatcagtagaatgttttgatcctcatactaataagtggacactgtgtgcacagatgtcaaaaaggagaggtggcgtaggagtgacgacctggaatggactgctgtatgctataggggggcacgatgctcccgcatccaacttgacttccagactctcagactgtgtggaaagatatgatcccaaaacagacatgtggactgcagtagcatccatgagcatcagcagagatgcagtgggggtctgtttacttggtgataagttatatgctgttggggggtatgatggacaggcataccttaataccgtggaggcttatgatccccagacaaatgagtggacccaggtatggcattcatgtttcattattacactgactctctttttattaaaacaattcttatggtaaaacagatcccctcaatcttgtccaatactgaaatatatggcataaatatgacaatcacgttttgattagcgatgagaaaaagaggcaatgtttaattttataacataattaaaatccagaattacctttgagatgtaagttaatactcagagaaattattaattatctgctaccacttgcatgatgaagtgttctagcctgattaaagctgataggactactggagggctgcaacaatgggaggggagactggaaaataaaaacaaggatagtagtcagaaaactttgaacaacttgcccatgtgtgagcagtcggatttttaaatactcaacccattgatatctgggagcagattaaagtcctgataacctaatgaagatggcaaccctaaattacactgagtaagaaacctgatctggcagtcttactaacagaaagaatttcacccttgtgtatttctgggagggtctagcacttctaaaaatgatcttttgagatctttgcttccatcatcaccaagaacagaatcaggaatttgtgcttgtgtcacccagttcagtacttggtacataaaagacaataaatgtttaactgagccaagattttcttgtatacaaggagccatgataagtatggtcaagaaaacaaagcttctaggccaggcatggtggcttatgcctataatcccagcactttgggaggctgaggcgggcagatcacgaggtcaggagttcaagaccagcctgaccaatatggtgagaccccatctctactaaaaatacaaaaaaattagccgggcatggtggcacgtgcctgtaatcccagctactcggggggctgaggcaggagaatcgcttgaacccaggaggcagagcttgcagtgtgccaagatcgcaccactgcactccagcctgggtgacagagcgagactccatcaaaaaaaaataaataaataaaaaataaaagatttcattttatgtgaggaattattttaataaaaaaaagagggtttatgctctatagtaataaaatttaccagtaacacccaatcagaaaattttggttccttagtatttagggaagacttttgtttaaatctcttatggaattttacatgttttgatttagaaaagtagatgcaatataatatatttcaagttttatacatattagatgaattgcatggtattttaggcaacttaactataaacaaatttattcatagaagcattgttgccaacaatttagatgacctcgatgaaaaaacacaccaattgacaaaactggctcaaaaggaaataaaaaatccaaacagacctgtaacaagtaaagagattgaaccagtaatcaaaaatctcccaacaaagaaagtccaggactaaatgagtttactggcaaactatgccaaacatataaagaagaattaacactaatccttctcgaactctcccaaaaaatggaagagaaaggagcaccctgtgacattctataaggcggacattaccttaacaccaaagccagacaaagacctcacagggaagctacagaccaatatcccttatgaatatagatgcaaaaaaacttcaaaatactagcaggccaaatccagcagcttattaaaatgatcacacagcatgaccaagtgagatttatcaaagaaatgcagggatggttctacatacaaatgtcaatcgatgtaataatataccatattaatagaatgaaggggaaaaaacagcatgatcacctcaattgataagaaaaagcatttgacaaaaatccaacaccctttcatggtaaaaacactctgcaaactaggaagaaaagggaactttcttaacctgataaagacatccataaaaacccacagctaacaacataatagcaaaacattgaaaatttttcccctaatatcatgaaaattcctgatttccccactgctattcaacattatactagaaggtctagccagagcaattaggcaagaaaaagaaataaaatgaatcccaaataggaagaagtaaaactacatttgcagaaaacatggtcctatatattaaaaatcctaaagaatccacaaaatgattccggctgattttaaaaattcagcaatgttgcaggttgcaagatcaacacacaaaagtctaagaaaaacctgaggggaaattaaaacaatttcatttacaataacatgaaaaagaataaaatacttagaaataaatttgaccaagaaagtgcaagacttggacactgaaaagtacaaaacgttgctgaaagaaattaaagaagacctaaataaatggaagacatcctgtgctggcaggttggaagacttaacattgttaagatggcattactcccaaaattagtctatagatttaatacaatccccattaaaattccagtgacccttttacagaaactgaaaagctgaccctagaatttatatgggattgcaagttactgaaggtactcaagtctgttcaaaacaatcttgaacaagaataaagttgaaggactcacattttccaatttcaaaatttactgcaaagctacttcaatcaaaacagtgttgtgctggtataaaaatatataaagcaatagagtagaatggaaagtccagaaacaaattacgccaatacactatggtcaattgatttttgacaagggttccaggaccattcaatgaagaaagaacagtgtcttcaactaatagtgctaagacaagtgaatattcacatgcaaaagaatgaatttgtacctgtacttcataccatatataaaaattaattcaaaatagatcaaagacctaaatgtaagagctaaaaccataaaactttgagaagaaaatacaggaataaatcttcatgaccttggatttggcaatggtttcttagatatggcaccaaaagcacaagcaacaacagcaaaaaaaaaaaaaaaaaaaaaaaatcaaaattaaaagcttctacatatcaagggacactatgaagaaagtgaaaagacaacccacagaatgggagaaaatatttgtaaatcttacatatctggtaaggaactaatacctagaatatataaggaactccgatgctcgacaacaaaaagacaaaccaattttaaaatgggcaaaggacttaaatagacatttctctaatgaagatatacaaatggccgacaagcacatggaaagcactcaacctcatcagtcattatgcaaatcagcgccacaagaagataccacttcacacctattagaatgacgaaatagacctaggatctaaacctacaggaaaaaaaaatgaataatagagaaaataaatgttagagaggatgtggagaaattgaaaaccttcattcgttgttggtgggaatgttaaatggtgtagccactgtggaaaacagtttggcagttcctcaagttaaaaaaaagaattaccatatgacccagcaagtccactcctggggacatatgactagaaatgaaaacaggtgttcaagcaaaaactttcacgcaaatattcattgcagcac

SEQ ID NO: 289384 - DNA, 3952 bp, Homo sapiens
ccgtcgcgaaaggtatatcttagtatatcattaaaatagtgcttgtttgtttaaccacaaccactattttaatgatatactaaagataacactatttagttttttcagaaacatctgcattatatgtgtgttggttgtggattttgtttctaaaattggcttagtccaataaataaagaaaagcattaaggacttaaagcaacaataaccaaataaaaacttgataggatctttgaagtctatttaaatattcattccattacatctagactcaccaagaactacatgttatgatgttaagttgaagttgaaacatgatgttttgcattaaatttaagatatgcaaatttatgtagagaaaataaatgttatataccctataatctttcacctaattagtatttaattatatggatttgttttatattataaaagatgttttgattttgtcttttgatattgacaaaattgtttggatatccttatgttctcaagtctgtatctgcctcccctgccttatttcttatgttttgccacagttaacccattgtgcttctttgtaatcaaacagtttgtgggagaatgggcttattgaatgtctaaaaaataagtttaaagtgtttgttaccctaagttttttacatttttaaactctaattacatatgtgaatgttattactctcagtgaattgttattgtttgcaaaaatgcactgggcagtaacattttgtgataaatcctataagatataagtcattgagatgtctaagatgctttttattttaaccccagttaataaccaccttacggaaaataatatttgctaatattgtttattgtgaactaggaatcaaagtttttgtatgcatcaatgcacttaatccttataacaaccttatgaggtagttctattccctttttatagctaaggaaattggggtacagagaagttagccccaaggttatatattgcaagtaagtggcagagcagggattcatacaaagaccttctcactcagcagtcttcactcttactattcctgccactaggtagaaaaagaaagatttcggccgggcacagtggctcacgcctataattcccagcactttgggaggctgaggtgggcggatcacgaggtcaggagatggagaccatcctggctaacacagtgaaaccccgtctctactaaaaataaaaaataaaaaaaaattagccaggcgtggtggcgggtgcctgtacgcccagctactcgggaggctgaggcgggagaatggcgtgaacccaggaggaggagcttgcagtgtgccaagatcgcaccactgcactccagcctgggtgacagagcgagactccatcaaaaaaaaataaataaataaaaaataaaagatttcattttatgtgaggaattattttaataaaaaaaagagggtttatgctctatagtaataaaatttaccagtaacacccaatcagaaaattttggttccttagtatttagggaagacttttgtttaaatctcttatggaattttacatgttttgatttagaaaagtagatgcaatataatatatttcaagttttatacatattagatgaattgcatggtattttaggcaacttaactataaacaaatttattcatagaagcattgttgccaacaatttagatgacctcgatgaaaaaacacaccaattgacaaaactggctcaaaaggaaataaaaaatccaaacagacctgtaacaagtaaagagattgaaccagtaatcaaaaatctcccaacaaagaaagtccaggactaaatgagtttactggcaaactatgccaaacatataaagaagaattaacactaatccttctcgaactctcccaaaaaatggaagagaaaggagcaccctgtgacattctataaggcggacattaccttaacaccaaagccagacaaagacctcacagggaagctacagaccaatatcccttatgaatatagatgcaaaaaaacttcaaaatactagcaggccaaatccagcagcttattaaaatgatcacacagcatgaccaagtgagatttatcaaagaaatgcagggatggttctacatacaaatgtcaatcgatgtaataatataccatattaatagaatgaaggggaaaaaacagcatgatcacctcaattgataagaaaaagcatttgacaaaaatccaacaccctttcatggtaaaaacactctgcaaactaggaagaaaagggaactttcttaacctgataaagacatccataaaaacccacagctaacaacataatagcaaaacattgaaaatttttcccctaatatcatgaaaattcctgatttccccactgctattcaacattatactagaaggtctagccagagcaattaggcaagaaaaagaaataaaatgaatcccaaataggaagaagtaaaactacatttgcagaaaacatggtcctatatattaaaaatcctaaagaatccacaaaatgattccggctgattttaaaaattcagcaatgttgcaggttgcaagatcaacacacaaaagtctaagaaaaacctgaggggaaattaaaacaatttcatttacaataacatgaaaaagaataaaatacttagaaataaatttgaccaagaaagtgcaagacttggacactgaaaagtacaaaacgttgctgaaagaaattaaagaagacctaaataaatggaagacatcctgtgctggcaggttggaagacttaacattgttaagatggcattactcccaaaattagtctatagatttaatacaatccccattaaaattccagtgacccttttacagaaactgaaaagctgaccctagaatttatatgggattgcaagttactgaaggtactcaagtctgttcaaaacaatcttgaacaagaataaagttgaaggactcacattttccaatttcaaaatttactgcaaagctacttcaatcaaaacagtgttgtgctggtataaaaatatataaagcaatagagtagaatggaaagtccagaaacaaattacgccaatacactatggtcaattgatttttgacaagggttccaggaccattcaatgaagaaagaacagtgtcttcaactaatagtgctaagacaagtgaatattcacatgcaaaagaatgaatttgtacctgtacttcataccatatataaaaattaattcaaaatagatcaaagacctaaatgtaagagctaaaaccataaaactttgagaagaaaatacaggaataaatcttcatgaccttggatttggcaatggtttcttagatatggcaccaaaagcacaagcaacaacagcaaaaaaaaaaaaaaaaaaaaaaaatcaaaattaaaagcttctacatatcaagggacactatgaagaaagtgaaaagacaacccacagaatgggagaaaatatttgtaaatcttacatatctggtaaggaactaatacctagaatatataaggaactccgatgctcgacaacaaaaagacaaaccaattttaaaatgggcaaaggacttaaatagacatttctctaatgaagatatacaaatggccgacaagcacatggaaagcactcaacctcatcagtcattatgcaaatcagcgccacaagaagataccacttcacacctattagaatgacgaaatagacctaggatctaaacctacaggaaaaaaaaatgaataatagagaaaataaatgttagagaggatgtggagaaattgaaaaccttcattcgttgttggtgggaatgttaaatggtgtagccactgtggaaaacagtttggcagttcctcaagttaaaaaaaagaattaccatatgacccagcaagtccactcctggggacatatgactagaaatgaaaacaggtgttcaagcaaaaactttcacgcaaatattcattgcagcac

SEQ ID NO: 289385 - DNA, 5827 bp, Homo sapiens
tgtttcatctttattcattatcctttgttctttaaaatctgatatattggcataaaagtaattgtacatatatatatgaatgtgatttattttcctttacatctttttgttgtgtacagcagggcatatacttctcttgtcttggttggatgcacaaatctgtgtgcagtgctttttgcccgttgcctagacgatcacttggtttctctgaggatgtctggttctcgtaaagagtttgatgtgaaacagattttgaaaatcagatggaggtggtttggtcatcaagcatcatctcctaattctacagttgacagccagcagggagaattttggaaccgaggacagactggagcaaacggtgggagaaagtttttagatccatgtagcctacaattgcctttggcttcaattggttaccgaaggtccagccaactggattttcagaattcaccttcttggccaatggcatccacctctgaagtccctgcatttgagtttacagcagaagattgtggcggtgcacattggctggatagaccagaagtggatgatggcactagtgaagaagaaaatgaatctgattccagttcatgcaggacttccaatagtagtcagacattatcatcctgtcatactatggagccatgtacatcagatgaatttttccaagcccttaatcatgccgagcaaacatttaaaaaaatggaaaactatttgagacataaacagttgtgtgatgtaattttagtcgctggtgatcgcagaattccagctcacagattggtgctctcctctgtctcagactattttgctgccatgtttactaatgatgtcagagaggcaagacaagaagaaataaaaatggaaggtgtagaaccaaattcgttgtggtccttgatccagtatgcttatacaggccgccttgaattaaaagaagataatattgagtgcctgttatctacagcttgccttcttcagctttcacaggttgtagaagcatgctgtaagtttttaatgaaacagcttcatccatccaactgtcttggaattcgttcttttgctgatgcccaaggttgtacagatttgcataaagtggctcacaattatactatggagcatttcatggaagtaatcagaaaccaggaatttgtattattaccagccagcgaaattgcaaagctcttggctagtgatgacatgaacattcctaatgaggagacaatattgaatgcacttcttacttgggtccgtcatgatttggaacagagacggaaagatctaagtaaacttttggcttatattaggctacctcttcttgcaccacagttcctggcagacatggaaaataatgtactttttcgggatgatatagaatgtcagaaactcattatggaagcaatgaagtaccatttattaccagagagacgacccatgttacaaagtcctcggacaaaacctaggaagtcaactgttggtacattatttgcagttgggggaatggattcaacaaaaggagcaacaagcattgaaaagtatgatctccgtacaaatatgtggactccagtagcaaatatgaatgggaggaggctacagttcggtgttgcagtgctagatgacaaactgtatgtggttggaggaagagatggactgaagactttgaatactgtagagtgctacaaccccaaaacaaaaacttggagtgtgatgccacctatgtccacacatagacatggccttggtgtggctgtactggaaggtcccatgtatgccgtaggaggacatgatggctggagctatctgaacacagtggaaagatgggaccctcaggctcgccagtggaattttgttgccactatgtctacccctaggagtacagtaggtgtggcagtactaagtggaaaactttatgcagttggtggtcgtgatggaagttcttgtctcaaatcagtagaatgttttgatcctcatactaataagtggacactgtgtgcacagatgtcaaaaaggagaggtggcgtaggagtgacgacctggaatggactgctgtatgctataggggggcacgatgctcccgcatccaacttgacttccagactctcagactgtgtggaaagatatgatcccaaaacagacatgtggactgcagtagcatccatgagcatcagcagagatgcagtgggggtctgtttacttggtgataagttatatgctgttggggggtatgatggacaggcataccttaataccgtggaggcttatgatccccagacaaatgagtggacccaggtatggcattcatgtttcattattacactgactctctttttattaaaacaattcttatggtaaaacagatcccctcaatcttgtccaatactgaaatatatggcataaatatgacaatcacgttttgattagcgatgagaaaaagaggcaatgtttaattttataacataattaaaatccagaattacctttgagatgtaagttaatactcagagaaattattaattatctgctaccacttgcatgatgaagtgttctagcctgattaaagctgataggactactggagggctgcaacaatgggaggggagactggaaaataaaaacaaggatagtagtcagaaaactttgaacaacttgcccatgtgtgagcagtcggatttttaaatactcaacccattgatatctgggagcagattaaagtcctgataacctaatgaagatggcaaccctaaattacactgagtaagaaacctgatctggcagtcttactaacagaaagaatttcacccttgtgtatttctgggagggtctagcacttctaaaaatgatcttttgagatctttgcttccatcatcaccaagaacagaatcaggaatttgtgcttgtgtcacccagttcagtacttggtacataaaagacaataaatgtttaactgagccaagattttcttgtatacaaggagccatgataagtatggtcaagaaaacaaagcttctaggccaggcatggtggcttatgcctataatcccagcactttgggaggctgaggcgggcagatcacgaggtcaggagttcaagaccagcctgaccaatatggtgagaccccatctctactaaaaatacaaaaaaattagccgggcatggtggcacgtgcctgtaatcccagctactcggggggctgaggcaggagaatcgcttgaacccaggaggcagagcttgcagtgtgccaagatcgcaccactgcactccagcctgggtgacagagcgagactccatcaaaaaaaaataaataaataaaaaataaaagatttcattttatgtgaggaattattttaataaaaaaaagagggtttatgctctatagtaataaaatttaccagtaacacccaatcagaaaattttggttccttagtatttagggaagacttttgtttaaatctcttatggaattttacatgttttgatttagatggtattttaggcaacttaactataaacaaatttattcatagaagcattgttgccaacaatttagatgacctcgatgaaaaaacacaccaattgacaaaactggctcaaaaggaaataaaaaatccaaacagacctgtaacaagtaaagagattgaaccagtaatcaaaaatctcccaacaaagaaagtccaggactaaatgagtttactggcaaactatgccaaacatataaagaagaattaacactaatccttctcgaactctcccaaaaaatggaagagaaaggagcaccctgtgacattctataaggcggacattaccttaacaccaaagccagacaaagacctcacagggaagctacagaccaatatcccttatgaatatagatgcaaaaaaacttcaaaatactagcaggccaaatccagcagcttattaaaatgatcacacagcatgaccaagtgagatttatcaaagaaatgcagggatggttctacatacaaatgtcaatcgatgtaataatataccatattaatagaatgaaggggaaaaaacagcatgatcacctcaattgataagaaaaagcatttgacaaaaatccaacaccctttcatggtaaaaacactctgcaaactaggaagaaaagggaactttcttaacctgataaagacatccataaaaacccacagctaacaacataatagcaaaacattgaaaatttttcccctaatatcatgaaaattcctgatttccccactgctattcaacattatactagaaggtctagccagagcaattaggcaagaaaaagaaataaaatgaatcccaaataggaagaagtaaaactacatttgcagaaaacatggtcctatatattaaaaatcctaaagaatccacaaaatgattccggctgattttaaaaattcagcaatgttgcaggttgcaagatcaacacacaaaagtctaagaaaaacctgaggggaaattaaaacaatttcatttacaataacatgaaaaagaataaaatacttagaaataaatttgaccaagaaagtgcaagacttggacactgaaaagtacaaaacgttgctgaaagaaattaaagaagacctaaataaatggaagacatcctgtgctggcaggttggaagacttaacattgttaagatggcattactcccaaaattagtctatagatttaatacaatccccattaaaattccagtgacccttttacagaaactgaaaagctgaccctagaatttatatgggattgcaagttactgaaggtactcaagtctgttcaaaacaatcttgaacaagaataaagttgaaggactcacattttccaatttcaaaatttactgcaaagctacttcaatcaaaacagtgttgtgctggtataaaaatatataaagcaatagagtagaatggaaagtccagaaacaaattacgccaatacactatggtcaattgatttttgacaagggttccaggaccattcaatgaagaaagaacagtgtcttcaactaatagtgctaagacaagtgaatattcacatgcaaaagaatgaatttgtacctgtacttcataccatatataaaaattaattcaaaatagatcaaagacctaaatgtaagagctaaaaccataaaactttgagaagaaaatacaggaataaatcttcatgaccttggatttggcaatggtttcttagatatggcaccaaaagcacaagcaacaacagcaaaaaaaaaaaaaaaaaaaaaaaatcaaaattaaaagcttctacatatcaagggacactatgaagaaagtgaaaagacaacccacagaatgggagaaaatatttgtaaatcttacatatctggtaaggaactaatacctagaatatataaggaactccgatgctcgacaacaaaaagacaaaccaattttaaaatgggcaaaggacttaaatagacatttctctaatgaagatatacaaatggccgacaagcacatggaaagcactcaacctcatcagtcattatgcaaatcagcgccacaagaagataccacttcacacctattagaatgacgaaatagacctaggatctaaacctacaggaaaaaaaaatgaataatagagaaaataaatgttagagaggatgtggagaaattgaaaaccttcattcgttgttggtgggaatgttaaatggtgtagccactgtggaaaacagtttggcagttcctcaagttaaaaaaaagaattaccatatgacccagcaagtccactcctggggacatatgactagaaatgaaaacaggtgttcaagcaaaaactttcacgcaaatattcattgcagcac

SEQ ID NO: 289386 - DNA, 3783 bp, Homo sapiens
tgtttcatctttattcattatcctttgttctttaaaatctgatatattggcataaaagtaattgtacatatatatatgaatgtgatttattttcctttacatctttttgttgtgtacagcagggcatatacttctcttgtcttggttggatgcacaaatctgtgtgcagtgctttttgcccgttgcctagacgatcacttggtttctctgaggatgtctggttctcgtaaagagtttgatgtgaaacagattttgaaaatcagatggaggtggtttggtcatcaagcatcatctcctaattctacagttgacagccagcagggagaattttggaaccgaggacagactggagcaaacggtgggagaaagtttttagatccatgtagcctacaattgcctttggcttcaattggttaccgaaggtccagccaactggattttcagaattcaccttcttggccaatggcatccacctctgaagtccctgcatttgagtttacagcagaagattgtggcggtgcacattggctggatagaccagaagtggatgatggcactagtgaagaagaaaatgaatctgattccagttcatgcaggacttccaatagtagtcagacattatcatcctgtcatactatggagccatgtacatcagatgaatttttccaagcccttaatcatgccgagcaaacatttaaaaaaatggaaaactatttgagacataaacagttgtgtgatgtaattttagtcgctggtgatcgcagaattccagctcacagattggtgctctcctctgtctcagactattttgctgccatgtttactaatgatgtcagagaggcaagacaagaagaaataaaaatggaaggtgtagaaccaaattcgttgtggtccttgatccagtatgcttatacaggccgccttgaattaaaagaagataatattgagtgcctgttatctacagcttgccttcttcagctttcacaggttgtagaagcatgctgtaagtttttaatgaaacagcttcatccatccaactgtcttggaattcgttcttttgctgatgcccaaggttgtacagatttgcataaagtggctcacaattatactatggagcatttcatggaagtaatcagaaaccaggaatttgtattattaccagccagcgaaattgcaaagctcttggctagtgatgacatgaacattcctaatgaggagacaatattgaatgcacttcttacttgggtccgtcatgatttggaacagagacggaaagatctaagtaaacttttggcttatattaggctacctcttcttgcaccacagttcctggcagacatggaaaataatgtactttttcgggatgatatagaatgtcagaaactcattatggaagcaatgaagtaccatttattaccagagagacgacccatgttacaaagtcctcggacaaaacctaggaagtcaactgttggtacattatttgcagttgggggaatggattcaacaaaaggagcaacaagcattgaaaagtatgatctccgtacaaatatgtggactccagtagcaaatatgaatgggaggaggctacagttcggtgttgcagtgctagatgacaaactgtatgtggttggaggaagagatggactgaagactttgaatactgtagagtgctacaaccccaaaacaaaaacttggagtgtgatgccacctatgtccacacatagacatggccttggtgtggctgtactggaaggtcccatgtatgccgtaggaggacatgatggctggagctatctgaacacagtggaaagatgggaccctcaggctcgccagtggaattttgttgccactatgtctacccctaggagtacagtaggtgtggcagtactaagtggaaaactttatgcagttggtggtcgtgatggaagttcttgtctcaaatcagtagaatgttttgatcctcatactaataagtggacactgtgtgcacagatgtcaaaaaggagaggtggcgtaggagtgacgacctggaatggactgctgtatgctataggggggcacgatgctcccgcatccaacttgacttccagactctcagactgtgtggaaagatatgatcccaaaacagacatgtggactgcagtagcatccatgagcatcagcagagatgcagtgggggtctgtttacttggtgataagttatatgctgttggggggtatgatggacaggcataccttaataccgtggaggcttatgatccccagacaaatgagtggacccaggtattttcacatacttttgaggacagcaaagatcacctggtggccatcaagcagaccatctggaggcaaaactccttatctgaggaattcagaagtcattagactgccctattatctaaagccggcatcttgtactaggcttctttaccaaaaatgtatttaataaaacatttccaacctgtgaaaaaaaaaaaaaaaaatttttttttttttgcttcaaagagcttttctcagagcagggatttattttcattacatgcaacatggacaaacactgttctggttttcatgacaatttgaattcaaagtaatatgtttttctaaaattcagtgtatttatttggccatatggatgctccttgtgttcttggtcacatattaaagaaactggcactttggctgcaagaacaaataaaaaatatcataaatccaactggtctttgatttgggtctaggttaataactaaagaaccattcagcaataatggcttgaacatttatatatcctatgaaaccgcaattagttaagaggctgctgattctaataactatgacaccagcaagggagtgaggggagaaatgataactctggatgccaaattcagagcaaagtatctattatctccttctcacttttgcagtatctataaataaagtggtggggggagaattatatgaataatgttaaataaaagtgcatacagaactgagaaatattttcatggaatttgccacttagttcttaaaattcttataaggaaaataaccatttacaacaaaagactagttacactgttgctgtttagaacatgagagcaaaatgagtaacaatcaaattctctggtttaaacttaattatcttaaaacatgttattctgtaagttgacatctatgccttgaaaattcaaggcagaaagtaaaatcatttagaaagccagaaattccatcaatacatctagacagatgtttgcttgtagtttttggtatccaaaaccttttttccacacatcgcacagatgccttttttgtaggcacagccctggcagtaatgagaacctggttggtgcacagaacttttacaaattctacaagtggagaacttattctttccatatggatcaaatcttgctttttttgaagtcaaagctttattttcattcagctttcttccaccactttctgtggtattcctagcaccacctttccatgtatctggagtgataacagtaccaagtttcttttcacatttttcgcacaccatccttccccacgacacctttttcttcccgatctgaacccctgttgactaatcttgcctgggtttgtgtaggtctgcaggaaggaaggctgaaaaagcggacgaagattttgacttaagtgggactttgtgatttaattttttcttttttttaagtggggaggaaggggaagctagatggactaggagagacttgattttggtgctaaagttccccagttcatatgtgacatcttttt

SEQ ID NO: 289387 - DNA, 3772 bp, Homo sapiens
  misc_feature (3771)..(3771): n is a, c, g, or t
tgtttcatctttattcattatcctttgttctttaaaatctgatatattggcataaaagtaattgtacatatatatatgaatgtgatttattttcctttacatctttttgttgtgtacagcagggcatatacttctcttgtcttggttggatgcacaaatctgtgtgcagtgctttttgcccgttgcctagacgatcacttggtttctctgaggatgtctggttctcgtaaagagtttgatgtgaaacagattttgaaaatcagatggaggtggtttggtcatcaagcatcatctcctaattctacagttgacagccagcagggagaattttggaaccgaggacagactggagcaaacggtgggagaaagtttttagatccatgtagcctacaattgcctttggcttcaattggttaccgaaggtccagccaactggattttcagaattcaccttcttggccaatggcatccacctctgaagtccctgcatttgagtttacagcagaagattgtggcggtgcacattggctggatagaccagaagtggatgatggcactagtgaagaagaaaatgaatctgattccagttcatgcaggacttccaatagtagtcagacattatcatcctgtcatactatggagccatgtacatcagatgaatttttccaagcccttaatcatgccgagcaaacatttaaaaaaatggaaaactatttgagacataaacagttgtgtgatgtaattttagtcgctggtgatcgcagaattccagctcacagattggtgctctcctctgtctcagactattttgctgccatgtttactaatgatgtcagagaggcaagacaagaagaaataaaaatggaaggtgtagaaccaaattcgttgtggtccttgatccagtatgcttatacaggccgccttgaattaaaagaagataatattgagtgcctgttatctacagcttgccttcttcagctttcacaggttgtagaagcatgctgtaagtttttaatgaaacagcttcatccatccaactgtcttggaattcgttcttttgctgatgcccaaggttgtacagatttgcataaagtggctcacaattatactatggagcatttcatggaagtaatcagaaaccaggaatttgtattattaccagccagcgaaattgcaaagctcttggctagtgatgacatgaacattcctaatgaggagacaatattgaatgcacttcttacttgggtccgtcatgatttggaacagagacggaaagatctaagtaaacttttggcttatattaggctacctcttcttgcaccacagttcctggcagacatggaaaataatgtactttttcgggatgatatagaatgtcagaaactcattatggaagcaatgaagtaccatttattaccagagagacgacccatgttacaaagtcctcggacaaaacctaggaagtcaactgttggtacattatttgcagttgggggaatggattcaacaaaaggagcaacaagcattgaaaagtatgatctccgtacaaatatgtggactccagtagcaaatatgaatgggaggaggctacagttcggtgttgcagtgctagatgacaaactgtatgtggttggaggaagagatggactgaagactttgaatactgtagagtgctacaaccccaaaacaaaaacttggagtgtgatgccacctatgtccacacatagacatggccttggtgtggctgtactggaaggtcccatgtatgccgtaggaggacatgatggctggagctatctgaacacagtggaaagatgggaccctcaggctcgccagtggaattttgttgccactatgtctacccctaggagtacagtaggtgtggcagtactaagtggaaaactttatgcagttggtggtcgtgatggaagttcttgtctcaaatcagtagaatgttttgatcctcatactaataagtggacactgtgtgcacagatgtcaaaaaggagaggtggcgtaggagtgacgacctggaatggactgctgtatgctataggggggcacgatgctcccgcatccaacttgacttccagactctcagactgtgtggaaagatatgatcccaaaacagacatgtggactgcagtagcatccatgagcatcagcagagatgcagtgggggtctgtttacttggtgataagttatatgctgttggggggtatgatggacaggcataccttaataccgtggaggcttatgatccccagacaaatgagtggacccaggttgctccactgtgcctaggaagagctggagcttgtgttgtgactgtaaaattataatttagtgccccgttttctacatgaagacaccgtcttcctttattaatttagtataattattctatcaatggatacatttttagtaaatgtgcattgtcacaatcctgggcacaaagtgcctgatgtcaaaatgaagatagtaaaacaagggaggaagcagtggatggaccaggattaattcctttcatttcttagtaaattaaaacctgcagctggtggattgtgatcacacattcccgaagtaataagtgaggacgaatgcactgctctggaacataacccagtgctaactgggggtttcatttattcagtcaagcacatcttactcacatccagatttattttcctacagtgcaaacacaccagatgaaactttaaaatgttactttttgtaagcttatcataaatgagttgcagtaatttgtttgcttgtttgtttaaccacaaccactattttaatgatatactaaagataacactatttagttttttcagaaacatctgcattatatgtgtgttggttgtggattttgtttctaaaattggcttagtccaataaataaagaaaagcattaaggacttaaagcaacaataaccaaataaaaacttgataggatctttgaagtctatttaaatattcattccattacatctagactcaccaagaactacatgttatgatgttaagttgaagttgaaacatgatgttttgcattaaatttaagatatgcaaatttatgtagagaaaataaatgttatataccctataatctttcacctaattagtatttaattatatggatttgttttatattataaaagatgttttgattttgtcttttgatattgacaaaattgtttggatatccttatgttctcaagtctgtatctgcctcccctgccttatttcttatgttttgccacagttaacccattgtgcttctttgtaatcaaacagtttgtgggagaatgggcttattgaatgtctaaaaaataagtttaaagtgtttgttaccctaagttttttacatttttaaactctaattacatatgtgaatgttattactctcagtgaattgttattgtttgcaaaaatgcactgggcagtaacattttgtgataaatcctataagatataagtcattgagatgtctaagatgctttttattttaaccccagttaataaccaccttacggaaaataattggtagtttggtatgggaacaggaacacaggttgggtggctaaggctaaccttaaaccttgggtgttaccttttagcagaatgggacaaaatcccagtatggcaaggggacggcaaacacttccaggctatcgccgcaaaaaaaagcggagcccaacacgggggggacaagagacacacgcaaaaaagggggggggggggcatataaaacggaataatcgggna

SEQ ID NO: 289388 - DNA, 3606 bp, Homo sapiens
  misc_feature (3492)..(3492): n is a, c, g, or t
tgtttcatctttattcattatcctttgttctttaaaatctgatatattggcataaaagtaattgtacatatatatatgaatgtgatttattttcctttacatctttttgttgtgtacagcagggcatatacttctcttgtcttggttggatgcacaaatctgtgtgcagtgctttttgcccgttgcctagacgatcacttggtttctctgaggatgtctggttctcgtaaagagtttgatgtgaaacagattttgaaaatcagatggaggtggtttggtcatcaagcatcatctcctaattctacagttgacagccagcagggagaattttggaaccgaggacagactggagcaaacggtgggagaaagtttttagatccatgtagcctacaattgcctttggcttcaattggttaccgaaggtccagccaactggattttcagaattcaccttcttggccaatggcatccacctctgaagtccctgcatttgagtttacagcagaagattgtggcggtgcacattggctggatagaccagaagtggatgatggcactagtgaagaagaaaatgaatctgattccagttcatgcaggacttccaatagtagtcagacattatcatcctgtcatactatggagccatgtacatcagatgaatttttccaagcccttaatcatgccgagcaaacatttaaaaaaatggaaaactatttgagacataaacagttgtgtgatgtaattttagtcgctggtgatcgcagaattccagctcacagattggtgctctcctctgtctcagactattttgctgccatgtttactaatgatgtcagagaggcaagacaagaagaaataaaaatggaaggtgtagaaccaaattcgttgtggtccttgatccagtatgcttatacaggccgccttgaattaaaagaagataatattgagtgcctgttatctacagcttgccttcttcagctttcacaggttgtagaagcatgctgtaagtttttaatgaaacagcttcatccatccaactgtcttggaattcgttcttttgctgatgcccaaggttgtacagatttgcataaagtggctcacaattatactatggagcatttcatggaagtaatcagaaaccaggaatttgtattattaccagccagcgaaattgcaaagctcttggctagtgatgacatgaacattcctaatgaggagacaatattgaatgcacttcttacttgggtccgtcatgatttggaacagagacggaaagatctaagtaaacttttggcttatattaggctacctcttcttgcaccacagttcctggcagacatggaaaataatgtactttttcgggatgatatagaatgtcagaaactcattatggaagcaatgaagtaccatttattaccagagagacgacccatgttacaaagtcctcggacaaaacctaggaagtcaactgttggtacattatttgcagttgggggaatggattcaacaaaaggagcaacaagcattgaaaagtatgatctccgtacaaatatgtggactccagtagcaaatatgaatgggaggaggctacagttcggtgttgcagtgctagatgacaaactgtatgtggttggaggaagagatggactgaagactttgaatactgtagagtgctacaaccccaaaacaaaaacttggagtgtgatgccacctatgtccacacatagacatggccttggtgtggctgtactggaaggtcccatgtatgccgtaggaggacatgatggctggagctatctgaacacagtggaaagatgggaccctcaggctcgccagtggaattttgttgccactatgtctacccctaggagtacagtaggtgtggcagtactaagtggaaaactttatgcagttggtggtcgtgatggaagttcttgtctcaaatcagtagaatgttttgatcctcatactaataagtggacactgtgtgcacagatgtcaaaaaggagaggtggcgtaggagtgacgacctggaatggactgctgtatgctataggggggcacgatgctcccgcatccaacttgacttccagactctcagactgtgtggaaagatatgatcccaaaacagacatgtggactgcagtagcatccatgagcatcagcagagatgcagtgggggtctgtttacttggtgataagttatatgctgttggggggtatgatggacaggcataccttaataccgtggaggcttatgatccccagacaaatgagtggacccaggttgctccactgtgcctaggaagagctggagcttgtgttgtgactgtaaaattataatttagtgccccgttttctacatgaagacaccgtcttcctttattaatttagtataattattctatcaatggatacatttttagtaaatgtgcattgtcacaatcctgggcacaaagtgcctgatgtcaaaatgaagatagtaaaacaagggaggaagcagtggatggaccaggattaattcctttcatttcttagtaaattaaaacctgcagctggtggattgtgatcacacattcccgaagtaataagtgaggacgaatgcactgctctggaacataacccagtgctaactgggggtttcatttattcagtcaagcacatcttactcacatccagatttattttcctacagtgcaaacacaccagatgaaactttaaaatgttactttttgtaagcttatcataaatgagttgcagtaatttgtttgcttgtttgtttaaccacaaccactattttaatgatatactaaagataacactatttagttttttcagaaacatctgcattatatgtgtgttggttgtggattttgtttctaaaattggcttagtccaataaataaagaaaagcattaaggacttaaagcaacaataaccaaataaaaacttgataggatctttgaagtctatttaaatattcattccattacatctagactcaccaagaactacatgttatgatgttaagttgaagttgaaacatgatgttttgcattaaatttaagatatgcaaatttatgtagagaaaataaatgttatataccctataatctttcacctaattagtatttaattatatggatttgttttatattataaaagatgttttgattttgtcttttgatattgacaaaattgtttggatatccttatgttctcaagtctgtatctgcctcccctgccttatttcttatgttttgccacagttaacccattgtgcttctttgtaatcaaacagtttgtgggagaatgggcttattgaatgtctaaaaaataagtttaaagtgtttgttaccctaagttttttacatttttaaactctaattacatatgtgaatgttattactctcaaaaacatttccaacctgtgaaaaaaaaaaaaaaaaacctcgtgccgaattcggcacgagcttctaagcaccacatggntaagagggcaaaagttttgcacctatgatggtattttaggtggtataaataaatccacttttgtctattggtaactattttggcaaattaatttttgggtgtaataactggggc

SEQ ID NO: 289389 - DNA, 3630 bp, Homo sapiens
tgtttcatctttattcattatcctttgttctttaaaatctgatatattggcataaaagtaattgtacatatatatatgaatgtgatttattttcctttacatctttttgttgtgtacagcagggcatatacttctcttgtcttggttggatgcacaaatctgtgtgcagtgctttttgcccgttgcctagacgatcacttggtttctctgaggatgtctggttctcgtaaagagtttgatgtgaaacagattttgaaaatcagatggaggtggtttggtcatcaagcatcatctcctaattctacagttgacagccagcagggagaattttggaaccgaggacagactggagcaaacggtgggagaaagtttttagatccatgtagcctacaattgcctttggcttcaattggttaccgaaggtccagccaactggattttcagaattcaccttcttggccaatggcatccacctctgaagtccctgcatttgagtttacagcagaagattgtggcggtgcacattggctggatagaccagaagtggatgatggcactagtgaagaagaaaatgaatctgattccagttcatgcaggacttccaatagtagtcagacattatcatcctgtcatactatggagccatgtacatcagatgaatttttccaagcccttaatcatgccgagcaaacatttaaaaaaatggaaaactatttgagacataaacagttgtgtgatgtaattttagtcgctggtgatcgcagaattccagctcacagattggtgctctcctctgtctcagactattttgctgccatgtttactaatgatgtcagagaggcaagacaagaagaaataaaaatggaaggtgtagaaccaaattcgttgtggtccttgatccagtatgcttatacaggccgccttgaattaaaagaagataatattgagtgcctgttatctacagcttgccttcttcagctttcacaggttgtagaagcatgctgtaagtttttaatgaaacagcttcatccatccaactgtcttggaattcgttcttttgctgatgcccaaggttgtacagatttgcataaagtggctcacaattatactatggagcatttcatggaagtaatcagaaaccaggaatttgtattattaccagccagcgaaattgcaaagctcttggctagtgatgacatgaacattcctaatgaggagacaatattgaatgcacttcttacttgggtccgtcatgatttggaacagagacggaaagatctaagtaaacttttggcttatattaggctacctcttcttgcaccacagttcctggcagacatggaaaataatgtactttttcgggatgatatagaatgtcagaaactcattatggaagcaatgaagtaccatttattaccagagagacgacccatgttacaaagtcctcggacaaaacctaggaagtcaactgttggtacattatttgcagttgggggaatggattcaacaaaaggagcaacaagcattgaaaagtatgatctccgtacaaatatgtggactccagtagcaaatatgaatgggaggaggctacagttcggtgttgcagtgctagatgacaaactgtatgtggttggaggaagagatggactgaagactttgaatactgtagagtgctacaaccccaaaacaaaaacttggagtgtgatgccacctatgtccacacatagacatggccttggtgtggctgtactggaaggtcccatgtatgccgtaggaggacatgatggctggagctatctgaacacagtggaaagatgggaccctcaggctcgccagtggaattttgttgccactatgtctacccctaggagtacagtaggtgtggcagtactaagtggaaaactttatgcagttggtggtcgtgatggaagttcttgtctcaaatcagtagaatgttttgatcctcatactaataagtggacactgtgtgcacagatgtcaaaaaggagaggtggcgtaggagtgacgacctggaatggactgctgtatgctataggggggcacgatgctcccgcatccaacttgacttccagactctcagactgtgtggaaagatatgatcccaaaacagacatgtggactgcagtagcatccatgagcatcagcagagatgcagtgggggtctgtttacttggtgataagttatatgctgttggggggtatgatggacaggcataccttaataccgtggaggcttatgatccccagacaaatgagtggacccaggttgctccactgtgcctaggaagagctggagcttgtgttgtgactgtaaaattataatttagtgccccgttttctacatgaagacaccgtcttcctttattaatttagtataattattctatcaatggatacatttttagtaaatgtgcattgtcacaatcctgggcacaaagtgcctgatgtcaaaatgaagatagtaaaacaagggaggaagcagtggatggaccaggattaattcctttcatttcttagtaaattaaaacctgcagctggtggattgtgatcacacattcccgaagtaataagtgaggacgaatgcactgctctggaacataacccagtgctaactgggggtttcatttattcagtcaagcacatcttactcacatccagatttattttcctacagtgcaaacacaccagatgaaactttaaaatgttactttttgtaagcttatcataaatgagttgcagtaatttgtttgcttgtttgtttaaccacaaccactattttaatgatatactaaagataacactatttagttttttcagaaacatctgcattatatgtgtgttggttgtggattttgtttctaaaattggcttagtccaataaataaagaaaagcattaaggacttaaagcaacaataaccaaataaaaacttgataggatctttgaagtctatttaaatattcattccattacatctagactcaccaagaactacatgttatgatgttaagttgaagttgaaacatgatgttttgcattaaatttaagatatgcaaatttatgtagagaaaataaatgttatataccctataatctttcacctaattagtatttaattatatggatttgttttatattataaaagatgttttgattttgtcttttgatattgacaaaattgtttggatatcctcgtgatccgcctgcctcggcttcaaagtgctgggattacaggtgtgagccaccaacccagcaatgttttcttaataagtatagttttctagggaaagttaattcatttttgtctagtacatatatgtccactctatccactgttgtaaggtcggtcactgtagtcacggagatgtacatagaacttcatgaggtatatagatactcatctgtctaggcagttccccaattttctgaagaatgttacacagcaaatttctattgctttattaatagtgcccgtcaaccatgtcccttccagacatagttcatcaattctagcgtatatagactggcggaggcatggttctggtgccatacctgtctcgctttactatgcccatctgtttgcgtgacaaaccttttcaatcataaacca

SEQ ID NO: 289390 - DNA, 3135 bp, Homo sapiens
  misc_feature (3061)..(3061): n is a, c, g, or t
  misc_feature (3098)..(3098): n is a, c, g, or t
tgtttcatctttattcattatcctttgttctttaaaatctgatatattggcataaaagtaattgtacatatatatatgaatgtgatttattttcctttacatctttttgttgtgtacagcagggcatatacttctcttgtcttggttggatgcacaaatctgtgtgcagtgctttttgcccgttgcctagacgatcacttggtttctctgaggatgtctggttctcgtaaagagtttgatgtgaaacagattttgaaaatcagatggaggtggtttggtcatcaagcatcatctcctaattctacagttgacagccagcagggagaattttggaaccgaggacagactggagcaaacggtgggagaaagtttttagatccatgtagcctacaattgcctttggcttcaattggttaccgaaggtccagccaactggattttcagaattcaccttcttggccaatggcatccacctctgaagtccctgcatttgagtttacagcagaagattgtggcggtgcacattggctggatagaccagaagtggatgatggcactagtgaagaagaaaatgaatctgattccagttcatgcaggacttccaatagtagtcagacattatcatcctgtcatactatggagccatgtacatcagatgaatttttccaagcccttaatcatgccgagcaaacatttaaaaaaatggaaaactatttgagacataaacagttgtgtgatgtaattttagtcgctggtgatcgcagaattccagctcacagattggtgctctcctctgtctcagactattttgctgccatgtttactaatgatgtcagagaggcaagacaagaagaaataaaaatggaaggtgtagaaccaaattcgttgtggtccttgatccagtatgcttatacaggccgccttgaattaaaagaagataatattgagtgcctgttatctacagcttgccttcttcagctttcacaggttgtagaagcatgctgtaagtttttaatgaaacagcttcatccatccaactgtcttggaattcgttcttttgctgatgcccaaggttgtacagatttgcataaagtggctcacaattatactatggagcatttcatggaagtaatcagaaaccaggaatttgtattattaccagccagcgaaattgcaaagctcttggctagtgatgacatgaacattcctaatgaggagacaatattgaatgcacttcttacttgggtccgtcatgatttggaacagagacggaaagatctaagtaaacttttggcttatattaggctacctcttcttgcaccacagttcctggcagacatggaaaataatgtactttttcgggatgatatagaatgtcagaaactcattatggaagcaatgaagtaccatttattaccagagagacgacccatgttacaaagtcctcggacaaaacctaggaagtcaactgttggtacattatttgcagttgggggaatggattcaacaaaaggagcaacaagcattgaaaagtatgatctccgtacaaatatgtggactccagtagcaaatatgaatgggaggaggctacagttcggtgttgcagtgctagatgacaaactgtatgtggttggaggaagagatggactgaagactttgaatactgtagagtgctacaaccccaaaacaaaaacttggagtgtgatgccacctatgtccacacatagacatggccttggtgtggctgtactggaaggtcccatgtatgccgtaggaggacatgatggctggagctatctgaacacagtggaaagatgggaccctcaggctcgccagtggaattttgttgccactatgtctacccctaggagtacagtaggtgtggcagtactaagtggaaaactttatgcagttggtggtcgtgatggaagttcttgtctcaaatcagtagaatgttttgatcctcatactaataagtggacactgtgtgcacagatgtcaaaaaggagaggtggcgtaggagtgacgacctggaatggactgctgtatgctataggggggcacgatgctcccgcatccaacttgacttccagactctcagactgtgtggaaagatatgatcccaaaacagacatgtggactgcagtagcatccatgagcatcagcagagatgcagtgggggtctgtttacttggtgataagttatatgctgttggggggtatgatggacaggcataccttaataccgtggaggcttatgatccccagacaaatgagtggacccaggttgctccactgtgcctaggaagagctggagcttgtgttgtgactgtaaaattataatttagtgccccgttttctacatgaagacaccgtcttcctttattaatttagtataattattctatcaatggatacatttttagtaaatgtgcattgtcacaatcctgggcacaaagtgcctgatgtcaaaatgaagatagtaaaacaagggaggaagcagtggatggaccaggattaattcctttcatttcttagtaaattaaaacctgcagctggtggattgtgatcacacattcccgaagtaataagtgaggacgaatgcactgctctggaacataacccagtgctaactgggggtttcatttattcagtcaagcacatcttactcacatccagatttattttcctacagtgcaaacacaccagatgaaactttaaaatgttactttttgtaagcttatcataaatgagttgcagtaatttgtttgcttgtttgtttaaccacaaccactattttaatgatatactaaagataacactatttagttttttcagaaacatctgcattatatgtgtgttggttgtggattttgtttctaaaattggcttagtccaataaataaagaaaagcattaaggacttaaagcaacaataaccaaataaaaacttgataggatctttgaagtctatttaaatattcattccattacatctagactcaccaagaactacatgttatgatgttaagttgaagttgaaacatgatgttttgcataantgtatgacaaagaatttacatgccccgcggaggggtntcaatgcttcaggcacgaatatataaatgaaaaatcc

SEQ ID NO: 289391 - DNA, 2219 bp, Homo sapiens
tgtttcatctttattcattatcctttgttctttaaaatctgatatattggcataaaagtaattgtacatatatatatgaatgtgatttattttcctttacatctttttgttgtgtacagcagggcatatacttctcttgtcttggttggatgcacaaatctgtgtgcagtgctttttgcccgttgcctagacgatcacttggtttctctgaggatgtctggttctcgtaaagagtttgatgtgaaacagattttgaaaatcagatggaggtggtttggtcatcaagcatcatctcctaattctacagttgacagccagcagggagaattttggaaccgaggacagactggagcaaacggtgggagaaagtttttagatccatgtagcctacaattgcctttggcttcaattggttaccgaaggtccagccaactggattttcagaattcaccttcttggccaatggcatccacctctgaagtccctgcatttgagtttacagcagaagattgtggcggtgcacattggctggatagaccagaagtggatgatggcactagtgaagaagaaaatgaatctgattccagttcatgcaggacttccaatagtagtcagacattatcatcctgtcatactatggagccatgtacatcagatgaatttttccaagcccttaatcatgccgagcaaacatttaaaaaaatggaaaactatttgagacataaacagttgtgtgatgtaattttagtcgctggtgatcgcagaattccagctcacagattggtgctctcctctgtctcagactattttgctgccatgtttactaatgatgtcagagaggcaagacaagaagaaataaaaatggaaggtgtagaaccaaattcgttgtggtccttgatccagtatgcttatacaggccgccttgaattaaaagaagataatattgagtgcctgttatctacagcttgccttcttcagctttcacaggttgtagaagcatgctgtaagtttttaatgaaacagcttcatccatccaactgtcttggaattcgttcttttgctgatgcccaaggttgtacagatttgcataaagtggctcacaattatactatggagcatttcatggaagtaatcagaaaccaggaatttgtattattaccagccagcgaaattgcaaagctcttggctagtgatgacatgaacattcctaatgaggagacaatattgaatgcacttcttacttgggtccgtcatgatttggaacagagacggaaagatctaagtaaacttttggcttatattaggctacctcttcttgcaccacagttcctggcagacatggaaaataatgtactttttcgggatgatatagaatgtcagaaactcattatggaagcaatgaagtaccatttattaccagagagacgacccatgttacaaagtcctcggacaaaacctaggaagtcaactgttggtacattatttgcagttgggggaatggattcaacaaaaggagcaacaagcattgaaaagtatgatctccgtacaaatatgtggactccagtagcaaatatgaatgggaggaggctacagttcggtgttgcagtgctagatgacaaactgtatgtggttggaggaagagatggactgaagactttgaatactgtagagtgctacaaccccaaaacaaaaacttggagtgtgatgccacctatgtccacacatagacatggccttggtgtggctgtactggaaggtcccatgtatgccgtaggaggacatgatggctggagctatctgaacacagtggaaagatgggaccctcaggctcgccagtggaattttgttgccactatgtctacccctaggagtacagtaggtgtggcagtactaagtggaaaactttatgcagttggtggtcgtgatggaagttcttgtctcaaatcagtagaatgttttgatcctcatactaataagtggacactgtgtgcacagatgtcaaaaaggagaggtggcgtaggagtgacgacctggaatggactgctgtatgctataggggggcacgatgctcccgcatccaacttgacttccagactctcagactgtgtggaaagtgcgaaaaggattatgatcccaaaacagacatgtggactgcagtagcatccaatgaagcaaatcaagccaaggagatgccaaggttgggaggagaggttcattgg

SEQ ID NO: 289392 - DNA, 1550 bp, Homo sapiens
tgtttcatctttattcattatcctttgttctttaaaatctgatatattggcataaaagtaattgtacatatatatatgaatgtgatttattttcctttacatctttttgttgtgtacagcagggcatatacttctcttgtcttggttggatgcacaaatctgtgtgcagtgctttttgcccgttgcctagacgatcacttggtttctctgaggatgtctggttctcgtaaagagtttgatgtgaaacagattttgaaaatcagatggaggtggtttggtcatcaagcatcatctcctaattctacagttgacagccagcagggagaattttggaaccgaggacagactggagcaaacggtgggagaaagtttttagatccatgtagcctacaattgcctttggcttcaattggttaccgaaggtccagccaactggattttcagaattcaccttcttggccaatggcatccacctctgaagtccctgcatttgagtttacagcagaagattgtggcggtgcacattggctggatagaccagaagtggatgatggcactagtgaagaagaaaatgaatctgattccagttcatgcaggacttccaatagtagtcagacattatcatcctgtcatactatggagccatgtacatcagatgaatttttccaagcccttaatcatgccgagcaaacatttaaaaaaatggaaaactatttgagacataaacagttgtgtgatgtaattttagtcgctggtgatcgcagaattccagctcacagattggtgctctcctctgtctcagactattttgctgccatgtttactaatgatgtcagagaggcaagacaagaagaaataaaaatggaaggtgtagaaccaaattcgttgtggtccttgatccagtatgcttatacaggccgccttgaattaaaagaagataatattgagtgcctgttatctacagcttgccttcttcagctttcacaggttgtagaagcatgctgtaagtttttaatgaaacagcttcatccatccaactgtcttggaattcgttcttttgctgatgcccaaggttgtacagatttgcataaagtggctcacaattatactatggagcatttcatggaagtaatcagaaaccaggaatttgtattattaccagccagcgaaattgcaaagctcttggctagtgatgacatgaacattcctaatgaggagacaatattgaatgcacttcttacttgggtccgtcatgatttggaacagagacggaaagatctaagtaaacttttggcttatattaggctacctcttcttgcaccacagttcctggcagacatggaaaataatgtactttttcgggatgatatagaatgtcagaaactcattatggaagcaatgaagtaccatttattaccagagagacgacccatgttacaaagtcctcggacaaaacctaggaagtcaactgttggtacattatttgcagttgggggaatggattcaacaaaagaacaagctttggaggctcagtttcggggtgcgctagt

SEQ ID NO: 289393 - DNA, 108 bp, Homo sapiens
actggaataggggattatgtcttgtaatgttcataatgcctaataaacccctgtaagtggtttacatgtttctttttactttcaaaaaggtactgtaccccacgctat

SEQ ID NO: 289394 - DNA, 4044 bp, Homo sapiens
cgctgcgcgggggctgccggcgggcagttgggagcaggcgacgccgacgcgagtctggcggctgctgcttgcgactgcggaggccgggcgaggccggtgaggacgcggcgggcgagcgagaggccgaggtgttttcttcactcatggtgaagaatgggggagatagaaggaacatacagagtcctgcagactgcagggatgcgcttgggtgcccagacccctgtgggagttagcacccttgagcctgggcagactctcttgcccagaatgcaagagaagcacctgcacctcagagtaaagctgctggacaacaccatggaaatatttgacattgagcctaaatgcgatggccaggtattactgacacaagtgtggaagcgtttaaacctggtagaatgtgactacttcgggatggagtttcaaaatactcagtcctactggatttggcttgaacctatgaaacccatcattaggcaaatacgaaggccaaagaatgtggtgcttcgcctagctgtaaaattttttccacctgatcctggtcagctacaagaagaatatacaagatacttgtttgccttgcaacttaagagagacctgctggaagagcgtttgacctgtgctgacaccacagcggcccttctcacgtcccatctcctgcagtcggaaataggagattacgatgaaacgctggaccgagagcacctcaaagtgaacgagtatttgcctggccagcagcactgccttgagaagatactagaattccatcagaagcacgtgggccagacacctgctgagtcggatttccaggtgctcgaaattgctcgaaagttggaaatgtacggcatcagatttcacatggcttctgacagggaaggaaccaagattcaactggcagtttcccacatgggtgtactcgtgttccagggcaccaccaaaatcaacactttcaactggtccaaggtccgtaaactaagcttcaagaggaaaagatttcttatcaaacttcatccagaggttcatggaccttaccaggacacattagaatttttgttgggtagtagagatgaatgtaagaacttctggaagatttgtgtggagtatcacaccttttttagacttttggaccaacctaagccaaaagcaaaagccgtcttcttcagccggggctcctccttcagatacagtggaagaactcagaaacaactagtagattatttcaaagacagtggaatgaagagaattccatatgaaagaaggcacagcaagacccacacgtccgttcgagctctgactgcagacctaccaaaacagagcatctcattccccgagggattgaggactcctgcctccccatcttcagcgaatgccttttactcgctctctccctccactctggtcccctctggcctgccagagtttaaggacagcagcagctccctcacagatccccaggtttcctacgtcaagagtccagctgcagagaggcgcagtggagcagtggctggaggccccgacacaccatcggcccagcccctcgggccccccgcactccagcctggtccaggcctttccacgaagagtcctcagccttctccctccagccggaagagccccctgagtctgagccctgcatttcaggtgcctttgggcccagctgaacagggctcatccccactcctgagccctgtcctcagtgatgctggcggagccgggatggactgcgaggagcccagacacaagcgcgtgcctgcagacgaggcctacttcatagtcaaagagattctcgctacagaacgaacatacctcaaggatttagaagttattaccgtgtggttccgcagcgcagtggtgaaggaggacgccatgcctgcgactctgatgacgctgctcttctccaacatcgatcccatctatgagttccacagaggcttcctgcgcgaggtggagcagaggctggcactctgggaagggccctccaaagcccacacaaaaggcagtcatcaacgaatcggggacatcctgctcaggaacatgcgccagttaaaggagtttaccagctacttccaaagacatgacgaggtcctaacagaactggaaaaggctaccaaacgctgtaagaagttggaggcagtgtacaaggagtttgagctgcagaaggtctgctacttgcctctcaacacgttcctgctgaagcccatccagcggctgctgcactaccgcctgctgctgcgccgcctatgcggacattacagccccgggcaccatgactacgctgactgccatgacgccctgaaagccatcacagaggtgaccaccacactacagcacattctcatccggctggagaacctgcagaagctaacggagctgcagcgggacctggtgggcatagagaacctcattgctcctggcagggagttcatccgtgagggctgccttcacaagctcaccaagaagggcctgcagcagaggatgttttttctgttctcagatatgttgctgtacacaagcaaaggagttgcagggaccagccacttccggatccggggcctccttcccctccaaggcatgctggtggaagaaagtgataacgagtggtctgttccacactgtttcaccatctacgcggctcagaaaacaatcgtggtggcagccagcactcggctggagaaagagaagtggatgctggacctgaactccgcgatccaagcagccaagagtggcggtgacacggcccctgcactgccaggccgcactgtgtgcactcgtccccccagatcccccaacgaggtatctctggagcaggagtcagaagatgatgctcggggtgtccgcagctccctggaggggcatggccagcaccgggccaacaccacaatgcacgtgtgctggtaccggaacaccagcgtgtccagggcagaccacagtgcagctgtcgagaaccagctttcaggatatctgctaagaaagttcaaaaacagtcatggctggcagaagctctgggtcgtctttaccaacttctgtttgttcttctacaaaactcatcaggatgactacccactggccagcctcccgctgctgggctacagcgtgagcatccccagggaggccgatggcatacacaaagactatgttttcaagctccagttcaaatcccacgtctacttcttccgggctgagagcaagtacacatttgaaaggtggatggaggtgatccagggggccagcagctcagccgggagggccccaagcatcgtgcaggatggcccccaaccctcctcagggctggaggggatggtcagggggaaggaggaatgacgctcaacctgcccaggtttggacacaactacaaagaacagcaggacacagaggtgacctctgtcctgaggcttctcaacagatgggaagtggctgtggtctcactggatccccactggcaccagcagtgtgggtgggcctcatgtaacatctgggaggggcttcatccccccacccaggacctagtgcatgccagcagctatctggggccctgggaaaaatgtgcgagtcttgagcgcggagccgctcaagccacagctcccaggcccctggctcaaagacgcagacaaggcctgagcagtgctctcggcatcggaccaaagcctgggcacaccctgcctctctccccagagcagggtccctgccgaggactggcctagagcaagcactggaaaagaggccctgccatacaccctgcgtacccactgccaggaccctctcagacaagcgtggcacagccatgctgaccttccatctggtgaaccaagtggcagccccaggggcctgccctgcaggtcacagctaaacaagtctggcagaagccacgcttgttccccatgtacctctagagaagcagaaaccaaagtccccctgtgccctgggagggtggggccgtctaatttattactgcccagcattccttccaacgggaagtagatgggcgactgctttgttcacacacatttgattaaaaataaacaaacagcatctccccaaaaaaaaaat

SEQ ID NO: 289395 - DNA, 644 bp, Homo sapiens
cgctgcgcgggggctgccggcgggcagttgggagcaggcgacgccgacgcgagtctggcggctgctgcttgcgactgcggaggccgggcgaggccggtgaggacgcggcgggcgagcgagaggccgaggtgttttcttcactcatggtgaagaatgggggagatagaaggaacatacagagtcctgcagactgcagggatgcgcttgggtgcccagacccctgtgggagttagcacccttgagcctgggcagactctcttgcccagaatgcaagagaagcacctgcacctcagagtaaagctgctggacaacaccatggaaatatttgacattgagcctaaatgcgatggccaggtattactgacacaagtgtggaagcgtttaaacctggtagaatgtgactacttcgggatggagtttcaaaatactcagtcctactggatttggcttgaacctatgaaacccatcattaggcaaatacgaaacagggtctcgctatttgttgcccaggctggagtgtagtggtgtgaacacagttctctgcagcctcaacctcctgggttcaagctgtcttcccacctcagtctcaagataattattttcgttcatctacttattaaattttttaaactaaggcatgtagt

SEQ ID NO: 289396 - DNA, 727 bp, Homo sapiens
ctgagggtagaggagccccattgggaggctccactagaggaccctcattgggaggagccagaggagcacaagcggccacaaggctattcctgaccctcagcccggctagtgcatccgccagctgccctcagcccgctgaaaggggactctgtctctgtctttcaggagttcatccgtgagggctgccttcacaagctcaccaagaagggcctgcagcagaggatgttttttctggtaggttctctccccactcaagctgtgcttccccccgagggggatgggcagcagttctgttagggacatcgcctgcagcggcagcccattggcctctgggtagtttagcacttggaggctttggtccaggtgggtagcgttggagtcagacagggccaggggagggtcacagagtgggaagaagcagaaaacagcttccccacccaccccagggccagcctccttcttcattccaggttctgagcacctgactatgggacaaacagaagccaaaagattgtaaagtccacatacatgtggctgcaagaaggtgctactgatggcccaatggccagtcgggacagtttcacaggaaccagtgcatctgctgggtcagctcccagctagcttggctgagaagctggaggcagtaaggaattctggctggtgttggctcagaagcccctcccagcatgtccttgttcctaccagttagtgggttccagcctgaaac

SEQ ID NO: 289397 - DNA, 3278 bp, Homo sapiens
cgtgcacctgtcgtcccagctactcaggaggctgaggcaggagaatccgcttgaacctgggaggcagagttgcagtgagccaagatcacgccattgcactccagcctgggcacagagcaagatcctgtctcaaaaaaaaaccttactgatttttaattttggaattccctatcgtgtgatctgcttcctaaatgtactttctcttgtccaatacttcattcttgaattaattaacctttgtgttttgtttctagggaccttaccaggacacattagaatttttgttgggtagtagagatgaatgtaagaacttctggaagatttgtgtggagtatcacaccttttttagacttttggaccaacctaagccaaaagcaaaagccgtcttcttcagccggggctcctccttcagatacagtggaagaactcagaaacaactagtagattatttcaaagacagtggaatgaagagaattccatatgaaagaaggcacagcaagacccacacgtccgttcgagctctgactgcagacctaccaaaacagagcatctcattccccgagggattgaggactcctgcctccccatcttcagcgaatgccttttactcgctctctccctccactctggtcccctctggcctgccagagtttaaggacagcagcagctccctcacagatccccaggtttcctacgtcaagagtccagctgcagagaggcgcagtggagcagtggctggaggccccgacacaccatcggcccagcccctcgggccccccgcactccagcctggtccaggcctttccacgaagagtcctcagccttctccctccagccggaagagccccctgagtctgagccctgcatttcaggtgcctttgggcccagctgaacagggctcatccccactcctgagccctgtcctcagtgatgctggcggagccgggatggactgcgaggagcccagacacaagcgcgtgcctgcagacgaggcctacttcatagtcaaagagattctcgctacagaacgaacatacctcaaggatttagaagttattaccgtgtggttccgcagcgcagtggtgaaggaggacgccatgcctgcgactctgatgacgctgctcttctccaacatcgatcccatctatgagttccacagaggcttcctgcgcgaggtggagcagaggctggcactctgggaagggccctccaaagcccacacaaaaggcagtcatcaacgaatcggggacatcctgctcaggaacatgcgccagttaaaggagtttaccagctacttccaaagacatgacgaggtcctaacagaactggaaaaggctaccaaacgctgtaagaagttggaggcagtgtacaaggagtttgagctgcagaaggtctgctacttgcctctcaacacgttcctgctgaagcccatccagcggctgctgcactaccgcctgctgctgcgccgcctatgcggacattacagccccgggcaccatgactacgctgactgccatgacgccctgaaagccatcacagaggtgaccaccacactacagcacattctcatccggctggagaacctgcagaagctaacggagctgcagcgggacctggtgggcatagagaacctcattgctcctggcagggagttcatccgtgagggctgccttcacaagctcaccaagaagggcctgcagcagaggatgttttttctgttctcagatatgttgctgtacacaagcaaaggagttgcagggaccagccacttccggatccggggcctccttcccctccaaggcatgctggtggaagaaagtgataacgagtggtctgttccacactgtttcaccatctacgcggctcagaaaacaatcgtggtggcagccagcactcggctggagaaagagaagtggatgctggacctgaactccgcgatccaagcagccaagagtggcggtgacacggcccctgcactgccaggccgcactgtgtgcactcgtccccccagatcccccaacgaggtatctctggagcaggagtcagaagatgatgctcggggtgtccgcagctccctggaggggcatggccagcaccgggccaacaccacaatgcacgtgtgctggtaccggaacaccagcgtgtccagggcagaccacagtgcagctgtcgagaaccagctttcaggatatctgctaagaaagttcaaaaacagtcatggctggcagaagctctgggtcgtctttaccaacttctgtttgttcttctacaaaactcatcaggatgactacccactggccagcctcccgctgctgggctacagcgtgagcatccccagggaggccgatggcatacacaaagactatgttttcaagctccagttcaaatcccacgtctacttcttccgggctgagagcaagtacacatttgaaaggtggatggaggtgatccagggggccagcagctcagccgggagggccccaagcatcgtgcaggatggcccccaaccctcctcagggctggaggggatggtcagggggaaggaggaatgacgctcaacctgcccaggtttggacacaactacaaagaacagcaggacacagaggtgacctctgtcctgaggcttctcaacagatgggaagtggctgtggtctcactggatccccactggcaccagcagtgtgggtgggcctcatgtaacatctgggaggggcttcatccccccacccaggacctagtgcatgccagcagctatctggggccctgggaaaaatgtgcgagtcttgagcgcggagccgctcaagccacagctcccaggcccctggctcaaagacgcagacaaggcctgagcagtgctctcggcatcggaccaaagcctgggcacaccctgcctctctccccagagcagggtccctgccgaggactggcctagagcaagcactggaaaagaggccctgccatacaccctgcgtacccactgccaggaccctctcagacaagcgtggcacagccatgctgaccttccatctggtgaaccaagtggcagccccaggggcctgccctgcaggtcacagctaaacaagtctggcagaagccacgcttgttccccatgtacctctagagaagcagaaaccaaagtccccctgtgccctgggagggtggggccgtctaatttattactgcccagcattccttccaacgggaagtagatgggcgactgctttgttcacacacatttgattaaaaataaacaaacagcatctccccaaaaaaaaaat

SEQ ID NO: 289398 - DNA, 2839 bp, Homo sapiens
ctagatcgtgtagtatgagaacgaattccgatataaatgaaggacagactacatgcacaccacagatcccgatcgacgctctgtactgcagtagctagcaaaacagagcatctcattccccgagggattgaggactcctgcctccccatcttcagcgaatgccttttactcgctctctccctccactctggtcccctctggcctgccagagtttaaggacagcagcagctccctcacagatccccaggtttcctacgtcaagagtccagctgcagagaggcgcagtggagcagtggctggaggccccgacacaccatcggcccagcccctcgggccccccgcactccagcctggtccaggcctttccacgaagagtcctcagccttctccctccagccggaagagccccctgagtctgagccctgcatttcaggtgcctttgggcccagctgaacagggctcatccccactcctgagccctgtcctcagtgatgctggcggagccgggatggactgcgaggagcccagacacaagcgcgtgcctgcagacgaggcctacttcatagtcaaagagattctcgctacagaacgaacatacctcaaggatttagaagttattaccgtgtggttccgcagcgcagtggtgaaggaggacgccatgcctgcgactctgatgacgctgctcttctccaacatcgatcccatctatgagttccacagaggcttcctgcgcgaggtggagcagaggctggcactctgggaagggccctccaaagcccacacaaaaggcagtcatcaacgaatcggggacatcctgctcaggaacatgcgccagttaaaggagtttaccagctacttccaaagacatgacgaggtcctaacagaactggaaaaggctaccaaacgctgtaagaagttggaggcagtgtacaaggagtttgagctgcagaaggtctgctacttgcctctcaacacgttcctgctgaagcccatccagcggctgctgcactaccgcctgctgctgcgccgcctatgcggacattacagccccgggcaccatgactacgctgactgccatgacgccctgaaagccatcacagaggtgaccaccacactacagcacattctcatccggctggagaacctgcagaagctaacggagctgcagcgggacctggtgggcatagagaacctcattgctcctggcagggagttcatccgtgagggctgccttcacaagctcaccaagaagggcctgcagcagaggatgttttttctgttctcagatatgttgctgtacacaagcaaaggagttgcagggaccagccacttccggatccggggcctccttcccctccaaggcatgctggtggaagaaagtgataacgagtggtctgttccacactgtttcaccatctacgcggctcagaaaacaatcgtggtggcagccagcactcggctggagaaagagaagtggatgctggacctgaactccgcgatccaagcagccaagagtggcggtgacacggcccctgcactgccaggccgcactgtgtgcactcgtccccccagatcccccaacgaggtatctctggagcaggagtcagaagatgatgctcggggtgtccgcagctccctggaggggcatggccagcaccgggccaacaccacaatgcacgtgtgctggtaccggaacaccagcgtgtccagggcagaccacagtgcagctgtcgagaaccagctttcaggatatctgctaagaaagttcaaaaacagtcatggctggcagaagctctgggtcgtctttaccaacttctgtttgttcttctacaaaactcatcaggatgactacccactggccagcctcccgctgctgggctacagcgtgagcatccccagggaggccgatggcatacacaaagactatgttttcaagctccagttcaaatcccacgtctacttcttccgggctgagagcaagtacacatttgaaaggtggatggaggtgatccagggggccagcagctcagccgggagggccccaagcatcgtgcaggatggcccccaaccctcctcagggctggaggggatggtcagggggaaggaggaatgacgctcaacctgcccaggtttggacacaactacaaagaacagcaggacacagaggtgacctctgtcctgaggcttctcaacagatgggaagtggctgtggtctcactggatccccactggcaccagcagtgtgggtgggcctcatgtaacatctgggaggggcttcatccccccacccaggacctagtgcatgccagcagctatctggggccctgggaaaaatgtgcgagtcttgagcgcggagccgctcaagccacagctcccaggcccctggctcaaagacgcagacaaggcctgagcagtgctctcggcatcggaccaaagcctgggcacaccctgcctctctccccagagcagggtccctgccgaggactggcctagagcaagcactggaaaagaggccctgccatacaccctgcgtacccactgccaggaccctctcagacaagcgtggcacagccatgctgaccttccatctggtgaaccaagtggcagccccaggggcctgccctgcaggtcacagctaaacaagtctggcagaagccacgcttgttccccatgtacctctagagaagcagaaaccaaagtccccctgtgccctgggagggtggggccgtctaatttattactgcccagcattccttccaacgggaagtagatgggcgactgctttgttcacacacatttgattaaaaataaacaaacagcatctccccaaaaaaaaaat

SEQ ID NO: 289399 - DNA, 2345 bp, Homo sapiens
gttgcgttcttctcaggtattgcgtttcttcttcaccacagcgcgtgcctgcagacgaggcctacttcatagtcaaagagattctcgctacagaacgaacatacctcaaggatttagaagttattaccgtgtggttccgcagcgcagtggtgaaggaggacgccatgcctgcgactctgatgacgctgctcttctccaacatcgatcccatctatgagttccacagaggcttcctgcgcgaggtggagcagaggctggcactctgggaagggccctccaaagcccacacaaaaggcagtcatcaacgaatcggggacatcctgctcaggaacatgcgccagttaaaggagtttaccagctacttccaaagacatgacgaggtcctaacagaactggaaaaggctaccaaacgctgtaagaagttggaggcagtgtacaaggagtttgagctgcagaaggtctgctacttgcctctcaacacgttcctgctgaagcccatccagcggctgctgcactaccgcctgctgctgcgccgcctatgcggacattacagccccgggcaccatgactacgctgactgccatgacgccctgaaagccatcacagaggtgaccaccacactacagcacattctcatccggctggagaacctgcagaagctaacggagctgcagcgggacctggtgggcatagagaacctcattgctcctggcagggagttcatccgtgagggctgccttcacaagctcaccaagaagggcctgcagcagaggatgttttttctgttctcagatatgttgctgtacacaagcaaaggagttgcagggaccagccacttccggatccggggcctccttcccctccaaggcatgctggtggaagaaagtgataacgagtggtctgttccacactgtttcaccatctacgcggctcagaaaacaatcgtggtggcagccagcactcggctggagaaagagaagtggatgctggacctgaactccgcgatccaagcagccaagagtggcggtgacacggcccctgcactgccaggccgcactgtgtgcactcgtccccccagatcccccaacgaggtatctctggagcaggagtcagaagatgatgctcggggtgtccgcagctccctggaggggcatggccagcaccgggccaacaccacaatgcacgtgtgctggtaccggaacaccagcgtgtccagggcagaccacagtgcagctgtcgagaaccagctttcaggatatctgctaagaaagttcaaaaacagtcatggctggcagaagctctgggtcgtctttaccaacttctgtttgttcttctacaaaactcatcaggatgactacccactggccagcctcccgctgctgggctacagcgtgagcatccccagggaggccgatggcatacacaaagactatgttttcaagctccagttcaaatcccacgtctacttcttccgggctgagagcaagtacacatttgaaaggtggatggaggtgatccagggggccagcagctcagccgggagggccccaagcatcgtgcaggatggcccccaaccctcctcagggctggaggggatggtcagggggaaggaggaatgacgctcaacctgcccaggtttggacacaactacaaagaacagcaggacacagaggtgacctctgtcctgaggcttctcaacagatgggaagtggctgtggtctcactggatccccactggcaccagcagtgtgggtgggcctcatgtaacatctgggaggggcttcatccccccacccaggacctagtgcatgccagcagctatctggggccctgggaaaaatgtgcgagtcttgagcgcggagccgctcaagccacagctcccaggcccctggctcaaagacgcagacaaggcctgagcagtgctctcggcatcggaccaaagcctgggcacaccctgcctctctccccagagcagggtccctgccgaggactggcctagagcaagcactggaaaagaggccctgccatacaccctgcgtacccactgccaggaccctctcagacaagcgtggcacagccatgctgaccttccatctggtgaaccaagtggcagccccaggggcctgccctgcaggtcacagctaaacaagtctggcagaagccacgcttgttccccatgtacctctagagaagcagaaaccaaagtccccctgtgccctgggagggtggggccgtctaatttattactgcccagcattccttccaacgggaagtagatgggcgactgctttgttcacacacatttgattaaaaataaacaaacagcatctccccaaaaaaaaaat

SEQ ID NO: 289400 - DNA, 3892 bp, Homo sapiens
cgctgcgcgggggctgccggcgggcagttgggagcaggcgacgccgacgcgagtctggcggctgctgcttgcgactgcggaggccgggcgaggccggtgaggacgcggcgggcgagcgagaggccgaggtgttttcttcactcatggtgaagaatgggggagatagaaggaacatacagagtcctgcagactgcagggatgcgcttgggtgcccagacccctgtgggagttagcacccttgagcctgggcagactctcttgcccagaatgcaagagaagcacctgcacctcagagtaaagctgctggacaacaccatggaaatatttgacattgagcctaaatgcgatggccaggtattactgacacaagtgtggaagcgtttaaacctggtagaatgtgactacttcgggatggagtttcaaaatactcagtcctactggatttggcttgaacctatgaaacccatcattaggcaaatacgaaggccaaagaatgtggtgcttcgcctagctgtaaaattttttccacctgatcctggtcagctacaagaagaatatacaagatacttgtttgccttgcaacttaagagagacctgctggaagagcgtttgacctgtgctgacaccacagcggcccttctcacgtcccatctcctgcagtcggaaataggagattacgatgaaacgctggaccgagagcacctcaaagtgaacgagtatttgcctggccagcagcactgccttgagaagatactagaattccatcagaagcacgtgggccagacacctgctgagtcggatttccaggtgctcgaaattgctcgaaagttggaaatgtacggcatcagatttcacatggcttctgacagggaaggaaccaagattcaactggcagtttcccacatgggtgtactcgtgttccagggcaccaccaaaatcaacactttcaactggtccaaggtccgtaaactaagcttcaagaggaaaagatttcttatcaaacttcatccagaggttcatggaccttaccaggacacattagaatttttgttgggtagtagagatgaatgtaagaacttctggaagatttgtgtggagtatcacaccttttttagacttttggaccaacctaagccaaaagcaaaagccgtcttcttcagccggggctcctccttcagatacagtggaagaactcagaaacaactagtagattatttcaaagacagtggaatgaagagaattccatatgaaagaaggcacagcaagacccacacgtccgttcgagctctgactgcagacctaccaaaacagagcatctcattccccgagggattgaggactcctgcctccccatcttcagcgaatgccttttactcgctctctccctccactctggtcccctctggcctgccagagtttaaggacagcagcagctccctcacagatccccaggtttcctacgtcaagagtccagctgcagagaggcgcagtggagcagtggctggaggccccgacacaccatcggcccagcccctcgggccccccgcactccagcctggtccaggcctttccacgaagagtcctcagccttctccctccagccggaagagccccctgagtctgagccctgcatttcaggtgcctttgggcccagctgaacagggctcatccccactcctgagccctgtcctcagtgatgctggcggagccgggatggactgcgaggagcccagacacaagcgcgtgcctgcagacgaggcctacttcatagtcaaagagattctcgctacagaacgaacatacctcaaggatttagaagttattaccgtgtggttccgcagcgcagtggtgaaggaggacgccatgcctgcgactctgatgacgctgctcttctccaacatcgatcccatctatgagttccacagaggcttcctgcgcgaggtggagcagaggctggcactctgggaagggccctccaaagcccacacaaaaggcagtcatcaacgaatcggggacatcctgctcaggaacatgcgccagttaaaggagtttaccagctacttccaaagacatgacgaggtcctaacagaactggaaaaggctaccaaacgctgtaagaagttggaggcagtgtacaaggagtttgagctgcagaaggtctgctacttgcctctcaacacgttcctgctgaagcccatccagcggctgctgcactaccgcctgctgctgcgccgcctatgcggacattacagccccgggcaccatgactacgctgactgccatgacgccctgaaagccatcacagaggtgaccaccacactacagcacattctcatccggctggagaacctgcagaagctaacggagctgcagcgggacctggtgggcatagagaacctcattgctcctggcagggagttcatccgtgagggctgccttcacaagctcaccaagaagggcctgcagcagaggatgttttttctgttctcagatatgttgctgtacacaagcaaaggagttgcagggaccagccacttccggatccggggcctccttcccctccaaggcatgctggtggaagaaagtgataacgagtggtctgttccacactgtttcaccatctacgcggctcagaaaacaatcgtggtggcagccagcactcggctggagaaagagaagtggatgctggacctgaactccgcgatccaagcagccaagagtggcggtgacacggcccctgcactgccaggccgcactgtgtgcactcgtccccccagatcccccaacgaggtatctctggagcaggagtcagaagatgatgctcggggtgtccgcagctccctggaggggcatggccagcaccgggccaacaccacaatgcacgtgtgctggtaccggaacaccagcgtgtccagggcagaccacagtgcagctgtcgagaaccagctttcaggatatctgctaagaaagttcaaaaacagtcatggctggcagaagctctgggtcgtctttaccaacttctgtttgttcttctacaaaactcatcaggtggatggaggtgatccagggggccagcagctcagccgggagggccccaagcatcgtgcaggatggcccccaaccctcctcagggctggaggggatggtcagggggaaggaggaatgacgctcaacctgcccaggtttggacacaactacaaagaacagcaggacacagaggtgacctctgtcctgaggcttctcaacagatgggaagtggctgtggtctcactggatccccactggcaccagcagtgtgggtgggcctcatgtaacatctgggaggggcttcatccccccacccaggacctagtgcatgccagcagctatctggggccctgggaaaaatgtgcgagtcttgagcgcggagccgctcaagccacagctcccaggcccctggctcaaagacgcagacaaggcctgagcagtgctctcggcatcggaccaaagcctgggcacaccctgcctctctccccagagcagggtccctgccgaggactggcctagagcaagcactggaaaagaggccctgccatacaccctgcgtacccactgccaggaccctctcagacaagcgtggcacagccatgctgaccttccatctggtgaaccaagtggcagccccaggggcctgccctgcaggtcacagctaaacaagtctggcagaagccacgcttgttccccatgtacctctagagaagcagaaaccaaagtccccctgtgccctgggagggtggggccgtctaatttattactgcccagcattccttccaacgggaagtagatgggcgactgctttgttcacacacatttgattaaaaataaacaaacagcatctccccaaaaaaaaaat

SEQ ID NO: 289401 - DNA, 1620 bp, Homo sapiens
tttggttactgaacactgactttattgtgcacagggaaagggaactcactttacttggtgcctggaatgtcactctaggtttttaacatgcttctgttggacttaagtactgataaagctgctgttcatagcagtccagaggtaaaaccaaggcctcagctggagaaagcatgcagaggcttagtcttggggagcaaacccactcccacaaggggtcctgggtgctggttaatgcacctgcatttttcctttattgacagaaccagctttcaggatatctgctaagaaagttcaaaaacagtcatggctggcagaagctctgggtcgtctttaccaacttctgtttgttcttctacaaaactcatcaggtactggagtttcactggagcccaatgcaggtgatgctagcagacagacacttaaccctgctcacctgtgtcccttttgtattttggttctgccctcccatgctttgcccacacaccctgtgctgtgtgaacagggaaactggctcccttggcccgtgggcatttgtacgtgccaccgttgtgcaggtagcagaggaatgggcattccctgtggcaacccagcccctggaacccgtgtccctatgctgtcttgcaggatgactacccactggccagcctcccgctgctgggctacagcgtgagcatccccagggaggccgatggcatacacaaagactatgttttcaagctccagttcaaatcccacgtctacttcttccgggctgagagcaagtacacatttgaaaggtggatggaggtgatccagggggccagcagctcagccgggagggccccaagcatcgtgcaggatggcccccaaccctcctcagggctggaggggatggtcagggggaaggaggaatgacgctcaacctgcccaggtttggacacaactacaaagaacagcaggacacagaggtgacctctgtcctgaggcttctcaacagatgggaagtggctgtggtctcactggatccccactggcaccagcagtgtgggtgggcctcatgtaacatctgggaggggcttcatccccccacccaggacctagtgcatgccagcagctatctggggccctgggaaaaatgtgcgagtcttgagcgcggagccgctcaagccacagctcccaggcccctggctcaaagacgcagacaaggcctgagcagtgctctcggcatcggaccaaagcctgggcacaccctgcctctctccccagagcagggtccctgccgaggactggcctagagcaagcactggaaaagaggccctgccatacaccctgcgtacccactgccaggaccctctcagacaagcgtggcacagccatgctgaccttccatctggtgaaccaagtggcagccccaggggcctgccctgcaggtcacagctaaacaagtctggcagaagccacgcttgttccccatgtacctctagagaagcagaaaccaaagtccccctgtgccctgggagggtggggccgtctaatttattactgcccagcattccttccaacgggaagtagatgggcgactgctttgttcacacacatttgattaaaaataaacaaacagcatctccccaaaaaaaaaat

SEQ ID NO: 289402 - DNA, 1084 bp, Homo sapiens
cgctggtactgagccgcgaattcatggctggcagaagctctgggtcgtctttaccaacttctgtttgttcttctacaaaactcatcaggatgactacccactggccagcctcccgctgctgggctacagcgtgagcatccccagggaggccgatggcatacacaaagactatgttttcaagctccagttcaaatcccacgtctacttcttccgggctgagagcaagtacacatttgaaaggtggatggaggtgatccagggggccagcagctcagccgggagggccccaagcatcgtgcaggatggcccccaaccctcctcagggctggaggggatggtcagggggaaggaggaatgacgctcaacctgcccaggtttggacacaactacaaagaacagcaggacacagaggtgacctctgtcctgaggcttctcaacagatgggaagtggctgtggtctcactggatccccactggcaccagcagtgtgggtgggcctcatgtaacatctgggaggggcttcatccccccacccaggacctagtgcatgccagcagctatctggggccctgggaaaaatgtgcgagtcttgagcgcggagccgctcaagccacagctcccaggcccctggctcaaagacgcagacaaggcctgagcagtgctctcggcatcggaccaaagcctgggcacaccctgcctctctccccagagcagggtccctgccgaggactggcctagagcaagcactggaaaagaggccctgccatacaccctgcgtacccactgccaggaccctctcagacaagcgtggcacagccatgctgaccttccatctggtgaaccaagtggcagccccaggggcctgccctgcaggtcacagctaaacaagtctggcagaagccacgcttgttccccatgtacctctagagaagcagaaaccaaagtccccctgtgccctgggagggtggggccgtctaatttattactgcccagcattccttccaacgggaagtagatgggcgactgctttgttcacacacatttgattaaaaataaacaaacagcatctccccaaaaaaaaaat

SEQ ID NO: 289403 - DNA, 3334 bp, Homo sapiens
cgctgcgcgggggctgccggcgggcagttgggagcaggcgacgccgacgcgagtctggcggctgctgcttgcgactgcggaggccgggcgaggccggtgaggacgcggcgggcgagcgagaggccgaggtgttttcttcactcatggtgaagaatgggggagatagaaggaacatacagagtcctgcagactgcagggatgcgcttgggtgcccagacccctgtgggagttagcacccttgagcctgggcagactctcttgcccagaatgcaagagaagcacctgcacctcagagtaaagctgctggacaacaccatggaaatatttgacattgagcctaaatgcgatggccaggtattactgacacaagtgtggaagcgtttaaacctggtagaatgtgactacttcgggatggagtttcaaaatactcagtcctactggatttggcttgaacctatgaaacccatcattaggcaaatacgaaggccaaagaatgtggtgcttcgcctagctgtaaaattttttccacctgatcctggtcagctacaagaagaatatacaagatacttgtttgccttgcaacttaagagagacctgctggaagagcgtttgacctgtgctgacaccacagcggcccttctcacgtcccatctcctgcagtcggaaataggagattacgatgaaacgctggaccgagagcacctcaaagtgaacgagtatttgcctggccagcagcactgccttgagaagatactagaattccatcagaagcacgtgggccagacacctgctgagtcggatttccaggtgctcgaaattgctcgaaagttggaaatgtacggcatcagatttcacatggcttctgacagggaaggaaccaagattcaactggcagtttcccacatgggtgtactcgtgttccagggcaccaccaaaatcaacactttcaactggtccaaggtccgtaaactaagcttcaagaggaaaagatttcttatcaaacttcatccagaggttcatggaccttaccaggacacattagaatttttgttgggtagtagagatgaatgtaagaacttctggaagatttgtgtggagtatcacaccttttttagacttttggaccaacctaagccaaaagcaaaagccgtcttcttcagccggggctcctccttcagatacagtggaagaactcagaaacaactagtagattatttcaaagacagtggaatgaagagaattccatatgaaagaaggcacagcaagacccacacgtccgttcgagctctgactgcagacctaccaaaacagagcatctcattccccgagggattgaggactcctgcctccccatcttcagcgaatgccttttactcgctctctccctccactctggtcccctctggcctgccagagtttaaggacagcagcagctccctcacagatccccaggtttcctacgtcaagagtccagctgcagagaggcgcagtggagcagtggctggaggccccgacacaccatcggcccagcccctcgggccccccgcactccagcctggtccaggcctttccacgaagagtcctcagccttctccctccagccggaagagccccctgagtctgagccctgcatttcaggtgcctttgggcccagctgaacagggctcatccccactcctgagccctgtcctcagtgatgctggcggagccgggatggactgcgaggagcccagacacaagcgcgtgcctgcagacgaggcctacttcatagtcaaagagattctcgctacagaacgaacatacctcaaggatttagaagttattaccgtgtggttccgcagcgcagtggtgaaggaggacgccatgcctgcgactctgatgacgctgctcttctccaacatcgatcccatctatgagttccacagaggcttcctgcgcgaggtggagcagaggctggcactctgggaagggccctccaaagcccacacaaaaggcagtcatcaacgaatcggggacatcctgctcaggaacatgcgccagttaaaggagtttaccagctacttccaaagacatgacgaggtcctaacagaactggaaaaggctaccaaacgctgtaagaagttggaggcagtgtacaaggagtttgagctgcagaaggtctgctacttgcctctcaacacgttcctgctgaagcccatccagcggctgctgcactaccgcctgctgctgcgccgcctatgcggacattacagccccgggcaccatgactacgctgactgccatgacgccctgaaagccatcacagaggtgaccaccacactacagcacattctcatccggctggagaacctgcagaagctaacggagctgcagcgggacctggtgggcatagagaacctcattgctcctggcagggagttcatccgtgagggctgccttcacaagctcaccaagaagggcctgcagcagaggatgttttttctgttctcagatatgttgctgtacacaagcaaaggagttgcagggaccagccacttccggatccggggcctccttcccctccaaggcatgctggtggaagaaagtgataacgagtggtctgttccacactgtttcaccatctacgcggctcagaaaacaatcgtggtggcagccagcactcggctggagaaagagaagtggatgctggacctgaactccgcgatccaagcagccaagagtggcggtgacacggcccctgcactgccaggccgcactgtgtgcactcgtccccccagatcccccaacgaggtatctctggagcaggagtcagaagatgatgctcggggtgtccgcagctccctggaggggcatggccagcaccgggccaacaccacaatgcacgtgtgctggtaccggaacaccagcgtgtccagggcagaccacagtgcagctgtcgagaaccagctttcaggatatctgctaagaaagttcaaaaacagtcatggctggcagaagctctgggtcgtctttaccaacttctgtttgttcttctacaaaactcatcaggatgactacccactggccagcctcccgctgctgggctacagcgtgagcatccccagggaggccgatggcatacacaaagactatgttttcaagctccagttcaaatcccacgtctacttcttccgggctgagagcaagtacacatttgaaaggtggatggaggtgatccagggggccagcagctcagccgggagggccccaagcatcgtgcaggatggcccccaaccctcctcaggctgagatgtcaggggaagagtttgctcttgggacctctgatcgacccgca

SEQ ID NO: 289404 - DNA, 2409 bp, Homo sapiens
cgctgcgcgggggctgccggcgggcagttgggagcaggcgacgccgacgcgagtctggcggctgctgcttgcgactgcggaggccgggcgaggccggtgaggacgcggcgggcgagcgagaggccgaggtgttttcttcactcatggtgaagaatgggggagatagaaggaacatacagagtcctgcagactgcagggatgcgcttgggtgcccagacccctgtgggagttagcacccttgagcctgggcagactctcttgcccagaatgcaagagaagcacctgcacctcagagtaaagctgctggacaacaccatggaaatatttgacattgagcctaaatgcgatggccaggtattactgacacaagtgtggaagcgtttaaacctggtagaatgtgactacttcgggatggagtttcaaaatactcagtcctactggatttggcttgaacctatgaaacccatcattaggcaaatacgaaggccaaagaatgtggtgcttcgcctagctgtaaaattttttccacctgatcctggtcagctacaagaagaatatacaagatacttgtttgccttgcaacttaagagagacctgctggaagagcgtttgacctgtgctgacaccacagcggcccttctcacgtcccatctcctgcagtcggaaataggagattacgatgaaacgctggaccgagagcacctcaaagtgaacgagtatttgcctggccagcagcactgccttgagaagatactagaattccatcagaagcacgtgggccagacacctgctgagtcggatttccaggtgctcgaaattgctcgaaagttggaaatgtacggcatcagatttcacatggcttctgacagggaaggaaccaagattcaactggcagtttcccacatgggtgtactcgtgttccagggcaccaccaaaatcaacactttcaactggtccaaggtccgtaaactaagcttcaagaggaaaagatttcttatcaaacttcatccagaggttcatggaccttaccaggacacattagaatttttgttgggtagtagagatgaatgtaagaacttctggaagatttgtgtggagtatcacaccttttttagacttttggaccaacctaagccaaaagcaaaagccgtcttcttcagccggggctcctccttcagatacagtggaagaactcagaaacaactagtagattatttcaaagacagtggaatgaagagaattccatatgaaagaaggcacagcaagacccacacgtccgttcgagctctgactgcagacctaccaaaacagagcatctcattccccgagggattgaggactcctgcctccccatcttcagcgaatgccttttactcgctctctccctccactctggtcccctctggcctgccagagtttaaggacagcagcagctccctcacagatccccaggtttcctacgtcaagagtccagctgcagagaggcgcagtggagcagtggctggaggccccgacacaccatcggcccagcccctcgggccccccgcactccagcctggtccaggcctttccacgaagagtcctcagccttctccctccagccggaagagccccctgagtctgagccctgcatttcaggtgcctttgggcccagctgaacagggctcatccccactcctgagccctgtcctcagtgatgctggcggagccgggatggactgcgaggagcccagacacaagcgcgtgcctgcagacgaggcctacttcatagtcaaagagattctcgctacagaacgaacatacctcaaggatttagaagttattaccgtgtggttccgcagcgcagtggtgaaggaggacgccatgcctgcgactctgatgacgctgctcttctccaacatcgatcccatctatgagttccacagaggcttcctgcgcgaggtggagcagaggctggcactctgggaagggccctccaaagcccacacaaaaggcagtcatcaacgaatcggggacatcctgctcaggaacatgcgccagttaaaggctgctcatgagttcaccacgtgaccgcccaaggtgtggagctctgcataacaccatgaagctgagccacagtgacgacgacgactcaagctccccctcctccatccctcgcctgtcccaccttctacccaatcctgcgagactctggccactcctcacacctagagttcccaagggactataggttttgctgttctgtgttgagatagccccacttgaagaactgcattcagcctaggtgcccttttcctgcctcgacggaagctgagtcaggttgttaatgagaaagttctacttatcccaaaggcagttgcactaatttaaaattgaaatatacacaaatctgtttgatccagattatca

SEQ ID NO: 289405 - DNA, 2021 bp, Homo sapiens
cgctgcgcgggggctgccggcgggcagttgggagcaggcgacgccgacgcgagtctggcggctgctgcttgcgactgcggaggccgggcgaggccggtgaggacgcggcgggcgagcgagaggccgaggtgttttcttcactcatggtgaagaatgggggagatagaaggaacatacagagtcctgcagactgcagggatgcgcttgggtgcccagacccctgtgggagttagcacccttgagcctgggcagactctcttgcccagaatgcaagagaagcacctgcacctcagagtaaagctgctggacaacaccatggaaatatttgacattgagcctaaatgcgatggccaggtattactgacacaagtgtggaagcgtttaaacctggtagaatgtgactacttcgggatggagtttcaaaatactcagtcctactggatttggcttgaacctatgaaacccatcattaggcaaatacgaaggccaaagaatgtggtgcttcgcctagctgtaaaattttttccacctgatcctggtcagctacaagaagaatatacaagatacttgtttgccttgcaacttaagagagacctgctggaagagcgtttgacctgtgctgacaccacagcggcccttctcacgtcccatctcctgcagtcggaaataggagattacgatgaaacgctggaccgagagcacctcaaagtgaacgagtatttgcctggccagcagcactgccttgagaagatactagaattccatcagaagcacgtgggccagacacctgctgagtcggatttccaggtgctcgaaattgctcgaaagttggaaatgtacggcatcagatttcacatggcttctgacagggaaggaaccaagattcaactggcagtttcccacatgggtgtactcgtgttccagggcaccaccaaaatcaacactttcaactggtccaaggtccgtaaactaagcttcaagaggaaaagatttcttatcaaacttcatccagaggttcatggaccttaccaggacacattagaatttttgttgggtagtagagatgaatgtaagaacttctggaagatttgtgtggagtatcacaccttttttagacttttggaccaacctaagccaaaagcaaaagccgtcttcttcagccggggctcctccttcagatacagtggaagaactcagaaacaactagtagattatttcaaagacagtggaatgaagagaattccatatgaaagaaggcacagcaagacccacacgtccgttcgagctctgactgcagacctaccaaaacagagcatctcattccccgagggattgaggactcctgcctccccatcttcagcgaatgccttttactcgctctctccctccactctggtcccctctggcctgccagagtttaaggacagcagcagctccctcacagatccccaggtttcctacgtcaagagtccagctgcagagaggcgcagtggagcagtggctggaggccccgacacaccatcggcccagcccctcgggccccccgcactccagcctggtccaggcctttccacgaagagtcctcagccttctccctccagccggaagagccccctgagtctgagccctgcatttcaggtgcctttgggcccagctgaacagggctcatccccactcctgagccctgtcctcagtgatgctggcggagccgggatggactgcgaggagcccagacacaagcgcgtgcctgcagacgaggcctacttcatagtcaaagagattctcgctacagaacgaacatacctcaaggatttagaagttattaccgtgtggttccgcagcgcagtggtgaaggaggacgccatgcctgcgactctgatgacgctgctcttctccaacatcgatcccatctatgagttccacagaggcttcctgcgcgaggtggagcagaggctggcactctggtaacaccccttcagcccccacacgggagactcccacaccaactcatcatcaccgct

SEQ ID NO: 289406 - DNA, 1713 bp, Homo sapiens
cgctgcgcgggggctgccggcgggcagttgggagcaggcgacgccgacgcgagtctggcggctgctgcttgcgactgcggaggccgggcgaggccggtgaggacgcggcgggcgagcgagaggccgaggtgttttcttcactcatggtgaagaatgggggagatagaaggaacatacagagtcctgcagactgcagggatgcgcttgggtgcccagacccctgtgggagttagcacccttgagcctgggcagactctcttgcccagaatgcaagagaagcacctgcacctcagagtaaagctgctggacaacaccatggaaatatttgacattgagcctaaatgcgatggccaggtattactgacacaagtgtggaagcgtttaaacctggtagaatgtgactacttcgggatggagtttcaaaatactcagtcctactggatttggcttgaacctatgaaacccatcattaggcaaatacgaaggccaaagaatgtggtgcttcgcctagctgtaaaattttttccacctgatcctggtcagctacaagaagaatatacaagatacttgtttgccttgcaacttaagagagacctgctggaagagcgtttgacctgtgctgacaccacagcggcccttctcacgtcccatctcctgcagtcggaaataggagattacgatgaaacgctggaccgagagcacctcaaagtgaacgagtatttgcctggccagcagcactgccttgagaagatactagaattccatcagaagcacgtgggccagacacctgctgagtcggatttccaggtgctcgaaattgctcgaaagttggaaatgtacggcatcagatttcacatggcttctgacagggaaggaaccaagattcaactggcagtttcccacatgggtgtactcgtgttccagggcaccaccaaaatcaacactttcaactggtccaaggtccgtaaactaagcttcaagaggaaaagatttcttatcaaacttcatccagaggttcatggaccttaccaggacacattagaatttttgttgggtagtagagatgaatgtaagaacttctggaagatttgtgtggagtatcacaccttttttagacttttggaccaacctaagccaaaagcaaaagccgtcttcttcagccggggctcctccttcagatacagtggaagaactcagaaacaactagtagattatttcaaagacagtggaatgaagagaattccatatgaaagaaggcacagcaagacccacacgtccgttcgagctctgactgcagacctaccaaaacagagcatctcattccccgagggattgaggactcctgcctccccatcttcagcgaatgccttttactcgctctctccctccactctggtcccctctggcctgccagagtttaaggacagcagcagctccctcacagatccccaggtttcctacgtcaagagtccagctgcagagaggcgcagtggagcagtggctggaggccccgacacaccatcggcccagcccctcgggccccccgcactccagcctggtccaggtgtcgggttttgtcatgtcgtgagcagctgtggttctgtctgtgctggggggcagagtttcagtgccttagacctagacacagggagggccggtagggagctcagcgctgcttgtaaaaatgacaatggtggggatgactttaccaca

SEQ ID NO: 289407 - DNA, 1121 bp, Homo sapiens
cgctgcgcgggggctgccggcgggcagttgggagcaggcgacgccgacgcgagtctggcggctgctgcttgcgactgcggaggccgggcgaggccggtgaggacgcggcgggcgagcgagaggccgaggtgttttcttcactcatggtgaagaatgggggagatagaaggaacatacagagtcctgcagactgcagggatgcgcttgggtgcccagacccctgtgggagttagcacccttgagcctgggcagactctcttgcccagaatgcaagagaagcacctgcacctcagagtaaagctgctggacaacaccatggaaatatttgacattgagcctaaatgcgatggccaggtattactgacacaagtgtggaagcgtttaaacctggtagaatgtgactacttcgggatggagtttcaaaatactcagtcctactggatttggcttgaacctatgaaacccatcattaggcaaatacgaaggccaaagaatgtggtgcttcgcctagctgtaaaattttttccacctgatcctggtcagctacaagaagaatatacaagatacttgtttgccttgcaacttaagagagacctgctggaagagcgtttgacctgtgctgacaccacagcggcccttctcacgtcccatctcctgcagtcggaaataggagattacgatgaaacgctggaccgagagcacctcaaagtgaacgagtatttgcctggccagcagcactgccttgagaagatactagaattccatcagaagcacgtgggccagacacctgctgagtcggatttccaggtgctcgaaattgctcgaaagttggaaatgtacggcatcagatttcacatggcttctgacagggaaggaaccaagattcaactggcagtttcccacatgggtgtactcgtgttccaggtaggccagtggggaagggaggggtgagaacagggcaggggaggttttctgcaacctggtggggtttgttcttatagatgttagtaaatatttgtcctgatgagtacgggcctcgatttggaagaggggctttgcatatcatccaatccaacctcttactcagtggggagcccactgcttcctgggactgcctcccg

SEQ ID NO: 289408 - DNA, 407 bp, Homo sapiens
attttttccacctgatcctggtcagctacaagaagaatatacaaggtaaagagctcacagagctgaagctgttgtcagcaggaatcttgtattcacctgttatctcccacagcacctggctcattgaaagaatgaataagcctgatatacacagaaaagtgaccatgagtgtagagtggttaacagaagcatgttggcagttgacccttgcacaaacacatgtgaataagacttcagtgtaaggtttacagtacaaatttgaaaataaaaaatggaatgggatgttagggtcatgttgaacttacattttccaaatgaacatagatttatgcatgttcataaggttctcagggattttgctcatatatacttatttatcaataaaatatacttaattggtagaagta

SEQ ID NO: 289409 - DNA, 378 bp, Homo sapiens
gtcgtgcattgactgttcaggggtctcactcttgcttaacgtgcctggaacagttctccctccctctcaggctgctcatgagttcaccacgtgaccgcccaaggtgtggagctctgcataacaccatgaagctgagccacagtgacgacgacgactcaagctccccctcctccatccctcgcctgtcccaccttctacccaatcctgcgagactctggccactcctcacacctagagttcccaagggactataggttttgctgttctgtgttgagatagccccacttgaagaactgcattcagcctaggtgcccttttcctgcctcgacggaagctgagtcaggttgttaatgagaaagttctacttatcccaaaggc

SEQ ID NO: 289410 - DNA, 381 bp, Homo sapiens
cggccggggaagatggtggaggacggcgcggaggagctggaggatctggtgcacttctccgtgtctgagttgcctagtcgcggctacggcgtcatggaggagatccggcggcagggcaagctgtgcgacgtgaccctcaagagctttgctgttccttgatcatcagtccgaaaggcggtatcacacagactctgcagccacactgcctacgtttgagttctgggtctgccacttgttagctgtgaaaatgagcagcttccttaaacactggtgattctctgtctcgtctgtaaaatgcacatcaccacctacttgagtgttgaggattcaattagttaatgtacttcaaataatcatgtagtaaatgctcagtagtgtgtg

SEQ ID NO: 289411 - DNA, 410 bp, Homo sapiens
cggccggggaagatggtggaggacggcgcggaggagctggaggatctggtgcacttctccgtgtctgagttgcctagtcgcggctacggcgtcatggaggagatccggcggcagggcaagctgtgcgacgtgaccctcaagagctttgctgttccttgatcatcagtccgaaaggcggtatcacacagactctgcagccacactgcctacgtttgagttctgggtctgccacttgttagctgtgaaaatgagcagcttccttaaacactggtgattctctgtctcgtctgtaaaatgcacatcaccacctacttgagtgttgaggattcaattagttaatgtacttcaaataatcatgtagtaaatgctcagtagtgtgtgaataaaaaaaaacaataaccacaaaaaaa

SEQ ID NO: 289412 - DNA, 824 bp, Homo sapiens
gtctgggaccacgttctgagagccatggttgtagggtgatggacctgtcgtttttctgtgggatgtgttcaaagtccgtagatcttcctccaggcttcttcctaggtggtataagcctggctgttattttgggagccttatggtaggagaggtctggaggttctcccttctgtatgcagactttcacttaatccccctaaatggtaccacttccttgtcttctgtggtgccctggttacccagatccagaggctcttgttcatcctgtctgaagagtaaacctccagtcttctgcagttgcttgtctggggagggggaccagtacttcctgatttcggcccttcttcttgctcacaacttcagaggaaactggtacctccagtggttccattttggaggggattcttcagtggcttgccatccgcaatactcagtatcctctaagtcagttactactcatgtgtcttcttttcttcttctaaaattttgttgacccttctaaaattttgttgacccttctaatgtgctgtctctctctgcatctttttccttcagagctttgctgttccttgatcatcagtccgaaaggcggtatcacacagactctgcagccacactgcctacgtttgagttctgggtctgccacttgttagctgtgaaaatgagcagcttccttaaacactggtgattctctgtctcgtctgtaaaatgcacatcaccacctacttgagtgttgaggattcaattagttaatgtacttcaaataatcatgtagtaaatgctcagtagtgtgtgaataaaaaaaaacaataaccacaaaaaaa

SEQ ID NO: 289413 - DNA, 2657 bp, Homo sapiens
aggccccaggaaatttcggcaaggagggcgccggggcgttttccttgttcctggtcaacaaagaaatgtggagtgtcttggctgaatcctcatacagacaagatcattatggtgctgttaggtaggacttgtatccagatgtaaggttgaaaaagtgatataataaaggaaccaaggagaaaattcagaaggaaagaaaaaattgcctctgcaggtgtgcgagcaggattgcttctgcaacaaaagcctccacccagccacatcttgggaaaagaatggccacttcttggggcacagtctttttcatgctggtggtatcctgtgtttgcagcgctgtctcccacaggaaccagcagacttggtttgagggtatcttcctgtcttccatgtgccccatcaatgtcagcgccagcaccttgtatggaattatgtttgatgcagggagcactggaactcgaattcatgtttacacctttgtgcagaaaatgccaggacagcttccaattctagaaggggaagtttttgattctgtgaagccaggactttctgcttttgtagatcaacctaagcagggtgctgagaccgttcaagggctcttagaggtggccaaagactcaatcccccgaagtcactggaaaaagaccccagtggtcctaaaggcaacagcaggactacgcttactgccagaacacaaagccaaggctctgctctttgaggtaaaggagatcttcaggaagtcacctttcctggtaccaaagggcagtgttagcatcatggatggatccgacgaaggcatattagcttgggttactgtgaattttctgacaggtcagctgcatggccacagacaggagactgtggggaccttggacctagggggagcctccacccaaatcacgttcctgccccagtttgagaaaactctggaacaaactcctaggggctacctcacttcctttgagatgtttaacagcacttataagctctatacacatagttacttgggatttggattgaaagctgcaagactagcaaccctgggagccctggagacagaagggactgatgggcacactttccggagtgcctgtttaccgagatggttggaagcagagtggatctttgggggtgtgaaataccagtatggtggcaaccaagaaggggaggtgggctttgagccctgctatgccgaagtgctgagggtggtacgaggaaaacttcaccagccagaggaggtccagagaggttccttctatgctttctcttactattatgaccgagctgttgacacagacatgattgattatgaaaaggggggtattttaaaagttgaagattttgaaagaaaagccagggaagtgtgtgataacttggaaaacttcacctcaggcagtcctttcctgtgcatggatctcagctacatcacagccctgttaaaggatggctttggctttgcagacagcacagtcttacagctcacaaagaaagtgaacaacatagagacgggctgggccttgggggccacctttcacctgttgcagtctctgggcatctcccattgaggccacgtacttccttggagacctgcatttgccaacacctttttaaggggaggagagagcacttagtttctgaactagtctggggacatcctggacttgagcctagagatttaggtttaattaattttacacatctaatgtgaactgctgcctaaccactcaagagtacacagctggcaccagagcatcacagagagccctgtgagccaaaaagtatagttttggaacttaaccttggagtgagagcccagggacaggtccctggaaaccaaagaaaaatcgcatttcaaccctttgagtgcctcattccactgaatatttaaattttcctcttaaatggtaaactgacttattgcaatcccaagacccatcaatatcagtatttttttcctccctatacagtgccctgcccacccttatctgcacccacctcccctgaaaaagagagaaaaaaaaaaacctggttttgctttccatgtataattcaacaacgcaaaatgggaccatgtcagaatctgtatgatcctattctgtgttagctccaatcagccagctgagagccatcctaaatattaataggatgagagagtaactcctaactgtgcataaattacagccttaagaaagaaggccacccggtctctggggacatgttttgggagggtgtggctgcctcatatagcctacctttgctttaatcagcattttatcagtcaactctgggattaatgaacatatccgactttatgggtatgtgtatattcagtgccagtaccacctcccaggctaatgtgttaacagtgttttctatgattctaaacttgttttctttgtatttctaagaaatacaactaggccctaacttttggtctgtggtcagaggtcagtgtctgtgctattccaggatctattatttcagtttgcccttttattctctccgtttgtaacagtaccttcctgtcctggtccctgatcactttagctaatatcctttgaattatttatctagttcagagtttccaataccgttcctgacaaaaccccacttggatttggttggctctctcagcccacatcagtacagtggaccaacat

SEQ ID NO: 289414 - DNA, 2599 bp, Homo sapiens
aggccccaggaaatttcggcaaggagggcgccggggcgttttccttgttcctggtcaacaaagaaatgtggagtgtcttggctgaatcctcatacagacaagatcattatggtgctgttaggtaggacttgtatccagatgtaaggttgaaaaagtgatataataaaggaaccaaggagaaaattcagaaggaaagaaaaaattgcctctgcaggtgtgcgagcaggattgcttctgcaacaaaagcctccacccagccacatcttgggaaaagaatggccacttcttggggcacagtctttttcatgctggtggtatcctgtgtttgcagcgctgtctcccacaggaaccagcagacttggtttgagggtatcttcctgtcttccatgtgccccatcaatgtcagcgccagcaccttgtatggaattatgtttgatgcagggagcactggaactcgaattcatgtttacacctttgtgcagaaaatgccaggacagcttccaattctagaaggggaagtttttgattctgtgaagccaggactttctgcttttgtagatcaacctaagcagggtgctgagaccgttcaagggctcttagaggtggccaaagactcaatcccccgaagtcactggaaaaagaccccagtggtcctaaaggcaacagcaggactacgcttactgccagaacacaaagccaaggctctgctctttgaggtaaaggagatcttcaggaagtcacctttcctggtaccaaagggcagtgttagcatcatggatggatccgacgaaggcatattagcttgggttactgtgaattttctgacaggtcagctgcatggccacagacaggagactgtggggaccttggacctagggggagcctccacccaaatcacgttcctgccccagtttgagaaaactctggaacaaactcctaggggctacctcacttcctttgagatgtttaacagcacttataagctctatacacatagttacttgggatttggattgaaagctgcaagactagcaaccctgggagccctggagacagaagggactgatgggcacactttccggagtgcctgtttaccgagatggttggaagcagagtggatctttgggggtgtgaaataccagtatggtggcaaccaagaaggggaggtgggctttgagccctgctatgccgaagtgctgagggtggtacgaggaaaacttcaccagccagaggaggtccagagaggttccttctatgctttctcttactattatgaccgagctgttgacacagacatgattgattatgaaaaggggggtattttaaaagttgaagattttgaaagaaaagccagggaagtgtgtgataacttggaaaacttcacctcaggcagtcctttcctgtgcatggatctcagctacatcacagccctgttaaaggatggctttggctttgcagacagcacagtcttacagctcacaaagaaagtgaacaacatagagacgggctgggccttgggggccacctttcacctgttgcagtctctgggcatctcccattgaggccacgtacttccttggagacctgcatttgccaacacctttttaaggggaggagagagcacttagtttctgaactagtctggggacatcctggacttgagcctagagatttaggtttaattaattttacacatctaatgtgaactgctgcctaaccactcaagagtacacagctggcaccagagcatcacagagagccctgtgagccaaaaagtatagttttggaacttaaccttggagtgagagcccagggacaggtccctggaaaccaaagaaaaatcgcatttcaaccctttgagtgcctcattccactgaatatttaaattttcctcttaaatggtaaactgacttattgcaatcccaagacccatcaatatcagtatttttttcctccctatacagtgccctgcccacccttatctgcacccacctcccctgaaaaagagagaaaaaaaatctgtatgatcctattctgtgttagctccaatcagccagctgagagccatcctaaatattaataggatgagagagtaactcctaactgtgcataaattacagccttaagaaagaaggccacccggtctctggggacatgttttgggagggtgtggctgcctcatatagcctacctttgctttaatcagcattttatcagtcaactctgggattaatgaacatatccgactttatgggtatgtgtatattcagtgccagtaccacctcccaggctaatgtgttaacagtgttttctatgattctaaacttgttttctttgtatttctaagaaatacaactaggccctaacttttggtctgtggtcagaggtcagtgtctgtgctattccaggatctattatttcagtttgcccttttattctctccgtttgtaacagtaccttcctgtcctggtccctgatcactttagctaatatcctttgaattatttatctagttcagagtttccaataccgttcctgacaaaaccccacttggatttggttggctctctcagcccacatcagtacagtggaccaacat

SEQ ID NO: 289415 - DNA, 2585 bp, Homo sapiens
tagttgcaaactggcacaaaggtgaatgcggttcatgaggctcgcttgattaagaagagctgaaacaggagcaaagagcaaaaggcaacctgcagcgaaagcaaggactcagggaaccggcagacacaagcagcctctgcaggtgtgcgagcaggattgcttctgcaacaaaagcctccacccagccacatcttgggaaaagaatggccacttcttggggcacagtctttttcatgctggtggtatcctgtgtttgcagcgctgtctcccacaggaaccagcagacttggtttgagggtatcttcctgtcttccatgtgccccatcaatgtcagcgccagcaccttgtatggaattatgtttgatgcagggagcactggaactcgaattcatgtttacacctttgtgcagaaaatgccaggacagcttccaattctagaaggggaagtttttgattctgtgaagccaggactttctgcttttgtagatcaacctaagcagggtgctgagaccgttcaagggctcttagaggtggccaaagactcaatcccccgaagtcactggaaaaagaccccagtggtcctaaaggcaacagcaggactacgcttactgccagaacacaaagccaaggctctgctctttgaggtaaaggagatcttcaggaagtcacctttcctggtaccaaagggcagtgttagcatcatggatggatccgacgaaggcatattagcttgggttactgtgaattttctgacaggtcagctgcatggccacagacaggagactgtggggaccttggacctagggggagcctccacccaaatcacgttcctgccccagtttgagaaaactctggaacaaactcctaggggctacctcacttcctttgagatgtttaacagcacttataagctctatacacatagttacttgggatttggattgaaagctgcaagactagcaaccctgggagccctggagacagaagggactgatgggcacactttccggagtgcctgtttaccgagatggttggaagcagagtggatctttgggggtgtgaaataccagtatggtggcaaccaagaaggggaggtgggctttgagccctgctatgccgaagtgctgagggtggtacgaggaaaacttcaccagccagaggaggtccagagaggttccttctatgctttctcttactattatgaccgagctgttgacacagacatgattgattatgaaaaggggggtattttaaaagttgaagattttgaaagaaaagccagggaagtgtgtgataacttggaaaacttcacctcaggcagtcctttcctgtgcatggatctcagctacatcacagccctgttaaaggatggctttggctttgcagacagcacagtcttacagctcacaaagaaagtgaacaacatagagacgggctgggccttgggggccacctttcacctgttgcagtctctgggcatctcccattgaggccacgtacttccttggagacctgcatttgccaacacctttttaaggggaggagagagcacttagtttctgaactagtctggggacatcctggacttgagcctagagatttaggtttaattaattttacacatctaatgtgaactgctgcctaaccactcaagagtacacagctggcaccagagcatcacagagagccctgtgagccaaaaagtatagttttggaacttaaccttggagtgagagcccagggacaggtccctggaaaccaaagaaaaatcgcatttcaaccctttgagtgcctcattccactgaatatttaaattttcctcttaaatggtaaactgacttattgcaatcccaagacccatcaatatcagtatttttttcctccctatacagtgccctgcccacccttatctgcacccacctcccctgaaaaagagagaaaaaaaaaaacctggttttgctttccatgtataattcaacaacgcaaaatgggaccatgtcagaatctgtatgatcctattctgtgttagctccaatcagccagctgagagccatcctaaatattaataggatgagagagtaactcctaactgtgcataaattacagccttaagaaagaaggccacccggtctctggggacatgttttgggagggtgtggctgcctcatatagcctacctttgctttaatcagcattttatcagtcaactctgggattaatgaacatatccgactttatgggtatgtgtatattcagtgccagtaccacctcccaggctaatgtgttaacagtgttttctatgattctaaacttgttttctttgtatttctaagaaatacaactaggccctaacttttggtctgtggtcagaggtcagtgtctgtgctattccaggatctattatttcagtttgcccttttattctctccgtttgtaacagtaccttcctgtcctggtccctgatcactttagctaatatcctttgaattatttatctagttcagagtttccaataccgttcctgacaaaaccccacttggatttggttggctctctcagcccacatcagtacagtggaccaacat

SEQ ID NO: 289416 - DNA, 2759 bp, Homo sapiens
cgcgcaagggtggcgcgcgcgcgttttccttgttcctggtcaacaaagaaatgtggagtgtcttggctgaatcctcatacagacaagatcattatggtgctgttaggtaggacttgtatccagatgtaaggttgaaaaagtgatataataaaggaaccaaggagaaaattcagaaggaaagaaaaaattggtctcactctgtcaccgaggctggagtacagtggtgcaatcacagctcacggcagcttcaaactcctgggctcaagcgatcctcctgcctcaccctcccgagtagctgagactacagcctctgcaggtgtgcgagcaggattgcttctgcaacaaaagcctccacccagccacatcttgggaaaagaatggccacttcttggggcacagtctttttcatgctggtggtatcctgtgtttgcagcgctgtctcccacaggaaccagcagacttggtttgagggtatcttcctgtcttccatgtgccccatcaatgtcagcgccagcaccttgtatggaattatgtttgatgcagggagcactggaactcgaattcatgtttacacctttgtgcagaaaatgccaggacagcttccaattctagaaggggaagtttttgattctgtgaagccaggactttctgcttttgtagatcaacctaagcagggtgctgagaccgttcaagggctcttagaggtggccaaagactcaatcccccgaagtcactggaaaaagaccccagtggtcctaaaggcaacagcaggactacgcttactgccagaacacaaagccaaggctctgctctttgaggtaaaggagatcttcaggaagtcacctttcctggtaccaaagggcagtgttagcatcatggatggatccgacgaaggcatattagcttgggttactgtgaattttctgacaggtcagctgcatggccacagacaggagactgtggggaccttggacctagggggagcctccacccaaatcacgttcctgccccagtttgagaaaactctggaacaaactcctaggggctacctcacttcctttgagatgtttaacagcacttataagctctatacacatagttacttgggatttggattgaaagctgcaagactagcaaccctgggagccctggagacagaagggactgatgggcacactttccggagtgcctgtttaccgagatggttggaagcagagtggatctttgggggtgtgaaataccagtatggtggcaaccaagaaggggaggtgggctttgagccctgctatgccgaagtgctgagggtggtacgaggaaaacttcaccagccagaggaggtccagagaggttccttctatgctttctcttactattatgaccgagctgttgacacagacatgattgattatgaaaaggggggtattttaaaagttgaagattttgaaagaaaagccagggaagtgtgtgataacttggaaaacttcacctcaggcagtcctttcctgtgcatggatctcagctacatcacagccctgttaaaggatggctttggctttgcagacagcacagtcttacagctcacaaagaaagtgaacaacatagagacgggctgggccttgggggccacctttcacctgttgcagtctctgggcatctcccattgaggccacgtacttccttggagacctgcatttgccaacacctttttaaggggaggagagagcacttagtttctgaactagtctggggacatcctggacttgagcctagagatttaggtttaattaattttacacatctaatgtgaactgctgcctaaccactcaagagtacacagctggcaccagagcatcacagagagccctgtgagccaaaaagtatagttttggaacttaaccttggagtgagagcccagggacaggtccctggaaaccaaagaaaaatcgcatttcaaccctttgagtgcctcattccactgaatatttaaattttcctcttaaatggtaaactgacttattgcaatcccaagacccatcaatatcagtatttttttcctccctatacagtgccctgcccacccttatctgcacccacctcccctgaaaaagagagaaaaaaaaaaacctggttttgctttccatgtataattcaacaacgcaaaatgggaccatgtcagaatctgtatgatcctattctgtgttagctccaatcagccagctgagagccatcctaaatattaataggatgagagagtaactcctaactgtgcataaattacagccttaagaaagaaggccacccggtctctggggacatgttttgggagggtgtggctgcctcatatagcctacctttgctttaatcagcattttatcagtcaactctgggattaatgaacatatccgactttatgggtatgtgtatattcagtgccagtaccacctcccaggctaatgtgttaacagtgttttctatgattctaaacttgttttctttgtatttctaagaaatacaactaggccctaacttttggtctgtggtcagaggtcagtgtctgtgctattccaggatctattatttcagtttgcccttttattctctccgtttgtaacagtaccttcctgtcctggtccctgatcactttagctaatatcctttgaattatttatctagttcagagtttccaataccgttcctgacaaaaccccacttggatttggttggctctctcagcccacatcagtacagtggaccaacat

SEQ ID NO: 289417 - DNA, 2436 bp, Homo sapiens
aggccccaggaaatttcggcaaggagggcgccggggcgttttccttgttcctggtcaacaaagaaatgtggagtgtcttggctgaatcctcatacagacaagatcattatggtgctgttaggtaggacttgtatccagatgtaaggttgaaaaagtgatataataaaggaaccaaggagaaaattcagaaggaaagaaaaaattgcctctgcaggtgtgcgagcaggattgcttctgcaacaaaagcctccacccagccacatcttgggaaaagaatggccacttcttggggcacagtctttttcatgctggtggtatcctgtgtttgcagcgctgtctcccacaggaaccagcagacttggtttgagggtatcttcctgtcttccatgtgccccatcaatgtcagcgccagcaccttgtatggaattatgtttgatgcagggagcactggaactcgaattcatgtttacacctttgtgcagaaaatgccaggacagcttccaattctagaaggggaagtttttgattctgtgaagccaggactttctgcttttgtagatcaacctaagcagggtgctgagaccgttcaagggctcttagaggtggccaaagactcaatcccccgaagtcactggaaaaagaccccagtggtcctaaaggcaacagcaggactacgcttactgccagaacacaaagccaaggctctgctctttgaggtaaaggagatcttcaggaagtcacctttcctggtaccaaagggcagtgttagcatcatggatggatccgacgaaggcatattagcttgggttactgtgaattttctgacaggtcagctgcatggccacagacaggagactgtggggaccttggacctagggggagcctccacccaaatcacgttcctgccccagtttgagttacttgggatttggattgaaagctgcaagactagcaaccctgggagccctggagacagaagggactgatgggcacactttccggagtgcctgtttaccgagatggttggaagcagagtggatctttgggggtgtgaaataccagtatggtggcaaccaagaagattatgaaaaggggggtattttaaaagttgaagattttgaaagaaaagccagggaagtgtgtgataacttggaaaacttcacctcaggcagtcctttcctgtgcatggatctcagctacatcacagccctgttaaaggatggctttggctttgcagacagcacagtcttacagctcacaaagaaagtgaacaacatagagacgggctgggccttgggggccacctttcacctgttgcagtctctgggcatctcccattgaggccacgtacttccttggagacctgcatttgccaacacctttttaaggggaggagagagcacttagtttctgaactagtctggggacatcctggacttgagcctagagatttaggtttaattaattttacacatctaatgtgaactgctgcctaaccactcaagagtacacagctggcaccagagcatcacagagagccctgtgagccaaaaagtatagttttggaacttaaccttggagtgagagcccagggacaggtccctggaaaccaaagaaaaatcgcatttcaaccctttgagtgcctcattccactgaatatttaaattttcctcttaaatggtaaactgacttattgcaatcccaagacccatcaatatcagtatttttttcctccctatacagtgccctgcccacccttatctgcacccacctcccctgaaaaagagagaaaaaaaaaaacctggttttgctttccatgtataattcaacaacgcaaaatgggaccatgtcagaatctgtatgatcctattctgtgttagctccaatcagccagctgagagccatcctaaatattaataggatgagagagtaactcctaactgtgcataaattacagccttaagaaagaaggccacccggtctctggggacatgttttgggagggtgtggctgcctcatatagcctacctttgctttaatcagcattttatcagtcaactctgggattaatgaacatatccgactttatgggtatgtgtatattcagtgccagtaccacctcccaggctaatgtgttaacagtgttttctatgattctaaacttgttttctttgtatttctaagaaatacaactaggccctaacttttggtctgtggtcagaggtcagtgtctgtgctattccaggatctattatttcagtttgcccttttattctctccgtttgtaacagtaccttcctgtcctggtccctgatcactttagctaatatcctttgaattatttatctagttcagagtttccaataccgttcctgacaaaaccccacttggatttggttggctctctcagcccacatcagtacagtggaccaacat

SEQ ID NO: 289418 - DNA, 1598 bp, Homo sapiens
ccttcctgctgttccctcattgtctccagcagcctgcctcagagagtgtccccttcccccagcgtcgttctcaccttacccctgtgcacctttgcctggcaggggaggtgggctttgagccctgctatgccgaagtgctgagggtggtacgaggaaaacttcaccagccagaggaggtccagagaggttccttctatgctttctcttactattatgaccgagctgttgacacagacatgattgattatgaaaaggggggtattttaaaagttgaagattttgaaagaaaagccagggaagtgtgtgataacttggaaaacttcacctcaggcagtcctttcctgtgcatggatctcagctacatcacagccctgttaaaggatggctttggctttgcagacagcacagtcttacagctcacaaagaaagtgaacaacatagagacgggctgggccttgggggccacctttcacctgttgcagtctctgggcatctcccattgaggccacgtacttccttggagacctgcatttgccaacacctttttaaggggaggagagagcacttagtttctgaactagtctggggacatcctggacttgagcctagagatttaggtttaattaattttacacatctaatgtgaactgctgcctaaccactcaagagtacacagctggcaccagagcatcacagagagccctgtgagccaaaaagtatagttttggaacttaaccttggagtgagagcccagggacaggtccctggaaaccaaagaaaaatcgcatttcaaccctttgagtgcctcattccactgaatatttaaattttcctcttaaatggtaaactgacttattgcaatcccaagacccatcaatatcagtatttttttcctccctatacagtgccctgcccacccttatctgcacccacctcccctgaaaaagagagaaaaaaaaaaacctggttttgctttccatgtataattcaacaacgcaaaatgggaccatgtcagaatctgtatgatcctattctgtgttagctccaatcagccagctgagagccatcctaaatattaataggatgagagagtaactcctaactgtgcataaattacagccttaagaaagaaggccacccggtctctggggacatgttttgggagggtgtggctgcctcatatagcctacctttgctttaatcagcattttatcagtcaactctgggattaatgaacatatccgactttatgggtatgtgtatattcagtgccagtaccacctcccaggctaatgtgttaacagtgttttctatgattctaaacttgttttctttgtatttctaagaaatacaactaggccctaacttttggtctgtggtcagaggtcagtgtctgtgctattccaggatctattatttcagtttgcccttttattctctccgtttgtaacagtaccttcctgtcctggtccctgatcactttagctaatatcctttgaattatttatctagttcagagtttccaataccgttcctgacaaaaccccacttggatttggttggctctctcagcccacatcagtacagtggaccaacat

SEQ ID NO: 289419 - DNA, 1833 bp, Homo sapiens
aggccccaggaaatttcggcaaggagggcgccggggcgttttccttgttcctggtcaacaaagaaatgtggagtgtcttggctgaatcctcatacagacaagatcattatggtgctgttaggtaggacttgtatccagatgtaaggttgaaaaagtgatataataaaggaaccaaggagaaaattcagaaggaaagaaaaaattgcctctgcaggtgtgcgagcaggattgcttctgcaacaaaagcctccacccagccacatcttgggaaaagaatggccacttcttggggcacagtctttttcatgctggtggtatcctgtgtttgcagcgctgtctcccacaggaaccagcagacttggtttgagggtatcttcctgtcttccatgtgccccatcaatgtcagcgccagcaccttgtatggaattatgtttgatgcagggagcactggaactcgaattcatgtttacacctttgtgcagaaaatgccaggacagcttccaattctagaaggggaagtttttgattctgtgaagccaggactttctgcttttgtagatcaacctaagcagggtgctgagaccgttcaagggctcttagaggtggccaaagactcaatcccccgaagtcactggaaaaagaccccagtggtcctaaaggcaacagcaggactacgcttactgccagaacacaaagccaaggctctgctctttgaggtaaaggagatcttcaggaagtcacctttcctggtaccaaagggcagtgttagcatcatggatggatccgacgaaggcatattagcttgggttactgtgaattttctgacaggtcagctgcatggccacagacaggagactgtggggaccttggacctagggggagcctccacccaaatcacgttcctgccccagtttgagaaaactctggaacaaactcctaggggctacctcacttcctttgagatgtttaacagcacttataagctctatacacatagttacttgggatttggattgaaagctgcaagactagcaaccctgggagccctggagacagaagggactgatgggcacactttccggagtgcctgtttaccgagatggttggaagcagagtggatctttgggggtgtgaaataccagtatggtggcaaccaagaaggggaggtgggctttgagccctgctatgccgaagtgctgagggtggtacgaggaaaacttcaccagccagaggaggtccagagaggttccttctatgctttctcttactattatgaccgagctgttgacacagacatgattgattatgaaaaggggggtattttaaaagttgaagattttgaaagaaaagccagggaagtgtgtgataacttggaaaacttcacctcaggcagtcctttcctgtgcatggatctcagctacatcacagccctgttaaaggatggctttggctttgcagacagcacagtcttacaggctgccgtactgaggtgatgggccaagctggagatatccccaaagcccatgttgacaccctgtcctgcaagcggatggactctgtgggctgcatccctaagaataaagcagagttcaggtgtgacctctggcagcaaagtgagaagggagtggccctgctctgttatcgtcttacccaatgagcgccacccgaggcctgacgtactcagcagcatgtcccaacccaagaggaaacagaactcggcttttggcatccaccctggctacgcttgggggcagctggcgagccgagaccttagtgggcttcagaaggctgacagcatactgcagcatggcaccagctgtgtcgatgaagtcc

SEQ ID NO: 289420 - DNA, 408 bp, Homo sapiens
gcctagtttcttctctagtttcttagggcaaaggaatgagttttgccaaaattttatctaggaaaaatggagtagttttctaagtcttacaggacactgtcaaaatatggaaatctattttattgccttagggaattctttttttttttttttcctttttctctaggtaaaggagatcttcaggaagtcacctttcctggtaccaaagggcagtgttagcatcatggatggatccgacgaaggtgggagaggtgttgatatgcgttccagggggagaggggcaggatcagtgaaagatctaactaaaggaactggggccaggaataaacagaaggaatgagatagcaggaaatagaagacagggagaagggaacatgtgctctagacatggaatttagagaggaaaaa

SEQ ID NO: 289421 - DNA, 3335 bp, Homo sapiens
tctgtgagggcagagcctgtggtgcaggaaggctggacctgcaggctcctcctggacagtgaaactgggcacttggggtccagaggcagggccttccttgacagaattgtgtcctctcctctcagagccccatcagccacacctgatgctggagggcggcagcctgagctcagcagaatatgaggcccgggtgagggcccgccgagattttcagaggctacagcgaagggacagtgatggggaccggcaggtgtggttcctgcagcgacgcttccacaaggacatcctgctgaaccccgtgctggcgctgagcttctgcccagacctgagctccaagcccggacacctggggacagctactcgggagctactcttccttttggatagcagcagcgtggcacacaaggatgccattgttttggctgtgaagtccctcccgccccagacgcttatcaacctggccgtgtttgggacgttggtgcagccactcttcccagagagccggccttgcagtgatgatgctgtgcagctgatctgcgagagcattgagaccctgcaggttccgagtgggcccccagacgtgctggctgctctggactgggccgtggggcagccccagcacagggcctaccctcggcagctgttcctgctcactgctgcctcacccatggccgccactacccaccgaaccctggagctcatgaggtggcacagggggacagccagatgcttctcctttgggctggggcccacctgccaccagctgctccagggtttatctgccctcagcagaggccaggcctacttcctgaggcctgggcagaggctgcagcccatgctggtacaggctctgcggaaggcactggagcctgctttgagtgacatctctgtggactggtttgtgcccgacactgtggaggcactgctgaccccccgggagatcccagcactctaccctggggaccagctgctcggttactgctcactcttcagggtggatggcttccggtcccgcccaccagggggccaagagcctggctggcagagctcgggtgggtccgtgtttccatccccagaagaggccccgtctgctgccagccctggcactgagcccactggcacctcagagccactgggaacaggcactgtctcagcagaactgtccagcccatgggctgccagggactcggagcagagtactgatgctctgacagacccagtcacggatcctggacccaacccctctgacacagccatatggcgccgcatctttcagtcctcgtacattcgggagcagtatgtgctcacccactgctctgccagccccgagccaggcccaggctccacaggcagcagtgagtccccaggctcacagggccctggctcccccgaaggtagtgctcccttggagcccccttctcagcagggctgccgcagtctggcctggggagaacctgcaggctcccgctcctgtcccctgcctgcacccacaccagctccattcaaggtgggggccttgagtactgaggtgctgggccgtcagcacagagcggctctggctggccgaagcctctcatcccctccaggccgggcaaaccaagtccccggccgaccccggaaaccctctttgggtgcaatactagatggcccaagtcctgagccaggccaacagttgggacaaggcctggatgactcaggaaacctgctctccccagcccctatggactgggacatgctgatggaaccacccttcttattcacggctgtgcctcctagtggggagttggcccctccagcagtgcctccccaggctccacgctgccatgtggtgatccggggcctgtgtggggagcagcccatgtgctgggaggtgggtgttgggctggagacactgtggggacctggagatggctcacagcctccctcacctcctgtaagagaagctgcttgggaccaagcactccatcggctgacagcagcctctgtggtccgggacaatgagcagctggccctccgaggaggggcagagaccacagctgaccggggccatgcccggaggtgctggcttcgagcccttcagacaagtaaggtcagctctgccccctcctgcttcacttgccctgtagctgtggatgctactactagggaggtcctgcctggggccctgcaggtgtgcagctcagagcccgctgagcccccaggaacccctcctgcctctcacagccatctagatgcagctcctctgcccactgttgtctactctaaaggacttcagagaggctctccagcaggcgcctgggactcggaccaaaatggcaactccaagcgtgctttgggggaccctgccactcccacggaaggtcctcgccgcccacctccccgtcctccctgtcggctcagcatgggccgccgtcacaaactctgtagccctgacccgggccaggccaacaacagtgaaggcagcgaccatgactacctgcccttggtgcggctgcaggaggcaccaggctccttccgcctggacgcgcccttctgcgccgctgtgcgcatctcgcaggagcgcctctgccgtgcctcgccctttgccgtgcaccgcgccagcctcagccccacctcggcctcattgccctgggcacttctgggccctggtgttggccagggtgacagtgccacggcctcctgcagcccgtcccccagctcgggctctgaggggccaggccaggtggacagtgggcggggctcagacaccgaggcctccgagggggcggaagggctgggcggcaccgacctgcggggccggacctgggccactgccgtagcactcgcctggctggagcaccgatgcgccgctgccttcgacgagtgggaactgacagcggccaaggctgattgctggctgcgggcccagcacttgcctgacggccttgacctggccgccctcaaggccgcagcccgagggctcttcctgctactgcgccactgggaccaaaacctgcagctacacctgctgtgctacagcccagcgaacgtgtgaaggctgccccctgctgcttgggctggcgccccacccaacacactcaagtcactgccgcccagggctggcctcttggtgctgggaaagtgtaggctggtgccagcctgtcccccactgcttcttactccctccctagagccctcttgcccccacaaaaagtgcctgcctgtgctctctccctctcctcccaccccactcacactcccctccatcctctgagctccctgcaacacagtggaagggtagagagccacagtccccaaatcctatgcaataaagtgcctcttagggactgcttgag

SEQ ID NO: 289422 - DNA, 1640 bp, Homo sapiens
  misc_feature (1)..(1): n is a, c, g, or t
  misc_feature (4)..(4): n is a, c, g, or t
  misc_feature (6)..(6): n is a, c, g, or t
  misc_feature (8)..(8): n is a, c, g, or t
ngcncnancagtccccaaacaaacctaggagctaaataaaacagtgtgtgcagtgtgcaaatggagctttatgtcctccagcctgcttcctgcttctctattcctcctgcccgggaggagtagagaattctggagccaccttagtgggcaatgggggagctcctgatggttcaggagcaggaaatttatgagcagagtggggtcccaggccacagggagatgtctatccacaagggatggtggccaagggttgaatggaaagaggcaggcagggggagaggggcagagggtgtgggtattcccagggccttgagagtggacatggccccttctcctcagccttccattagcaaggatgtcactgctgctcttgcctgatgacagccagatctgttcacagttagtctgcctctcctgccatcattcatctcatgcctccatcctgcgtcaccaatgcattagcctagtgccaacacgcaaagtcccccttgcccaggctccctgacccaatgcctgcttccacatctagcttcctccctctcctctgcttccagcatgctctgaccccatttctcacccatcataggtcatcttgtcttggatctggcccaggcccggtccacgttggtgctgcccacaggcattatcgccgcggctggcaccatgacggtgaccctgcacagcagccgggagctgccctcaaggcctgacggggtgctgcatgtggccctgcccactgtgctcaccccgctggccccgccaggcccgccggggccccccaggcctccggggctctgtgacgacaggttgggcctatggtgattctcttcgtccctccctcggcttctctgggtctagtgcgggtgagggggcactggcagggtacccagggatgggaagggtgaggaagggctggggccagtcagccggagggtttaggggccttcacagtggcccagtgaccctcctcatgctcccttccagccccaccagctgcttcggggtgggcagccttcaggaggaagggctggcctgggaggagctggctgcccctcgggacgtgttctcaggccctgcccgctgccctgccccatataccttctccttcgagatgctggtgactgggccatgcctgcttgcaggcctggagagcccctctcatgctctgcgggcagatgccccccctcatgccagctctgcagccaccatctgtgtcacactggcagagggccaccactgtgaccgggccttggagatcctgctgcaccccagtgagccccatcagccacacctgatgctggagggcggcagcctgagctcagcagaatatgaggcccgggtgagggcccgccgagattttcagaggctacagcgaagggacagtgatggggaccggcaggtaccgccataggagcctggcctggcccctggccttggctgcatttgtgcacaaggagcaggcaagcaggcttacattggaatgggtgcggggaggcctcttttctcggtaagatctctccacagctgccaccaaccatcacagaggacagatgagtattgtcattggagggccgatgtgaatctctctggggtgtgtctcagaggatggaggctaggtctgatataaacagaagacagcc

SEQ ID NO: 289423 - DNA, 970 bp, Homo sapiens
tctgtgagggcagagcctgtggtgcaggaaggctggacctgcaggctcctcctggacagtgaaactgggcacttggggtccagaggcagggccttccttgacagaattgtgtcctctcctctcagagccccatcagccacacctgatgctggagggcggcagcctgagctcagcagaatatgaggcccgggtgagggcccgccgagattttcagaggctacagcgaagggacagtgatggggaccggcaggtgtggttcctgcagcgacgcttccacaaggacatcctgctgaaccccgtgctggcgctgagcttctgcccagacctgagctccaagcccggacacctggggacagctactcgggagctactcttccttttggatagcagcagcgtggcacacaaggatgccattgttttggctgtgaagtccctcccgccccagacgcttatcaacctggccgtgtttgggacgttggtgcagccactcttcccagagagccggccttgcagtgatgatgctgtgcagctgatctgcgagagcattgagaccctgcaggttccgagtgggcccccagacgtgctggctgctctggactgggccgtggggcagccccagcacagggcctaccctcggcagctgttcctgctcactgctgcctcacccatggccgccactacccaccgaaccctggagctcatgaggtggcacagggggacagccagatgcttctcctttgggctggggcccacctgccaccagctgctccagggtttatctgccctcagcagaggccaggcctacttcctgaggcctgggcagaggctgcagcccatgctggtacacggtcgcgggacgcctggacctggctcgatgaatttctgggctgcttgggccgactgtgcgggcttgtcccccggagtccaccctcccggggcgcgcggtggctctggggggacggccccccag

SEQ ID NO: 289424 - DNA, 1694 bp, Homo sapiens
aaactagctagtacgaggctgggtgttgaatcggccgaggctcaatagtcaaatgtgactagtggctaccacattggatcatgaagagagagaacatttccaagttttattagtgcagaagcaggtggaggaaaatgtgccagctaatgcttcctctgggtgttgtccagagtgctgaatttctgggcagccagggggctcttgctctgctatgggttgaagattcagcctgatcacttcttgtcaaagttggggagtctgagctggttctgggcctagcaaggcaatctactctgttaaagtcgatagagggagaagctggggagaacactgcaattttttctatgagccctctgtagagggtgggtggtgggggctccacagactgctccttggttccacaggccatgcccggaggtgctggcttcgagcccttcagacaagtaaggtcagctctgccccctcctgcttcacttgccctgtagctgtggatgctactactagggaggtcctgcctggggccctgcaggtgtgcagctcagagcccgctgagcccccaggaacccctcctgcctctcacagccatctagatgcagctcctctgcccactgttgtctactctaaaggacttcagagaggctctccagcaggcgcctgggactcggaccaaaatggcaactccaagcgtgctttgggggaccctgccactcccacggaaggtcctcgccgcccacctccccgtcctccctgtcggctcagcatgggccgccgtcacaaactctgtagccctgacccgggccaggccaacaacagtgaaggcagcgaccatgactacctgcccttggtgcggctgcaggaggcaccaggctccttccgcctggacgcgcccttctgcgccgctgtgcgcatctcgcaggagcgcctctgccgtgcctcgccctttgccgtgcaccgcgccagcctcagccccacctcggcctcattgccctgggcacttctgggccctggtgttggccagggtgacagtgccacggcctcctgcagcccgtcccccagctcgggctctgaggggccaggccaggtggacagtgggcggggctcagacaccgaggcctccgagggggcggaagggctgggcggcaccgacctgcggggccggacctgggccactgccgtagcactcgcctggctggagcaccgatgcgccgctgccttcgacgagtgggaactgacagcggccaaggctgattgctggctgcgggcccagcacttgcctgacggccttgacctggccgccctcaaggccgcagcccgagggctcttcctgctactgcgccactgggaccaaaacctgcagctacacctgctgtgctacagcccagcgaacgtgtgaaggctgccccctgctgcttgggctggcgccccacccaacacactcaagtcactgccgcccagggctggcctcttggtgctgggaaagtgtaggctggtgccagcctgtcccccactgcttcttactccctccctagagccctcttgcccccacaaaaagtgcctgcctgtgctctctccctctcctcccaccccactcacactcccctccatcctctgagctccctgcaacacagtggaagggtagagagccacagtccccaaatcctatgcaataaagtgcctcttagggactgcttgag

SEQ ID NO: 289425 - DNA, 472 bp, Homo sapiens
  misc_feature (406)..(406): n is a, c, g, or t
  misc_feature (411)..(411): n is a, c, g, or t
  misc_feature (436)..(436): n is a, c, g, or t
ttttttgagacagagtcttgctctgtcacccaggctggagtgcagtggcgtgatctcggctcactgcaagctctgcctcccgggttcacgcgattctcctgcctcagcctcccaatagctgggattacaggtgtgggccaccgtgcccggcctgcccattctttctttctgcccacctctccaattccttgagcattgcagtggatgtttaattttgagaatactaattagcttcagtaattacacaccttgaggcatttcaggatatttatagcattgtagtttcggtcttgatatgttgtagctttttggcttttgtgtctttttttttaagaaagctttgaattttgttcagagaagatttgtgttaatccatctaagtggaattcaggggtattagaagttngtttngtcagtgcccaagaatatcatattngtatttgttcatagcattttgagtaatccgtgaggg

SEQ ID NO: 289426 - DNA, 4357 bp, Homo sapiens
agcggagttcgcgccggcggtagacgaggacgccaacagcagcggagaaacgtttctctttcctctcagtttgcgcacaccatggcggcccctgcccagcagactactcagcctggcggcgggaagcgcaaaggcaaggctcagtatgtgctggccaagcgcgctcggcgctgcgacgctggcgggccccgtcagctagagcccgggctacagggcatcctcatcacctgcaatatgaacgagcgcaagtgcgtggaggaggcctacagcctcctcaacgaatacggcgacgacatgtatgggccagaaaagtttacagacaaggatcagcagccctctggaagtgagggagaggatgatgatgcggaggctgccttgaagaaagaagttggtgacattaaggcatctacagagatgaggttaagaagattccagtcagtggaaagtggagcaaataacgttgtcttcatcaggacacttgggatagagcctgagaaattggtgcatcatattctccaggatatgtacaaaaccaagaaaaagaagactcgagttattttgcgaatgttacccatctcaggcacatgcaaggcttttttagaagatatgaaaaaatatgcagaaacatttttggaaccctggtttaaagctccaaacaaagggacatttcagattgtgtacaaatctcgaaataacagtcatgtgaatagagaagaagttatcagagaattggcaggaatagtgtgcaccctcaattcagaaaataaagtggatctcaccaatccacagtacacagtggtagtagaaatcatcaaagctgtctgttgcctgagtgttgtgaaagattacatgttgtttagaaaatacaatctccaggaggtggtgaagagccctaaggatccgtcacagcttaactcaaagcagggaaatgggaaagaagctaaactggaatctgcggacaaatcagaccaaaacaacacagcagaaggaaaaaataaccagcaggtaccagagaatactgaggagctggggcagacaaaaccaacgtctaatccacaggtggtaaatgagggaggagccaaacctgaacttgcaagtcaagccacagaaggatccaagtcaaatgaaaatgacttctcataggaagtcatttggtgttggaggtgggtttctcacctggggctctacgagatgttgctggggctccaccttaaattgtgactaaaaacagttttttatttgtgtgctgcattatgctgttctcacagtagtgagcaatgattgcgcagccctgttaacagtttttttagggatctttcagcctttatggtattacgtagaggcagacccatgtgctgctgttgcaaagaggggaggataggagggggatgttggcctctcccaggctcctcttctgcagtgccagctgacttaagggagtgaactacctgtgaagtagaaaatcagagggaagttttcattctaaggaaggagtttttacatgccacagctcagctgtctgcctgccactttgttgtaaacattgcaaaaatgtggatcatgtaggttagaagtgaattgtttagtgaagtttttgtacttttgtgattttcttgtttatgtctgtttttttttttttttttaacatttgtgtgtaatatagctgacagtccagtgtcgcaattttggaaggcaagatgtgagagagacgagaaccattttaggcatagaactacagacatttctgaaaaggttggtgatgaagaacttcagtcttctgagtatacttcagtatactagtgcaacaagggacacaaagaaattctgtcttaataaagaaagctacttctcaagggtattatgtggactcagtccaagctctcctgtcccattgtgcattgtctgtgacatgcaacttacaaaactagcaattgtaacaataaatcacagccacttgacaagaaaggatattcattattttcaaatggcttttggactatcaaaaacagtaaggcttttgttcagaaatcacctttagtcaaaaggtttaagaagcaaattatttagtagcagaacttatctcaggaaaggaaaatatgcatggttggtgagaatctaataacattaaaatgctggggcaagatgcagtacaaagttgaagagactttattctcaataagttgatttactgatgatatgtcatatgatgcaaaaaaggttttgtgtcattaactgaaaagtagcagcttctctatccaggatgatgagtcaacaggtttcactaatatttgtcatgctgtagcatttgtaagatttgtaaatgatgaaattcaaagaaaactttttctattgctaggagcctgccagaacaaaggccaatatataatgttgtgacatcatatctgataaccagaggtctggtatctacactcctggtgccccatcagtggttgtctccataagtcattttgcgttattaaaaaaaaaaaaagaaatcctgatgttgacattatagcacactgctttctccacagagatgctgatatcaaaaacttgaagatacagtgaagttctgaataatgttacaaaactggttacctgtatcaaagacccatttatgcaaaaatgttaaaaaaaaaaaaaacacccaaaacaaaaacctggacagacagcacataaacctcctgcaccatacagacatccagtggcttctcagaggaagcgttctctacaggatatttgaattgaaaggtgaattgccagagtacttacaataaaacagccagcttttgctgagtgctttggaaatgaaaaatgactacagaaagtagcctattttgcagacgtttttcatcacatgaacaaatggacaagtctctgaaaggttctggggaaaaaaatttttcttaaagcgacaagactcttagatctaaaaggaaactgacttgccaccttgccagaggaattcttgaaatgtttctgcagccacttggccttgaaaataaagggtgcaactctcaagtcttgttctaacccggctggaggaaccacaagacccaatgaaatagcattttctctccttttcccagcactagtatataacctatgaggaacccttgtctctgaatctgctcagcttgaaattttgtctctgaaggaagagaatgaactcagccctagtctgacagtcctagatttctgtgaaataagagtattcttcaacttagtgctcacactcacataccatgagggttctctgcaggggtttaggggtttcctgaatttgaaagttttttcaaggcctctttttgggtaaaacaattgaaaaggcagacaccaacaaagtctgcaaaattaactgtccagattaagaatattaaggagctgtaaaattagcttgtagaaatggacttatccttaagttttaaaaagttaggaaatcctaaaaatgttaggcttcctgcacaagtggctatgttcatttaatggctagtgaacatgggaatgtatttttatcctcctagctggtggttctgtttggtaaaccagactagaatgatttgagaggggcaaagagaataggcaggaccttccttctatagctttacatatttagaatgttaatacttaatgacattgaagttaccttgcaatgattgataagaggattattaatatcagttaggggaatagggaggataggattttggtgccttcttcagcagacttgctccaagacaaagattctattttgatagtgcaagacaaaaggactcggaagaaaattggccatatgcctacagagcatacaactctgtggaactaaattgtttttactttgtgaaagctgctattttacggaaagattttgattatacagtttgtttttaagttgtcttttatatttatttgtatttggtaagaatcggttgttacacaagctgttctttcccagttacaaaatcctgtgttcggttgtaacctgaactcattaaaagacttgttttcaggtttatcaactgtttattttcactgacatttgagcatgttattttataaatgacgagattccagggtaggaagtgctttttattccccttttgttttttcttttaaaaaattacgtcagttaaaaaaataaaaaaactgcagtcttatggtttagaaaacttgtttagctccatagaggaaagaatgttaaactttgtattttaaaacatgattctctgaggttaaacttggttttcaaatgttatttttacttgtattttgcttttggtacggccagaaatcgagcttgttttttcatagttcctgatattttcagaaaaatcaaaataaatttgttccctaaaaa

SEQ ID NO: 289427 - DNA, 4450 bp, Homo sapiens
agcggagttcgcgccggcggtagacgaggacgccaacagcagcggagaaacgtttctctttcctctcagtttgcgcacaccatggcggcccctgcccagcagactactcagcctggcggcgggaagcgcaaaggcaaggctcagtatgtgctggccaagcgcgctcggcgctgcgacgctggcgggccccgtcagctagagcccgggctacagggcatcctcatcacctgcaatatgaacgagcgcaagtgcgtggaggaggcctacagcctcctcaacgaatacggcgacgacatgtatgggccagaaaagtttacagacaaggatcagcagccctctggaagtgagggagaggatgatgatgcggaggctgccttgaagaaagaagttggtgacattaaggcatctacagagatgaggttaagaagattccagtcagtggaaagtggagcaaataacgttgtcttcatcaggacacttgggatagagcctgagaaattggtgcatcatattctccaggatatgtacaaaaccaagaaaaagaagactcgagttattttgcgaatgttacccatctcaggcacatgcaaggcttttttagaagatatgaaaaaatatgcagaaacatttttggaaccctggtttaaagctccaaacaaagggacatttcagattgtgtacaaatctcgaaataacagtcatgtgaatagagaagaagttatcagagaattggcaggaatagtgtgcaccctcaattcagaaaataaagtggatctcaccaatccacagtacacagtggtagtagaaatcatcaaagctgtctgttgcctgagtgttgtgaaagattacatgttgtttagaaaatacaatctccaggaggtggtgaagagccctaaggatccgtcacagcttaactcaaagcagggaaatgggaaagaagctaaactggaatctgcggacaaatcagaccaaaacaacacagcagaaggaaaaaataaccagcaggtaccagagaatactgaggagctggggcagacaaaaccaacgtctaatccacaggtggtaaatgagggaggagccaaacctgaacttgcaagtcaagccacagaaggatccaagtcaaatgaaaatgacttctcataggaagtcatttggtgttggaggtgggtttctcacctggggctctacgagatgttgctggggctccaccttaaattgtgactaaaaacagttttttatttgtgtgctgcattatgctgttctcacagtagtgagcaatgattgcgcagccctgttaacagtttttttagggatctttcagcctttatggtattacgtagaggcagacccatgtgctgctgttgcaaagaggggaggataggagggggatgttggcctctcccaggctcctcttctgcagtgccagctgacttaagggagtgaactacctgtgaagtagaaaatcagagggaagttttcattctaaggaaggagtttttacatgccacagctcagctgtctgcctgccactttgttgtaaacattgcaaaaatgtggatcatgtaggttagaagtgaattgtttagtgaagtttttgtacttttgtgattttcttgtttatgtctgtttttttttttttttttaacatttgtgtgtaatatagctgacagtccagtgtcgcaattttggaaggcaagatgtgagagagacgagaaccattttaggcatagaactacagacatttctgaaaaggttggtgatgaagaacttcagtcttctgagtatacttcagtatactagtgcaacaagggacacaaagaaattctgtcttaataaagaaagctacttctcaagggtattatgtggactcagtccaagctctcctgtcccattgtgcattgtctgtgacatgcaacttacaaaactagcaattgtaacaataaatcacagccacttgacaagaaaggatattcattattttcaaatggcttttggactatcaaaaacagtaaggcttttgttcagaaatcacctttagtcaaaaggtttaagaagcaaattatttagtagcagaacttatctcaggaaaggaaaatatgcatggttggtgagaatctaataacattaaaatgctggggcaagatgcagtacaaagttgaagagactttattctcaataagttgatttactgatgatatgtcatatgatgcaaaaaaggttttgtgtcattaactgaaaagtagcagcttctctatccaggatgatgagtcaacaggtttcactaatatttgtcatgctgtagcatttgtaagatttgtaaatgatgaaattcaaagaaaactttttctattgctaggagcctgccagaacaaaggccaatatataatgttgtgacatcatatctgataaccagaggtctggtatctacactcctggtgccccatcagtggttgtctccataagtcattttgcgttattaaaaaaaaaaaaagaaatcctgatgttgacattatagcacactgctttctccacagagatgctgatatcaaaaacttgaagatacagtgaagttctgaataatgttacaaaactggttacctgtatcaaagacccatttatgcaaaaatgttaaaaaaaaaaaaaacacccaaaacaaaaacctggacagacagcacataaacctcctgcaccatacagacatccagtggcttctcagaggaagcgttctctacaggatatttgaattgaaaggtgaattgccagagtacttacaataaaacagccagcttttgctgagtgctttggaaatgaaaaatgactacagaaagtagcctattttgcagacgtttttcatcacatgaacaaatggacaagtctctgaaaggttctggggaaaaaaatttttcttaaagcgacaagactcttagatctaaaaggaaactgacttgccaccttgccagaggaattcttgaaatgtttctgcagccacttggccttgaaaataaagggtgcaactctcaagtcttgttctaacccggctggaggaaccacaagacccaatgaaatagcattttctctccttttcccagcactagtatataacctatgaggaacccttgtctctgaatctgctcagcttgaaattttgtctctgaaggaagagaatgaactcagccctagtctgacagtcctagatttctgtgaaataagagtattcttcaacttagtgctcacactcacataccatgagggttctctgcaggggtttaggggtttcctgaatttgaaagttttttcaaggcctctttttgggtaaaacaattgaaaaggcagacaccaacaaagtctgcaaaattaactgtccagattaagaatattaaggagctgtaaaattagcttgtagaaatggacttatccttaagttttaaaaagttaggaaatcctaaaaatgttaggcttcctgcacaagtggctatgttcatttaatggctagtgaacatgggaatgtatttttatcctcctagctggtggttctgtttggtaaaccagactagaatgatttgagaggggcaaagagaataggcaggaccttccttctatagctttacatatttagaatgttaatacttaatgacattgaagttaccttgcaatgattgataagaggattattaatatcagttaggggaatagggaggataggattttggtgccttcttcagcagacttgctccaagacaaagattctattttgatagtgcaagacaaaaggactcggaagaaaattggccatatgcctacagagcatacaactctgtggaactaaattgtttttactttgtgaaagctgctattttacggaaagattttgattatacagtttgtttttaagttgtcttttatatttatttgtatttggtaagaatcggttgttacacaagctgttctttcccagttacaaaatcctgtgttcggttgtaacctgaactcattaaaagacttgttttcaggtttatcaactgtttattttcactgacatttgagcatgttattttataaatgacgagattccagggtaggaagtgctttttattccccttttgttttttcttttaaaaaattacgtcagttaaaaaaataaaaaaactgcagtcttatggtttagaaaacttgtttagctccatagaggaaagaatgttaaactttgtattttaaaacatgattctctgaggttaaacttggttttcaaatgttatttttacttgtattttgcttttggtacggccagaaatcgagcttgttttttcatagttcctgatattttcagaaaaatcaaaataaatttgttccctaaaaaaaaaattaaaaactttagggggggcccgggacccattttgcctttagtgaagtcgatttaccctcgcttattggccttcttttttacaacttc

SEQ ID NO: 289428 - DNA, 4092 bp, Homo sapiens
taaaaaagtgtgtactgtttaatgtactctgttgttacaggaaaacaacagcatggtgttacggttggataactcaggacatcacaaaaatgttaacaacggtgtctacctaaacagtcatttctagtgcaagcagtaataatgatgaaaagttaaaatatattagatacattatagtacgtattaggcactgaagaaatactgtttggaaagaatgactagagcctgagaaattggtgcatcatattctccaggatatgtacaaaaccaagaaaaagaagactcgagttattttgcgaatgttacccatctcaggcacatgcaaggcttttttagaagatatgaaaaaatatgcagaaacatttttggaaccctggtttaaagctccaaacaaagggacatttcagattgtgtacaaatctcgaaataacagtcatgtgaatagagaagaagttatcagagaattggcaggaatagtgtgcaccctcaattcagaaaataaagtggatctcaccaatccacagtacacagtggtagtagaaatcatcaaagctgtctgttgcctgagtgttgtgaaagattacatgttgtttagaaaatacaatctccaggaggtggtgaagagccctaaggatccgtcacagcttaactcaaagcagggaaatgggaaagaagctaaactggaatctgcggacaaatcagaccaaaacaacacagcagaaggaaaaaataaccagcaggtaccagagaatactgaggagctggggcagacaaaaccaacgtctaatccacaggtggtaaatgagggaggagccaaacctgaacttgcaagtcaagccacagaaggatccaagtcaaatgaaaatgacttctcataggaagtcatttggtgttggaggtgggtttctcacctggggctctacgagatgttgctggggctccaccttaaattgtgactaaaaacagttttttatttgtgtgctgcattatgctgttctcacagtagtgagcaatgattgcgcagccctgttaacagtttttttagggatctttcagcctttatggtattacgtagaggcagacccatgtgctgctgttgcaaagaggggaggataggagggggatgttggcctctcccaggctcctcttctgcagtgccagctgacttaagggagtgaactacctgtgaagtagaaaatcagagggaagttttcattctaaggaaggagtttttacatgccacagctcagctgtctgcctgccactttgttgtaaacattgcaaaaatgtggatcatgtaggttagaagtgaattgtttagtgaagtttttgtacttttgtgattttcttgtttatgtctgtttttttttttttttttaacatttgtgtgtaatatagctgacagtccagtgtcgcaattttggaaggcaagatgtgagagagacgagaaccattttaggcatagaactacagacatttctgaaaaggttggtgatgaagaacttcagtcttctgagtatacttcagtatactagtgcaacaagggacacaaagaaattctgtcttaataaagaaagctacttctcaagggtattatgtggactcagtccaagctctcctgtcccattgtgcattgtctgtgacatgcaacttacaaaactagcaattgtaacaataaatcacagccacttgacaagaaaggatattcattattttcaaatggcttttggactatcaaaaacagtaaggcttttgttcagaaatcacctttagtcaaaaggtttaagaagcaaattatttagtagcagaacttatctcaggaaaggaaaatatgcatggttggtgagaatctaataacattaaaatgctggggcaagatgcagtacaaagttgaagagactttattctcaataagttgatttactgatgatatgtcatatgatgcaaaaaaggttttgtgtcattaactgaaaagtagcagcttctctatccaggatgatgagtcaacaggtttcactaatatttgtcatgctgtagcatttgtaagatttgtaaatgatgaaattcaaagaaaactttttctattgctaggagcctgccagaacaaaggccaatatataatgttgtgacatcatatctgataaccagaggtctggtatctacactcctggtgccccatcagtggttgtctccataagtcattttgcgttattaaaaaaaaaaaaagaaatcctgatgttgacattatagcacactgctttctccacagagatgctgatatcaaaaacttgaagatacagtgaagttctgaataatgttacaaaactggttacctgtatcaaagacccatttatgcaaaaatgttaaaaaaaaaaaaaacacccaaaacaaaaacctggacagacagcacataaacctcctgcaccatacagacatccagtggcttctcagaggaagcgttctctacaggatatttgaattgaaaggtgaattgccagagtacttacaataaaacagccagcttttgctgagtgctttggaaatgaaaaatgactacagaaagtagcctattttgcagacgtttttcatcacatgaacaaatggacaagtctctgaaaggttctggggaaaaaaatttttcttaaagcgacaagactcttagatctaaaaggaaactgacttgccaccttgccagaggaattcttgaaatgtttctgcagccacttggccttgaaaataaagggtgcaactctcaagtcttgttctaacccggctggaggaaccacaagacccaatgaaatagcattttctctccttttcccagcactagtatataacctatgaggaacccttgtctctgaatctgctcagcttgaaattttgtctctgaaggaagagaatgaactcagccctagtctgacagtcctagatttctgtgaaataagagtattcttcaacttagtgctcacactcacataccatgagggttctctgcaggggtttaggggtttcctgaatttgaaagttttttcaaggcctctttttgggtaaaacaattgaaaaggcagacaccaacaaagtctgcaaaattaactgtccagattaagaatattaaggagctgtaaaattagcttgtagaaatggacttatccttaagttttaaaaagttaggaaatcctaaaaatgttaggcttcctgcacaagtggctatgttcatttaatggctagtgaacatgggaatgtatttttatcctcctagctggtggttctgtttggtaaaccagactagaatgatttgagaggggcaaagagaataggcaggaccttccttctatagctttacatatttagaatgttaatacttaatgacattgaagttaccttgcaatgattgataagaggattattaatatcagttaggggaatagggaggataggattttggtgccttcttcagcagacttgctccaagacaaagattctattttgatagtgcaagacaaaaggactcggaagaaaattggccatatgcctacagagcatacaactctgtggaactaaattgtttttactttgtgaaagctgctattttacggaaagattttgattatacagtttgtttttaagttgtcttttatatttatttgtatttggtaagaatcggttgttacacaagctgttctttcccagttacaaaatcctgtgttcggttgtaacctgaactcattaaaagacttgttttcaggtttatcaactgtttattttcactgacatttgagcatgttattttataaatgacgagattccagggtaggaagtgctttttattccccttttgttttttcttttaaaaaattacgtcagttaaaaaaataaaaaaactgcagtcttatggtttagaaaacttgtttagctccatagaggaaagaatgttaaactttgtattttaaaacatgattctctgaggttaaacttggttttcaaatgttatttttacttgtattttgcttttggtacggccagaaatcgagcttgttttttcatagttcctgatattttcagaaaaatcaaaataaatttgttccctaaaaa

SEQ ID NO: 289429 - DNA, 3857 bp, Homo sapiens
agcggagttcgcgccggcggtagacgaggacgccaacagcagcggagaaacgtttctctttcctctcagtttgcgcacaccatggcggcccctgcccagcagactactcagcctggcggcgggaagcgcaaaggcaaggctcagtatgtgctggccaagcgcgctcggcgctgcgacgctggcgggccccgtcagctagagcccgggctacagggcatcctcatcacctgcaatatgaacgagcgcaagtgcgtggaggaggcctacagcctcctcaacgaatacggcgacgacatgtatgggccagaaaagtttacagacaaggatcagcagccctctggaagtgagggagaggatgatgatgcggaggctgccttgaagaaagaagttggtgacattaaggcatctacagagatgaggttaagaagattccagtcagtggaaagtggagcaaataacgttgtcttcatcaggacacttgggatagagcctgagaaattggtgcatcatattctccaggatatgtacaaaaccaagaaaaagaagactcgagttattttgcgaatgttacccatctcaggcacatgcaaggcttttttagaagatatgaaaaaatatgcagaaacatttttggaaccctggtttaaagctccaaacaaagggacatttcagattgtgtacaaatctcgaaataacagtcatgtgaatagagaagaagttatcagagaattggcaggaatagtgtgcaccctcaattcagaaaataaagtggatctcaccaatccacagtacacagtggtagtagaaatcatcaaagctgtctgttgcctgagtgttgtgaaagattacatgttgtttagaaaatacaatctccaggaggtggtgaagagccctaaggatccgtcacagcttaactcaaagcagggaaatgggaaagaagctaaactggaatctgcggacaaatcagaccaaaacaacacagcagaaggaaaaaataaccagcaggtaccagagaatactgaggagctggggcagacaaaaccaacgtctaatccacaggtggtaaatgagggaggagccaaacctgaacttgcaagtcaagccacagaaggatccaagtcaaatgaaaatgacttctcataggaagtcatttggtgttggagctgacagtccagtgtcgcaattttggaaggcaagatgtgagagagacgagaaccattttaggcatagaactacagacatttctgaaaaggttggtgatgaagaacttcagtcttctgagtatacttcagtatactagtgcaacaagggacacaaagaaattctgtcttaataaagaaagctacttctcaagggtattatgtggactcagtccaagctctcctgtcccattgtgcattgtctgtgacatgcaacttacaaaactagcaattgtaacaataaatcacagccacttgacaagaaaggatattcattattttcaaatggcttttggactatcaaaaacagtaaggcttttgttcagaaatcacctttagtcaaaaggtttaagaagcaaattatttagtagcagaacttatctcaggaaaggaaaatatgcatggttggtgagaatctaataacattaaaatgctggggcaagatgcagtacaaagttgaagagactttattctcaataagttgatttactgatgatatgtcatatgatgcaaaaaaggttttgtgtcattaactgaaaagtagcagcttctctatccaggatgatgagtcaacaggtttcactaatatttgtcatgctgtagcatttgtaagatttgtaaatgatgaaattcaaagaaaactttttctattgctaggagcctgccagaacaaaggccaatatataatgttgtgacatcatatctgataaccagaggtctggtatctacactcctggtgccccatcagtggttgtctccataagtcattttgcgttattaaaaaaaaaaaaagaaatcctgatgttgacattatagcacactgctttctccacagagatgctgatatcaaaaacttgaagatacagtgaagttctgaataatgttacaaaactggttacctgtatcaaagacccatttatgcaaaaatgttaaaaaaaaaaaaaacacccaaaacaaaaacctggacagacagcacataaacctcctgcaccatacagacatccagtggcttctcagaggaagcgttctctacaggatatttgaattgaaaggtgaattgccagagtacttacaataaaacagccagcttttgctgagtgctttggaaatgaaaaatgactacagaaagtagcctattttgcagacgtttttcatcacatgaacaaatggacaagtctctgaaaggttctggggaaaaaaatttttcttaaagcgacaagactcttagatctaaaaggaaactgacttgccaccttgccagaggaattcttgaaatgtttctgcagccacttggccttgaaaataaagggtgcaactctcaagtcttgttctaacccggctggaggaaccacaagacccaatgaaatagcattttctctccttttcccagcactagtatataacctatgaggaacccttgtctctgaatctgctcagcttgaaattttgtctctgaaggaagagaatgaactcagccctagtctgacagtcctagatttctgtgaaataagagtattcttcaacttagtgctcacactcacataccatgagggttctctgcaggggtttaggggtttcctgaatttgaaagttttttcaaggcctctttttgggtaaaacaattgaaaaggcagacaccaacaaagtctgcaaaattaactgtccagattaagaatattaaggagctgtaaaattagcttgtagaaatggacttatccttaagttttaaaaagttaggaaatcctaaaaatgttaggcttcctgcacaagtggctatgttcatttaatggctagtgaacatgggaatgtatttttatcctcctagctggtggttctgtttggtaaaccagactagaatgatttgagaggggcaaagagaataggcaggaccttccttctatagctttacatatttagaatgttaatacttaatgacattgaagttaccttgcaatgattgataagaggattattaatatcagttaggggaatagggaggataggattttggtgccttcttcagcagacttgctccaagacaaagattctattttgatagtgcaagacaaaaggactcggaagaaaattggccatatgcctacagagcatacaactctgtggaactaaattgtttttactttgtgaaagctgctattttacggaaagattttgattatacagtttgtttttaagttgtcttttatatttatttgtatttggtaagaatcggttgttacacaagctgttctttcccagttacaaaatcctgtgttcggttgtaacctgaactcattaaaagacttgttttcaggtttatcaactgtttattttcactgacatttgagcatgttattttataaatgacgagattccagggtaggaagtgctttttattccccttttgttttttcttttaaaaaattacgtcagttaaaaaaataaaaaaactgcagtcttatggtttagaaaacttgtttagctccatagaggaaagaatgttaaactttgtattttaaaacatgattctctgaggttaaacttggttttcaaatgttatttttacttgtattttgcttttggtacggccagaaatcgagcttgttttttcatagttcctgatattttcagaaaaatcaaaataaatttgttccctaaaaa

SEQ ID NO: 289430 - DNA, 2362 bp, Homo sapiens
tgtcacaacattatatattggcctttgttctggcaggctcctagcaatagaaaaagttttctttgaatttcatcatttacaaatcttacaaatgctacagcatgacatttattagtgaaacctgttgactcatcatcctggatagagatgcagtacaaagttgaagagactttattctcaataagttgatttactgatgatatgtcatatgatgcaaaaaaggttttgtgtcattaactgaaaagtagcagcttctctatccaggatgatgagtcaacaggtttcactaatatttgtcatgctgtagcatttgtaagatttgtaaatgatgaaattcaaagaaaactttttctattgctaggagcctgccagaacaaaggccaatatataatgttgtgacatcatatctgataaccagaggtctggtatctacactcctggtgccccatcagtggttgtctccataagtcattttgcgttattaaaaaaaaaaaaagaaatcctgatgttgacattatagcacactgctttctccacagagatgctgatatcaaaaacttgaagatacagtgaagttctgaataatgttacaaaactggttacctgtatcaaagacccatttatgcaaaaatgttaaaaaaaaaaaaaacacccaaaacaaaaacctggacagacagcacataaacctcctgcaccatacagacatccagtggcttctcagaggaagcgttctctacaggatatttgaattgaaaggtgaattgccagagtacttacaataaaacagccagcttttgctgagtgctttggaaatgaaaaatgactacagaaagtagcctattttgcagacgtttttcatcacatgaacaaatggacaagtctctgaaaggttctggggaaaaaaatttttcttaaagcgacaagactcttagatctaaaaggaaactgacttgccaccttgccagaggaattcttgaaatgtttctgcagccacttggccttgaaaataaagggtgcaactctcaagtcttgttctaacccggctggaggaaccacaagacccaatgaaatagcattttctctccttttcccagcactagtatataacctatgaggaacccttgtctctgaatctgctcagcttgaaattttgtctctgaaggaagagaatgaactcagccctagtctgacagtcctagatttctgtgaaataagagtattcttcaacttagtgctcacactcacataccatgagggttctctgcaggggtttaggggtttcctgaatttgaaagttttttcaaggcctctttttgggtaaaacaattgaaaaggcagacaccaacaaagtctgcaaaattaactgtccagattaagaatattaaggagctgtaaaattagcttgtagaaatggacttatccttaagttttaaaaagttaggaaatcctaaaaatgttaggcttcctgcacaagtggctatgttcatttaatggctagtgaacatgggaatgtatttttatcctcctagctggtggttctgtttggtaaaccagactagaatgatttgagaggggcaaagagaataggcaggaccttccttctatagctttacatatttagaatgttaatacttaatgacattgaagttaccttgcaatgattgataagaggattattaatatcagttaggggaatagggaggataggattttggtgccttcttcagcagacttgctccaagacaaagattctattttgatagtgcaagacaaaaggactcggaagaaaattggccatatgcctacagagcatacaactctgtggaactaaattgtttttactttgtgaaagctgctattttacggaaagattttgattatacagtttgtttttaagttgtcttttatatttatttgtatttggtaagaatcggttgttacacaagctgttctttcccagttacaaaatcctgtgttcggttgtaacctgaactcattaaaagacttgttttcaggtttatcaactgtttattttcactgacatttgagcatgttattttataaatgacgagattccagggtaggaagtgctttttattccccttttgttttttcttttaaaaaattacgtcagttaaaaaaataaaaaaactgcagtcttatggtttagaaaacttgtttagctccatagaggaaagaatgttaaactttgtattttaaaacatgattctctgaggttaaacttggttttcaaatgttatttttacttgtattttgcttttggtacggccagaaatcgagcttgttttttcatagttcctgatattttcagaaaaatcaaaataaatttgttccctaaaaa

SEQ ID NO: 289431 - DNA, 639 bp, Homo sapiens
gcggccgcctactactactaaattcgcggccgcgtcgacgatcaattggaaaacccaggtgacccaattggccatatgcctacagagcatacaactctgtggaactaaattgtttttactttgtgaaagctgctattttacggaaagattttgattatacagtttgtttttaagttgtcttttatatttatttgtatttggtaagaatcggttgttacacaagctgttctttcccagttacaaaatcctgtgttcggttgtaacctgaactcattaaaagacttgttttcaggtttatcaactgtttattttcactgacatttgagcatgttattttataaatgacgagattccagggtaggaagtgctttttattccccttttgttttttcttttaaaaaattacgtcagttaaaaaaataaaaaaactgcagtcttatggtttagaaaacttgtttagctccatagaggaaagaatgttaaactttgtattttaaaacatgattctctgaggttaaacttggttttcaaatgttatttttacttgtattttgcttttggtacggccagaaatcgagcttgttttttcatagttcctgatattttcagaaaaatcaaaataaatttgttccctaaaaa

SEQ ID NO: 289432 - DNA, 3063 bp, Homo sapiens
ttcatatagtttcagttatcagagtattagaccagactttatttgcaatttgttcaacagagagattttattttgatacagatattaagcataaagcatagtaagttttatataattctatgagttcattaaacaatattatgaaattttcattatgttcgtggggagtctttttaactgtttctacctcatatatgaggtctcttctgtattttactttgcatactagcatgtgattgcctgccttagaactatgtagaggaggggaaatcgatattaccttttaagaaatttttgattttatgaagtgttttcattaatacttttttaatgtttgagaagtaaaggggaaagggtggcaaattacataggttgcaacacagagtagaagtcacatagtactatttacagatctgtcctgttttaagatttgagaattgtgaacaggatggagcaatggttctcaaacttcagccagtatcagaattgcctcgaggtcttgttaaaattcagatagctggacccacccccagcatttctgattttggtctggagcctgatgatttgcatttccaacaagtttccaggcgatgctgatgctgccagtccaggaaccacactttgaaaatcactgggtctgattctcgcagtttgaaagtctcagagaccttcagagtctgaacgtcttttcaaccatgtatttatttactcagtgtaaaaaactgatctctggagacatttttataaatctggtgccatgactggaacatttgtggagaaaggtctccatggagcgacaggccctttggattggccaccacccctcctcactctcacccctgctggggtctgcactgctcttccgcagtagggtgaaggagctctttggttttagggtgagtttgcttttgtgtacgctgctgcctggacatcagtctggaagctgtgcatttgtttggtgtgcttagggtcaatcttgatccacatgcatggaagtgagaatcctggaaagaagccatcagaatgccatgagagtgcacctagcatgtatcgaggcactaagtgcaggagtccctgtcctaagatggcagtgacatggagcatcgaaaaccacagataatccttaaataataaaataatagttttgtttttttttcttcggggcagagtctcgctctgttgccctggctggagtacagtggcatgatctcggctcactgcaacctccgcctcccggcttcaagtgattctcctgcctcagcctcccaagtagttgggactacaggcatgcgccaccacgcccagctaatttttgtattttttagtagagacggggtttcaccgtgttggccaggatggtctccatctcttgacctcatgatctgcccgcctcgggctcccaaagtgttgggattacaggcatgagccactgcgcctggcaaatgttttagtttttatggttattattattttttttttttgtggggggagggtggtgagggcaaaggatttgtttttcaaattatgtgtttctcaggttaacaaagttattttagattctctgccatgccagcaggtgttagagagagcctgaagtgttacatatggcagaaaataaatgtctctgattactttgctacctttaaaaaaatctatatgtgtttgcaaaacagcctagggggatctaccacctacacagcatgaattattcataagtcataggtgcacatgtatgagcaagttatttttgagaaagaaactgcctataatataataaacctgtcaggtctttgggtattgtttaatttgtgtgttgttgctgttttatctggactgcatcttggggggtactgggctctgcttctggtttttagtttgcctttgaatttactgagctactagaaagacaaaaaaaagctatttttatggtaatagaatacagaatgacttaggtgtaaaagtacacgtgaagaccatcgtagaatatacagctttggagttttcttaagacacagtccttcctactgaaaaggcttgctcacctttggagaggattgtttatattttcagcctgggttcctttatgcagtcccaacttagaggggagcttcggtttatttacactttgctttgcacgataacttgtatgcgaagacctctttatatctttcagtaggtcagagggctctttgtcctggttgaagtcccaaagtgtcagtgcagctgagaatgtttctcagcctccccctttacagaggaagggtcctggattttcataaatccagaccatgcctgcttcctataaatccatgtatatgacattgtactgtatctgatttctgtgccagtcatctgacctgattctttaaaccccataaaggtactggctatatgtagtagttgtatcctaggtaaatatggtgattaaaatacttctcttctaaattataaagataatgagttttgcattttattaaagggtcctgttattagtgacacaggatttttttttaatgcttcatacatatagttcttatctaaacttgttcagctaacttcatagatcagttacttagcaaattcatactgagtcttattttgggaagtcttcctgagggaagctgtacaaaactgaggtggtcaggttcatctcttcaaagtaccagttatacagccatctaaataggcataacttatggcaaaattataacaattttttttctttgcagtaaacgatacctcatctaagaggctctaatacctaaagagtttatccttaaaagtaaaagtgactttgtaccataaaataaccccaaagccactctctagggtttttattttcttctttctttgtctttatcttttctaacttagttttggaattacgttagctactttggttccatagaacaagttttcaacttggggtctacagttcctacagtgtgctcattgtctcagtgaagttcttttgttttcaaagattcatggtaacaaaatgtattttactgctacaactaaaatgtatttataataaaatgcctttttaataatttggagatg

SEQ ID NO: 289433 - DNA, 1329 bp, Homo sapiens
aagcttgcggccgctcccacttaaactgcctataatataataaacctgtcaggtctttgggtattgtttaatttgtgtgttgttgctgttttatctggactgcatcttggggggtactgggctctgcttctggtttttagtttgcctttgaatttactgagctactagaaagacaaaaaaaagctatttttatggtaatagaatacagaatgacttaggtgtaaaagtacacgtgaagaccatcgtagaatatacagctttggagttttcttaagacacagtccttcctactgaaaaggcttgctcacctttggagaggattgtttatattttcagcctgggttcctttatgcagtcccaacttagaggggagcttcggtttatttacactttgctttgcacgataacttgtatgcgaagacctctttatatctttcagtaggtcagagggctctttgtcctggttgaagtcccaaagtgtcagtgcagctgagaatgtttctcagcctccccctttacagaggaagggtcctggattttcataaatccagaccatgcctgcttcctataaatccatgtatatgacattgtactgtatctgatttctgtgccagtcatctgacctgattctttaaaccccataaaggtactggctatatgtagtagttgtatcctaggtaaatatggtgattaaaatacttctcttctaaattataaagataatgagttttgcattttattaaagggtcctgttattagtgacacaggatttttttttaatgcttcatacatatagttcttatctaaacttgttcagctaacttcatagatcagttacttagcaaattcatactgagtcttattttgggaagtcttcctgagggaagctgtacaaaactgaggtggtcaggttcatctcttcaaagtaccagttatacagccatctaaataggcataacttatggcaaaattataacaattttttttctttgcagtaaacgatacctcatctaagaggctctaatacctaaagagtttatccttaaaagtaaaagtgactttgtaccataaaataaccccaaagccactctctagggtttttattttcttctttctttgtctttatcttttctaacttagttttggaattacgttagctactttggttccatagaacaagttttcaacttggggtctacagttcctacagtgtgctcattgtctcagtgaagttcttttgttttcaaagattcatggtaacaaaatgtattttactgctacaactaaaatgtatttataataaaatgcctttttaataatttggagatg

SEQ ID NO: 289434 - DNA, 3104 bp, Homo sapiens
ttcatatagtttcagttatcagagtattagaccagactttatttgcaatttgttcaacagagagattttattttgatacagatattaagcataaagcatagtaagttttatataattctatgagttcattaaacaatattatgaaattttcattatgttcgtggggagtctttttaactgtttctacctcatatatgaggtctcttctgtattttactttgcatactagcatgtgattgcctgccttagaactatgtagaggaggggaaatcgatattaccttttaagaaatttttgattttatgaagtgttttcattaatacttttttaatgtttgagaagtaaaggggaaagggtggcaaattacataggttgcaacacagagtagaagtcacatagtactatttacagatctgtcctgttttaagatttgagaattgtgaacaggatggagcaatggttctcaaacttcagccagtatcagaattgcctcgaggtcttgttaaaattcagatagctggacccacccccagcatttctgattttggtctggagcctgatgatttgcatttccaacaagtttccaggcgatgctgatgctgccagtccaggaaccacactttgaaaatcactgggtctgattctcgcagtttgaaagtctcagagaccttcagagtctgaacgtcttttcaaccatgtatttatttactcagtgtaaaaaactgatctctggagacatttttataaatctggtgccatgactggaacatttgtggagaaaggtctccatggagcgacaggccctttggattggccaccacccctcctcactctcacccctgctggggtctgcactgctcttccgcagtagggtgaaggagctctttggttttagggtgagtttgcttttgtgtacgctgctgcctggacatcagtctggaagctgtgcatttgtttggtgtgcttagggtcaatcttgatccacatgcatggaagtgagaatcctggaaagaagccatcagaatgccatgagagtgcacctagcatgtatcgaggcactaagtgcaggagtccctgtcctaagatggcagtgacatggagcatcgaaaaccacagataatccttaaataataaaataatagttttgtttttttttcttcggggcagagtctcgctctgttgccctggctggagtacagtggcatgatctcggctcactgcaacctccgcctcccggcttcaagtgattctcctgcctcagcctcccaagtagttgggactacaggcatgcgccaccacgcccagctaatttttgtattttttagtagagacggggtttcaccgtgttggccaggatggtctccatctcttgacctcatgatctgcccgcctcgggctcccaaagtgttgggattacaggcatgagccactgcgcctggcaaatgttttagtttttatggttattattattttttttttttgtggggggagggtggtgagggcaaaggatttgtttttcaaattatgtgtttctcaggttaacaaagttattttagattctctgccatgccagcaggtgttagagagagcctgaagtgttacatatggcagaaaataaatgtctctgattactttgctacctttaaaaaaatctatatgtgtttgcaaaacagcctagggggatctaccacctacacagcatgaattattcataagtcataggtgcacatgtatgagcaagttatttttgagaaagaaactgcctataatataataaacctgtcaggtctttgggtattgtttaatttgtgtgttgttgctgttttatctggactgcatcttggggggtactgggctctgcttctggtttttagtttgcctttgaatttactgagctactagaaagacaaaaaaaagctatttttatggtaatagaatacagaatgacttaggtgtaaaagtacacgtgaagaccatcgtagaatatacagctttggagttttcttaagacacagtccttcctactgaaaaggcttgctcacctttggagaggattgtttatattttcagcctgggttcctttatgcagtcccaacttagaggggagcttcggtttatttacactttgctttgcacgataacttgtatgcgaagacctctttatatctttcagtaggtcagagggctctttgtcctggttgaagtcccaaagtgtcagtgcagctgagaatgtttctcagcctccccctttacagaggaagggtcctggattttcataaatccagaccatgcctgcttcctataaatccatgtatatgacattgtactgtatctgatttctgtgccagtcatctgacctgattctttaaaccccataaaggtactggctatatgtagtagttgtatcctaggtaaatatggtgattaaaatacttctcttctaaattataaagataatgagttttgcattttattaaagggtcctgttattagtgacacaggatttttttttaatgcttcatacatatagttcttatctaaacttgttcagctaacttcatagatcagttacttagcaaattcatactgagtcttattttgggaagtcttcctgagggaagctgtacaaaactgaggtggtcaggttcatctcttcaaagtaccagttatacagccatctaaataggcataacttatggcaaaattataacaattttttttctttgcagtaaacgatacctcatctaagaggctctaatacctaaagagtttatccttaaaagtaaaagtgactttgtaccataaaataaccccaaagccactctctagggtttttattttcttctttctttgtctttatcttttctaacttagttttggaattacgttagctactttggttccatagaacaagttttcaacttggggtctacagttcctacagtgtgctcattgtctcacggaaagtctcaggggcccaagatccgggtaaccaagtatcttacgggaacagtaagagggtttcacacaaacgggccttggagtagacagacaactcgggggggccgtaccacatcgccgaagcgtatacagcacgggcgggt

SEQ ID NO: 289435 - DNA, 411 bp, Homo sapiens
ccacctcagcttcctgagtagtcgaactacaggtgcacgccaccacacccagctaatttttgtatgttttgtagagacagggtttcgccatgttgcccaggctggtctcgaactcctgggctcaagctgtcctctcatgttggtttcccaaagtgttggaattgtaggcatgagccaccacactcagcctgcgttaatactcttaattatagaaacaatccttaattaataaacaagtcctttcattggaaaaagaactaatacattttgttctctcagtcaaaattctgtttttgtggttagagtaataaaatggtaacacctagggtctgccacgatcatggttctcactctggattcattccctaccacatccttatttccctcctcttccccattccctcactcacc

SEQ ID NO: 289436 - DNA, 2070 bp, Homo sapiens
ctccaggagggctgctctgcccttccttcctctgttctttggccttatgttccccgccaccacagaccttcccccgccccacccctctgcagacttagccgtgcattgcaggcatggaggattaatcagtgacaggaagctgcgtctctcggagcggtgaccagctgtggtcaggagagcctcagcagggccagccccaggagtctttcccgattcttgctcactgctcacccacctgctgctgccatgaggcaccttggggccttcctcttccttctgggggtcctgggggccctcactgagatgtgtgaaataccagagatggacagccatctggtagagaagttgggccagcacctcttaccttggatggaccggctttccctggagcacttgaaccccagcatctatgtgggcctacgcctctccagtctgcaggctgggaccaaggaagacctctacctgcacagcctcaagcttggttaccagcagtgcctcctagggtctgccttcagcgaggatgacggtgactgccagggcaagccttccatgggccagctggccctctacctgctcgctctcagagccaactgtgagtttgtcaggggccacaagggggacaggctggtctcacagctcaaatggttcctggaggatgagaagagagccattgggcatgatcacaagggccacccccacactagctactaccagtatggcctgggcattctggccctgtgtctccaccagaagcgggtccatgacagcgtggtggacaaacttctgtatgctgtggaacctttccaccagggccaccattctgtggacacagcagccatggcaggcttgggcattcacctgtctgaagcgctcaaacttcaaccctggtcggagacaacggatcaccatggccatcagaacagtgcgagaggagatcttgaaggcccagacccccgagggccactttgggaatgtctacagcaccccattggcattacagttcctcatgacttcccccatgcctggggcagaactgggaacagcatgtctcaaggcgagggttgctttgctggccagtctgcaggatggagccttccagaatgctctcatgatttcccagctgctgcccgttctgaaccacaagacctacattgatctgatcttcccagactgtctggcaccacgagtcatgttggaaccagctgctgagaccattcctcagacccaagagatcatcagtgtcacgctgcaggtgcttagtctcttgccgccgtacagacagtccatctctgttctggccgggtccaccgtggaagatgtcctgaagaaggcccatgagttaggaggattcacatatgaaacacaggcctccttgtcaggcccctacttaacctccgtgatggggaaagcggccggagaaagggagttctggcagcttctccgagaccccaacaccccactgttgcaaggtattgctgactacagacccaaggatggagaaaccattgagctgaggctggttagctggtagcccctgagctccctcatcccagcagcctcgcacactccctaggcttctaccctccctcctgatgtccctggaacaggaactcgcctgaccctgctgccacctcctgtgcactttgagcaatgccccctgggatcaccccagccacaagcccttcgagggccctataccatggcccaccttggagcagagagccaagcatcttccctgggaagtctttctggccaagtctggccagcctggccctgcaggtctcccatgaaggccaccccatggtctgatgggcatgaagcatctcagactccttggcaaaaaacggagtccgcaggccgcaggtgttgtgaagaccactcgttctgtggttggggtcctgcaagaaggcctcctcagcccgggggctatggccctgaccccagctctccactctgctgttagagtggcagctccgagctggttgtggcacagtagctggggagacctcagcagggctgctcagtgcctgcctctgacaaaattaaagcattgatggcctgtggacctgc

SEQ ID NO: 289437 - DNA, 1989 bp, Homo sapiens
ctccaggagggctgctctgcccttccttcctctgttctttggccttatgttccccgccaccacagaccttcccccgccccacccctctgcagacttagccgtgcattgcaggcatggaggattaatcagtgacaggaagctgcgtctctcggagcggtgaccagctgtggtcaggagagcctcagcagggccagccccaggagtctttcccgattcttgctcactgctcacccacctgctgctgccatgaggcaccttggggccttcctcttccttctgggggtcctgggggccctcactgagatgtgtgaaataccagagatggacagccatctggtagagaagttgggccagcacctcttaccttggatggaccggctttccctggagcacttgaaccccagcatctatgtgggcctacgcctctccagtctgcaggctgggaccaaggaagacctctacctgcacagcctcaagcttggttaccagcagtgcctcctagggtctgccttcagcgaggatgacggtgactgccagggcaagccttccatgggccagctggccctctacctgctcgctctcagagccaactggcatgatcacaagggccacccccacactagctactaccagtatggcctgggcattctggccctgtgtctccaccagaagcgggtccatgacagcgtggtggacaaacttctgtatgctgtggaacctttccaccagggccaccattctgtggacacagcagccatggcaggcttgggcattcacctgtctgaagcgctcaaacttcaaccctggtcggagacaacggatcaccatggccatcagaacagtgcgagaggagatcttgaaggcccagacccccgagggccactttgggaatgtctacagcaccccattggcattacagttcctcatgacttcccccatgcctggggcagaactgggaacagcatgtctcaaggcgagggttgctttgctggccagtctgcaggatggagccttccagaatgctctcatgatttcccagctgctgcccgttctgaaccacaagacctacattgatctgatcttcccagactgtctggcaccacgagtcatgttggaaccagctgctgagaccattcctcagacccaagagatcatcagtgtcacgctgcaggtgcttagtctcttgccgccgtacagacagtccatctctgttctggccgggtccaccgtggaagatgtcctgaagaaggcccatgagttaggaggattcacatatgaaacacaggcctccttgtcaggcccctacttaacctccgtgatggggaaagcggccggagaaagggagttctggcagcttctccgagaccccaacaccccactgttgcaaggtattgctgactacagacccaaggatggagaaaccattgagctgaggctggttagctggtagcccctgagctccctcatcccagcagcctcgcacactccctaggcttctaccctccctcctgatgtccctggaacaggaactcgcctgaccctgctgccacctcctgtgcactttgagcaatgccccctgggatcaccccagccacaagcccttcgagggccctataccatggcccaccttggagcagagagccaagcatcttccctgggaagtctttctggccaagtctggccagcctggccctgcaggtctcccatgaaggccaccccatggtctgatgggcatgaagcatctcagactccttggcaaaaaacggagtccgcaggccgcaggtgttgtgaagaccactcgttctgtggttggggtcctgcaagaaggcctcctcagcccgggggctatggccctgaccccagctctccactctgctgttagagtggcagctccgagctggttgtggcacagtagctggggagacctcagcagggctgctcagtgcctgcctctgacaaaattaaagcattgatggcctgtggacctgc

SEQ ID NO: 289438 - DNA, 567 bp, Homo sapiens
aggccatggtcatggtcagcgtggagaggatgaagcctgagcaggcaggatcgggggtctagaggggaaggaggtggaagttgagatcacagacctgtggccaggtggcctgggaagggtttgacgagtgtcggcccaaagagcttggaagggattttgctgctgtgggtgagcactgcctctccccttagggacaacagccacctcttctctccccatttgcctttcccttctgtagatatgaaacacaggcctccttgtcaggcccctacttaacctccgtgatggggaaagcggccggagaaagggagttctggcagcttctccgagaccccaacaccccactgttgcaaggtgagtcatggcctgacactctggatgtgtcccctaccccaagcttactcagccaagaggcttcatcaactcaccccagctttccctagcaccctcctgggccacaccttcacaaaatcactgatgctcaaagttggatataatatattgaactgaagccttagaatttttatgcaagttactgtggaaattctaggaaaccagacagattac

SEQ ID NO: 289439 - DNA, 3343 bp, Homo sapiens
ctccaggagggctgctctgcccttccttcctctgttctttggccttatgttccccgccaccacagaccttcccccgccccacccctctgcagacttagccgtgcattgcaggcatggaggattaatcagtgacaggaagctgcgtctctcggagcggtgaccagctgtggtcaggagagcctcagcagggccagccccaggagtctttcccgattcttgctcactgctcacccacctgctgctgccatgaggcaccttggggccttcctcttccttctgggggtcctgggggccctcactgagatgtgtgaaataccagagatggacagccatctggtagagaagttgggccagcacctcttaccttggatggaccggctttccctggagcacttgaaccccagcatctatgtgggcctacgcctctccagtctgcaggctgggaccaaggaagacctctacctgcacagcctcaagcttggttaccagcagtgcctcctagggtctgccttcagcgaggatgacggtgactgccagggcaagccttccatgggccagctggccctctacctgctcgctctcagagccaactgtgagtttgtcaggggccacaagggggacaggctggtctcacagctcaaatggttcctggaggatgagaagagagccattgggcatgatcacaagggccacccccacactagctactaccagtatggcctgggcattctggccctgtgtctccaccagaagcgggtccatgacagcgtggtggacaaacttctgtatgctgtggaacctttccaccagggccaccattctgtggacacagcagccatggcaggcttgggcattcacctgtctgaagcgctcaaacttcaaccctggtcggagacaacggatcaccatggccatcagaacagtgcgagaggagatcttgaaggcccagacccccgagggccactttgggaatgtctacagcaccccattggcattacagttcctcatgacttcccccatgcctggggcagaactgggaacagcatgtctcaaggcgagggttgctttgctggccagtctgcaggatggagccttccagaatgctctcatgatttcccagctgctgcccgttctgaaccacaagacctacattgatctgatcttcccagactgtctggcaccacgagtcatgttggaaccagctgctgagaccattcctcagacccaagagatcatcagtgtcacgctgcaggtgcttagtctcttgccgccgtacagacagtccatctctgttctggccgggtccaccgtggaagatgtcctgaagaaggcccatgagttaggaggattcacatatgaaacacaggcctccttgtcaggcccctacttaacctccgtgatggggaaagcggccggagaaagggagttctggcagcttctccgagaccccaacaccccactgttgcaaggtattgctgactacagacccaaggatggagaaaccattgagctgaggctggttagctggtagcccctgagctccctcatcccagcagcctcgcacactccctaggcttctaccctccctcctgatgtccctggaacaggaactcgcctgaccctgctgccacctcctgtgcactttgagcaatgccccctgggatcaccccagccacaagcccttcgagggccctataccatggcccaccttggagcagagagccaagcatcttccctgggaagtctttctggccaagtctggccagcctggccctgcaggtctcccatgaaggccaccccatggtctgatgggcatgaagcatctcagactccttggcaaaaaacggagtccgcaggccgcaggtgttgtgaagaccactcgttctgtggttggggtcctgcaagaaggcctcctcagcccgggggctatggccctgaccccagctctccactctgctgttagagtggcagctccgagctggttgtggcacagtagctggggagacctcagcagggctgctcagtgcctgcctctgacaaaattaaagcattgatggcctgtggacctgctacagtggcctggtgcctcatactcctcaggtgcaggggcagggacaagagaagggggaagtaaccccatcagggaggagtggagggtgcctgagccgccatgtgggcattgggggagtgatgggaatgccagcagtgatgacattgactactgactgagcacccactactatgactgagcactcactcgctagatactatcttgaactgctctgtgaggttgttgatattttcatttttatctgtgctttacaaatcaggaaactgggaggccgggcatggtggctcacgcctgtaatcccagcactttaggaggccaaggcaggtggatcacaaggtcaggagtttgagatcagcctggccaacatggtgaaactccatctttactaaaaatacaaaaaattagccaggcatggtgttgcatgcctgcatgcctgtaatcccagttacttgggaagctgaggcaggagaattgcttgaaccctggaggcggaggttgtagtgagccgagatcacgccattgcactccagcttgggcaagaagagaaacactctcaaaaaaaaaaaaaaatcaggaaactggtgctcaaaaaggaaaagtgactcaccaaggtcacagactaggcagtgatgctgggggaacctggctcaggggacacagacctggcctggggcagccttgcagctcctccactaaaatactgaaaatgaggggcttcgatgatggttataatcgtatggcagagccccaactcaactggagccctgggacccagaagctagggtctcactccctgcttttccacaaggcaccattagggcatcaccccaggcctcggcagccacgacgcagggatcctgcctctcattggttgggggcttaggggctctgggctgccctcttgaagagggggttcagcccagcgaggcaccccctatgctgcaccccaccaaggttaggaagaggtcctgtcctcagtggggccctctgatgaacagcccatcaggtctgcgtccacatgccttggaagagatggtgacatactcaaagtccttgaagccgcatattaaaccacctagagcaccatcttcaaacatttagggtctgagaagataggggaagtaagcaatttaaaacatttctttatattgggccaggtgcaatggctcacgtctgtaatcccagcgctttgggaggacgaggatcacctgaggtcaggagttcaagatcagcctggccaacatggagaaaccccatctctactaaaaatac

SEQ ID NO: 289440 - DNA, 2354 bp, Homo sapiens
ctccaggagggctgctctgcccttccttcctctgttctttggccttatgttccccgccaccacagaccttcccccgccccacccctctgcagacttagccgtgcattgcaggcatggaggattaatcagtgacaggaagctgcgtctctcggagcggtgaccagctgtggtcaggagagcctcagcagggccagccccaggagtctttcccgattcttgctcactgctcacccacctgctgctgccatgaggcaccttggggccttcctcttccttctgggggtcctgggggccctcactgagatgtgtgaaataccagagatggacagccatctggtagagaagttgggccagcacctcttaccttggatggaccggctttccctggagcacttgaaccccagcatctatgtgggcctacgcctctccagtctgcaggctgggaccaaggaagacctctacctgcacagcctcaagcttggttaccagcagtgcctcctagggtctgccttcagcgaggatgacggtgactgccagggcaagccttccatgggccagctggccctctacctgctcgctctcagagccaactgtgagtttgtcaggggccacaagggggacaggctggtctcacagctcaaatggttcctggaggatgagaagagagccattgggcatgatcacaagggccacccccacactagctactaccagtatggcctgggcattctggccctgtgtctccaccagaagcgggtccatgacagcgtggtggacaaacttctgtatgctgtggaacctttccaccagggccaccattctgtggacacagcagccatggcaggcttgggcattcacctgtctgaagcgctcaaacttcaaccctggtcggagacaacggatcaccatggccatcagaacagtgcgagaggagatcttgaaggcccagacccccgagggccactttgggaatgtctacagcaccccattggcattacagttcctcatgacttcccccatgcctggggcagaactgggaacagcatgtctcaaggcgagggttgctttgctggccagtctgcaggatggagccttccagaatgctctcatgatttcccagctgctgcccgttctgaaccacaagacctacattgatctgatcttcccagactgtctggcaccacgagtcatgttggaaccagctgctgagaccattcctcagacccaagagatcatcagtgtcacgctgcaggtgcttagtctcttgccgccgtacagacagtccatctctgttctggccgggtccaccgtggaagatgtcctgaagaaggcccatgagttaggaggattcacatatgaaacacaggcctccttgtcaggcccctacttaacctccgtgatggggaaagcggccggagaaagggagttctggcagcttctccgagaccccaacaccccactgttgcaaggtattgctgactacagacccaaggatggagaaaccattgagctgaggctggttagctggtagcccctgagctccctcatcccagcagcctcgcacactccctaggcttctaccctccctcctgatgtccctggaacaggaactcgcctgaccctgctgccacctcctgtgcactttgagcaatgccccctgggatcaccccagccacaagcccttcgagggccctataccatggcccaccttggagcagagagccaagcatcttccctgggaagtctttctggccaagtctggccagcctggccctgcaggtctcccatgaaggccaccccatggtctgatgggcatgaagcatctcagactccttggcaaaaaacggagtccgcaggccgcaggtgttgtgaagaccactcgttctgtggttggggtcctgcaagaaggcctcctcagcccgggggctatggccctgaccccagctctccactctgctgttagagtggcagctccgagctggttgtggcacagtagctggggagacctcagcagggctgctcagtgcctgcctctgacaaaattaaagcattgatggcctgtggacctgctacagtggcctggtgcctcatactcctcaggtgcaggggcagggacaagagaagggggaagtaaccccatcagggaggagtggagggtgcctgagccgccatgtgggcattgggggagtgatgggaatgccagcagtgatgacattgactactgactgagcacccactactatgactgagcgggagaaactggctctgagcgggagaaactggctctgagcgggagaaactggctctgagcgggagaaactggctctgagcgggagaaactggctctgagcggg

SEQ ID NO: 289441 - DNA, 1682 bp, Homo sapiens
ctccaggagggctgctctgcccttccttcctctgttctttggccttatgttccccgccaccacagaccttcccccgccccacccctctgcagacttagccgtgcattgcaggcatggaggattaatcagtgacaggaagctgcgtctctcggagcggtgaccagctgtggtcaggagagcctcagcagggccagccccaggagtctttcccgattcttgctcactgctcacccacctgctgctgccatgaggcaccttggggccttcctcttccttctgggggtcctgggggccctcactgagatgtgtgaaataccagagatggacagccatctggtagagaagttgggccagcacctcttaccttggatggaccggctttccctggagcacttgaaccccagcatctatgtgggcctacgcctctccagtctgcaggctgggaccaaggaagacctctacctgcacagcctcaagcttggttaccagcagtgcctcctagggtctgccttcagcgaggatgacggtgactgccagggcaagccttccatgggccagctggccctctacctgctcgctctcagagccaactgtgagtttgtcaggggccacaagggggacaggctggtctcacagctcaaatggttcctggaggatgagaagagagccattgggcatgatcacaagggccacccccacactagctactaccagtatggcctgggcattctggccctgtgtctccaccagaagcgggtccatgacagcgtggtggacaaacttctgtatgctgtggaacctttccaccagggccaccattctgtggacacagcagccatggcaggcttgggcattcacctgtctgaagcgctcaaacttcaaccctggtcggagacaacggatcaccatggccatcagaacagtgcgagaggagatcttgaaggcccagacccccgagggccactttgggaatgtctacagcaccccattggcattacagttcctcatgacttcccccatgcctggggcagaactgggaacagcatgtctcaaggcgagggttgctttgctggccagtctgcaggatggagccttccagaatgctctcatgatttcccagctgctgcccgttctgaaccacaagacctacattgatctgatcttcccagactgtctggcaccacgagtcatgttggaaccagctgctgagaccattcctcagacccaagagatcatcagtgtcacgctgcaggtgcttagtctcttgccgccgtacagacagtccatctctgttctggccgggtccaccgtggaagatgtcctgaagaaggcccatgagttaggaggattcacatatgaaacacaggcctccttgtcaggcccctacttaacctccgtgatggggaaagcggccggagaaagggagttctggcagcttctccgagaccccaacaccccactgttgcaaggtgagtcatggcctgacactctggatgtgtcccctaccccaagcttactcagccaagaggcttcatcaactcaccccagctttccctagcaccctcctgggccacaccttcacaaaatcactgatgctcaaagttggatataatatattgaactgaagccttagaatttttatgcaagttactgtggaaattctaggaaaccagacagattac

SEQ ID NO: 289442 - DNA, 414 bp, Homo sapiens
ggaagtctcaggaatgggtaagtgctcctgctcccacacagtctacagacctgggtgcaatggtgagaaagacctcagtaaagcaaaggaattacgaaagggagaggattcggaatcacaccgtcagttctcctggttctcaacccttcagagacagactgaattacaccaccagctttcttggttctccaggatgcagatggcattaacatgagactcctttacctccatgactgtggaggcagcagctgaggctgtggtgggagaagaatgacaagaactgagcgtgggccacgggctcttaccttcagcaacttcatcagctcttccagctggaccatcagctcccgcctgctctcctgcagggccgacatcctctgctccagttcatccttcctttgcctatccaagacg

SEQ ID NO: 289443 - DNA, 1291 bp, Homo sapiens
atagcccacaccttgacagtacattcagtcactggatgattttgtattgaagtctgtaagttcaagaactaaaacaatccaaaacggctactacaggtgaagttgagagcaatggcccaacctcagctgtatctaccagaaccctttaagattgcctacagaaaagttggacagtgccgaagattccagcaactcaagaagaaaaatggctcattcaaaaggaaggggatagaaagatggcatagagctgtgtctaccaacttactaaaacaaaatgtattggtccctaaagaggaatcatccagtgatagtgacatgggatttcatgaaagccagcaaaatcagaaaagtaatttgaagacgaaagtgaagactgcttttgggaggatgctgtcctacaagtatagaagcaagccagcatgtgccagccaagagggctccactgaccataaagaagccctcctgtcaaacacgcagagccttctccctaggattgtcaaggagttttcatctcccaagttatttacagcaaaaatgagaaagctctcagagaatgcgactatacaacttgatgttgtagaggcagagacagaggagataacccagggaaacacactccttcgggccaggagaaccaccaagcggttatctgtgacatctcttccttcaggactgcaaaaggggccatattcaccaaaaaagagaccacactttccagcacttaaaaaaaagaagcgtggcatggaaaacatccttcgaaaatcagatttgacagtaggaaagcttcaaatgcaggtggatgacctcatagaaacagtgactgataaatccatgaagctactggcccaaagacatgctgagcttcaacagtgtgagtttctgggggatgaaattcttcagtcttctaaacagttccagaggatatccaagagaaccatgaggaagtataaattaaaaaatatgaccacaaaaggacctggagacagctgacctgagactccttgaggaacacaggaaaaggtcttcagacaataacttaaccaattaccaatcagaaaatcgactccacctatgagctggaagtccttcccaccccccaccttcaagctgtcctgcttttctgtactgaaccaatatacatcttacgtgtattcattgatgtctgcctgtaacttctgtccccctaaaatgcataaaatcagctgtaattcaaccaccttcggcacatctcaggacctcctgatgctgtggcatgtctttaaccttggcaaaataaactcctaaattgatt

SEQ ID NO: 289444 - DNA, 1007 bp, Homo sapiens
atagcccacaccttgacagtacattcagtcactggatgattttgtattgaagtctgtaagttcaagaactaaaacaatccaaaacggctactacaggtgaagttgagagcaatggcccaacctcagctgtatctaccagaaccctttaagattgcctacagaaaagttggacagtgccgaagattccagcaactcaagaagaaaaatggctcattcaaaaggaaggggatagaaagatggcatagagctgtgtctaccaacttactaaaacaaaatgtattggtccctaaagaggaatcatccagtgatagtgacatgggatttcatgaaagccagcaaaatcagaaaagtaatttgaagacgaaagtgaagactgcttttgggaggatgctgtcctacaagtatagaagcaagccagcatgtgccagccaagagggctccactgaccataaagaagccctcctgtcaaacacgcagagccttctccctaggattgtcaaggagttttcatctcccaagttatttacagcaaaaatgagaaagctctcagagaatgcgactatacaacttgatgttgtagaggcagagacagaggagataacccagggaaacacactccttcgggccaggagaaccaccaagcggttatctgtgacatctcttccttcaggactgcaaaaggggccatattcaccaaaaaagagaccacactttccagcacttaaaaaaaagaagcgtggcatggaaaacatccttcgaaaatcagatttgacagtaggaaagcttcaaatgcaggtggatgacctcatagaaacagtgactgataaatccatgaagctactggcccaaagacatgctgagcttcaacagtgctggccgtggtggctcacgcctgtaatctcagcactttgggaggccgagcgagtggatcacttgatgtctggagttcaaaaccagcctggccaacatggtgaaaccctgtctctactaaaaatacaaaaattatc

SEQ ID NO: 289445 - DNA, 447 bp, Homo sapiens
aacaagcaacaaaatcaaaggtaaagccatctgagagctggcaatgcaaagggacctaaattaatcaaaatgcagacaggacgagcccttccttggggaaggagcccacagctttcaccctggtgcgaggcagcagggcgggatgccctgcgtgaggggaaatgagtggaagttcatgaccgtgtggggactggcgtgacagatgaggactccagggagccccagcacagcccgcctctgccccctgccaactccctcacacgggcttcatggaaggttgggcgcgagggagtgaggtgcagagaaacctcctgaggtacagaagtgggggcgagactggagagcggaggtgggaggatcacttgagcccaggagtttgaggctgcagtgagcaatgatggtgccactgcactctagcctgggtgacagagtaaaattctgtctcta

SEQ ID NO: 289446 - DNA, 532 bp, Homo sapiens
tgaattatcttaaaatactcagcatcaagtggaaatacatgcatgaatccagatcgtagaacattttataaaagaactggcctggacacagcgcaatgtcactgtcataaaagagtctcccaaaaaagaagtgagactttctaggtaaaaagaggtaaaaaggcaggtcataggcaacactggtgctttcaacggacgctgaattttttaaaagcagctaaaaaggatgttttggggagagctggggagaattaaaatactaatagatgtctagaaatgcagatgatttatttttcacagattggatatgaccttgacaatgacatgcatatttgtcaatgtttccagattttccggatggcctgtggactgtctaccttagtcagtattatcacatcaatgatgaatttctaagctctctgtaggtctgacgatttccaaaataagctggggaaaaaggtgttaagaaaatgcaggcggcatccacttctagtcagaaggtagaaaagttacaaaagactgtctcgcccta

SEQ ID NO: 289447 - DNA, 762 bp, Homo sapiens
tgaattatcttaaaatactcagcatcaagtggaaatacatgcatgaatccagatcgtagaacattttataaaagaactggcctggacacagcgcaatgtcactgtcataaaagagtctcccaaaaaagaagtgagactttctaggtaaaaagaggtaaaaaggcaggtcataggcaacactggtgctttcaacggacgctgaattttttaaaagcagctaaaaaggatgttttggggagagctggggagaattaaaatactaatagatgtctagaaatgcagatgatttatttttcacagattggatatgaccttgacaatgacatgcatatttgtcaatgtttccagattttccggatggcctgtggactgtctaccttagtcagtattatcacatcaatgatgaatttctaaggtaggacaattcaactgtggtcacacaagaggacgtctttgtttttgggagatccaggttatgatggctgcaacttactttcaaatgggttaggggaaaaaaaagaaaaaagtatacacatacaaatgcataaataagtagacagacacataaagttaatgcattaaaatgttcacaagtggtgaatctgtgtgaagggtggacagatgttaactgtactgttctttcagctctctgtaggtctgacgatttccaaaataagctggggaaaaaggtgttaagaaaatgcaggcggcatccacttctagtcagaaggtagaaaagttacaaaagactgtctcgcccta

SEQ ID NO: 289448 - DNA, 714 bp, Homo sapiens
tatacacatacaaatgcataaataagtagacagacacataaagttaatgcattaaaatgttcacaagtggtgaatctgtgtgaagggtggacagatgttaactgtactgttctttcagctctctgtaggtctgacgatttccaaaataagctggggaaaaaggtgttaagaaaatgcaggcggcatccacttctagtcagaaggtagaaaagttacaaaagactgtctcgccctaaagatgaaaacaagccaaacaagcaacaaaatcaaaggtaaagccatctgagagctggcaatgcaaagggacctaaattaatcaaaatgcagacaggacgagcccttccttggggaaggagcccacagctttcaccctggtgcgaggcagcagggcgggatgccctgcgtgaggggaaatgagtggaagttcatgaccgtgtggggactggcgtgacagatgaggactccagggagccccagcacagcccgcctctgccccctgccaactccctcacacgggcttcatggaaggttgggcgcgagggagtgaggtgcagagaaacctcctgaggtacagaagtgggggcgagactggagagcggagagcaccccagtggccccacagtctggcggcagggctgaataccagaggcctcccacagttccaaaagctggcgactttaaaacataaagacatccctggaattctgccagggc

SEQ ID NO: 289449 - DNA, 386 bp, Homo sapiens
agctccccctgtattctctcaccatgtcattggcgtggagaagcaggaacctaaacatgggaagtgaacatcaaaatatgtcatgatcacagtgtgcttcaagatacatatctagactataaagaaaagcacagggattatgaacataaccttcagaagagtggtcacctctgttgcgaagcaaggggactggatcagagaagaaattccagcagtcctgtagcttccacaggactagaaatgtttcatactgcatgaggtcatgggtttatggatgttatttaattgttatgcttcataacttagatgcacatcccatgttgagaatatctcctatagaaacaaagcacttgtatttaagaatgtgtaaaaaaacaaagggaaaa

SEQ ID NO: 289450 - DNA, 779 bp, Homo sapiens
cgcggccgcttctgcattcccccagcaacggcgctctgctagagagctgccgtaagtcacgctactgccgcaagcctctgccgtcgctaagcacgtctgtaggttcaggctaaggttttccgtcagaaggccgcgcaagtgcacttgcgtgtcaccgttaccgtagcgactgggcttctggactgtatatcctagctgccttgtcaacatcttcgagcatcggcagctccggaggccggggtaactggcagcaggtaggaaactatgtgaaagaatctcctgatgtcataatttccgggtgtcaccggaacatttgatcatcattcctttggcaattccagccttctgtggaaaggccagtagaaagcattgatttattcacctctacaggaatcagactcagcctcttttggttttcagtgaagtatgccttttcaatttggaacccagccaaggaggtttccagtggaaggaggagattcttcaattgagctggaacctgggctgagctccagtgctgcctgtaatgggaaggagatgtcaccaaccaggcaactccggaggtgccctggaagtcattgcctgacaataactgatgttcccgtcactgtttatgcaacaacgagaaagccacctgcacaaagcagcaaggaaatgcatcctaaatagcaccattaagtcttttgtcaaggtctgactaggtcaagggtaatggaccagtatcatctggtgatctggtaaacaaataaaagtggtggcacctttagatgatgacaaca

SEQ ID NO: 289451 - DNA, 1887 bp, Homo sapiens
cgcggccgcttctgcattcccccagcaacggcgctctgctagagagctgccgtaagtcacgctactgccgcaagcctctgccgtcgctaagcacgtctgtaggttcaggctaaggttttccgtcagaaggccgcgcaagtgcacttgcgtgtcaccgttaccgtagcgactgggcttctggactgtatatcctagctgccttgtcaacatcttcgagcatcggcagctccggaggccggggtaactggcagcaggtaggaaactatgtgaaagaatctcctgatgtcataatttccgggtgtcaccggaacatttgatcatcattcctttggcaattccagccttctgtggaaaggccagtagaaagcattgatttattcacctctacaggaatcagactcagcctcttttggttttcagtgaagtatgccttttcaatttggaacccagccaaggaggtttccagtggaaggaggagattcttcaattgagctggaacctgggctgagctccagtgctgcctgtaatgggaaggagatgtcaccaaccaggcaactccggaggtgccctggaagtcattgcctgacaataactgatgttcccgtcactgtttatgcaacaacgagaaagccacctgcacaaagcagcaaggaaatgcatcctaaatagcaccattaagtcttttgtcaaggtctgactaggtcaagggtaatggaccagtatcatctggtgatctggtaaacaaataaaagtggtggcacctttagatgatgacaacagttgagctctttacttttagtaagaccgacagaaatgtagtcagtaaagcacatgtagtgataggctatcagttatgtctgatacataagacagaataatatttcacaattagaaagtaccttagagatcatcttgctcacagtagatcattaatatcaataattaaagatgaagcttaatccaccatggtcatcagtcaggtggggcttattctaaatgcttaatgtgtcttaagctcatttccttgttcatatttgggttgctacttggctaaatcctttcaccttagtaccctaagccagtttcctggcttgatactatttgataatgctctgctcaggaatgattatattgggtgagaaatggagccctggggttgtgtgttttggaacagtattcaagatcaaagaaagttcttagtccatggttaatctgcaaggcatttaagccacttccatagaggagcccagattgttggttaaatatattgataatgaagtcaaagctgtggttccaaccccgatttttccaagaaaaatgacgtctggttatcactttgtacacgaagtgctaaccaggtatcttgataaattgtttacagtaggtattgagaaacctcatgtggattttttaatttggttagatgtgggatcacttttgaggatgaggccagctctctatgttctctttttcttcttgcagtagtccccagaaactcagtctgctttccttttctctcgatggctgtcagcacccatctaatgaaattgtcttctccaaaagactgactttaggatcagatacaattttcaccagtgttttttgtctaccttgctgcttctgaaaatatacatataagccttttaaaatgaaaagtttattaacttataattaaatagacgtagatgcatatgtgttgcattaggtgaaaagaaaaactgccagggagttataagaggaaatggaaagatcttgaacatgtggggcattgagtagagactcagaaaggttgtactttcataagagatccaaactggagctagactaaaggctaatgtataccaattttaagaaagcttaaaaataagccttgagagactcaagatg

SEQ ID NO: 289452 - DNA, 901 bp, Homo sapiens
cgcggccgcttctgcattcccccagcaacggcgctctgctagagagctgccgtaagtcacgctactgccgcaagcctctgccgtcgctaagcacgtctgtaggttcaggctaaggttttccgtcagaaggccgcgcaagtgcacttgcgtgtcaccgttaccgtagcgactgggcttctggactgtatatcctagctgccttgtcaacatcttcgagcatcggcagctccggaggccggggtaactggcagcaggtaggaaactatgtgaaagaatctcctgatgtcataatttccgggtgtcaccggaacatttgatcatcattcctttggcaattccagccttctgtggaaaggccagtagaaagcattgatttattcacctctacaggaatcagactcagcctcttttggttttcagtgaagtatgccttttcaatttggaacccagccaaggaggtttccagtggaaggaggagattcttcaattgagctggaacctgggctgagctccagtgctgcctgtaatgggaaggagatgtcaccaaccaggcaactccggaggtgccctggaagtcattgcctgacaataactgatgttcccgtcactgtttatgcaacaacgagaaagccacctgcacaaagcagcaaggaaatgcatcctaaatagcaccattaagtcttttgtcaaggtctgactaggtcaagggtaatggaccagtatcatctggtgatctggtaaacaaataaaagtggtggcacctttagatgatgacaacattataacttatagacttttggtatgacctagcatatttgttttaattatctttcttaatatagttaggctttatattatgtttggtaacatttggctaaagtatattttatactatattata

SEQ ID NO: 289453 - DNA, 365 bp, Homo sapiens
agcgactgggcttctggactgtatatcctagctgccttgtcaacatcttcgagcatcggcagctccggaggccggggtaactggcaggtaactaggctttggagtggtattttaaaatatgtgtcgttaagctgttcgtgggctatcagaggtttaatttttgttcacagcctcaacacccggggcggtggatcagtccgtttattcagattccacgggacgctgcgttggcatctctgttcaacaagccctttattctaatagaaaatgaacaatggcgttgagcaaagagaaaccccagagaaatagtcatgtcagggcacaattgaaactagatggttatacgctttgacaaaaatggcaaa

SEQ ID NO: 289454 - DNA, 2758 bp, Homo sapiens
cctctgctgcccagtcgcgccgccagcgggctgagggtaggaagtagccgctccgagtggaggcgactgggggctgaagagcgcgccgccctctcgtcccactttccaggtgtgtgatcctgtaaaattaaatcttccaagatgatctggtatatattaattataggaattctgcttccccagtctttggctcatccaggcttttttacttcaattggtcagatgactgatttgatccatactgagaaagatctggtgacttctctgaaagattatattaaggcagaagaggacaagttagaacaaataaaaaaatgggcagagaagttagatcggctaactagtacagcgacaaaagatccagaaggatttgttgggcatccagtaaatgcattcaaattaatgaaacgtctgaatactgagtggagtgagttggagaatctggtccttaaggatatgtcagatggctttatctctaacctaaccattcagagacagtactttcctaatgatgaagatcaggttggggcagccaaagctctgttacgtctccaggatacctacaatttggatacagataccatctcaaagggtaatcttccaggagtgaaacacaaatcttttctaacggctgaggactgctttgagttgggcaaagtggcctatacagaagcagattattaccatacggaactgtggatggaacaagccctaaggcaactggatgaaggcgagatttctaccatagataaagtctctgttctagattatttgagctatgcggtatatcagcagggagacctggataaggcacttttgctcacaaagaagcttcttgaactagatcctgaacatcagagagctaatggtaacttaaaatattttgagtatataatggctaaagaaaaagatgtcaataagtctgcttcagatgaccaatctgatcagaaaactacaccaaagaaaaaaggggttgctgtggattacctgccagagagacagaagtacgaaatgctgtgccgtggggagggtatcaaaatgacccctcggagacagaaaaaactcttttgccgctaccatgatggaaaccgtaatcctaaatttattctggctccagctaaacaggaggatgaatgggacaagcctcgtattattcgcttccatgatattatttctgatgcagaaattgaaatcgtcaaagacctagcaaaaccaaggctgaggcgagccaccatttcaaacccaataacaggagacttggagacggtacattacagaattagctaaaagtgcctggctctctggctatgaaaatcctgtggtgtctcgaattaatatgagaatacaagatctaacaggactagatgtttccacagcagaggaattacaggtagcaaattatggagttggaggacagtatgaaccccattttgactttgcacggaaagatgagccagatgctttcaaagagctggggacaggaaatagaattgctacatggctgttttatatgagtgatgtgtctgcaggaggagccactgtttttcctgaagttggagctagtgtttggcccaaaaaaggaactgctgttttctggtataatctgtttgccagtggagaaggagattatagtacacggcatgcagcctgtccagtgctagttggcaacaaatgggtatccaataaatggctccatgaacgtggacaagaatttcgaagaccttgtacgttgtcagaattggaatgacaaacaggcttccctttttctcctattgttgtactcttatgtgtctgatatacacatttcctagtcttaactttcaggagtttacaattgactaacactccatgattgattcagtcatgaacctcatcccatgtttcatctgtggacaattgcttactttgtgggttcttttaaaagtaacacgaaatcatcatattgcataaaaccttaaagttctgttggtatcacagaagacaaggcagagtttaaagtgaggaattttatatttaaagaactttttggttggataaaaacataatttgagcatccagttttagtatttcactacatctcagttggtgggtgttaagctagaatgggctgtgtgataggaaacaaatgccttacagatgtgcctaggtgttctgtttacctagtgtcttactctgttttctggatctgaagactagtaataaactaggacactaactgggttccatgtgattgccctttcatatgatcttctaagttgatttttttcctcccaagtcttttttaaagaaagtatactgtattttaccaaccccctctcttttcttttagctcctctgtggtgaattaaacgtacttgagttaaaatatttcgattttttttttttttttaatggaaagtcctgcataacaacactgggccttcttaactaaaatgctcaccacttagcctgtttttttatcccttttttaaaatgacagatgattttgttcaggaattttgctgtttttcttagtgctaataccttgcctcttattcctgctacagcagggtggtaatattggcattctgattaaatactgtgccttaggagactggaagtttaaaaatgtacaagtcctttcagtgatgagggaattgattttttttaaaagtctttttcttagaaagccaaaatgtttgtttttttaagattctgaaatgtgttgtgacaacaatgacctatttatgatcttaaatcttttttaaaaaaaaaattg

SEQ ID NO: 289455 - DNA, 720 bp, Homo sapiens
tcattttctcttgatttggaagtggctgttcttactgccacttttctaaatgtttttgtggattcgagaccattacccaccatccagaccaatctgaacccttccaatcacctgtggcttggcaaaacaaaacaaacaaaaagcccaaaattgcctgctactggagtaagtccttgtcctttctctttttttgtagctgagccgagctacagtacatgaccctgagactggaaaattgaccacagcacagtacagagtatctaagaggtaagggagtaatggagagaactttagtcatatttggaccatttctttcttgggaatctaattttctgaaaactcatgatatagtttctaagacctaggtggttaggcatagatgtttgataatatctgtgctggagttttcatgacggactaataaacatggttatggggcagttaataggggttttccaaagtaacattaacttacataatgtctgttgaggctccccaaactttgataagtgaaatgtgttctcatattgaactaagagaagttcccaaattcccttcattaaacaaggcctcttttggactctgcagtaaagcaggggtttaaaaatctcagggtcacctagtagctgcaggtattgcgtaagtaagtgcctttataacaaagcctttgcaagttccttgcttttaacagtgtttaaagataatcttattaggttatta

SEQ ID NO: 289456 - DNA, 278 bp, Homo sapiens
aagtttaaaaatgtacaagtatttaatcagaatgccaatatttaccacccccgctgtagcaggaataagaggcaaggtattggcattctgattaaatactgtgccttaggagactggaagtttaaaaatgtacaagtcctttcagtgatgagggaattgattttttttaaaagtctttttcttagaaagccaaaatgtttgtttttttaagattctgaaatgtgttgtgacaacaatgacctatttatgatcttaaatcttttttaaaaaaaaaattg

SEQ ID NO: 289457 - DNA, 260 bp, Homo sapiens
tactactactaaattcgcggccgcgtcgacaaaaattcgctgactcaaaagttggcagtaggaagaacagagttacgcttctgagctctgtcttccaaaaattagttgtaaacttagttgccttttactttgccagagagatttaaaaacagttttatctcagtgagaggtttgaaaaatgaatttaaggagtctactattttttttcaaaatatttaaataacttctagatctgagaaagtttctgtgaaacccagtgc

SEQ ID NO: 289458 - DNA, 2686 bp, Homo sapiens
cctctgctgcccagtcgcgccgccagcgggctgagggtaggaagtagccgctccgagtggaggcgactgggggctgaagagcgcgccgccctctcgtcccactttccaggtgtgtgatcctgtaaaattaaatcttccaagatgatctggtatatattaattataggaattctgcttccccagtctttggctcatccaggcttttttacttcaattggtcagatgactgatttgatccatactgagaaagatctggtgacttctctgaaagattatattaaggcagaagaggacaagttagaacaaataaaaaaatgggcagagaagttagatcggctaactagtacagcgacaaaagatccagaaggatttgttgggcatccagtaaatgcattcaaattaatgaaacgtctgaatactgagtggagtgagttggagaatctggtccttaaggatatgtcagatggctttatctctaacctaaccattcagagacagtactttcctaatgatgaagatcaggttggggcagccaaagctctgttacgtctccaggatacctacaatttggatacagataccatctcaaagggtaatcttccaggagtgaaacacaaatcttttctaacggctgaggactgctttgagttgggcaaagtggcctatacagaagcagattattaccatacggaactgtggatggaacaagccctaaggcaactggatgaaggcgagatttctaccatagataaagtctctgttctagattatttgagctatgcggtatatcagcagggagacctggataaggcacttttgctcacaaagaagcttcttgaactagatcctgaacatcagagagctaatggtaacttaaaatattttgagtatataatggctaaagaaaaagatgtcaataagtctgcttcagatgaccaatctgatcagaaaactacaccaaagaaaaaaggggttgctgtggattacctgccagagagacagaagtacgaaatgctgtgccgtggggagggtatcaaaatgacccctcggagacagaaaaaactcttttgccgctaccatgatggaaaccgtaatcctaaatttattctggctccagctaaacaggaggatgaatgggacaagcctcgtattattcgcttccatgatattatttctgatgcagaaattgaaatcgtcaaagacctagcaaaaccaaggtgcctggctctctggctatgaaaatcctgtggtgtctcgaattaatatgagaatacaagatctaacaggactagatgtttccacagcagaggaattacaggtagcaaattatggagttggaggacagtatgaaccccattttgactttgcacggaaagatgagccagatgctttcaaagagctggggacaggaaatagaattgctacatggctgttttatatgagtgatgtgtctgcaggaggagccactgtttttcctgaagttggagctagtgtttggcccaaaaaaggaactgctgttttctggtataatctgtttgccagtggagaaggagattatagtacacggcatgcagcctgtccagtgctagttggcaacaaatgggtatccaataaatggctccatgaacgtggacaagaatttcgaagaccttgtacgttgtcagaattggaatgacaaacaggcttccctttttctcctattgttgtactcttatgtgtctgatatacacatttcctagtcttaactttcaggagtttacaattgactaacactccatgattgattcagtcatgaacctcatcccatgtttcatctgtggacaattgcttactttgtgggttcttttaaaagtaacacgaaatcatcatattgcataaaaccttaaagttctgttggtatcacagaagacaaggcagagtttaaagtgaggaattttatatttaaagaactttttggttggataaaaacataatttgagcatccagttttagtatttcactacatctcagttggtgggtgttaagctagaatgggctgtgtgataggaaacaaatgccttacagatgtgcctaggtgttctgtttacctagtgtcttactctgttttctggatctgaagactagtaataaactaggacactaactgggttccatgtgattgccctttcatatgatcttctaagttgatttttttcctcccaagtcttttttaaagaaagtatactgtattttaccaaccccctctcttttcttttagctcctctgtggtgaattaaacgtacttgagttaaaatatttcgattttttttttttttttaatggaaagtcctgcataacaacactgggccttcttaactaaaatgctcaccacttagcctgtttttttatcccttttttaaaatgacagatgattttgttcaggaattttgctgtttttcttagtgctaataccttgcctcttattcctgctacagcagggtggtaatattggcattctgattaaatactgtgccttaggagactggaagtttaaaaatgtacaagtcctttcagtgatgagggaattgattttttttaaaagtctttttcttagaaagccaaaatgtttgtttttttaagattctgaaatgtgttgtgacaacaatgacctatttatgatcttaaatcttttttaaaaaaaaaattg

SEQ ID NO: 289459 - DNA, 2704 bp, Homo sapiens
cctctgctgcccagtcgcgccgccagcgggctgagggtaggaagtagccgctccgagtggaggcgactgggggctgaagagcgcgccgccctctcgtcccactttccaggtgtgtgatcctgtaaaattaaatcttccaagatgatctggtatatattaattataggaattctgcttccccagtctttggctcatccaggcttttttacttcaattggtcagatgactgatttgatccatactgagaaagatctggtgacttctctgaaagattatattaaggcagaagaggacaagttagaacaaataaaaaaatgggcagagaagttagatcggctaactagtacagcgacaagtctgaatactgagtggagtgagttggagaatctggtccttaaggatatgtcagatggctttatctctaacctaaccattcagagacagtactttcctaatgatgaagatcaggttggggcagccaaagctctgttacgtctccaggatacctacaatttggatacagataccatctcaaagggtaatcttccaggagtgaaacacaaatcttttctaacggctgaggactgctttgagttgggcaaagtggcctatacagaagcagattattaccatacggaactgtggatggaacaagccctaaggcaactggatgaaggcgagatttctaccatagataaagtctctgttctagattatttgagctatgcggtatatcagcagggagacctggataaggcacttttgctcacaaagaagcttcttgaactagatcctgaacatcagagagctaatggtaacttaaaatattttgagtatataatggctaaagaaaaagatgtcaataagtctgcttcagatgaccaatctgatcagaaaactacaccaaagaaaaaaggggttgctgtggattacctgccagagagacagaagtacgaaatgctgtgccgtggggagggtatcaaaatgacccctcggagacagaaaaaactcttttgccgctaccatgatggaaaccgtaatcctaaatttattctggctccagctaaacaggaggatgaatgggacaagcctcgtattattcgcttccatgatattatttctgatgcagaaattgaaatcgtcaaagacctagcaaaaccaaggctgaggcgagccaccatttcaaacccaataacaggagacttggagacggtacattacagaattagctaaaagtgcctggctctctggctatgaaaatcctgtggtgtctcgaattaatatgagaatacaagatctaacaggactagatgtttccacagcagaggaattacaggtagcaaattatggagttggaggacagtatgaaccccattttgactttgcacggaaagatgagccagatgctttcaaagagctggggacaggaaatagaattgctacatggctgttttatatgagtgatgtgtctgcaggaggagccactgtttttcctgaagttggagctagtgtttggcccaaaaaaggaactgctgttttctggtataatctgtttgccagtggagaaggagattatagtacacggcatgcagcctgtccagtgctagttggcaacaaatgggtatccaataaatggctccatgaacgtggacaagaatttcgaagaccttgtacgttgtcagaattggaatgacaaacaggcttccctttttctcctattgttgtactcttatgtgtctgatatacacatttcctagtcttaactttcaggagtttacaattgactaacactccatgattgattcagtcatgaacctcatcccatgtttcatctgtggacaattgcttactttgtgggttcttttaaaagtaacacgaaatcatcatattgcataaaaccttaaagttctgttggtatcacagaagacaaggcagagtttaaagtgaggaattttatatttaaagaactttttggttggataaaaacataatttgagcatccagttttagtatttcactacatctcagttggtgggtgttaagctagaatgggctgtgtgataggaaacaaatgccttacagatgtgcctaggtgttctgtttacctagtgtcttactctgttttctggatctgaagactagtaataaactaggacactaactgggttccatgtgattgccctttcatatgatcttctaagttgatttttttcctcccaagtcttttttaaagaaagtatactgtattttaccaaccccctctcttttcttttagctcctctgtggtgaattaaacgtacttgagttaaaatatttcgattttttttttttttttaatggaaagtcctgcataacaacactgggccttcttaactaaaatgctcaccacttagcctgtttttttatcccttttttaaaatgacagatgattttgttcaggaattttgctgtttttcttagtgctaataccttgcctcttattcctgctacagcagggtggtaatattggcattctgattaaatactgtgccttaggagactggaagtttaaaaatgtacaagtcctttcagtgatgagggaattgattttttttaaaagtctttttcttagaaagccaaaatgtttgtttttttaagattctgaaatgtgttgtgacaacaatgacctatttatgatcttaaatcttttttaaaaaaaaaattg

SEQ ID NO: 289460 - DNA, 2717 bp, Homo sapiens
cctctgctgcccagtcgcgccgccagcgggctgagggtaggaagtagccgctccgagtggaggcgactgggggctgaagagcgcgccgccctctcgtcccactttccaggtgtgtgatcctgtaaaattaaatcttccaagatgatctggtatatattaattataggaattctgcttccccagtctttggctcatccaggcttttttacttcaattggtcagatgactgatttgatccatactgagaaagatctggtgacttctctgaaagattatattaaggcagaagaggacaagttagaacaaataaaaaaatgggcagagaagttagatcggctaactagtacagcgacaaaagatccagaaggatttgttgggcatccagtaaatgcattcaaattaatgaaacgtctgaatactgagtggagtgagttggagaatctggtccttaaggatatgtcagatggctttatctctaacctaaccattcagagacagtactttcctaatgatgaagatcaggttggggcagccaaagctctgttacgtctccaggatacctacaatttggatacagataccatctcaaagggtaatcttccaggagtgaaacacaaatcttttctaacggctgaggactgctttgagttgggcaaagtggcctatacagaagcagattattaccatacggaactgtggatggaacaagccctaaggcaactggatgaaggcgagatttctaccatagataaagtctctgttctagattatttgagctatgcggtatatcagcagggagacctggataaggcacttttgctcacaaagaagcttcttgaactagatcctgaacatcagagagctaatggtaacttaaaatattttgagtatataatggctaaagaaaaagatgtcaataagtctgcttcagatgaccaatctgatcagaaaactacaccaaagaaaaaaggggttgctgtggattacctgccagagagacaacccctcggagacagaaaaaactcttttgccgctaccatgatggaaaccgtaatcctaaatttattctggctccagctaaacaggaggatgaatgggacaagcctcgtattattcgcttccatgatattatttctgatgcagaaattgaaatcgtcaaagacctagcaaaaccaaggctgagccgagctacagtacatgaccctgagactggaaaattgaccacagcacagtacagagtatctaagagtgcctggctctctggctatgaaaatcctgtggtgtctcgaattaatatgagaatacaagatctaacaggactagatgtttccacagcagaggaattacaggtagcaaattatggagttggaggacagtatgaaccccattttgactttgcacggaaagatgagccagatgctttcaaagagctggggacaggaaatagaattgctacatggctgttttatatgagtgatgtgtctgcaggaggagccactgtttttcctgaagttggagctagtgtttggcccaaaaaaggaactgctgttttctggtataatctgtttgccagtggagaaggagattatagtacacggcatgcagcctgtccagtgctagttggcaacaaatgggtatccaataaatggctccatgaacgtggacaagaatttcgaagaccttgtacgttgtcagaattggaatgacaaacaggcttccctttttctcctattgttgtactcttatgtgtctgatatacacatttcctagtcttaactttcaggagtttacaattgactaacactccatgattgattcagtcatgaacctcatcccatgtttcatctgtggacaattgcttactttgtgggttcttttaaaagtaacacgaaatcatcatattgcataaaaccttaaagttctgttggtatcacagaagacaaggcagagtttaaagtgaggaattttatatttaaagaactttttggttggataaaaacataatttgagcatccagttttagtatttcactacatctcagttggtgggtgttaagctagaatgggctgtgtgataggaaacaaatgccttacagatgtgcctaggtgttctgtttacctagtgtcttactctgttttctggatctgaagactagtaataaactaggacactaactgggttccatgtgattgccctttcatatgatcttctaagttgatttttttcctcccaagtcttttttaaagaaagtatactgtattttaccaaccccctctcttttcttttagctcctctgtggtgaattaaacgtacttgagttaaaatatttcgattttttttttttttttaatggaaagtcctgcataacaacactgggccttcttaactaaaatgctcaccacttagcctgtttttttatcccttttttaaaatgacagatgattttgttcaggaattttgctgtttttcttagtgctaataccttgcctcttattcctgctacagcagggtggtaatattggcattctgattaaatactgtgccttaggagactggaagtttaaaaatgtacaagtcctttcagtgatgagggaattgattttttttaaaagtctttttcttagaaagccaaaatgtttgtttttttaagattctgaaatgtgttgtgacaacaatgacctatttatgatcttaaatcttttttaaaaaaaaaattg

SEQ ID NO: 289461 - DNA, 2735 bp, Homo sapiens
cctctgctgcccagtcgcgccgccagcgggctgagggtaggaagtagccgctccgagtggaggcgactgggggctgaagagcgcgccgccctctcgtcccactttccaggtgtgtgatcctgtaaaattaaatcttccaagatgatctggtatatattaattataggaattctgcttccccagtctttggctcatccaggcttttttacttcaattggtcagatgactgatttgatccatactgagaaagatctggtgacttctctgaaagattatattaaggcagaagaggacaagttagaacaaataaaaaaatgggcagagaagttagatcggctaactagtacagcgacaaaagatccagaaggatttgttgggcatccagtaaatgcattcaaattaatgaaacgtctgaatactgagtggagtgagttggagaatctggtccttaaggatatgtcagatggctttatctctaacctaaccattcagagacagtactttcctaatgatgaagatcaggttggggcagccaaagctctgttacgtctccaggatacctacaatttggatacagataccatctcaaagggtaatcttccaggagtgaaacacaaatcttttctaacggctgaggactgctttgagttgggcaaagtggcctatacagaagcagattattaccatacggaactgtggatggaacaagccctaaggcaactggatgaaggcgagatttctaccatagataaagtctctgttctagattatttgagctatgcggtatatcagcagggagacctggataaggcacttttgctcacaaagaagcttcttgaactagatcctgaacatcagagagctaatggtaacttaaaatattttgagtatataatggctaaagaaaaagatgtcaataagtctgcttcagatgaccaatctgatcagaaaactacaccaaagaaaaaaggggttgctgtggattacctgccagagagacaacccctcggagacagaaaaaactcttttgccgctaccatgatggaaaccgtaatcctaaatttattctggctccagctaaacaggaggatgaatgggacaagcctcgtattattcgcttccatgatattatttctgatgcagaaattgaaatcgtcaaagacctagcaaaaccaaggctgaggcgagccaccatttcaaacccaataacaggagacttggagacggtacattacagaattagctaaaagctgagccgagctacagtacatgaccctgagactggaaaattgaccacagcacagtacagagtatctaagagtgcctggctctctggctatgatgtttccacagcagaggaattacaggtagcaaattatggagttggaggacagtatgaaccccattttgactttgcacggaaagatgagccagatgctttcaaagagctggggacaggaaatagaattgctacatggctgttttatatgagtgatgtgtctgcaggaggagccactgtttttcctgaagttggagctagtgtttggcccaaaaaaggaactgctgttttctggtataatctgtttgccagtggagaaggagattatagtacacggcatgcagcctgtccagtgctagttggcaacaaatgggtatccaataaatggctccatgaacgtggacaagaatttcgaagaccttgtacgttgtcagaattggaatgacaaacaggcttccctttttctcctattgttgtactcttatgtgtctgatatacacatttcctagtcttaactttcaggagtttacaattgactaacactccatgattgattcagtcatgaacctcatcccatgtttcatctgtggacaattgcttactttgtgggttcttttaaaagtaacacgaaatcatcatattgcataaaaccttaaagttctgttggtatcacagaagacaaggcagagtttaaagtgaggaattttatatttaaagaactttttggttggataaaaacataatttgagcatccagttttagtatttcactacatctcagttggtgggtgttaagctagaatgggctgtgtgataggaaacaaatgccttacagatgtgcctaggtgttctgtttacctagtgtcttactctgttttctggatctgaagactagtaataaactaggacactaactgggttccatgtgattgccctttcatatgatcttctaagttgatttttttcctcccaagtcttttttaaagaaagtatactgtattttaccaaccccctctcttttcttttagctcctctgtggtgaattaaacgtacttgagttaaaatatttcgattttttttttttttttaatggaaagtcctgcataacaacactgggccttcttaactaaaatgctcaccacttagcctgtttttttatcccttttttaaaatgacagatgattttgttcaggaattttgctgtttttcttagtgctaataccttgcctcttattcctgctacagcagggtggtaatattggcattctgattaaatactgtgccttaggagactggaagtttaaaaatgtacaagtcctttcagtgatgagggaattgattttttttaaaagtctttttcttagaaagccaaaatgtttgtttttttaagattctgaaatgtgttgtgacaacaatgacctatttatgatcttaaatcttttttaaaaaaaaaattg

SEQ ID NO: 289462 - DNA, 1666 bp, Homo sapiens
tcgagctcggtaccgtgctactccactaaacaggaggatgaatgggacaagcctcgtattattcgcttccatgatattatttctgatgcagaaattgaaatcgtcaaagacctagcaaaaccaaggctgaggcgagccaccatttcaaacccaataacaggagacttggagacggtacattacagaattagctaaaagtgcctggctctctggctatgaaaatcctgtggtgtctcgaattaatatgagaatacaagatctaacaggactagatgtttccacagcagaggaattacaggtagcaaattatggagttggaggacagtatgaaccccattttgactttgcacggaaagatgagccagatgctttcaaagagctggggacaggaaatagaattgctacatggctgttttatatgagtgatgtgtctgcaggaggagccactgtttttcctgaagttggagctagtgtttggcccaaaaaaggaactgctgttttctggtataatctgtttgccagtggagaaggagattatagtacacggcatgcagcctgtccagtgctagttggcaacaaatgggtatccaataaatggctccatgaacgtggacaagaatttcgaagaccttgtacgttgtcagaattggaatgacaaacaggcttccctttttctcctattgttgtactcttatgtgtctgatatacacatttcctagtcttaactttcaggagtttacaattgactaacactccatgattgattcagtcatgaacctcatcccatgtttcatctgtggacaattgcttactttgtgggttcttttaaaagtaacacgaaatcatcatattgcataaaaccttaaagttctgttggtatcacagaagacaaggcagagtttaaagtgaggaattttatatttaaagaactttttggttggataaaaacataatttgagcatccagttttagtatttcactacatctcagttggtgggtgttaagctagaatgggctgtgtgataggaaacaaatgccttacagatgtgcctaggtgttctgtttacctagtgtcttactctgttttctggatctgaagactagtaataaactaggacactaactgggttccatgtgattgccctttcatatgatcttctaagttgatttttttcctcccaagtcttttttaaagaaagtatactgtattttaccaaccccctctcttttcttttagctcctctgtggtgaattaaacgtacttgagttaaaatatttcgattttttttttttttttaatggaaagtcctgcataacaacactgggccttcttaactaaaatgctcaccacttagcctgtttttttatcccttttttaaaatgacagatgattttgttcaggaattttgctgtttttcttagtgctaataccttgcctcttattcctgctacagcagggtggtaatattggcattctgattaaatactgtgccttaggagactggaagtttaaaaatgtacaagtcctttcagtgatgagggaattgattttttttaaaagtctttttcttagaaagccaaaatgtttgtttttttaagattctgaaatgtgttgtgacaacaatgacctatttatgatcttaaatcttttttaaaaaaaaaattg

SEQ ID NO: 289463 - DNA, 1293 bp, Homo sapiens
  misc_feature (45)..(45): n is a, c, g, or t
atttcggaacgagggggaaatagaattgctacatggctgttttanatgagtgatgtgtctgcaggaggagccactgtttttcctgaagttggagctagtgtttggcccaaaaaaggaactgctgttttctggtataatctgtttgccagtggagaaggagattatagtacacggcatgcagcctgtccagtgctagttggcaacaaatgggtatccaataaatggctccatgaacgtggacaagaatttcgaagaccttgtacgttgtcagaattggaatgacaaacaggcttccctttttctcctattgttgtactcttatgtgtctgatatacacatttcctagtcttaactttcaggagtttacaattgactaacactccatgattgattcagtcatgaacctcatcccatgtttcatctgtggacaattgcttactttgtgggttcttttaaaagtaacacgaaatcatcatattgcataaaaccttaaagttctgttggtatcacagaagacaaggcagagtttaaagtgaggaattttatatttaaagaactttttggttggataaaaacataatttgagcatccagttttagtatttcactacatctcagttggtgggtgttaagctagaatgggctgtgtgataggaaacaaatgccttacagatgtgcctaggtgttctgtttacctagtgtcttactctgttttctggatctgaagactagtaataaactaggacactaactgggttccatgtgattgccctttcatatgatcttctaagttgatttttttcctcccaagtcttttttaaagaaagtatactgtattttaccaaccccctctcttttcttttagctcctctgtggtgaattaaacgtacttgagttaaaatatttcgattttttttttttttttaatggaaagtcctgcataacaacactgggccttcttaactaaaatgctcaccacttagcctgtttttttatcccttttttaaaatgacagatgattttgttcaggaattttgctgtttttcttagtgctaataccttgcctcttattcctgctacagcagggtggtaatattggcattctgattaaatactgtgccttaggagactggaagtttaaaaatgtacaagtcctttcagtgatgagggaattgattttttttaaaagtctttttcttagaaagccaaaatgtttgtttttttaagattctgaaatgtgttgtgacaacaatgacctatttatgatcttaaatcttttttaaaaaaaaaattg

SEQ ID NO: 289464 - DNA, 952 bp, Homo sapiens
acgatccgaatcgagccggtacccgatgagtaatcttggtccatgattgattcagtcatgaacctcatcccatgtttcatctgtggacaattgcttactttgtgggttcttttaaaagtaacacgaaatcatcatattgcataaaaccttaaagttctgttggtatcacagaagacaaggcagagtttaaagtgaggaattttatatttaaagaactttttggttggataaaaacataatttgagcatccagttttagtatttcactacatctcagttggtgggtgttaagctagaatgggctgtgtgataggaaacaaatgccttacagatgtgcctaggtgttctgtttacctagtgtcttactctgttttctggatctgaagactagtaataaactaggacactaactgggttccatgtgattgccctttcatatgatcttctaagttgatttttttcctcccaagtcttttttaaagaaagtatactgtattttaccaaccccctctcttttcttttagctcctctgtggtgaattaaacgtacttgagttaaaatatttcgattttttttttttttttaatggaaagtcctgcataacaacactgggccttcttaactaaaatgctcaccacttagcctgtttttttatcccttttttaaaatgacagatgattttgttcaggaattttgctgtttttcttagtgctaataccttgcctcttattcctgctacagcagggtggtaatattggcattctgattaaatactgtgccttaggagactggaagtttaaaaatgtacaagtcctttcagtgatgagggaattgattttttttaaaagtctttttcttagaaagccaaaatgtttgtttttttaagattctgaaatgtgttgtgacaacaatgacctatttatgatcttaaatcttttttaaaaaaaaaattg

SEQ ID NO: 289465 - DNA, 2681 bp, Homo sapiens
  misc_feature (2598)..(2598): n is a, c, g, or t
cctctgctgcccagtcgcgccgccagcgggctgagggtaggaagtagccgctccgagtggaggcgactgggggctgaagagcgcgccgccctctcgtcccactttccaggtgtgtgatcctgtaaaattaaatcttccaagatgatctggtatatattaattataggaattctgcttccccagtctttggctcatccaggcttttttacttcaattggtcagatgactgatttgatccatactgagaaagatctggtgacttctctgaaagattatattaaggcagaagaggacaagttagaacaaataaaaaaatgggcagagaagttagatcggctaactagtacagcgacaaaagatccagaaggatttgttgggcatccagtaaatgcattcaaattaatgaaacgtctgaatactgagtggagtgagttggagaatctggtccttaaggatatgtcagatggctttatctctaacctaaccattcagagacagtactttcctaatgatgaagatcaggttggggcagccaaagctctgttacgtctccaggatacctacaatttggatacagataccatctcaaagggtaatcttccaggagtgaaacacaaatcttttctaacggctgaggactgctttgagttgggcaaagtggcctatacagaagcagattattaccatacggaactgtggatggaacaagccctaaggcaactggatgaaggcgagatttctaccatagataaagtctctgttctagattatttgagctatgcggtatatcagcagggagacctggataaggcacttttgctcacaaagaagcttcttgaactagatcctgaacatcagagagctaatggtaacttaaaatattttgagtatataatggctaaagaaaaagatgtcaataagtctgcttcagatgaccaatctgatcagaaaactacaccaaagaaaaaaggggttgctgtggattacctgccagagagacagaagtacgaaatgctgtgccgtggggagggtatcaaaatgacccctcggagacagaaaaaactcttttgccgctaccatgatggaaaccgtaatcctaaatttattctggctccagctaaacaggaggatgaatgggacaagcctcgtattattcgcttccatgatattatttctgatgcagaaattgaaatcgtcaaagacctagcaaaaccaaggctgaggcgagccaccatttcaaacccaataacaggagacttggagacggtacattacagaattagctaaaagtgcctggctctctggctatgaaaatcctgtggtgtctcgaattaatatgagaatacaagatctaacaggactagatgtttccacagcagaggaattacaggtagcaaattatggagttggaggacagtatgaaccccattttgactttgcacggaaagatgagccagatgctttcaaagagctggggacaggaaatagaattgctacatggctgttttatatgagtgatgtgtctgcaggaggagccactgtttttcctgaagttggagctagtgtttggcccaaaaaaggaactgctgttttctggtataatctgtttgccagtggagaaggagattatagtacacggcatgcagcctgtccagtgctagttggcaacaaatgggtatccaataaatggctccatgaacgtggacaagaatttcgaagaccttgtacgttgtcagaattggaatgacaaacaggcttccctttttctcctattgttgtactcttatgtgtctgatatacacatttcctagtcttaactttcaggagtttacaattgactaacactccatgattgattcagtcatgaacctcatcccatgtttcatctgtggacaattgcttactttgtgggttcttttaaaagtaacacgaaatcatcatattgcataaaaccttaaagttctgttggtatcacagaagacaaggcagagtttaaagtgaggaattttatatttaaagaactttttggttggataaaaacataatttgagcatccagttttagtatttcactacatctcagttggtgggtgttaagctagaatgggctgtgtgataggaaacaaatgccttacagatgtgcctaggtgttctgtttacctagtgtcttactctgttttctggatctgaagactagtaataaactaggacactaactgggttccatgtgattgccctttcatatgatcttctaagttgatttttttcctcccaagtcttttttaaagaaagtatactgtattttaccaaccccctctcttttcttttagctcctctgtggtgaattaaacgtacttgagttaaaatatttcgattttttttttttttttaatggaaagtcctgcataacaacactgggccttcttaactaaaatgctcaccacttagcctgtttttttatcccttttttaaaatgacagatgattttgttcaggaattttgctgtttttcttagtgctaataccttgcctcttattcctgctacagcagggtggtaatattggcattctgattaaatactgtgccttaggagactgantaaagacagctcaggatgaggatgatttttaagctttctagaagcaaatgttgtcttcagatctgaatggtgtgacacatgac

SEQ ID NO: 289466 - DNA, 2625 bp, Homo sapiens
cctctgctgcccagtcgcgccgccagcgggctgagggtaggaagtagccgctccgagtggaggcgactgggggctgaagagcgcgccgccctctcgtcccactttccaggtgtgtgatcctgtaaaattaaatcttccaagatgatctggtatatattaattataggaattctgcttccccagtctttggctcatccaggcttttttacttcaattggtcagatgactgatttgatccatactgagaaagatctggtgacttctctgaaagattatattaaggcagaagaggacaagttagaacaaataaaaaaatgggcagagaagttagatcggctaactagtacagcgacaaaagatccagaaggatttgttgggcatccagtaaatgcattcaaattaatgaaacgtctgaatactgagtggagtgagttggagaatctggtccttaaggatatgtcagatggctttatctctaacctaaccattcagagacagtactttcctaatgatgaagatcaggttggggcagccaaagctctgttacgtctccaggatacctacaatttggatacagataccatctcaaagggtaatcttccaggagtgaaacacaaatcttttctaacggctgaggactgctttgagttgggcaaagtggcctatacagaagcagattattaccatacggaactgtggatggaacaagccctaaggcaactggatgaaggcgagatttctaccatagataaagtctctgttctagattatttgagctatgcggtatatcagcagggagacctggataaggcacttttgctcacaaagaagcttcttgaactagatcctgaacatcagagagctaatggtaacttaaaatattttgagtatataatggctaaagaaaaagatgtcaataagtctgcttcagatgaccaatctgatcagaaaactacaccaaagaaaaaaggggttgctgtggattacctgccagagagacagaagtacgaaatgctgtgccgtggggagggtatcaaaatgacccctcggagacagaaaaaactcttttgccgctaccatgatggaaaccgtaatcctaaatttattctggctccagctaaacaggaggatgaatgggacaagcctcgtattattcgcttccatgatattatttctgatgcagaaattgaaatcgtcaaagacctagcaaaaccaaggctgaggcgagccaccatttcaaacccaataacaggagacttggagacggtacattacagaattagctaaaagtgcctggctctctggctatgaaaatcctgtggtgtctcgaattaatatgagaatacaagatctaacaggactagatgtttccacagcagaggaattacaggtagcaaattatggagttggaggacagtatgaaccccattttgactttgcacggaaagatgagccagatgctttcaaagagctggggacaggaaatagaattgctacatggctgttttatatgagtgatgtgtctgcaggaggagccactgtttttcctgaagttggagctagtgtttggcccaaaaaaggaactgctgttttctggtataatctgtttgccagtggagaaggagattatagtacacggcatgcagcctgtccagtgctagttggcaacaaatgggtatccaataaatggctccatgaacgtggacaagaatttcgaagaccttgtacgttgtcagaattggaatgacaaacaggcttccctttttctcctattgttgtactcttatgtgtctgatatacacatttcctagtcttaactttcaggagtttacaattgactaacactccatgattgattcagtcatgaacctcatcccatgtttcatctgtggacaattgcttactttgtgggttcttttaaaagtaacacgaaatcatcatattgcataaaaccttaaagttctgttggtatcacagaagacaaggcagagtttaaagtgaggaattttatatttaaagaactttttggttggataaaaacataatttgagcatccagttttagtatttcactacatctcagttggtgggttttctggatctgaagactagtaataaactaggacactaactgggttccatgtgattgccctttcatatgatcttctaagttgatttttttcctcccaagtcttttttaaagaaagtatactgtattttaccaaccccctctcttttcttttagctcctctgtggtgaattaaacgtacttgagttaaaatatttccttcttaactaaaatgctcaccacttagcctgtttttttatcccttttttaaaatgacagatgattttgttcaggaattttgctgtttttcttagtgctaataccttgcctcttattcctgctacagcagggtggtaatattggcattctgattaaatactgtgccttaggagactggaagtttaaaaatgtacaagtcctttcagtgatgagggaattgattttttttaaaagtctttttcttagaaagccaaaatgtttgtttttttaagattctgaaatgtgttgtgacaacaatgacctatttatgatcttaaatcttttttaaaaaaaaaattg

SEQ ID NO: 289467 - DNA, 1968 bp, Homo sapiens
cctctgctgcccagtcgcgccgccagcgggctgagggtaggaagtagccgctccgagtggaggcgactgggggctgaagagcgcgccgccctctcgtcccactttccaggtgtgtgatcctgtaaaattaaatcttccaagatgatctggtatatattaattataggaattctgcttccccagtctttggctcatccaggcttttttacttcaattggtcagatgactgatttgatccatactgagaaagatctggtgacttctctgaaagattatattaaggcagaagaggacaagttagaacaaataaaaaaatgggcagagaagttagatcggctaactagtacagcgacaaaagatccagaaggatttgttgggcatccagtaaatgcattcaaattaatgaaacgtctgaatactgagtggagtgagttggagaatctggtccttaaggatatgtcagatggctttatctctaacctaaccattcagagacagtactttcctaatgatgaagatcaggttggggcagccaaagctctgttacgtctccaggatacctacaatttggatacagataccatctcaaagggtaatcttccaggagtgaaacacaaatcttttctaacggctgaggactgctttgagttgggcaaagtggcctatacagaagcagattattaccatacggaactgtggatggaacaagccctaaggcaactggatgaaggcgagatttctaccatagataaagtctctgttctagattatttgagctatgcggtatatcagcagggagacctggataaggcacttttgctcacaaagaagcttcttgaactagatcctgaacatcagagagctaatggtaacttaaaatattttgagtatataatggctaaagaaaaagatgtcaataagtctgcttcagatgaccaatctgatcagaaaactacaccaaagaaaaaaggggttgctgtggattacctgccagagagacagaagtacgaaatgctgtgccgtggggagggtatcaaaatgacccctcggagacagaaaaaactcttttgccgctaccatgatggaaaccgtaatcctaaatttattctggctccagctaaacaggaggatgaatgggacaagcctcgtattattcgcttccatgatattatttctgatgcagaaattgaaatcgtcaaagacctagcaaaaccaaggctgaggcgagccaccatttcaaacccaataacaggagacttggagacggtacattacagaattagctaaaagtgcctggctctctggctatgaaaatcctgtggtgtctcgaattaatatgagaatacaagatctaacaggactagatgtttccacagcagaggaattacaggtagcaaattatggagttggaggacagtatgaaccccattttgactttgcacggaaagatgagccagatgctttcaaagagctggggacaggaaatagaattgctacatggctgttttatatgagtgatgtgtctgcaggaggagccactgtttttcctgaagttggagctagtgtttggcccaaaaaaggaactgctgttttctggtataatctgtttgccagtggagaaggagattatagtacacggcatgcagcctgtccagtgctagttggcaacaaatgggtatccaataaatggctccatgaacgtggacaagaatttcgaagaccttgtacgttgtcagaattggaatgacaaacaggcttccctttttctcctattgttgtactcttatgtgtctgatatacacatttcctagtcttaactttcaggagtttacaattgactaacacattgattttttttaaaagtctttttcttagaaagccaaaatgtttgtttttttaagattctgaaatgtgttgtgacaacaatgacctatttatgatcttaaatcttttttaaaaaaaaaattg

SEQ ID NO: 289468 - DNA, 1843 bp, Homo sapiens
cctctgctgcccagtcgcgccgccagcgggctgagggtaggaagtagccgctccgagtggaggcgactgggggctgaagagcgcgccgccctctcgtcccactttccaggtgtgtgatcctgtaaaattaaatcttccaagatgatctggtatatattaattataggaattctgcttccccagtctttggctcatccaggcttttttacttcaattggtcagatgactgatttgatccatactgagaaagatctggtgacttctctgaaagattatattaaggcagaagaggacaagttagaacaaataaaaaaatgggcagagaagttagatcggctaactagtacagcgacaaaagatccagaaggatttgttgggcatccagtaaatgcattcaaattaatgaaacgtctgaatactgagtggagtgagttggagaatctggtccttaaggatatgtcagatggctttatctctaacctaaccattcagagacagtactttcctaatgatgaagatcaggttggggcagccaaagctctgttacgtctccaggatacctacaatttggatacagataccatctcaaagggtaatcttccaggagtgaaacacaaatcttttctaacggctgaggactgctttgagttgggcaaagtggcctatacagaagcagattattaccatacggaactgtggatggaacaagccctaaggcaactggatgaaggcgagatttctaccatagataaagtctctgttctagattatttgagctatgcggtatatcagcagggagacctggataaggcacttttgctcacaaagaagcttcttgaactagatcctgaacatcagagagctaatggtaacttaaaatattttgagtatataatggctaaagaaaaagatgtcaataagtctgcttcagatgaccaatctgatcagaaaactacaccaaagaaaaaaggggttgctgtggattacctgccagagagacagaagtacgaaatgctgtgccgtggggagggtatcaaaatgacccctcggagacagaaaaaactcttttgccgctaccatgatggaaaccgtaatcctaaatttattctggctccagctaaacaggaggatgaatgggacaagcctcgtattattcgcttccatgatattatttctgatgcagaaattgaaatcgtcaaagacctagcaaaaccaaggctgaggcgagccaccatttcaaacccaataacaggagacttggagacggtacattacagaattagctaaaagtgcctggctctctggctatgaaaatcctgtggtgtctcgaattaatatgagaatacaagatctaacaggactagatgtttccacagcagaggaattacaggtagcaaattatggagttggaggacagtatgaaccccattttgactttgcacggaaagatgagccagatgctttcaaagagctggggacaggaaatagaattgctacatggctgttttatatgagtgatgtgtctgcaggaggagccactgtttttcctgaagttggagctagtgtttggcccaaaaaaggaactgctgttttctggtataatctgtttgccagtggagaaggagattatagtacacggcatgcagcctgtccagtgctagttggcaacaaatggggtaaatatttcatatattctgcgaagataatgtaatttttgtttcttattttggaactattatctgtgtcttaaaaacaaaagcccccatgtttgcttaatatgattttaacattgtacaggattcagccaaacaagtgcctaatcataatacaaatttgaaatcag

SEQ ID NO: 289469 - DNA, 1814 bp, Homo sapiens
cctctgctgcccagtcgcgccgccagcgggctgagggtaggaagtagccgctccgagtggaggcgactgggggctgaagagcgcgccgccctctcgtcccactttccaggtgtgtgatcctgtaaaattaaatcttccaagatgatctggtatatattaattataggaattctgcttccccagtctttggctcatccaggcttttttacttcaattggtcagatgactgatttgatccatactgagaaagatctggtgacttctctgaaagattatattaaggcagaagaggacaagttagaacaaataaaaaaatgggcagagaagttagatcggctaactagtacagcgacaaaagatccagaaggatttgttgggcatccagtaaatgcattcaaattaatgaaacgtctgaatactgagtggagtgagttggagaatctggtccttaaggatatgtcagatggctttatctctaacctaaccattcagagacagtactttcctaatgatgaagatcaggttggggcagccaaagctctgttacgtctccaggatacctacaatttggatacagataccatctcaaagggtaatcttccaggagtgaaacacaaatcttttctaacggctgaggactgctttgagttgggcaaagtggcctatacagaagcagattattaccatacggaactgtggatggaacaagccctaaggcaactggatgaaggcgagatttctaccatagataaagtctctgttctagattatttgagctatgcggtatatcagcagggagacctggataaggcacttttgctcacaaagaagcttcttgaactagatcctgaacatcagagagctaatggtaacttaaaatattttgagtatataatggctaaagaaaaagatgtcaataagtctgcttcagatgaccaatctgatcagaaaactacaccaaagaaaaaaggggttgctgtggattacctgccagagagacagaagtacgaaatgctgtgccgtggggagggtatcaaaatgacccctcggagacagaaaaaactcttttgccgctaccatgatggaaaccgtaatcctaaatttattctggctccagctaaacaggaggatgaatgggacaagcctcgtattattcgcttccatgatattatttctgatgcagaaattgaaatcgtcaaagacctagcaaaaccaaggctgaggcgagccaccatttcaaacccaataacaggagacttggagacggtacattacagaattagctaaaagctgagccgagctacagtacatgaccctgagactggaaaattgaccacagcacagtacagagtatctaagaggtaagggagtaatggagagaactttagtcatatttggaccatttctttcttgggaatctaattttctgaaaactcatgatatagtttctaagacctaggtggttaggcatagatgtttgataatatctgtgctggagttttcatgacggactaataaacatggttatggggcagttaataggggttttccaaagtaacattaacttacataatgtctgttgaggctccccaaactttgataagtgaaatgtgttctcatattgaactaagagaagttcccaaattcccttcattaaacaaggcctcttttggactctgcagtaaagcaggggtttaaaaatctcagggtcacctagtagctgcaggtattgcgtaagtaagtgcctttataacaaagcctttgcaagttccttgcttttaacagtgtttaaagataatcttattaggttatta

SEQ ID NO: 289470 - DNA, 602 bp, Homo sapiens
gctttatctctaacctaaccattcagagacagtactttcctaatgatgaagatcaggttggggcagccaaagctctgttacgtctccaggatacctacaatttggatacagataccatctcaaagggtaatcttccaggtaagatcattcttccattctataaaatacctatcacctagcttctctgttgagtccattaacacaatgttagtataaaaaagacttgcattttaagattttaaattgtagtttgtttcatagccttcgaagactaaagaatcaccttccctttctcttagggcttaatagttacgggtatgcttctagcttctagcttgttactctgaaagcttgtattgatagagactaacttaagtagggaattttagtgtgtaaggaaaagaaactatcatttcaccaaatgtttttattcagaacacctaatactatttgaaagctttgtatgtaaagctataagggattgatagtcaaagtttatatgttaaataattaaaagccaagatgttttgggtatccacatatgtttaaagtgttccatagtatggaacatcctactttctgacctatttttggcaaagtcc

SEQ ID NO: 289471 - DNA, 685 bp, Homo sapiens
ggagtagtagtcttcacctatgcagttttctcatattcataaatgctgcggtgattcatatcctccttcatggtgattacgttggcatttgttcatacatcttgtaaaataacattgtcattatgtagtaatctgtattcctcctgtttgagttttttatttaaaaaaattcgctgactcaaaagttggcagtaggaagaacagagttacgcttctgagctctgtcttccaaaaattagttgtaaacttagttgccttttactttgccagagagatttaaaaacagttttatctcagtgagaggtttgaaaaatgaatttaaggagtctactattttttttcaaaatatttaaataacttctagatctgagaaagtttctgtgaaacccagtgctataaatcatttacatacagcttcaaatgattttttgtttaaaaaaagtgaaaggacaataaatctacaacaaaaatctgtcaactcattttctcttgatttggaagtggctgttcttactgccacttttctaaatgtttttgtggattcgagaccattacccaccatccagaccaatctgaacccttccaatcacctgtggcttggcaaaacaaaacaaacaaaaagcccaaaattgcctgctactggagtaagtccttgtcctttctctttttttgtagctgagccgag

SEQ ID NO: 289472 - DNA, 723 bp, Homo sapiens
ggaggagtgcttgcatggtaagctcccactggagtctgacagggacttaaggacatcacttcattgattctttcagctctgagtatattaagactaagtagtgggtctagaaacatttatttttgaaatttcatgcctggcacaagccagatatctctttttctaactcaacttttttgtctaagagtcagctgtaattaatcagaaaagacttaattgtattaagtactcatttgaaattatctttgaatttgtatttagtcaatattcttcccatgatgctaaatcagattgtatcttgtcctgaaattattatttcagtagtcacattgaatctcaggccacaaaagatctttgggattctcctggacctgtgagctcagcattaagattgctgacatgaaagaaatttattgatcagagttttgtgataggaagtttgtcttttggcttacgtattactaatcattctggagttccttgagtggaacatttataaaatttctaatacagaatgaaggaaggccaagcccctcttggtttaaatattttgatttttgttttctctttctgaccgggcttctttttccttttttatatggttggcacatgggaattcatctcaaggtattggtatatttaacacagtatatatagattcagagagcaagagattcagccttggttttggagtattgttacgtcttcatccagaacttggtt

SEQ ID NO: 289473 - DNA, 355 bp, Homo sapiens
gtgagcgactcaccaggacagttttatttctgtgctgagcttgctgcttcctgctgggaaaatgttagtggcggagtcacacccagaaacaaagtacatttgcttttgaaaagccaagccatacggacgacaaacaatatgatgaaaggtcactcagaaccccaccctagaagaaagccagaagtcctggttcggcccaagaggtgggatgaagagtttcactagatcgtctcccttttggctgatgtcacagcaaatattcatcagccatcagccagactggatagcaggccaaaaacgtggccgtctggtctcacgttggaagttctgttttaaactttgtgaccttgattcc

SEQ ID NO: 289474 - DNA, 3177 bp, Homo sapiens
caggacgaagtttttggctgtgggctctctgggacagagtggagcgcctgtggatttagccggggacacaccatcctgctcgcaggtgcctggacaggacaggggacgagggaggaacactctctgaggaagcccaactcctatgagctcctctctggcagcactcaaaccagtgaagcttgggaaagtcattgacctccagtcgttctgctgagaaacatctggctctatttccatggagaccagggaatctgaagatttggaaaagacccggaggaaatcagcaagtgatcaatggaacactgataatgaaccagccaaggtgaaacctgagttactcccagaaaaagaggagacttctcaagctgaccaggatatccaagacaaagagcctcattgccacatcccaattaagagaaattccatcttcaatcgctccataagacgcaaaagcaaagccaaggccagagacaaccccgaacggaacgccagctgcctggcagattcacaggacaatggaaaatctgtaaatgagcccctgaccttgaatatcccctggagcagaacgcctccttgcagaacagcaatgcagacagacccaggagcccaggaaatgagtgagtcgtcctccaccccgggaaatggggccacgcccgaggagtggccggccctggccgacagccccaccacgctcaccgaggccctgcggatgatccaccccattcccgccgactcctggagaaacctcattgaacaaatagggctcctgtatcaggaataccgagataaatcgactctccaagaaatcgaaaccaggaggcaacaggatgcagaaatagaagacaataccaatgggtccccggccagtgaggacaccccggaggaggaagaagaagaggaggaggaggaggagccggccagcccaccagagaggaagactctgccccagatctgcctgctcagtaacccccactcaaggttcaacctctggcaggatcttcccgagatccggagcagcggggtgcttgagatcctacagcctgaggagattaagctgcaggaggccatgttcgagctggtcacttccgaggcgtcctactacaagagtctgaacctgctcgtgtcccacttcatggagaacgagcggataaggaagatcctgcacccgtccgaggcgcacatcctcttctccaacgtcctggacgtgctggctgtcagtgagcggttcctcctggagctggagcaccggatggaggagaacatcgtcatctctgacgtgtgtgacatcgtgtaccgttatgcggccgaccacttctctgtctacatcacctacgtcagcaatcagacctaccaggagcggacctataagcagctgctccaggagaaggcagctttccgggagctgatcgcgcagctagagctcgaccccaagtgcagggggctgcccttctcctccttcctcatcctgcctttccagaggatcacacgcctcaagctgttggtccagaacatcctgaagagggtagaagagaggtctgagcgggagtgcactgctttggatgctcacaaggagctggaaatggtggtgaaggcatgcaacgagggcgtcaggaaaatgagccgcacggaacagatgatcagcattcagaagaagatggagttcaagatcaagtcggtgcccatcatctcccactcccgctggctgctgaagcagggtgagctgcagcagatgtcaggccccaagacctcccggaccctgaggaccaagaagctcttccacgaaatttacctcttcctgttcaacgacctgctggtgatctgccggcagattccaggagacaagtaccaggtatttgactcagctccgcggggactgctgcgtgtggaggagctggaggaccagggccagacgctggccaacgtgttcatcctgcggctgctggagaacgcagatgaccgggaggccacctacatgctaaaggcgtcctctcagagtgagatgaagcgttggatgacctcactggcccccaacaggaggaccaagtttgtttcgttcacatcccggctgctggactgcccccaggtccagtgcgtgcacccatacgtggctcagcagccagacgagctgacgctggagctcgccgacatcctcaacatcctggacaagactgacgacgggtggatctttggcgagcgtctgcacgaccaggagagaggctggttccccagctccatgactgaggagatcttgaatcccaagatccggtcccagaacctcaaggaatgtttccgtgtccacaagatggatgaccctcagcgcagccagaacaaggaccgcaggaagctgggcagccggaatcggcaatgacccccacccagggggccagcgggagcagggcctgcatgagaccccgacagaaggtggggggggggcctctgggaagcacaggccagcacctccccaggtggcaggatctggcttggggtgcccggccctcatccctgcccacgcagtgagtgctcatgtgtcttggccccttgcttgcaaactggataaagggtgcccaagcctctcctgatgcatttgtaaacaagaaggtttcagcagtattacaccacctccctcatgcctccgagggggtggaagggggtgggcacactccagggccccccatgcccctggcccccagggactggaagaggctcccaacccagagtgtccctgtgggaggcaggcagaaggtgacaattgacacgatttcctgcacgcgtcctcctctaccttggaagcagttagaatctaccaggcacagatgaggccgcccttgcctgacggagcttgatgagcagcccttggtctccggttccaggactgagagcccagctgcctctgcccacccttccccaggcctctgccagcctctggctgcacggtcaggccctgccccatggcaggcctgccagagcttggctggggacccctcccgcctctggctccctgatgggctggatgtaacttgtgtcttctagccccttaaggagcccaggtgttttaaggaatgaattggtcactgcatcttgtatcgattatggttctgagaaaagcaaatatcacttttggctgcattaaaagaagcatcatatataaaataaagaagatgaaggtctaaaatttat

SEQ ID NO: 289475 - DNA, 2606 bp, Homo sapiens
tcggaaagcgacgcgcgcgactcggcggcgggacacctgcccggcagtgagtcgtcctccaccccgggaaatggggccacgcccgaggagtggccggccctggccgacagccccaccacgctcaccgaggccctgcggatgatccaccccattcccgccgactcctggagaaacctcattgaacaaatagggctcctgtatcaggaataccgagataaatcgactctccaagaaatcgaaaccaggaggcaacaggatgcagaaatagaagacaataccaatgggtccccggccagtgaggacaccccggaggaggaagaagaagaggaggaggaggaggagccggccagcccaccagagaggaagactctgccccagatctgcctgctcagtaacccccactcaaggttcaacctctggcaggatcttcccgagatccggagcagcggggtgcttgagatcctacagcctgaggagattaagctgcaggaggccatgttcgagctggtcacttccgaggcgtcctactacaagagtctgaacctgctcgtgtcccacttcatggagaacgagcggataaggaagatcctgcacccgtccgaggcgcacatcctcttctccaacgtcctggacgtgctggctgtcagtgagcggttcctcctggagctggagcaccggatggaggagaacatcgtcatctctgacgtgtgtgacatcgtgtaccgttatgcggccgaccacttctctgtctacatcacctacgtcagcaatcagacctaccaggagcggacctataagcagctgctccaggagaaggcagctttccgggagctgatcgcgcagctagagctcgaccccaagtgcagggggctgcccttctcctccttcctcatcctgcctttccagaggatcacacgcctcaagctgttggtccagaacatcctgaagagggtagaagagaggtctgagcgggagtgcactgctttggatgctcacaaggagctggaaatggtggtgaaggcatgcaacgagggcgtcaggaaaatgagccgcacggaacagatgatcagcattcagaagaagatggagttcaagatcaagtcggtgcccatcatctcccactcccgctggctgctgaagcagggtgagctgcagcagatgtcaggccccaagacctcccggaccctgaggaccaagaagctcttccacgaaatttacctcttcctgttcaacgacctgctggtgatctgccggcagattccaggagacaagtaccaggtatttgactcagctccgcggggactgctgcgtgtggaggagctggaggaccagggccagacgctggccaacgtgttcatcctgcggctgctggagaacgcagatgaccgggaggccacctacatgctaaaggcgtcctctcagagtgagatgaagcgttggatgacctcactggcccccaacaggaggaccaagtttgtttcgttcacatcccggctgctggactgcccccaggtccagtgcgtgcacccatacgtggctcagcagccagacgagctgacgctggagctcgccgacatcctcaacatcctggacaagactgacgacgggtggatctttggcgagcgtctgcacgaccaggagagaggctggttccccagctccatgactgaggagatcttgaatcccaagatccggtcccagaacctcaaggaatgtttccgtgtccacaagatggatgaccctcagcgcagccagaacaaggaccgcaggaagctgggcagccggaatcggcaatgacccccacccagggggccagcgggagcagggcctgcatgagaccccgacagaaggtggggggggggcctctgggaagcacaggccagcacctccccaggtggcaggatctggcttggggtgcccggccctcatccctgcccacgcagtgagtgctcatgtgtcttggccccttgcttgcaaactggataaagggtgcccaagcctctcctgatgcatttgtaaacaagaaggtttcagcagtattacaccacctccctcatgcctccgagggggtggaagggggtgggcacactccagggccccccatgcccctggcccccagggactggaagaggctcccaacccagagtgtccctgtgggaggcaggcagaaggtgacaattgacacgatttcctgcacgcgtcctcctctaccttggaagcagttagaatctaccaggcacagatgaggccgcccttgcctgacggagcttgatgagcagcccttggtctccggttccaggactgagagcccagctgcctctgcccacccttccccaggcctctgccagcctctggctgcacggtcaggccctgccccatggcaggcctgccagagcttggctggggacccctcccgcctctggctccctgatgggctggatgtaacttgtgtcttctagccccttaaggagcccaggtgttttaaggaatgaattggtcactgcatcttgtatcgattatggttctgagaaaagcaaatatcacttttggctgcattaaaagaagcatcatatataaaataaagaagatgaaggtctaaaatttat

SEQ ID NO: 289476 - DNA, 2596 bp, Homo sapiens
gcgtcgctttccgaggtgggacacctgcccggacagatgagtcgtcctccaccccgggaaatggggccacgcccgaggagtggccggccctggccgacagccccaccacgctcaccgaggccctgcggatgatccaccccattcccgccgactcctggagaaacctcattgaacaaatagggctcctgtatcaggaataccgagataaatcgactctccaagaaatcgaaaccaggaggcaacaggatgcagaaatagaagacaataccaatgggtccccggccagtgaggacaccccggaggaggaagaagaagaggaggaggaggaggagccggccagcccaccagagaggaagactctgccccagatctgcctgctcagtaacccccactcaaggttcaacctctggcaggatcttcccgagatccggagcagcggggtgcttgagatcctacagcctgaggagattaagctgcaggaggccatgttcgagctggtcacttccgaggcgtcctactacaagagtctgaacctgctcgtgtcccacttcatggagaacgagcggataaggaagatcctgcacccgtccgaggcgcacatcctcttctccaacgtcctggacgtgctggctgtcagtgagcggttcctcctggagctggagcaccggatggaggagaacatcgtcatctctgacgtgtgtgacatcgtgtaccgttatgcggccgaccacttctctgtctacatcacctacgtcagcaatcagacctaccaggagcggacctataagcagctgctccaggagaaggcagctttccgggagctgatcgcgcagctagagctcgaccccaagtgcagggggctgcccttctcctccttcctcatcctgcctttccagaggatcacacgcctcaagctgttggtccagaacatcctgaagagggtagaagagaggtctgagcgggagtgcactgctttggatgctcacaaggagctggaaatggtggtgaaggcatgcaacgagggcgtcaggaaaatgagccgcacggaacagatgatcagcattcagaagaagatggagttcaagatcaagtcggtgcccatcatctcccactcccgctggctgctgaagcagggtgagctgcagcagatgtcaggccccaagacctcccggaccctgaggaccaagaagctcttccacgaaatttacctcttcctgttcaacgacctgctggtgatctgccggcagattccaggagacaagtaccaggtatttgactcagctccgcggggactgctgcgtgtggaggagctggaggaccagggccagacgctggccaacgtgttcatcctgcggctgctggagaacgcagatgaccgggaggccacctacatgctaaaggcgtcctctcagagtgagatgaagcgttggatgacctcactggcccccaacaggaggaccaagtttgtttcgttcacatcccggctgctggactgcccccaggtccagtgcgtgcacccatacgtggctcagcagccagacgagctgacgctggagctcgccgacatcctcaacatcctggacaagactgacgacgggtggatctttggcgagcgtctgcacgaccaggagagaggctggttccccagctccatgactgaggagatcttgaatcccaagatccggtcccagaacctcaaggaatgtttccgtgtccacaagatggatgaccctcagcgcagccagaacaaggaccgcaggaagctgggcagccggaatcggcaatgacccccacccagggggccagcgggagcagggcctgcatgagaccccgacagaaggtggggggggggcctctgggaagcacaggccagcacctccccaggtggcaggatctggcttggggtgcccggccctcatccctgcccacgcagtgagtgctcatgtgtcttggccccttgcttgcaaactggataaagggtgcccaagcctctcctgatgcatttgtaaacaagaaggtttcagcagtattacaccacctccctcatgcctccgagggggtggaagggggtgggcacactccagggccccccatgcccctggcccccagggactggaagaggctcccaacccagagtgtccctgtgggaggcaggcagaaggtgacaattgacacgatttcctgcacgcgtcctcctctaccttggaagcagttagaatctaccaggcacagatgaggccgcccttgcctgacggagcttgatgagcagcccttggtctccggttccaggactgagagcccagctgcctctgcccacccttccccaggcctctgccagcctctggctgcacggtcaggccctgccccatggcaggcctgccagagcttggctggggacccctcccgcctctggctccctgatgggctggatgtaacttgtgtcttctagccccttaaggagcccaggtgttttaaggaatgaattggtcactgcatcttgtatcgattatggttctgagaaaagcaaatatcacttttggctgcattaaaagaagcatcatatataaaataaagaagatgaaggtctaaaatttat

SEQ ID NO: 289477 - DNA, 1702 bp, Homo sapiens
aaccgcttgtgcaaaggccccaagactgcaagaacatcctgaagagggtagaagagaggtctgagcgggagtgcactgctttggatgctcacaaggagctggaaatggtggtgaaggcatgcaacgagggcgtcaggaaaatgagccgcacggaacagatgatcagcattcagaagaagatggagttcaagatcaagtcggtgcccatcatctcccactcccgctggctgctgaagcagggtgagctgcagcagatgtcaggccccaagacctcccggaccctgaggaccaagaagctcttccacgaaatttacctcttcctgttcaacgacctgctggtgatctgccggcagattccaggagacaagtaccaggtatttgactcagctccgcggggactgctgcgtgtggaggagctggaggaccagggccagacgctggccaacgtgttcatcctgcggctgctggagaacgcagatgaccgggaggccacctacatgctaaaggcgtcctctcagagtgagatgaagcgttggatgacctcactggcccccaacaggaggaccaagtttgtttcgttcacatcccggctgctggactgcccccaggtccagtgcgtgcacccatacgtggctcagcagccagacgagctgacgctggagctcgccgacatcctcaacatcctggacaagactgacgacgggtggatctttggcgagcgtctgcacgaccaggagagaggctggttccccagctccatgactgaggagatcttgaatcccaagatccggtcccagaacctcaaggaatgtttccgtgtccacaagatggatgaccctcagcgcagccagaacaaggaccgcaggaagctgggcagccggaatcggcaatgacccccacccagggggccagcgggagcagggcctgcatgagaccccgacagaaggtggggggggggcctctgggaagcacaggccagcacctccccaggtggcaggatctggcttggggtgcccggccctcatccctgcccacgcagtgagtgctcatgtgtcttggccccttgcttgcaaactggataaagggtgcccaagcctctcctgatgcatttgtaaacaagaaggtttcagcagtattacaccacctccctcatgcctccgagggggtggaagggggtgggcacactccagggccccccatgcccctggcccccagggactggaagaggctcccaacccagagtgtccctgtgggaggcaggcagaaggtgacaattgacacgatttcctgcacgcgtcctcctctaccttggaagcagttagaatctaccaggcacagatgaggccgcccttgcctgacggagcttgatgagcagcccttggtctccggttccaggactgagagcccagctgcctctgcccacccttccccaggcctctgccagcctctggctgcacggtcaggccctgccccatggcaggcctgccagagcttggctggggacccctcccgcctctggctccctgatgggctggatgtaacttgtgtcttctagccccttaaggagcccaggtgttttaaggaatgaattggtcactgcatcttgtatcgattatggttctgagaaaagcaaatatcacttttggctgcattaaaagaagcatcatatataaaataaagaagatgaaggtctaaaatttat

SEQ ID NO: 289478 - DNA, 1242 bp, Homo sapiens
caggacgaagtttttggctgtgggctctctgggacagagtggagcgcctgtggatttagccggggacacaccatcctgctcgcaggtgcctggacaggacaggggacgagggaggaacactctctgaggaagcccaactcctatgagctcctctctggcagcactcaaaccagtgaagcttgggaaagtcattgacctccagtcgttctgctgagaaacatctggctctatttccatggagaccagggaatctgaagatttggaaaagacccggaggaaatcagcaagtgatcaatggaacactgataatgaaccagccaaggtgaaacctgagttactcccagaaaaagaggagacttctcaagctgaccaggatatccaagacaaagagcctcattgccacatcccaattaagagaaattccatcttcaatcgctccataagacgcaaaagcaaagccaaggccagagacaaccccgaacggaacgccagctgcctggcagattcacaggacaatggaaaatctgtaaatgagcccctgaccttgaatatcccctggagcagaacgcctccttgcagaacagcaatgcagacagacccaggagcccaggaaatgagtgagtcgtcctccaccccgggaaatggggccacgcccgaggagtggccggccctggccgacagccccaccacgctcaccgaggccctgcggatgatccaccccattcccgccgactcctggagaaacctcattgaacaaatagggctcctgtatcaggaataccgagataaatcgactctccaagaaatcgaaaccaggaggcaacaggatgcagaaatagaagacaataccaatgggtccccggccagtgaggacaccccggaggaggaagaagaagaggaggaggaggaggagccggccagcccaccagagaggaagactctgccccagatctgcctgctcagtaacccccactcaaggttcaacctctggcaggatcttcccgagatccggagcagcggggtgcttgagatcctacagcctgaggagattaagctgcaggaggtaacaggcgccgaggggcgggggctcccccacagcacaccggggtggccctcactgctgggggtgaggcttcctctggggggtgaggttccctggctggttcaccagaggaatcgctggcagggttgtccatctagaacatgcagaaaaataaacatggtttcacaggcagcaagaga

SEQ ID NO: 289479 - DNA, 542 bp, Homo sapiens
gtccggctggctagcagccgcctgtgcgcacgcccctcgctagccagccgaggtgaatccttgcttaaaaataaccagcccctgtcctcctccctctctggcagtgagtcgtcctccaccccgggaaatggggccacgcccgaggagtggccggccctggccgacagccccaccacgctcaccgaggccctgcggatgatccaccccattcccgccgactcctggagaaacctcattgaacaaataggtgggtgtctccgcagtaaccgggttttatttgggaaacgcgggtccctggaggactctgagggtcctcctgctcatgggatgccgttgtgtttcatacgaaggactgcgtctgacatgggtaaggaaagcttttgacatgtttggctctaaatggttccgcaggcaaaactgctgcattttaatagcgctgcacaagtgggctttagcaaacatttctgtcctgctctctgcggagaggtctatttgcccagctcttgtctggtgggagggctctctgaccccttatcacttct

SEQ ID NO: 289480 - DNA, 1480 bp, Homo sapiens
gacagagggagactctgtctcaaaaagaaaacacaagttcagctgccttatggagaagctgctaaccctgaccatgtgaaccctgtcctgaccaccccaaaccacacccagggccatatcccaggtacaaaaagttccttctgaagtttaaactaaggccccctcacagcctttatgcatgtatttcttcccagaactcctggctatgttaataacgttttctatggaaacaaatcctcctcttcctcagacgagcccttctccagttgctgtgggagttttcctattctaggcagggctcagctgcgggcttggtgggagtgtgcaggtgggtagtgcggtggtggggatgtgcccgtgcctcttgtccctcagactgcccccaggtccagtgcgtgcacccatacgtggctcagcagccagacgagctgacgctggagctcgccgacatcctcaacatcctggacaagactgacgacgggtggatctttggcgagcgtctgcacgaccaggagagaggctggttccccagctccatgactgaggagatcttgaatcccaagatccggtcccagaacctcaaggaatgtttccgtgtccacaagatggatgaccctcagcgcagccagaacaaggaccgcaggaagctgggcagccggaatcggcaatgacccccacccagggggccagcgggagcagggcctgcatgagaccccgacagaaggtggggggggggcctctgggaagcacaggccagcacctccccaggtggcaggatctggcttggggtgcccggccctcatccctgcccacgcagtgagtgctcatgtgtcttggccccttgcttgcaaactggataaagggtgcccaagcctctcctgatgcatttgtaaacaagaaggtttcagcagtattacaccacctccctcatgcctccgagggggtggaagggggtgggcacactccagggccccccatgcccctggcccccagggactggaagaggctcccaacccagagtgtccctgtgggaggcaggcagaaggtgacaattgacacgatttcctgcacgcgtcctcctctaccttggaagcagttagaatctaccaggcacagatgaggccgcccttgcctgacggagcttgatgagcagcccttggtctccggttccaggactgagagcccagctgcctctgcccacccttccccaggcctctgccagcctctggctgcacggtcaggccctgccccatggcaggcctgccagagcttggctggggacccctcccgcctctggctccctgatgggctggatgtaacttgtgtcttctagccccttaaggagcccaggtgttttaaggaatgaattggtcactgcatcttgtatcgattatggttctgagaaaagcaaatatcacttttggctgcattaaaagaagcatcatatataaaataaagaagatgaaggtctaaaatttat

SEQ ID NO: 289481 - DNA, 781 bp, Homo sapiens
caggacgaagtttttggctgtgggctctctgggacagagtggagcgcctgtggatttagccggggacacaccatcctgctcgcaggtgcctggacaggacaggggacgagggaggaacactctctgaggaagcccaactcctatgagctcctctctggcagcactcaaaccagtgaagcttgggaaagtcattgacctccagtcgttctgctgagaaacatctggctctatttccatggagaccagggaatctgaagatttggaaaagacccggaggaaatcagcaagtgatcaatggaacactgataatgaaccagccaaggtgaaacctgagttactcccagaaaaagaggagacttctcaagctgaccaggatatccaagacaaagagcctcattgccacatcccaattaagagaaattccatcttcaatcgctccataagacgcaaaagcaaagccaaggccagagacaaccccgaacggaacgccagctgcctggcagattcacaggacaatggaaaatctgtaaatgagcccctgaccttgaatatcccctggagcagaacgcctccttgcagaacagcaatgcagacagacccaggagcccaggaaatgaggtaagagatggcagatcatgaggaatgctggtctgggaaagatgcatcagaggtcattgctgcaaagacttgacagggttacgagggtgtcatgttaaaaaaaataataataacttttggttgcccgtgctaaaaaaataaataaataaaaactccataatta

SEQ ID NO: 289482 - DNA, 2144 bp, Homo sapiens
  misc_feature (354)..(354): n is a, c, g, or t
  misc_feature (491)..(491): n is a, c, g, or t
  misc_feature (901)..(902): n is a, c, g, or t
  misc_feature (904)..(905): n is a, c, g, or t
  misc_feature (908)..(908): n is a, c, g, or t
  misc_feature (912)..(912): n is a, c, g, or t
  misc_feature (915)..(915): n is a, c, g, or t
  misc_feature (920)..(920): n is a, c, g, or t
  misc_feature (922)..(922): n is a, c, g, or t
  misc_feature (924)..(925): n is a, c, g, or t
  misc_feature (927)..(928): n is a, c, g, or t
  misc_feature (930)..(930): n is a, c, g, or t
  misc_feature (1998)..(1998): n is a, c, g, or t
ggcaattagtagtcttctttcattgagaagaattggtatgtcatttaaaaatttaattctagcttcctaaactaaaaaaactccagaaagctcatgcctcattctaatctcagaaagcactgtctaggcttggagatctccccagctgtctaagtagaaagcagaatgaggacttcagtgagcctaatccctgctctgtgttccccatccttccccgacccctagcccccaaggactgggatcaatattggaaacctgtgctttagttcttccacctctgctgctgctatgctgtgtgacctcaggtgagttcctcctctctctggttctcagttttctcacttatgaataganggggttgaaagattcatgctgtagcgggtctgtctcaggtctcagctctgaaggtcattgagtgtcctgttgtcctcagtgatacatgtgagtgaccacccagacggtgcctgaggaagtggtcctttccttgcggnccccatcaatagtctgcctctggattctgacaggggaagctgaattgatggtctctgagtcacagttcctcatgaaaagaggtgcttaacaggagacactcggggactgaggcttcagggacccacccccccccgccaccccgccccacctccactgttctggtgcccctgaggccttcagaagttgttcctatttatccctacgacttctgagggctacgttgctatagcaacctgggtctgctgatctgtgtaaaaaacttatcaattagctgtctggagagtccatttaaggggtaacagagaagcaattactccttatagaggaagcgcaaacagtccccatttcagagcctctcagggagagtctgagaatggcaggtccaagtcactcattttagggacggggnnannttngccnagntcctntnanntnntncctttccttaagaccaagctccagcctcttcaaaaacagcacatctctctctgacacagccactctccctttatcctgtgtattccttcacagctcccctccccatctgcaaccacactctgattgttacgactttgctcgttcccctctctggaataaaaatggtaaaactctgtctcttattcatgaccatttatccacaacctagaactgctcctggcaatgaagaggctcgccacgcctcttgctgaatgagtggatggatggctggatgctaaaagagattcccactaggttctgagaatgaggcatcccagagtaacatcctgtttccttctccgttacctcgacacctgtaggactgggccgactgggagcaccatgtggagaacagagacaaactggagtgccttggggaggaaggaggagagcacagtctctgagtcagccatgaggcagagcaaatacaagtggtcatgcaggaagaagagtgctggttctgcggggtcctaagagggagatgtacggggggtgtgctttgttcaatatgacaacactaccaatggtttagttcttactgcatgagctttacatgtggtgtatctttctggccttgaaactatcctgcagggtaaaacaactgtcccccatcataagaaatgaaggtaacagtgcatgttctcccctcagcctgggacagcttcaccaggcaaattcctgctcattctccaggccatctccccagagaagtccttcctcaacctcaagaacacatcgagttctctgtcttctgttcccacaggaccctgcagtcacccctcctagctcttgctgtaacagtagacacatgatttcggtgtaaatatggacaggacaggaggcagggctggacactgctacatgccccagaacagtgcctgtcctatgatatccaaggaataattatctaatgagtgagatggagcagggaaccctcttaggggccctgcagcaccgcccccgccaagcatggaaataaaatcttgagtttcttcaagggaaattccaggcacctagctagccctgagnagtaaataagcaagctgataagcaagaaggtaatagtaactaacttaaaacaacagccaaggaagctagaatcatgggatgtttgattccctacagaaattaaagataacatcttcacatatgaaccagagttctttttcagaaac

SEQ ID NO: 289483 - DNA, 1006 bp, Homo sapiens
  misc_feature (860)..(860): n is a, c, g, or t
atgccttcctggggtgaggacgctgccaggctcccagctctggagtcaccgccccgtgctaggggcaagagcccccaaggactgggatcaatattggaaacctgtgctttagttcttccacctctgctgctgctatgctgtgtgacctcaggactgggccgactgggagcaccatgtggagaacagagacaaactggagtgccttggggaggaaggaggagagcacagtctctgagtcagccatgaggcagagcaaatacaagtggtcatgcaggaagaagagtgctggttctgcggggtcctaagagggagatgtacggggggtgtgctttgttcaatatgacaacactaccaatggtttagttcttactgcatgagctttacatgtggtgtatctttctggccttgaaactatcctgcagggtaaaacaactgtcccccatcataagaaatgaaggtaacagtgcatgttctcccctcagcctgggacagcttcaccaggcaaattcctgctcattctccaggccatctccccagagaagtccttcctcaacctcaagaacacatcgagttctctgtcttctgttcccacaggaccctgcagtcacccctcctagctcttgctgtaacagtagacacatgatttcggtgtaaatatggacaggacaggaggcagggctggacactgctacatgccccagaacagtgcctgtcctatgatatccaaggaataattatctaatgagtgagatggagcagggaaccctcttaggggccctgcagcaccgcccccgccaagcatggaaataaaatcttgagtttcttcaagggaaattccaggcacctagctagccctgagnagtaaataagcaagctgataagcaagaaggtaatagtaactaacttaaaacaacagccaaggaagctagaatcatgggatgtttgattccctacagaaattaaagataacatcttcacatatgaaccagagttctttttcagaaac

SEQ ID NO: 289484 - DNA, 754 bp, Homo sapiens
tggtttcgacagcctagaaggaacaaaacggcatttccgggaagatggcggcgcacaagtcaggtccggcacatgtttccgcggagcggacccagcaatgacggtaaggggctcccttcccccgaacggtggtagtcggagcccgggcttattagcaaacgtgagaggagcagagtatttttacccaagtggcactggggtaggagggctggaatttagccctcaagagcaaggaagcctagggaaagggcagccggctctttaggactgctgtaagacgagtgaacctggggccacttctgaaaacacagattgactgtagaggggacagtgcccgaagtgtgatcacaggtttcagaaagactggggcgcacagcttctacccagttatccactgaaaatccggtaaagccattcctaactatgccattcagttcaacaaataacgactgaatgtattcttgagttctggcgccgcgttacgtgctctggagtggcggaataaagccggtctcttaacttccagggcatgtagttttcaattattgcgacaagggttaggctgtgtgtggtcttacaggagaaagcacaaagagctgtaagagactgaagagtgtagtgatgaagaacatcagtttttggccgggtgccttggctcacgcctgtaatcccagcactttggtaggtcgagtcaggtggatcaccagaggtcaggagttcgagaccagcccctggccaatatggggaaacccta

SEQ ID NO: 289485 - DNA, 2348 bp, Homo sapiens
tggtttcgacagcctagaaggaacaaaacggcatttccgggaagatggcggcgcacaagtcaggtccggcacatgtttccgcggagcggacccagcaatgacggatgatatcacctcttcttctctggtgagagtctgaggatagagacttttttctcaccatgaatgtcaccccagaggtcaagagtcgtgggatgaagtttgctgaggagcagctgctaaagcatggatggactcaaggcaaaggcctcggccggaaggagaatggtatcactcaggctctcagggtgacactgaagcaagacactcatggggtaggacatgaccctgccaaggagttcacaaaccactggtggaatgagctcttcaacaagactgcggccaacttggtagtggaaactgggcaggatggagtacagataaggagcctttctaaggagaccacccgttataatcatcccaagcccaacttgctgtatcagaagtttgtgaagatggctacattgacttcaggtggagagaagccaaacaaagacttggagagctgcagtgatgacgacaaccaggggtccaagtccccaaagattctgactgatgagatgctgctccaagcctgtgaggggcgaacagcacacaaggctgcccgtcttgggatcacaatgaaggccaagcttgctcgcctagaggcccaggagcaggccttcctggctcgtctcaaaggccaggaccctggggcccctcaactgcagtcagagagcaagccccccaaaaaaaagaaaaagaaaaggaggcagaaagaggaggaagaagctacagcatctgaaaggaatgatgcagatgagaagcacccagaacatgctgagcagaacatcagaaaaagcaagaagaagaaaaggcgacatcaagaaggaaaggtctcagatgaaagagagggtacaactaaagggaatgagaaggaggacgctgcaggaacaagtgggcttggggaattgaatagcagagagcaaaccaatcagtccctcaggaaagggaagaaaaagaagaggtggcaccatgaagaggagaagatgggggtcttggaggaaggaggaaaaggcaaggaggctgcaggcagtgtcaggacagaggaggtagagagcagggcatatgctgacccatgcagccgaagaaagaagaggcagcaacaggaggaggaggacttgaacctagaagatagaggtgaggaaactgttttaggtggtggaaccagggaagcagagagcagagcatgcagtgatggaagaagcaggaaaagcaagaagaaaagacagcagcatcaagaggaggaggacatcttggatgtaagggatgagaaggatagcggggctagggaagcagagagcagagcacacactggctcaagcagcagaggtaagaggaagaggcagcagcatcccaagaaggaaagagctggagtcagcactgtccagaaagccaaaaagaaacagaagaagagagactaaaggtctggtaaaggtagggctcaattgattgattttcaggagttgaagcctcaaagaccagggttgatgcaggtctgcaggtcttctgcacccccctcaatgaggagtccctcccagaaaggaaactgatctctgggatgtcagctgctgagaggagcaagcggtagtaccaccccttagttgagggagtcagcacagtcctttctgcagcttctaacccaggaccatgaactcaggtgcctagagaagccaggcagctaaaggacaaggaatgctgggggctgtgggaacaggaatgcagataccctttgaaggagcattcctgctaaaagaagctgaaaatgtagacctatgtgaagtgctctgatttctaaatattgtgaaggttaagaaaaacataaatttaggtctatgggctagatttagcccacagttgccagtttctagcgctaccaaatgaatgaataaacatgagcttgcgctcctagcctagagataaaaaaaaaaaaaaaaaaaaaaaattttaaaaaatttagaaaaaaaaaagaaaaaaaaaaaaaaagaaaaaagaaaaagaaagaagaaacagagccaaaaaaaaacagaacaaaataagaaaaggaggaggcaaaaaaagacacgggagagaagaaagagagagacacaagaggacagaagagcaacaagaggggaagcataagagaagcacgacgagacataaacaacacggggccaaaagcacaggagaaataagagaacaaccactaggcggcaaacggacacaccacggagagccggagagaaaagggcaagaagcaaaagatgatcgcaagacgcggagtatac

SEQ ID NO: 289486 - DNA, 2995 bp, Homo sapiens
tttttgaaaaacatgcttgtggagaccacggaattgatttagggagatactcagtgggggagcaaggcggattctgcagacaagctgcctgggcttgaattctacatgttacctgtgtgaccttgaagtcacttaacctttttaggccttactttactcatttgtaaaataggctaatatttccctgaatgggctgggaagattaaatgaaataatctttgtaaagtcttagcacatcctggcatgtggtgagcacaccataaacttaggtatcagaattgacaccattcctccttgacttctctatatgctctttctgtagccagatagggagctccccaaagaccaggccacctccttcctctgtctctggctcaggaaagagaattcttttttctttctttttaattttttttttttctagaggcagggtttcactacgttgcccacactggtctggaactcctgggctcaagtgattcttctaccttggccttccaaagtgctgggattacaaatgtgaaccactgtgcctggccgctttattctttttatgagagagggtcttgctatactgcccaggctggactcaagcaatcccgcctcagcctcccatgtagctgggactacaggtgtgtgccactgcacccaactagcagagaattcttaacaagcagtcaggatggaactgatggctgtttgggcactttctactttcttcttaaaaggatgatatcacctcttcttctctggtgagagtctgaggatagagacttttttctcaccatgaatgtcaccccagaggtcaagagtcgtgggatgaagtttgctgaggagcagctgctaaagcatggatggactcaaggcaaaggcctcggccggaaggagaatggtatcactcaggctctcagggtgacactgaagcaagacactcatggggtaggacatgaccctgccaaggagttcacaaaccactggtggaatgagctcttcaacaagactgcggccaacttggtagtggaaactgggcaggatggagtacagataaggagcctttctaaggagaccacccgttataatcatcccaagcccaacttgctgtatcagaagtttgtgaagatggctacattgacttcaggtggagagaagccaaacaaagacttggagagctgcagtgatgacgacaaccaggggtccaagtccccaaagattctgactgatgagatgctgctccaagcctgtgaggggcgaacagcacacaaggctgcccgtcttgggatcacaatgaaggccaagcttgctcgcctagaggcccaggagcaggccttcctggctcgtctcaaaggccaggaccctggggcccctcaactgcagtcagagagcaagccccccaaaaaaaagaaaaagaaaaggaggcagaaagaggaggaagaagctacagcatctgaaaggaatgatgcagatgagaagcacccagaacatgctgagcagaacatcagaaaaagcaagaagaagaaaaggcgacatcaagaaggaaaggtctcagatgaaagagagggtacaactaaagggaatgagaaggaggacgctgcaggaacaagtgggcttggggaattgaatagcagagagcaaaccaatcagtccctcaggaaagggaagaaaaagaagaggtggcaccatgaagaggagaagatgggggtcttggaggaaggaggaaaaggcaaggaggctgcaggcagtgtcaggacagaggaggtagagagcagggcatatgctgacccatgcagccgaagaaagaagaggcagcaacaggaggaggaggacttgaacctagaagatagaggtgaggaaactgttttaggtggtggaaccagggaagcagagagcagagcatgcagtgatggaagaagcaggaaaagcaagaagaaaagacagcagcatcaagaggaggaggacatcttggatgtaagggatgagaaggatagcggggctagggaagcagagagcagagcacacactggctcaagcagcagaggtaagaggaagaggcagcagcatcccaagaaggaaagagctggagtcagcactgtccagaaagccaaaaagaaacagaagaagagagactaaaggtctggtaaaggtagggctcaattgattgattttcaggagttgaagcctcaaagaccagggttgatgcaggtctgcaggtcttctgcacccccctcaatgaggagtccctcccagaaaggaaactgatctctgggatgtcagctgctgagaggagcaagcggtagtaccaccccttagttgagggagtcagcacagtcctttctgcagcttctaacccaggaccatgaactcaggtgcctagagaagccaggcagctaaaggacaaggaatgctgggggctgtgggaacaggaatgcagataccctttgaaggagcattcctgctaaaagaagctgaaaatgtagacctatgtgaagtgctctgatttctaaatattgtgaaggttaagaaaaacataaatttaggtctatgggctagatttagcccacagttgccagtttctagcgctaccaaatgaatgaataaacatgagcttgcgctcctagcctagagataaatcctgactggcatctctgttcccagcctgggaaggtcctgaatacaaattagaagatattccttggaggcctttgaagaaattccttcggttaacctctttgtagtcttgctacactgataagtagaagtagctccctgtctgtgtcccaaatgaataagaattgtgtaaaggacagcacaactcacttggcatctaacagtccattttcattgtttccaaataccatagcaacctcttgccctttgtgttacccctagagagatggcacccaatccccagggttggtctctgacttccaccattcactgacttttattgccagaggagctcccaggaatccacagttctggaagagaggggctctaa

SEQ ID NO: 289487 - DNA, 2493 bp, Homo sapiens
tggtttcgacagcctagaaggaacaaaacggcatttccgggaagatggcggcgcacaagtcaggtccggcacatgtttccgcggagcggacccagcaatgacggatgatatcacctcttcttctctggtgagagtctgaggatagagacttttttctcaccatgaatgtcaccccagaggtcaagagtcgtgggatgaagtttgctgaggagcagctgctaaagcatggatggactcaaggcaaaggcctcggccggaaggagaatggtatcactcaggctctcagggtgacactgaagcaagacactcatggggtaggacatgaccctgccaaggagttcacaaaccactggtggaatgagctcttcaacaagactgcggccaacttggtagtggaaactgggcaggatggagtacagataaggagcctttctaaggagaccacccgttataatcatcccaagcccaacttgctgtatcagaagtttgtgaagtgggatcctgtgaccagccttgctgttgcttacttagactgcccagaccctcagcaggaattgagatcttcaggttccgtggatcctgccatctgttaagggagcagcaatagggcgtgggagatggctacattgacttcaggtggagagaagccaaacaaagacttggagagctgcagtgatgacgacaaccaggggtccaagtccccaaagattctgactgatgagatgctgctccaagcctgtgaggggcgaacagcacacaaggctgcccgtcttgggatcacaatgaaggccaagcttgctcgcctagaggcccaggagcaggccttcctggctcgtctcaaaggccaggaccctggggcccctcaactgcagtcagagagcaagccccccaaaaaaaagaaaaagaaaaggaggcagaaagaggaggaagaagctacagcatctgaaaggaatgatgcagatgagaagcacccagaacatgctgagcagaacatcagaaaaagcaagaagaagaaaaggcgacatcaagaaggaaaggtctcagatgaaagagagggtacaactaaagggaatgagaaggaggacgctgcaggaacaagtgggcttggggaattgaatagcagagagcaaaccaatcagtccctcaggaaagggaagaaaaagaagaggtggcaccatgaagaggagaagatgggggtcttggaggaaggaggaaaaggcaaggaggctgcaggcagtgtcaggacagaggaggtagagagcagggcatatgctgacccatgcagccgaagaaagaagaggcagcaacaggaggaggaggacttgaacctagaagatagaggtgaggaaactgttttaggtggtggaaccagggaagcagagagcagagcatgcagtgatggaagaagcaggaaaagcaagaagaaaagacagcagcatcaagaggaggaggacatcttggatgtaagggatgagaaggatagcggggctagggaagcagagagcagagcacacactggctcaagcagcagaggtaagaggaagaggcagcagcatcccaagaaggaaagagctggagtcagcactgtccagaaagccaaaaagaaacagaagaagagagactaaaggtctggtaaaggtagggctcaattgattgattttcaggagttgaagcctcaaagaccagggttgatgcaggtctgcaggtcttctgcacccccctcaatgaggagtccctcccagaaaggaaactgatctctgggatgtcagctgctgagaggagcaagcggtagtaccaccccttagttgagggagtcagcacagtcctttctgcagcttctaacccaggaccatgaactcaggtgcctagagaagccaggcagctaaaggacaaggaatgctgggggctgtgggaacaggaatgcagataccctttgaaggagcattcctgctaaaagaagctgaaaatgtagacctatgtgaagtgctctgatttctaaatattgtgaaggttaagaaaaacataaatttaggtctatgggctagatttagcccacagttgccagtttctagcgctaccaaatgaatgaataaacatgagcttgcgctcctagcctagagataaatcctgactggcatctctgttcccagcctgggaaggtcctgaatacaaattagaagatattccttggaggcctttgaagaaattccttcggttaacctctttgtagtcttgctacactgataagtagaagtagctccctgtctgtgtcccaaatgaataagaattgtgtaaaggacagcacaactcacttggcatctaacagtccattttcattgtttccaaataccatagcaacctcttgccctttgtgttacccctagagagatggcacccaatccccagggttggtctctgacttccaccattcactgacttttattgccagaggagctcccaggaatccacagttctggaagagaggggctctaa

SEQ ID NO: 289488 - DNA, 1392 bp, Homo sapiens
tggtttcgacagcctagaaggaacaaaacggcatttccgggaagatggcggcgcacaagtcaggtccggcacatgtttccgcggagcggacccagcaatgacggatgatatcacctcttcttctctggtgagagtctgaggatagagacttttttctcaccatgaatgtcaccccagaggtcaagagtcgtgggatgaagtttgctgaggagcagctgctaaagcatggatggactcaaggcaaaggcctcggccggaaggagaatggtatcactcaggctctcagggtgacactgaagcaagacactcatggggtaggacatgaccctgccaaggagttcacaaaccactggtggaatgagctcttcaacaagactgcggccaacttggtagtggaaactgggcaggatggagtacagataaggagcctttctaaggagaccacccgttataatcatcccaagcccaacttgctgtatcagaagtttgtgaagatggctacattgacttcaggtggagagaagccaaacaaagacttggagagctgcagtgatgacgacaaccaggggtccaagtccccaaagattctgactgatgagatgctgctccaagcctgtgaggggcgaacagcacacaaggctgcccgtcttgggatcacaatgaaggccaagcttgctcgcctagaggcccaggagcaggccttcctggctcgtctcaaaggccaggaccctggggcccctcaactgcagtcagagagcaagccccccaaaaaaaagaaaaagaaaaggaggcagaaagaggaggaagaagctacagcatctgaaaggaatgatgcagatgagaagcacccagaacatgctgagcagaacatcagaaaaagcaagaagaagaaaaggcgacatcaagaaggaaaggtctcagatgaaagagagggtacaactaaagggaatgagaaggaggacgctgcaggaacaagtgggcttggggaattgaatagcagagagcaaaccaatcagtccctcaggaaagggaagaaaaagaagaggtggcaccatgaagaggagaagatgggggtcttggaggaaggaggaaaaggcaaggaggctgcaggcagtgtcaggacagaggaggtagagagcagggcatatgctgacccatgcagccgaagaaagaagaggcagcaacaggaggaggaggacttgaacctagaagatagaggtgaggaaactgttttaggtggtggaaccagggaagcagagagcagagcatgcagtgatggaagaagcaggaaaagcaagaagaaaagacagcagcatcaagaggaggaggacatcttggatgtaagggatgagaaggatagcgggtagctttaagggggtcctctagagcgcc

SEQ ID NO: 289489 - DNA, 2601 bp, Homo sapiens
tggtttcgacagcctagaaggaacaaaacggcatttccgggaagatggcggcgcacaagtcaggtccggcacatgtttccgcggagcggacccagcaatgacggatgatatcacctcttcttctctggtgagagtctgaggatagagacttttttctcaccatgaatgtcaccccagaggtcaagagtcgtgggatgaagtttgctgaggagcagctgctaaagcatggatggactcaaggcaaaggcctcggccggaaggagaatggtatcactcaggctctcagggtgacactgaagcaagacactcatggggtaggacatgaccctgccaaggagttcacaaaccactggtggaatgagctcttcaacaagactgcggccaacttggtagtggaaactgggcaggatggagtacagataaggagcctttctaaggagaccacccgttataatcatcccaagcccaacttgctgtatcagaagtttgtgaagatggctacattgacttcaggtggagagaagccaaacaaagacttggagagctgcagtgatgacgacaaccaggggtccaagtccccaaagattctgactgatgagatgctgctccaagcctgtgaggggcgaacagcacacaagtaagtagtggtcagctccttgagctcccttttctccccacctttgaccatggcctgtgccacctcttggttctttttaccccagggaaatgattcctattacctacccatctattgcctgaagataggcagctccccactcctaccctccaccaactttccctgcaggcttaaggactaggcccatttcccccgataccctcgctttgacttggaccctgtctgtttcagggctgcccgtcttgggatcacaatgaaggccaagcttgctcgcctagaggcccaggagcaggccttcctggctcgtctcaaaggccaggaccctggggcccctcaactgcagtcagagagcaagccccccaaaaaaaagaaaaagaaaaggaggcagaaagaggaggaagaagctacagcatctgaaaggaatgatgcagatgagaagcacccagaacatgctgagcagaacatcagaaaaagcaagaagaagaaaaggcgacatcaagaaggaaaggtctcagatgaaagagagggtacaactaaagggaatgagaaggaggacgctgcaggaacaagtgggcttggggaattgaatagcagagagcaaaccaatcagtccctcaggaaagggaagaaaaagaagaggtggcaccatgaagaggagaagatgggggtcttggaggaaggaggaaaaggcaaggaggctgcaggcagtgtcaggacagaggaggtagagagcagggcatatgctgacccatgcagccgaagaaagaagaggcagcaacaggaggaggaggacttgaacctagaagatagaggtgaggaaactgttttaggtggtggaaccagggaagcagagagcagagcatgcagtgatggaagaagcaggaaaagcaagaagaaaagacagcagcatcaagaggaggaggacatcttggatgtaagggatgagaaggatagcggggctagggaagcagagagcagagcacacactggctcaagcagcagaggtaagaggaagaggcagcagcatcccaagaaggaaagagctggagtcagcactgtccagaaagccaaaaagaaacagaagaagagagactaaaggtctggtaaaggtagggctcaattgattgattttcaggagttgaagcctcaaagaccagggttgatgcaggtctgcaggtcttctgcacccccctcaatgaggagtccctcccagaaaggaaactgatctctgggatgtcagctgctgagaggagcaagcggtagtaccaccccttagttgagggagtcagcacagtcctttctgcagcttctaacccaggaccatgaactcaggtgcctagagaagccaggcagctaaaggacaaggaatgctgggggctgtgggaacaggaatgcagataccctttgaaggagcattcctgctaaaagaagctgaaaatgtagacctatgtgaagtgctctgatttctaaatattgtgaaggttaagaaaaacataaatttaggtctatgggctagatttagcccacagttgccagtttctagcgctaccaaatgaatgaataaacatgagcttgcgctcctagcctagagataaatcctgactggcatctctgttcccagcctgggaaggtcctgaatacaaattagaagatattccttggaggcctttgaagaaattccttcggttaacctctttgtagtcttgctacactgataagtagaagtagctccctgtctgtgtcccaaatgaataagaattgtgtaaaggacagcacaactcacttggcatctaacagtccattttcattgtttccaaataccatagcaacctcttgccctttgtgttacccctagagagatggcacccaatccccagggttggtctctgacttccaccattcactgacttttattgccagaggagctcccaggaatccacagttctggaagagaggggctctaa

SEQ ID NO: 289490 - DNA, 1282 bp, Homo sapiens
tggtttcgacagcctagaaggaacaaaacggcatttccgggaagatggcggcgcacaagtcaggtccggcacatgtttccgcggagcggacccagcaatgacggatgatatcacctcttcttctctggtgagagtctgaggatagagacttttttctcaccatgaatgtcaccccagaggtcaagagtcgtgggatgaagtttgctgaggagcagctgctaaagcatggatggactcaaggcaaaggcctcggccggaaggagaatggtatcactcaggctctcagggtgacactgaagcaagacactcatggggtaggacatgaccctgccaaggagttcacaaaccactggtggaatgagctcttcaacaagactgcggccaacttggtagtggaaactgggcaggatggagtacagataaggagcctttctaaggagaccacccgttataatcatcccaagcccaacttgctgtatcagaagtttgtgaagatggctacattgacttcaggtggagagaagccaaacaaagacttggagagctgcagtgatgacgacaaccaggggtccaagtccccaaagattctgactgatgagatgctgctccaagcctgtgaggggcgaacagcacacaaggctgcccgtcttgggatcacaatgaaggccaagcttgctcgcctagaggcccaggagcaggccttcctggctcgtctcaaaggccaggaccctggggcccctcaactgcagtcagagagcaagccccccaaaaaaaagaaaaagaaaaggaggcagaaagaggaggaagaagctacagcatctgaaaggaatgatgcagatgagaagcacccagaacatgctgagcagaacatcagaaaaagcaagaagaagaaaaggcgacatcaagaaggaaaggtctcagatgaaagagagggtacaactaaagggaatgagaaggaggacgctgcaggaacaagtgggcttggggaattgaatagcagagagcaaaccaatcagtccctcaggaaagggaagaaaaagaagaggtggcaccatgaagaggagaagatgggggtcttggaggaaggaggaaaaggcaaggaggctgcaggcagtgtcaggacagaggaggtagagagcagggcatatgctgacccatgcagccgaagaaagaagaggcagcaacaggaggaggaggacttgaacctagaagatagaggtgaggaaactgttttaggtggtggaaccagggaagcaaaggatttagcgagacagagggcccc

SEQ ID NO: 289491 - DNA, 1242 bp, Homo sapiens
tggtttcgacagcctagaaggaacaaaacggcatttccgggaagatggcggcgcacaagtcaggtccggcacatgtttccgcggagcggacccagcaatgacggatgatatcacctcttcttctctggtgagagtctgaggatagagacttttttctcaccatgaatgtcaccccagaggtcaagagtcgtgggatgaagtttgctgaggagcagctgctaaagcatggatggactcaaggcaaaggcctcggccggaaggagaatggtatcactcaggctctcagggtgacactgaagcaagacactcatggggtaggacatgaccctgccaaggagttcacaaaccactggtggaatgagctcttcaacaagactgcggccaacttggtagtggaaactgggcaggatggagtacagataaggagcctttctaaggagaccacccgttataatcatcccaagcccaacttgctgtatcagaagtttgtgaagatggctacattgacttcaggtggagagaagccaaacaaagacttggagagctgcagtgatgacgacaaccaggggtccaagtccccaaagattctgactgatgagatgctgctccaagcctgtgaggggcgaacagcacacaaggctgcccgtcttgggatcacaatgaaggccaagcttgctcgcctagaggcccaggagcaggccttcctggctcgtctcaaaggccaggaccctggggcccctcaactgcagtcagagagcaagccccccaaaaaaaagaaaaagaaaaggaggcagaaagaggaggaagaagctacagcatctgaaaggaatgatgcagatgagaagcacccagaacatgctgagcagaacatcagaaaaagcaagaagaagaaaaggcgacatcaagaaggaaaggtctcagatgaaagagagggtacaactaaagggaatgagaaggaggacgctgcaggaacaagtgggcttggggaattgaatagcagagagcaaaccaatcagtccctcaggaaagggaagaaaaagaagaggtggcaccatgaagaggagaagatgggggtcttggaggaaggaggaaaaggcaaggaggctgcaggcagtgtcaggacagaggaggtagagagcagggcatatgctgacccatgcagccgaagaaagaagaggcggcgttggatgcagtcagcggcgtgggatgcagtcagcggcgttggatgcagtcgggtaccga

SEQ ID NO: 289492 - DNA, 2724 bp, Homo sapiens
tggtttcgacagcctagaaggaacaaaacggcatttccgggaagatggcggcgcacaagtcaggtccggcacatgtttccgcggagcggacccagcaatgacggatgatatcacctcttcttctctggtgagagtctgaggatagagacttttttctcaccatgaatgtcaccccagaggtcaagagtcgtgggatgaagtttgctgaggagcagctgctaaagcatggatggactcaaggcaaaggcctcggccggaaggagaatggtatcactcaggctctcagggtgacactgaagcaagacactcatggggtaggacatgaccctgccaaggagttcacaaaccactggtggaatgagctcttcaacaagactgcggccaacttggtagtggaaactgggcaggatggagtacagataaggagcctttctaaggagaccacccgttataatcatcccaagcccaacttgctgtatcagaagtttgtgaagtgggatcctgtgaccagccttgctgttgcttacttagactgcccagaccctcagcaggaattgagatcttcaggttccgtggatcctgccatctgttaagggagcagcaatagggcgtgggagatggctacattgacttcaggtggagagaagccaaacaaagacttggagagctgcagtgatgacgacaaccaggggtccaagtccccaaagattctgactgatgagatgctgctccaagcctgtgaggggcgaacagcacacaagtaagtagtggtcagctccttgagctcccttttctccccacctttgaccatggcctgtgccacctcttggttctttttaccccagggaaatgattcctattacctacccatctattgcctgaagataggcagctccccactcctaccctccaccaactttccctgcaggcttaaggactaggcccatttcccccgataccctcgctttgacttggaccctgtctgtttcagggctgcccgtcttgggatcacaatgaaggccaagcttgctcgcctagaggcccaggagcaggccttcctggctcgtctcaaaggccaggaccctggggcccctcaactgcagtcagagagcaagccccccaaaaaaaagaaaaagaaaaggaggcagaaagaggaggaagaagctacagcatctgaaaggaatgatgcagatgagaagcacccagaacatgctgagcagaacatcagaaaaagcaagaagaagaaaaggcgacatcaagaaggaaaggtctcagatgaaagagagggtacaactaaagggaatgagaaggaggacgctgcaggaacaagtgggcttggggaattgaatagcagagagcaaaccaatcagtccctcaggaaagggaagaaaaagaagaggtggcaccatgaagaggagaagatgggggtcttggaggaaggaggaaaaggcaaggaggctgcaggcagtgtcaggacagaggaggtagagagcagggcatatgctgacccatgcagccgaagaaagaagaggcagcaacaggaggaggaggacttgaacctagaagatagaggtgaggaaactgttttaggtggtggaaccagggaagcagagagcagagcatgcagtgatggaagaagcaggaaaagcaagaagaaaagacagcagcatcaagaggaggaggacatcttggatgtaagggatgagaaggatagcggggctagggaagcagagagcagagcacacactggctcaagcagcagaggtaagaggaagaggcagcagcatcccaagaaggaaagagctggagtcagcactgtccagaaagccaaaaagaaacagaagaagagagactaaaggtctggtaaaggtagggctcaattgattgattttcaggagttgaagcctcaaagaccagggttgatgcaggtctgcaggtcttctgcacccccctcaatgaggagtccctcccagaaaggaaactgatctctgggatgtcagctgctgagaggagcaagcggtagtaccaccccttagttgagggagtcagcacagtcctttctgcagcttctaacccaggaccatgaactcaggtgcctagagaagccaggcagctaaaggacaaggaatgctgggggctgtgggaacaggaatgcagataccctttgaaggagcattcctgctaaaagaagctgaaaatgtagacctatgtgaagtgctctgatttctaaatattgtgaaggttaagaaaaacataaatttaggtctatgggctagatttagcccacagttgccagtttctagcgctaccaaatgaatgaataaacatgagcttgcgctcctagcctagagataaatcctgactggcatctctgttcccagcctgggaaggtcctgaatacaaattagaagatattccttggaggcctttgaagaaattccttcggttaacctctttgtagtcttgctacactgataagtagaagtagctccctgtctgtgtcccaaatgaataagaattgtgtaaaggacagcacaactcacttggcatctaacagtccattttcattgtttccaaataccatagcaacctcttgccctttgtgttacccctagagagatggcacccaatccccagggttggtctctgacttccaccattcactgacttttattgccagaggagctcccaggaatccacagttctggaagagaggggctctaa

SEQ ID NO: 289493 - DNA, 1464 bp, Homo sapiens
cccgtccttcatcatacctaccagagggtacaactaaagggaatgagaaggaggacgctgcaggaacaagtgggcttggggaattgaatagcagagagcaaaccaatcagtccctcaggaaagggaagaaaaagaagaggtggcaccatgaagaggagaagatgggggtcttggaggaaggaggaaaaggcaaggaggctgcaggcagtgtcaggacagaggaggtagagagcagggcatatgctgacccatgcagccgaagaaagaagaggcagcaacaggaggaggaggacttgaacctagaagatagaggtgaggaaactgttttaggtggtggaaccagggaagcagagagcagagcatgcagtgatggaagaagcaggaaaagcaagaagaaaagacagcagcatcaagaggaggaggacatcttggatgtaagggatgagaaggatagcggggctagggaagcagagagcagagcacacactggctcaagcagcagaggtaagaggaagaggcagcagcatcccaagaaggaaagagctggagtcagcactgtccagaaagccaaaaagaaacagaagaagagagactaaaggtctggtaaaggtagggctcaattgattgattttcaggagttgaagcctcaaagaccagggttgatgcaggtctgcaggtcttctgcacccccctcaatgaggagtccctcccagaaaggaaactgatctctgggatgtcagctgctgagaggagcaagcggtagtaccaccccttagttgagggagtcagcacagtcctttctgcagcttctaacccaggaccatgaactcaggtgcctagagaagccaggcagctaaaggacaaggaatgctgggggctgtgggaacaggaatgcagataccctttgaaggagcattcctgctaaaagaagctgaaaatgtagacctatgtgaagtgctctgatttctaaatattgtgaaggttaagaaaaacataaatttaggtctatgggctagatttagcccacagttgccagtttctagcgctaccaaatgaatgaataaacatgagcttgcgctcctagcctagagataaatcctgactggcatctctgttcccagcctgggaaggtcctgaatacaaattagaagatattccttggaggcctttgaagaaattccttcggttaacctctttgtagtcttgctacactgataagtagaagtagctccctgtctgtgtcccaaatgaataagaattgtgtaaaggacagcacaactcacttggcatctaacagtccattttcattgtttccaaataccatagcaacctcttgccctttgtgttacccctagagagatggcacccaatccccagggttggtctctgacttccaccattcactgacttttattgccagaggagctcccaggaatccacagttctggaagagaggggctctaa

SEQ ID NO: 289494 - DNA, 2864 bp, Homo sapiens
tgggtttacaaggtaatatattttgggagatactatgtagtggtacagtacagattctgcagacaagctgcctgggcttgaattctacatgttacctgtgtgaccttgaagtcacttaacctttttaggccttactttactcatttgtaaaataggctaatatttccctgaatgggctgggaagattaaatgaaataatctttgtaaagtcttagcacatcctggcatgtggtgagcacaccataaacttaggtatcagaattgacaccattcctccttgacttctctatatgctctttctgtagccagatagggagctccccaaagaccaggccacctccttcctctgtctctggctcaggaaagagaattcttttttctttctttttaattttttttttttctagaggcagggtttcactacgttgcccacactggtctggaactcctgggctcaagtgattcttctaccttggccttccaaagtgctgggattacaaatgtgaaccactgtgcctggccgctttattctttttatgagagagggtcttgctatactgcccaggctggactcaagcaatcccgcctcagcctcccatgtagctgggactacaggtgtgtgccactgcacccaactagcagagaattcttaacaagcagtcaggatggaactgatggctgtttgggcactttctactttcttcttaaaaggatgatatcacctcttcttctctggtgagagtctgaggatagagacttttttctcaccatgaatgtcaccccagaggtcaagagtcgtgggatgaagtttgctgaggagcagctgctaaagcatggatggactcaaggtgatccccatggggcctcttccacatcccccagctccctgcctaccatctgcccaggggaaagccatcatcctggattacccccccatgtagtccatttaattaaaggaggaaaagctagtttaaagggaaatttgcagaagaaaatttctaactttcccagaaaagggaagaaaggaagaaatttgacagtggataatgaagaagtggtggttgggaggactaggggagggaaaaagagatatgggctctctaccaaaagaatttgaaggaagagatagttcaggctcacacaaaagcaggggactatatggagtggtactagaaagaagtgcgctaggaggtcttctgagaggtacagagtataccccaatgtcaggtgtgtggaatggcaagaggcctgtgtggggggtgccttgtgaggaaggttagcatgtgtgggagaggggacccttgagggcaggtgaggcaggcactcagagctcatatttattcccctggcaggtaggacatgaccctgccaaggagttcacaaaccactggtggaatgagctcttcaacaagactgcggccaacttggtagtggaaactgggcaggtatgagctcttgatagatgggcacatgaaacagagggcctgggacctgtggcgtaggcagtcatgatatgtcacccattcactggtactgataattctctacaggatggagtacagataaggagcctttctaaggagaccacccgttataatcatcccaagcccaacttgctgtatcagaagtttgtgaaggtattagaggctgtgggtaacagagtccatcctttttctcttccctggtttccctggggcctgaacagttgccttgtatgccttatcaattctcagaactttcctaacatagtgggatcctgtgaccagccttgctgttgcttacttagactgcccagaccctcagcaggaattgagatcttcaggttccgtggatcctgccatctgttaagggagcagcaatagggcgtgggaggtagggtacagtctcttaagtcaggagctgccaaattttgggggggccaggggacatctaattcaaaggacttagaagccagaggagacctgagaaattatctggaccatccctgctttgcagatgtggctaaaagggtgaaaagtggtttgctgaagagcccacagctggctagtaatggcaaacaggactggaacccaggacttcaggcctccactttctactgtaccaataggaggaagctaacatgtaatggtcattatgtgctaagggctatacatgttacctagcaaatctttcccatttctctacatctctgttaccatctactaccccacttcgggccatcatcatctcttgcctaatttctttctccagcagcctcctaagaacacctgtagtctcactccccaccccaacctttgtggaggatggacttctccacaaagcatccagtgttctctctaaaacataaatgtcatcatgtcactgggtcttgtttgacctaggatgacacaatccagatttatcggactggcttatatggctctgcatgcctgttcctgccatctccagcctcatctcttcacttttctccaggaccactactttagcctaaccattagcataacagattccaatctgtttcttttctttgaaggtacgacagtcttccatcttcaggttattgcacatgttgctccctctgcttgggacattcttctccctttccccctttaccttctgagtttctcttatcctccagagctcagcttatacatcagttacttttagaagccattctctgaagtctgagttgagtacccttcctctatcacaggcaacacttccatcataattgcctatgtagattccatctgggctgggcccatctcattcttattccactctgaatccccaactccttggcccatagtagactctcaattaatctgattaaatgaaggtactgtgaacaggtactatggtcg

SEQ ID NO: 289495 - DNA, 1235 bp, Homo sapiens
cgcctttaatcccagcactttcagaggcgaggcaggcggatcactgaggtcaggagttcgagaccagcctggccaatatggtgaaaccccgtctctactaaaaatacaaaaattagctgggcgtggtggtgggcacctgtagtcccagcaactcaggatgcttcttgacgtcaagcagcatcaagaggaggaggacatcttggatgtaagggatgagaaggatagcggggctagggaagcagagagcagagcacacactggctcaagcagcagaggtaagaggaagaggcagcagcatcccaagaaggaaagagctggagtcagcactgtccagaaagccaaaaagaaacagaagaagagagactaaaggtctggtaaaggtagggctcaattgattgattttcaggagttgaagcctcaaagaccagggttgatgcaggtctgcaggtcttctgcacccccctcaatgaggagtccctcccagaaaggaaactgatctctgggatgtcagctgctgagaggagcaagcggtagtaccaccccttagttgagggagtcagcacagtcctttctgcagcttctaacccaggaccatgaactcaggtgcctagagaagccaggcagctaaaggacaaggaatgctgggggctgtgggaacaggaatgcagataccctttgaaggagcattcctgctaaaagaagctgaaaatgtagacctatgtgaagtgctctgatttctaaatattgtgaaggttaagaaaaacataaatttaggtctatgggctagatttagcccacagttgccagtttctagcgctaccaaatgaatgaataaacatgagcttgcgctcctagcctagagataaatcctgactggcatctctgttcccagcctgggaaggtcctgaatacaaattagaagatattccttggaggcctttgaagaaattccttcggttaacctctttgtagtcttgctacactgataagtagaagtagctccctgtctgtgtcccaaatgaataagaattgtgtaaaggacagcacaactcacttggcatctaacagtccattttcattgtttccaaataccatagcaacctcttgccctttgtgttacccctagagagatggcacccaatccccagggttggtctctgacttccaccattcactgacttttattgccagaggagctcccaggaatccacagttctggaagagaggggctctaa

SEQ ID NO: 289496 - DNA, 1104 bp, Homo sapiens
cgtccggattacctcaacacaatgaggctcactcacccaccactattaacctactgggagaactctctgtgctagtaaccacgttctcctgatcaaatatcaccctcctagccttactactaataattattacattttgattaccttcttattatttgatctagaggcccaagaaggaaagagctggagtcagcactgtccagaaagccaaaaagaaacagaagaagagagactaaaggtctggtaaaggtagggctcaattgattgattttcaggagttgaagcctcaaagaccagggttgatgcaggtctgcaggtcttctgcacccccctcaatgaggagtccctcccagaaaggaaactgatctctgggatgtcagctgctgagaggagcaagcggtagtaccaccccttagttgagggagtcagcacagtcctttctgcagcttctaacccaggaccatgaactcaggtgcctagagaagccaggcagctaaaggacaaggaatgctgggggctgtgggaacaggaatgcagataccctttgaaggagcattcctgctaaaagaagctgaaaatgtagacctatgtgaagtgctctgatttctaaatattgtgaaggttaagaaaaacataaatttaggtctatgggctagatttagcccacagttgccagtttctagcgctaccaaatgaatgaataaacatgagcttgcgctcctagcctagagataaatcctgactggcatctctgttcccagcctgggaaggtcctgaatacaaattagaagatattccttggaggcctttgaagaaattccttcggttaacctctttgtagtcttgctacactgataagtagaagtagctccctgtctgtgtcccaaatgaataagaattgtgtaaaggacagcacaactcacttggcatctaacagtccattttcattgtttccaaataccatagcaacctcttgccctttgtgttacccctagagagatggcacccaatccccagggttggtctctgacttccaccattcactgacttttattgccagaggagctcccaggaatccacagttctggaagagaggggctctaa

SEQ ID NO: 289497 - DNA, 865 bp, Homo sapiens
ttttttcaataaatgcatgctgatttattacagggataaaatgggggtcttggaggaaggaggaaaaggcaaggaggctgcaggcagtgtcaggacagaggaggtagagagcagaaaggaaactgatctctgggatgtcagctgctgagaggagcaagcggtagtaccaccccttagttgagggagtcagcacagtcctttctgcagcttctaacccaggaccatgaactcaggtgcctagagaagccaggcagctaaaggacaaggaatgctgggggctgtgggaacaggaatgcagataccctttgaaggagcattcctgctaaaagaagctgaaaatgtagacctatgtgaagtgctctgatttctaaatattgtgaaggttaagaaaaacataaatttaggtctatgggctagatttagcccacagttgccagtttctagcgctaccaaatgaatgaataaacatgagcttgcgctcctagcctagagataaatcctgactggcatctctgttcccagcctgggaaggtcctgaatacaaattagaagatattccttggaggcctttgaagaaattccttcggttaacctctttgtagtcttgctacactgataagtagaagtagctccctgtctgtgtcccaaatgaataagaattgtgtaaaggacagcacaactcacttggcatctaacagtccattttcattgtttccaaataccatagcaacctcttgccctttgtgttacccctagagagatggcacccaatccccagggttggtctctgacttccaccattcactgacttttattgccagaggagctcccaggaatccacagttctggaagagaggggctctaa

SEQ ID NO: 289498 - DNA, 2370 bp, Homo sapiens
tggtttcgacagcctagaaggaacaaaacggcatttccgggaagatggcggcgcacaagtcaggtccggcacatgtttccgcggagcggacccagcaatgacggatgatatcacctcttcttctctggtgagagtctgaggatagagacttttttctcaccatgaatgtcaccccagaggtcaagagtcgtgggatgaagtttgctgaggagcagctgctaaagcatggatggactcaaggcaaaggcctcggccggaaggagaatggtatcactcaggctctcagggtgacactgaagcaagacactcatggggtaggacatgaccctgccaaggagttcacaaaccactggtggaatgagctcttcaacaagactgcggccaacttggtagtggaaactgggcaggatggagtacagataaggagcctttctaaggagaccacccgttataatcatcccaagcccaacttgctgtatcagaagtttgtgaagatggctacattgacttcaggtggagagaagccaaacaaagacttggagagctgcagtgatgacgacaaccaggggtccaagtccccaaagattctgactgatgagatgctgctccaagcctgtgaggggcgaacagcacacaaggctgcccgtcttgggatcacaatgaaggccaagcttgctcgcctagaggcccaggagcaggccttcctggctcgtctcaaaggccaggaccctggggcccctcaactgcagtcagagagcaagccccccaaaaaaaagaaaaagaaaaggaggcagaaagaggaggaagaagctacagcatctgaaaggaatgatgcagatgagaagcacccagaacatgctgagcagaacatcagaaaaagcaagaagaagaaaaggcgacatcaagaaggaaaggtctcagatgaaagagagggtacaactaaagggaatgagaaggaggacgctgcaggaacaagtgggcttggggaattgaatagcagagagcaaaccaatcagtccctcaggaaagggaagaaaaagaagaggtggcaccatgaagaggagaagatgggggtcttggaggaaggaggaaaaggcaaggaggctgcaggcagtgtcaggacagaggaggtagagagcagggcatatgctgacccatgcagccgaagaaagaagaggcagcaacaggaggaggaggacttgaacctagaagatagaggtgaggaaactgttttaggtggtggaaccagggaagcagagagcagagcatgcagtgatggaagaagcaggaaaagcaagaagaaaagacagcagcatcaagaggaggaggacatcttggatgtaagggatgagaaggatagcggggctagggaagcagagagcagagcacacactggctcaagcagcagaggtaagaggaagaggcagcagcatcccaagaaggaaagagctggagtcagcactgtccagaaagccaaaaagaaacagaagaagagagactaaaggtctggtaaaggtagggctcaattgattgattttcaggagttgaagcctcaaagaccagggttgatgcaggtctgcaggtcttctgcacccccctcaatgaggagtccctcccagaaaggaaactgatctctgggatgtcagctgctgagaggagcaagcggtagtaccaccccttagttgagggagtcagcacagtcctttctgcagcttctaacccaggaccatgaactcaggtgcctagagaagccaggcagctaaaggacaaggaatgctgggggctgtgggaacaggaatgcagataccctttgaaggagcattcctgctaaaagaagctgaaaatgtagacctatgtgaagtgctctgatttctaaatattgtgaaggttaagaaaaacataaatttaggtctatgggctagatttagcccacagttgccagtttctagcgctaccaaatgaatgaataaacatgagcttgcgctcctagcctagagataaatcctgactggcatctctgttcccagcctgggaaggtcctgaatacaaattagaagatattccttggaggcctttgaagaaattccttcggttaacctctttgtagtcttgctacactgataagtagaagtagctccctgtctgtgtcccaaatgaataagaattgtgtaaaggacagcacaactcacttggcatctaacagtccattttcattgtttccaaataccatagcaacctcttgccctttgtgttacccctagagagatggcacccaatccccagggttggtctctgacttccaccattcactgacttttattgccagaggagctcccaggaatccacagttctggaagagaggggctctaa

SEQ ID NO: 289499 - DNA, 2978 bp, Homo sapiens
tgggtttacaaggtaatatattttgggagatactatgtagtggtacagtacagattctgcagacaagctgcctgggcttgaattctacatgttacctgtgtgaccttgaagtcacttaacctttttaggccttactttactcatttgtaaaataggctaatatttccctgaatgggctgggaagattaaatgaaataatctttgtaaagtcttagcacatcctggcatgtggtgagcacaccataaacttaggtatcagaattgacaccattcctccttgacttctctatatgctctttctgtagccagatagggagctccccaaagaccaggccacctccttcctctgtctctggctcaggaaagagaattcttttttctttctttttaattttttttttttctagaggcagggtttcactacgttgcccacactggtctggaactcctgggctcaagtgattcttctaccttggccttccaaagtgctgggattacaaatgtgaaccactgtgcctggccgctttattctttttatgagagagggtcttgctatactgcccaggctggactcaagcaatcccgcctcagcctcccatgtagctgggactacaggtgtgtgccactgcacccaactagcagagaattcttaacaagcagtcaggatggaactgatggctgtttgggcactttctactttcttcttaaaaggatgatatcacctcttcttctctggtgagagtctgaggatagagacttttttctcaccatgaatgtcaccccagaggtcaagagtcgtgggatgaagtttgctgaggagcagctgctaaagcatggatggactcaaggcaaaggcctcggccggaaggagaatggtatcactcaggctctcagggtgacactgaagcaagacactcatggggtaggacatgaccctgccaaggagttcacaaaccactggtggaatgagctcttcaacaagactgcggccaacttggtagtggaaactgggcaggatggagtacagataaggagcctttctaaggagaccacccgttataatcatcccaagcccaacttgctgtatcagaagtttgtgaagatggctacattgacttcaggtggagagaagccaaacaaagacttggagagctgcagtgatgacgacaaccaggggtccaagtccccaaagattctgactgatgagatgctgctccaagcctgtgaggggcgaacagcacacaaggctgcccgtcttgggatcacaatgaaggccaagcttgctcgcctagaggcccaggagcaggccttcctggctcgtctcaaaggccaggaccctggggcccctcaactgcagtcagagagcaagccccccaaaaaaaagaaaaagaaaaggaggcagaaagaggaggaagaagctacagcatctgaaaggaatgatgcagatgagaagcacccagaacatgctgagcagaacatcagaaaaagcaagaagaagaaaaggcgacatcaagaaggaaaggtctcagatgaaagagagggtacaactaaagggaatgagaaggaggacgctgcaggaacaagtgggcttggggaattgaatagcagagagcaaaccaatcagtccctcaggaaagggaagaaaaagaagaggtggcaccatgaagaggagaagatgggggtcttggaggaaggaggaaaaggcaaggaggctgcaggcagtgtcaggacagaggaggtagagagcagggcatatgctgacccatgcagccgaagaaagaagaggcagcaacaggaggaggaggacttgaacctagaagatagaggtgaggaaactgttttaggtggtggaaccagggaagcagagagcagagcatgcagtgatggaagaagcaggaaaagcaagaagaaaagacagcagcatcaagaggaggaggacatcttggatgtaagggatgagaaggatagcggggctagggaagcagagagcagagcacacactggctcaagcagcagaggtaagaggaagaggcagcagcatcccaagaaggaaagagctggagtcagcactgtccagaaagccaaaaagaaacagaagaagagagactaaaggtctggtaaaggtagggctcaattgattgattttcaggagttgaagcctcaaagaccagggttgatgcaggtctgcaggtcttctgcacccccctcaatgaggagtccctcccagaaaggaaactgatctctgggatgtcagctgctgagaggagcaagcggtagtaccaccccttagttgagggagtcagcacagtcctttctgcagcttctaacccaggaccatgaactcaggtgcctagagaagccaggcagctaaaggacaaggaatgctgggggctgtgggaacaggaatgcagataccctttgaaggagcattcctgctaaaagaagctgaaaatgtagacctatgtgaagtgctctgatttctaaatattgtgaaggttaagaaaaacataaatttaggtctatgggctagatttagcccacagttgccagtttctagcgctaccaaatgaatgaataaacatgagcttgcgctcctagcctagagataaatcctgactggcatctctgttcccagcctgggaaggtcctgaatacaaattagaagatattccttggaggcctttgaagaaattccttcggttaacctctttgtagtcttgctacactgataagtagaagtagctccctgtctgtgtcccaaatgaataagaattgtgtaaaggacagcacaactcacttggcatctaacagtccattttcattgtttccaaataccatagcaacctcttgccctttgtgttacccctagagagatggcacccaatccccagggttggtctctgacttccaccattcactgacttttattgccagaggagctcccaggaatccacagttctggaagagaggggctctaa

SEQ ID NO: 289500 - DNA, 2296 bp, Homo sapiens
tggtttcgacagcctagaaggaacaaaacggcatttccgggaagatggcggcgcacaagtcaggtccggcacatgtttccgcggagcggacccagcaatgacgaggtcaagagtcgtgggatgaagtttgctgaggagcagctgctaaagcatggatggactcaaggcaaaggcctcggccggaaggagaatggtatcactcaggctctcagggtgacactgaagcaagacactcatggggtaggacatgaccctgccaaggagttcacaaaccactggtggaatgagctcttcaacaagactgcggccaacttggtagtggaaactgggcaggatggagtacagataaggagcctttctaaggagaccacccgttataatcatcccaagcccaacttgctgtatcagaagtttgtgaagatggctacattgacttcaggtggagagaagccaaacaaagacttggagagctgcagtgatgacgacaaccaggggtccaagtccccaaagattctgactgatgagatgctgctccaagcctgtgaggggcgaacagcacacaaggctgcccgtcttgggatcacaatgaaggccaagcttgctcgcctagaggcccaggagcaggccttcctggctcgtctcaaaggccaggaccctggggcccctcaactgcagtcagagagcaagccccccaaaaaaaagaaaaagaaaaggaggcagaaagaggaggaagaagctacagcatctgaaaggaatgatgcagatgagaagcacccagaacatgctgagcagaacatcagaaaaagcaagaagaagaaaaggcgacatcaagaaggaaaggtctcagatgaaagagagggtacaactaaagggaatgagaaggaggacgctgcaggaacaagtgggcttggggaattgaatagcagagagcaaaccaatcagtccctcaggaaagggaagaaaaagaagaggtggcaccatgaagaggagaagatgggggtcttggaggaaggaggaaaaggcaaggaggctgcaggcagtgtcaggacagaggaggtagagagcagggcatatgctgacccatgcagccgaagaaagaagaggcagcaacaggaggaggaggacttgaacctagaagatagaggtgaggaaactgttttaggtggtggaaccagggaagcagagagcagagcatgcagtgatggaagaagcaggaaaagcaagaagaaaagacagcagcatcaagaggaggaggacatcttggatgtaagggatgagaaggatagcggggctagggaagcagagagcagagcacacactggctcaagcagcagaggtaagaggaagaggcagcagcatcccaagaaggaaagagctggagtcagcactgtccagaaagccaaaaagaaacagaagaagagagactaaaggtctggtaaaggtagggctcaattgattgattttcaggagttgaagcctcaaagaccagggttgatgcaggtctgcaggtcttctgcacccccctcaatgaggagtccctcccagaaaggaaactgatctctgggatgtcagctgctgagaggagcaagcggtagtaccaccccttagttgagggagtcagcacagtcctttctgcagcttctaacccaggaccatgaactcaggtgcctagagaagccaggcagctaaaggacaaggaatgctgggggctgtgggaacaggaatgcagataccctttgaaggagcattcctgctaaaagaagctgaaaatgtagacctatgtgaagtgctctgatttctaaatattgtgaaggttaagaaaaacataaatttaggtctatgggctagatttagcccacagttgccagtttctagcgctaccaaatgaatgaataaacatgagcttgcgctcctagcctagagataaatcctgactggcatctctgttcccagcctgggaaggtcctgaatacaaattagaagatattccttggaggcctttgaagaaattccttcggttaacctctttgtagtcttgctacactgataagtagaagtagctccctgtctgtgtcccaaatgaataagaattgtgtaaaggacagcacaactcacttggcatctaacagtccattttcattgtttccaaataccatagcaacctcttgccctttgtgttacccctagagagatggcacccaatccccagggttggtctctgacttccaccattcactgacttttattgccagaggagctcccaggaatccacagttctggaagagaggggctctaa

SEQ ID NO: 289501 - DNA, 3748 bp, Homo sapiens
tgggtttacaaggtaatatattttgggagatactatgtagtggtacagtacagattctgcagacaagctgcctgggcttgaattctacatgttacctgtgtgaccttgaagtcacttaacctttttaggccttactttactcatttgtaaaataggctaatatttccctgaatgggctgggaagattaaatgaaataatctttgtaaagtcttagcacatcctggcatgtggtgagcacaccataaacttaggtatcagaattgacaccattcctccttgacttctctatatgctctttctgtagccagatagggagctccccaaagaccaggccacctccttcctctgtctctggctcaggaaagagaattcttttttctttctttttaattttttttttttctagaggcagggtttcactacgttgcccacactggtctggaactcctgggctcaagtgattcttctaccttggccttccaaagtgctgggattacaaatgtgaaccactgtgcctggccgctttattctttttatgagagagggtcttgctatactgcccaggctggactcaagcaatcccgcctcagcctcccatgtagctgggactacaggtgtgtgccactgcacccaactagcagagaattcttaacaagcagtcaggatggaactgatggctgtttgggcactttctactttcttcttaaaaggatgatatcacctcttcttctctggtgagagtctgaggatagagacttttttctcaccatgaatgtcaccccagaggtcaagagtcgtgggatgaagtttgctgaggagcagctgctaaagcatggatggactcaaggtgatccccatggggcctcttccacatcccccagctccctgcctaccatctgcccaggggaaagccatcatcctggattacccccccatgtagtccatttaattaaaggaggaaaagctagtttaaagggaaatttgcagaagaaaatttctaactttcccagaaaagggaagaaaggaagaaatttgacagtggataatgaagaagtggtggttgggaggactaggggagggaaaaagagatatgggctctctaccaaaagaatttgaaggaagagatagttcaggctcacacaaaagcaggggactatatggagtggtactagaaagaagtgcgctaggaggtcttctgagaggtacagagtataccccaatgtcaggtgtgtggaatggcaagaggcctgtgtggggggtgccttgtgaggaaggttagcatgtgtgggagaggggacccttgagggcaggtgaggcaggcactcagagctcatatttattcccctggcaggtaggacatgaccctgccaaggagttcacaaaccactggtggaatgagctcttcaacaagactgcggccaacttggtagtggaaactgggcaggtatgagctcttgatagatgggcacatgaaacagagggcctgggacctgtggcgtaggcagtcatgatatgtcacccattcactggtactgataattctctacaggatggagtacagataaggagcctttctaaggagaccacccgttataatcatcccaagcccaacttgctgtatcagaagtttgtgaaggtattagaggctgtgggtaacagagtccatcctttttctcttccctggtttccctggggcctgaacagttgccttgtatgccttatcaattctcagaactttcctaacatagtgggatcctgtgaccagccttgctgttgcttacttagactgcccagaccctcagcaggaattgagatcttcaggttccgtggatcctgccatctgttaagggagcagcaatagggcgtgggagatggctacattgacttcaggtggagagaagccaaacaaagacttggagagctgcagtgatgacgacaaccaggggtccaagtccccaaagattctgactgatgagatgctgctccaagcctgtgaggggcgaacagcacacaaggctgcccgtcttgggatcacaatgaaggccaagcttgctcgcctagaggcccaggagcaggccttcctggctcgtctcaaaggccaggaccctggggcccctcaactgcagtcagagagcaagccccccaaaaaaaagaaaaagaaaaggaggcagaaagaggaggaagaagctacagcatctgaaaggaatgatgcagatgagaagcacccagaacatgctgagcagaacatcagaaaaagcaagaagaagaaaaggcgacatcaagaaggaaaggtctcagatgaaagagagggtacaactaaagggaatgagaaggaggacgctgcaggaacaagtgggcttggggaattgaatagcagagagcaaaccaatcagtccctcaggaaagggaagaaaaagaagaggtggcaccatgaagaggagaagatgggggtcttggaggaaggaggaaaaggcaaggaggctgcaggcagtgtcaggacagaggaggtagagagcagggcatatgctgacccatgcagccgaagaaagaagaggcagcaacaggaggaggaggacttgaacctagaagatagaggtgaggaaactgttttaggtggtggaaccagggaagcagagagcagagcatgcagtgatggaagaagcaggaaaagcaagaagaaaagacagcagcatcaagaggaggaggacatcttggatgtaagggatgagaaggatagcggggctagggaagcagagagcagagcacacactggctcaagcagcagaggtaagaggaagaggcagcagcatcccaagaaggaaagagctggagtcagcactgtccagaaagccaaaaagaaacagaagaagagagactaaaggtctggtaaaggtagggctcaattgattgattttcaggagttgaagcctcaaagaccagggttgatgcaggtctgcaggtcttctgcacccccctcaatgaggagtccctcccagaaaggaaactgatctctgggatgtcagctgctgagaggagcaagcggtagtaccaccccttagttgagggagtcagcacagtcctttctgcagcttctaacccaggaccatgaactcaggtgcctagagaagccaggcagctaaaggacaaggaatgctgggggctgtgggaacaggaatgcagataccctttgaaggagcattcctgctaaaagaagctgaaaatgtagacctatgtgaagtgctctgatttctaaatattgtgaaggttaagaaaaacataaatttaggtctatgggctagatttagcccacagttgccagtttctagcgctaccaaatgaatgaataaacatgagcttgcgctcctagcctagagataaatcctgactggcatctctgttcccagcctgggaaggtcctgaatacaaattagaagatattccttggaggcctttgaagaaattccttcggttaacctctttgtagtcttgctacactgataagtagaagtagctccctgtctgtgtcccaaatgaataagaattgtgtaaaggacagcacaactcacttggcatctaacagtccattttcattgtttccaaataccatagcaacctcttgccctttgtgttacccctagagagatggcacccaatccccagggttggtctctgacttccaccattcactgacttttattgccagaggagctcccaggaatccacagttctggaagagaggggctctaa

SEQ ID NO: 289502 - DNA, 2487 bp, Homo sapiens
tggtttcgacagcctagaaggaacaaaacggcatttccgggaagatggcggcgcacaagtcaggtccggcacatgtttccgcggagcggacccagcaatgacggatgatatcacctcttcttctctggtgagagtctgaggatagagacttttttctcaccatgaatgtcaccccagaggtcaagagtcgtgggatgaagtttgctgaggagcagctgctaaagcatggatggactcaaggcaaaggcctcggccggaaggagaatggtatcactcaggctctcagggtgacactgaagcaagacactcatggggtaggacatgaccctgccaaggagttcacaaaccactggtggaatgagctcttcaacaagactgcggccaacttggtagtggaaactgggcaggatggagtacagataaggagcctttctaaggagaccacccgttataatcatcccaagcccaacttgctgtatcagaagtttgtgaagatggctacattgacttcaggtggagagaagccaaacaaagacttggagagctgcagtgatgacgacaaccaggggtccaagtccccaaagattacctcaaaaagtgccaggtcctgaacaagaattcagtgttgaaggaatgttttagaaggaggagaggtcaagcctttccaccaggtctgtttgtaactgctgatctcccctaacagtctgactgatgagatgctgctccaagcctgtgaggggcgaacagcacacaaggctgcccgtcttgggatcacaatgaaggccaagcttgctcgcctagaggcccaggagcaggccttcctggctcgtctcaaaggccaggaccctggggcccctcaactgcagtcagagagcaagccccccaaaaaaaagaaaaagaaaaggaggcagaaagaggaggaagaagctacagcatctgaaaggaatgatgcagatgagaagcacccagaacatgctgagcagaacatcagaaaaagcaagaagaagaaaaggcgacatcaagaaggaaaggtctcagatgaaagagagggtacaactaaagggaatgagaaggaggacgctgcaggaacaagtgggcttggggaattgaatagcagagagcaaaccaatcagtccctcaggaaagggaagaaaaagaagaggtggcaccatgaagaggagaagatgggggtcttggaggaaggaggaaaaggcaaggaggctgcaggcagtgtcaggacagaggaggtagagagcagggcatatgctgacccatgcagccgaagaaagaagaggcagcaacaggaggaggaggacttgaacctagaagatagaggtgaggaaactgttttaggtggtggaaccagggaagcagagagcagagcatgcagtgatggaagaagcaggaaaagcaagaagaaaagacagcagcatcaagaggaggaggacatcttggatgtaagggatgagaaggatagcggggctagggaagcagagagcagagcacacactggctcaagcagcagaggtaagaggaagaggcagcagcatcccaagaaggaaagagctggagtcagcactgtccagaaagccaaaaagaaacagaagaagagagactaaaggtctggtaaaggtagggctcaattgattgattttcaggagttgaagcctcaaagaccagggttgatgcaggtctgcaggtcttctgcacccccctcaatgaggagtccctcccagaaaggaaactgatctctgggatgtcagctgctgagaggagcaagcggtagtaccaccccttagttgagggagtcagcacagtcctttctgcagcttctaacccaggaccatgaactcaggtgcctagagaagccaggcagctaaaggacaaggaatgctgggggctgtgggaacaggaatgcagataccctttgaaggagcattcctgctaaaagaagctgaaaatgtagacctatgtgaagtgctctgatttctaaatattgtgaaggttaagaaaaacataaatttaggtctatgggctagatttagcccacagttgccagtttctagcgctaccaaatgaatgaataaacatgagcttgcgctcctagcctagagataaatcctgactggcatctctgttcccagcctgggaaggtcctgaatacaaattagaagatattccttggaggcctttgaagaaattccttcggttaacctctttgtagtcttgctacactgataagtagaagtagctccctgtctgtgtcccaaatgaataagaattgtgtaaaggacagcacaactcacttggcatctaacagtccattttcattgtttccaaataccatagcaacctcttgccctttgtgttacccctagagagatggcacccaatccccagggttggtctctgacttccaccattcactgacttttattgccagaggagctcccaggaatccacagttctggaagagaggggctctaa

SEQ ID NO: 289503 - DNA, 1832 bp, Homo sapiens
tatactgtttgcgagaagacgacagaaggggtccaagtccccaaagattctgactgatgagatgctgctccaagcctgtgaggggcgaacagcacacaaggctgcccgtcttgggatcacaatgaaggccaagcttgctcgcctagaggcccaggagcaggccttcctggctcgtctcaaaggccaggaccctggggcccctcaactgcagtcagagagcaagccccccaaaaaaaagaaaaagaaaaggaggcagaaagaggaggaagaagctacagcatctgaaaggaatgatgcagatgagaagcacccagaacatgctgagcagaacatcagaaaaagcaagaagaagaaaaggcgacatcaagaaggaaaggtctcagatgaaagagagggtacaactaaagggaatgagaaggaggacgctgcaggaacaagtgggcttggggaattgaatagcagagagcaaaccaatcagtccctcaggaaagggaagaaaaagaagaggtggcaccatgaagaggagaagatgggggtcttggaggaaggaggaaaaggcaaggaggctgcaggcagtgtcaggacagaggaggtagagagcagggcatatgctgacccatgcagccgaagaaagaagaggcagcaacaggaggaggaggacttgaacctagaagatagaggtgaggaaactgttttaggtggtggaaccagggaagcagagagcagagcatgcagtgatggaagaagcaggaaaagcaagaagaaaagacagcagcatcaagaggaggaggacatcttggatgtaagggatgagaaggatagcggggctagggaagcagagagcagagcacacactggctcaagcagcagaggtaagaggaagaggcagcagcatcccaagaaggaaagagctggagtcagcactgtccagaaagccaaaaagaaacagaagaagagagactaaaggtctggtaaaggtagggctcaattgattgattttcaggagttgaagcctcaaagaccagggttgatgcaggtctgcaggtcttctgcacccccctcaatgaggagtccctcccagaaaggaaactgatctctgggatgtcagctgctgagaggagcaagcggtagtaccaccccttagttgagggagtcagcacagtcctttctgcagcttctaacccaggaccatgaactcaggtgcctagagaagccaggcagctaaaggacaaggaatgctgggggctgtgggaacaggaatgcagataccctttgaaggagcattcctgctaaaagaagctgaaaatgtagacctatgtgaagtgctctgatttctaaatattgtgaaggttaagaaaaacataaatttaggtctatgggctagatttagcccacagttgccagtttctagcgctaccaaatgaatgaataaacatgagcttgcgctcctagcctagagataaatcctgactggcatctctgttcccagcctgggaaggtcctgaatacaaattagaagatattccttggaggcctttgaagaaattccttcggttaacctctttgtagtcttgctacactgataagtagaagtagctccctgtctgtgtcccaaatgaataagaattgtgtaaaggacagcacaactcacttggcatctaacagtccattttcattgtttccaaataccatagcaacctcttgccctttgtgttacccctagagagatggcacccaatccccagggttggtctctgacttccaccattcactgacttttattgccagaggagctcccaggaatccacagttctggaagagaggggctctaa

SEQ ID NO: 289504 - DNA, 1551 bp, Homo sapiens
gcaggggttaaaaggacgttccagaagcatctggggacagaaccagcctcttccagggaggcctgggagctgggggtgtgtgtctggcagtccctgcagccctgggctctgcggcccctgcgtcctccgcttggctctgccactgcatctgagtgtcttctctcctcacggctccccgcatttctaactctttctgcctcctcgtctcaaagctgttccttcccccgactcaagaatccccggaggcccggaggcctgcagcaggagcggccatgaagaagctgatggtggtgctgagtctgattgctgcagcctgggcagaggagcagaataagttggtgcatggcggaccctgcgacaagacatctcacccctaccaagctgccctctacacctcgggccacttgctctgtggtggggtccttatccatccactgtgggtcctcacagctgcccactgcaaaaaaccgaatcttcaggtcttcctggggaagcataaccttcggcaaagggagagttcccaggagcagagttctgttgtccgggctgtgatccaccctgactatgatgccgccagccatgaccaggacatcatgctgttgcgcctggcacgcccagccaaactctctgaactcatccagccccttcccctggagagggactgctcagccaacaccaccagctgccacatcctgggctggggcaagacagcagatggtgatttccctgacaccatccagtgtgcatacatccacctggtgtcccgtgaggagtgtgagcatgcctaccctggccagatcacccagaacatgttgtgtgctggggatgagaagtacgggaaggattcctgccagggtgattctgggggtccgctggtatgtggagaccacctccgaggccttgtgtcatggggtaacatcccctgtggatcaaaggagaagccaggagtctacaccaacgtctgcagatacacgaactggatccaaaaaaccattcaggccaagtgaccctgacatgtgacatctacctcccgacctaccaccccactggctggttccagaacgtctctcacctagaccttgcctcccctcctctcctgcccagctctgaccctgatgcttaataaacgcagcgacgtgagggtcctgattctccctggttttaccccagctccatccttgcatcactggggaggacgtgatgagtgaggacttgggtcctcggtcttacccccaccactaagagaatacaggaaaatcccttctaggcatctcctctccccaacccttccacacgtttgatttcttcctgcagaggcccagccacgtgtctggaatcccagctccgctgcttactgtcggtgtccccttgggatgtacctttcttcactgcagatttctcacctgtaagatgaagataaggatgatacagtctccataaggcagtggctgttggaaagatttaaggtttcacacctatgacatacatggaatagcacctgggccaccatgcactcaataaagaatgaattttattatgaaaaaaaaggct

SEQ ID NO: 289505 - DNA, 832 bp, Homo sapiens
tgggaggagcaggccagcgattcatgacttcccagccctctctgaagcctcaactgcagcccaagggctccaggtgagacccagccctcttccttcccaggaatcttcaggtcttcctggggaagcataaccttcggcaaagggagagttcccaggagcagagttctgttgtccgggctgtgatccaccctgactatgatgccgccagccatgaccaggacatcatgctgttgcgcctggcacgcccagccaaactctctgaactcatccagccccttcccctggagagggactgctcagccaacaccaccagctgccacatcctgggccccaccactaagagaatacaggaaaatcccttctaggcatctcctctccccaacccttccacacgtttgatttcttcctgcagaggcccagccacgtgtctggaatcccagctccgctgcttactgtcggtgtccccttgggatgtacctttcttcactgcagatttctcacctgggggacagggcaagtgagacctggtgagggtggctcagcaggcagggaaggagaggtgtctgtgcgtcctgcacccacatctttctctgtcccctccttgccctgtctggaggctgctagactcctatcttctgaattctatagtgcctgggtctcagcgcagtgccgatggtggcccgtccttgtggttcctctctacctgagcctgggctctgtccttgagcttgagcctgggcttgagaggtgccactcttattctccaggccctgcccctgccccctcagcatgtcagacacccaccctctagctggtctggcctcttgagtct

SEQ ID NO: 289506 - DNA, 1442 bp, Homo sapiens
acttaggctaggtacgaggcctcgtgtgtaatcggacaccctgggctctgcggcccctgcgtcctccgcttggctctgccactgcatctgagtgtcttctctcctcacggctccccgcatttctaactctttctgcctcctcgtctcaaagctgttccttcccccgactcaagaatccccggaggcccggaggcctgcagcagcctgggcagaggagcagaataagttggtgcatggcggaccctgcgacaagacatctcacccctaccaagctgccctctacacctcgggccacttgctctgtggtggggtccttatccatccactgtgggtcctcacagctgcccactgcaaaaaaccgaatcttcaggtcttcctggggaagcataaccttcggcaaagggagagttcccaggagcagagttctgttgtccgggctgtgatccaccctgactatgatgccgccagccatgaccaggacatcatgctgttgcgcctggcacgcccagccaaactctctgaactcatccagccccttcccctggagagggactgctcagccaacaccaccagctgccacatcctgggctggggcaagacagcagatggtgatttccctgacaccatccagtgtgcatacatccacctggtgtcccgtgaggagtgtgagcatgcctaccctggccagatcacccagaacatgttgtgtgctggggatgagaagtacgggaaggattcctgccagggtgattctgggggtccgctggtatgtggagaccacctccgaggccttgtgtcatggggtaacatcccctgtggatcaaaggagaagccaggagtctacaccaacgtctgcagatacacgaactggatccaaaaaaccattcaggccaagtgaccctgacatgtgacatctacctcccgacctaccaccccactggctggttccagaacgtctctcacctagaccttgcctcccctcctctcctgcccagctctgaccctgatgcttaataaacgcagcgacgtgagggtcctgattctccctggttttaccccagctccatccttgcatcactggggaggacgtgatgagtgaggacttgggtcctcggtcttacccccaccactaagagaatacaggaaaatcccttctaggcatctcctctccccaacccttccacacgtttgatttcttcctgcagaggcccagccacgtgtctggaatcccagctccgctgcttactgtcggtgtccccttgggatgtacctttcttcactgcagatttctcacctgtaagatgaagataaggatgatacagtctccataaggcagtggctgttggaaagatttaaggtttcacacctatgacatacatggaatagcacctgggccaccatgcactcaataaagaatgaattttattatgaaaaaaaaggct

SEQ ID NO: 289507 - DNA, 1469 bp, Homo sapiens
  misc_feature (50)..(50): n is a, c, g, or t
ggcgcatacaacgcctagttcagcgtagtactccgccgtgctatagggcntttgtgtcgtcggtctatctcatcccgtgtgaggacagcagaggtcggcaggcagtacacagatggagctactggaccagctgttccttccccgagtcaagaatccccggaggcccggaggcctgcagcaggagcggcataagaagctgatggtgagtgctgagtctgaataatgctgcacctgggcagaggagcagaataagttggtgcatggcggaccctgcgacaagacatctcacccctaccaagctgccctctacacctcgggccacttgctctgtggtggggtccttatccatccactgtgggtcctcacagctgcccactgcaaaaaaccgaatcttcaggtcttcctggggaagcataaccttcggcaaagggagagttcccaggagcagagttctgttgtccgggctgtgatccaccctgactatgatgccgccagccatgaccaggacatcatgctgttgcgcctggcacgcccagccaaactctctgaactcatccagccccttcccctggagagggactgctcagccaacaccaccagctgccacatcctgggctggggcaagacagcagatggtgatttccctgacaccatccagtgtgcatacatccacctggtgtcccgtgaggagtgtgagcatgcctaccctggccagatcacccagaacatgttgtgtgctggggatgagaagtacgggaaggattcctgccagggtgattctgggggtccgctggtatgtggagaccacctccgaggccttgtgtcatggggtaacatcccctgtggatcaaaggagaagccaggagtctacaccaacgtctgcagatacacgaactggatccaaaaaaccattcaggccaagtgaccctgacatgtgacatctacctcccgacctaccaccccactggctggttccagaacgtctctcacctagaccttgcctcccctcctctcctgcccagctctgaccctgatgcttaataaacgcagcgacgtgagggtcctgattctccctggttttaccccagctccatccttgcatcactggggaggacgtgatgagtgaggacttgggtcctcggtcttacccccaccactaagagaatacaggaaaatcccttctaggcatctcctctccccaacccttccacacgtttgatttcttcctgcagaggcccagccacgtgtctggaatcccagctccgctgcttactgtcggtgtccccttgggatgtacctttcttcactgcagatttctcacctgtaagatgaagataaggatgatacagtctccataaggcagtggctgttggaaagatttaaggtttcacacctatgacatacatggaatagcacctgggccaccatgcactcaataaagaatgaattttattatgaaaaaaaaggct

SEQ ID NO: 289508 - DNA, 948 bp, Homo sapiens
gcaggggttaaaaggacgttccagaagcatctggggacagaaccagcctcttccagggaggcctgggagctgggggtgtgtgtctggcagtccctgcagccctgggctctgcggcccctgcgtcctccgcttggctctgccactgcatctgagtgtcttctctcctcacggctccccgcatttctaactctttctgcctcctcgtctcaaagctgttccttcccccgactcaagaatccccggaggcccggaggcctgcagcaggagcggccatgaagaagctgatggtggtgctgagtctgattgctgcagcctgggcagaggagcagaataagttggtgcatggcggaccctgcgacaagacatctcacccctaccaagctgccctctacacctcgggccacttgctctgtggtggggtccttatccatccactgtgggtcctcacagctgcccactgcaaaaaaccgaatcttcaggtcttcctggggaagcataaccttcggcaaagggagagttcccaggagcagagttctgttgtccgggctgtgatccaccctgactatgatgccgccagccatgaccaggacatcatgctgttgcgcctggcacgcccagccaaactctctgaactcatccagccccttcccctggagagggactgctcagccaacaccaccagctgccacatcctgggctggggcaagacagcagatggtgatttccctgacaccatccagtgtgcatacatccacctggtgtcccgtgaggagtgtgagcatgcctaccctggccagatcacccagaacatgttgtgtgctggggatgagaagtacgggaaggattcctgccagtcaccaggccagcccccacacaccctcactcattccagggaagcccaggtaggtggtgaacccgctgccacgtctatcagtcctcttgtttatg

SEQ ID NO: 289509 - DNA, 1524 bp, Homo sapiens
aggcggacaaagcccgattgttcctgggccctttccccatcgcgcctgggcctgctccccagcccggggcaggggcgggggccagtgtggtgacacacgctgtagctgtctccccggctggctggctcgctctctcctggggacacagaggtcggcaggcagcacacagagggacctacgggcagctgttccttcccccgactcaagaatccccggaggcccggaggcctgcagcaggagcggccatgaagaagctgatggtggtgctgagtctgattgctgcagcctgggcagaggagcagaataagttggtgcatggcggaccctgcgacaagacatctcacccctaccaagctgccctctacacctcgggccacttgctctgtggtggggtccttatccatccactgtgggtcctcacagctgcccactgcaaaaaaccgaatcttcaggtcttcctggggaagcataaccttcggcaaagggagagttcccaggagcagagttctgttgtccgggctgtgatccaccctgactatgatgccgccagccatgaccaggacatcatgctgttgcgcctggcacgcccagccaaactctctgaactcatccagccccttcccctggagagggactgctcagccaacaccaccagctgccacatcctgggctggggcaagacagcagatggtgatttccctgacaccatccagtgtgcatacatccacctggtgtcccgtgaggagtgtgagcatgcctaccctggccagatcacccagaacatgttgtgtgctggggatgagaagtacgggaaggattcctgccagggtgattctgggggtccgctggtatgtggagaccacctccgaggccttgtgtcatggggtaacatcccctgtggatcaaaggagaagccaggagtctacaccaacgtctgcagatacacgaactggatccaaaaaaccattcaggccaagtgaccctgacatgtgacatctacctcccgacctaccaccccactggctggttccagaacgtctctcacctagaccttgcctcccctcctctcctgcccagctctgaccctgatgcttaataaacgcagcgacgtgagggtcctgattctccctggttttaccccagctccatccttgcatcactggggaggacgtgatgagtgaggacttgggtcctcggtcttacccccaccactaagagaatacaggaaaatcccttctaggcatctcctctccccaacccttccacacgtttgatttcttcctgcagaggcccagccacgtgtctggaatcccagctccgctgcttactgtcggtgtccccttgggatgtacctttcttcactgcagatttctcacctgtaagatgaagataaggatgatacagtctccataaggcagtggctgttggaaagatttaaggtttcacacctatgacatacatggaatagcacctgggccaccatgcactcaataaagaatgaattttattatgaaaaaaaaggct

SEQ ID NO: 289510 - DNA, 1456 bp, Homo sapiens
  misc_feature (11)..(11): n is a, c, g, or t
tgtcgaaccgncgtccgacatgcgacacacgctgtagctgtctccccggctggctggctcgctctctcctggggacacagaggtcggcaggcagcacacagagggacctacgggcagctgttccttcccccgactcaagaatccccggaggcccggaggcctgcagcaggagcggccatgaagaagctgatggtggtgctgagtctgattgctgcagcctgggcagaggagcagaataagttggtgcatggcggaccctgcgacaagacatctcacccctaccaagctgccctctacacctcgggccacttgctctgtggtggggtccttatccatccactgtgggtcctcacagctgcccactgcaaaaaaccgaatcttcaggtcttcctggggaagcataaccttcggcaaagggagagttcccaggagcagagttctgttgtccgggctgtgatccaccctgactatgatgccgccagccatgaccaggacatcatgctgttgcgcctggcacgcccagccaaactctctgaactcatccagccccttcccctggagagggactgctcagccaacaccaccagctgccacatcctgggctggggcaagacagcagatggtgatttccctgacaccatccagtgtgcatacatccacctggtgtcccgtgaggagtgtgagcatgcctaccctggccagatcacccagaacatgttgtgtgctggggatgagaagtacgggaaggattcctgccagggtgattctgggggtccgctggtatgtggagaccacctccgaggccttgtgtcatggggtaacatcccctgtggatcaaaggagaagccaggagtctacaccaacgtctgcagatacacgaactggatccaaaaaaccattcaggccaagtgaccctgacatgtgacatctacctcccgacctaccaccccactggctggttccagaacgtctctcacctagaccttgcctcccctcctctcctgcccagctctgaccctgatgcttaataaacgcagcgacgtgagggtcctgattctccctggttttaccccagctccatccttgcatcactggggaggacgtgatgagtgaggacttgggtcctcggtcttacccccaccactaagagaatacaggaaaatcccttctaggcatctcctctccccaacccttccacacgtttgatttcttcctgcagaggcccagccacgtgtctggaatcccagctccgctgcttactgtcggtgtccccttgggatgtacctttcttcactgcagatttctcacctgtaagatgaagataaggatgatacagtctccataaggcagtggctgttggaaagatttaaggtttcacacctatgacatacatggaatagcacctgggccaccatgcactcaataaagaatgaattttattatgaaaaaaaaggct

SEQ ID NO: 289511 - DNA, 1315 bp, Homo sapiens
aggcggacaaagcccgattgttcctgggccctttccccatcgcgcctgggcctgctccccagcccggggcaggggcgggggccagtgtggtgacacacgctgtagctgtctccccggctggctggctcgctctctcctggggacacagaggtcggcaggcagcacacagagggacctacgggcagctgttccttcccccgactcaagaatccccggaggcccggaggcctgcagcaggagcggccatgaagaagctgatggtggtgctgagtctgattgctgcagcctgggcagaggagcagaataagttggtgcatggcggaccctgcgacaagacatctcacccctaccaagctgccctctacacctcgggccacttgctctgtggtggggtccttatccatccactgtgggtcctcacagctgcccactgcaaaaaaccgaatcttcaggtcttcctggggaagcataaccttcggcaaagggagagttcccaggagcagagttctgttgtccgggctgtgatccaccctgactatgatgccgccagccatgaccaggacatcatgctgttgcgcctggcacgcccagccaaactctctgaactcatccagccccttcccctggagagggactgctcagccaacaccaccagctgccacatcctgggctggggcaagacagcagatggtgatttccctgacaccatccagtgtgcatacatccacctggtgtcccgtgaggagtgtgagcatgcctaccctggccagatcacccagaacatgttgtgtgctggggatgagaagtacgggaaggattcctgccagggtgattctgggggtccgctggtatgtggagaccacctccgaggccttgtgtcatggggtaacatcccctgtggatcaaaggagaagccaggagtctacaccaacgtctgcagatacacgaactggatccaaaaaaccattcaggccaagtgaccctgacatgtgacatctacctcccgacctaccaccccactggctggttccagaacgtctctcacctagaccttgcctcccctcctctcctgcccagctctgaccctgatgcttaataaacgcagcgacgtgagggtcctgattctccctggttttaccccagctccatccttgcatcactggggaggacgtgatgagtgaggacttgggtcctcggtcttacccccaccactaagagaatacaggaaaatcccttctaggcatctcctctccccaacccttccacacgtttgatttcttcctgctatctctgggatcctctagaacactcatca

SEQ ID NO: 289512 - DNA, 418 bp, Homo sapiens
catccagccccttcccctggagagggactgctcagccaacaccaccagctgccacatcctgggctggggcaagacagcagatggtcagtagtgggaggctggtggggagcaggctactggctacttggggaagtgtgccaaaggatggggagtgggaaaattggtgaggggccatgggaagatgggctaatggtgaggaccaatgggacagggtttcaatgggagaaaggtcaagggggagggagagtgaatttgggagctgggccagtgagtgaacagccaatggaaaatgtagaccaatgggtgaatagcatgggagagatggaacataagatgaaggttcaataaagagggaaggtcagtggggagatgctaatcaggaaggatgtcaaaggtcaaaggggactgatcaggattc

SEQ ID NO: 289513 - DNA, 1235 bp, Homo sapiens
tttttttgagacagagtcttgctttgttgtcaggctggagtgcagtggcgccatcttggctcattgcaatctgtctcctgagttcaagagatcctcctgcctcagcctcctgagtagctgggactactggtgtgcaccaccacgcctggctagtttttgtattttcagtcaagacaggatttcaccatgttggccaggctggcctcaaactcctgacctcccatgatctgcccacctcggcatcccaaagtgctgggattataggagtgagccatcgtgcctggccaaactattaatatacataaaaacatgaataaatatcaaaaacagtgtgctgagttaaagaagccaaatgcagaatacatactctgtgactccatttacatgaaactctacaaaacaaatctacagtgatagaaaccagatcagtgtggattgcaatgagtgaggagtaaatgcaaagggtaataaggaaatttgggggcagtggtggggtggtgacagagatgttctacatcttgactgggaagatgattacacaggtatatacatctgctaaaactcactgaattgtacattttaaatgggtacatcttcctgtatataaattatatttcaataaagttgaaaaaagtattttgaaacagttatttaaaagtattttttgttatcaatagtagctggccaacaaatcattatagagattaagcagcccattagtaatataaggttatccttgctccattagccttctgaaacataccggaagaatgagttctctgtccagtggaaatggaggttaatttgttatccaatccacaggagttaaagagtgtgaatatgcacacttctcatcattagcttaagtcgaatttttaaaaatcagaccaagtgctaagaattgaaattaactttttcccaaaaggataatgcttcaaaagatctccattgtgggaaaacaaaacacttcacttcttttttcttcttcttctttttattttattttattttcaagacagggtctcactctgtctcccaggctgagtgtggtggcatgatcatggctcactacagcctcaacctcctagcctcaagccgtcctcccacctcagcctcctgagtaaaaaaaggaagtccctcttcctcccctcctctctctcctttctcaatctctcttatcagagttaatgtctgtcatcagtctgatgagttttttcttttctcggacgcgtggt

SEQ ID NO: 289514 - DNA, 1303 bp, Homo sapiens
aggggaaaatatttttaattcatatactcacaaaggacttgtatccagaatatataaagaactcttaaaactcagtaacaagaagccaaacattccagttttttaaatgggcaaatactttgaatagatttcaccaaatatgagatactggtgacaagaaagcacataaaaagatgctcaatgtcattaaacattaggaaaatgcaaattaaaaccacaatgaggcagcactacacacctactagattttttttttttttttttttttttaagaaactgacaatactaaggccggcacggtggctcatgcctataatcccagcactttgggaggccgagccatcgtgcctggccaaactattaatatacataaaaacatgaataaatatcaaaaacagtgtgctgagttaaagaagccaaatgcagaatacatactctgtgactccatttacatgaaactctacaaaacaaatctacagtgatagaaaccagatcagtgtggattgcaatgagtgaggagtaaatgcaaagggtaataaggaaatttgggggcagtggtggggtggtgacagagatgttctacatcttgactgggaagatgattacacaggtatatacatctgctaaaactcactgaattgtacattttaaatgggtacatcttcctgtatataaattatatttcaataaagttgaaaaaagtattttgaaacagttatttaaaagtattttttgttatcaatagtagctggccaacaaatcattatagagattaagcagcccattagtaatataaggttatccttgctccattagccttctgaaacataccggaagaatgagttctctgtccagtggaaatggaggttaatttgttatccaatccacaggagttaaagagtgtgaatatgcacacttctcatcattagcttaagtcgaatttttaaaaatcagaccaagtgctaagaattgaaattaactttttcccaaaaggataatgcttcaaaagatctccattgtgggaaaacaaaacacttcacttcttttttcttcttcttctttttattttattttattttcaagacagggtctcactctgtctcccaggctgagtgtggtggcatgatcatggctcactacagcctcaacctcctagcctcaagccgtcctcccacctcagcctcctgagtaaaaaaaggaagtccctcttcctcccctcctctctctcctttctcaatctctcttatcagagttaatgtctgtcatcagtctgatgagttttttcttttctcggacgcgtggt

SEQ ID NO: 289515 - DNA, 536 bp, Homo sapiens
cggccgcctggggagccgcgggagaggcggcggcggggggaggagggagaggagggccgagccggcggcccgggaggcccggttttgaagccgcttctctggccgagttaggtttcgcccagcgcaatttctttctctatgtactttgcgaataagtttcggagcatcggttaacagcctatgggtgaaatttggctttcattcatgaatgagtacagatggtgtttcgccttgttggccagcctggtctggaactcctgaccttgtgatctgcccacctcgactctcccaaagtgctaggattacaggtgtgagccaccatgcctggctgacaatttttaataaatgttttgttcacatggctctggaagaattggacctggacaaataattgggttagtctagttttactgtttttcattcagtgccttagtttatactgaagacctagatgacaatttctgttttccataataaagtagctcctggttcagttttgtaaagagttgtgtaagatcaattaacattttgtgcag

SEQ ID NO: 289516 - DNA, 484 bp, Homo sapiens
tgagacagagtctcgctctgtctcccaggcaagaggggcgatcttggctcactgcagcctccgcctctcaggttccaacaattctcctgcctcagcctcccaggtagctgggattacaagcacacaccaccatgcccggctaatttttgtatttttagtagagacgggggtttcactgtgttggccaggctggtctcaaactcctgacctcaggtgatctgcccacctcgactctcccaaagtgctaggattacaggtgtgagccaccatgcctggctgacaatttttaataaatgttttgttcacatggctctggaagaattggacctggacaaataattgggttagtctagttttactgtttttcattcagtgccttagtttatactgaagacctagatgacaatttctgttttccataataaagtagctcctggttcagttttgtaaagagttgtgtaagatcaattaacattttgtgcag

SEQ ID NO: 289517 - DNA, 461 bp, Homo sapiens
cgcagctcggagcgccggggaagagagagtccgaaccgcggctctgccccgcggcctagcgttgctgcctgctttctccagccccttctcggcgtctggaagtgtctggagtttcttttttttatttcccctaaactgccattcaaattaataatcctcctaataacctgatctcccgctcctccccaccggcctgcctcccgccctcgctccttcctccctccctccctctctccttcccacctccagggtcgcagccggagggaaacccggcagcagtccgagagtggaggtgtcccagcccgtagggggcgtcgccgcgcggtgggggatggggtcgaggcaatgatcctcgaggcttttgtgtgccctctgcgcacggaactccgaccgccgcctccgagcgcggggctggttgcatccccgggcatctcgttcccaaattaaacgttaacggggga

SEQ ID NO: 289518 - DNA, 1885 bp, Homo sapiens
aggaggctgcctggtgcggaggcggcggcggcggccgcggccgaggtcgaggcgatcagtgggtgaccgcggctgcgagggactttgtcatccgtcctccaggatctggggagaaagagccccatcccttctctctctgccaccatttcggacaccccgcagggactcgttttgggattcgcactgacttcaaggaaggacgcgaacccttctctgaccccagctcgggcggccacctgtctttgccgcggtgacccttctctcatgaccctgcggtgccttgagccctccgggaatggcggggaagggacgcggagccagtgggggaccgcggggtcggcggaggagccatccccgcaggcggcgcgtctggcgaaggccctgcgggagctcggtcagacaggatggtactggggaagtatgactgttaatgaagccaaagagaaattaaaagaggcaccagaaggaactttcttgattagagatagctcgcattcagactacctactaacaatatctgttaaaacatcagctggaccaactaatcttcgaatcgaataccaagacggaaaattcagattggactctatcatatgtgtcaaatccaagcttaaacaatttgacagtgtggttcatctgatcgactactatgttcagatgtgcaaggataagcggacaggtccagaagccccccggaacggcactgttcacctttatctgaccaaaccgctctacacgtcagcaccatctctgcagcatctctgtaggctcaccattaacaaatgtaccggtgccatctggggactgcctttaccaacaagactaaaagattacttggaagaatataaattccaggtataaatgtttctctttttttaaacatgtctcacatagagtatctccgaatgcagctatgtaaaagagaaccaaaacttgagtgctctggataactatatggaatgctttctaagaacagctgaagctaatctaatttaaatttaacagcttgaagaggtagctaggtgtttaaagttcctccagatacttttacctgagtgatgcttcccttcctaaggctgaccaagacctgttgatccttttagattaaaaataaaatgtcgcatgtaaaggctgaagtcgcgttttatcagaatgccttgccttcttaggttcttttccattatgtcaaaggtccaggctccagtaggagagaaagaactcctcataggaatactgaagaagtgggaaggaaccaagctgacacaggcctcactgcaatttgatatgcctgctgatcagagtctcttgggcattttatattttgcattctgatgtacctaggagttttgttaaacagatgatgtatgtgagtatttatcccattttatgcaattaaccaaatcaaccaaaaaaagtgaccatgaagtcctgtatttgtctttttactacatgtaggaactctcatgtgaatgagtactgtagtaatccattctatgggagccttatttcagaaatatttcaaactggtgcaaatggaaaagactttctcttttcctttaaagctaaagacaagaatatcatgctatacaggtgcaactcaatccccgttaataaaaaccaatgtaggtataggcattctaccctttgaaatagctgtgtcccaacctgttgccattgattttttggaaatggctttagaaatatccaagttgtccttgaattgtctaaccatggacataaacagttgtctcccttctactgtgtagaatactttgacttaattttcttccagatacagggggatacctgcctgtttttcaaagtgtttatttactgctgttactatttgattagaatgtattaaataaaaaaaacctgatttcta

SEQ ID NO: 289519 - DNA, 2157 bp, Homo sapiens
aggaggctgcctggtgcggaggcggcggcggcggccgcggccgaggtcgaggtaagagcgcggcgttggtggtttgcattttccgcagcgctcgcgaccgcccgctcggccccggcctcgcctcggagccccgcgagggctgcgcgctcgggccgattcctcgacagcgcccgcggcggcgagaaccaccgcagccatcctggtccgggagcgaccgccgcggcacccccaaccccgccagagcgggcaccaggaagcggggggaggggagcgaggagcctcccgggcggagatgcggcagctcccgcacctccgcaccccgggcgatcagtgggtgaccgcggctgcgagggactttgtcatccgtcctccaggatctggggagaaagagccccatcccttctctctctgccaccatttcggacaccccgcagggactcgttttgggattcgcactgacttcaaggaaggacgcgaacccttctctgaccccagctcgggcggccacctgtctttgccgcggtgacccttctctcatgaccctgcggtgccttgagccctccgggaatggcggggaagggacgcggagccagtgggggaccgcggggtcggcggaggagccatccccgcaggcggcgcgtctggcgaaggccctgcgggagctcggtcagacaggatggtactggggaagtatgactgttaatgaagccaaagagaaattaaaagaggcaccagaaggaactttcttgattagagatagctcgcattcagactacctactaacaatatctgttaaaacatcagctggaccaactaatcttcgaatcgaataccaagacggaaaattcagattggactctatcatatgtgtcaaatccaagcttaaacaatttgacagtgtggttcatctgatcgactactatgttcagatgtgcaaggataagcggacaggtccagaagccccccggaacggcactgttcacctttatctgaccaaaccgctctacacgtcagcaccatctctgcagcatctctgtaggctcaccattaacaaatgtaccggtgccatctggggactgcctttaccaacaagactaaaagattacttggaagaatataaattccaggtataaatgtttctctttttttaaacatgtctcacatagagtatctccgaatgcagctatgtaaaagagaaccaaaacttgagtgctctggataactatatggaatgctttctaagaacagctgaagctaatctaatttaaatttaacagcttgaagaggtagctaggtgtttaaagttcctccagatacttttacctgagtgatgcttcccttcctaaggctgaccaagacctgttgatccttttagattaaaaataaaatgtcgcatgtaaaggctgaagtcgcgttttatcagaatgccttgccttcttaggttcttttccattatgtcaaaggtccaggctccagtaggagagaaagaactcctcataggaatactgaagaagtgggaaggaaccaagctgacacaggcctcactgcaatttgatatgcctgctgatcagagtctcttgggcattttatattttgcattctgatgtacctaggagttttgttaaacagatgatgtatgtgagtatttatcccattttatgcaattaaccaaatcaaccaaaaaaagtgaccatgaagtcctgtatttgtctttttactacatgtaggaactctcatgtgaatgagtactgtagtaatccattctatgggagccttatttcagaaatatttcaaactggtgcaaatggaaaagactttctcttttcctttaaagctaaagacaagaatatcatgctatacaggtgcaactcaatccccgttaataaaaaccaatgtaggtataggcattctaccctttgaaatagctgtgtcccaacctgttgccattgattttttggaaatggctttagaaatatccaagttgtccttgaattgtctaaccatggacataaacagttgtctcccttctactgtgtagaatactttgacttaattttcttccagatacagggggatacctgcctgtttttcaaagtgtttatttactgctgttactatttgattagaatgtattaaataaaaaaaacctgatttcta

SEQ ID NO: 289520 - DNA, 2346 bp, Homo sapiens
aggaggctgcctggtgcggaggcggcggcggcggccgcggccgaggtcgaggtaagagcgcggcgttggtggtttgcattttccgcagcgctcgcgaccgcccgctcggccccggcctcgcctcggagccccgcgagggctgcgcgctcgggccgattcctcgacagcgcccgcggcggcgagaaccaccgcagccatcctggtccgggagcgaccgccgcggcacccccaaccccgccagagcgggcaccaggaagcggggggaggggagcgaggagcctcccgggcggagatgcggcagctcccgcacctccgcaccccgggttggtgcctcggggccccgcagcgctttagggcggagaaccaagtttgtgtgggtgcttcttcctgggggccctcgggctgcgccaggtgtgagaccggaatgccaatttggggaatctctcctgttctttcctttttaattttttctacttgtccttgacaagggcctattcccactggatctgcaggcgatcagtgggtgaccgcggctgcgagggactttgtcatccgtcctccaggatctggggagaaagagccccatcccttctctctctgccaccatttcggacaccccgcagggactcgttttgggattcgcactgacttcaaggaaggacgcgaacccttctctgaccccagctcgggcggccacctgtctttgccgcggtgacccttctctcatgaccctgcggtgccttgagccctccgggaatggcggggaagggacgcggagccagtgggggaccgcggggtcggcggaggagccatccccgcaggcggcgcgtctggcgaaggccctgcgggagctcggtcagacaggatggtactggggaagtatgactgttaatgaagccaaagagaaattaaaagaggcaccagaaggaactttcttgattagagatagctcgcattcagactacctactaacaatatctgttaaaacatcagctggaccaactaatcttcgaatcgaataccaagacggaaaattcagattggactctatcatatgtgtcaaatccaagcttaaacaatttgacagtgtggttcatctgatcgactactatgttcagatgtgcaaggataagcggacaggtccagaagccccccggaacggcactgttcacctttatctgaccaaaccgctctacacgtcagcaccatctctgcagcatctctgtaggctcaccattaacaaatgtaccggtgccatctggggactgcctttaccaacaagactaaaagattacttggaagaatataaattccaggtataaatgtttctctttttttaaacatgtctcacatagagtatctccgaatgcagctatgtaaaagagaaccaaaacttgagtgctctggataactatatggaatgctttctaagaacagctgaagctaatctaatttaaatttaacagcttgaagaggtagctaggtgtttaaagttcctccagatacttttacctgagtgatgcttcccttcctaaggctgaccaagacctgttgatccttttagattaaaaataaaatgtcgcatgtaaaggctgaagtcgcgttttatcagaatgccttgccttcttaggttcttttccattatgtcaaaggtccaggctccagtaggagagaaagaactcctcataggaatactgaagaagtgggaaggaaccaagctgacacaggcctcactgcaatttgatatgcctgctgatcagagtctcttgggcattttatattttgcattctgatgtacctaggagttttgttaaacagatgatgtatgtgagtatttatcccattttatgcaattaaccaaatcaaccaaaaaaagtgaccatgaagtcctgtatttgtctttttactacatgtaggaactctcatgtgaatgagtactgtagtaatccattctatgggagccttatttcagaaatatttcaaactggtgcaaatggaaaagactttctcttttcctttaaagctaaagacaagaatatcatgctatacaggtgcaactcaatccccgttaataaaaaccaatgtaggtataggcattctaccctttgaaatagctgtgtcccaacctgttgccattgattttttggaaatggctttagaaatatccaagttgtccttgaattgtctaaccatggacataaacagttgtctcccttctactgtgtagaatactttgacttaattttcttccagatacagggggatacctgcctgtttttcaaagtgtttatttactgctgttactatttgattagaatgtattaaataaaaaaaacctgatttcta

SEQ ID NO: 289521 - DNA, 2211 bp, Homo sapiens
agccgcggcctcaactaaaagtggccattgacctttcaagctttcgagcagtgatgcaatagaatagtatttcaaagaaaaatgcttatcgaaattttggatccggttttcccgtgattgttaagggtttcttttaaaaagtaggtcacatttcaagtaggtcatatttcgggggcgggtgcgcagacaaggagatgagtttccactaaggccagggggcctccaacggggttggaggtgagaatcccaggtagggtagaggtgccgagatccttccgaatcccagccctggggcgtcagccctgcagggaatggcagagacactctccggactgagggaaccgaggccagtcaccaagccccttccgggcgcgcaggcgatcagtgggtgaccgcggctgcgagggactttgtcatccgtcctccaggatctggggagaaagagccccatcccttctctctctgccaccatttcggacaccccgcagggactcgttttgggattcgcactgacttcaaggaaggacgcgaacccttctctgaccccagctcgggcggccacctgtctttgccgcggtgacccttctctcatgaccctgcggtgccttgagccctccgggaatggcggggaagggacgcggagccagtgggggaccgcggggtcggcggaggagccatccccgcaggcggcgcgtctggcgaaggccctgcgggagctcggtcagacaggatggtactggggaagtatgactgttaatgaagccaaagagaaattaaaagaggcaccagaaggaactttcttgattagagatagctcgcattcagactacctactaacaatatctgttaaaacatcagctggaccaactaatcttcgaatcgaataccaagacggaaaattcagattggactctatcatatgtgtcaaatccaagcttaaacaatttgacagtgtggttcatctgatcgactactatgttcagatgtgcaaggataagcggacaggtccagaagccccccggaacggcactgttcacctttatctgaccaaaccgctctacacgtcagcaccatctctgcagcatctctgtaggctcaccattaacaaatgtaccggtgccatctggggactgcctttaccaacaagactaaaagattacttggaagaatataaattccaggtataaatgtttctctttttttaaacatgtctcacatagagtatctccgaatgcagctatgtaaaagagaaccaaaacttgagtgctctggataactatatggaatgctttctaagaacagctgaagctaatctaatttaaatttaacagcttgaagaggtagctaggtgtttaaagttcctccagatacttttacctgagtgatgcttcccttcctaaggctgaccaagacctgttgatccttttagattaaaaataaaatgtcgcatgtaaaggctgaagtcgcgttttatcagaatgccttgccttcttaggttcttttccattatgtcaaaggtccaggctccagtaggagagaaagaactcctcataggaatactgaagaagtgggaaggaaccaagctgacacaggcctcactgcaatttgatatgcctgctgatcagagtctcttgggcattttatattttgcattctgatgtacctaggagttttgttaaacagatgatgtatgtgagtatttatcccattttatgcaattaaccaaatcaaccaaaaaaagtgaccatgaagtcctgtatttgtctttttactacatgtaggaactctcatgtgaatgagtactgtagtaatccattctatgggagccttatttcagaaatatttcaaactggtgcaaatggaaaagactttctcttttcctttaaagctaaagacaagaatatcatgctatacaggtgcaactcaatccccgttaataaaaaccaatgtaggtataggcattctaccctttgaaatagctgtgtcccaacctgttgccattgattttttggaaatggctttagaaatatccaagttgtccttgaattgtctaaccatggacataaacagttgtctcccttctactgtgtagaatactttgacttaattttcttccagatacagggggatacctgcctgtttttcaaagtgtttatttactgctgttactatttgattagaatgtattaaataaaaaaaacctgatttcta

SEQ ID NO: 289522 - DNA, 1937 bp, Homo sapiens
cgcagctcggagcgccggggaagagagagtccgaaccgcggctctgccccgcggcctagcgttgctgcctgctttctccagccccttctcggcgtctggaagtgcgatcagtgggtgaccgcggctgcgagggactttgtcatccgtcctccaggatctggggagaaagagccccatcccttctctctctgccaccatttcggacaccccgcagggactcgttttgggattcgcactgacttcaaggaaggacgcgaacccttctctgaccccagctcgggcggccacctgtctttgccgcggtgacccttctctcatgaccctgcggtgccttgagccctccgggaatggcggggaagggacgcggagccagtgggggaccgcggggtcggcggaggagccatccccgcaggcggcgcgtctggcgaaggccctgcgggagctcggtcagacaggatggtactggggaagtatgactgttaatgaagccaaagagaaattaaaagaggcaccagaaggaactttcttgattagagatagctcgcattcagactacctactaacaatatctgttaaaacatcagctggaccaactaatcttcgaatcgaataccaagacggaaaattcagattggactctatcatatgtgtcaaatccaagcttaaacaatttgacagtgtggttcatctgatcgactactatgttcagatgtgcaaggataagcggacaggtccagaagccccccggaacggcactgttcacctttatctgaccaaaccgctctacacgtcagcaccatctctgcagcatctctgtaggctcaccattaacaaatgtaccggtgccatctggggactgcctttaccaacaagactaaaagattacttggaagaatataaattccaggtataaatgtttctctttttttaaacatgtctcacatagagtatctccgaatgcagctatgtaaaagagaaccaaaacttgagtgctctggataactatatggaatgctttctaagaacagctgaagctaatctaatttaaatttaacagcttgaagaggtagctaggtgtttaaagttcctccagatacttttacctgagtgatgcttcccttcctaaggctgaccaagacctgttgatccttttagattaaaaataaaatgtcgcatgtaaaggctgaagtcgcgttttatcagaatgccttgccttcttaggttcttttccattatgtcaaaggtccaggctccagtaggagagaaagaactcctcataggaatactgaagaagtgggaaggaaccaagctgacacaggcctcactgcaatttgatatgcctgctgatcagagtctcttgggcattttatattttgcattctgatgtacctaggagttttgttaaacagatgatgtatgtgagtatttatcccattttatgcaattaaccaaatcaaccaaaaaaagtgaccatgaagtcctgtatttgtctttttactacatgtaggaactctcatgtgaatgagtactgtagtaatccattctatgggagccttatttcagaaatatttcaaactggtgcaaatggaaaagactttctcttttcctttaaagctaaagacaagaatatcatgctatacaggtgcaactcaatccccgttaataaaaaccaatgtaggtataggcattctaccctttgaaatagctgtgtcccaacctgttgccattgattttttggaaatggctttagaaatatccaagttgtccttgaattgtctaaccatggacataaacagttgtctcccttctactgtgtagaatactttgacttaattttcttccagatacagggggatacctgcctgtttttcaaagtgtttatttactgctgttactatttgattagaatgtattaaataaaaaaaacctgatttcta

SEQ ID NO: 289523 - DNA, 2096 bp, Homo sapiens
gtatcaacgcagagtggtcattatggccggggacatttcaagtaggtcatatttcgggggcgggtgcgcagacaaggagatgagtttccactaaggccagggggcctccaacggggttggaggtgagaatcccaggtagggtagaggtgccgagatccttccgaatcccagccctggggcgtcagccctgcagggaatggcagagacactctccggactgagggaaccgaggccagtcaccaagccccttccgggcgcgcaggcgatcagtgggtgaccgcggctgcgagggactttgtcatccgtcctccaggatctggggagaaagagccccatcccttctctctctgccaccatttcggacaccccgcagggactcgttttgggattcgcactgacttcaaggaaggacgcgaacccttctctgaccccagctcgggcggccacctgtctttgccgcggtgacccttctctcatgaccctgcggtgccttgagccctccgggaatggcggggaagggacgcggagccagtgggggaccgcggggtcggcggaggagccatccccgcaggcggcgcgtctggcgaaggccctgcgggagctcggtcagacaggatggtactggggaagtatgactgttaatgaagccaaagagaaattaaaagaggcaccagaaggaactttcttgattagagatagctcgcattcagactacctactaacaatatctgttaaaacatcagctggaccaactaatcttcgaatcgaataccaagacggaaaattcagattggactctatcatatgtgtcaaatccaagcttaaacaatttgacagtgtggttcatctgatcgactactatgttcagatgtgcaaggataagcggacaggtccagaagccccccggaacggcactgttcacctttatctgaccaaaccgctctacacgtcagcaccatctctgcagcatctctgtaggctcaccattaacaaatgtaccggtgccatctggggactgcctttaccaacaagactaaaagattacttggaagaatataaattccaggtataaatgtttctctttttttaaacatgtctcacatagagtatctccgaatgcagctatgtaaaagagaaccaaaacttgagtgctctggataactatatggaatgctttctaagaacagctgaagctaatctaatttaaatttaacagcttgaagaggtagctaggtgtttaaagttcctccagatacttttacctgagtgatgcttcccttcctaaggctgaccaagacctgttgatccttttagattaaaaataaaatgtcgcatgtaaaggctgaagtcgcgttttatcagaatgccttgccttcttaggttcttttccattatgtcaaaggtccaggctccagtaggagagaaagaactcctcataggaatactgaagaagtgggaaggaaccaagctgacacaggcctcactgcaatttgatatgcctgctgatcagagtctcttgggcattttatattttgcattctgatgtacctaggagttttgttaaacagatgatgtatgtgagtatttatcccattttatgcaattaaccaaatcaaccaaaaaaagtgaccatgaagtcctgtatttgtctttttactacatgtaggaactctcatgtgaatgagtactgtagtaatccattctatgggagccttatttcagaaatatttcaaactggtgcaaatggaaaagactttctcttttcctttaaagctaaagacaagaatatcatgctatacaggtgcaactcaatccccgttaataaaaaccaatgtaggtataggcattctaccctttgaaatagctgtgtcccaacctgttgccattgattttttggaaatggctttagaaatatccaagttgtccttgaattgtctaaccatggacataaacagttgtctcccttctactgtgtagaatactttgacttaattttcttccagatacagggggatacctgcctgtttttcaaagtgtttatttactgctgttactatttgattagaatgtattaaataaaaaaaacctgatttcta

SEQ ID NO: 289524 - DNA, 2605 bp, Homo sapiens
aggaggctgcctggtgcggaggcggcggcggcggccgcggccgaggtcgaggtaagagcgcggcgttggtggtttgcattttccgcagcgctcgcgaccgcccgctcggccccggcctcgcctcggagccccgcgagggctgcgcgctcgggccgattcctcgacagcgcccgcggcggcgagaaccaccgcagccatcctggtccgggagcgaccgccgcggcacccccaaccccgccagagcgggcaccaggaagcggggggaggggagcgaggagcctcccgggcggagatgcggcagctcccgcacctccgcaccccgggttggtgcctcggggccccgcagcgctttagggcggagaaccaagtttgtgtgggtgcttcttcctgggggccctcgggctgcgccaggtgtgagaccggaatgccaatttggggaatctctcctgttctttcctttttaattttttctacttgtccttgacaagggcctattcccactggatctgcaggtgactatttgctcttcctaggtcgccagtctttgatttcagctagtgaccctgggcgggaagacaccctgttcaccctcctcctgacctccgccccccacctcttcagccaactttatcttggatctctgctctctttatcttttctctagagctgggccagggcgctaactggaagcttggggttaaatggtgcaggaacgtagaggcggaggagtccctgggattttccacgtctatttccccacccccaccccagccgcaggggtccagtttggactgacccaacctcccgctttctctttgtaggcgatcagtgggtgaccgcggctgcgagggactttgtcatccgtcctccaggatctggggagaaagagccccatcccttctctctctgccaccatttcggacaccccgcagggactcgttttgggattcgcactgacttcaaggaaggacgcgaacccttctctgaccccagctcgggcggccacctgtctttgccgcggtgacccttctctcatgaccctgcggtgccttgagccctccgggaatggcggggaagggacgcggagccagtgggggaccgcggggtcggcggaggagccatccccgcaggcggcgcgtctggcgaaggccctgcgggagctcggtcagacaggatggtactggggaagtatgactgttaatgaagccaaagagaaattaaaagaggcaccagaaggaactttcttgattagagatagctcgcattcagactacctactaacaatatctgttaatcagattggactctatcatatgtgtcaaatccaagcttaaacaatttgacagtgtggttcatctgatcgactactatgttcagatgtgcaaggataagcggacaggtccagaagccccccggaacggcactgttcacctttatctgaccaaaccgctctacacgtcagcaccatctctgcagcatctctgtaggctcaccattaacaaatgtaccggtgccatctggggactgcctttaccaacaagactaaaagattacttggaagaatataaattccaggtataaatgtttctctttttttaaacatgtctcacatagagtatctccgaatgcagctatgtaaaagagaaccaaaacttgagtgctctggataactatatggaatgctttctaagaacagctgaagctaatctaatttaaatttaacagcttgaagaggtagctaggtgtttaaagttcctccagatacttttacctgagtgatgcttcccttcctaaggctgaccaagacctgttgatccttttagattaaaaataaaatgtcgcatgtaaaggctgaagtcgcgttttatcagaatgccttgccttcttaggttcttttccattatgtcaaaggtccaggctccagtaggagagaaagaactcctcataggaatactgaagaagtgggaaggaaccaagctgacacaggcctcactgcaatttgatatgcctgctgatcagagtctcttgggcattttatattttgcattctgatgtacctaggagttttgttaaacagatgatgtatgtgagtatttatcccattttatgcaattaaccaaatcaaccaaaaaaagtgaccatgaagtcctgtatttgtctttttactacatgtaggaactctcatgtgaatgagtactgtagtaatccattctatgggagccttatttcagaaatatttcaaactggtgcaaatggaaaagactttctcttttcctttaaagctaaagacaagaatatcatgctatacaggtgcaactcaatccccgttaataaaaaccaatgtaggtataggcattctaccctttgaaatagctgtgtcccaacctgttgccattgattttttggaaatggctttagaaatatccaagttgtccttgaattgtctaaccatggacataaacagttgtctcccttctactgtgtagaatactttgacttaattttcttccagatacagggggatacctgcctgtttttcaaagtgtttatttactgctgttactatttgattagaatgtattaaataaaaaaaacctgatttcta

SEQ ID NO: 289525 - DNA, 1831 bp, Homo sapiens
aggaggctgcctggtgcggaggcggcggcggcggccgcggccgaggtcgaggcgatcagtgggtgaccgcggctgcgagggactttgtcatccgtcctccaggatctggggagaaagagccccatcccttctctctctgccaccatttcggacaccccgcagggactcgttttgggattcgcactgacttcaaggaaggacgcgaacccttctctgaccccagctcgggcggccacctgtctttgccgcggtgacccttctctcatgaccctgcggtgccttgagccctccgggaatggcggggaagggacgcggagccagtgggggaccgcggggtcggcggaggagccatccccgcaggcggcgcgtctggcgaaggccctgcgggagctcggtcagacaggatggtactggggaagtatgactgttaatgaagccaaagagaaattaaaagaggcaccagaaggaactttcttgattagagatagctcgcattcagactacctactaacaatatctgttaaaacatcagctggaccaactaatcttcgaatcgaataccaagacggaaaattcagattggactctatcatatgtgtcaaatccaagcttaaacaatttgacagtgtggttcatctgatcgactactatgttcagatgtgcaaggataagcggacaggtccagaagccccccggaacggcactgttcacctttatctgaccaaaccgctctacacgtcagcaccatctctgcagcatctctgtaggctcaccattaacaaatgtaccggtgccatctggggactgcctttaccaacaagactaaaagattacttggaagaatataaattccaggtataaatgtttctctttttttaaacatgtctcacatagagtatctccgaatgcagctatgtaaaagagaaccctaatctaatttaaatttaacagcttgaagaggtagctaggtgtttaaagttcctccagatacttttacctgagtgatgcttcccttcctaaggctgaccaagacctgttgatccttttagattaaaaataaaatgtcgcatgtaaaggctgaagtcgcgttttatcagaatgccttgccttcttaggttcttttccattatgtcaaaggtccaggctccagtaggagagaaagaactcctcataggaatactgaagaagtgggaaggaaccaagctgacacaggcctcactgcaatttgatatgcctgctgatcagagtctcttgggcattttatattttgcattctgatgtacctaggagttttgttaaacagatgatgtatgtgagtatttatcccattttatgcaattaaccaaatcaaccaaaaaaagtgaccatgaagtcctgtatttgtctttttactacatgtaggaactctcatgtgaatgagtactgtagtaatccattctatgggagccttatttcagaaatatttcaaactggtgcaaatggaaaagactttctcttttcctttaaagctaaagacaagaatatcatgctatacaggtgcaactcaatccccgttaataaaaaccaatgtaggtataggcattctaccctttgaaatagctgtgtcccaacctgttgccattgattttttggaaatggctttagaaatatccaagttgtccttgaattgtctaaccatggacataaacagttgtctcccttctactgtgtagaatactttgacttaattttcttccagatacagggggatacctgcctgtttttcaaagtgtttatttactgctgttactatttgattagaatgtattaaataaaaaaaacctgatttcta

SEQ ID NO: 289526 - DNA, 4121 bp, Homo sapiens
aggaggctgcctggtgcggaggcggcggcggcggccgcggccgaggtcgaggcgatcagtgggtgaccgcggctgcgagggactttgtcatccgtcctccaggatctggggagaaagagccccatcccttctctctctgccaccatttcggacaccccgcagggactcgttttgggattcgcactgacttcaaggaaggacgcgaacccttctctgaccccagctcgggcggccacctgtctttgccgcggtgacccttctctcatgaccctgcggtgccttgagccctccgggaatggcggggaagggacgcggagccagtgggggaccgcggggtcggcggaggagccatccccgcaggcggcgcgtctggcgaaggccctgcgggagctcggtcagacaggatggtactggggaagtatgactgttaatgaagccaaagagaaattaaaagaggcaccagaaggaactttcttgattagagatagctcgcattcagactacctactaacaatatctgttaaaacatcagctggaccaactaatcttcgaatcgaataccaagacggaaaattcagattggactctatcatatgtgtcaaatccaagcttaaacaatttgacagtgtggttcatctgatcgactactatgttcagatgtgcaaggataagcggacaggtccagaagccccccggaacggcactgttcacctttatctgaccaaaccgctctacacgtcagcaccatctctgcagcatctctgtaggctcaccattaacaaatgtaccggtgccatctggggactgcctttaccaacaagactaaaagattacttggaagaatataaattccagccagctgttttttatcctggttagaagaattttgtgttttcttttagctatggatctttgaacattaccctatgatcgaagagttttgagttgggtttttagatgttggttgtcatggagaaacaggaatctggtgtatgccagccatcatcatcatcatcataaccctttggatgaattttcattatcaagggatctggaaggctgtcttcgctctgcttcccagctaacaaacagatgtgttcccagaagatgatgggcatagggtgtgtttttgcaagtcatttttcccatttacgtagattattcttatttccaattgatcctcaatagataagagtgccattgagctttattttcatctgtcaggcaattaagaaaaaagtaaaggaaacaaaaaagctataatatactaaggaaattcttagattctttggtaaaattaaaagaatcttggtgcatgaatgatccggccctaatctatccatcttgcacatttgggttttcctggatctctcttaaagtggggcacatctctggtcttgatagtcaaggaggagggttggggtaatcagatgtctcaagcagaggtgcatcattgagcctgggtaatggctgaaagtcccccagatatccagtttgaagctgcgttgggcaggccatgggttttattacgtccaaggcgtgacaggcaaccattctataacagaccaactcttgggcttccagaagactgaaaaaagctagaacatttactaatgccaggtgttgcatttgacactttacaagtataacctcactgaaagttccccacaaacatctgaagtagattctgcttttatctccacttcagagacaaggagattgacacttacacagattaaatgatttaatagtgtcgaaagacaaaatcacaacaatttctcttaaagatcttaattacctttatttgcaattccagaattgggtaacacttcattccataaaatagagtaagtgttccaattagctaagcagaagaggttggttttacagccagagaggagtagaagaaagcaaaaaacagaacccagagtggattggtcctttcaaagttaagttccttgtaaggtggggacagggagacagaacaatagaaaagtaactgattggttaacatcaggttactccaggttacttttttgtaaggattacagtagagggaacttaattatcatgctgattgaaactagcctgcttgggaaattaggctgttacctctctcccgatttctcagagggtcagataacaacctattttcagtttggtaaaaatctcagcttgagtgactccattttgattaaattagatttttggggtctagtgcaagaccttagtccaaaacaatgactttctataatttttatttaacaggagggaaacttgagatttgaattcaagccactctgactcaaaagccatggttttctcactcttttgttcattttctcaataagcttgcaaatgcttttaacctctgatgcctgcagccagcatgtacctcaatattgtctgctagtcacatgtaggtaatatttcatcatgtggttaatactaagagggctatgacctcttaataatgatgcatcttaataatgatgctattattgggactttgatttcagaagtaatgcaagatctgcctaaatcctaattatccagcttggaagagtccctgacatctgaatttacaccttttcttcccttcttttttttttgagacggagtttcgcttttgttgcctaggctggagtgcaatggcatgatctcagctcactgcaacctctgcctcccaggttcaagtgattctctcgcctcagcctcccgagtagctgggattacaggtgcctgccaccatgcccaactaatttttgtattttttgtagagacagcgtttcaccatgttggccaggctagtctcaaactcctgacctcaggtgattcacctgtctcggcctcccaaagtgctgggattacaggtgtgagccatcacgcctggccattcctcccttcttttaatctcctttaggtgtctatccagtgcaaccataacccacaagctcttccctatcactcctttcctttctctggaggtaaattttataaatgatgtgtccatcataatagccattttacgttgcagaacaaacaaccccaaactctcggtggcttaaaacaataaagatttctacatctatacacatctgtcataatcaccagggaggctcttttagccactcagaaccaggctgatgaagcagctgcagcacctcctcaaacagctggtctgaggtgctgagctgatgggcaaggagaatcagaggatctcttagtggtgtttaaatgccctgtcacttctgctcctgacagattggccagaactctgtaaaatagtgccacccaaccataagggggccaggaagcacagttctcccctgtgccaagaaggagagaaacagaaatgtttggtgagcggcatggtgtaaccaccacatataccatgccatatatatcctgcttccttctttttttctgcctagcttggcaaatctgacttcacgtaaactttatagaacatgtatagcctctttaattccatttctctttcgcctttgtcttccaaaagtttttcaggtactgcaaaacagtgtctctccttcgtgtaagccaaaaggaaagatctcaagccttgaagtgaaatatacataattcatccctcagtatcttcagggattgatcccaggactcccgcccctgccccctcaaaagccctgccaaggataccaaaatctgaagatgcttaaatctcttatatgaaacggtatagtatttgcatataaccggcatacaccctcacatataccttaaatcatctctaaattacttaataatacctgatacatgtaaatactatgtaaatagttgttatactatattttaaaggtttgtattatttattagtattgtattgttattttttattgcttttttttccctcccccaaatattttcgttctgtggttggttggatccgtggatgggaaacccacgggtacagaggactgaccatattaaagagttagggctactaacctcaaaaagtttctgaatgaccggaagttcttctgatcttcacaaacatctcttgggttttctcacttgctaaaattaaatctgtcttttctccagtgtcaatattcaagataaataaattatgttcacattca

SEQ ID NO: 289527 - DNA, 529 bp, Homo sapiens
ggtggggggcacaccaaccatccaaaaaagttgcttctgtttttactgtagttcaattacaggagttgggttttccactttttaaagggcatggcttttatttctaacttctgatttttttctaatttacctaaatctttattttacttaaataatgttaaaagtgtcatgcttcatcagccagtgtgtcatgctgcagatgttcttttggttcattagaagaaaatcttaagaagagcttcagaaagttgattttttaaaaaagaaagaaaactggctcgccgtttgtgttcataaaatggacccaaatttttattaaattcctactgaaagtatttgtggtggcccggtaaactttcgctcacacaccaccttttttttttttcttttttagagctaaaaaaattattgccaattacttgctctgttctaagaattcttataataactgttttaccctcttttctttttctttttgaacaaaaaccccaggatggtactggggaagtatgactgttaatgaagccaa

SEQ ID NO: 289528 - DNA, 1938 bp, Homo sapiens
ggcttactcactatagggctcgagcggccgcccgggcaggtctagaattcagcggccgctgaattctagcggaggcggcggcggcggccgcggccgaggtcgaggcgatcagtgggtgaccgcggctgcgagggactttgtcatccgtcctccaggatctggggagaaagagccccatcccttctctctctgccaccatttcggacaccccgcagggactcgttttgggattcgcactgacttcaaggaaggacgcgaacccttctctgaccccagctcgggcggccacctgtctttgccgcggtgacccttctctcatgaccctgcggtgccttgagccctccgggaatggcggggaagggacgcggagccagtgggggaccgcggggtcggcggaggagccatccccgcaggcggcgcgtctggcgaaggccctgcgggagctcggtcagacaggatggtactggggaagtatgactgttaatgaagccaaagagaaattaaaagaggcaccagaaggaactttcttgattagagatagctcgcattcagactacctactaacaatatctgttaaaacatcagctggaccaactaatcttcgaatcgaataccaagacggaaaattcagattggactctatcatatgtgtcaaatccaagcttaaacaatttgacagtgtggttcatctgatcgactactatgttcagatgtgcaaggataagcggacaggtccagaagccccccggaacggcactgttcacctttatctgaccaaaccgctctacacgtcagcaccatctctgcagcatctctgtaggctcaccattaacaaatgtaccggtgccatctggggactgcctttaccaacaagactaaaagattacttggaagaatataaattccaggtataaatgtttctctttttttaaacatgtctcacatagagtatctccgaatgcagctatgtaaaagagaaccaaaacttgagtgctctggataactatatggaatgctttctaagaacagctgaagctaatctaatttaaatttaacagcttgaagaggtagctaggtgtttaaagttcctccagatacttttacctgagtgatgcttcccttcctaaggctgaccaagacctgttgatccttttagattaaaaataaaatgtcgcatgtaaaggctgaagtcgcgttttatcagaatgccttgccttcttaggttcttttccattatgtcaaaggtccaggctccagtaggagagaaagaactcctcataggaatactgaagaagtgggaaggaaccaagctgacacaggcctcactgcaatttgatatgcctgctgatcagagtctcttgggcattttatattttgcattctgatgtacctaggagttttgttaaacagatgatgtatgtgagtatttatcccattttatgcaattaaccaaatcaaccaaaaaaagtgaccatgaagtcctgtatttgtctttttactacatgtaggaactctcatgtgaatgagtactgtagtaatccattctatgggagccttatttcagaaatatttcaaactggtgcaaatggaaaagactttctcttttcctttaaagctaaagacaagaatatcatgctatacaggtgcaactcaatccccgttaataaaaaccaatgtaggtataggcattctaccctttgaaatagctgtgtcccaacctgttgccattgattttttggaaatggctttagaaatatccaagttgtccttgaattgtctaaccatggacataaacagttgtctcccttctactgtgtagaatactttgacttaattttcttccagatacagggggatacctgcctgtttttcaaagtgtttatttactgctgttactatttgattagaatgtattaaataaaaaaaacctgatttcta

SEQ ID NO: 289529 - DNA, 5653 bp, Homo sapiens
aaaaaagaaaaggaaaagaaaaagaggccatgttatttctacccagagaaagttgtttgacttcccattttaacattcccccttgccatcttgatgaacttgacccatcttaggtttccagcatagcttgtttctcttcatttttatttctaggttgtggccatcaattctgtatttggtcagaaagtgtctttgtattttgcatattggattagagcatctgctcttaattatctgtaggaataagaggcagagagactggggaatagtagaagcccataaacacatctagccaatagtttcaacttcctccccattctgtctcctttgctagaaccactgacagaaaaatcagctgcttctctgttctctcattttattttccttgtccatcatgtgatagggatgttaatatgcaacaaactggctaaaaaaatatcaagagagaaaagtaagggagatggagcatcagtagtgtgtggaggctcctgagagtcaattactaaaaactgagagattttgtgagctcaatcattatgcataaattattgatagattgaatcagccatggtgggagtattacaccacagaaataggcagatgctataaattaagactctccgccaccagatagctgatttaacaacatagcactgatctaggtattatgtcctcctcaataattgagacctcattagggtaagatcagtttatttgtagcctcttttataccaagcccagtgcttagagcagaataggagtgaacaattcaaggaatgatttttttttttttaatgtgtgtcaatcttatattgggttacattgtcttctactatggatcaggccatctcctgattctgtgtctttttctagttactctggggtatctgtagctaccttttcaatttcttagtaggaaggtgttaggcaatctcaacatcatgtgatcattgtttacaacaactcagctctaatagatcagggcctcttttttccttctagcttcgttcatttatctcattagttttctctttttttttcttcctccctcccttctcacctgctttctccctccttctctcctttctgccaacgtttattgaatgtctactgtattactcaacagtaggaagtgttctttcattgagggagctcttacagaccatgagaaaggatggagaggatggggactaacatttattaaacagtctaatatatcccattaccctgcttagccattgcatttcatcttcacaacaacctgatgaggtatgtatgaccctcatttattccaaatgaaacagaaacttaggtcaaatatcctgcccagtcaagtagggaagtcatgaatcaaacccaggttctgcatctcaggataccatattgtataggagctgtaattacatgaataacttattgtaaaatgcattgttaaaggcagtgtagttactttgcggacagggtgccattgacctgctttgagggtttatgaagacaagcccccagaggaaggtatcttgtgtctgagtgttaatagactggaaggagtcctcagacctgctgagtggggaagatcttttggctgaaaggttgaagaagagggtagagatgaggcttctgggaggtgctgtctgagggtgacttggggcagatcttgcaggcctggctgaaaaccttggaatttatcctgagggcagtagggagcagatgtcagctttttaaatggaggggaaaacaacagaactaagtttgtgttttatatcatccctctggaggtcctttggaaaaatggcttggaacaaagcaagggcggagagagggagaccggttaagtgttaggtaggagggaggtagtccttgtgagaagattggagagagagtcagaggttgactctttccttccttggctgcaggctcagatttgccctggagtatgcggctttgagtcacacagattgcacgcttccctttgaggagcggcttccactttgggcaagttggggtaactggcacagattctcttctcaggaaagcaagaggtcgcggtgcagcgggcacaaccctgaactaggaattggaaaacttggggtccactctggttctctgaccttgggccaaacattgaatctctgttatctgtaaattgaagagcctggagccttcaggatttttggtcccttccaaggaggtcccatctgcccagatgtgatagtacattggggtgagagtgctcagaggagaggcaggctccacctatcagtggagtctcagtttctacgtagattgtagtacagattttacctctatgctataatatattctcatttattttgaaaatatacttccttcttaactctgggttttgtttttttttttttttttcacagccagctgttttttatcctggttagaagaattttgtgttttcttttagctatggatctttgaacattaccctatgatcgaagagttttgagttgggtttttagatgttggttgtcatggagaaacaggaatctggtgtatgccagccatcatcatcatcatcataaccctttggatgaattttcattatcaagggatctggaaggctgtcttcgctctgcttcccagctaacaaacagatgtgttcccagaagatgatgggcatagggtgtgtttttgcaagtcatttttcccatttacgtagattattcttatttccaattgatcctcaatagataagagtgccattgagctttattttcatctgtcaggcaattaagaaaaaagtaaaggaaacaaaaaagctataatatactaaggaaattcttagattctttggtaaaattaaaagaatcttggtgcatgaatgatccggccctaatctatccatcttgcacatttgggttttcctggatctctcttaaagtggggcacatctctggtcttgatagtcaaggaggagggttggggtaatcagatgtctcaagcagaggtgcatcattgagcctgggtaatggctgaaagtcccccagatatccagtttgaagctgcgttgggcaggccatgggttttattacgtccaaggcgtgacaggcaaccattctataacagaccaactcttgggcttccagaagactgaaaaaagctagaacatttactaatgccaggtgttgcatttgacactttacaagtataacctcactgaaagttccccacaaacatctgaagtagattctgcttttatctccacttcagagacaaggagattgacacttacacagattaaatgatttaatagtgtcgaaagacaaaatcacaacaatttctcttaaagatcttaattacctttatttgcaattccagaattgggtaacacttcattccataaaatagagtaagtgttccaattagctaagcagaagaggttggttttacagccagagaggagtagaagaaagcaaaaaacagaacccagagtggattggtcctttcaaagttaagttccttgtaaggtggggacagggagacagaacaatagaaaagtaactgattggttaacatcaggttactccaggttacttttttgtaaggattacagtagagggaacttaattatcatgctgattgaaactagcctgcttgggaaattaggctgttacctctctcccgatttctcagagggtcagataacaacctattttcagtttggtaaaaatctcagcttgagtgactccattttgattaaattagatttttggggtctagtgcaagaccttagtccaaaacaatgactttctataatttttatttaacaggagggaaacttgagatttgaattcaagccactctgactcaaaagccatggttttctcactcttttgttcattttctcaataagcttgcaaatgcttttaacctctgatgcctgcagccagcatgtacctcaatattgtctgctagtcacatgtaggtaatatttcatcatgtggttaatactaagagggctatgacctcttaataatgatgcatcttaataatgatgctattattgggactttgatttcagaagtaatgcaagatctgcctaaatcctaattatccagcttggaagagtccctgacatctgaatttacaccttttcttcccttcttttttttttgagacggagtttcgcttttgttgcctaggctggagtgcaatggcatgatctcagctcactgcaacctctgcctcccaggttcaagtgattctctcgcctcagcctcccgagtagctgggattacaggtgcctgccaccatgcccaactaatttttgtattttttgtagagacagcgtttcaccatgttggccaggctagtctcaaactcctgacctcaggtgattcacctgtctcggcctcccaaagtgctgggattacaggtgtgagccatcacgcctggccattcctcccttcttttaatctcctttaggtgtctatccagtgcaaccataacccacaagctcttccctatcactcctttcctttctctggaggtaaattttataaatgatgtgtccatcataatagccattttacgttgcagaacaaacaaccccaaactctcggtggcttaaaacaataaagatttctacatctatacacatctgtcataatcaccagggaggctcttttagccactcagaaccaggctgatgaagcagctgcagcacctcctcaaacagctggtctgaggtgctgagctgatgggcaaggagaatcagaggatctcttagtggtgtttaaatgccctgtcacttctgctcctgacagattggccagaactctgtaaaatagtgccacccaaccataagggggccaggaagcacagttctcccctgtgccaagaaggagagaaacagaaatgtttggtgagcggcatggtgtaaccaccacatataccatgccatatatatcctgcttccttctttttttctgcctagcttggcaaatctgacttcacgtaaactttatagaacatgtatagcctctttaattccatttctctttcgcctttgtcttccaaaagtttttcaggtactgcaaaacagtgtctctccttcgtgtaagccaaaaggaaagatctcaagccttgaagtgaaatatacataattcatccctcagtatcttcagggattgatcccaggactcccgcccctgccccctcaaaagccctgccaaggataccaaaatctgaagatgcttaaatctcttatatgaaacggtatagtatttgcatataaccggcatacaccctcacatataccttaaatcatctctaaattacttaataatacctgatacatgtaaatactatgtaaatagttgttatactatattttaaaggtttgtattatttattagtattgtattgttattttttattgcttttttttccctcccccaaatattttcgttctgtggttggttggatccgtggatgggaaacccacgggtacagaggactgaccatattaaagagttagggctactaacctcaaaaagtttctgaatgaccggaagttcttctgatcttcacaaacatctcttgggttttctcacttgctaaaattaaatctgtcttttctccagtgtcaatattcaagataaataaattatgttcacattca

SEQ ID NO: 289530 - DNA, 2036 bp, Homo sapiens
ctcgctgctcctgggaccgacgtttaactcttgccaagtctcgtcgcagccgccgcggctggcgggccttgggcttcccctgaagcatgagccctctcgcccgcagccaccctcaccgcgtggcccgcggacagtgcgcgccggggtcccgggtgcacagcctcaggataccccgtgcccgcagctcgggcgcccgcggcaggcgatcagtgggtgaccgcggctgcgagggactttgtcatccgtcctccaggatctggggagaaagagccccatcccttctctctctgccaccatttcggacaccccgcagggactcgttttgggattcgcactgacttcaaggaaggacgcgaacccttctctgaccccagctcgggcggccacctgtctttgccgcggtgacccttctctcatgaccctgcggtgccttgagccctccgggaatggcggggaagggacgcggagccagtgggggaccgcggggtcggcggaggagccatccccgcaggcggcgcgtctggcgaaggccctgcgggagctcggtcagacaggatggtactggggaagtatgactgttaatgaagccaaagagaaattaaaagaggcaccagaaggaactttcttgattagagatagctcgcattcagactacctactaacaatatctgttaaaacatcagctggaccaactaatcttcgaatcgaataccaagacggaaaattcagattggactctatcatatgtgtcaaatccaagcttaaacaatttgacagtgtggttcatctgatcgactactatgttcagatgtgcaaggataagcggacaggtccagaagccccccggaacggcactgttcacctttatctgaccaaaccgctctacacgtcagcaccatctctgcagcatctctgtaggctcaccattaacaaatgtaccggtgccatctggggactgcctttaccaacaagactaaaagattacttggaagaatataaattccaggtataaatgtttctctttttttaaacatgtctcacatagagtatctccgaatgcagctatgtaaaagagaaccaaaacttgagtgctctggataactatatggaatgctttctaagaacagctgaagctaatctaatttaaatttaacagcttgaagaggtagctaggtgtttaaagttcctccagatacttttacctgagtgatgcttcccttcctaaggctgaccaagacctgttgatccttttagattaaaaataaaatgtcgcatgtaaaggctgaagtcgcgttttatcagaatgccttgccttcttaggttcttttccattatgtcaaaggtccaggctccagtaggagagaaagaactcctcataggaatactgaagaagtgggaaggaaccaagctgacacaggcctcactgcaatttgatatgcctgctgatcagagtctcttgggcattttatattttgcattctgatgtacctaggagttttgttaaacagatgatgtatgtgagtatttatcccattttatgcaattaaccaaatcaaccaaaaaaagtgaccatgaagtcctgtatttgtctttttactacatgtaggaactctcatgtgaatgagtactgtagtaatccattctatgggagccttatttcagaaatatttcaaactggtgcaaatggaaaagactttctcttttcctttaaagctaaagacaagaatatcatgctatacaggtgcaactcaatccccgttaataaaaaccaatgtaggtataggcattctaccctttgaaatagctgtgtcccaacctgttgccattgattttttggaaatggctttagaaatatccaagttgtccttgaattgtctaaccatggacataaacagttgtctcccttctactgtgtagaatactttgacttaattttcttccagatacagggggatacctgcctgtttttcaaagtgtttatttactgctgttactatttgattagaatgtattaaataaaaaaaacctgatttcta

SEQ ID NO: 289531 - DNA, 2655 bp, Homo sapiens
aggaggctgcctggtgcggaggcggcggcggcggccgcggccgaggtcgaggtaagagcgcggcgttggtggtttgcattttccgcagcgctcgcgaccgcccgctcggccccggcctcgcctcggagccccgcgagggctgcgcgctcgggccgattcctcgacagcgcccgcggcggcgagaaccaccgcagccatcctggtccgggagcgaccgccgcggcacccccaaccccgccagagcgggcaccaggaagcggggggaggggagcgaggagcctcccgggcggagatgcggcagctcccgcacctccgcaccccgggttggtgcctcggggccccgcagcgctttagggcggagaaccaagtttgtgtgggtgcttcttcctgggggccctcgggctgcgccaggtgtgagaccggaatgccaatttggggaatctctcctgttctttcctttttaattttttctacttgtccttgacaagggcctattcccactggatctgcaggtgactatttgctcttcctaggtcgccagtctttgatttcagctagtgaccctgggcgggaagacaccctgttcaccctcctcctgacctccgccccccacctcttcagccaactttatcttggatctctgctctctttatcttttctctagagctgggccagggcgctaactggaagcttggggttaaatggtgcaggaacgtagaggcggaggagtccctgggattttccacgtctatttccccacccccaccccagccgcaggggtccagtttggactgacccaacctcccgctttctctttgtaggcgatcagtgggtgaccgcggctgcgagggactttgtcatccgtcctccaggatctggggagaaagagccccatcccttctctctctgccaccatttcggacaccccgcagggactcgttttgggattcgcactgacttcaaggaaggacgcgaacccttctctgaccccagctcgggcggccacctgtctttgccgcggtgacccttctctcatgaccctgcggtgccttgagccctccgggaatggcggggaagggacgcggagccagtgggggaccgcggggtcggcggaggagccatccccgcaggcggcgcgtctggcgaaggccctgcgggagctcggtcagacaggatggtactggggaagtatgactgttaatgaagccaaagagaaattaaaagaggcaccagaaggaactttcttgattagagatagctcgcattcagactacctactaacaatatctgttaaaacatcagctggaccaactaatcttcgaatcgaataccaagacggaaaattcagattggactctatcatatgtgtcaaatccaagcttaaacaatttgacagtgtggttcatctgatcgactactatgttcagatgtgcaaggataagcggacaggtccagaagccccccggaacggcactgttcacctttatctgaccaaaccgctctacacgtcagcaccatctctgcagcatctctgtaggctcaccattaacaaatgtaccggtgccatctggggactgcctttaccaacaagactaaaagattacttggaagaatataaattccaggtataaatgtttctctttttttaaacatgtctcacatagagtatctccgaatgcagctatgtaaaagagaaccaaaacttgagtgctctggataactatatggaatgctttctaagaacagctgaagctaatctaatttaaatttaacagcttgaagaggtagctaggtgtttaaagttcctccagatacttttacctgagtgatgcttcccttcctaaggctgaccaagacctgttgatccttttagattaaaaataaaatgtcgcatgtaaaggctgaagtcgcgttttatcagaatgccttgccttcttaggttcttttccattatgtcaaaggtccaggctccagtaggagagaaagaactcctcataggaatactgaagaagtgggaaggaaccaagctgacacaggcctcactgcaatttgatatgcctgctgatcagagtctcttgggcattttatattttgcattctgatgtacctaggagttttgttaaacagatgatgtatgtgagtatttatcccattttatgcaattaaccaaatcaaccaaaaaaagtgaccatgaagtcctgtatttgtctttttactacatgtaggaactctcatgtgaatgagtactgtagtaatccattctatgggagccttatttcagaaatatttcaaactggtgcaaatggaaaagactttctcttttcctttaaagctaaagacaagaatatcatgctatacaggtgcaactcaatccccgttaataaaaaccaatgtaggtataggcattctaccctttgaaatagctgtgtcccaacctgttgccattgattttttggaaatggctttagaaatatccaagttgtccttgaattgtctaaccatggacataaacagttgtctcccttctactgtgtagaatactttgacttaattttcttccagatacagggggatacctgcctgtttttcaaagtgtttatttactgctgttactatttgattagaatgtattaaataaaaaaaacctgatttcta

SEQ ID NO: 289532 - DNA, 2093 bp, Homo sapiens
aaggggaccgcctccggtccccggccgtgggcaccgggacgagcacggcgtccccacgccatcgatgtgtcttagagccggagagtctggtttccgaggacccacagtcgctcctgcacgcccaccccccgcaaaagtgcggccaggagggtcgcatcgagggggcgccgccgggatgtttagaggaacccacccccgtggcaggccaagggccaaggatcgctatccttccctgaacccgggcgctcagctggcccgggcgatcagtgggtgaccgcggctgcgagggactttgtcatccgtcctccaggatctggggagaaagagccccatcccttctctctctgccaccatttcggacaccccgcagggactcgttttgggattcgcactgacttcaaggaaggacgcgaacccttctctgaccccagctcgggcggccacctgtctttgccgcggtgacccttctctcatgaccctgcggtgccttgagccctccgggaatggcggggaagggacgcggagccagtgggggaccgcggggtcggcggaggagccatccccgcaggcggcgcgtctggcgaaggccctgcgggagctcggtcagacaggatggtactggggaagtatgactgttaatgaagccaaagagaaattaaaagaggcaccagaaggaactttcttgattagagatagctcgcattcagactacctactaacaatatctgttaaaacatcagctggaccaactaatcttcgaatcgaataccaagacggaaaattcagattggactctatcatatgtgtcaaatccaagcttaaacaatttgacagtgtggttcatctgatcgactactatgttcagatgtgcaaggataagcggacaggtccagaagccccccggaacggcactgttcacctttatctgaccaaaccgctctacacgtcagcaccatctctgcagcatctctgtaggctcaccattaacaaatgtaccggtgccatctggggactgcctttaccaacaagactaaaagattacttggaagaatataaattccaggtataaatgtttctctttttttaaacatgtctcacatagagtatctccgaatgcagctatgtaaaagagaaccaaaacttgagtgctctggataactatatggaatgctttctaagaacagctgaagctaatctaatttaaatttaacagcttgaagaggtagctaggtgtttaaagttcctccagatacttttacctgagtgatgcttcccttcctaaggctgaccaagacctgttgatccttttagattaaaaataaaatgtcgcatgtaaaggctgaagtcgcgttttatcagaatgccttgccttcttaggttcttttccattatgtcaaaggtccaggctccagtaggagagaaagaactcctcataggaatactgaagaagtgggaaggaaccaagctgacacaggcctcactgcaatttgatatgcctgctgatcagagtctcttgggcattttatattttgcattctgatgtacctaggagttttgttaaacagatgatgtatgtgagtatttatcccattttatgcaattaaccaaatcaaccaaaaaaagtgaccatgaagtcctgtatttgtctttttactacatgtaggaactctcatgtgaatgagtactgtagtaatccattctatgggagccttatttcagaaatatttcaaactggtgcaaatggaaaagactttctcttttcctttaaagctaaagacaagaatatcatgctatacaggtgcaactcaatccccgttaataaaaaccaatgtaggtataggcattctaccctttgaaatagctgtgtcccaacctgttgccattgattttttggaaatggctttagaaatatccaagttgtccttgaattgtctaaccatggacataaacagttgtctcccttctactgtgtagaatactttgacttaattttcttccagatacagggggatacctgcctgtttttcaaagtgtttatttactgctgttactatttgattagaatgtattaaataaaaaaaacctgatttcta

SEQ ID NO: 289533 - DNA, 2048 bp, Homo sapiens
  misc_feature (37)..(38): n is a, c, g, or t
  misc_feature (40)..(40): n is a, c, g, or t
  misc_feature (50)..(50): n is a, c, g, or t
  misc_feature (53)..(53): n is a, c, g, or t
atggccatgtatggggctacacataatgaaacaccgnntntggtatttanaanagcagtgtcgtcgatacggatgccggtggggctggcttccctagcatgagccctctcgcccgcagccaccctcaccgcgtggcccgcggacagtgcgcgccggggtcccgggtgcacagcctcaggataccccgtgcccgcagctcgggcgcccgcggcaggcgatcagtgggtgaccgcggctgcgagggactttgtcatccgtcctccaggatctggggagaaagagccccatcccttctctctctgccaccatttcggacaccccgcagggactcgttttgggattcgcactgacttcaaggaaggacgcgaacccttctctgaccccagctcgggcggccacctgtctttgccgcggtgacccttctctcatgaccctgcggtgccttgagccctccgggaatggcggggaagggacgcggagccagtgggggaccgcggggtcggcggaggagccatccccgcaggcggcgcgtctggcgaaggccctgcgggagctcggtcagacaggatggtactggggaagtatgactgttaatgaagccaaagagaaattaaaagaggcaccagaaggaactttcttgattagagatagctcgcattcagactacctactaacaatatctgttaaaacatcagctggaccaactaatcttcgaatcgaataccaagacggaaaattcagattggactctatcatatgtgtcaaatccaagcttaaacaatttgacagtgtggttcatctgatcgactactatgttcagatgtgcaaggataagcggacaggtccagaagccccccggaacggcactgttcacctttatctgaccaaaccgctctacacgtcagcaccatctctgcagcatctctgtaggctcaccattaacaaatgtaccggtgccatctggggactgcctttaccaacaagactaaaagattacttggaagaatataaattccaggtataaatgtttctctttttttaaacatgtctcacatagagtatctccgaatgcagctatgtaaaagagaaccaaaacttgagtgctctggataactatatggaatgctttctaagaacagctgaagctaatctaatttaaatttaacagcttgaagaggtagctaggtgtttaaagttcctccagatacttttacctgagtgatgcttcccttcctaaggctgaccaagacctgttgatccttttagattaaaaataaaatgtcgcatgtaaaggctgaagtcgcgttttatcagaatgccttgccttcttaggttcttttccattatgtcaaaggtccaggctccagtaggagagaaagaactcctcataggaatactgaagaagtgggaaggaaccaagctgacacaggcctcactgcaatttgatatgcctgctgatcagagtctcttgggcattttatattttgcattctgatgtacctaggagttttgttaaacagatgatgtatgtgagtatttatcccattttatgcaattaaccaaatcaaccaaaaaaagtgaccatgaagtcctgtatttgtctttttactacatgtaggaactctcatgtgaatgagtactgtagtaatccattctatgggagccttatttcagaaatatttcaaactggtgcaaatggaaaagactttctcttttcctttaaagctaaagacaagaatatcatgctatacaggtgcaactcaatccccgttaataaaaaccaatgtaggtataggcattctaccctttgaaatagctgtgtcccaacctgttgccattgattttttggaaatggctttagaaatatccaagttgtccttgaattgtctaaccatggacataaacagttgtctcccttctactgtgtagaatactttgacttaattttcttccagatacagggggatacctgcctgtttttcaaagtgtttatttactgctgttactatttgattagaatgtattaaataaaaaaaacctgatttcta

SEQ ID NO: 289534 - DNA, 2434 bp, Homo sapiens
aggaggctgcctggtgcggaggcggcggcggcggccgcggccgaggtcgaggcgatcagtgggtgaccgcggctgcgagggactttgtcatccgtcctccaggatctggggagaaagagccccatcccttctctctctgccaccatttcggacaccccgcagggactcgttttgggattcgcactgacttcaaggaaggacgcgaacccttctctgaccccagctcgggcggccacctgtctttgccgcggtgacccttctctcatgaccctgcggtgccttgagccctccgggaatggcggggaagggacgcggagccagtgggggaccgcggggtcggcggaggagccatccccgcaggcggcgcgtctggcgaaggccctgcgggagctcggtcagacaggatggtactggggaagtatgactgttaatgaagccaaagagaaattaaaagaggcaccagaaggaactttcttgattagagatagctcgcattcagactacctactaacaatatctgttaaaacatcagctggaccaactaatcttcgaatcgaataccaagacggaaaattcagattggactctatcatatgtgtcaaatccaagcttaaacaatttgacagtgtggttcatctgatcgactactatgttcagatgtgcaaggataagcggacaggtccagaagccccccggaacggcactgttcacctttatctgaccaaaccgctctacacgtcagcaccatctctgcagcatctctgtaggctcaccattaacaaatgtaccggtgccatctggggactgcctttaccaacaagactaaaagattacttggaagaatataaattccaggtataaatgtttctctttttttaaacatgtctcacatagagtatctccgaatgcagctatgtaaaagagaaccaaaacttgagtgctctggataactatatggaatgctttctaagaacagctgaagctaatctaatttaaatttaacagcttgaagaggtagctaggtgtttaaagttcctccagatacttttacctgagtgatgcttcccttcctaaggctgaccaagacctgttgatccttttagattaaaaataaaatgtcgcatgtaaaggctgaagtcgcgttttatcagaatgccttgccttcttaggttcttttccattatgtcaaaggtccaggctccagtaggagagaaagaactcctcataggaatactgaagaagtgggaaggaaccaagctgacacaggcctcactgcaatttgatatgcctgctgatcagagtctcttgggcattttatattttgcattctgatgtacctaggagttttgttaaacagatgatgtatgtgagtatttatcccattttatgcaattaaccaaatcaaccaaaaaaagtgaccatgaagtcctgtatttgtctttttactacatgtaggaactctcatgtgaatgagtactgtagtaatccattctatgggagccttatttcagaaatatttcaaactggtgcaaatggaaaagactttctcttttcctttaaagctaaagacaagaatatcatgctatacaggtgcaactcaatccccgttaataaaaaccaatgtaggtataggcattctaccctttgaaatagctgtgtcccaacctgttgccattgattttttggaaatggctttagaaatatccaagttgtccttgaattgtctaaccatggacataaacagttgtctcccttctactgtgtagaatactttgacttaattttcttccagatacagggggatacctgcctgtttttcaaagtgtttatttactgctgttactatttgattagaatgtattaaataaaaaaaacctgatttctacaagttggcacttattgagttctagagaacgtacactttcatggtaatagaggattgccataaaaacttacgtcaagtgaaataagccaattattcaacaaaaggtagaacattacttgccattctgtaaagttatgggctgtacctgccccctttgcaatttggaaagcatggtttagaaactacaggcattgtcaagtggccgggtcttttataatttgaataggcataacactgatgtcctctgtgtttccaaaaacatggtttagaaactacaaacattatgacatggccagtcttttacaagttgagtaggcataatactaaagaaaaatacaaagttttgtggccacttattttttgctatgttagtctgcataactgttataaatgtaccatcttttctagagtccagacattatttattttatggctttaaaattttcctgcatagctacaatcctgtggtgtgtcaccataaaggtggaccctgtgtgaatgagaaaattcagttataaattgtaataaaacctgcttactggaaaatta

SEQ ID NO: 289535 - DNA, 2605 bp, Homo sapiens
aggaggctgcctggtgcggaggcggcggcggcggccgcggccgaggtcgaggtaagagcgcggcgttggtggtttgcattttccgcagcgctcgcgaccgcccgctcggccccggcctcgcctcggagccccgcgagggctgcgcgctcgggccgattcctcgacagcgcccgcggcggcgagaaccaccgcagccatcctggtccgggagcgaccgccgcggcacccccaaccccgccagagcgggcaccaggaagcggggggaggggagcgaggagcctcccgggcggagatgcggcagctcccgcacctccgcaccccgggttggtgcctcggggccccgcagcgctttagggcggagaaccaagtttgtgtgggtgcttcttcctgggggccctcgggctgcgccaggtgtgagaccggaatgccaatttggggaatctctcctgttctttcctttttaattttttctacttgtccttgacaagggcctattcccactggatctgcaggtgactatttgctcttcctaggtcgccagtctttgatttcagctagtgaccctgggcgggaagacaccctgttcaccctcctcctgacctccgccccccacctcttcagccaactttatcttggatctctgctctctttatcttttctctagagctgggccagggcgctaactggaagcttggggttaaatggtgcaggaacgtagaggcggaggagtccctgggattttccacgtctatttccccacccccaccccagccgcaggggtccagtttggactgacccaacctcccgctttctctttgtaggcgatcagtgggtgaccgcggctgcgagggactttgtcatccgtcctccaggatctggggagaaagagccccatcccttctctctctgccaccatttcggacaccccgcagggactcgttttgggattcgcactgacttcaaggaaggacgcgaacccttctctgaccccagctcgggcggccacctgtctttgccgcggtgacccttctctcatgaccctgcggtgccttgagccctccgggaatggcggggaagggacgcggagccagtgggggaccgcggggtcggcggaggagccatccccgcaggcggcgcgtctggcgaaggccctgcgggagctcggtcagacaggatggtactggggaagtatgactgttaatgaagccaaagagaaattaaaagaggcaccagaaggaactttcttgattagagatagctcgcattcagactacctactaacaatatctgttaaaacatcagctggaccaactaatcttcgaatcgaataccaagacggaaaatagtgtggttcatctgatcgactactatgttcagatgtgcaaggataagcggacaggtccagaagccccccggaacggcactgttcacctttatctgaccaaaccgctctacacgtcagcaccatctctgcagcatctctgtaggctcaccattaacaaatgtaccggtgccatctggggactgcctttaccaacaagactaaaagattacttggaagaatataaattccaggtataaatgtttctctttttttaaacatgtctcacatagagtatctccgaatgcagctatgtaaaagagaaccaaaacttgagtgctctggataactatatggaatgctttctaagaacagctgaagctaatctaatttaaatttaacagcttgaagaggtagctaggtgtttaaagttcctccagatacttttacctgagtgatgcttcccttcctaaggctgaccaagacctgttgatccttttagattaaaaataaaatgtcgcatgtaaaggctgaagtcgcgttttatcagaatgccttgccttcttaggttcttttccattatgtcaaaggtccaggctccagtaggagagaaagaactcctcataggaatactgaagaagtgggaaggaaccaagctgacacaggcctcactgcaatttgatatgcctgctgatcagagtctcttgggcattttatattttgcattctgatgtacctaggagttttgttaaacagatgatgtatgtgagtatttatcccattttatgcaattaaccaaatcaaccaaaaaaagtgaccatgaagtcctgtatttgtctttttactacatgtaggaactctcatgtgaatgagtactgtagtaatccattctatgggagccttatttcagaaatatttcaaactggtgcaaatggaaaagactttctcttttcctttaaagctaaagacaagaatatcatgctatacaggtgcaactcaatccccgttaataaaaaccaatgtaggtataggcattctaccctttgaaatagctgtgtcccaacctgttgccattgattttttggaaatggctttagaaatatccaagttgtccttgaattgtctaaccatggacataaacagttgtctcccttctactgtgtagaatactttgacttaattttcttccagatacagggggatacctgcctgtttttcaaagtgtttatttactgctgttactatttgattagaatgtattaaataaaaaaaacctgatttcta

SEQ ID NO: 289536 - DNA, 343 bp, Homo sapiens
tgtggcaccattttcttgaaaaaggctattgattattctctaatctgacaccaacctaagtcattaaaggaattttagttactgaagattgtatattcatgaactcttcacttagctcactggcagcaaaggagttttatttagggggtttgaaaaaggaaatgggtacattttcagctattctgggacgcactgtcagaatgtaagcagttacaactgattccactaaataaacatttgttttccaaaacaatgatgaacattcagcatctgttcatttaattgaaaattcaaagttaaaatattttctctgcatgattctttttcttttcccccctagtgt

SEQ ID NO: 289537 - DNA, 382 bp, Homo sapiens
atctgtctactcccaagaaactaaaggacagacactggactgctgctgcagaaacacccacaattccacaggcttgcttgcgttttaatgtccaccaacagtggagttggcttcccggctgtgaatagattcatggaagatgaacaaaaacaaatgaacaaatcaatgacaacaacagcaacatctgtgcatactatagaagcagatgtgtaattattttgtacattggcttaatactgagaaagagactgaataattattgcacttctggcaagtctatatatactgtctcctgacgaaggaccctccagcaacttcgggctgaaatgaagcagattcactcaatccgcacaaactctcagaaaagtgcatctggaaaaaa

SEQ ID NO: 289538 - DNA, 1047 bp, Homo sapiens
ggtctagataagtgtacatgcttaggccttctgaagcagcatttgaagctgcagtcctgaaaaccatgcaggccggaagagtagataaagaaatatttatttgagatggcacatgtttcttcagaaactcaagatgtttcccccaaagatgaattaactgcttcagaagcctccactaggtctccattgtgtgaacacaccttccctggggactcagacttacggtcaatgattgaagaacatgcttttcaggttttgtcacaaggatccttgttagaaagtccaagttacacagtttgtgtctctgagccagataaagatgatgattttctttctctgaactttcccaggaaactttggaaaatagtggaaagtgaccaattcaagtctatttcatgggatgagaatggaacttgcatagtgattaatgaagaactcttcaagaaagaaattttggaaacaaaggctccttacagaatatttcaaactgatgctatcaaaagttttgttcgacagctcaacctttatggatttagtaaaattcaacagaattttcaaagatctgcctttctagccacctttctgtcagaagagaaagaatcgtctgtcttaagcaagatacgcttcaccaaaatgaaactttccagatcttcaacttatgaaaacaggtatttatgttgcaacttacatttaaaagatgagtcgaattactcataatccttagaagttagcttgtccgcatctgaaaattcacttttaccttgaagttcaatctgtctctgggaaagactagattggaagaataaaattcaagaatgtgatgttttagtaatggaaaagccaagagcgtcaggtggcaaaagtccttctgttactcaagaaaatgctctgaaaaattccttttctcttttttttttgtaaagattaactccacctcaccaccacaatgaggtatttttctcagcaattgacacctgtttactcagttactccctgtaactatgttatgctgtgaagtaggcaatacagttgttaaagaagaataaa

SEQ ID NO: 289539 - DNA, 741 bp, Homo sapiens
ggtctagataagtgtacatgcttaggccttctgaagcagcatttgaagctgcagtcctgaaaaccatgcaggccggaagagtagataaagaaatatttatttgagatggcacatgtttcttcagaaactcaagatgtttcccccaaagatgaattaactgcttcagaagcctccactaggtctccattgtgtgaacacaccttccctggggactcagacttacggtcaatgattgaagaacatgcttttcaggttttgtcacaaggatccttgttagaaagtccaagttacacagtttgtgtctctgagccagataaagatgatgattttctttctctgaactttcccaggaaactttggaaaatagtggaaagtgaccaattcaagtctatttcatgggatgagaatggaacttgcatagtgattaatgaagaactcttcaagaaagaaattttggaaacaaaggctccttacagaatatttcaaactgatgctatcaaaagttttgttcgacagctcaacctttatggatttagtaaaattcaacagaattttcaaagatctgcctttctagccacctttctgtcagaagagaaagaatcgtctgtcttaagcaagttaaagttctattataatccaaatttcaagcgtggctatccccaacttttagtaagagtgaagagaagaattggtgttaaaaatgcttcacctatatctactttattcaacgaagatttcaac

SEQ ID NO: 289540 - DNA, 401 bp, Homo sapiens
ctttcaaattttttaatgttataaggataaaaagtaaaaacactcactgaaaaataataatcctcactatctcaaccagggccacaataaaactttcaactactatatacaatataatagatagaataatatacaaacacccatgcacctatcatttagctgcaataattaccaacatatagtaataatcatacccagcactcccagctgccttaactaaattattttaaagcaaatctcatgtattttgagatttcgctatatttccctaaaggtggttatgaagagagaagttcatgttctccctagcccacttcccagtggtatgagatgcctaaaataatcatttttaaaagtaggtgatgaaactctctcaatggattatatagaaatcacatgac

SEQ ID NO: 289541 - DNA, 414 bp, Homo sapiens
acatatggaaggaacccatccctggtgggccttgaatgatggaggggcccgaagggcagagtgctccagcctgctcagaagaactatttctaacaatgttttttaatagtattttactgggtccaagtggaggagaacttgatgaccttctccatgtcttctctaggtcaacatcgggcaaggtagccatcctcagaaggtcaaagtgtttgggccaggtgtggagagaagtggtctgaaggcaaatgaacctacacacttcacggtggactgtactgaggctggggaaggtgagaaagggctttgttcaacccagtgatcattgctccttggggaaggcagttcttttcataacgtttcaattccttttgaactaggaagtagtccatctgaataggtaatcatctactgagc

SEQ ID NO: 289542 - DNA, 409 bp, Homo sapiens
tctggggtagaacttagtgtagaaaatgtagaaggtaaggcagtgattttagtagtccagatgtgcagtaaaggcaagagttttatcaaatgagcttgatgtgaacatgccagtgtcatgaggataccactgtacagtctccacactgtatctgtgaacatcaggatgatctctacaaaacagcaatcaaaatttacattaactgacttataaaacaaaagttaacagaagacttctgcaaccctatgcagatacaaccgtgatgcttttggattccttaagatgaaggtttgggaccttaaaacatttgtggtgctatctgaaggaatgagaacacaaagaaggaaagtcttaagtgccagctctggcattaaaacagctgcaaaatacaagaactatagtgcctact

SEQ ID NO: 289543 - DNA, 378 bp, Homo sapiens
atgtgaccttaggagaagggaagagttgcaagggaaagggacttgagagttttatcaaatgagcttgatgtgaacatgccagtgtcatgaggataccactgtacagtctccacactgtatctgtgaacatcaggatgatctctacaaaacagcaatcaaaatttacattaactgacttataaaacaaaagttaacagaagacttctgcaaccctatgcagatacaaccgtgatgcttttggattccttaagatgaaggtttgggaccttaaaacatttgtggtgctatctgaaggaatgagaacacaaagaaggaaagtcttaagtgccagctctggcattaaaacagctgcaaaatacaagaactatagtgcctact

SEQ ID NO: 289544 - DNA, 578 bp, Homo sapiens
agtgttggcattaagtgtgatgcccgggtgttaagtgaagatgaggaagacgtggattttgacattattcacaatgccaatgatacgttcacagtcaaatatgtgcctcctgctgctgggcgatacactatcaaagttctctttgcatctcaggtacgtggtggggcctgggaggagatgggtggagtaggcctggattcgctttggccacttgtgtgcatgtctcatctactttttggtgttttgttagtattattatttttgagatggagtctcactctttcacccaagctagagtgcagtggtgtgatcttggctcactgcaacctctgcctcccaggttcaagtgatcctcccacctcagcctcccaagtagctggggactacaggctcataccaccacccagctaatttttttttaatttgtttttatttttttattttttttttgagatggagttttgctcttgttgcccaagctggagtgcaatggcatgatcttggctcactgcaacctctgcctcccgggttcaagtgattctcctgcctcagcctcccaagtagctgggattacaggc

SEQ ID NO: 289545 - DNA, 1233 bp, Homo sapiens
gagaacagacagacctactgacacaggggaggtgagaagggaggtgaccaccaggactggctctgtgagtaccacacagtggggagggggtgggggccaccatgtcatcatatcagaaggaactggagaaatacagagacatagatgaagatgagatcctaaggaccttgagccccgaggagctagagcagctggactgcgaactacaggagatggatcctgagaacatgctcctgccagctggactaagacaacgtgaccagacaaagaagagcccaacggggccactggaccgagaggcccttttgcagtacttggagcaacaggcactagaagtcaaagagcgtgatgacttggtgcccttcacaggcgagaagaaggggaaaccctatattcagcccaagagggaaatcccagcagaggagcagatcaccctggagcctgagctggaggaggcactggcacatgccacagatgctgaaatgtgtgacattgcagcaattctggacatgtacacactgatgagtaacaagcaatactatgatgccctctgcagtggagaaatctgcaacactgaaggcattagcagtgtggtacagcctgacaagtataagccagtgccggatgaacccccaaatcccacaaacattgaggagatactaaagagggtccgaagcaatgacaaggagctggaggaggtgaacttgaataatatacaggacatcccaatacccatgctaagtgagctgtgtgaggcaatgaaggcaaatacctatgtgcggagcttcagtctggtagccacgaggagtggtgaccccattgccaatgcagtggctgacatgttgcgtgagaatcgtagcctccagagcctaaacatcgaatccaacttcattagcagcacaggactcatggctgtgctgaaggcagttcgggaaaatgccacactcactgagctccgtgtagacaatcagcgccagtggcctggtgatgcagtggagatggagatggccaccgtgctagagcagtgtccctctattgtccgctttggctaccactttacacagcaggggccacgagctcgggcagcccaggccatgacccgaaacaatgaactacgtcgccagcaaaagaagagataacactgcatttccctttaccaactagcgctgggagcactggacacttaaatcctcatctgtcctcctttcctgtaaataaaagcccttctatcca

SEQ ID NO: 289546 - DNA, 328 bp, Homo sapiens
ccaagtccctactacccaggcagtggctgacatgttgcgtgagaatcgtagcctccagagcctaaacatcgaatccaacttcattagcagcacaggactcatggctgtgctgaaggcagttcgggaaaatgccacactcactgagctccgtgtagacaatcagcgccagtggcctggtgatgcagtggagatggagatggccaccgtgctagagcagtgtccctctattgtccgctttggctaccactttacacagcaggggccacgagctcgggcacttaaatcctcatctgtcctcctttcctgtaaataaaagcccttctatcca

SEQ ID NO: 289547 - DNA, 1125 bp, Homo sapiens
gagaacagacagacctactgacacaggggaggtgagaagggaggtgaccaccaggactggctctgtgagtaccacacagtggggagggggtgggggccaccatgtcatcatatcagaaggaactggagaaatacagagacatagatgaagatgagatcctaaggaccttgagccccgaggagctagagcagctggactgcgaactacaggagatggatcctgagaacatgctcctgccagctggactaagacaacgtgaccagacaaagaagagcccaacggggccactggaccgagaggcccttttgcagtacttggagcaacaggcactagaagtcaaagagcgtgatgacttggtgcccttcacaggcgagaagaaggggaaaccctatattcagcccaagagggaaatcccagcagaggagcagatcaccctggagcctgagctggaggaggcactggcacatgccacagatgctgaaatgtgtgacattgcagcaattctggacatgtacacactgatgagtaacaagcaatactatgatgccctctgcagtggagaaatctgcaacactgaaggcattagcagtgtggtacagcctgacaagtataagccagtgccggatgaacccccaaatcccacaaacattgaggagatactaaagagggtccgaagcaatgacaaggagctggaggaggtgaacttgaataatatacaggcagtggctgacatgttgcgtgagaatcgtagcctccagagcctaaacatcgaatccaacttcattagcagcacaggactcatggctgtgctgaaggcagttcgggaaaatgccacactcactgagctccgtgtagacaatcagcgccagtggcctggtgatgcagtggagatggagatggccaccgtgctagagcagtgtccctctattgtccgctttggctaccactttacacagcaggggccacgagctcgggcagcccaggccatgacccgaaacaatgaactacgtcgccagcaaaagaagagataacactgcatttccctttaccaactagcgctgggagcactggacacttaaatcctcatctgtcctcctttcctgtaaataaaagcccttctatcca

SEQ ID NO: 289548 - DNA, 1068 bp, Homo sapiens
gagaacagacagacctactgacacaggggaggtgagaagggaggtgaccaccaggactgaacatgctcctgccagctggactaagacaacgtgaccagacaaagaagagcccaacggggccactggaccgagaggcccttttgcagtacttggagcaacaggcactagaagtcaaagagcgtgatgacttggtgcccttcacaggcgagaagaaggggaaaccctatattcagcccaagagggaaatcccagcagaggagcagatcaccctggagcctgagctggaggaggcactggcacatgccacagatgctgaaatgtgtgacattgcagcaattctggacatgtacacactgatgagtaacaagcaatactatgatgccctctgcagtggagaaatctgcaacactgaaggcattagcagtgtggtacagcctgacaagtataagccagtgccggatgaacccccaaatcccacaaacattgaggagatactaaagagggtccgaagcaatgacaaggagctggaggaggtgaacttgaataatatacaggacatcccaatacccatgctaagtgagctgtgtgaggcaatgaaggcaaatacctatgtgcggagcttcagtctggtagccacgaggagtggtgaccccattgccaatgcagtggctgacatgttgcgtgagaatcgtagcctccagagcctaaacatcgaatccaacttcattagcagcacaggactcatggctgtgctgaaggcagttcgggaaaatgccacactcactgagctccgtgtagacaatcagcgccagtggcctggtgatgcagtggagatggagatggccaccgtgctagagcagtgtccctctattgtccgctttggctaccactttacacagcaggggccacgagctcgggcagcccaggccatgacccgaaacaatgaactacgtcgccagcaaaagaagagataacactgcatttccctttaccaactagcgctgggagcactggacacttaaatcctcatctgtcctcctttcctgtaaataaaagcccttctatcca

SEQ ID NO: 289549 - DNA, 980 bp, Homo sapiens
gagaacagacagacctactgacacaggggaggtgagaagggaggtgaccaccaggactggctctgtgagtaccacacagtggggagggggtgggggccaccatgtcatcatatcagaaggaactggagaaatacagagacatagatgaagatgagatcctaaggaccttgagccccgaggagctagagcagctggactgcgaactacaggagatggatcctgagaacatgctcctgccagctggactaagacaacgtgaccagacaaagaagagcccaacggggccactggaccgagaggcccttttgcagtacttggagcaacaggcactagaagtcaaagagcgtgatgacttggtgcccttcacaggcgagaagaaggggaaaccctatattcagcccaagagggaaatcccagcagaggagcagatcaccctggagcctgagctggaggaggcactggcacatgccacagatgctgaaatgtgtgacattgcagcaattctggacatgtacacactgatgagtaacaagcaatactatgatgccctctgcagtggagaaatctgcaacactgaaggcattagcagtgtggtacagcctgacaagtataagccagtgccggatgaacccccaaatcccacaaacattgaggagatactaaagagggtccgaagcaatgacaaggagctggaggaggtgaacttgaataatatacaggcagtggctgacatgttgcgtgagaatcgtagcctccagagcctaaacatcgaatccaacttcattagcagcacaggactcatggctgtgctgaaggcagttcgggaaaatgccacactcactgagctccgtgtagacaatcaggtcgccagcaaaagaagagataacactgcatttccctttaccaactagcgctgggagcactggacacttaaatcctcatctgtcctcctttcctgtaaataaaagcccttctatcca

SEQ ID NO: 289550 - DNA, 846 bp, Homo sapiens
caagaaggccctcgccagatgctagcactatgctcctggacttcccaacctccagaacaagtctcgtaaaatgaggaatacctttaaactttaacagaagagttctgaagaccaaactctgaaggaaagaaagcattctggaagaatggcatagctgaaatcaagacccttgaacaaagaatagtacccattaactcttcaaaaactattccacgtaaattcttcccatgagaattgaccagaattattgaacaattacagatctgtaaaaccataaaggtacaaaatcagtctactcactaatgctactggaaagaatgttcttccacaaatcttgcaaggtaacaattctccaacttggacaacacctccattctctaaaacaggaaggaatttaataaataatttatataacttgaaattgtgaaacttcacattttaatgttttctcttagttttataggtaaattatcagtttttgtgaaaaatgttttactgcattttgaaataagcaaaattatctatgaaaaggagcataatacttagttatcagtggtgaaaaaggtcaggataaatatggaggagtcatgatttaaagatatccaaactgatactgctggaaatatctagttttcttgtaattattttaagcaaatcaatttgtcatattctcttaacttataggctatctctatggtaaattactacattttaagaacaaaatttatcttattaatttccaaggcatgaagaaataccattagtgatgagttcagtgacttcctgagatgatttgaagaatctagaataaaacgaatcttactctgtttaccaccaaacaataga

SEQ ID NO: 289551 - DNA, 851 bp, Homo sapiens
ggaggaggagccaaagccaggactttgagaccggcgcgcggtcaagcccaggcagctctccctaaccctccagcactgggcaaacgctgcccgatgacgcccgcctcgggggccacggcatcactggggcgactgcgagcccggccgcggagccgctgggacgcggcttacctcccggctgtcgctgctgtgtgtgttgcccgcgccagtcacgtccctaatgggaccctccgtttcggcgtctgtaaggcgaggaggacgatgcgtcccctccctcgcaggattgaggttaggactaaacggggtccgcagcgcccggcagctcccgagcgctctccccagccgcgcctccctccttcccgccacccgtcccgcaggggcccgcggcgtcacctctcaggctgtagcgcgcctgcatgccgaataccgacagggtgccggtgcccgtgcggtcgtccttcctgacgccgcagcggaggatgtgttggatctgccccaggatttccaggtcccagatgaagagataattctacttactggatataggatgcattagatcttcttaccttaaaaaaaaaaaaaaaggcagcaatgatcaaaatactaataaattactcacagactcagtgtattttttcttggagtaaaagtccaggatgggtaatagaatacctgctgttggcttttggaaaaattggtactgtatgtagcaaaataatgtgaaacccatatgcatggatattcttaacaatttgaagaaatcgtcacagctttcctgggttgttgagcctctaagatggtcttttcctctgatgtgataataaagtgtttattctgaactctacatgcac

SEQ ID NO: 289552 - DNA, 327 bp, Homo sapiens
aacattctcaattgtttaacctggtcaagtctatcacagctgtggttctcagaccctggagagggagtttgcagtgagtagatatctctggagctttttaaaatatagatcccaactgtcaccccaggtgcacagaattaacatctctgagcctaggacctggaatgtcaatttgaaaagcttttcagatgattctgatgtgcatctttaattaggaaccaccaaatgacagccagcagtacaaacctaaagttctcttttgaggaatttttggtctggctgtggtttccacaggttcattactgtgtactattttcacagctcatt

SEQ ID NO: 289553 - DNA, 497 bp, Homo sapiens
aattacacgctctgcaccttttcaaaagagataatggaaatatggttaagataaggagttaagcctatgacagataaccccagggcccaattttccatatattttaaccagaggtgttcccctaagattcttgcttaggaattatgaaatgtagatatccaggtggctttttgttgaaaaagatctatcgattactatcacactcataaatacaaagaaagataaatgtatttggaatgggaactgcatcccacccaaaaatcatgtgttagtttattgcaaagttagttagattgggttctcaaccagctcagactcatagtatgttgatagagagggtctttttatgatctgctagaacttcattcgtcttttatgcaagcaataactgatacaattgctccttttgataacagaaaattatgcaaacaatgcctcccagaggctatccttattttacaccattaaaacatttttactttgtggaaaaaaaaaaa

SEQ ID NO: 289554 - DNA, 804 bp, Homo sapiens
gggcctcactcctggtggttccacctcttttgatattggcaatatctagtgaagttaaaaatgtgtatatccaataacccaaaaattctaattctaggtcctaggaatcctaaagaaattctcacatattgctcaaggaaaggagtactaagttataaactaaagcatcaatcaaagaatggataaataagttgttgaatagtcatactatggaatactttatagaggtgaaaatcagtaaaccagagctatatgtagtagcagatctttaaaataatgtggaaaaaaaggaaaccgcctatataaaaattaagacacaattcattatgatatattgtttatgaatgtacacatatgtagaaaagtataaaaacacatgtggaaatagtgtttgcctctgagaaggaattcacagggagctcacttgtgtttgtaatgttttattttttaagtgctggatggtagatactcagttctcattttctgtacattttggaatatctgaaatatttcacaatttttttatgattatatctggaacctgaggtgagaagacagaagaacccccagtactaacaagaaccctttctatttgcttcaggaagaaggagagagcttcaaagaggaggagagggctatgattgaggtgttctgagaaaatgtcaacccactcaaatgcagagtggtcagactcaaagccaccccaaaataagccagtgcttggaagtgtgtcccatcttcccctcaccataaaggttataatattggttttatttcagataaaacagaatttcatcttccaaa

SEQ ID NO: 289555 - DNA, 2869 bp, Homo sapiens
agtagttaactgaatgttttcaccgctttaacgtccagctgcgcttatctttgacatcgactacctaaggtctacctttagtcccacgactctgacaaaatgatctcaatattggtgtaaaatcacctcccctttcaagggtcttccaaagcacttcctgtctgcggcatacaaaatgtattggcacggaattttaagcttactgagctttataaacacgtcacattcacacattcaagacacacactggatattcggataaaaacaaacaaacaaaaaactggctaaatacccattcccctcaataacttggataagatacctaaaaaaggtcgaccttcggtacctttctgtcttctcccctctcgctatttgcctacactggcttcctcacctccactttttctcacgtttatctgagcgaaaacaagcacggttcggcagcctcctttcccagccctacctttgtgctgcaaaagcgaaaattcaaaagccaagtacaataggagaccgcccaccctggctccctcgtgacacgagggagcgcgaagcggagggcgcctcgcggcaggagcgggatttccggggtcacgggaaccggcaggggaacgggataaagttcccggagaaaggaaaggagagcgtgggatagtaaaagagaagacgcggagaagaggagaggacctacaagaacggaggacaggggcgcacgatggtcccggggggagcggaaacaaaggcacgcaaaacggaaaagcgtgtgtaggggagcggaaaaggaagtcaccaccgtggcctgcgacgaaatggcgaaaagtcttttgaagacagcctctctgtctggaaggacaaaattgctacatcaaacaggattgtcactttatagtacatcccatggattttatgaggaagaagtgaaaaaaacacttcagcagtttcctggtggatccattgaccttcagaaggaagacaatggcattggcattcttactctgaacaatccaagtagaatgaatgccttttcaggtgttatgatgctacaacttctggaaaaagtaattgaattggaaaattggacagaggggaaaggcctcattgtccgtggggcaaaaaatactttctcttcaggatctgatctgaatgctgtgaaatcactaggaactccagaggatggaatggccgtatgcatgttcatgcaaaacaccttaacaagatttatgagacttcctttaataagtgttgcgctggttcaaggttgggcattgggtggaggagcagaatttactacagcatgtgatttcaggttaatgactccagagagtaagatcagattcgtccacaaagagatgggcataataccaagctggggtggcaccacccggctagttgaaataatcggaagtagacaagctctcaaagtgttgagtggggcccttaaactggattcaaaaaatgctctaaacataggaatggttgaagaggtcttgcagtcttcagatgaaactaaatctctagaagaggcacaagaatggctaaagcaattcatccaagggccaccggaagtaattagagctttgaaaaaatctgtttgttcaggcagagagctatatttggaggaagcattacagaacgaaagagatcttttaggaacagtttggggtgggcctgcaaatttagaggctattgctaagaaaggaaaatttaataaataattggtttttcgtgtggatgtactccaagtaaagctccagtgactaatatgtataaatgttaaatgatattaaatatgaacatcagaattactttgaaggctactattaatatgcagacttacttttaatcatttgaatatctgaactcatttacctcatttcttgccaattactcacttgggtatttactgcgtaatctggaacatttagctaaaatatacacttttggcttaaaaattattgctgtcaattccaataataattcttagcttataaccaaagagcagtgtttaaaaggagagcttctatacaaaacctattcctggcgttacttttcatacaatttttgttctgttttacctggaaataatttaccaaaataactgagtgttgctgctaaagaacaaaagtggggaggtatcagggaacaagaaaacaagaaagggtatgatcaatcattttcttctgctccaaacagctggagtaaaattcatgggaaatggcccttcatttaaaaaaagatgtacctcactacccactacaaatttggaactttgttcttttcaataattagttttctattgtaaattacctactaaacagtggtagccatgacatggaaagtcaactgattctacaattggacattcatttgtgtgccctggaatttccaactagtaataaacaactactgttgatgtagttttaaaccacttgaagggactcatgaagcatcctgcaacataaatttgcatttttacatcagatttcttttttttcctgaaaaacaactaaccttctaacaactatctttcaaaagtaaatgtaataaaaatgcacaacataaaatgtttatgatcccagcaatacactttttaaaaaatgtgaaagtcaaagaattaagttctagttctgactcatcacaagaggtcaaaagtatttgctactgtaacattcaattcacatttgagaatcatggtaaaaataacttgtatttgccttaccatcatgatcctactgttgagttaggaaaatatggttagacagactcacattactttttttcagaggtaaactctagattactgtgtcaacccaatactatttggccatagatgtaaaaactaccaaataaaagtggattttgtggtctacaa

SEQ ID NO: 289556 - DNA, 2117 bp, Homo sapiens
aacattccaggaagggaagccagcctgtgaagaagcatggcattgaaacaggaaatggcgaaaagtcttttgaagacagcctctctgtctggaaggacaaaattgctacatcaaacaggattgtcactttatagtacatcccatggattttatgaggaagaagtgaaaaaaacacttcagcagtttcctggtggatccattgaccttcagaaggaagacaatggcattggcattcttactctgaacaatccaagtagaatgaatgccttttcaggtgttatgatgctacaacttctggaaaaagtaattgaattggaaaattggacagaggggaaaggcctcattgtccgtggggcaaaaaatactttctcttcaggatctgatctgaatgctgtgaaatcactaggaactccagaggatggaatggccgtatgcatgttcatgcaaaacaccttaacaagatttatgagacttcctttaataagtgttgcgctggttcaaggttgggcattgggtggaggagcagaatttactacagcatgtgatttcaggttaatgactccagagagtaagatcagattcgtccacaaagagatgggcataataccaagctggggtggcaccacccggctagttgaaataatcggaagtagacaagctctcaaagtgttgagtggggcccttaaactggattcaaaaaatgctctaaacataggaatggttgaagaggtcttgcagtcttcagatgaaactaaatctctagaagaggcacaagaatggctaaagcaattcatccaagggccaccggaagtaattagagctttgaaaaaatctgtttgttcaggcagagagctatatttggaggaagcattacagaacgaaagagatcttttaggaacagtttggggtgggcctgcaaatttagaggctattgctaagaaaggaaaatttaataaataattggtttttcgtgtggatgtactccaagtaaagctccagtgactaatatgtataaatgttaaatgatattaaatatgaacatcagaattactttgaaggctactattaatatgcagacttacttttaatcatttgaatatctgaactcatttacctcatttcttgccaattactcacttgggtatttactgcgtaatctggaacatttagctaaaatatacacttttggcttaaaaattattgctgtcaattccaataataattcttagcttataaccaaagagcagtgtttaaaaggagagcttctatacaaaacctattcctggcgttacttttcatacaatttttgttctgttttacctggaaataatttaccaaaataactgagtgttgctgctaaagaacaaaagtggggaggtatcagggaacaagaaaacaagaaagggtatgatcaatcattttcttctgctccaaacagctggagtaaaattcatgggaaatggcccttcatttaaaaaaagatgtacctcactacccactacaaatttggaactttgttcttttcaataattagttttctattgtaaattacctactaaacagtggtagccatgacatggaaagtcaactgattctacaattggacattcatttgtgtgccctggaatttccaactagtaataaacaactactgttgatgtagttttaaaccacttgaagggactcatgaagcatcctgcaacataaatttgcatttttacatcagatttcttttttttcctgaaaaacaactaaccttctaacaactatctttcaaaagtaaatgtaataaaaatgcacaacataaaatgtttatgatcccagcaatacactttttaaaaaatgtgaaagtcaaagaattaagttctagttctgactcatcacaagaggtcaaaagtatttgctactgtaacattcaattcacatttgagaatcatggtaaaaataacttgtatttgccttaccatcatgatcctactgttgagttaggaaaatatggttagacagactcacattactttttttcagaggtaaactctagattactgtgtcaacccaatactatttggccatagatgtaaaaactaccaaataaaagtggattttgtggtctacaa

SEQ ID NO: 289557 - DNA, 1798 bp, Homo sapiens
agtagttaactgaatgttttcaccgctttaacgtccagctgcgcttatctttgacatcgactacctaaggtctacctttagtcccacgactctgacaaaatgatctcaatattggtgtaaaatcacctcccctttcaagggtcttccaaagcacttcctgtctgcggcatacaaaatgtattggcacggaattttaagcttactgagctttataaacacgtcacattcacacattcaagacacacactggatattcggataaaaacaaacaaacaaaaaactggctaaatacccattcccctcaataacttggataagatacctaaaaaaggtcgaccttcggtacctttctgtcttctcccctctcgctatttgcctacactggcttcctcacctccactttttctcacgtttatctgagcgaaaacaagcacggttcggcagcctcctttcccagccctacctttgtgctgcaaaagcgaaaattcaaaagccaagtacaataggagaccgcccaccctggctccctcgtgacacgagggagcgcgaagcggagggcgcctcgcggcaggagcgggatttccggggtcacgggaaccggcaggggaacgggataaagttcccggagaaaggaaaggagagcgtgggatagtaaaagagaagacgcggagaagaggagaggacctacaagaacggaggacaggggcgcacgatggtcccggggggagcggaaacaaaggcacgcaaaacggaaaagcgtgtgtaggggagcggaaaaggaagtcaccaccgtggcctgcgacgaaatggcgaaaagtcttttgaagacagcctctctgtctggaaggacaaaattgctacatcaaacaggattgtcactttatagtacatcccatggattttatgaggaagaagtgaaaaaaacacttcagcagtttcctggtggatccattgaccttcagaaggaagacaatggcattggcattcttactctgaacaatccaagtagaatgaatgccttttcaggtgttatgatgctacaacttctggaaaaagtaattgaattggaaaattggacagaggggaaaggcctcattgtccgtggggcaaaaaatactttctcttcaggatctgatctgaatgctgtgaaatcactaggaactccagaggatggaatggccgtatgcatgttcatgcaaaacaccttaacaagatttatgagacttcctttaataagtgttgcgctggttcaaggttgggcattgggtggaggagcagaatttactacagcatgtgatttcaggttaatgactccagagagtaagatcagattcgtccacaaagagatgggcataataccaagctggggtggcaccacccggctagttgaaataatcggaagtagacaagctctcaaagtgttgagtggggcccttaaactggattcaaaaaatgctctaaacataggaatggttgaagaggtcttgcagtcttcagatgaaactaaatctctagaagaggcacaagaatggctaaagcaattcatccaagggccaccggaagtaattagagctttgaaaaaatctgtttgttcaggcagagagctatatttggaggaagcattacagaacgaaagagatcttttaggaacagtttggggtgggcctgcaaatttagaggctattgctaagaaaggaaaatttaataaataattggtttttcgtgtggatgtactccaagtaaagctccagtgactaatatgtataaatgttaaatgatattaaatatgaacatcaga

SEQ ID NO: 289558 - DNA, 1737 bp, Homo sapiens
agtagttaactgaatgttttcaccgctttaacgtccagctgcgcttatctttgacatcgactacctaaggtctacctttagtcccacgactctgacaaaatgatctcaatattggtgtaaaatcacctcccctttcaagggtcttccaaagcacttcctgtctgcggcatacaaaatgtattggcacggaattttaagcttactgagctttataaacacgtcacattcacacattcaagacacacactggatattcggataaaaacaaacaaacaaaaaactggctaaatacccattcccctcaataacttggataagatacctaaaaaaggtcgaccttcggtacctttctgtcttctcccctctcgctatttgcctacactggcttcctcacctccactttttctcacgtttatctgagcgaaaacaagcacggttcggcagcctcctttcccagccctacctttgtgctgcaaaagcgaaaattcaaaagccaagtacaataggagaccgcccaccctggctccctcgtgacacgagggagcgcgaagcggagggcgcctcgcggcaggagcgggatttccggggtcacgggaaccggcaggggaacgggataaagttcccggagaaaggaaaggagagcgtgggatagtaaaagagaagacgcggagaagaggagaggacctacaagaacggaggacaggggcgcacgatggtcccggggggagcggaaacaaaggcacgcaaaacggaaaagcgtgtgtaggggagcggaaaaggaagtcaccaccgtggcctgcgacgaaatggcgaaaagtcttttgaagacagcctctctgtctggaaggacaaaattgctacatcaaacaggattgtcactttatagtacatcccatggattttatgaggaagaagtgaaaaaaacacttcagcagtttcctggtggatccattgaccttcagaaggaagacaatggcattggcattcttactctgaacaatccaagtagaatgaatgccttttcaggtgttatgatgctacaacttctggaaaaagtaattgaattggaaaattggacagaggggaaaggcctcattgtccgtggggcaaaaaatactttctcttcaggatctgatctgaatgctgtgaaatcactaggaactccagaggatggaatggccgtatgcatgttcatgcaaaacaccttaacaagatttatgagacttcctttaataagtgttgcgctggttcaaggttgggcattgggtggaggagcagaatttactacagcatgtgatttcaggttaatgactccagagagtaagatcagattcgtccacaaagagatgggcataataccaagctggggtggcaccacccggctagttgaaataatcggaagtagacaagctctcaaagtgttgagtggggcccttaaactggattcaaaaaatgctctaaacataggaatggttgaagaggtcttgcagtcttcagatgaaactaaatctctagaagaggcacaagaatggctaaagcaattcatccaagggccaccggaagtaattagagctttgaaaaaatctgtttgttcaggcagagagctatatttggaggaagcattacagaacgaaagagatcttttaggaacagtttggggtgggcctgcaaatttagaggctattgctaagaaaggaaaatttaataaataattggtttttcgtgtggatgtactcc

SEQ ID NO: 289559 - DNA, 1217 bp, Homo sapiens
  misc_feature (657)..(657): n is a, c, g, or t
  misc_feature (662)..(662): n is a, c, g, or t
  misc_feature (667)..(667): n is a, c, g, or t
  misc_feature (672)..(672): n is a, c, g, or t
  misc_feature (677)..(677): n is a, c, g, or t
  misc_feature (682)..(682): n is a, c, g, or t
  misc_feature (687)..(687): n is a, c, g, or t
atttgcatttgcatttgcatttgcatttgcatttgcatttcatttgcatttgcatttgcatttgcatttgcatttgcatttgcatttcatttgcatttgcatttgcatttgcatttgcatttgcatttgcatttcatttgcatttgcatttgcatttgcatttgcatttgcatttgcatttcatttgcatttgcatttgcatttgcatttgcatttgcatttgcatttcatttgcatttgcatttgcatttgcatttgcatttgcatttgcatttcatttgcatttgcatttgcatttgcatttgcatttgcatttgcatttcatttgcatttgcatttgcatttgcatttgcatttgcatttgcatttcatttgcatttgcatttgcatttgcatttgcatttgcatttgcatttcatttgcatttgcatttgcatttgcatttgcatttgcatttgcatttcatttgcatttgcatttgcatttgcatttgcatttgcatttgcatttcatttgcatttgcatttgcatttgcatttgcatttgcatttgcatttcatttgcatttgcatttgcatttgcatttgcatttgcatttgcatttcatttgcatttgcatttgcatttgcatttgcatttgcatttgcatttcatttnatttnatttnatttnatttnatttnatttnatttatttcatttcatttcattcatttgtgtgccctggaatttccaactagtaataaacaactactgttgatgtagttttaaaccacttgaagggactcatgaagcatcctgcaacataaatttgcatttttacatcagatttcttttttttcctgaaaaacaactaaccttctaacaactatctttcaaaagtaaatgtaataaaaatgcacaacataaaatgtttatgatcccagcaatacactttttaaaaaatgtgaaagtcaaagaattaagttctagttctgactcatcacaagaggtcaaaagtatttgctactgtaacattcaattcacatttgagaatcatggtaaaaataacttgtatttgccttaccatcatgatcctactgttgagttaggaaaatatggttagacagactcacattactttttttcagaggtaaactctagattactgtgtcaacccaatactatttggccatagatgtaaaaactaccaaataaaagtggattttgtggtctacaa

SEQ ID NO: 289560 - DNA, 735 bp, Homo sapiens
gttcttgtttgcaaagggtaaacaagcacaacaaaaaatgatactgttttcaaagggaagttttaaatactattagtaaattaaattctagatgaaacagccatatttttcaaacattgtttttaatatacctacctataaagatctatggagaattcacatcagatcatgaatggatagtactttatgattagagcatacagagagagttacaattaagcttttcttttttcttttacagttaatgactccagagagtaagatcagattcgtccacaaagagatgggcataataccaagctggggtggcaccacccggctagttgaaataatcggaagtagacaagctctcaaagtgttgagtggggcccttaaactggattcaaaaaatgctctaaacataggaatggttgaagaggtcttgcagtcttcagatgaaactaaatctctagaagaggcacaagaatggctaaagcaattcatccaagggccaccggaagtaattagagctttgaaaaaatctgtttgttcaggcagagagctatatttggaggaagcattacagaacgaaagagatcttttaggaacagtttggggtgggcctgcaaatttagaggctattgctaagaaaggaaaatttaataaataattggtttttcgtgtggatgtactccaagtaaagctccagtgactaatatgtataaatgttaaatgatattaaatatgaacatcaga

SEQ ID NO: 289561 - DNA, 2816 bp, Homo sapiens
agtagttaactgaatgttttcaccgctttaacgtccagctgcgcttatctttgacatcgactacctaaggtctacctttagtcccacgactctgacaaaatgatctcaatattggtgtaaaatcacctcccctttcaagggtcttccaaagcacttcctgtctgcggcatacaaaatgtattggcacggaattttaagcttactgagctttataaacacgtcacattcacacattcaagacacacactggatattcggataaaaacaaacaaacaaaaaactggctaaatacccattcccctcaataacttggataagatacctaaaaaaggtcgaccttcggtacctttctgtcttctcccctctcgctatttgcctacactggcttcctcacctccactttttctcacgtttatctgagcgaaaacaagcacggttcggcagcctcctttcccagccctacctttgtgctgcaaaagcgaaaattcaaaagccaagtacaataggagaccgcccaccctggctccctcgtgacacgagggagcgcgaagcggagggcgcctcgcggcaggagcgggatttccggggtcacgggaaccggcaggggaacgggataaagttcccggagaaaggaaaggagagcgtgggatagtaaaagagaagacgcggagaagaggagaggacctacaagaacggaggacaggggcgcacgatggtcccggggggagcggaaacaaaggcacgcaaaacggaaaagcgtgtgtaggggagcggaaaaggaagtcaccaccgtggcctgcgacgaaatggcgaaaagtcttttgaagacagcctctctgtctggaaggacaaaattgctacatcaaacaggattgtcactttatagtacatcccatggattttatgaggaagaagtgaaaaaaacacttcagcagtttcctggtggatccattgaccttcagaaggaagacaatggcattggcattcttactctgaacaatccaagtagaatgaatgccttttcaggtgttatgatgctacaacttctggaaaaagtaattgaattggaaaattggacagaggggaaaggcctcattgtccgtggggcaaaaaatactttctcttcaggatctgatctgaatgctgtgaaatcactaggaactccagagacttcctttaataagtgttgcgctggttcaaggttgggcattgggtggaggagcagaatttactacagcatgtgatttcaggttaatgactccagagagtaagatcagattcgtccacaaagagatgggcataataccaagctggggtggcaccacccggctagttgaaataatcggaagtagacaagctctcaaagtgttgagtggggcccttaaactggattcaaaaaatgctctaaacataggaatggttgaagaggtcttgcagtcttcagatgaaactaaatctctagaagaggcacaagaatggctaaagcaattcatccaagggccaccggaagtaattagagctttgaaaaaatctgtttgttcaggcagagagctatatttggaggaagcattacagaacgaaagagatcttttaggaacagtttggggtgggcctgcaaatttagaggctattgctaagaaaggaaaatttaataaataattggtttttcgtgtggatgtactccaagtaaagctccagtgactaatatgtataaatgttaaatgatattaaatatgaacatcagaattactttgaaggctactattaatatgcagacttacttttaatcatttgaatatctgaactcatttacctcatttcttgccaattactcacttgggtatttactgcgtaatctggaacatttagctaaaatatacacttttggcttaaaaattattgctgtcaattccaataataattcttagcttataaccaaagagcagtgtttaaaaggagagcttctatacaaaacctattcctggcgttacttttcatacaatttttgttctgttttacctggaaataatttaccaaaataactgagtgttgctgctaaagaacaaaagtggggaggtatcagggaacaagaaaacaagaaagggtatgatcaatcattttcttctgctccaaacagctggagtaaaattcatgggaaatggcccttcatttaaaaaaagatgtacctcactacccactacaaatttggaactttgttcttttcaataattagttttctattgtaaattacctactaaacagtggtagccatgacatggaaagtcaactgattctacaattggacattcatttgtgtgccctggaatttccaactagtaataaacaactactgttgatgtagttttaaaccacttgaagggactcatgaagcatcctgcaacataaatttgcatttttacatcagatttcttttttttcctgaaaaacaactaaccttctaacaactatctttcaaaagtaaatgtaataaaaatgcacaacataaaatgtttatgatcccagcaatacactttttaaaaaatgtgaaagtcaaagaattaagttctagttctgactcatcacaagaggtcaaaagtatttgctactgtaacattcaattcacatttgagaatcatggtaaaaataacttgtatttgccttaccatcatgatcctactgttgagttaggaaaatatggttagacagactcacattactttttttcagaggtaaactctagattactgtgtcaacccaatactatttggccatagatgtaaaaactaccaaataaaagtggattttgtggtctacaa

SEQ ID NO: 289562 - DNA, 2119 bp, Homo sapiens
gaccgtggcctgcgacggaccctttccagcttttgcctgaaagctttgcagaagaaatggcgaaaagtcttttgaagacagcctctctgtctggaaggacaaaattgctacatcaaacaggattgtcactttatagtacatcccatggattttatgaggaagaagtgaaaaaaacacttcagcagtttcctggtggatccattgaccttcagaaggaagacaatggcattggcattcttactctgaacaatccaagtagaatgaatgccttttcaggtgttatgatgctacaacttctggaaaaagtaattgaattggaaaattggacagaggggaaaggcctcattgtccgtggggcaaaaaatactttctcttcaggatctgatctgaatgctgtgaaatcactaggaactccagaggatggaatggccgtatgcatgttcatgcaaaacaccttaacaagatttatgagacttcctttaataagtgttgcgctggttcaaggttgggcattgggtggaggagcagaatttactacagcatgtgatttcaggttaatgactccagagagtaagatcagattcgtccacaaagagatgggcataataccaagctggggtggcaccacccggctagttgaaataatcggaagtagacaagctctcaaagtgttgagtggggcccttaaactggattcaaaaaatgctctaaacataggaatggttgaagaggtcttgcagtcttcagatgaaactaaatctctagaagaggcacaagaatggctaaagcaattcatccaagggccaccggaagtaattagagctttgaaaaaatctgtttgttcaggcagagagctatatttggaggaagcattacagaacgaaagagatcttttaggaacagtttggggtgggcctgcaaatttagaggctattgctaagaaaggaaaatttaataaataattggtttttcgtgtggatgtactccaagtaaagctccagtgactaatatgtataaatgttaaatgatattaaatatgaacatcagaattactttgaaggctactattaatatgcagacttacttttaatcatttgaatatctgaactcatttacctcatttcttgccaattactcacttgggtatttactgcgtaatctggaacatttagctaaaatatacacttttggcttaaaaattattgctgtcaattccaataataattcttagcttataaccaaagagcagtgtttaaaaggagagcttctatacaaaacctattcctggcgttacttttcatacaatttttgttctgttttacctggaaataatttaccaaaataactgagtgttgctgctaaagaacaaaagtggggaggtatcagggaacaagaaaacaagaaagggtatgatcaatcattttcttctgctccaaacagctggagtaaaattcatgggaaatggcccttcatttaaaaaaagatgtacctcactacccactacaaatttggaactttgttcttttcaataattagttttctattgtaaattacctactaaacagtggtagccatgacatggaaagtcaactgattctacaattggacattcatttgtgtgccctggaatttccaactagtaataaacaactactgttgatgtagttttaaaccacttgaagggactcatgaagcatcctgcaacataaatttgcatttttacatcagatttcttttttttcctgaaaaacaactaaccttctaacaactatctttcaaaagtaaatgtaataaaaatgcacaacataaaatgtttatgatcccagcaatacactttttaaaaaatgtgaaagtcaaagaattaagttctagttctgactcatcacaagaggtcaaaagtatttgctactgtaacattcaattcacatttgagaatcatggtaaaaataacttgtatttgccttaccatcatgatcctactgttgagttaggaaaatatggttagacagactcacattactttttttcagaggtaaactctagattactgtgtcaacccaatactatttggccatagatgtaaaaactaccaaataaaagtggattttgtggtctacaa

SEQ ID NO: 289563 - DNA, 2126 bp, Homo sapiens
gcaggctggtactgcccgagataaggatggaaaaggaagtcaccaccgtggcctgcgaacgaaatggcgaaaagtcttttgaagacagcctctctgtctggaaggacaaaattgctacatcaaacaggattgtcactttatagtacatcccatggattttatgaggaagaagtgaaaaaaacacttcagcagtttcctggtggatccattgaccttcagaaggaagacaatggcattggcattcttactctgaacaatccaagtagaatgaatgccttttcaggtgttatgatgctacaacttctggaaaaagtaattgaattggaaaattggacagaggggaaaggcctcattgtccgtggggcaaaaaatactttctcttcaggatctgatctgaatgctgtgaaatcactaggaactccagaggatggaatggccgtatgcatgttcatgcaaaacaccttaacaagatttatgagacttcctttaataagtgttgcgctggttcaaggttgggcattgggtggaggagcagaatttactacagcatgtgatttcaggttaatgactccagagagtaagatcagattcgtccacaaagagatgggcataataccaagctggggtggcaccacccggctagttgaaataatcggaagtagacaagctctcaaagtgttgagtggggcccttaaactggattcaaaaaatgctctaaacataggaatggttgaagaggtcttgcagtcttcagatgaaactaaatctctagaagaggcacaagaatggctaaagcaattcatccaagggccaccggaagtaattagagctttgaaaaaatctgtttgttcaggcagagagctatatttggaggaagcattacagaacgaaagagatcttttaggaacagtttggggtgggcctgcaaatttagaggctattgctaagaaaggaaaatttaataaataattggtttttcgtgtggatgtactccaagtaaagctccagtgactaatatgtataaatgttaaatgatattaaatatgaacatcagaattactttgaaggctactattaatatgcagacttacttttaatcatttgaatatctgaactcatttacctcatttcttgccaattactcacttgggtatttactgcgtaatctggaacatttagctaaaatatacacttttggcttaaaaattattgctgtcaattccaataataattcttagcttataaccaaagagcagtgtttaaaaggagagcttctatacaaaacctattcctggcgttacttttcatacaatttttgttctgttttacctggaaataatttaccaaaataactgagtgttgctgctaaagaacaaaagtggggaggtatcagggaacaagaaaacaagaaagggtatgatcaatcattttcttctgctccaaacagctggagtaaaattcatgggaaatggcccttcatttaaaaaaagatgtacctcactacccactacaaatttggaactttgttcttttcaataattagttttctattgtaaattacctactaaacagtggtagccatgacatggaaagtcaactgattctacaattggacattcatttgtgtgccctggaatttccaactagtaataaacaactactgttgatgtagttttaaaccacttgaagggactcatgaagcatcctgcaacataaatttgcatttttacatcagatttcttttttttcctgaaaaacaactaaccttctaacaactatctttcaaaagtaaatgtaataaaaatgcacaacataaaatgtttatgatcccagcaatacactttttaaaaaatgtgaaagtcaaagaattaagttctagttctgactcatcacaagaggtcaaaagtatttgctactgtaacattcaattcacatttgagaatcatggtaaaaataacttgtatttgccttaccatcatgatcctactgttgagttaggaaaatatggttagacagactcacattactttttttcagaggtaaactctagattactgtgtcaacccaatactatttggccatagatgtaaaaactaccaaataaaagtggattttgtggtctacaa

SEQ ID NO: 289564 - DNA, 2055 bp, Homo sapiens
cttaggaccctttccagctttttgcctgaaagctttgcagaagaaatggcgaaaagtcttttgaagacagcctctctgtctggaaggacaaaattgctacatcaaacaggattgtcactttatagtacatcccatggattttatgaggaagaagtgaaaaaaacacttcagcagtttcctggtggatccattgaccttcagaaggaagacaatggcattggcattcttactctgaacaatccaagtagaatgaatgccttttcaggtgttatgatgctacaacttctggaaaaagtaattgaattggaaaattggacagaggggaaaggcctcattgtccgtggggcaaaaaatactttctcttcaggatctgatctgaatgctgtgaaatcactaggaactccagagacttcctttaataagtgttgcgctggttcaaggttgggcattgggtggaggagcagaatttactacagcatgtgatttcaggttaatgactccagagagtaagatcagattcgtccacaaagagatgggcataataccaagctggggtggcaccacccggctagttgaaataatcggaagtagacaagctctcaaagtgttgagtggggcccttaaactggattcaaaaaatgctctaaacataggaatggttgaagaggtcttgcagtcttcagatgaaactaaatctctagaagaggcacaagaatggctaaagcaattcatccaagggccaccggaagtaattagagctttgaaaaaatctgtttgttcaggcagagagctatatttggaggaagcattacagaacgaaagagatcttttaggaacagtttggggtgggcctgcaaatttagaggctattgctaagaaaggaaaatttaataaataattggtttttcgtgtggatgtactccaagtaaagctccagtgactaatatgtataaatgttaaatgatattaaatatgaacatcagaattactttgaaggctactattaatatgcagacttacttttaatcatttgaatatctgaactcatttacctcatttcttgccaattactcacttgggtatttactgcgtaatctggaacatttagctaaaatatacacttttggcttaaaaattattgctgtcaattccaataataattcttagcttataaccaaagagcagtgtttaaaaggagagcttctatacaaaacctattcctggcgttacttttcatacaatttttgttctgttttacctggaaataatttaccaaaataactgagtgttgctgctaaagaacaaaagtggggaggtatcagggaacaagaaaacaagaaagggtatgatcaatcattttcttctgctccaaacagctggagtaaaattcatgggaaatggcccttcatttaaaaaaagatgtacctcactacccactacaaatttggaactttgttcttttcaataattagttttctattgtaaattacctactaaacagtggtagccatgacatggaaagtcaactgattctacaattggacattcatttgtgtgccctggaatttccaactagtaataaacaactactgttgatgtagttttaaaccacttgaagggactcatgaagcatcctgcaacataaatttgcatttttacatcagatttcttttttttcctgaaaaacaactaaccttctaacaactatctttcaaaagtaaatgtaataaaaatgcacaacataaaatgtttatgatcccagcaatacactttttaaaaaatgtgaaagtcaaagaattaagttctagttctgactcatcacaagaggtcaaaagtatttgctactgtaacattcaattcacatttgagaatcatggtaaaaataacttgtatttgccttaccatcatgatcctactgttgagttaggaaaatatggttagacagactcacattactttttttcagaggtaaactctagattactgtgtcaacccaatactatttggccatagatgtaaaaactaccaaataaaagtggattttgtggtctacaa

SEQ ID NO: 289565 - DNA, 2941 bp, Homo sapiens
ctgtatttaggaatagatactgggaaagttaaatactggtattagagcagaataataaagacactgatcaagacatgacacataaagtttacctaatattccaaattagtagaatgtgtggtgaagtggtctgtatccagaggagatgagaaaaagaactatggattggaaagtttttacagctttctgaggaatatgaattgactttgcacctaggtaaagaagcaaagaggaaaaattcttcttggcctatcaaggtatgtttgaggttacaaactgacatgttttggttgattagctttctactttcacattccgaatgtagacaaatttaaaattatgaaaagtaaggaaattcttatttaagcaaggttattaattggacattactgtatttttggtacctattgtatctgagagtctagagagagtaatagaatcataacattactattctaaaatagtatcttcattgtttaaaccctattcacctccttttcctattgcatttgactttttcatagataaatctgaagttattatttttttaaataatcctttctacatgggagcagtgtatattaggaaattttcaattactttggacctgcacctttgcattgtaggtcagaacctacaaaaattccatcttggaaaacattttagatttaccttgtattcacacacccctgcaaagtgggtctttgcaaacaggaaaggtaaaagatttatttttactgcaaaatcatgcctttatataggattagtctgtggattatttcaggcaacaatgagtagatttttgaaggaaacttcataacacagttttggagccctatcttctgtaacacatttccaacctttggaaatagccttgattttccaacttttaacctgataccaacaaaaatggacaaagataatatcacatggaattattctgaagagccagctgctgagaagttccaggagctgtaaattagacaaaagcatccatttatttgggagtaagttacaatatggctatagcttaaaaatatataatgattcagggaggtattttaatgaacttatgtggcatttattgtgaactattgtatgtttagtattacactgtttttcttctcatgatgtaaaggttcaagcttctgctatcctttgatgtgtgtttgtttttatgaagacagtgcaataattttgtttccactgcattttaagattttttaaaaaataacatttgtaaatgaatattgaaattaaaaatagtaacatcagttttttcttcaatatacagacttcctttaataagtgttgcgctggttcaaggttgggcattgggtggaggagcagaatttactacagcatgtgatttcaggttaatgactccagagagtaagatcagattcgtccacaaagagatgggcataataccaagctggggtggcaccacccggctagttgaaataatcggaagtagacaagctctcaaagtgttgagtggggcccttaaactggattcaaaaaatgctctaaacataggaatggttgaagaggtcttgcagtcttcagatgaaactaaatctctagaagaggcacaagaatggctaaagcaattcatccaagggccaccggaagtaattagagctttgaaaaaatctgtttgttcaggcagagagctatatttggaggaagcattacagaacgaaagagatcttttaggaacagtttggggtgggcctgcaaatttagaggctattgctaagaaaggaaaatttaataaataattggtttttcgtgtggatgtactccaagtaaagctccagtgactaatatgtataaatgttaaatgatattaaatatgaacatcagaattactttgaaggctactattaatatgcagacttacttttaatcatttgaatatctgaactcatttacctcatttcttgccaattactcacttgggtatttactgcgtaatctggaacatttagctaaaatatacacttttggcttaaaaattattgctgtcaattccaataataattcttagcttataaccaaagagcagtgtttaaaaggagagcttctatacaaaacctattcctggcgttacttttcatacaatttttgttctgttttacctggaaataatttaccaaaataactgagtgttgctgctaaagaacaaaagtggggaggtatcagggaacaagaaaacaagaaagggtatgatcaatcattttcttctgctccaaacagctggagtaaaattcatgggaaatggcccttcatttaaaaaaagatgtacctcactacccactacaaatttggaactttgttcttttcaataattagttttctattgtaaattacctactaaacagtggtagccatgacatggaaagtcaactgattctacaattggacattcatttgtgtgccctggaatttccaactagtaataaacaactactgttgatgtagttttaaaccacttgaagggactcatgaagcatcctgcaacataaatttgcatttttacatcagatttcttttttttcctgaaaaacaactaaccttctaacaactatctttcaaaagtaaatgtaataaaaatgcacaacataaaatgtttatgatcccagcaatacactttttaaaaaatgtgaaagtcaaagaattaagttctagttctgactcatcacaagaggtcaaaagtatttgctactgtaacattcaattcacatttgagaatcatggtaaaaataacttgtatttgccttaccatcatgatcctactgttgagttaggaaaatatggttagacagactcacattactttttttcagaggtaaactctagattactgtgtcaacccaatactatttggccatagatgtaaaaactaccaaataaaagtggattttgtggtctacaa

SEQ ID NO: 289566 - DNA, 3107 bp, Homo sapiens
ggcctgccatgtgtacctcttctgtatactccatagtgccagtgcagtaggcatttgatagacactcagtaaatatttataaaatataggacctaagagtatgcttgacacttgtgatttataaattatttctgtttttccagtcaccttcatatatttgtgatttcccacttccatctctggcaggtgttatgatgctacaacttctggaaaaagtaattgaattggaaaattggacagaggggaaaggcctcattgtccgtggggcaaaaaatactttctcttcaggatctgatctgaatgctgtgaaatcactaggaactccagaggatggaatggccgtatgcatgttcatgcaaaacaccttaacaagatttatgaggtaaagaagcaaagaggaaaaattcttcttggcctatcaaggtatgtttgaggttacaaactgacatgttttggttgattagctttctactttcacattccgaatgtagacaaatttaaaattatgaaaagtaaggaaattcttatttaagcaaggttattaattggacattactgtatttttggtacctattgtatctgagagtctagagagagtaatagaatcataacattactattctaaaatagtatcttcattgtttaaaccctattcacctccttttcctattgcatttgactttttcatagataaatctgaagttattatttttttaaataatcctttctacatgggagcagtgtatattaggaaattttcaattactttggacctgcacctttgcattgtaggtcagaacctacaaaaattccatcttggaaaacattttagatttaccttgtattcacacacccctgcaaagtgggtctttgcaaacaggaaaggtaaaagatttatttttactgcaaaatcatgcctttatataggattagtctgtggattatttcaggcaacaatgagtagatttttgaaggaaacttcataacacagttttggagccctatcttctgtaacacatttccaacctttggaaatagccttgattttccaacttttaacctgataccaacaaaaatggacaaagataatatcacatggaattattctgaagagccagctgctgagaagttccaggagctgtaaattagacaaaagcatccatttatttgggagtaagttacaatatggctatagcttaaaaatatataatgattcagggaggtattttaatgaacttatgtggcatttattgtgaactattgtatgtttagtattacactgtttttcttctcatgatgtaaaggttcaagcttctgctatcctttgatgtgtgtttgtttttatgaagacagtgcaataattttgtttccactgcattttaagattttttaaaaaataacatttgtaaatgaatattgaaattaaaaatagtaacatcagttttttcttcaatatacagacttcctttaataagtgttgcgctggttcaaggttgggcattgggtggaggagcagaatttactacagcatgtgatttcaggttaatgactccagagagtaagatcagattcgtccacaaagagatgggcataataccaagctggggtggcaccacccggctagttgaaataatcggaagtagacaagctctcaaagtgttgagtggggcccttaaactggattcaaaaaatgctctaaacataggaatggttgaagaggtcttgcagtcttcagatgaaactaaatctctagaagaggcacaagaatggctaaagcaattcatccaagggccaccggaagtaattagagctttgaaaaaatctgtttgttcaggcagagagctatatttggaggaagcattacagaacgaaagagatcttttaggaacagtttggggtgggcctgcaaatttagaggctattgctaagaaaggaaaatttaataaataattggtttttcgtgtggatgtactccaagtaaagctccagtgactaatatgtataaatgttaaatgatattaaatatgaacatcagaattactttgaaggctactattaatatgcagacttacttttaatcatttgaatatctgaactcatttacctcatttcttgccaattactcacttgggtatttactgcgtaatctggaacatttagctaaaatatacacttttggcttaaaaattattgctgtcaattccaataataattcttagcttataaccaaagagcagtgtttaaaaggagagcttctatacaaaacctattcctggcgttacttttcatacaatttttgttctgttttacctggaaataatttaccaaaataactgagtgttgctgctaaagaacaaaagtggggaggtatcagggaacaagaaaacaagaaagggtatgatcaatcattttcttctgctccaaacagctggagtaaaattcatgggaaatggcccttcatttaaaaaaagatgtacctcactacccactacaaatttggaactttgttcttttcaataattagttttctattgtaaattacctactaaacagtggtagccatgacatggaaagtcaactgattctacaattggacattcatttgtgtgccctggaatttccaactagtaataaacaactactgttgatgtagttttaaaccacttgaagggactcatgaagcatcctgcaacataaatttgcatttttacatcagatttcttttttttcctgaaaaacaactaaccttctaacaactatctttcaaaagtaaatgtaataaaaatgcacaacataaaatgtttatgatcccagcaatacactttttaaaaaatgtgaaagtcaaagaattaagttctagttctgactcatcacaagaggtcaaaagtatttgctactgtaacattcaattcacatttgagaatcatggtaaaaataacttgtatttgccttaccatcatgatcctactgttgagttaggaaaatatggttagacagactcacattactttttttcagaggtaaactctagattactgtgtcaacccaatactatttggccatagatgtaaaaactaccaaataaaagtggattttgtggtctacaa

SEQ ID NO: 289567 - DNA, 2647 bp, Homo sapiens
agtagttaactgaatgttttcaccgctttaacgtccagctgcgcttatctttgacatcgactacctaaggtctacctttagtcccacgactctgacaaaatgatctcaatattggtgtaaaatcacctcccctttcaagggtcttccaaagcacttcctgtctgcggcatacaaaatgtattggcacggaattttaagcttactgagctttataaacacgtcacattcacacattcaagacacacactggatattcggataaaaacaaacaaacaaaaaactggctaaatacccattcccctcaataacttggataagatacctaaaaaaggtcgaccttcggtacctttctgtcttctcccctctcgctatttgcctacactggcttcctcacctccactttttctcacgtttatctgagcgaaaacaagcacggttcggcagcctcctttcccagccctacctttgtgctgcaaaagcgaaaattcaaaagccaagtacaataggagaccgcccaccctggctccctcgtgacacgagggagcgcgaagcggagggcgcctcgcggcaggagcgggatttccggggtcacgggaaccggcaggggaacgggataaagttcccggagaaaggaaaggagagcgtgggatagtaaaagagaagacgcggagaagaggagaggacctacaagaacggaggacaggggcgcacgatggtcccggggggagcggaaacaaaggcacgcaaaacggaaaagcgtgtgtaggggagcggaaaaggaagtcaccaccgtggcctgcgacggtgttatgatgctacaacttctggaaaaagtaattgaattggaaaattggacagaggggaaaggcctcattgtccgtggggcaaaaaatactttctcttcaggatctgatctgaatgctgtgaaatcactaggaactccagaggatggaatggccgtatgcatgttcatgcaaaacaccttaacaagatttatgagacttcctttaataagtgttgcgctggttcaaggttgggcattgggtggaggagcagaatttactacagcatgtgatttcaggttaatgactccagagagtaagatcagattcgtccacaaagagatgggcataataccaagctggggtggcaccacccggctagttgaaataatcggaagtagacaagctctcaaagtgttgagtggggcccttaaactggattcaaaaaatgctctaaacataggaatggttgaagaggtcttgcagtcttcagatgaaactaaatctctagaagaggcacaagaatggctaaagcaattcatccaagggccaccggaagtaattagagctttgaaaaaatctgtttgttcaggcagagagctatatttggaggaagcattacagaacgaaagagatcttttaggaacagtttggggtgggcctgcaaatttagaggctattgctaagaaaggaaaatttaataaataattggtttttcgtgtggatgtactccaagtaaagctccagtgactaatatgtataaatgttaaatgatattaaatatgaacatcagaattactttgaaggctactattaatatgcagacttacttttaatcatttgaatatctgaactcatttacctcatttcttgccaattactcacttgggtatttactgcgtaatctggaacatttagctaaaatatacacttttggcttaaaaattattgctgtcaattccaataataattcttagcttataaccaaagagcagtgtttaaaaggagagcttctatacaaaacctattcctggcgttacttttcatacaatttttgttctgttttacctggaaataatttaccaaaataactgagtgttgctgctaaagaacaaaagtggggaggtatcagggaacaagaaaacaagaaagggtatgatcaatcattttcttctgctccaaacagctggagtaaaattcatgggaaatggcccttcatttaaaaaaagatgtacctcactacccactacaaatttggaactttgttcttttcaataattagttttctattgtaaattacctactaaacagtggtagccatgacatggaaagtcaactgattctacaattggacattcatttgtgtgccctggaatttccaactagtaataaacaactactgttgatgtagttttaaaccacttgaagggactcatgaagcatcctgcaacataaatttgcatttttacatcagatttcttttttttcctgaaaaacaactaaccttctaacaactatctttcaaaagtaaatgtaataaaaatgcacaacataaaatgtttatgatcccagcaatacactttttaaaaaatgtgaaagtcaaagaattaagttctagttctgactcatcacaagaggtcaaaagtatttgctactgtaacattcaattcacatttgagaatcatggtaaaaataacttgtatttgccttaccatcatgatcctactgttgagttaggaaaatatggttagacagactcacattactttttttcagaggtaaactctagattactgtgtcaacccaatactatttggccatagatgtaaaaactaccaaataaaagtggattttgtggtctacaa

SEQ ID NO: 289568 - DNA, 2230 bp, Homo sapiens
gtaatgacaaaggcactgcatagaaccgagaaaatgtcgtgactgtagtgtgcgcatgctgcgacagatacggcacagctccaaccatcggtgctgcctgggcgacgaacacatggctgaacaagctcttgtttgacatgactaggccgtctcgtggtcttgggaaggcgcaccacatcattgttcacatcgctacactgtattgtcgactctctatagctacatcccgagggagttttatgaggagacgaagtgaaaagacacacttcagaagtttccctggtgagtagtccattgaccgttcaccaaggcataggacagatgggccattggtcgattgcttactctgatacaataccacagtagcaatgcaactgcctttttcaggtgttatgatgctacaacttctggaaaaagtaattgaattggaaaattggacagaggggaaaggcctcattgtccgtggggcaaaaaatactttctcttcaggatctgatctgaatgctgtgaaatcactaggaactccagaggatggaatggccgtatgcatgttcatgcaaaacaccttaacaagatttatgagacttcctttaataagtgttgcgctggttcaaggttgggcattgggtggaggagcagaatttactacagcatgtgatttcaggttaatgactccagagagtaagatcagattcgtccacaaagagatgggcataataccaagctggggtggcaccacccggctagttgaaataatcggaagtagacaagctctcaaagtgttgagtggggcccttaaactggattcaaaaaatgctctaaacataggaatggttgaagaggtcttgcagtcttcagatgaaactaaatctctagaagaggcacaagaatggctaaagcaattcatccaagggccaccggaagtaattagagctttgaaaaaatctgtttgttcaggcagagagctatatttggaggaagcattacagaacgaaagagatcttttaggaacagtttggggtgggcctgcaaatttagaggctattgctaagaaaggaaaatttaataaataattggtttttcgtgtggatgtactccaagtaaagctccagtgactaatatgtataaatgttaaatgatattaaatatgaacatcagaattactttgaaggctactattaatatgcagacttacttttaatcatttgaatatctgaactcatttacctcatttcttgccaattactcacttgggtatttactgcgtaatctggaacatttagctaaaatatacacttttggcttaaaaattattgctgtcaattccaataataattcttagcttataaccaaagagcagtgtttaaaaggagagcttctatacaaaacctattcctggcgttacttttcatacaatttttgttctgttttacctggaaataatttaccaaaataactgagtgttgctgctaaagaacaaaagtggggaggtatcagggaacaagaaaacaagaaagggtatgatcaatcattttcttctgctccaaacagctggagtaaaattcatgggaaatggcccttcatttaaaaaaagatgtacctcactacccactacaaatttggaactttgttcttttcaataattagttttctattgtaaattacctactaaacagtggtagccatgacatggaaagtcaactgattctacaattggacattcatttgtgtgccctggaatttccaactagtaataaacaactactgttgatgtagttttaaaccacttgaagggactcatgaagcatcctgcaacataaatttgcatttttacatcagatttcttttttttcctgaaaaacaactaaccttctaacaactatctttcaaaagtaaatgtaataaaaatgcacaacataaaatgtttatgatcccagcaatacactttttaaaaaatgtgaaagtcaaagaattaagttctagttctgactcatcacaagaggtcaaaagtatttgctactgtaacattcaattcacatttgagaatcatggtaaaaataacttgtatttgccttaccatcatgatcctactgttgagttaggaaaatatggttagacagactcacattactttttttcagaggtaaactctagattactgtgtcaacccaatactatttggccatagatgtaaaaactaccaaataaaagtggattttgtggtctacaa

SEQ ID NO: 289569 - DNA, 1806 bp, Homo sapiens
gttcttgtttgcaaagggtaaacaagcacaacaaaaaatgatactgttttcaaagggaagttttaaatactattagtaaattaaattctagatgaaacagccatatttttcaaacattgtttttaatatacctacctataaagatctatggagaattcacatcagatcatgaatggatagtactttatgattagagcatacagagagagttacaattaagcttttcttttttcttttacagttaatgactccagagagtaagatcagattcgtccacaaagagatgggcataataccaagctggggtggcaccacccggctagttgaaataatcggaagtagacaagctctcaaagtgttgagtggggcccttaaactggattcaaaaaatgctctaaacataggaatggttgaagaggtcttgcagtcttcagatgaaactaaatctctagaagaggcacaagaatggctaaagcaattcatccaagggccaccggaagtaattagagctttgaaaaaatctgtttgttcaggcagagagctatatttggaggaagcattacagaacgaaagagatcttttaggaacagtttggggtgggcctgcaaatttagaggctattgctaagaaaggaaaatttaataaataattggtttttcgtgtggatgtactccaagtaaagctccagtgactaatatgtataaatgttaaatgatattaaatatgaacatcagaattactttgaaggctactattaatatgcagacttacttttaatcatttgaatatctgaactcatttacctcatttcttgccaattactcacttgggtatttactgcgtaatctggaacatttagctaaaatatacacttttggcttaaaaattattgctgtcaattccaataataattcttagcttataaccaaagagcagtgtttaaaaggagagcttctatacaaaacctattcctggcgttacttttcatacaatttttgttctgttttacctggaaataatttaccaaaataactgagtgttgctgctaaagaacaaaagtggggaggtatcagggaacaagaaaacaagaaagggtatgatcaatcattttcttctgctccaaacagctggagtaaaattcatgggaaatggcccttcatttaaaaaaagatgtacctcactacccactacaaatttggaactttgttcttttcaataattagttttctattgtaaattacctactaaacagtggtagccatgacatggaaagtcaactgattctacaattggacattcatttgtgtgccctggaatttccaactagtaataaacaactactgttgatgtagttttaaaccacttgaagggactcatgaagcatcctgcaacataaatttgcatttttacatcagatttcttttttttcctgaaaaacaactaaccttctaacaactatctttcaaaagtaaatgtaataaaaatgcacaacataaaatgtttatgatcccagcaatacactttttaaaaaatgtgaaagtcaaagaattaagttctagttctgactcatcacaagaggtcaaaagtatttgctactgtaacattcaattcacatttgagaatcatggtaaaaataacttgtatttgccttaccatcatgatcctactgttgagttaggaaaatatggttagacagactcacattactttttttcagaggtaaactctagattactgtgtcaacccaatactatttggccatagatgtaaaaactaccaaataaaagtggattttgtggtctacaa

SEQ ID NO: 289570 - DNA, 1611 bp, Homo sapiens
agactctagaggaccccagtttagaagttcatagcatgtgatttcgttaatgactccagagagtaagatcagattcgtccacaaagagatgggcataataccaagctggggtggcaccacccggctagttgaaataatcggaagtagacaagctctcaaagtgttgagtggggcccttaaactggattcaaaaaatgctctaaacataggaatggttgaagaggtcttgcagtcttcagatgaaactaaatctctagaagaggcacaagaatggctaaagcaattcatccaagggccaccggaagtaattagagctttgaaaaaatctgtttgttcaggcagagagctatatttggaggaagcattacagaacgaaagagatcttttaggaacagtttggggtgggcctgcaaatttagaggctattgctaagaaaggaaaatttaataaataattggtttttcgtgtggatgtactccaagtaaagctccagtgactaatatgtataaatgttaaatgatattaaatatgaacatcagaattactttgaaggctactattaatatgcagacttacttttaatcatttgaatatctgaactcatttacctcatttcttgccaattactcacttgggtatttactgcgtaatctggaacatttagctaaaatatacacttttggcttaaaaattattgctgtcaattccaataataattcttagcttataaccaaagagcagtgtttaaaaggagagcttctatacaaaacctattcctggcgttacttttcatacaatttttgttctgttttacctggaaataatttaccaaaataactgagtgttgctgctaaagaacaaaagtggggaggtatcagggaacaagaaaacaagaaagggtatgatcaatcattttcttctgctccaaacagctggagtaaaattcatgggaaatggcccttcatttaaaaaaagatgtacctcactacccactacaaatttggaactttgttcttttcaataattagttttctattgtaaattacctactaaacagtggtagccatgacatggaaagtcaactgattctacaattggacattcatttgtgtgccctggaatttccaactagtaataaacaactactgttgatgtagttttaaaccacttgaagggactcatgaagcatcctgcaacataaatttgcatttttacatcagatttcttttttttcctgaaaaacaactaaccttctaacaactatctttcaaaagtaaatgtaataaaaatgcacaacataaaatgtttatgatcccagcaatacactttttaaaaaatgtgaaagtcaaagaattaagttctagttctgactcatcacaagaggtcaaaagtatttgctactgtaacattcaattcacatttgagaatcatggtaaaaataacttgtatttgccttaccatcatgatcctactgttgagttaggaaaatatggttagacagactcacattactttttttcagaggtaaactctagattactgtgtcaacccaatactatttggccatagatgtaaaaactaccaaataaaagtggattttgtggtctacaa

SEQ ID NO: 289571 - DNA, 1807 bp, Homo sapiens
gttcttactttagagctgtgacatcaagaaaatttacctctgatcatgccaggattactaaatgttaaaatcagacttcagtatcacaaaacatttttatatctgctccccccctcacaaccacacaacaaataaaagttttcacacattcgactatataccttcttactcaagcagtctgtttgcatataatgaatggaaactcatgaagccaatcatctgagacttggaaatcagaaaggttaatgactccagagagtaagatcagattcgtccacaaagagatgggcataataccaagctggggtggcaccacccggctagttgaaataatcggaagtagacaagctctcaaagtgttgagtggggcccttaaactggattcaaaaaatgctctaaacataggaatggttgaagaggtcttgcagtcttcagatgaaactaaatctctagaagaggcacaagaatggctaaagcaattcatccaagggccaccggaagtaattagagctttgaaaaaatctgtttgttcaggcagagagctatatttggaggaagcattacagaacgaaagagatcttttaggaacagtttggggtgggcctgcaaatttagaggctattgctaagaaaggaaaatttaataaataattggtttttcgtgtggatgtactccaagtaaagctccagtgactaatatgtataaatgttaaatgatattaaatatgaacatcagaattactttgaaggctactattaatatgcagacttacttttaatcatttgaatatctgaactcatttacctcatttcttgccaattactcacttgggtatttactgcgtaatctggaacatttagctaaaatatacacttttggcttaaaaattattgctgtcaattccaataataattcttagcttataaccaaagagcagtgtttaaaaggagagcttctatacaaaacctattcctggcgttacttttcatacaatttttgttctgttttacctggaaataatttaccaaaataactgagtgttgctgctaaagaacaaaagtggggaggtatcagggaacaagaaaacaagaaagggtatgatcaatcattttcttctgctccaaacagctggagtaaaattcatgggaaatggcccttcatttaaaaaaagatgtacctcactacccactacaaatttggaactttgttcttttcaataattagttttctattgtaaattacctactaaacagtggtagccatgacatggaaagtcaactgattctacaattggacattcatttgtgtgccctggaatttccaactagtaataaacaactactgttgatgtagttttaaaccacttgaagggactcatgaagcatcctgcaacataaatttgcatttttacatcagatttcttttttttcctgaaaaacaactaaccttctaacaactatctttcaaaagtaaatgtaataaaaatgcacaacataaaatgtttatgatcccagcaatacactttttaaaaaatgtgaaagtcaaagaattaagttctagttctgactcatcacaagaggtcaaaagtatttgctactgtaacattcaattcacatttgagaatcatggtaaaaataacttgtatttgccttaccatcatgatcctactgttgagttaggaaaatatggttagacagactcacattactttttttcagaggtaaactctagattactgtgtcaacccaatactatttggccatagatgtaaaaactaccaaataaaagtggattttgtggtctacaa

SEQ ID NO: 289572 - DNA, 2765 bp, Homo sapiens
agtagttaactgaatgttttcaccgctttaacgtccagctgcgcttatctttgacatcgactacctaaggtctacctttagtcccacgactctgacaaaatgatctcaatattggtgtaaaatcacctcccctttcaagggtcttccaaagcacttcctgtctgcggcatacaaaatgtattggcacggaattttaagcttactgagctttataaacacgtcacattcacacattcaagacacacactggatattcggataaaaacaaacaaacaaaaaactggctaaatacccattcccctcaataacttggataagatacctaaaaaaggtcgaccttcggtacctttctgtcttctcccctctcgctatttgcctacactggcttcctcacctccactttttctcacgtttatctgagcgaaaacaagcacggttcggcagcctcctttcccagccctacctttgtgctgcaaaagcgaaaattcaaaagccaagtacaataggagaccgcccaccctggctccctcgtgacacgagggagcgcgaagcggagggcgcctcgcggcaggagcgggatttccggggtcacgggaaccggcaggggaacgggataaagttcccggagaaaggaaaggagagcgtgggatagtaaaagagaagacgcggagaagaggagaggacctacaagaacggaggacaggggcgcacgatggtcccggggggagcggaaacaaaggcacgcaaaacggaaaagcgtgtgtaggggagcggaaaaggaagtcaccaccgtggcctgcgacgaaatggcgaaaagtcttttgaagacagcctctctgtctggaaggacaaaattgctacatcaaacaggattgtcactttatagtacatcccatggattttatgaggaagaagtgaaaaaaacacttcagcagtttcctggtggatccattgaccttcagaaggaagacaatggcattggcattcttactctgaacaatccaagtagaatgaatgccttttcaggtgttatgatgctacaacttctggaaaaagtaattgaattggaaaattggacagaggggaaaggcctcattgtccgtggggcaaaaaatactttctcttcaggatctgatctgaatgctgtgaaatcactaggaactccagaggatggaatggccgtatgcatgttcatgcaaaacaccttaacaagatttatgagacttcctttaataagtgttgcgctggttcaaggttgggcattgggtggaggagcagaatttactacagcatgtgatttcaggttaatgactccagagagtaagatcagattcgtccacaaagagatgggcataataccaagctggggtggcaccacccggctagttgaaataatcggaagtagacaagctctcaaagtgttgagtggggcccttaaactggattcaaaaaatgctctaaacataggaatggttgaagaggtcttgcagtcttcagatgaaactaaatctctagaagaggcacaagaatggctaaagcaattcatccaagggccaccggaagtaattagagctttgaaaaaatctgtttgttctaggaacagtttggggtgggcctgcaaatttagaggctattgctaagaaaggaaaatttaataaataattggtttttcgtgtggatgtactccaagtaaagctccagtgactaatatgtataaatgttaaatgatattaaatatgaacatcagaattactttgaaggctactattaatatgcagacttacttttaatcatttgaatatctgaactcatttacctcatttcttgccaattactcacttgggtatttactgcgtaatctggaacatttagctaaaatatacacttttggcttaaaaattattgctgtcaattccaataataattcttagcttataaccaaagagcagtgtttaaaaggagagcttctatacaaaacctattcctggcgttacttttcatacaatttttgttctgttttacctggaaataatttaccaaaataactgagtgttgctgctaaagaacaaaagtggggaggtatcagggaacaagaaaacaagaaagggtatgatcaatcattttcttctgctccaaacagctggagtaaaattcatgggaaatggcccttcatttaaattagttttctattgtaaattacctactaaacagtggtagccatgacatggaaagtcaactgattctacaattggacattcatttgtgtgccctggaatttccaactagtaataaacaactactgttgatgtagttttaaaccacttgaagggactcatgaagcatcctgcaacataaatttgcatttttacatcagatttcttttttttcctgaaaaacaactaaccttctaacaactatctttcaaaagtaaatgtaataaaaatgcacaacataaaatgtttatgatcccagcaatacactttttaaaaaatgtgaaagtcaaagaattaagttctagttctgactcatcacaagaggtcaaaagtatttgctactgtaacattcaattcacatttgagaatcatggtaaaaataacttgtatttgccttaccatcatgatcctactgttgagttaggaaaatatggttagacagactcacattactttttttcagaggtaaactctagattactgtgtcaacccaatactatttggccatagatgtaaaaactaccaaataaaagtggattttgtggtctacaa

SEQ ID NO: 289573 - DNA, 978 bp, Homo sapiens
tcgtgccgaattcggcagagggaacatttagctaaaatatacacttttggcttaaaaattattgctgtcaattccaataataattcttagcttataaccaaagagcagtgtttaaaaggagagcttctatacaaaacctattcctggcgttacttttcatacaatttttgttctgttttacctggaaataatttaccaaaataactgagtgttgctgctaaagaacaaaagtggggaggtatcagggaacaagaaaacaagaaagggtatgatcaatcattttcttctgctccaaacagctggagtaaaattcatgggaaatggcccttcatttaaaaaaagatgtacctcactacccactacaaatttggaactttgttcttttcaataattagttttctattgtaaattacctactaaacagtggtagccatgacatggaaagtcaactgattctacaattggacattcatttgtgtgccctggaatttccaactagtaataaacaactactgttgatgtagttttaaaccacttgaagggactcatgaagcatcctgcaacataaatttgcatttttacatcagatttcttttttttcctgaaaaacaactaaccttctaacaactatctttcaaaagtaaatgtaataaaaatgcacaacataaaatgtttatgatcccagcaatacactttttaaaaaatgtgaaagtcaaagaattaagttctagttctgactcatcacaagaggtcaaaagtatttgctactgtaacattcaattcacatttgagaatcatggtaaaaataacttgtatttgccttaccatcatgatcctactgttgagttaggaaaatatggttagacagactcacattactttttttcagaggtaaactctagattactgtgtcaacccaatactatttggccatagatgtaaaaactaccaaataaaagtggattttgtggtctacaa

SEQ ID NO: 289574 - DNA, 856 bp, Homo sapiens
cgtggagtaagtccaattgtagaagtcagttgactttccatgtcatggctaccactgtttagtaggtaatttaccaaaataactgagtgttgctgctaaagaacaaaagtggggaggtatcagggaacaagaaaacaagaaagggtatgatcaatcattttcttctgctccaaacagctggagtaaaattcatgggaaatggcccttcatttaaaaaaagatgtacctcactacccactacaaatttggaactttgttcttttcaataattagttttctattgtaaattacctactaaacagtggtagccatgacatggaaagtcaactgattctacaattggacattcatttgtgtgccctggaatttccaactagtaataaacaactactgttgatgtagttttaaaccacttgaagggactcatgaagcatcctgcaacataaatttgcatttttacatcagatttcttttttttcctgaaaaacaactaaccttctaacaactatctttcaaaagtaaatgtaataaaaatgcacaacataaaatgtttatgatcccagcaatacactttttaaaaaatgtgaaagtcaaagaattaagttctagttctgactcatcacaagaggtcaaaagtatttgctactgtaacattcaattcacatttgagaatcatggtaaaaataacttgtatttgccttaccatcatgatcctactgttgagttaggaaaatatggttagacagactcacattactttttttcagaggtaaactctagattactgtgtcaacccaatactatttggccatagatgtaaaaactaccaaataaaagtggattttgtggtctacaa

SEQ ID NO: 289575 - DNA, 1687 bp, Homo sapiens
agtagttaactgaatgttttcaccgctttaacgtccagctgcgcttatctttgacatcgactacctaaggtctacctttagtcccacgactctgacaaaatgatctcaatattggtgtaaaatcacctcccctttcaagggtcttccaaagcacttcctgtctgcggcatacaaaatgtattggcacggaattttaagcttactgagctttataaacacgtcacattcacacattcaagacacacactggatattcggataaaaacaaacaaacaaaaaactggctaaatacccattcccctcaataacttggataagatacctaaaaaaggtcgaccttcggtacctttctgtcttctcccctctcgctatttgcctacactggcttcctcacctccactttttctcacgtttatctgagcgaaaacaagcacggttcggcagcctcctttcccagccctacctttgtgctgcaaaagcgaaaattcaaaagccaagtacaataggagaccgcccaccctggctccctcgtgacacgagggagcgcgaagcggagggcgcctcgcggcaggagcgggatttccggggtcacgggaaccggcaggggaacgggataaagttcccggagaaaggaaaggagagcgtgggatagtaaaagagaagacgcggagaagaggagaggacctacaagaacggaggacaggggcgcacgatggtcccggggggagcggaaacaaaggcacgcaaaacggaaaagcgtgtgtaggggagcggaaaaggaagtcaccaccgtggcctgcgacgaaatggcgaaaagtcttttgaagacagcctctctgtctggaaggacaaaattgctacatcaaacaggattgtcactttatagtacatcccatggattttatgaggaagaagtgaaaaaaacacttcagcagtttcctggtggatccattgaccttcagaaggaagacaatggcattggcattcttactctgaacaatccaagtagaatgaatgccttttcaggtgttatgatgctacaacttctggaaaaagtaattgaattggaaaattggacagaggggaaaggcctcattgtccgtggggcaaaaaatactttctcttcaggatctgatctgaatgctgtgaaatcactaggaactccagaggatggaatggccgtatgcatgttcatgcaaaacaccttaacaagatttatgagacttcctttaataagtgttgcgctggttcaaggttgggcattgggtggaggagcagaatttactacagcatgtgatttcaggttaatgactccagagagtaagatcagattcgtccacaaagagatgggcataataccaagctggggtggcaccacccggctagttgaaataatcggaagtagacaagctctcaaagtgttgagtggggcccttaaactggattcaaaaaatgctctaaacataggaatggttgaagaggtcttgcagtcttcagatgaaactaaatctctagaagaggcacaagaatggctaaagcaattcatccaagggccaccggaagtaattagagctttgaaaaaatctgtttgttctaggaacagtttggggtgggcctgcaaatttagaggctattgctaagaaaggaaaatttaataaataattggtttttcgtgtggatgtactcc

SEQ ID NO: 289576 - DNA, 1839 bp, Homo sapiens
agtagttaactgaatgttttcaccgctttaacgtccagctgcgcttatctttgacatcgactacctaaggtctacctttagtcccacgactctgacaaaatgatctcaatattggtgtaaaatcacctcccctttcaagggtcttccaaagcacttcctgtctgcggcatacaaaatgtattggcacggaattttaagcttactgagctttataaacacgtcacattcacacattcaagacacacactggatattcggataaaaacaaacaaacaaaaaactggctaaatacccattcccctcaataacttggataagatacctaaaaaaggtcgaccttcggtacctttctgtcttctcccctctcgctatttgcctacactggcttcctcacctccactttttctcacgtttatctgagcgaaaacaagcacggttcggcagcctcctttcccagccctacctttgtgctgcaaaagcgaaaattcaaaagccaagtacaataggagaccgcccaccctggctccctcgtgacacgagggagcgcgaagcggagggcgcctcgcggcaggagcgggatttccggggtcacgggaaccggcaggggaacgggataaagttcccggagaaaggaaaggagagcgtgggatagtaaaagagaagacgcggagaagaggagaggacctacaagaacggaggacaggggcgcacgatggtcccggggggagcggaaacaaaggcacgcaaaacggaaaagcgtgtgtaggggagcggaaaaggaagtcaccaccgtggcctgcgacgaaatggcgaaaagtcttttgaagacagcctctctgtctggaaggacaaaattgctacatcaaacaggattgtcactttatagtacatcccatggattttatgaggaagaagtgaaaaaaacacttcagcagtttcctggtggatccattgaccttcagaaggaagacaatggcattggcattcttactctgaacaatccaagtagaatgaatgccttttcaggtgttatgatgctacaacttctggaaaaagtaattgaattggaaaattggacagaggggaaaggcctcattgtccgtggggcaaaaaatactttctcttcaggatctgatctgaatgctgtgaaatcactaggaactccagaggatggaatggccgtatgcatgttcatgcaaaacaccttaacaagatttatgaggtaaagaagcaaagaggaaaaattcttcttggcctatcaagacttcctttaataagtgttgcgctggttcaaggttgggcattgggtggaggagcagaatttactacagcatgtgatttcaggttaatgactccagagagtaagatcagattcgtccacaaagagatgggcataataccaagctggggtggcaccacccggctagttgaaataatcggaagtagacaagctctcaaagtgttgagtggggcccttaaactggattcaaaaaatgctctaaacataggaatggttgaagaggtcttgcagtcttcagatgaaactaaatctctagaagaggcacaagaatggctaaagcaattcatccaagggccaccggaagtaattagagctttgaaaaaatctgtttgttcaggcagagagctatatttggaggaagcattacagaacgaaagagatcttttaggaacagtttggggtgggcctgcaaatttagaggctattgctaagaaaggaaaatttaataaataattggtttttcgtgtggatgtactccaagtaaagctccagtgactaatatgtataaatgttaaatgatattaaatatgaacatcaga

SEQ ID NO: 289577 - DNA, 1714 bp, Homo sapiens
agtagttaactgaatgttttcaccgctttaacgtccagctgcgcttatctttgacatcgactacctaaggtctacctttagtcccacgactctgacaaaatgatctcaatattggtgtaaaatcacctcccctttcaagggtcttccaaagcacttcctgtctgcggcatacaaaatgtattggcacggaattttaagcttactgagctttataaacacgtcacattcacacattcaagacacacactggatattcggataaaaacaaacaaacaaaaaactggctaaatacccattcccctcaataacttggataagatacctaaaaaaggtcgaccttcggtacctttctgtcttctcccctctcgctatttgcctacactggcttcctcacctccactttttctcacgtttatctgagcgaaaacaagcacggttcggcagcctcctttcccagccctacctttgtgctgcaaaagcgaaaattcaaaagccaagtacaataggagaccgcccaccctggctccctcgtgacacgagggagcgcgaagcggagggcgcctcgcggcaggagcgggatttccggggtcacgggaaccggcaggggaacgggataaagttcccggagaaaggaaaggagagcgtgggatagtaaaagagaagacgcggagaagaggagaggacctacaagaacggaggacaggggcgcacgatggtcccggggggagcggaaacaaaggcacgcaaaacggaaaagcgtgtgtaggggagcggaaaaggaagtcaccaccgtggcctgcgacgaaatggcgaaaagtcttttgaagacagcctctctgtctggaaggacaaaattgctacatcaaacaggattgtcactttatagtacatcccatggattttatgaggaagaagtgaaaaaaacacttcagcagtttcctggtggatccattgaccttcagaaggaagacaatggcattggcattcttactctgaacaatccaagtagaatgaatgccttttcaggtgttatgatgctacaacttctggaaaaagtaattgaattggaaaattggacagaggggaaaggcctcattgtccgtggggcaaaaaatactttctcttcaggatctgatctgaatgctgtgaaatcactaggaactccagaggatggaatggccgtatgcatgttcatgcaaaacaccttaacaagatttatgagacttcctttaataagtgttgcgctggttcaaggttgggcattgggtggaggagcagaatttactacagcatgtgatttcagtttcagacactgaagagaaagtgattctgcgctggcatgtagtgctctacatatttcaaaacatcatgttgtacatttaaaaacttttaagcctggcgtggtggctcatgcctgttatcccagcattttggggggctgaaataggcagatcacctgaggtcaggagtttgagaccagcctggccaacatggtgaaaccctatctctactcaaaatacaaaaattagccaggtgtggtggcacatgcctgtagtcctacaacttgggagtctgaggtggaaggattgcttgaacctgggaggtggaggttacagtgagccaagatcacaccattgcactccagcctgggcaacagagtgagactctgtctcaaataaataaataaataaataaatttgttgagctacaaatt

SEQ ID NO: 289578 - DNA, 1416 bp, Homo sapiens
agtagttaactgaatgttttcaccgctttaacgtccagctgcgcttatctttgacatcgactacctaaggtctacctttagtcccacgactctgacaaaatgatctcaatattggtgtaaaatcacctcccctttcaagggtcttccaaagcacttcctgtctgcggcatacaaaatgtattggcacggaattttaagcttactgagctttataaacacgtcacattcacacattcaagacacacactggatattcggataaaaacaaacaaacaaaaaactggctaaatacccattcccctcaataacttggataagatacctaaaaaaggtcgaccttcggtacctttctgtcttctcccctctcgctatttgcctacactggcttcctcacctccactttttctcacgtttatctgagcgaaaacaagcacggttcggcagcctcctttcccagccctacctttgtgctgcaaaagcgaaaattcaaaagccaagtacaataggagaccgcccaccctggctccctcgtgacacgagggagcgcgaagcggagggcgcctcgcggcaggagcgggatttccggggtcacgggaaccggcaggggaacgggataaagttcccggagaaaggaaaggagagcgtgggatagtaaaagagaagacgcggagaagaggagaggacctacaagaacggaggacaggggcgcacgatggtcccggggggagcggaaacaaaggcacgcaaaacggaaaagcgtgtgtaggggagcggaaaaggaagtcaccaccgtggcctgcgacgaaatggcgaaaagtcttttgaagacagcctctctgtctggaaggacaaaattgctacatcaaacaggattgtcactttatagtacatcccatggattttatgaggaagaagtgaaaaaaacacttcagcagtttcctggtggatccattgaccttcagaaggaagacaatggcattggcattcttactctgaacaatccaagtagaatgaatgccttttcaggtgttatgatgctacaacttctggaaaaagtaattgaattggaaaattggacagaggggaaaggcctcattgtccgtggggcaaaaaatactttctcttcaggatctgatctgaatgctgtgaaatcactaggaactccagaggatggaatggccgtatgcatgttcatgcaaaacaccttaacaagatttatgaggtaatgcagccttctttttaaaatatgatttctaaaagaccaaaaatagctttttgctattccattatttgtactagttaagaaataatagctaattttcaaattacatctattctaatgatgtactatttttttgtgccgtagaggataatcatttaattacatgttaatgaagtatatacatatgtatttta

SEQ ID NO: 289579 - DNA, 1891 bp, Homo sapiens
agtagttaactgaatgttttcaccgctttaacgtccagctgcgcttatctttgacatcgactacctaaggtctacctttagtcccacgactctgacaaaatgatctcaatattggtgtaaaatcacctcccctttcaagggtcttccaaagcacttcctgtctgcggcatacaaaatgtattggcacggaattttaagcttactgagctttataaacacgtcacattcacacattcaagacacacactggatattcggataaaaacaaacaaacaaaaaactggctaaatacccattcccctcaataacttggataagatacctaaaaaaggtcgaccttcggtacctttctgtcttctcccctctcgctatttgcctacactggcttcctcacctccactttttctcacgtttatctgagcgaaaacaagcacggttcggcagcctcctttcccagccctacctttgtgctgcaaaagcgaaaattcaaaagccaagtacaataggagaccgcccaccctggctccctcgtgacacgagggagcgcgaagcggagggcgcctcgcggcaggagcgggatttccggggtcacgggaaccggcaggggaacgggataaagttcccggagaaaggaaaggagagcgtgggatagtaaaagagaagacgcggagaagaggagaggacctacaagaacggaggacaggggcgcacgatggtcccggggggagcggaaacaaaggcacgcaaaacggaaaagcgtgtgtaggggagcggaaaaggaagtcaccaccgtggcctgcgacgaaatggcgaaaagtcttttgaagacagcctctctgtctggaaggacaaaattgctacatcaaacaggattgtcactttatagtacatcccatggattttatgaggaagaagtgaaaaaaacacttcagcagtttcctggtggatccattgaccttcagaaggaagacaatggcattggcattcttactctgaacaatccaagtagaatgaatgccttttcaggtgttatgatgctacaacttctggaaaaagtaattgaattggaaaattggacagaggggaaaggcctcattgtccgtggggcaaaaaatactttctcttcaggatctgatctgaatgctgtgaaatcactaggaactccagagacttcctttaataagtgttgcgctggttcaaggttgggcattgggtggaggagcagaatttactacagcatgtgatttcaggttaatgactccagagagtaagatcagattcgtccacaaagagatgggcataataccaagctggggtggcaccacccggctagttgaaataatcggaagtagacaagctctcaaagtgttgagtggggcccttaaactggattcaaaaaatgctctaaacataggaatggttgaagaggtcttgcagtcttcagatgaaactaaatctctagaagaggcacaagaatggctaaagcaattcatccaagggccaccggaagtaattagagctttgaaaaaatctgtttgttcaggcagagagctatatttggaggaagcattacagaacgaaagagatcttttaggaacagtttggggtgggcctgcaaatttagaggctattgctaagaaaggaaaatttaataaataattggtttttcgtgtggatgtactccaagtaaagctccagtgactaatatgtataaatgttaaatgatattaaatatgaacatcagaattactttgaaggctactattaatatgcagacttacttttaatcatttgaatatctgaactcatttacctcatttcttgccaattactcacttgggtatttactgcgtaatctggaacatttagctaaaatatacacttttggctt

SEQ ID NO: 289580 - DNA, 572 bp, Homo sapiens
ggcctgccatgtgtacctcttctgtatactccatagtgccagtgcagtaggcatttgatagacactcagtaaatatttataaaatataggacctaagagtatgcttgacacttgtgatttataaattatttctgtttttccagtcaccttcatatatttgtgatttcccacttccatctctggcaggtgttatgatgctacaacttctggaaaaagtaattgaattggaaaattggacagaggggaaaggcctcattgtccgtggggcaaaaaatactttctcttcaggatctgatctgaatgctgtgaaatcactaggaactccagaggatggaatggccgtatgcatgttcatgcaaaacaccttaacaagatttatgagacttcctttaataagtgttgcaccggcccaaccaggaccagatcctcaccaacctaagcaagaggaagtgcccctctcaacctgtgcgggctgctgcgtcccaggactgagacgcaggccagccccggcccctagccctcaggccttctttcttatccaaataaatgtttcttaatgagaaaaaaaaaaa

SEQ ID NO: 289581 - DNA, 3947 bp, Homo sapiens
agtagttaactgaatgttttcaccgctttaacgtccagctgcgcttatctttgacatcgactacctaaggtctacctttagtcccacgactctgacaaaatgatctcaatattggtgtaaaatcacctcccctttcaagggtcttccaaagcacttcctgtctgcggcatacaaaatgtattggcacggaattttaagcttactgagctttataaacacgtcacattcacacattcaagacacacactggatattcggataaaaacaaacaaacaaaaaactggctaaatacccattcccctcaataacttggataagatacctaaaaaaggtcgaccttcggtacctttctgtcttctcccctctcgctatttgcctacactggcttcctcacctccactttttctcacgtttatctgagcgaaaacaagcacggttcggcagcctcctttcccagccctacctttgtgctgcaaaagcgaaaattcaaaagccaagtacaataggagaccgcccaccctggctccctcgtgacacgagggagcgcgaagcggagggcgcctcgcggcaggagcgggatttccggggtcacgggaaccggcaggggaacgggataaagttcccggagaaaggaaaggagagcgtgggatagtaaaagagaagacgcggagaagaggagaggacctacaagaacggaggacaggggcgcacgatggtcccggggggagcggaaacaaaggcacgcaaaacggaaaagcgtgtgtaggggagcggaaaaggaagtcaccaccgtggcctgcgacgaaatggcgaaaagtcttttgaagacagcctctctgtctggaaggacaaaattgctacatcaaacaggattgtcactttatagtacatcccatggattttatgaggaagaagtgaaaaaaacacttcagcagtttcctggtggatccattgaccttcagaaggaagacaatggcattggcattcttactctgaacaatccaagtagaatgaatgccttttcaggtgttatgatgctacaacttctggaaaaagtaattgaattggaaaattggacagaggggaaaggcctcattgtccgtggggcaaaaaatactttctcttcaggatctgatctgaatgctgtgaaatcactaggaactccagaggatggaatggccgtatgcatgttcatgcaaaacaccttaacaagatttatgaggtaaagaagcaaagaggaaaaattcttcttggcctatcaaggtatgtttgaggttacaaactgacatgttttggttgattagctttctactttcacattccgaatgtagacaaatttaaaattatgaaaagtaaggaaattcttatttaagcaaggttattaattggacattactgtatttttggtacctattgtatctgagagtctagagagagtaatagaatcataacattactattctaaaatagtatcttcattgtttaaaccctattcacctccttttcctattgcatttgactttttcatagataaatctgaagttattatttttttaaataatcctttctacatgggagcagtgtatattaggaaattttcaattactttggacctgcacctttgcattgtaggtcagaacctacaaaaattccatcttggaaaacattttagatttaccttgtattcacacacccctgcaaagtgggtctttgcaaacaggaaaggtaaaagatttatttttactgcaaaatcatgcctttatataggattagtctgtggattatttcaggcaacaatgagtagatttttgaaggaaacttcataacacagttttggagccctatcttctgtaacacatttccaacctttggaaatagccttgattttccaacttttaacctgataccaacaaaaatggacaaagataatatcacatggaattattctgaagagccagctgctgagaagttccaggagctgtaaattagacaaaagcatccatttatttgggagtaagttacaatatggctatagcttaaaaatatataatgattcagggaggtattttaatgaacttatgtggcatttattgtgaactattgtatgtttagtattacactgtttttcttctcatgatgtaaaggttcaagcttctgctatcctttgatgtgtgtttgtttttatgaagacagtgcaataattttgtttccactgcattttaagattttttaaaaaataacatttgtaaatgaatattgaaattaaaaatagtaacatcagttttttcttcaatatacagacttcctttaataagtgttgcgctggttcaaggttgggcattgggtggaggagcagaatttactacagcatgtgatttcaggttaatgactccagagagtaagatcagattcgtccacaaagagatgggcataataccaagctggggtggcaccacccggctagttgaaataatcggaagtagacaagctctcaaagtgttgagtggggcccttaaactggattcaaaaaatgctctaaacataggaatggttgaagaggtcttgcagtcttcagatgaaactaaatctctagaagaggcacaagaatggctaaagcaattcatccaagggccaccggaagtaattagagctttgaaaaaatctgtttgttcaggcagagagctatatttggaggaagcattacagaacgaaagagatcttttaggaacagtttggggtgggcctgcaaatttagaggctattgctaagaaaggaaaatttaataaataattggtttttcgtgtggatgtactccaagtaaagctccagtgactaatatgtataaatgttaaatgatattaaatatgaacatcagaattactttgaaggctactattaatatgcagacttacttttaatcatttgaatatctgaactcatttacctcatttcttgccaattactcacttgggtatttactgcgtaatctggaacatttagctaaaatatacacttttggcttaaaaattattgctgtcaattccaataataattcttagcttataaccaaagagcagtgtttaaaaggagagcttctatacaaaacctattcctggcgttacttttcatacaatttttgttctgttttacctggaaataatttaccaaaataactgagtgttgctgctaaagaacaaaagtggggaggtatcagggaacaagaaaacaagaaagggtatgatcaatcattttcttctgctccaaacagctggagtaaaattcatgggaaatggcccttcatttaaaaaaagatgtacctcactacccactacaaatttggaactttgttcttttcaataattagttttctattgtaaattacctactaaacagtggtagccatgacatggaaagtcaactgattctacaattggacattcatttgtgtgccctggaatttccaactagtaataaacaactactgttgatgtagttttaaaccacttgaagggactcatgaagcatcctgcaacataaatttgcatttttacatcagatttcttttttttcctgaaaaacaactaaccttctaacaactatctttcaaaagtaaatgtaataaaaatgcacaacataaaatgtttatgatcccagcaatacactttttaaaaaatgtgaaagtcaaagaattaagttctagttctgactcatcacaagaggtcaaaagtatttgctactgtaacattcaattcacatttgagaatcatggtaaaaataacttgtatttgccttaccatcatgatcctactgttgagttaggaaaatatggttagacagactcacattactttttttcagaggtaaactctagattactgtgtcaacccaatactatttggccatagatgtaaaaactaccaaataaaagtggattttgtggtctacaa

SEQ ID NO: 289582 - DNA, 2411 bp, Homo sapiens
cttcagtttagtgttgtcagtgggagaatcctaaaatgtcgccgtggaatggactgtaccgctcgcttctccaaacgtgtcccagacggcgagcctccccggctccgcggcttgtcccttgcaagcgccgcgcaggcctgccccgcgctggacgtggagacgcggtgccgagcgccacgggccggctgtgcgccggccggggaaagagggcgaggggaagagatgaatcggtcttcccagagcgcgccgcgaggtcgcgagattacactttaaaaagcatgaggaggcttgctttctacatgctgatttaatttcggaatacattcgaggccctgtgctaagttagaaatggcgaaaagtcttttgaagacagcctctctgtctggaaggacaaaattgctacatcaaacaggattgtcactttatagtacatcccatggattttatgaggaagaagtgaaaaaaacacttcagcagtttcctggtggatccattgaccttcagaaggaagacaatggcattggcattcttactctgaacaatccaagtagaatgaatgccttttcaggtgttatgatgctacaacttctggaaaaagtaattgaattggaaaattggacagaggggaaaggcctcattgtccgtggggcaaaaaatactttctcttcaggatctgatctgaatgctgtgaaatcactaggaactccagaggatggaatggccgtatgcatgttcatgcaaaacaccttaacaagatttatgagacttcctttaataagtgttgcgctggttcaaggttgggcattgggtggaggagcagaatttactacagcatgtgatttcaggttaatgactccagagagtaagatcagattcgtccacaaagagatgggcataataccaagctggggtggcaccacccggctagttgaaataatcggaagtagacaagctctcaaagtgttgagtggggcccttaaactggattcaaaaaatgctctaaacataggaatggttgaagaggtcttgcagtcttcagatgaaactaaatctctagaagaggcacaagaatggctaaagcaattcatccaagggccaccggaagtaattagagctttgaaaaaatctgtttgttcaggcagagagctatatttggaggaagcattacagaacgaaagagatcttttaggaacagtttggggtgggcctgcaaatttagaggctattgctaagaaaggaaaatttaataaataattggtttttcgtgtggatgtactccaagtaaagctccagtgactaatatgtataaatgttaaatgatattaaatatgaacatcagaattactttgaaggctactattaatatgcagacttacttttaatcatttgaatatctgaactcatttacctcatttcttgccaattactcacttgggtatttactgcgtaatctggaacatttagctaaaatatacacttttggcttaaaaattattgctgtcaattccaataataattcttagcttataaccaaagagcagtgtttaaaaggagagcttctatacaaaacctattcctggcgttacttttcatacaatttttgttctgttttacctggaaataatttaccaaaataactgagtgttgctgctaaagaacaaaagtggggaggtatcagggaacaagaaaacaagaaagggtatgatcaatcattttcttctgctccaaacagctggagtaaaattcatgggaaatggcccttcatttaaaaaaagatgtacctcactacccactacaaatttggaactttgttcttttcaataattagttttctattgtaaattacctactaaacagtggtagccatgacatggaaagtcaactgattctacaattggacattcatttgtgtgccctggaatttccaactagtaataaacaactactgttgatgtagttttaaaccacttgaagggactcatgaagcatcctgcaacataaatttgcatttttacatcagatttcttttttttcctgaaaaacaactaaccttctaacaactatctttcaaaagtaaatgtaataaaaatgcacaacataaaatgtttatgatcccagcaatacactttttaaaaaatgtgaaagtcaaagaattaagttctagttctgactcatcacaagaggtcaaaagtatttgctactgtaacattcaattcacatttgagaatcatggtaaaaataacttgtatttgccttaccatcatgatcctactgttgagttaggaaaatatggttagacagactcacattactttttttcagaggtaaactctagattactgtgtcaacccaatactatttggccatagatgtaaaaactaccaaataaaagtggattttgtggtctacaa

SEQ ID NO: 289583 - DNA, 3436 bp, Homo sapiens
cttcagtttagtgttgtcagtgggagaatcctaaaatgtcgccgtggaatggactgtaccgctcgcttctccaaacgtgtcccagacggcgagcctccccggctccgcggcttgtcccttgcaagcgccgcgcaggcctgccccgcgctggacgtggagacgcggtgccgagcgccacgggccggctgtgcgccggccggggaaagagggcgaggggaagagatgaatcggtcttcccagagcgcgccgcgaggtcgcgagattacactttaaaaagcatgaggaggcttgctttctacatgctgatttaatttcggaatacattcgaggccctgtgctaagttagaaatggcgaaaagtcttttgaagacagcctctctgtctggaaggacaaaattgctacatcaaacaggattgtcactttatagtacatcccatggattttatgaggaagaagtgaaaaaaacacttcagcagtttcctggtggatccattgaccttcagaaggaagacaatggcattggcattcttactctgaacaatccaagtagaatgaatgccttttcaggtgttatgatgctacaacttctggaaaaagtaattgaattggaaaattggacagaggggaaaggcctcattgtccgtggggcaaaaaatagatggaatggccgtatgcatgttcatgcaaaacaccttaacaagatttatgaggtaaagaagcaaagaggaaaaattcttcttggcctatcaaggtatgtttgaggttacaaactgacatgttttggttgattagctttctactttcacattccgaatgtagacaaatttaaaattatgaaaagtaaggaaattcttatttaagcaaggttattaattggacattactgtatttttggtacctattgtatctgagagtctagagagagtaatagaatcataacattactattctaaaatagtatcttcattgtttaaaccctattcacctccttttcctattgcatttgactttttcatagataaatctgaagttattatttttttaaataatcctttctacatgggagcagtgtatattaggaaattttcaattactttggacctgcacctttgcattgtaggtcagaacctacaaaaattccatcttggaaaacattttagatttaccttgtattcacacacccctgcaaagtgggtctttgcaaacaggaaaggtaaaagatttatttttactgcaaaatcatgcctttatataggattagtctgtggattatttcaggcaacaatgagtagatttttgaaggaaacttcataacacagttttggagccctatcttctgtaacacatttccaacctttggaaatagccttgattttccaacttttaacctgataccaacaaaaatggacaaagataatatcacatggaattattctgaagagccagctgctgagaagttccaggagctgtaaattagacaaaagcatccatttatttgggagtaagttacaatatggctatagcttaaaaatatataatgattcagggaggtattttaatgaacttatgtggcatttattgtgaactattgtatgtttagtattacactgtttttcttctcatgatgtaaaggttcaagcttctgctatcctttgatgtgtgtttgtttttatgaagacagtgcaataattttgtttccactgcattttaagattttttaaaaaataacatttgtaaatgaatattgaaattaaaaatagtaacatcagttttttcttcaatatacagacttcctttaataagtgttgcgctggttcaaggttgggcattgggtggaggagcagaatttactacagcatgtgatttcaggttaatgactccagagagtaagatcagattcgtccacaaagagatgggcataataccaagctggggtggcaccacccggctagttgaaataatcggaagtagacaagctctcaaagtgttgagtggggcccttaaactggattcaaaaaatgctctaaacataggaatggttgaagaggtcttgcagtcttcagatgaaactaaatctctagaagaggcacaagaatggctaaagcaattcatccaagggccaccggaagtaattagagctttgaaaaaatctgtttgttcaggcagagagctatatttggaggaagcattacagaacgaaagagatcttttaggaacagtttggggtgggcctgcaaatttagaggctattgctaagaaaggaaaatttaataaataattggtttttcgtgtggatgtactccaagtaaagctccagtgactaatatgtataaatgttaaatgatattaaatatgaacatcagaattactttgaaggctactattaatatgcagacttacttttaatcatttgaatatctgaactcatttacctcatttcttgccaattactcacttgggtatttactgcgtaatctggaacatttagctaaaatatacacttttggcttaaaaattattgctgtcaattccaataataattcttagcttataaccaaagagcagtgtttaaaaggagagcttctatacaaaacctattcctggcgttacttttcatacaatttttgttctgttttacctggaaataatttaccaaaataactgagtgttgctgctaaagaacaaaagtggggaggtatcagggaacaagaaaacaagaaagggtatgatcaatcattttcttctgctccaaacagctggagtaaaattcatgggaaatggcccttcatttaaaaaaagatgtacctcactacccactacaaatttggaactttgttcttttcaataattagttttctattgtaaattacctactaaacagtggtagccatgacatggaaagtcaactgattctacaattggacattcatttgtgtgccctggaatttccaactagtaataaacaactactgttgatgtagttttaaaccacttgaagggactcatgaagcatcctgcaacataaatttgcatttttacatcagatttcttttttttcctgaaaaacaactaaccttctaacaactatctttcaaaagtaaatgtaataaaaatgcacaacataaaatgtttatgatcccagcaatacactttttaaaaaatgtgaaagtcaaagaattaagttctagttctgactcatcacaagaggtcaaaagtatttgctactgtaacattcaattcacatttgagaatcatggtaaaaataacttgtatttgccttaccatcatgatcctactgttgagttaggaaaatatggttagacagactcacattactttttttcagaggtaaactctagattactgtgtcaacccaatactatttggccatagatgtaaaaactaccaaataaaagtggattttgtggtctacaa

SEQ ID NO: 289584 - DNA, 2910 bp, Homo sapiens
agtagttaactgaatgttttcaccgctttaacgtccagctgcgcttatctttgacatcgactacctaaggtctacctttagtcccacgactctgacaaaatgatctcaatattggtgtaaaatcacctcccctttcaagggtcttccaaagcacttcctgtctgcggcatacaaaatgtattggcacggaattttaagcttactgagctttataaacacgtcacattcacacattcaagacacacactggatattcggataaaaacaaacaaacaaaaaactggctaaatacccattcccctcaataacttggataagatacctaaaaaaggtcgaccttcggtacctttctgtcttctcccctctcgctatttgcctacactggcttcctcacctccactttttctcacgtttatctgagcgaaaacaagcacggttcggcagcctcctttcccagccctacctttgtgctgcaaaagcgaaaattcaaaagccaagtacaataggagaccgcccaccctggctccctcgtgacacgagggagcgcgaagcggagggcgcctcgcggcaggagcgggatttccggggtcacgggaaccggcaggggaacgggataaagttcccggagaaaggaaaggagagcgtgggatagtaaaagagaagacgcggagaagaggagaggacctacaagaacggaggacaggggcgcacgatggtcccggggggagcggaaacaaaggcacgcaaaacggaaaagcgtgtgtaggggagcggaaaaggaagtcaccaccgtggcctgcgacgaaatggcgaaaagtcttttgaagacagcctctctgtctggaaggacaaaattgctacatcaaacaggattgtcactttatagtacatcccatggattttatgaggaagaagtgaaaaaaacacttcagcagtttcctggtggatccattgaccttcagaaggaagacaatggcattggcattcttactctgaacaatccaagtagaatgaatgccttttcaggtgttatgatgctacaacttctggaaaaagtaattgaattggaaaattggacagaggggaaaggcctcattgtccgtggggcaaaaaatactttctcttcaggatctgatctgaatgctgtgaaatcactaggaactccagaggatggaatggccgtatgcatgttcatgcaaaacaccttaacaagatttatgaggtaaagaagcaaagaggaaaaattcttcttggcctatcaagacttcctttaataagtgttgcgctggttcaaggttgggcattgggtggaggagcagaatttactacagcatgtgatttcaggttaatgactccagagagtaagatcagattcgtccacaaagagatgggcataataccaagctggggtggcaccacccggctagttgaaataatcggaagtagacaagctctcaaagtgttgagtggggcccttaaactggattcaaaaaatgctctaaacataggaatggttgaagaggtcttgcagtcttcagatgaaactaaatctctagaagaggcacaagaatggctaaagcaattcatccaagggccaccggaagtaattagagctttgaaaaaatctgtttgttcaggcagagagctatatttggaggaagcattacagaacgaaagagatcttttaggaacagtttggggtgggcctgcaaatttagaggctattgctaagaaaggaaaatttaataaataattggtttttcgtgtggatgtactccaagtaaagctccagtgactaatatgtataaatgttaaatgatattaaatatgaacatcagaattactttgaaggctactattaatatgcagacttacttttaatcatttgaatatctgaactcatttacctcatttcttgccaattactcacttgggtatttactgcgtaatctggaacatttagctaaaatatacacttttggcttaaaaattattgctgtcaattccaataataattcttagcttataaccaaagagcagtgtttaaaaggagagcttctatacaaaacctattcctggcgttacttttcatacaatttttgttctgttttacctggaaataatttaccaaaataactgagtgttgctgctaaagaacaaaagtggggaggtatcagggaacaagaaaacaagaaagggtatgatcaatcattttcttctgctccaaacagctggagtaaaattcatgggaaatggcccttcatttaaaaaaagatgtacctcactacccactacaaatttggaactttgttcttttcaataattagttttctattgtaaattacctactaaacagtggtagccatgacatggaaagtcaactgattctacaattggacattcatttgtgtgccctggaatttccaactagtaataaacaactactgttgatgtagttttaaaccacttgaagggactcatgaagcatcctgcaacataaatttgcatttttacatcagatttcttttttttcctgaaaaacaactaaccttctaacaactatctttcaaaagtaaatgtaataaaaatgcacaacataaaatgtttatgatcccagcaatacactttttaaaaaatgtgaaagtcaaagaattaagttctagttctgactcatcacaagaggtcaaaagtatttgctactgtaacattcaattcacatttgagaatcatggtaaaaataacttgtatttgccttaccatcatgatcctactgttgagttaggaaaatatggttagacagactcacattactttttttcagaggtaaactctagattactgtgtcaacccaatactatttggccatagatgtaaaaactaccaaataaaagtggattttgtggtctacaa

SEQ ID NO: 289585 - DNA, 2989 bp, Homo sapiens
agtagttaactgaatgttttcaccgctttaacgtccagctgcgcttatctttgacatcgactacctaaggtctacctttagtcccacgactctgacaaaatgatctcaatattggtgtaaaatcacctcccctttcaagggtcttccaaagcacttcctgtctgcggcatacaaaatgtattggcacggaattttaagcttactgagctttataaacacgtcacattcacacattcaagacacacactggatattcggataaaaacaaacaaacaaaaaactggctaaatacccattcccctcaataacttggataagatacctaaaaaaggtcgaccttcggtacctttctgtcttctcccctctcgctatttgcctacactggcttcctcacctccactttttctcacgtttatctgagcgaaaacaagcacggttcggcagcctcctttcccagccctacctttgtgctgcaaaagcgaaaattcaaaagccaagtacaataggagaccgcccaccctggctccctcgtgacacgagggagcgcgaagcggagggcgcctcgcggcaggagcgggatttccggggtcacgggaaccggcaggggaacgggataaagttcccggagaaaggaaaggagagcgtgggatagtaaaagagaagacgcggagaagaggagaggacctacaagaacggaggacaggggcgcacgatggtcccggggggagcggaaacaaaggcacgcaaaacggaaaagcgtgtgtaggggagcggaaaaggaagtcaccaccgtggcctgcgacgaaatggcgaaaagtcttttgaagacagcctctctgtctggaaggacaaaattgctacatcaaacaggattgtcactttatagtacatcccatggattttatgaggaagaagtgaaaaaaacacttcagcagtttcctggtggatccattgaccttcagaaggaagacaatggcattggcattcttactctgaacaatccaagtagaatgaatgccttttcaggtgttatgatgctacaacttctggaaaaagtaattgaattggaaaattggacagaggggaaaggcctcattgtccgtggggcaaaaaatactttctcttcaggatctgatctgaatgctgtgaaatcactaggaactccagaggaaagttgcagatggaatacagagttcctgtacaccctgcatccagtttccccttttattaacatcttatattcctatggatggaatggccgtatgcatgttcatgcaaaacaccttaacaagatttatgaggtaaagaagcaaagaggaaaaattcttcttggcctatcaagacttcctttaataagtgttgcgctggttcaaggttgggcattgggtggaggagcagaatttactacagcatgtgatttcaggttaatgactccagagagtaagatcagattcgtccacaaagagatgggcataataccaagctggggtggcaccacccggctagttgaaataatcggaagtagacaagctctcaaagtgttgagtggggcccttaaactggattcaaaaaatgctctaaacataggaatggttgaagaggtcttgcagtcttcagatgaaactaaatctctagaagaggcacaagaatggctaaagcaattcatccaagggccaccggaagtaattagagctttgaaaaaatctgtttgttcaggcagagagctatatttggaggaagcattacagaacgaaagagatcttttaggaacagtttggggtgggcctgcaaatttagaggctattgctaagaaaggaaaatttaataaataattggtttttcgtgtggatgtactccaagtaaagctccagtgactaatatgtataaatgttaaatgatattaaatatgaacatcagaattactttgaaggctactattaatatgcagacttacttttaatcatttgaatatctgaactcatttacctcatttcttgccaattactcacttgggtatttactgcgtaatctggaacatttagctaaaatatacacttttggcttaaaaattattgctgtcaattccaataataattcttagcttataaccaaagagcagtgtttaaaaggagagcttctatacaaaacctattcctggcgttacttttcatacaatttttgttctgttttacctggaaataatttaccaaaataactgagtgttgctgctaaagaacaaaagtggggaggtatcagggaacaagaaaacaagaaagggtatgatcaatcattttcttctgctccaaacagctggagtaaaattcatgggaaatggcccttcatttaaaaaaagatgtacctcactacccactacaaatttggaactttgttcttttcaataattagttttctattgtaaattacctactaaacagtggtagccatgacatggaaagtcaactgattctacaattggacattcatttgtgtgccctggaatttccaactagtaataaacaactactgttgatgtagttttaaaccacttgaagggactcatgaagcatcctgcaacataaatttgcatttttacatcagatttcttttttttcctgaaaaacaactaaccttctaacaactatctttcaaaagtaaatgtaataaaaatgcacaacataaaatgtttatgatcccagcaatacactttttaaaaaatgtgaaagtcaaagaattaagttctagttctgactcatcacaagaggtcaaaagtatttgctactgtaacattcaattcacatttgagaatcatggtaaaaataacttgtatttgccttaccatcatgatcctactgttgagttaggaaaatatggttagacagactcacattactttttttcagaggtaaactctagattactgtgtcaacccaatactatttggccatagatgtaaaaactaccaaataaaagtggattttgtggtctacaa

SEQ ID NO: 289586 - DNA, 2815 bp, Homo sapiens
agtagttaactgaatgttttcaccgctttaacgtccagctgcgcttatctttgacatcgactacctaaggtctacctttagtcccacgactctgacaaaatgatctcaatattggtgtaaaatcacctcccctttcaagggtcttccaaagcacttcctgtctgcggcatacaaaatgtattggcacggaattttaagcttactgagctttataaacacgtcacattcacacattcaagacacacactggatattcggataaaaacaaacaaacaaaaaactggctaaatacccattcccctcaataacttggataagatacctaaaaaaggtcgaccttcggtacctttctgtcttctcccctctcgctatttgcctacactggcttcctcacctccactttttctcacgtttatctgagcgaaaacaagcacggttcggcagcctcctttcccagccctacctttgtgctgcaaaagcgaaaattcaaaagccaagtacaataggagaccgcccaccctggctccctcgtgacacgagggagcgcgaagcggagggcgcctcgcggcaggagcgggatttccggggtcacgggaaccggcaggggaacgggataaagttcccggagaaaggaaaggagagcgtgggatagtaaaagagaagacgcggagaagaggagaggacctacaagaacggaggacaggggcgcacgatggtcccggggggagcggaaacaaaggcacgcaaaacggaaaagcgtgtgtaggggagcggaaaaggaagtcaccaccgtggcctgcgacgaaatggcgaaaagtcttttgaagacagcctctctgtctggaaggacaaaattgctacatcaaacaggattgtcactttatagtacatcccatggattttatgaggaagaagtgaaaaaaacacttcagcagtttcctggtggatccattgaccttcagaaggaagacaatggcattggcattcttactctgaacaatccaagtagaatgaatgccttttcaggtgttatgatgctacaacttctggaaaaagtaattgaattggaaaattggacagaggggaaaggcctcattgtccgtggggcaaaaaatactttctcttcaggatctgatctgaatgctgtgaaatcactaggaactccagaggatggaatggccgtatgcatgttcatgcaaaacaccttaacaagatttatgagacttcctttaataagtgttgcgctggttcaaggttgggcattgggtggaggagcagaatttactacagcatgtgatttcaggttaatgactccagagagtaagatcagattcgtccacaaagagatgggcataataccaagctggggtggcaccacccggctagttgaaataatcggaagtagacaagctctcaaagtgttgagtggggcccttaaactggattcaaaaaatgctctaaacataggaatggttgaagaggtcttgcagtcttcagatgaaactaaatctctagaagaggcacaagaatggctaaagcaattcatccaagggccaccggaagtaattagagctttgaaaaaatctgtttgttcaggcagagagctatatttggaggaagcattacagaacgaaagagatcttttaggaacagtttggggtgggcctgcaaatttagaggctattgctaagaaaggaaaatttaataaataattggtttttcgtgtggatgtactccaagtaaagctccagtgactaatatgtataaatgttaaatgatattaaatatgaacatcagaattactttgaaggctactattaatatgcagacttacttttaatcatttgaatatctgaactcatttacctcatttcttgccaattactcacttgggtatttactgcgtaatctggaacatttagctaaaatatacacttttggcttaaaaattattgctgtcaattccaataataattcttagcttataaccaaagagcagtgtttaaaaggagagcttctatacaaaacctattcctggcgttacttttcatacaatttttgttctgttttacctggaaataatttaccaaaataactgagtgttgctgctaaagaacaaaagtggggaggtatcagggaacaagaaaacaagaaagggtatgatcaatcattttcttctgctccaaacagctggagtaaaattcatgggaaatggcccttcatttaaattagttttctattgtaaattacctactaaacagtggtagccatgacatggaaagtcaactgattctacaattggacattcatttgtgtgccctggaatttccaactagtaataaacaactactgttgatgtagttttaaaccacttgaagggactcatgaagcatcctgcaacataaatttgcatttttacatcagatttcttttttttcctgaaaaacaactaaccttctaacaactatctttcaaaagtaaatgtaataaaaatgcacaacataaaatgtttatgatcccagcaatacactttttaaaaaatgtgaaagtcaaagaattaagttctagttctgactcatcacaagaggtcaaaagtatttgctactgtaacattcaattcacatttgagaatcatggtaaaaataacttgtatttgccttaccatcatgatcctactgttgagttaggaaaatatggttagacagactcacattactttttttcagaggtaaactctagattactgtgtcaacccaatactatttggccatagatgtaaaaactaccaaataaaagtggattttgtggtctacaa

SEQ ID NO: 289587 - DNA, 2559 bp, Homo sapiens
cgccgctcgtccccgccgcggccgcgccgcctgcagcagcaccagctgctcctccccggcggccgccccccgcgggtccctccctggctgcgggagagacggaggtagagggaggacacagagccgcgccgcccgcaccacagaccttcgcctcgccccgccggttcctcaccctcggggagcaacatggataatctcagtgataccttgaagaagctgaagataacagctgttgacaagactgaggatagtttagaaggatgcttggattgtctgcttcaagccctggctcaaaataatacggaaacaagtgaaaaaatccaagcaagtggaatacttcagctgtttgcaagtctgttgactccacagtcttcctgcaaagccaaagtagctaacatcatagcagaagtagccaaaaatgagtttatgcgaattccatgtgtggatgctggattgatttcaccactggtgcagctgctaaatagcaaagaccaggaagtgctgcttcaaacgggcagggctctaggaaacatatgttacgatagccatgagggcagaagtgcagttgaccaagcaggtggtgcacagattgtaattgaccatttaaggtcactgtgcagtataacagatcccgccaatgagaagctcttgactgtcttttgtggcatgctgatgaactatagcaatgagaatgattcgcttcaagctcagcttatcaatatgggtgttattcctaccttagtgaaattactgggcatccactgccaaaatgcagctcttacagaaatgtgtcttgttgcatttggtaatttagcagaacttgagtcaagtaaagaacagtttgccagtacaaacattgctgaagagctagtaaaactcttcaagaaacaaatagaacatgataagagagaaatgatttttgaagttcttgctccattggcagaaaatgatgctattaaactacagctggttgaagcaggcctagtagagtgtctactagagattgttcagcaaaaagtggatagtgacaaagaagatgatattactgagctcaaaactggttcagatctcatggttttattacttcttggagatgaatccatgcagaagttatttgaaggaggaaaaggtagtgtatttcaaagggtactctcttggatcccatcaaataaccaccagctacagcttgctggagcattggcaattgcaaattttgccagaaatgatgcaaattgtattcatatggtagacaatgggattgtagaaaaacttatggatttactggacagacatgtagaagatggaaatgtaacagtacagcatgcagcactaagtgccctcagaaacctggccattccagttataaataaagcaaagatgttatcagctggggtcacagaggcagttttgaaatttcttaaatctgaaatgcctcctgttcagttcaaacttctgggaacattaagaatgttaatagatgcacaagcagaagctgctgaacaattgggaaagaatgttaagttagtggagcgtttggtggaatggtgtgaagccaaagatcatgctggtgtgatgggggagtcaaacagactgctgtctgcccttatacgacacagtaaatcaaaagatgtaattaaaaccattgtgcagagtggtggcatcaagcatctagttaccatggcaactagtgaacatgtaataatgcagaatgaagctcttgttgctttggcattaatagcagctttagaattgggcactgctgagaaagatctagaaagtgctaaacttgtacagattttacatagactgctagcagatgagagaagtgctcctgaaatcaaatataattccatggtcctgatatgtgctcttatgggatctgaatgtctacacaaggaagtacaggatttggcttttctagatgtcgtatccaaacttcgcagtcatgagaacaaaagtgttgcccagcaggcctctctcacagagcagagacttactgtggaaagctgagaactgcccgatacacggcatcatcccatctctaatttcccctctgtcctccatccagcggcttcttccgcttcattctctaccataccacttgtgcatgcatgtgatgttctaataccaattgaagaaccgctgtaggtacctccctaataagatttctaaacctatagttagtgtgatcatgactttgtcaaaggcaagtctccacccataaccgttctcttgtattcctgttgcttgagctacattaagtagaatgtgcatgttgtagtcctatgatgatgtaaacttggtactacataatgacttgctccacacatgcagtaaactacataatgatgtactggtaaactagaaacaaagaatgcagcaggatctgtctagcttattaaagatgaaactgaattggaaaaatagctccattttttggtgcttgggaagcacagtgaccaaaaaagttgtatggctgcttattcattagtctttcctactgatgtcaaatccatggtacctagagttaaataaaattccaatgctcttactctttaa

SEQ ID NO: 289588 - DNA, 728 bp, Homo sapiens
  misc_feature (41)..(42): n is a, c, g, or t
cctcgcgcccctgtctcccgcacaggaggattaattacgtnnccgcttctgaatgtctacacaaggaagtacaggatttggcttttctagatgtcgtatccaaacttcgcagtcatgagaacaaaagtgttgcccagcaggcctctctcacagagcagagacttactgtggaaagctgagaactgcccgatacacggcatcatcccatctctaatttcccctctgtcctccatccagcggcttcttccgcttcattctctaccataccacttgtgcatgcatgtgatgttctaataccaattgaagaaccgctgtaggtacctccctaataagatttctaaacctatagttagtgtgatcatgactttgtcaaaggcaagtctccacccataaccgttctcttgtattcctgttgcttgagctacattaagtagaatgtgcatgttgtagtcctatgatgatgtaaacttggtactacataatgacttgctccacacatgcagtaaactacataatgatgtactggtaaactagaaacaaagaatgcagcaggatctgtctagcttattaaagatgaaactgaattggaaaaatagctccattttttggtgcttgggaagcacagtgaccaaaaaagttgtatggctgcttattcattagtctttcctactgatgtcaaatccatggtacctagagttaaataaaattccaatgctcttactctttaa

SEQ ID NO: 289589 - DNA, 2676 bp, Homo sapiens
cgccgctcgtccccgccgcggccgcgccgcctgcagcagcaccagctgctcctccccggcggccgccccccgcgggtccctccctggctgcgggagagacggaggtagagggaggacacagagccgcgccgcccgcaccacagaccttcgcctcgccccgccggttcctcaccctcggggagcaacatggataatctcagtgataccttgaagaagctgaagataacagctgttgacaagactgaggatagtttagaaggatgcttggattgtctgcttcaagccctggctcaaaataatacggaaacaagtgaaaaaatccaagcaagtggaatacttcagctgtttgcaagtctgttgactccacagtcttcctgcaaagccaaagtagctaacatcatagcagaagtagccaaaaatgagtttatgcgaattccatgtgtggatgctggattgatttcaccactggtgcagctgctaaatagcaaagaccaggaagtgctgcttcaaacgggcagggctctaggaaacatatgttacgatagccatgagggcagaagtgcagttgaccaagcaggtggtgcacagattgtaattgaccatttaaggtcactgtgcagtataacagatcccgccaatgagaagctcttgactgtcttttgtggcatgctgatgaactatagcaatgagaatgattcgcttcaagctcagcttatcaatatgggtgttattcctaccttagtgaaattactgggcatccactgccaaaatgcagctcttacagaaatgtgtcttgttgcatttggtaatttagcagaacttgagtcaagtaaagaacagtttgccagtacaaacattgctgaagagctagtaaaactcttcaagaaacaaatagaacatgataagagagaaatgatttttgaagttcttgctccattggcagaaaatgatgctattaaactacagctggttgaagcaggcctagtagagtgtctactagagattgttcagcaaaaagtggatagtgacaaagaagatgatattactgagctcaaaactggttcagatctcatggttttattacttcttggagatgaatccatgcagaagttatttgaaggaggaaaaggtagtgtatttcaaagggtactctcttggatcccatcaaataaccaccagctacagcttgctggagcattggcaattgcaaattttgccagaaatgatgcaaattgtattcatatggtagacaatgggattgtagaaaaacttatggatttactggacagacatgtagaagatggaaatgtaacagtacagcatgcagcactaagtgccctcagaaacctggccattccagttataaataaagcaaagatgttatcagctggggtcacagaggcagttttgaaatttcttaaatctgaaatgcctcctgttcagttcaaacttctgggaacattaagaatgttaatagatgcacaagcagaagctgctgaacaattgggaaagaatgttaagttagtggagcgtttggtggaatggtgtgaagccaaagatcatgctggtgtgatgggggagtcaaacagactgctgtctgcccttatacgacacagtaaatcaaaagatgtaattaaaaccattgtgcagagtggtggcatcaagcatctagttaccatggcaactagtgaacatgtaataatgcagaatgaagctcttgttgctttggcattaatagcagctttagaattgggcactgctgagaaagatctagaaagtgctaaacttgtacagattttacatagactgctagcagatgagagaagtgctcctgaaatcaaatataattccatggtcctgatatgtgctcttatgggatctgaatgtctacacaaggaagtacaggatttggcttttctagatgtcgtatccaaacttcgcagtcatgagaacaaaagtgttgcccagcaggcctctctcacagagcagagacttactgtggaaagctgagaactgcccgatacacggcatcatcccatctctaatttcccctctgtcctccatccagcggcttcttccgcttcattctctaccataccacttgtgcatgcatgtgatgttctaataccaattgaagaaccgctgtaggtacctccctaataagatttctaaacctatagttagtgtgatcatgactttgtcaaaggcaagtctccacccataaccgttctcttgtattcctgttgcttgagctacattaagtagaatgtgcatgttgtagtcctatgatgatgtaaacttggtactacataatgacttgctccacacatgcagtaaactacataatgatgtactggtaaactagaaacaaagaatgcagcaggatctgtctagcttattaaagatgaaactgaattggaaaaatagctccattttttggtgcttgggaagcacagtgaccaaaaaagttgtatggctgcttattcattagtctttcctactgatgtcaaatccatggtacctagagttaaataaaattccaatgctcttactctttaaaaaaaaaaaaatattgggcctgtttggccttacgcgtgagaactttagtggccggtttcctcttagggaggaataattcaggatccttcatcattaacccgctcccacggacgaccg

SEQ ID NO: 289590 - DNA, 2412 bp, Homo sapiens
cgccgctcgtccccgccgcggccgcgccgcctgcagcagcaccagctgctcctccccggcggccgccccccgcgggtccctccctggctgcgggagagacggaggtagagggaggacacagagccgcgccgcccgcaccacagaccttcgcctcgccccgccggttcctcaccctcggggagcaacatggataatctcagtgataccttgaagaagctgaagataacagctgttgacaagactgaggatagtttagaaggatgcttggattgtctgcttcaagccctggctcaaaataatacggaaacaagtgaaaaaatccaagcaagtggaatacttcagctgtttgcaagtctgttgactccacagtcttcctgcaaagccaaagtagctaacatcatagcagaagtagccaaaaatgagtttatgcgaattccatgtgtggatgctggattgatttcaccactggtgcagctgctaaatagcaaagaccaggaagtgctgcttcaaacgggcagggctctaggaaacatatgttacgatagccattcgcttcaagctcagcttatcaatatgggtgttattcctaccttagtgaaattactgggcatccactgccaaaatgcagctcttacagaaatgtgtcttgttgcatttggtaatttagcagaacttgagtcaagtaaagaacagtttgccagtacaaacattgctgaagagctagtaaaactcttcaagaaacaaatagaacatgataagagagaaatgatttttgaagttcttgctccattggcagaaaatgatgctattaaactacagctggttgaagcaggcctagtagagtgtctactagagattgttcagcaaaaagtggatagtgacaaagaagatgatattactgagctcaaaactggttcagatctcatggttttattacttcttggagatgaatccatgcagaagttatttgaaggaggaaaaggtagtgtatttcaaagggtactctcttggatcccatcaaataaccaccagctacagcttgctggagcattggcaattgcaaattttgccagaaatgatgcaaattgtattcatatggtagacaatgggattgtagaaaaacttatggatttactggacagacatgtagaagatggaaatgtaacagtacagcatgcagcactaagtgccctcagaaacctggccattccagttataaataaagcaaagatgttatcagctggggtcacagaggcagttttgaaatttcttaaatctgaaatgcctcctgttcagttcaaacttctgggaacattaagaatgttaatagatgcacaagcagaagctgctgaacaattgggaaagaatgttaagttagtggagcgtttggtggaatggtgtgaagccaaagatcatgctggtgtgatgggggagtcaaacagactgctgtctgcccttatacgacacagtaaatcaaaagatgtaattaaaaccattgtgcagagtggtggcatcaagcatctagttaccatggcaactagtgaacatgtaataatgcagaatgaagctcttgttgctttggcattaatagcagctttagaattgggcactgctgagaaagatctagaaagtgctaaacttgtacagattttacatagactgctagcagatgagagaagtgctcctgaaatcaaatataattccatggtcctgatatgtgctcttatgggatctgaatgtctacacaaggaagtacaggatttggcttttctagatgtcgtatccaaacttcgcagtcatgagaacaaaagtgttgcccagcaggcctctctcacagagcagagacttactgtggaaagctgagaactgcccgatacacggcatcatcccatctctaatttcccctctgtcctccatccagcggcttcttccgcttcattctctaccataccacttgtgcatgcatgtgatgttctaataccaattgaagaaccgctgtaggtacctccctaataagatttctaaacctatagttagtgtgatcatgactttgtcaaaggcaagtctccacccataaccgttctcttgtattcctgttgcttgagctacattaagtagaatgtgcatgttgtagtcctatgatgatgtaaacttggtactacataatgacttgctccacacatgcagtaaactacataatgatgtactggtaaactagaaacaaagaatgcagcaggatctgtctagcttattaaagatgaaactgaattggaaaaatagctccattttttggtgcttgggaagcacagtgaccaaaaaagttgtatggctgcttattcattagtctttcctactgatgtcaaatccatggtacctagagttaaataaaattccaatgctcttactctttaa

SEQ ID NO: 289591 - DNA, 2433 bp, Homo sapiens
cgccgctcgtccccgccgcggccgcgccgcctgcagcagcaccagctgctcctccccggcggccgccccccgcgggtccctccctggctgcgggagagacggaggtagagggaggacacagagccgcgccgcccgcaccacagaccttcgcctcgccccgccggttcctcaccctcggggagcaacatggataatctcagtgataccttgaagaagctgaagataacagctgttgacaagactgaggatagtttagaaggatgcttggattgtctgcttcaagccctggctcaaaataatacggaaacaagtgaaaaaatccaagcaagtggaatacttcagctgtttgcaagtctgttgactccacagtcttcctgcaaagccaaagtagctaacatcatagcagaagtagccaaaaatgagtttatgcgaattccatgtgtggatgctggattgatttcaccactggtgcagctgctaaatagcaaagaccaggaagtgctgcttcaaacgggcagggctctaggaaacatatgttacgatagccatgagggcagaagtgcagttgaccaagcaggtggtgcacagattgtaattgaccatttaaggtcactgtgcagtataacagatcccgccaatgagaagctcttgactgtcttttgtggcatgctgatgaactatagcaatgagaatgattcgcttcaagctcagcttatcaatatgggtgttattcctaccttagtgaaattactgggcatccactgccaaaatgcagctcttacagaaatgtgtcttgttgcatttggtaatttagcagaacttgatgctattaaactacagctggttgaagcaggcctagtagagtgtctactagagattgttcagcaaaaagtggatagtgacaaagaagatgatattactgagctcaaaactggttcagatctcatggttttattacttcttggagatgaatccatgcagaagttatttgaaggaggaaaaggtagtgtatttcaaagggtactctcttggatcccatcaaataaccaccagctacagcttgctggagcattggcaattgcaaattttgccagaaatgatgcaaattgtattcatatggtagacaatgggattgtagaaaaacttatggatttactggacagacatgtagaagatggaaatgtaacagtacagcatgcagcactaagtgccctcagaaacctggccattccagttataaataaagcaaagatgttatcagctggggtcacagaggcagttttgaaatttcttaaatctgaaatgcctcctgttcagttcaaacttctgggaacattaagaatgttaatagatgcacaagcagaagctgctgaacaattgggaaagaatgttaagttagtggagcgtttggtggaatggtgtgaagccaaagatcatgctggtgtgatgggggagtcaaacagactgctgtctgcccttatacgacacagtaaatcaaaagatgtaattaaaaccattgtgcagagtggtggcatcaagcatctagttaccatggcaactagtgaacatgtaataatgcagaatgaagctcttgttgctttggcattaatagcagctttagaattgggcactgctgagaaagatctagaaagtgctaaacttgtacagattttacatagactgctagcagatgagagaagtgctcctgaaatcaaatataattccatggtcctgatatgtgctcttatgggatctgaatgtctacacaaggaagtacaggatttggcttttctagatgtcgtatccaaacttcgcagtcatgagaacaaaagtgttgcccagcaggcctctctcacagagcagagacttactgtggaaagctgagaactgcccgatacacggcatcatcccatctctaatttcccctctgtcctccatccagcggcttcttccgcttcattctctaccataccacttgtgcatgcatgtgatgttctaataccaattgaagaaccgctgtaggtacctccctaataagatttctaaacctatagttagtgtgatcatgactttgtcaaaggcaagtctccacccataaccgttctcttgtattcctgttgcttgagctacattaagtagaatgtgcatgttgtagtcctatgatgatgtaaacttggtactacataatgacttgctccacacatgcagtaaactacataatgatgtactggtaaactagaaacaaagaatgcagcaggatctgtctagcttattaaagatgaaactgaattggaaaaatagctccattttttggtgcttgggaagcacagtgaccaaaaaagttgtatggctgcttattcattagtctttcctactgatgtcaaatccatggtacctagagttaaataaaattccaatgctcttactctttaa

SEQ ID NO: 289592 - DNA, 2424 bp, Homo sapiens
  misc_feature (19)..(19): n is a, c, g, or t
gtgggtgtctagaggatcnctcgaatcgacggtttctcacctcgggagcacatggataatctcagtgataccttgaagaagctgaagataacagctgttgacaagactgaggatagtttagaaggatgcttggattgtctgcttcaagccctggctcaaaataatacggaaacaagtgaaaaaatccaagcaagtggaatacttcagctgtttgcaagtctgttgactccacagtcttcctgcaaagccaaagtagctaacatcatagcagaagtagccaaaaatgagtttatgcgaattccatgtgtggatgctggattgatttcaccactggtgcagctgctaaatagcaaagaccaggaagtgctgcttcaaacgggcagggctctaggaaacatatgttacgatagccatgagggcagaagtgcagttgaccaagcaggtggtgcacagattgtaattgaccatttaaggtcactgtgcagtataacagatcccgccaatgagaagctcttgactgtcttttgtggcatgctgatgaactatagcaatgagaatgattcgcttcaagctcagcttatcaatatgggtgttattcctaccttagtgaaattactgggcatccactgccaaaatgcagctcttacagaaatgtgtcttgttgcatttggtaatttagcagaacttgagtcaagtaaagaacagtttgccagtacaaacattgctgaagagctagtaaaactcttcaagaaacaaatagaacatgataagagagaaatgatttttgaagttcttgctccattggcagaaaatgatgctattaaactacagctggttgaagcaggcctagtagagtgtctactagagattgttcagcaaaaagtggatagtgacaaagaagatgatattactgagctcaaaactggttcagatctcatggttttattacttcttggagatgaatccatgcagaagttatttgaaggaggaaaaggtagtgtatttcaaagggtactctcttggatcccatcaaataaccaccagctacagcttgctggagcattggcaattgcaaattttgccagaaatgatgcaaattgtattcatatggtagacaatgggattgtagaaaaacttatggatttactggacagacatgtagaagatggaaatgtaacagtacagcatgcagcactaagtgccctcagaaacctggccattccagttataaataaagcaaagatgttatcagctggggtcacagaggcagttttgaaatttcttaaatctgaaatgcctcctgttcagttcaaacttctgggaacattaagaatgttaatagatgcacaagcagaagctgctgaacaattgggaaagaatgttaagttagtggagcgtttggtggaatggtgtgaagccaaagatcatgctggtgtgatgggggagtcaaacagactgctgtctgcccttatacgacacagtaaatcaaaagatgtaattaaaaccattgtgcagagtggtggcatcaagcatctagttaccatggcaactagtgaacatgtaataatgcagaatgaagctcttgttgctttggcattaatagcagctttagaattgggcactgctgagaaagatctagaaagtgctaaacttgtacagattttacatagactgctagcagatgagagaagtgctcctgaaatcaaatataattccatggtcctgatatgtgctcttatgggatctgaatgtctacacaaggaagtacaggatttggcttttctagatgtcgtatccaaacttcgcagtcatgagaacaaaagtgttgcccagcaggcctctctcacagagcagagacttactgtggaaagctgagaactgcccgatacacggcatcatcccatctctaatttcccctctgtcctccatccagcggcttcttccgcttcattctctaccataccacttgtgcatgcatgtgatgttctaataccaattgaagaaccgctgtaggtacctccctaataagatttctaaacctatagttagtgtgatcatgactttgtcaaaggcaagtctccacccataaccgttctcttgtattcctgttgcttgagctacattaagtagaatgtgcatgttgtagtcctatgatgatgtaaacttggtactacataatgacttgctccacacatgcagtaaactacataatgatgtactggtaaactagaaacaaagaatgcagcaggatctgtctagcttattaaagatgaaactgaattggaaaaatagctccattttttggtgcttgggaagcacagtgaccaaaaaagttgtatggctgcttattcattagtctttcctactgatgtcaaatccatggtacctagagttaaataaaattccaatgctcttactctttaa

SEQ ID NO: 289593 - DNA, 2283 bp, Homo sapiens
cgccgctcgtccccgccgcggccgcgccgcctgcagcagcaccagctgctcctccccggcggccgccccccgcgggtccctccctggctgcgggagagacggaggtagagggaggacacagagccgcgccgcccgcaccacagaccttcgcctcgccccgccggttcctcaccctcggggagcaacatggataatctcagtgataccttgaagaagctgaagataacagctgttgacaagactgaggatagtttagaaggatgcttggattgtctgcttcaagccctggctcaaaataatacggaaacaagtgaaaaaatccaagcaagtggaatacttcagctgtttgcaagtctgttgactccacagtcttcctgcaaagccaaagtagctaacatcatagcagaagtagccaaaaatgagtttatgcgaattccatgtgtggatgctggattgatttcaccactggtgcagctgctaaatagcaaagaccaggaagtgctgcttcaaacgggcagggctctaggaaacatatgttacgatagccagtcaagtaaagaacagtttgccagtacaaacattgctgaagagctagtaaaactcttcaagaaacaaatagaacatgataagagagaaatgatttttgaagttcttgctccattggcagaaaatgatgctattaaactacagctggttgaagcaggcctagtagagtgtctactagagattgttcagcaaaaagtggatagtgacaaagaagatgatattactgagctcaaaactggttcagatctcatggttttattacttcttggagatgaatccatgcagaagttatttgaaggaggaaaaggtagtgtatttcaaagggtactctcttggatcccatcaaataaccaccagctacagcttgctggagcattggcaattgcaaattttgccagaaatgatgcaaattgtattcatatggtagacaatgggattgtagaaaaacttatggatttactggacagacatgtagaagatggaaatgtaacagtacagcatgcagcactaagtgccctcagaaacctggccattccagttataaataaagcaaagatgttatcagctggggtcacagaggcagttttgaaatttcttaaatctgaaatgcctcctgttcagttcaaacttctgggaacattaagaatgttaatagatgcacaagcagaagctgctgaacaattgggaaagaatgttaagttagtggagcgtttggtggaatggtgtgaagccaaagatcatgctggtgtgatgggggagtcaaacagactgctgtctgcccttatacgacacagtaaatcaaaagatgtaattaaaaccattgtgcagagtggtggcatcaagcatctagttaccatggcaactagtgaacatgtaataatgcagaatgaagctcttgttgctttggcattaatagcagctttagaattgggcactgctgagaaagatctagaaagtgctaaacttgtacagattttacatagactgctagcagatgagagaagtgctcctgaaatcaaatataattccatggtcctgatatgtgctcttatgggatctgaatgtctacacaaggaagtacaggatttggcttttctagatgtcgtatccaaacttcgcagtcatgagaacaaaagtgttgcccagcaggcctctctcacagagcagagacttactgtggaaagctgagaactgcccgatacacggcatcatcccatctctaatttcccctctgtcctccatccagcggcttcttccgcttcattctctaccataccacttgtgcatgcatgtgatgttctaataccaattgaagaaccgctgtaggtacctccctaataagatttctaaacctatagttagtgtgatcatgactttgtcaaaggcaagtctccacccataaccgttctcttgtattcctgttgcttgagctacattaagtagaatgtgcatgttgtagtcctatgatgatgtaaacttggtactacataatgacttgctccacacatgcagtaaactacataatgatgtactggtaaactagaaacaaagaatgcagcaggatctgtctagcttattaaagatgaaactgaattggaaaaatagctccattttttggtgcttgggaagcacagtgaccaaaaaagttgtatggctgcttattcattagtctttcctactgatgtcaaatccatggtacctagagttaaataaaattccaatgctcttactctttaa

SEQ ID NO: 289594 - DNA, 699 bp, Homo sapiens
attcggaacgagggccagttagaatgtctacacaaggaagtacaggatttggcttttctagatgtcgtatccaaacttcgcagtcatgagaacaaaagtgttgcccagcaggcctctctcacagagcagagacttactgtggaaagctgagaactgcccgatacacggcatcatcccatctctaatttcccctctgtcctccatccagcggcttcttccgcttcattctctaccataccacttgtgcatgcatgtgatgttctaataccaattgaagaaccgctgtaggtacctccctaataagatttctaaacctatagttagtgtgatcatgactttgtcaaaggcaagtctccacccataaccgttctcttgtattcctgttgcttgagctacattaagtagaatgtgcatgttgtagtcctatgatgatgtaaacttggtactacataatgacttgctccacacatgcagtaaactacataatgatgtactggtaaactagaaacaaagaatgcagcaggatctgtctagcttattaaagatgaaactgaattggaaaaatagctccattttttggtgcttgggaagcacagtgaccaaaaaagttgtatggctgcttattcattagtctttcctactgatgtcaaatccatggtacctagagttaaataaaattccaatgctcttactctttaa

SEQ ID NO: 289595 - DNA, 743 bp, Homo sapiens
  misc_feature (17)..(17): n is a, c, g, or t
  misc_feature (21)..(22): n is a, c, g, or t
acaaaaaaaaaaaaacnaaannaagcaaaacgacgccgcggcgattgaaagcacggccgacgcctgaatgtctacacaaggaagtacaggatttggcttttctagatgtcgtatccaaacttcgcagtcatgagaacaaaagtgttgcccagcaggcctctctcacagagcagagacttactgtggaaagctgagaactgcccgatacacggcatcatcccatctctaatttcccctctgtcctccatccagcggcttcttccgcttcattctctaccataccacttgtgcatgcatgtgatgttctaataccaattgaagaaccgctgtaggtacctccctaataagatttctaaacctatagttagtgtgatcatgactttgtcaaaggcaagtctccacccataaccgttctcttgtattcctgttgcttgagctacattaagtagaatgtgcatgttgtagtcctatgatgatgtaaacttggtactacataatgacttgctccacacatgcagtaaactacataatgatgtactggtaaactagaaacaaagaatgcagcaggatctgtctagcttattaaagatgaaactgaattggaaaaatagctccattttttggtgcttgggaagcacagtgaccaaaaaagttgtatggctgcttattcattagtctttcctactgatgtcaaatccatggtacctagagttaaataaaattccaatgctcttactctttaa

SEQ ID NO: 289596 - DNA, 1127 bp, Homo sapiens
cgccgctcgtccccgccgcggccgcgccgcctgcagcagcaccagctgctcctccccggcggccgccccccgcgggtccctccctggctgcgggagagacggaggtagagggaggacacagagccgcgccgcccgcaccacagaccttcgcctcgccccgccggttcctcaccctcggggagcaacatggataatctcagtgataccttgaagaagctgaagataacagctgttgacaagactgaggatagtttagaaggatgcttggattgtctgcttcaagccctggctcaaaataatacggaaacaagtgaaaaaatccaagcaagtggaatacttcagctgtttgcaagtctgttgactccacagtcttcctgcaaagccaaagtagctaacatcatagcagaagtagccaaaaatgagtttatgcgaattccatgtgtggatgctggattgatttcaccactggtgcagctgctaaatagcaaagaccaggaagtgctgcttcaaacgggcagggctctaggaaacatatgttacgatagccatgagggcagaagtgcagttgaccaagcaggtggtgcacagattgtaattgaccatttaaggtcactgtgcagtataacagatcccgccaatgagaagctcttgactgtcttttgtggcatgctgatgaactatagcaatgagaatgattcgcttcaagctcagcttatcaatatgggtgttattcctaccttagtgaaattactgggcatccactgccaaaatgcagctcttacagaaatgtgtcttgttgcatttggtaatttagcagaacttgagtcaagtaaagaacagtttgccagtacaaacattgctgaagagctagtaaaactcttcaagaaacaaatagaacatgataagagagaaatgatttttgaagttcttgctccattggcagaaaatggaaaacaggactaggaaggtcttcaatctgaaaaagatatctatgagaaggctgaagaaaacatcacaatcaatggtgaaataaaaaagcatttgctttgagattgggacaagaaggatcatccccgcttccatttaacattgtattgtaagaagtatccagtgcattaaagagaata

SEQ ID NO: 289597 - DNA, 1026 bp, Homo sapiens
cgccgctcgtccccgccgcggccgcgccgcctgcagcagcaccagctgctcctccccggcggccgccccccgcgggtccctccctggctgcgggagagacggaggtagagggaggacacagagccgcgccgcccgcaccacagaccttcgcctcgccccgccggttcctcaccctcggggagcaacatggataatctcagtgataccttgaagaagctgaagataacagctgttgacaagactgaggatagtttagaaggatgcttggattgtctgcttcaagccctggctcaaaataatacggaaacaagtgaaaaaatccaagcaagtggaatacttcagctgtttgcaagtctgttgactccacagtcttcctgcaaagccaaagtagctaacatcatagcagaagtagccaaaaatgagtttatgcgaattccatgtgtggatgctggattgatttcaccactggtgcagctgctaaatagcaaagaccaggaagtgctgcttcaaacgggcagggctctaggaaacatatgttacgatagccatgagggcagaagtgcagttgaccaagcaggtggtgcacagattgtaattgaccatttaaggtcactgtgcagtataacagatcccgccaatgagaagctcttgactgtcttttgtggcatgctgatgaactatagcaatgagaatgattcgcttcaagctcagcttatcaatatgggtgttattcctaccttagtgaaattactgggcatccactgccaaaatgcagctcttacagaaatgtgtcttgttgcatttggtaatttagcagaacttggtaaactagaaacaaagaatgcagcaggatctgtctagcttattaaagatgaaactgaattggaaaaatagctccattttttggtgcttgggaagcacagtgaccaaaaaagttgtatggctgcttattcattagtctttcctactgatgtcaaatccatggtacctagagttaaataaaattccaatgctcttactctttaa

SEQ ID NO: 289598 - DNA, 887 bp, Homo sapiens
cgccgctcgtccccgccgcggccgcgccgcctgcagcagcaccagctgctcctccccggcggccgccccccgcgggtccctccctggctgcgggagagacggaggtagagggaggacacagagccgcgccgcccgcaccacagaccttcgcctcgccccgccggttcctcaccctcggggagcaacatggataatctcagtgataccttgaagaagctgaagataacagctgttgacaagactgaggatagtttagaaggatgcttggattgtctgcttcaagccctggctcaaaataatacggaaacaagtgaaaaaatccaagcaagtggaatacttcagctgtttgcaagtctgttgactccacagtcttcctgcaaagccaaagtagctaacatcatagcagaagtagccaaaaatgagtttatgcgaattccatgtgtggatgctggattgatttcaccactggtgcagctgctaaatagcaaagaccaggaagtgctgcttcaaacgggcagggctctaggaaacatatgttacgatagccatgagggcagaagtgcagttgaccaagcaggtggtgcacagattgtaattgaccatttaaggtcactgtgcagtataacagatcccgccaatgagaagctcttgactgtcttttgtggcatgctgatgaactatagcaatgagaatgattcgcttcaagctcagcttatcaatatgggtgttattcctaccttagtgaaattactgggcatccactgccaaaatgcagctcttacagaaatgtgtcttgttgcatttggtaatttagcagaacttggtaagtcttagtcatgaaccacaaatgtaattaacttattaatgtgcttacaataaatttttct

SEQ ID NO: 289599 - DNA, 1219 bp, Homo sapiens
cgccgctcgtccccgccgcggccgcgccgcctgcagcagcaccagctgctcctccccggcggccgccccccgcgggtccctccctggctgcgggagagacggaggtagagggaggacacagagccgcgccgcccgcaccacagaccttcgcctcgccccgccggttcctcaccctcggggagcaacatggataatctcagtgataccttgaagaagctgaagataacagctgttgacaagactgaggatagtttagaaggatgcttggattgtctgcttcaagccctggctcaaaataatacggaaacaagtgaaaaaatccaagcaagtggaatacttcagctgtttgcaagtctgttgactccacagtcttcctgcaaagccaaagtagctaacatcatagcagaagtagccaaaaatgagtttatgcgaattccatgtgtggatgctggattgatttcaccactggtgcagctgctaaatagcaaagaccaggaagtgctgcttcaaacgggcagggctctaggaaacatatgttacgatagccagagctgcaaggcacttcatttatgtatttctctttcgaagtatccgaacagacttctgatataagcaatattttaaaatgcttctgccctttaactttgccaaaataactctttttatgagaaatttgacatctttcagatcagagaagaaaggaaagttgtatttcaatttggaaagaaataatcaaaatatgtgcgattgatgggatacaccagggaatgtggttttaaagcgcagtagtattatatttcagaaatgcatgcctttggcctatttacacttccttttcaaaggttttataaaaaagaggattatgttcttatatagctgtctttgtggcattcctcattttattgatttgtttatataactgtacacattttaaattgctgatatacttaaatggccttatagttttaaaaagctttatgttaaattcccatcctgtatttataattcctggggataaattggtgatttgagactagtgttctgttttgtggatattactgcctgaggtcagaaaataattgttacttgatctactggttaaaagatattagtagaggctagaagaaaatgattacgtgaaattaaatatttgtgcctttttatacaccgaggaagaataatgtacaaatcaaataaaaatgttttaaaattaaacaaa

SEQ ID NO: 289600 - DNA, 1402 bp, Homo sapiens
cgccgctcgtccccgccgcggccgcgccgcctgcagcagcaccagctgctcctccccggcggccgccccccgcgggtccctccctggctgcgggagagacggaggtagagggaggacacagagccgcgccgcccgcaccacagaccttcgcctcgccccgccggttcctcaccctcggggagcaacatggataatctcagtgataccttgaagaagctgaagataacagctgttgacaagactgaggatagtttagaaggatgcttggattgtctgcttcaagccctggctcaaaataatacggaaacaagtgaaaaaatccaagcaagtggaatacttcagctgtttgcaagtctgttgactccacagtcttcctgcaaagccaaagtagctaacatcatagcagaagtagccaaaaatgagtttatgcgaattccatgtgtggatgctggattgatttcaccactggtgcagctgctaaatagcaaagaccaggaagtgctgcttcaaacgggcagggctctaggaaacatatgttacgatagccatgagggcagaagtgcagttgaccaagcaggtggtgcacagattgtaattgaccatttaaggtcactgtgcagtataacagatcccgccaatgagaagctcttgactgtcttttgtggcatgctgatgaactatagcaatgagaatggtaaacaaaactgaaaacttgctttatctctgggggaaaaattaaaaattatctttactatagtgcaaaacaaaaatatttgaaaaatgatgaacaaagaattcgtaagtggcatataaaattaataattagccaacattaaatttcaatgtttcaaaaatgtaaaatggttaatttactaaatgggactaatttttgaagggctgccagttttgatcagtatcaaaaacaaaaactccacagccctatagtatgatttaagcattcttactgtgaacattttaaaaataaacaatattaaaatagttttatcttcgttatatatataccaggagtagctttaaaatatgaacactgtttgcagaagtaaaattattttatctagatgctaggtttacttcgaataattttttaaaactctaataaaatctggctttagaaacaagttcagagcaactgtagagatctcattttagaaatttaattattgtaaacagcagtttcttttctctgtaaaacatttttagaccctagaaacaagtgatgtatcaataattttcagatagcctatatggttaattaaatgcatataaatctgtgatattaaggcttcacaatacgtttgtgtcacaaaatatccatttgtttctttatcatcttatgtgaatcactgtgtggatcagacattcaaattttggtatgttcctg

SEQ ID NO: 289601 - DNA, 4335 bp, Homo sapiens
tcctctctcactctaggtcagatgctctgggccatatcctgccccagctggggaaagactggacacaccagggcatcaccagtctctatcacaaaatccaactaaatgggtacaagttcctgtactgctcggcgcgggccattggcatggcggacctcaccaaggggtacctgcagtggagaggtgatcgagaagaaaccagaggtgttcaaggtcgcctgcctgagtgacatccagcagctgtttctgccccacggacagcccttctatgctgcctttgggaataggcccaatgatgtctttgcctaccggcaggtgggcctgcctgagtcacgcatcttcacagtcaacccccggggagagctcatccaggagctcataaagaaccacaaatccacgtatgagcggcttggtgaagtggtcgagctcctcttcccacctgtggcccgtggccccagcacagacctggccaaccctgaatacagtaacttctgctactggcgggagccactgcctgctgtggaccttgataccctggactgaacctgccctggctggctcctcctccctggcccggcccaggactggctaggtgtcctggggtataggagggtgggaattggagtgtcatggggcaaacccactgaaggggaaggaggaggctgcaggttggttggcagctagagagactcccccatcttccccgtcatatttttgccagctaagctgcagctgctccaggcgtcagtgtggcactgtcctggggcaattagcttgtcatctgggcccttgcagggttctttttttttttttttttttttttcctgagacagggtcttgttctgttgcccaggctggagtgcagtggcatgatctctcggctcactgcaacctccgcctcccgggttcaagcgattcacctgcctcagcctcccaagtagctgggattacaggcgtgtaccaccacgcctggctaattttcgtgtttttagtagagatgggttttcaccacattggccaggctggtctcgaactcctgacctcaagtgatttgcccacctcggcctcccaaagtgctgggattacaggcatgagctaccatgccaggcctccttgcagggttttctatgcccttgatatctgtctccctgtcaacctgggaccttgctgtaagtcttgataggacagggagaagagggaggccctaccgaggctcgaggcttcagtgaagggtgacagcagtgggagtgtggtacagcctctggaaggacacagtgttctccccgccccttgtctgggagccaggactgtaccctccgaagccagacatcactgccaacatatcccccttgctggtgccctggcatctcagcacatgacacacacccacacctgcaggctgtggttccggcttggcctgctccccgtccggctgctgccgctgcctctctccagacctcgcttaaggacagtcccaaactcagctggggcaggtgttggcctgaaagtcctcccccagcctctgctggccagcttggtgctcacagctgctgggtaagctcttgcctaaggagctgtgggaagcagggctgatgccccagcaacctctcctcccactgtctttgaagaaagtagctttagaccggctaaaagctttaatccagagcctgccctactctgatagtaccagagtggagggcagaataccaaatgtccaggaaccaaaggcagggctgtggggacctgaagagcagcacagtggggcccgtgctgctgtgggggaaactgaggctgggagcctcagcagagaccggtgtcaagagtctctgggaactgcataggcctgaggaacatgcattttcaagttgtccattgatggtttcgtacctgaatttctcaccttttgtgaacatcttgggagggtgggggttttgcaggggtgttaaaagcaaggcttggagcccctttcctccagctggtggctccttctcagggcctggcctcattcaggccactttgtagagaaatgccctgacctcgcaggaaggatttccccacccccaagtggaaggaagaggacagtgtgggcaccagagggccctggaaacatcttaggggaaggaaaggaaaaggataaatttggagtggggggtctctaaacagattgcctggattccgttctttcctggggttctacagctgcctaagccctcaccttgggggaggatcaaagggaataaagagaactcttggctgagtctttgtgcttctgttctgtcctgaaggacacgtgaggagccagaaacatctggcagcctctggtccttagttcagatacaacatccatgaagctgccaggtgtgaggagagttccagtgggcatcaccttcctgcacaaacctagtcctgatggctgcgaagagaagccgaggggacaaggaacagaagccaccaagggctgtggactgttgcttgtgggcacagggcaatgcggacaggccactggctgtgggcctgtaggtctctgcacagttgctgaggctggtgctgactgcctgcagggtcctctcaaggccttacatacggacactgatcaaggccagtttgccacagcagctgcccctgccagccatgctcaggccctgcagctggctgtccagacactgatttgctgacagtggaatgtgaactctctcaagtctaccctggccttcaagcatgacatccttgccttgaccgctgtccggaactgtccagtttctgcagcactgtgcatgggttttggtggctgggacagccacgtggaggattccctcagtggcctccttagtgccatttgggctagccagggaaggctggaaggcgctgctggataaggctgggctctggggtgatgttccccgagttggtgggatctaggggttgggtcctggccagcctgtctagttggcttgccctggccgcacctgctcagccagctgggcctggcagtccagtaggtcatcccggaggcgggcaatgtcctgcgtgtgctgggccagcgtacgattcagctggtccacatggctccacaggccctctctgggcctcagtggctcagtgggcaagctgtccaggcccgcggccagcaggcccagcctcctgcacgcaccctccacttgtgccacccgctggtcaaagtgtcccactgtgtgctgaagtttctgggctgtgtcctggcagcggctcagcccactggccaccttggccacaccagccttgagttgctccagctccccacgcaggttcaggacctgcctgtggccagcctgaagcctggagccttggctgctgacctgctcctggatggcctggacttcggcttccaccttgcgttcccgctcatccagggacgtgttggcagccaagaaggcatcagagtactggctgacagagtcactgaggcctgtgagcgacttgctcactgagttcagattgaccttgagcagagtgatctcgccttgaagtgagctgcccgtcccttctgccagctgtccctggacctcggccacagtgccattgagctgctggagcagtgctgcgtggctggccacctggcgtaggagggcctcgctccggctctgccaggccttcacctctgccacgaggctgtccaggatggctgaggtggtgctcggggtgcacgaagtctccagtgagaccaaccgttgctctagcacagccagctctgtctgtacaaggggccgagctgacctgcccggagaggcgctgtcatggcttagctccccagccaatgttgctaggcgctcctcgaggctctgcacgcgctcttccagcatggtcccaaagccgcccactccccacccccccatgtccaacctcagacagcatccccttgctccaccctctgtcccattgagcgtctccagaccctcaagcagcccgtccacacctccctcgagcatggcagcagagagcctcgtaagctcatccccggccggggcaccggggcccctttgggtctcggtgactgcctgcagggccctctcaaggccatccatacgggcattgatcaaggctagttgcccacagcagctgcccctgccagacacgctcaggccctgcagctggctgcccagctgtgacagctcctggcgcagggccagctcccggccatcaaggctctggtgcagcctccggctggcggcctgaccctcctcacattgccgccgtacctcctgcacccgcaggtcacactcactctggacgccttgcagcttctgctcaaagccatccagcaggctcccccagagtcggtgcagccgtcggtccacg

SEQ ID NO: 289602 - DNA, 2873 bp, Homo sapiens
tctgttgccccagttcttttttttttttttttttttttgagacagagtctcgctctgtcgcccaggttggagtgcagtggtgtgatctcagttcactgcaaccttcgcctcctgggttcaagcaattctcctgcctcagcaacctctcctcccactgtctttgaagaaagtagctttagaccggctaaaagctttaatccagagcctgccctactctgatagtaccagagtggagggcagaataccaaatgtccaggaaccaaaggcagggctgtggggacctgaagagcagcacagtggggcccgtgctgctgtgggggaaactgaggctgggagcctcagcagagaccggtgtcaagagtctctgggaactgcataggcctgaggaacatgcattttcaagttgtccattgatggtttcgtacctgaatttctcaccttttgtgaacatcttgggagggtgggggttttgcaggggtgttaaaagcaaggcttggagcccctttcctccagctggtggctccttctcagggcctggcctcattcaggccactttgtagagaaatgccctgacctcgcaggaaggatttccccacccccaagtggaaggaagaggacagtgtgggcaccagagggccctggaaacatcttaggggaaggaaaggaaaaggataaatttggagtggggggtctctaaacagattgcctggattccgttctttcctggggttctacagctgcctaagccctcaccttgggggaggatcaaagggaataaagagaactcttggctgagtctttgtgcttctgttctgtcctgaaggacacgtgaggagccagaaacatctggcagcctctggtccttagttcagatacaacatccatgaagctgccaggtgtgaggagagttccagtgggcatcaccttcctgcacaaacctagtcctgatggctgcgaagagaagccgaggggacaaggaacagaagccaccaagggctgtggactgttgcttgtgggcacagggcaatgcggacaggccactggctgtgggcctgtaggtctctgcacagttgctgaggctggtgctgactgcctgcagggtcctctcaaggccttacatacggacactgatcaaggccagtttgccacagcagctgcccctgccagccatgctcaggccctgcagctggctgtccagacactgatttgctgacagtggaatgtgaactctctcaagtctaccctggccttcaagcatgacatccttgccttgaccgctgtccggaactgtccagtttctgcagcactgtgcatgggttttggtggctgggacagccacgtggaggattccctcagtggcctccttagtgccatttgggctagccagggaaggctggaaggcgctgctggataaggctgggctctggggtgatgttccccgagttggtgggatctaggggttgggtcctggccagcctgtctagttggcttgccctggccgcacctgctcagccagctgggcctggcagtccagtaggtcatcccggaggcgggcaatgtcctgcgtgtgctgggccagcgtacgattcagctggtccacatggctccacaggccctctctgggcctcagtggctcagtgggcaagctgtccaggcccgcggccagcaggcccagcctcctgcacgcaccctccacttgtgccacccgctggtcaaagtgtcccactgtgtgctgaagtttctgggctgtgtcctggcagcggctcagcccactggccaccttggccacaccagccttgagttgctccagctccccacgcaggttcaggacctgcctgtggccagcctgaagcctggagccttggctgctgacctgctcctggatggcctggacttcggcttccaccttgcgttcccgctcatccagggacgtgttggcagccaagaaggcatcagagtactggctgacagagtcactgaggcctgtgagcgacttgctcactgagttcagattgaccttgagcagagtgatctcgccttgaagtgagctgcccgtcccttctgccagctgtccctggacctcggccacagtgccattgagctgctggagcagtgctgcgtggctggccacctggcgtaggagggcctcgctccggctctgccaggccttcacctctgccacgaggctgtccaggatggctgaggtggtgctcggggtgcacgaagtctccagtgagaccaaccgttgctctagcacagccagctctgtctgtacaaggggccgagctgacctgcccggagaggcgctgtcatggcttagctccccagccaatgttgctaggcgctcctcgaggctctgcacgcgctcttccagcatggtcccaaagccgcccactccccacccccccatgtccaacctcagacagcatccccttgctccaccctctgtcccattgagcgtctccagaccctcaagcagcccgtccacacctccctcgagcatggcagcagagagcctcgtaagctcatccccggccggggcaccggggcccctttgggtctcggtgactgcctgcagggccctctcaaggccatccatacgggcattgatcaaggctagttgcccacagcagctgcccctgccagacacgctcaggccctgcagctggctgcccagctgtgacagctcctggcgcagggccagctcccggccatcaaggctctggtgcagcctccggctggcggcctgaccctcctcacattgccgccgtacctcctgcacccgcaggtcacactcactctggacgccttgcagcttctgctcaaagccatccagcaggctcccccagagtcggtgcagccgtcggtccacg

SEQ ID NO: 289603 - DNA, 1749 bp, Homo sapiens
gagaatccttgtcctctccttgcggccgccagtgtggtggaattcctgagcctgccatcccctctggcttcttccctactttggcccccttccctgctgtggttctggccaccccagagaggtgatcgagaagaaaccagaggtgttcaaggtcgcctgcctgagtgacatccagcagctgtttctgccccacggacagcccttctatgctgcctttgggaataggcccaatgatgtctttgcctaccggcaggtgggcctgcctgagtcacgcatcttcacagtcaacccccggggagagctcatccaggagctcataaagaaccacaaatccacgtatgagcggcttggtgaagtggtcgagctcctcttcccacctgtggcccgtggccccagcacagacctggccaaccctgaatacagtaacttctgctactggcgggagccactgcctgctgtggaccttgataccctggactgaacctgccctggctggctcctcctccctggcccggcccaggactggctaggtgtcctggggtataggagggtgggaattggagtgtcatggggcaaacccactgaaggggaaggaggaggctgcaggttggttggcagctagagagactcccccatcttccccgtcatatttttgccagctaagctgcagctgctccaggcgtcagtgtggcactgtcctggggcaattagcttgtcatctgggcccttgcagggttctttttttttttttttttttttttcctgagacagggtcttgttctgttgcccaggctggagtgcagtggcatgatctctcggctcactgcaacctccgcctcccgggttcaagcgattcacctgcctcagcctcccaagtagctgggattacaggcgtgtaccaccacgcctggctaattttcgtgtttttagtagagatgggttttcaccacattggccaggctggtctcgaactcctgacctcaagtgatttgcccacctcggcctcccaaagtgctgggattacaggcatgagctaccatgccaggcctccttgcagggttttctatgcccttgatatctgtctccctgtcaacctgggaccttgctgtaagtcttgataggacagggagaagagggaggccctaccgaggctcgaggcttcagtgaagggtgacagcagtgggagtgtggtacagcctctggaaggacacagtgttctccccgccccttgtctgggagccaggactgtaccctccgaagccagacatcactgccaacatatcccccttgctggtgccctggcatctcagcacatgacacacacccacacctgcaggctgtggttccggcttggcctgctccccgtccggctgctgccgctgcctctctccagacctcgcttaaggacagtcccaaactcagctggggcaggtgttggcctgaaagtcctcccccagcctctgctggccagcttggtgctcacagctgctgggtaagctcttgcctaaggagctgtgggaagcagggctgatgccccagcaacctctcctcccactgtctttgaagaaagtagctttagaccggctaaaagctttaatccagagcctgccctactctgatagtaccagagtggagggcagaataccaaatgtccaggaaccaaaggcagggctgtggggacctgaagagcagcacagtggggcccgtgctgcctctctccagacctcgcttaagcgatacagcgggcga

SEQ ID NO: 289604 - DNA, 1252 bp, Homo sapiens
gagaatccttgtcctctccttgcggccgccagtgtggtggaattcctgagcctgccatcccctctggcttcttccctactttggcccccttccctgctgtggttctggccaccccagagaggtgatcgagaagaaaccagaggtgttcaaggtcgcctgcctgagtgacatccagcagctgtttctgccccacggacagcccttctatgctgcctttgggaataggcccaatgatgtctttgcctaccggcaggtgggcctgcctgagtcacgcatcttcacagtcaacccccggggagagctcatccaggagctcataaagaaccacaaatccacgtatgagcggcttggtgaagtggtcgagctcctcttcccacctgtggcccgtggccccagcacagacctggccaaccctgaatacagtaacttctgctactggcgggagccactgcctgctgtggaccttgataccctggactgaacctgccctggctggctcctcctccctggcccggcccaggactggctaggtgtcctggggtataggagggtgggaattggagtgtcatggggcaaacccactgaaggggaaggaggaggctgcaggttggttggcagctagagagactcccccatcttccccgtcatatttttgccagctaagctgcagctgctccaggcgtcagtgtggcactgtcctggggcaattagcttgtcatctgggcccttgcagggttctttttttttttttttttttttttcctgagacagggtcttgttctgttgcccaggctggagtgcagtggcatgatctctcggctcactgcaacctccgcctcccgggttcaagcgattcacctgcctcagcctcccaagtagctgggattacaggcgtgtaccaccacgcctggctaattttcgtgtttttagtagagatgggttttcaccacattggccaggctggtctcgaactcctgacctcaagtgatttgcccacctcggcctcccaaagtgctgggattacaggcatgagctaccatgccaggcctccttgcagggttttctatgcccttgatatctgtctccctgtcaacctgggaccttgctgtaagtcttgataggacagggagaagagggaggccctaccgaggctcgaggcttcagtgaagggtgacagcagtgggagtgtggtacagcctctggaaggacacagtgttctccccgaattccaccacactggcggccgcaagga

SEQ ID NO: 289605 - DNA, 4273 bp, Homo sapiens
gagaatccttgtcctctccttgcggccgccagtgtggtggaattcctgagcctgccatcccctctggcttcttccctactttggcccccttccctgctgtggttctggccaccccagagaggtgatcgagaagaaaccagaggtgttcaaggtcgcctgcctgagtgacatccagcagctgtttctgccccacggacagcccttctatgctgcctttgggaataggcccaatgatgtctttgcctaccggcaggtgggcctgcctgagtcacgcatcttcacagtcaacccccggggagagctcatccaggagctcataaagaaccacaaatccacgtatgagcggcttggtgaagtggtcgagctcctcttcccacctgtggcccgtggccccagcacagacctggccaaccctgaatacagtaacttctgctactggcgggagccactgcctgctgtggaccttgataccctggactgaacctgccctggctggctcctcctccctggcccggcccaggactggctaggtgtcctggggtataggagggtgggaattggagtgtcatggggcaaacccactgaaggggaaggaggaggctgcaggttggttggcagctagagagactcccccatcttccccgtcatatttttgccagctaagctgcagctgctccaggcgtcagtgtggcactgtcctggggcaattagcttgtcatctgggcccttgcagggttctttttttttttttttttttttttcctgagacagggtcttgttctgttgcccaggctggagtgcagtggcatgatctctcggctcactgcaacctccgcctcccgggttcaagcgattcacctgcctcagcctcccaagtagctgggattacaggcgtgtaccaccacgcctggctaattttcgtgtttttagtagagatgggttttcaccacattggccaggctggtctcgaactcctgacctcaagtgatttgcccacctcggcctcccaaagtgctgggattacaggcatgagctaccatgccaggcctccttgcagggttttctatgcccttgatatctgtctccctgtcaacctgggaccttgctgtaagtcttgataggacagggagaagagggaggccctaccgaggctcgaggcttcagtgaagggtgacagcagtgggagtgtggtacagcctctggaaggacacagtgttctccccgccccttgtctgggagccaggactgtaccctccgaagccagacatcactgccaacatatcccccttgctggtgccctggcatctcagcacatgacacacacccacacctgcaggctgtggttccggcttggcctgctccccgtccggctgctgccgctgcctctctccagacctcgcttaaggacagtcccaaactcagctggggcaggtgttggcctgaaagtcctcccccagcctctgctggccagcttggtgctcacagctgctgggtaagctcttgcctaaggagctgtgggaagcagggctgatgccccagcaacctctcctcccactgtctttgaagaaagtagctttagaccggctaaaagctttaatccagagcctgccctactctgatagtaccagagtggagggcagaataccaaatgtccaggaaccaaaggcagggctgtggggacctgaagagcagcacagtggggcccgtgctgctgtgggggaaactgaggctgggagcctcagcagagaccggtgtcaagagtctctgggaactgcataggcctgaggaacatgcattttcaagttgtccattgatggtttcgtacctgaatttctcaccttttgtgaacatcttgggagggtgggggttttgcaggggtgttaaaagcaaggcttggagcccctttcctccagctggtggctccttctcagggcctggcctcattcaggccactttgtagagaaatgccctgacctcgcaggaaggatttccccacccccaagtggaaggaagaggacagtgtgggcaccagagggccctggaaacatcttaggggaaggaaaggaaaaggataaatttggagtggggggtctctaaacagattgcctggattccgttctttcctggggttctacagctgcctaagccctcaccttgggggaggatcaaagggaataaagagaactcttggctgagtctttgtgcttctgttctgtcctgaaggacacgtgaggagccagaaacatctggcagcctctggtccttagttcagatacaacatccatgaagctgccaggtgtgaggagagttccagtgggcatcaccttcctgcacaaacctagtcctgatggctgcgaagagaagccgaggggacaaggaacagaagccaccaagggctgtggactgttgcttgtgggcacagggcaatgcggacaggccactggctgtgggcctgtaggtctctgcacagttgctgaggctggtgctgactgcctgcagggtcctctcaaggccttacatacggacactgatcaaggccagtttgccacagcagctgcccctgccagccatgctcaggccctgcagctggctgtccagacactgatttgctgacagtggaatgtgaactctctcaagtctaccctggccttcaagcatgacatccttgccttgaccgctgtccggaactgtccagtttctgcagcactgtgcatgggttttggtggctgggacagccacgtggaggattccctcagtggcctccttagtgccatttgggctagccagggaaggctggaaggcgctgctggataaggctgggctctggggtgatgttccccgagttggtgggatctaggggttgggtcctggccagcctgtctagttggcttgccctggccgcacctgctcagccagctgggcctggcagtccagtaggtcatcccggaggcgggcaatgtcctgcgtgtgctgggccagcgtacgattcagctggtccacatggctccacaggccctctctgggcctcagtggctcagtgggcaagctgtccaggcccgcggccagcaggcccagcctcctgcacgcaccctccacttgtgccacccgctggtcaaagtgtcccactgtgtgctgaagtttctgggctgtgtcctggcagcggctcagcccactggccaccttggccacaccagccttgagttgctccagctccccacgcaggttcaggacctgcctgtggccagcctgaagcctggagccttggctgctgacctgctcctggatggcctggacttcggcttccaccttgcgttcccgctcatccagggacgtgttggcagccaagaaggcatcagagtactggctgacagagtcactgaggcctgtgagcgacttgctcactgagttcagattgaccttgagcagagtgatctcgccttgaagtgagctgcccgtcccttctgccagctgtccctggacctcggccacagtgccattgagctgctggagcagtgctgcgtggctggccacctggcgtaggagggcctcgctccggctctgccaggccttcacctctgccacgaggctgtccaggatggctgaggtggtgctcggggtgcacgaagtctccagtgagaccaaccgttgctctagcacagccagctctgtctgtacaaggggccgagctgacctgcccggagaggcgctgtcatggcttagctccccagccaatgttgctaggcgctcctcgaggctctgcacgcgctcttccagcatggtcccaaagccgcccactccccacccccccatgtccaacctcagacagcatccccttgctccaccctctgtcccattgagcgtctccagaccctcaagcagcccgtccacacctccctcgagcatggcagcagagagcctcgtaagctcatccccggccggggcaccggggcccctttgggtctcggtgactgcctgcagggccctctcaaggccatccatacgggcattgatcaaggctagttgcccacagcagctgcccctgccagacacgctcaggccctgcagctggctgcccagctgtgacagctcctggcgcagggccagctcccggccatcaaggctctggtgcagcctccggctggcggcctgaccctcctcacattgccgccgtacctcctgcacccgcaggtcacactcactctggacgccttgcagcttctgctcaaagccatccagcaggctcccccagagtcggtgcagccgtcggtccacg

SEQ ID NO: 289606 - DNA, 4214 bp, Homo sapiens
gcctccccaagggccccatccttctgtctcccagcagcctcttctctgccctccacagagaggtgatcgagaagaaaccagaggtgttcaaggtcgcctgcctgagtgacatccagcagctgtttctgccccacggacagcccttctatgctgcctttgggaataggcccaatgatgtctttgcctaccggcaggtgggcctgcctgagtcacgcatcttcacagtcaacccccggggagagctcatccaggagctcataaagaaccacaaatccacgtatgagcggcttggtgaagtggtcgagctcctcttcccacctgtggcccgtggccccagcacagacctggccaaccctgaatacagtaacttctgctactggcgggagccactgcctgctgtggaccttgataccctggactgaacctgccctggctggctcctcctccctggcccggcccaggactggctaggtgtcctggggtataggagggtgggaattggagtgtcatggggcaaacccactgaaggggaaggaggaggctgcaggttggttggcagctagagagactcccccatcttccccgtcatatttttgccagctaagctgcagctgctccaggcgtcagtgtggcactgtcctggggcaattagcttgtcatctgggcccttgcagggttctttttttttttttttttttttttcctgagacagggtcttgttctgttgcccaggctggagtgcagtggcatgatctctcggctcactgcaacctccgcctcccgggttcaagcgattcacctgcctcagcctcccaagtagctgggattacaggcgtgtaccaccacgcctggctaattttcgtgtttttagtagagatgggttttcaccacattggccaggctggtctcgaactcctgacctcaagtgatttgcccacctcggcctcccaaagtgctgggattacaggcatgagctaccatgccaggcctccttgcagggttttctatgcccttgatatctgtctccctgtcaacctgggaccttgctgtaagtcttgataggacagggagaagagggaggccctaccgaggctcgaggcttcagtgaagggtgacagcagtgggagtgtggtacagcctctggaaggacacagtgttctccccgccccttgtctgggagccaggactgtaccctccgaagccagacatcactgccaacatatcccccttgctggtgccctggcatctcagcacatgacacacacccacacctgcaggctgtggttccggcttggcctgctccccgtccggctgctgccgctgcctctctccagacctcgcttaaggacagtcccaaactcagctggggcaggtgttggcctgaaagtcctcccccagcctctgctggccagcttggtgctcacagctgctgggtaagctcttgcctaaggagctgtgggaagcagggctgatgccccagcaacctctcctcccactgtctttgaagaaagtagctttagaccggctaaaagctttaatccagagcctgccctactctgatagtaccagagtggagggcagaataccaaatgtccaggaaccaaaggcagggctgtggggacctgaagagcagcacagtggggcccgtgctgctgtgggggaaactgaggctgggagcctcagcagagaccggtgtcaagagtctctgggaactgcataggcctgaggaacatgcattttcaagttgtccattgatggtttcgtacctgaatttctcaccttttgtgaacatcttgggagggtgggggttttgcaggggtgttaaaagcaaggcttggagcccctttcctccagctggtggctccttctcagggcctggcctcattcaggccactttgtagagaaatgccctgacctcgcaggaaggatttccccacccccaagtggaaggaagaggacagtgtgggcaccagagggccctggaaacatcttaggggaaggaaaggaaaaggataaatttggagtggggggtctctaaacagattgcctggattccgttctttcctggggttctacagctgcctaagccctcaccttgggggaggatcaaagggaataaagagaactcttggctgagtctttgtgcttctgttctgtcctgaaggacacgtgaggagccagaaacatctggcagcctctggtccttagttcagatacaacatccatgaagctgccaggtgtgaggagagttccagtgggcatcaccttcctgcacaaacctagtcctgatggctgcgaagagaagccgaggggacaaggaacagaagccaccaagggctgtggactgttgcttgtgggcacagggcaatgcggacaggccactggctgtgggcctgtaggtctctgcacagttgctgaggctggtgctgactgcctgcagggtcctctcaaggccttacatacggacactgatcaaggccagtttgccacagcagctgcccctgccagccatgctcaggccctgcagctggctgtccagacactgatttgctgacagtggaatgtgaactctctcaagtctaccctggccttcaagcatgacatccttgccttgaccgctgtccggaactgtccagtttctgcagcactgtgcatgggttttggtggctgggacagccacgtggaggattccctcagtggcctccttagtgccatttgggctagccagggaaggctggaaggcgctgctggataaggctgggctctggggtgatgttccccgagttggtgggatctaggggttgggtcctggccagcctgtctagttggcttgccctggccgcacctgctcagccagctgggcctggcagtccagtaggtcatcccggaggcgggcaatgtcctgcgtgtgctgggccagcgtacgattcagctggtccacatggctccacaggccctctctgggcctcagtggctcagtgggcaagctgtccaggcccgcggccagcaggcccagcctcctgcacgcaccctccacttgtgccacccgctggtcaaagtgtcccactgtgtgctgaagtttctgggctgtgtcctggcagcggctcagcccactggccaccttggccacaccagccttgagttgctccagctccccacgcaggttcaggacctgcctgtggccagcctgaagcctggagccttggctgctgacctgctcctggatggcctggacttcggcttccaccttgcgttcccgctcatccagggacgtgttggcagccaagaaggcatcagagtactggctgacagagtcactgaggcctgtgagcgacttgctcactgagttcagattgaccttgagcagagtgatctcgccttgaagtgagctgcccgtcccttctgccagctgtccctggacctcggccacagtgccattgagctgctggagcagtgctgcgtggctggccacctggcgtaggagggcctcgctccggctctgccaggccttcacctctgccacgaggctgtccaggatggctgaggtggtgctcggggtgcacgaagtctccagtgagaccaaccgttgctctagcacagccagctctgtctgtacaaggggccgagctgacctgcccggagaggcgctgtcatggcttagctccccagccaatgttgctaggcgctcctcgaggctctgcacgcgctcttccagcatggtcccaaagccgcccactccccacccccccatgtccaacctcagacagcatccccttgctccaccctctgtcccattgagcgtctccagaccctcaagcagcccgtccacacctccctcgagcatggcagcagagagcctcgtaagctcatccccggccggggcaccggggcccctttgggtctcggtgactgcctgcagggccctctcaaggccatccatacgggcattgatcaaggctagttgcccacagcagctgcccctgccagacacgctcaggccctgcagctggctgcccagctgtgacagctcctggcgcagggccagctcccggccatcaaggctctggtgcagcctccggctggcggcctgaccctcctcacattgccgccgtacctcctgcacccgcaggtcacactcactctggacgccttgcagcttctgctcaaagccatccagcaggctcccccagagtcggtgcagccgtcggtccacg

SEQ ID NO: 289607 - DNA, 3958 bp, Homo sapiens
gagaatccttgtcctctccttgcggccgccagtgtggtggaattcctgagcctgccatcccctctggcttcttccctactttggcccccttccctgctgtggttctggccaccccagagaggtgatcgagaagaaaccagaggtgttcaaggtcgcctgcctgagtgacatccagcagctgtttctgccccacggacagcccttctatgctgcctttgggaataggcccaatgatgtctttgcctaccggcaggtgggcctgcctgagtcacgcatcttcacagtcaacccccggggagagctcatccaggagctcataaagaaccacaaatccacgtatgagcggcttggtgaagtggtcgagctcctcttcccacctgtggcccgtggccccagcacagacctggccaaccctgaatacagtaacttctgctactggcgggagccactgcctgctgtggaccttgataccctggactgaacctgccctggctggctcctcctccctggcccggcccaggactggctaggtgtcctggggtataggagggtgggaattggagtgtcatggggcaaacccactgaaggggaaggaggaggctgcaggttggttggcagctagagagactcccccatcttccccgtcatatttttgccagctaagctgcagctgctccaggcgtcagtgtggcactgtcctggggcaattagcttgtcatctgggcccttgcagggttctttttttttttttttttttttttcctgagacagggtcttgttctgttgcccaggctggagtgcagtggcatgatctctcggctcactgcaacctccgcctcccgggttcaagcgattcacctgcctcagcctcccaagtagctgggattacaggcgtgtaccaccacgcctggctaattttcgtgtttttagtagagatgggttttcaccacattggccaggctggtctcgaactcctgacctcaagtgatttgcccacctcggcctcccaaagtgctgggattacaggcatgagctaccatgccaggcctccttgcagggttttctatgcccttgatatctgtctccctgtcaacctgggaccttgctgtaagtcttgataggacagggagaagagggaggccctaccgaggctcgaggcttcagtgaagggtgacagcagtgggagtgtggtacagcctctggaaggacacagtgttctccccgccccttgtctgggagccaggactgtaccctccgaagccagacatcactgccaacatatcccccttgctggtgccctggcatctcagcacatgacacacacccacacctgcaggctgtggttccggcttggcctgctccccgtccggctgctgccgctgcctctctccagacctcgcttaaggacagtcccaaactcagctggggcaggtgttggcctgaaagtcctcccccagcctctgctggccagcttggtgctcacagctgctgggtaagctcttgcctaaggagctgtgggaagcagggctgatgccccagcaacctctcctcccactgtctttgaagaaagtagctttagaccggctaaaagctttaatccagagcctgccctactctgatagtaccagagtggagggcagaataccaaatgtccaggaaccaaaggcagggctgtggggacctgaagagcagcacagtggggcccgtgctgctgtgggggaaactgaggctgggagcctcagcagagaccggtgtcaagagtctctgggaactgcataggcctgaggaacatgcattttcaagttgtccattgatggtttcgtacctgaatttctcaccttgggggaggatcaaagggaataaagagaactcttggctgagtctttgtgcttctgttctgtcctgaaggacacgtgaggagccagaaacatctggcagcctctggtccttagttcagatacaacatccatgaagctgccaggtgtgaggagagttccagtgggcatcaccttcctgcacaaacctagtcctgatggctgcgaagagaagccgaggggacaaggaacagaagccaccaagggctgtggactgttgcttgtgggcacagggcaatgcggacaggccactggctgtgggcctgtaggtctctgcacagttgctgaggctggtgctgactgcctgcagggtcctctcaaggccttacatacggacactgatcaaggccagtttgccacagcagctgcccctgccagccatgctcaggccctgcagctggctgtccagacactgatttgctgacagtggaatgtgaactctctcaagtctaccctggccttcaagcatgacatccttgccttgaccgctgtccggaactgtccagtttctgcagcactgtgcatgggttttggtggctgggacagccacgtggaggattccctcagtggcctccttagtgccatttgggctagccagggaaggctggaaggcgctgctggataaggctgggctctggggtgatgttccccgagttggtgggatctaggggttgggtcctggccagcctgtctagttggcttgccctggccgcacctgctcagccagctgggcctggcagtccagtaggtcatcccggaggcgggcaatgtcctgcgtgtgctgggccagcgtacgattcagctggtccacatggctccacaggccctctctgggcctcagtggctcagtgggcaagctgtccaggcccgcggccagcaggcccagcctcctgcacgcaccctccacttgtgccacccgctggtcaaagtgtcccactgtgtgctgaagtttctgggctgtgtcctggcagcggctcagcccactggccaccttggccacaccagccttgagttgctccagctccccacgcaggttcaggacctgcctgtggccagcctgaagcctggagccttggctgctgacctgctcctggatggcctggacttcggcttccaccttgcgttcccgctcatccagggacgtgttggcagccaagaaggcatcagagtactggctgacagagtcactgaggcctgtgagcgacttgctcactgagttcagattgaccttgagcagagtgatctcgccttgaagtgagctgcccgtcccttctgccagctgtccctggacctcggccacagtgccattgagctgctggagcagtgctgcgtggctggccacctggcgtaggagggcctcgctccggctctgccaggccttcacctctgccacgaggctgtccaggatggctgaggtggtgctcggggtgcacgaagtctccagtgagaccaaccgttgctctagcacagccagctctgtctgtacaaggggccgagctgacctgcccggagaggcgctgtcatggcttagctccccagccaatgttgctaggcgctcctcgaggctctgcacgcgctcttccagcatggtcccaaagccgcccactccccacccccccatgtccaacctcagacagcatccccttgctccaccctctgtcccattgagcgtctccagaccctcaagcagcccgtccacacctccctcgagcatggcagcagagagcctcgtaagctcatccccggccggggcaccggggcccctttgggtctcggtgactgcctgcagggccctctcaaggccatccatacgggcattgatcaaggctagttgcccacagcagctgcccctgccagacacgctcaggccctgcagctggctgcccagctgtgacagctcctggcgcagggccagctcccggccatcaaggctctggtgcagcctccggctggcggcctgaccctcctcacattgccgccgtacctcctgcacccgcaggtcacactcactctggacgccttgcagcttctgctcaaagccatccagcaggctcccccagagtcggtgcagccgtcggtccacg

SEQ ID NO: 289608 - DNA, 165 bp, Homo sapiens
ttccatgggcccctcctgtctcccacaggatgtctttgcctaccggcaggtgggcctgcctgagtcacgcatcttcacagtcaacccccggggagagctcatccaggagctcataaagaaccacaaatccacgtgaggctaaaccctgccatgttccccatgccc

SEQ ID NO: 289609 - DNA, 7244 bp, Homo sapiens
atggaagagttaatagttgaacttcgtctctttcttgaactcctggaccatgaatatctaacctcaactgtcagggagaaaaaggcagtgataaccaacattctgctaagaatacagtcatccaaaggttttgacgtgaaggaccatgctcagaagcaggagaccgctaacagcctgccagcccctcctcagatgcccctgccggagatccctcagccctggctgcctcctgacagtgggcctccaccattgccaacatcctccctcccagaaggttattatgaggaagctgtgccactgagccccggaaaagctccggaatacatcacatcaaattatgattccgatgcgatgagcagctcttatgagtcgtatgatgaagaggaggaggatgggaaggggaagaaaacccggcaccagtggccctccgaggaggcctccatggacctggtcaaggacgccaaaatctgcgccttcctgctgcggaagaagcggttcggccagtggaccaagttgctctgcgtcatcaaagacaccaaactgctgtgctataaaagttccaaggaccagcagcctcagatggaactgctactccaaggctgtaacattacgtacatcccgaaagacagcaaaaagaagaagcacgagctgaagattactcagcaggacacggacccgcttgttctcgccgtccagagcaaggaacaggccgggcagtggctgaaggtgatcaaagaagcctacagtggttgtagtggccccgtggattcagagtgtcctcctccaccaagctccccggtgcacaaggcagaactggagaagaaactgtcttcagagagacccagctcagatggggagggtgttgtggaaaatggaattaccacatgtaatggaaaggagcaagtgaagaggaagaaaagttccaaatcagaggccaagggcactgtgtcgaaagtcactgggaaaaaaatcaccaagatcatcagtctgggaaagaaaaagccgtccacagacgagcagacctcctcagctgaggaagatgttcccacctgcggctatctgaacgtgctctccaacagccgctggcgagagcgctggtgccgagtgaaagataacaagctcattttccacaaggacaggaccgacctgaagacccatattgtgtctattccgctccgtggctgcgaggtgatcccgggtttggattctaaacatcctctgacgttccggctgctgcgcaacggccaggaggttgcagtattggaggcatcttcttctgaagacatgggcaggtggattgggattttactcgcagagacgggatcgtccacagacccggaggctctgcactatgactacattgatgtggagatgtctgcaagtgtcattcagacagccaaacagaccttctgtttcatgaacaggcgtgttatatctgctaacccatatctagggggcacctccaacggctatgcccaccccagcgggacggcacttcattatgacgatgtcccgtgcatcaacggctcgctcaagggtaaaaagccccccgtggcgtctaatggggtcacaggaaaagggaagactctgagcagtcagccaaagaaagcggatcccgcggctgttgtgaaaaggacgggttcgaatgctgcccagtacaagtatggcaagaaccgggtagaagcagatgccaagcggctacagaccaaagaggaggagctgctgaagaggaaagaggccctgcggaataggctggcccagctccgcaaggaaagaaaagaccttcgagcggctattgaagtgaacgccggcaggaagccgcaggcgatcctggaggagaagctgaagcagctggaggaggagtgccggcagaaggaggcggagcgtgtcagcctggagctggagctgacggaggtcaaggagagcctgaagaaagcgctggcgggcggagtcaccctggggctggccatcgagcccaagtcagggacatcgagtccacagtctccagtgttccggcaccggaccctggaaaactcgcccatctccagctgtgacaccagtgacaccgagggccccgtgccggtgaacagcgcggccgtcttgaagaagagccaggctgccccgggcagctccccctgccgagggcatgtgctgcggaaggccaaggaatgggaattgaagaacgggacctaggggacagcagcaccactccagcctcagagactgcacacccccttgcctgtatcctcatctgtgtgacggcaggaagctctgcccagagtggcctcagctgcacgactccagaggctccacgactgagctctgaggccagtgcctgtcccccaggcccacttgtattctttctactgtaaaatggcgcctttaaaaaagatgtaagactttggttcccaactttgttaaaaaacaaaaaaagtgatggaaaggtgtttgaaaggatgctatcaggcgaagtgacatctttctaaccagataggccattgctttcaccgattccaacccagccctggactgaggatggatggttccatgagcccccagatgaaaacctggattcgacagggaagagcttggatccccggctgccccgggcatgagtgtggctggccatgggcactgggctcgccttgcacgcccaccaggagggccaggggcatacgcagtcctgacgtggactttgtgtcttggcgtaccctctccacgtgcccgtccccctcgtcatcagaggtaaaggcatgagaaaatcgcgctgtgaaacgttttttaccttttattattattttttggacagatgcttttgtcaccaagacatgaaaagctgccattcttcttaacctgttttttaagaatgtctttttactgtgtgtcacacttagatcaaggagttttcagaggttccttattttattaattaattatttgtgctgcttttgacaggtagcagagggttttaatacttcactaacagtacaccctcctcccccttgggctagcatccccagcccttaatccacgtcggagccggcaggtgcttctcacaccaggagcctctgggggcaggggctggctcctcgccgctgtacaggacgtttactgctgcttggggccagggcagtcctttgaaagggaagcaagttccggaatttgttccctcatggaactataacaccttagagcaagaggcaggaattccagggcctcctgcccctccccttcctccagcttgtcaagttaaaccactaatgtgttggtgggcctggccgtgctgcctctcctgagtagggtgggtgcaagtagggcctctttcccagctttcttgcttgccttctgtgcaatatttcttggagaatttggatgcctaaggcataaaggaaaaaaacagagttcatagtttgagctggtatttaccccctgggtttaaaaatcagattaacttcttggtctcccggaggctgctgtcaggaattctccagtacgggaagatgcagtcacttatgacgaaataagtcacccctgaacgcctccgcaggcagattcatggagaccagtcccagtagcaaccgccccttccccaagcatagaatacagaggtgccatacttggtgtaagccttccttctgtccactgtccagaatgtcctttttcacacagaggaagagatggcgggaaaacactgactgactccttgggtttcccccagacatactttcagagcgctagctgtgtggtgcacgggactttacagttaggattcatgtttaaggtggtggcgcttgaggcctgcaagggccacgttggattactgaagcggaaagcggtctcccatgtataagaaaaagttttacaacacgaattggaagctgcttgagtccacctgaacttgaattgattgcaaagccatctgccgggaacggttttgggttcctgagccatcagccagcctttctttcccctctgatgcacgttcctcccggcctagtccgtggaggcccatcacaccagcatccgtgacgccagcttcccactaggacatccaggcaggtcgggcggggacgccacacgcctcagggccgtccgctgcactgccatagaggagccctccctccagtggtcacttcccaccattgcaggcagacttcccaccattgcaggcagctgggcccacttcatatcacacaaaatgaattttctataaagggaaaaaagtttgctcctccatagatttttgctgccttcgggtcaaatagtttccctggttgacgctcttgggccactctgattggcagcctgctttgccaaagagaactgtgtgaggttttggtggttagtaagagaagggggagatggccagcctgaagtcacggtcctggcccagcacaggtgggcagcagcgagctggcaggtgaagtgtgagcagcacgcaaagtgtcacgtgggccttagccgtcacccaccagcttcctcaccaggcaaggaggccccggagccttagcagggacttgcccgacggcacagctgattggtgctcgactcccagcatgcatattttgttgtaaaaacccaggtttgtaattcacatccacaaccctaagccttttaaagcggaggcaaacgttaacgaaccccatcgtggtccatggagcctttcaaaatgggtgccctggaggggcctgacagtgggttccttccatggcggatactcccttgaaatttcacattccatcaaagtttaaagcatttacttcagaataagttatttatgtgtatatgttcaataaatatagtttttaatttatatctgtacatattagacacacgcgagccatcttgccagaattctgacagtgatgtcattttattcccctcccaaaacatgccccaggaacaagcaccccttgcctctgtggcagctgcgagtgtgtctgatttcataacgaagccaggctgagggcaagaggcccgacaggcaggccagggtccccggagaagccggatttcttcgcaatgtcactggtacttagcagatggtcgtgttcacaggggctagccacctgtactacggtgccgaccgcaatgcgaggaatgtggtggccacgcgatggagctggccggaggacaggtcaggtgagggggccgacccctgcggggctcagggctccttccattctaaccttgagccacagtgtcactcttcagggctctgctcctggctctattttgttaaggtgtcatcagccttcaacctccatttatatatttttataatgttaagccactgaccaactttttcatagaaacaactatcagatttgagggctccctttgtccccctgacctgggcacaggcatgggccatggctccctcttcccagaatctgcggggaactggggcaaggcccatctgtctgcaaggctggtagctctctccctcggcttccagagtccacggcagttgcaaggtaaccagtgtggatctgctgagtcaccccaggcaccagacttaccccaggagcatgggccactgtccatggggccttccttgagaccttcccttggggctggcgggcggcggcttaccagctgggtcagtcccatctcgcccctctgtgcctatgccctggcgttgccaggcttaaccttcccctgtatcttactcatcccagaattattactggccatttctaaatagacaaaaactaccctaaaatgtggagatttactccttttgaaaagtctgtttcaaaaagtgtggcctcagctctggaggccacccccaggaaggagtttgaggttcattgtcattatgggccacagtttggtgcttgtgcacgggactcaaagggcagcgtcgaagctggggttaggtgtagggttgtgagcaaagctcccctgtttgtggccacaccttccctttccaaaaaggctattaattctactcacccactatttggggggatgtaaattttgcccacagactttgccacccaggtgaggtgctgtgttcatgcacggaactgatgtcattagacaccatccaaggatgggcagcctgcagtgtggccggcgactgccatccagagaaaaggcaccttgtgccacagggcggggccgacaccctgagctcacaggtggcccctgcattcaggtggatgtccatccttgaaacagcctcttctgggaacacagcactggaggtctccaggcatcagggttggccggcagggtgccctgcagcttacataaaggtcgtggcaatgtttcaatgttaaactaaactattgccttcctcttacttttcctaaaatgattttctaatgggaacagtcacttcaagttcatgacatagtttgaaggaggataattcattttttcctggttgtcactgtcttcttatccccttggtgggctgggttcatactgtgaaataaactaaaatgaaaccaaaacgttcctgccgtaaatacgtggcacagcactgcagaaaaagcagtcacctctattcgtgagtccccaagccatagcagggcgtctgtaaaagaagggaaactgcacccaggaagtggtgggcgtcagacgcatcctttcgcccgtagttcatgaaatagttccggctttggtcttccagaaaatctcaacttcaccgtgcacaagtgttaccgggtctttttagtgtagccatggaagatactttcaaaaggacatcttcagatcataagtcttaggaccaaaggtgtttttaatgagataatctttttgattttctaacaagaaaggaaatattcactttacattttaacatcaacttttaagtgatattcagaattaattgaccatggtgatacgttgtaaaatgttttcatattaagaatgtaattatttccttattgtattttttaaaagctaaagtcatatttaaaattctctttgaaagaaacaggcaaagaaacagcaaagatttttttaaattaaatatgttagtagtgcccacttcaaatgactgtaaatatattttcactgtttctcaatgtatttaattcataaagtaaaaattttatgaaaagaaacttgcaaggaaaatcctagttttcagtccactcgccccactttgtagtagcttcactgaatttcctgctttcctggttgaattttctactgtttcacgtggtgtaaccctagactggcgcccttggcgtgcccctttgtgtatgaataaacttctctccccc

SEQ ID NO: 289610 - DNA, 8020 bp, Homo sapiens
  misc_feature (15)..(15): n is a, c, g, or t
acaggctggtaccgnccgggatgtaatggatctggagaagaaactgtcttcagagagacccagctcagatggggagggtgttgtggaaaatggaattaccacatgtaatggaaaggagcaagtgaagaggaagaaaagttccaaatcagaggccaagggcactgtgtcgaaagtcactgggaaaaaaatcaccaagatcatcagtctgggaaagaaaaagccgtccacagacgagcagacctcctcagctgaggaagatgttcccacctgcggctatctgaacgtgctctccaacagccgctggcgagagcgctggtgccgagtgaaagataacaagctcattttccacaaggacaggaccgacctgaagacccatattgtgtctattccgctccgtggctgcgaggtgatcccgggtttggattctaaacatcctctgacgttccggctgctgcgcaacggccaggaggttgcagtattggaggcatcttcttctgaagacatgggcaggtggattgggattttactcgcagagacgggatcgtccacagacccggaggctctgcactatgactacattgatgtggagatgtctgcaagtgtcattcagacagccaaacagaccttctgtttcatgaacaggcgtgttatatctgctaacccatatctagggggcacctccaacggctatgcccaccccagcgggacggcacttcattatgacgatgtcccgtgcatcaacggctcgctcaagggtaaaaagccccccgtggcgtctaatggggtcacaggaaaagggaagactctgagcagtcagccaaagaaagcggatcccgcggctgttgtgaaaaggacgggttcgaatgctgcccagtacaagtatggcaagaaccgggtagaagcagatgccaagcggctacagaccaaagaggaggagctgctgaagaggaaagaggccctgcggaataggctggcccagctccgcaaggaaagaaaagaccttcgagcggctattgaagtgaacgccggtatgaagggtgtgggtgactgcccagggtgcatgtttgtattagagactggagatttcattctgctttgcccaaaggacctattgctcaccaaggctgtcattttatttagtaagagtgggttatctcacagtgtttcttggggcttggaaacattgctggtaaccccgaggcaggtgcctgtgtggtcaaacatgcggcgtgcaggcagaggccagggccagacccacacgctgctcaccgaggcaggggaggtgctgggggacctgttccggcttctggcgctgacaacagagattgtctggaggatggcccctgtatccgcaggacgcagtagattctggtcaccgggtaggagggatcagctggatttctctacagagggtagcccacaggggtcagtaatattcagaagtccagacaagggtagaagcagcccctcgtttgttgagaagggacaggcgagagcaaggcagcatctgtcttgggatgcatcagggaagaggccaggctaatggaatacagacaccagagagggactgaagtcacagaaactgagtttgcagccagagtggcagccctgggccaggcgcgtgcaattcctgctggcgggagctggcgctcagctcctgagcctggggtggcaccgcttacctacgcatggcctcccttccagcccggtgcttagactacggaagactgctccttagattgagattgtactggcctgggctgggacgggggcttcagatgcctcagagccctgggcggtccagagaagaggctgtggccttcccatggctcgccgcgcggggaggagctgacgcacacccagcaggtggttaccagctccagccttgctggactttgtgcctcaatgatctgatgaagggaaatgcttttggagtttagaggagggaaggcaggtgttggcagggcaggtcaggctgaccctataggaggcccaggatgtggcctgcagtctgaggctgaccctacgggaggaggctgtgccagagaatgggacggggcatggagtttaatgagacagaagtagcatttctcccgtgttcccagcttgcaggatagtgaagatgcaggagggccaggagtgcttttggctttgaaaaagagaacctcgcctgccggccaccaccggcccaggccctgggcacaagtccgttcacctcttgggattggtgttctcatctgcccagtgggtgcatcttaggtcactgcagcaaacctcaaataaaataagtgaatgtgccttaaagaaatgtgtgccatgtccagtagagatgcaagctgagctactgttcattgcctcgggcgcaaataagatgactgaaggatcggcggagcattaggggaggacagggttcacactccaagaaggtggcagctttgggaactgtggagtttagggtccacgttttaaaatgagaacattgaggcccagagccaggagctcctggccttcgtcagaatcagcatctcctctttcctggtccgagtcctcaacggctgcagcaaagggaaatggtaggagaaggactctgatcccttagagaactgctgaatttaagtttcacaacgaggacctaagtcaggggagctcgacctcagacgttttgtggaagttcttcttggggaccaggtgccttctctgttgtttggagaacctgtgcctgccgcgggagtaacggcgtttctgggaattccaggcaggaagccgcaggcgatcctggaggagaagctgaagcagctggaggaggagtgccggcagaaggaggcggagcgtgtcagcctggagctggagctgacggaggtcaaggagagcctgaagaaagcgctggcgggcggagtcaccctggggctggccatcgagcccaagtcagggacatcgagtccacagtctccagtgttccggcaccggaccctggaaaactcgcccatctccagctgtgacaccagtgacaccgagggccccgtgccggtgaacagcgcggccgtcttgaagaagagccaggctgccccgggcagctccccctgccgagggcatgtgctgcggaaggccaaggaatgggaattgaagaacgggacctaggggacagcagcaccactccagcctcagagactgcacacccccttgcctgtatcctcatctgtgtgacggcaggaagctctgcccagagtggcctcagctgcacgactccagaggctccacgactgagctctgaggccagtgcctgtcccccaggcccacttgtattctttctactgtaaaatggcgcctttaaaaaagatgtaagactttggttcccaactttgttaaaaaacaaaaaaagtgatggaaaggtgtttgaaaggatgctatcaggcgaagtgacatctttctaaccagataggccattgctttcaccgattccaacccagccctggactgaggatggatggttccatgagcccccagatgaaaacctggattcgacagggaagagcttggatccccggctgccccgggcatgagtgtggctggccatgggcactgggctcgccttgcacgcccaccaggagggccaggggcatacgcagtcctgacgtggactttgtgtcttggcgtaccctctccacgtgcccgtccccctcgtcatcagaggtaaaggcatgagaaaatcgcgctgtgaaacgttttttaccttttattattattttttggacagatgcttttgtcaccaagacatgaaaagctgccattcttcttaacctgttttttaagaatgtctttttactgtgtgtcacacttagatcaaggagttttcagaggttccttattttattaattaattatttgtgctgcttttgacaggtagcagagggttttaatacttcactaacagtacaccctcctcccccttgggctagcatccccagcccttaatccacgtcggagccggcaggtgcttctcacaccaggagcctctgggggcaggggctggctcctcgccgctgtacaggacgtttactgctgcttggggccagggcagtcctttgaaagggaagcaagttccggaatttgttccctcatggaactataacaccttagagcaagaggcaggaattccagggcctcctgcccctccccttcctccagcttgtcaagttaaaccactaatgtgttggtgggcctggccgtgctgcctctcctgagtagggtgggtgcaagtagggcctctttcccagctttcttgcttgccttctgtgcaatatttcttggagaatttggatgcctaaggcataaaggaaaaaaacagagttcatagtttgagctggtatttaccccctgggtttaaaaatcagattaacttcttggtctcccggaggctgctgtcaggaattctccagtacgggaagatgcagtcacttatgacgaaataagtcacccctgaacgcctccgcaggcagattcatggagaccagtcccagtagcaaccgccccttccccaagcatagaatacagaggtgccatacttggtgtaagccttccttctgtccactgtccagaatgtcctttttcacacagaggaagagatggcgggaaaacactgactgactccttgggtttcccccagacatactttcagagcgctagctgtgtggtgcacgggactttacagttaggattcatgtttaaggtggtggcgcttgaggcctgcaagggccacgttggattactgaagcggaaagcggtctcccatgtataagaaaaagttttacaacacgaattggaagctgcttgagtccacctgaacttgaattgattgcaaagccatctgccgggaacggttttgggttcctgagccatcagccagcctttctttcccctctgatgcacgttcctcccggcctagtccgtggaggcccatcacaccagcatccgtgacgccagcttcccactaggacatccaggcaggtcgggcggggacgccacacgcctcagggccgtccgctgcactgccatagaggagccctccctccagtggtcacttcccaccattgcaggcagacttcccaccattgcaggcagctgggcccacttcatatcacacaaaatgaattttctataaagggaaaaaagtttgctcctccatagatttttgctgccttcgggtcaaatagtttccctggttgacgctcttgggccactctgattggcagcctgctttgccaaagagaactgtgtgaggttttggtggttagtaagagaagggggagatggccagcctgaagtcacggtcctggcccagcacaggtgggcagcagcgagctggcaggtgaagtgtgagcagcacgcaaagtgtcacgtgggccttagccgtcacccaccagcttcctcaccaggcaaggaggccccggagccttagcagggacttgcccgacggcacagctgattggtgctcgactcccagcatgcatattttgttgtaaaaacccaggtttgtaattcacatccacaaccctaagccttttaaagcggaggcaaacgttaacgaaccccatcgtggtccatggagcctttcaaaatgggtgccctggaggggcctgacagtgggttccttccatggcggatactcccttgaaatttcacattccatcaaagtttaaagcatttacttcagaataagttatttatgtgtatatgttcaataaatatagtttttaatttatatctgtacatattagacacacgcgagccatcttgccagaattctgacagtgatgtcattttattcccctcccaaaacatgccccaggaacaagcaccccttgcctctgtggcagctgcgagtgtgtctgatttcataacgaagccaggctgagggcaagaggcccgacaggcaggccagggtccccggagaagccggatttcttcgcaatgtcactggtacttagcagatggtcgtgttcacaggggctagccacctgtactacggtgccgaccgcaatgcgaggaatgtggtggccacgcgatggagctggccggaggacaggtcaggtgagggggccgacccctgcggggctcagggctccttccattctaaccttgagccacagtgtcactcttcagggctctgctcctggctctattttgttaaggtgtcatcagccttcaacctccatttatatatttttataatgttaagccactgaccaactttttcatagaaacaactatcagatttgagggctccctttgtccccctgacctgggcacaggcatgggccatggctccctcttcccagaatctgcggggaactggggcaaggcccatctgtctgcaaggctggtagctctctccctcggcttccagagtccacggcagttgcaaggtaaccagtgtggatctgctgagtcaccccaggcaccagacttaccccaggagcatgggccactgtccatggggccttccttgagaccttcccttggggctggcgggcggcggcttaccagctgggtcagtcccatctcgcccctctgtgcctatgccctggcgttgccaggcttaaccttcccctgtatcttactcatcccagaattattactggccatttctaaatagacaaaaactaccctaaaatgtggagatttactccttttgaaaagtctgtttcaaaaagtgtggcctcagctctggaggccacccccaggaaggagtttgaggttcattgtcattatgggccacagtttggtgcttgtgcacgggactcaaagggcagcgtcgaagctggggttaggtgtagggttgtgagcaaagctcccctgtttgtggccacaccttccctttccaaaaaggctattaattctactcacccactatttggggggatgtaaattttgcccacagactttgccacccaggtgaggtgctgtgttcatgcacggaactgatgtcattagacaccatccaaggatgggcagcctgcagtgtggccggcgactgccatccagagaaaaggcaccttgtgccacagggcggggccgacaccctgagctcacaggtggcccctgcattcaggtggatgtccatccttgaaacagcctcttctgggaacacagcactggaggtctccaggcatcagggttggccggcagggtgccctgcagcttacataaaggtcgtggcaatgtttcaatgttaaactaaactattgccttcctcttacttttcctaaaatgattttctaatgggaacagtcacttcaagttcatgacatagtttgaaggaggataattcattttttcctggttgtcactgtcttcttatccccttggtgggctgggttcatactgtgaaataaactaaaatgaaaccaaaacgttcctgccgtaaatacgtggcacagcactgcagaaaaagcagtcacctctattcgtgagtccccaagccatagcagggcgtctgtaaaagaagggaaactgcacccaggaagtggtgggcgtcagacgcatcctttcgcccgtagttcatgaaatagttccggctttggtcttccagaaaatctcaacttcaccgtgcacaagtgttaccgggtctttttagtgtagccatggaagatactttcaaaaggacatcttcagatcataagtcttaggaccaaaggtgtttttaatgagataatctttttgattttctaacaagaaaggaaatattcactttacattttaacatcaacttttaagtgatattcagaattaattgaccatggtgatacgttgtaaaatgttttcatattaagaatgtaattatttccttattgtattttttaaaagctaaagtcatatttaaaattctctttgaaagaaacaggcaaagaaacagcaaagatttttttaaattaaatatgttagtagtgcccacttcaaatgactgtaaatatattttcactgtttctcaatgtatttaattcataaagtaaaaattttatga

SEQ ID NO: 289611 - DNA, 3536 bp, Homo sapiens
atagctcactcctgatgaaaaacgaccgctagtgaatcctgcaccatgctctacagtgattactgatgtatacgtggtggcgcttgaggcctgcaagggccacgttggattactgaagcggaaagcggtctcccatgtataagaaaaagttttacaacacgaattggaagctgcttgagtccacctgaacttgaattgattgcaaagccatctgccgggaacggttttgggttcctgagccatcagccagcctttctttcccctctgatgcacgttcctcccggcctagtccgtggaggcccatcacaccagcatccgtgacgccagcttcccactaggacatccaggcaggtcgggcggggacgccacacgcctcagggccgtccgctgcactgccatagaggagccctccctccagtggtcacttcccaccattgcaggcagacttcccaccattgcaggcagctgggcccacttcatatcacacaaaatgaattttctataaagggaaaaaagtttgctcctccatagatttttgctgccttcgggtcaaatagtttccctggttgacgctcttgggccactctgattggcagcctgctttgccaaagagaactgtgtgaggttttggtggttagtaagagaagggggagatggccagcctgaagtcacggtcctggcccagcacaggtgggcagcagcgagctggcaggtgaagtgtgagcagcacgcaaagtgtcacgtgggccttagccgtcacccaccagcttcctcaccaggcaaggaggccccggagccttagcagggacttgcccgacggcacagctgattggtgctcgactcccagcatgcatattttgttgtaaaaacccaggtttgtaattcacatccacaaccctaagccttttaaagcggaggcaaacgttaacgaaccccatcgtggtccatggagcctttcaaaatgggtgccctggaggggcctgacagtgggttccttccatggcggatactcccttgaaatttcacattccatcaaagtttaaagcatttacttcagaataagttatttatgtgtatatgttcaataaatatagtttttaatttatatctgtacatattagacacacgcgagccatcttgccagaattctgacagtgatgtcattttattcccctcccaaaacatgccccaggaacaagcaccccttgcctctgtggcagctgcgagtgtgtctgatttcataacgaagccaggctgagggcaagaggcccgacaggcaggccagggtccccggagaagccggatttcttcgcaatgtcactggtacttagcagatggtcgtgttcacaggggctagccacctgtactacggtgccgaccgcaatgcgaggaatgtggtggccacgcgatggagctggccggaggacaggtcaggtgagggggccgacccctgcggggctcagggctccttccattctaaccttgagccacagtgtcactcttcagggctctgctcctggctctattttgttaaggtgtcatcagccttcaacctccatttatatatttttataatgttaagccactgaccaactttttcatagaaacaactatcagatttgagggctccctttgtccccctgacctgggcacaggcatgggccatggctccctcttcccagaatctgcggggaactggggcaaggcccatctgtctgcaaggctggtagctctctccctcggcttccagagtccacggcagttgcaaggtaaccagtgtggatctgctgagtcaccccaggcaccagacttaccccaggagcatgggccactgtccatggggccttccttgagaccttcccttggggctggcgggcggcggcttaccagctgggtcagtcccatctcgcccctctgtgcctatgccctggcgttgccaggcttaaccttcccctgtatcttactcatcccagaattattactggccatttctaaatagacaaaaactaccctaaaatgtggagatttactccttttgaaaagtctgtttcaaaaagtgtggcctcagctctggaggccacccccaggaaggagtttgaggttcattgtcattatgggccacagtttggtgcttgtgcacgggactcaaagggcagcgtcgaagctggggttaggtgtagggttgtgagcaaagctcccctgtttgtggccacaccttccctttccaaaaaggctattaattctactcacccactatttggggggatgtaaattttgcccacagactttgccacccaggtgaggtgctgtgttcatgcacggaactgatgtcattagacaccatccaaggatgggcagcctgcagtgtggccggcgactgccatccagagaaaaggcaccttgtgccacagggcggggccgacaccctgagctcacaggtggcccctgcattcaggtggatgtccatccttgaaacagcctcttctgggaacacagcactggaggtctccaggcatcagggttggccggcagggtgccctgcagcttacataaaggtcgtggcaatgtttcaatgttaaactaaactattgccttcctcttacttttcctaaaatgattttctaatgggaacagtcacttcaagttcatgacatagtttgaaggaggataattcattttttcctggttgtcactgtcttcttatccccttggtgggctgggttcatactgtgaaataaactaaaatgaaaccaaaacgttcctgccgtaaatacgtggcacagcactgcagaaaaagcagtcacctctattcgtgagtccccaagccatagcagggcgtctgtaaaagaagggaaactgcacccaggaagtggtgggcgtcagacgcatcctttcgcccgtagttcatgaaatagttccggctttggtcttccagaaaatctcaacttcaccgtgcacaagtgttaccgggtctttttagtgtagccatggaagatactttcaaaaggacatcttcagatcataagtcttaggaccaaaggtgtttttaatgagataatctttttgattttctaacaagaaaggaaatattcactttacattttaacatcaacttttaagtgatattcagaattaattgaccatggtgatacgttgtaaaatgttttcatattaagaatgtaattatttccttattgtattttttaaaagctaaagtcatatttaaaattctctttgaaagaaacaggcaaagaaacagcaaagatttttttaaattaaatatgttagtagtgcccacttcaaatgactgtaaatatattttcactgtttctcaatgtatttaattcataaagtaaaaattttatgaaaagaaacttgcaaggaaaatcctagttttcagtccactcgccccactttgtagtagcttcactgaatttcctgctttcctggttgaattttctactgtttcacgtggtgtaaccctagactggcgcccttggcgtgcccctttgtgtatgaataaacttctctccccc

SEQ ID NO: 289612 - DNA, 2262 bp, Homo sapiens
gcatgcagtgtggtgagatggttaaaagggggcaagacgtgtggcttctcttattgttagatattttgctatctctcacttctcagggatgaaattctttttcaaagtttggaagttcctgcaacttagccatgatgtgagtggttatccctagataaaattaaaaggatttttacaaagtaattactgcacataaaatgataaataggtaatttgaataattttatttgaagctccttggtttaattattttgtctattgtctcagctataaattcaaatttatacatactattgagtattaatattctctgatttcagggagaattctgtcagtcacatgcatgcacaggcacatgcatgcacccaggcctgggcacaggcatgggccatggctccctcttcccagaatctgcggggaactggggcaaggcccatctgtctgcaaggctggtagctctctccctcggcttccagagtccacggcagttgcaaggtaaccagtgtggatctgctgagtcaccccaggcaccagacttaccccaggagcatgggccactgtccatggggccttccttgagaccttcccttggggctggcgggcggcggcttaccagctgggtcagtcccatctcgcccctctgtgcctatgccctggcgttgccaggcttaaccttcccctgtatcttactcatcccagaattattactggccatttctaaatagacaaaaactaccctaaaatgtggagatttactccttttgaaaagtctgtttcaaaaagtgtggcctcagctctggaggccacccccaggaaggagtttgaggttcattgtcattatgggccacagtttggtgcttgtgcacgggactcaaagggcagcgtcgaagctggggttaggtgtagggttgtgagcaaagctcccctgtttgtggccacaccttccctttccaaaaaggctattaattctactcacccactatttggggggatgtaaattttgcccacagactttgccacccaggtgaggtgctgtgttcatgcacggaactgatgtcattagacaccatccaaggatgggcagcctgcagtgtggccggcgactgccatccagagaaaaggcaccttgtgccacagggcggggccgacaccctgagctcacaggtggcccctgcattcaggtggatgtccatccttgaaacagcctcttctgggaacacagcactggaggtctccaggcatcagggttggccggcagggtgccctgcagcttacataaaggtcgtggcaatgtttcaatgttaaactaaactattgccttcctcttacttttcctaaaatgattttctaatgggaacagtcacttcaagttcatgacatagtttgaaggaggataattcattttttcctggttgtcactgtcttcttatccccttggtgggctgggttcatactgtgaaataaactaaaatgaaaccaaaacgttcctgccgtaaatacgtggcacagcactgcagaaaaagcagtcacctctattcgtgagtccccaagccatagcagggcgtctgtaaaagaagggaaactgcacccaggaagtggtgggcgtcagacgcatcctttcgcccgtagttcatgaaatagttccggctttggtcttccagaaaatctcaacttcaccgtgcacaagtgttaccgggtctttttagtgtagccatggaagatactttcaaaaggacatcttcagatcataagtcttaggaccaaaggtgtttttaatgagataatctttttgattttctaacaagaaaggaaatattcactttacattttaacatcaacttttaagtgatattcagaattaattgaccatggtgatacgttgtaaaatgttttcatattaagaatgtaattatttccttattgtattttttaaaagctaaagtcatatttaaaattctctttgaaagaaacaggcaaagaaacagcaaagatttttttaaattaaatatgttagtagtgcccacttcaaatgactgtaaatatattttcactgtttctcaatgtatttaattcataaagtaaaaattttatgaaaagaaacttgcaaggaaaatcctagttttcagtccactcgccccactttgtagtagcttcactgaatttcctgctttcctggttgaattttctactgtttcacgtggtgtaaccctagactggcgcccttggcgtgcccctttgtgtatgaataaacttctctccccc

SEQ ID NO: 289613 - DNA, 5757 bp, Homo sapiens
  misc_feature (15)..(15): n is a, c, g, or t
acaggctggtaccgnccgggatgtaatggatctggagaagaaactgtcttcagagagacccagctcagatggggagggtgttgtggaaaatggaattaccacatgtaatggaaaggagcaagtgaagaggaagaaaagttccaaatcagaggccaagggcactgtgtcgaaagtcactgggaaaaaaatcaccaagatcatcagtctgggaaagaaaaagccgtccacagacgagcagacctcctcagctgaggaagatgttcccacctgcggctatctgaacgtgctctccaacagccgctggcgagagcgctggtgccgagtgaaagataacaagctcattttccacaaggacaggaccgacctgaagacccatattgtgtctattccgctccgtggctgcgaggtgatcccgggtttggattctaaacatcctctgacgttccggctgctgcgcaacggccaggaggttgcagtattggaggcatcttcttctgaagacatgggcaggtggattgggattttactcgcagagacgggatcgtccacagacccggaggctctgcactatgactacattgatgtggagatgtctgcaagtgtcattcagacagccaaacagaccttctgtttcatgaacaggcgtgttatatctgctaacccatatctagggggcacctccaacggctatgcccaccccagcgggacggcacttcattatgacgatgtcccgtgcatcaacggctcgctcaagggtaaaaagccccccgtggcgtctaatggggtcacaggaaaagggaagactctgagcagtcagccaaagaaagcggatcccgcggctgttgtgaaaaggacgggttcgaatgctgcccagtacaagtatggcaagaaccgggtagaagcagatgccaagcggctacagaccaaagaggaggagctgctgaagaggaaagaggccctgcggaataggctggcccagctccgcaaggaaagaaaagaccttcgagcggctattgaagtgaacgccggtatgaagggtgtgggtgactgcccagggtgcatgtttgtattagagactggagatttcattctgctttgcccaaaggacctattgctcaccaaggctgtcattttatttagtaagagtgggttatctcacagtgtttcttggggcttggaaacattgctggtaaccccgaggcaggtgcctgtgtggtcaaacatgcggcgtgcaggcagaggccagggccagacccacacgctgctcaccgaggcaggggaggtgctgggggacctgttccggcttctggcgctgacaacagagattgtctggaggatggcccctgtatccgcaggacgcagtagattctggtcaccgggtaggagggatcagctggatttctctacagagggtagcccacaggggtcagtaatattcagaagtccagacaagggtagaagcagcccctcgtttgttgagaagggacaggcgagagcaaggcagcatctgtcttgggatgcatcagggaagaggccaggctaatggaatacagacaccagagagggactgaagtcacagaaactgagtttgcagccagagtggcagccctgggccaggcgcgtgcaattcctgctggcgggagctggcgctcagctcctgagcctggggtggcaccgcttacctacgcatggcctcccttccagcccggtgcttagactacggaagactgctccttagattgagattgtactggcctgggctgggacgggggcttcagatgcctcagagccctgggcggtccagagaagaggctgtggccttcccatggctcgccgcgcggggaggagctgacgcacacccagcaggtggttaccagctccagccttgctggactttgtgcctcaatgatctgatgaagggaaatgcttttggagtttagaggagggaaggcaggtgttggcagggcaggtcaggctgaccctataggaggcccaggatgtggcctgcagtctgaggctgaccctacgggaggaggctgtgccagagaatgggacggggcatggagtttaatgagacagaagtagcatttctcccgtgttcccagcttgcaggatagtgaagatgcaggagggccaggagtgcttttggctttgaaaaagagaacctcgcctgccggccaccaccggcccaggccctgggcacaagtccgttcacctcttgggattggtgttctcatctgcccagtgggtgcatcttaggtcactgcagcaaacctcaaataaaataagtgaatgtgccttaaagaaatgtgtgccatgtccagtagagatgcaagctgagctactgttcattgcctcgggcgcaaataagatgactgaaggatcggcggagcattaggggaggacagggttcacactccaagaaggtggcagctttgggaactgtggagtttagggtccacgttttaaaatgagaacattgaggcccagagccaggagctcctggccttcgtcagaatcagcatctcctctttcctggtccgagtcctcaacggctgcagcaaagggaaatggtaggagaaggactctgatcccttagagaactgctgaatttaagtttcacaacgaggacctaagtcaggggagctcgacctcagacgttttgtggaagttcttcttggggaccaggtgccttctctgttgtttggagaacctgtgcctgccgcgggagtaacggcgtttctgggaattccaggcaggaagccgcaggcgatcctggaggagaagctgaagcagctggaggaggagtgccggcagaaggaggcggagcgtgtcagcctggagctggagctgacggaggtcaaggagagcctgaagaaagcgctggcgggcggagtcaccctggggctggccatcgagcccaagtcagggacatcgagtccacagtctccagtgttccggcaccggaccctggaaaactcgcccatctccagctgtgacaccagtgacaccgagggccccgtgccggtgaacagcgcggccgtcttgaagaagagccaggctgccccgggcagctccccctgccgagggcatgtgctgcggaaggccaaggaatgggaattgaagaacgggacctaggggacagcagcaccactccagcctcagagactgcacacccccttgcctgtatcctcatctgtgtgacggcaggaagctctgcccagagtggcctcagctgcacgactccagaggctccacgactgagctctgaggccagtgcctgtcccccaggcccacttgtattctttctactgtaaaatggcgcctttaaaaaagatgtaagactttggttcccaactttgttaaaaaacaaaaaaagtgatggaaaggtgtttgaaaggatgctatcaggcgaagtgacatctttctaaccagataggccattgctttcaccgattccaacccagccctggactgaggatggatggttccatgagcccccagatgaaaacctggattcgacagggaagagcttggatccccggctgccccgggcatgagtgtggctggccatgggcactgggctcgccttgcacgcccaccaggagggccaggggcatacgcagtcctgacgtggactttgtgtcttggcgtaccctctccacgtgcccgtccccctcgtcatcagaggtaaaggcatgagaaaatcgcgctgtgaaacgttttttaccttttattattattttttggacagatgcttttgtcaccaagacatgaaaagctgccattcttcttaacctgttttttaagaatgtctttttactgtgtgtcacacttagatcaaggagttttcagaggttccttattttattaattaattatttgtgctgcttttgacaggtagcagagggttttaatacttcactaacagtacaccctcctcccccttgggctagcatccccagcccttaatccacgtcggagccggcaggtgcttctcacaccaggagcctctgggggcaggggctggctcctcgccgctgtacaggacgtttactgctgcttggggccagggcagtcctttgaaagggaagcaagttccggaatttgttccctcatggaactataacaccttagagcaagaggcaggaattccagggcctcctgcccctccccttcctccagcttgtcaagttaaaccactaatgtgttggtgggcctggccgtgctgcctctcctgagtagggtgggtgcaagtagggcctctttcccagctttcttgcttgccttctgtgcaatatttcttggagaatttggatgcctaaggcataaaggaaaaaaacagagttcatagtttgagctggtatttaccccctgggtttaaaaatcagattaacttcttggtctcccggaggctgctgtcaggaattctccagtacgggaagatgcagtcacttatgacgaaataagtcacccctgaacgcctccgcaggcagattcatggagaccagtcccagtagcaaccgccccttccccaagcatagaatacagaggtgccatacttggtgtaagccttccttctgtccactgtccagaatgtcctttttcacacagaggaagagatggcgggaaaacactgactgactccttgggtttcccccagacatactttcagagcgctagctgtgtggtgcacgggactttacagttaggattcatgtttaaggtggtggcgcttgaggcctgcaagggccacgttggattactgaagcggaaagcggtctcccatgtataagaaaaagttttacaacacgaattggaagctgcttgagtccacctgaacttgaattgattgcaaagccatctgccgggaacggttttgggttcctgagccatcagccagcctttctttcccctctgatgcacgttcctcccggcctagtccgtggaggcccatcacaccagcatccgtgacgccagcttcccactaggacatccaggcaggtcgggcggggacgccacacgcctcagggccgtccgctgcactgccatagaggagccctccctccagtggtcacttcccaccattgcaggcagacttcccaccattgcaggcagctgggcccacttcatatcacacaaaatgaattttctataaagggaaaaaagtttgctcctccatagatttttgctgccttcgggtcaaatagtttccctggttgacgctcttgggccactctgattggcagcctgctttgccaaagagaactgtgtgaggttttggtggttagtaagagaagggggagatggccagcctgaagtcacggtcctggcccagcacaggtgggcagcagcgagctggcaggtgaagtgtgagcagcacgcaaagtgtcacgtgggccttagccgtcacccaccagcttcctcaccaggcaaggaggccccggagccttagcagggacttgcccgacggcacagctgattggtgctcgactcccagcatgcatattttgttgtaaaaacccaggtttgtaattcacatccacaaccctaagccttttaaagcggaggcaaacgttaacgaaccccatcgtggtccatggagcctttcaaaatgggtgccctggaggggcctgacagtgggttccttccatggcggatactcccttgaaatttcacattccatcaaagtttaaagcatttacttcagaataagttatttatgtgtatatgttcaataaatatagtttttaattt

SEQ ID NO: 289614 - DNA, 3608 bp, Homo sapiens
  misc_feature (15)..(15): n is a, c, g, or t
acaggctggtaccgnccgggatgtaatggatctggagaagaaactgtcttcagagagacccagctcagatggggagggtgttgtggaaaatggaattaccacatgtaatggaaaggagcaagtgaagaggaagaaaagttccaaatcagaggccaagggcactgtgtcgaaagtcactgggaaaaaaatcaccaagatcatcagtctgggaaagaaaaagccgtccacagacgagcagacctcctcagctgaggaagatgttcccacctgcggctatctgaacgtgctctccaacagccgctggcgagagcgctggtgccgagtgaaagataacaagctcattttccacaaggacaggaccgacctgaagacccatattgtgtctattccgctccgtggctgcgaggtgatcccgggtttggattctaaacatcctctgacgttccggctgctgcgcaacggccaggaggttgcagtattggaggcatcttcttctgaagacatgggcaggtggattgggattttactcgcagagacgggatcgtccacagacccggaggctctgcactatgactacattgatgtggagatgtctgcaagtgtcattcagacagccaaacagaccttctgtttcatgaacaggcgtgttatatctgctaacccatatctagggggcacctccaacggctatgcccaccccagcgggacggcacttcattatgacgatgtcccgtgcatcaacggctcgctcaagggtaaaaagccccccgtggcgtctaatggggtcacaggaaaagggaagactctgagcagtcagccaaagaaagcggatcccgcggctgttgtgaaaaggacgggttcgaatgctgcccagtacaagtatggcaagaaccgggtagaagcagatgccaagcggctacagaccaaagaggaggagctgctgaagaggaaagaggccctgcggaataggctggcccagctccgcaaggaaagaaaagaccttcgagcggctattgaagtgaacgccggtatgaagggtgtgggtgactgcccagggtgcatgtttgtattagagactggagatttcattctgctttgcccaaaggacctattgctcaccaaggctgtcattttatttagtaagagtgggttatctcacagtgtttcttggggcttggaaacattgctggtaaccccgaggcaggtgcctgtgtggtcaaacatgcggcgtgcaggcagaggccagggccagacccacacgctgctcaccgaggcaggggaggtgctgggggacctgttccggcttctggcgctgacaacagagattgtctggaggatggcccctgtatccgcaggacgcagtagattctggtcaccgggtaggagggatcagctggatttctctacagagggtagcccacaggggtcagtaatattcagaagtccagacaagggtagaagcagcccctcgtttgttgagaagggacaggcgagagcaaggcagcatctgtcttgggatgcatcagggaagaggccaggctaatggaatacagacaccagagagggactgaagtcacagaaactgagtttgcagccagagtggcagccctgggccaggcgcgtgcaattcctgctggcgggagctggcgctcagctcctgagcctggggtggcaccgcttacctacgcatggcctcccttccagcccggtgcttagactacggaagactgctccttagattgagattgtactggcctgggctgggacgggggcttcagatgcctcagagccctgggcggtccagagaagaggctgtggccttcccatggctcgccgcgcggggaggagctgacgcacacccagcaggtggttaccagctccagccttgctggactttgtgcctcaatgatctgatgaagggaaatgcttttggagtttagaggagggaaggcaggtgttggcagggcaggtcaggctgaccctataggaggcccaggatgtggcctgcagtctgaggctgaccctacgggaggaggctgtgccagagaatgggacggggcatggagtttaatgagacagaagtagcatttctcccgtgttcccagcttgcaggatagtgaagatgcaggagggccaggagtgcttttggctttgaaaaagagaacctcgcctgccggccaccaccggcccaggccctgggcacaagtccgttcacctcttgggattggtgttctcatctgcccagtgggtgcatcttaggtcactgcagcaaacctcaaataaaataagtgaatgtgccttaaagaaatgtgtgccatgtccagtagagatgcaagctgagctactgttcattgcctcgggcgcaaataagatgactgaaggatcggcggagcattaggggaggacagggttcacactccaagaaggtggcagctttgggaactgtggagtttagggtccacgttttaaaatgagaacattgaggcccagagccaggagctcctggccttcgtcagaatcagcatctcctctttcctggtccgagtcctcaacggctgcagcaaagggaaatggtaggagaaggactctgatcccttagagaactgctgaatttaagtttcacaacgaggacctaagtcaggggagctcgacctcagacgttttgtggaagttcttcttggggaccaggtgccttctctgttgtttggagaacctgtgcctgccgcgggagtaacggcgtttctgggaattccaggcaggaagccgcaggcgatcctggaggagaagctgaagcagctggaggaggagtgccggcagaaggaggcggagcgtgtcagcctggagctggagctgacggaggtcaaggagagcctgaagaaagcgctggcgggcggagtcaccctggggctggccatcgagcccaagtcagggacatcgagtccacaggtgtgtgtccttctggctcacctcggaggctggcgcggccttgcgtggccgagggccagtgcacccagagagaatgtggagtggctctggggcgtagcttgcttgtggccccttagtgtgcccagcagaagacagttcatgtgttagcatcagacactttcatcggccgggcctgtgttcctgacatgctttctcacctctcgctgaaatgttaaaagctgtggaaatgctgagtctgtgtctttcccctttgcacaatctgtttagaacagatccagtcctcgtgtctcttctgaaccaggtcatgatttgatgccagttcagtagagccggtgcttacaaaccgtctaacatgtctgagagttaagccaggtgctggggaaactgaaatgaatgaagcagtctgtgtcctcttagaatcaaacagaacaaagtggggtcctcttcccatgtgagtcatccctgtccctggttcctcttcactcattcggctgagactgctgagaacttagacgtcttctccacttggtcattctgttgagtctcctgtcttgtgagttggatgccgtcactccattgagcgagggaggcactgggcccagagcagtaaacacgcagttgcacatggctggggaggcctcagaatcatggcgggaggcgaa

SEQ ID NO: 289615 - DNA, 447 bp, Homo sapiens
  misc_feature (15)..(15): n is a, c, g, or t
acaggctggtaccgnccgggatgtaatggatctggagaagaaactgtcttcagagagacccagctcagatggggagggtgttgtggaaaatggaattaccacatgtaatggaaaggagcaagtgaagaggaagaaaagttccaaatcagaggccaagggcactgtgtcgaaagtcactgggaaaaaaatcaccaagatcatcagtctgggaaagaaaaagccgtccacagacgagcagacctcctcagctgaggaagatgttcccacctgcggtaagactgcgcttcccggagacgagcagcgtgcacctaagtgggtttcattttctcctgcagtggtgtcggtacccagttcatccaaggctcgttaatttgagctcttttgcattggacttggaatcattcagatagtgggaaatgtattaaatgtttacatttttgcctctta

SEQ ID NO: 289616 - DNA, 8189 bp, Homo sapiens
  misc_feature (15)..(15): n is a, c, g, or t
acaggctggtaccgnccgggatgtaatggatctggagaagaaactgtcttcagagagacccagctcagatggggagggtgttgtggaaaatggaattaccacatgtaatggaaaggagcaagtgaagaggaagaaaagttccaaatcagaggccaagggcactgtgtcgaaagtcactgggaaaaaaatcaccaagatcatcagtctgggaaagaaaaagccgtccacagacgagcagacctcctcagctgaggaagatgttcccacctgcggctatctgaacgtgctctccaacagccgctggcgagagcgctggtgccgagtgaaagataacaagctcattttccacaaggacaggaccgacctgaagacccatattgtgtctattccgctccgtggctgcgaggtgatcccgggtttggattctaaacatcctctgacgttccggctgctgcgcaacggccaggaggttgcagtattggaggcatcttcttctgaagacatgggcaggtggattgggattttactcgcagagacgggatcgtccacagacccggaggctctgcactatgactacattgatgtggagatgtctgcaagtgtcattcagacagccaaacagaccttctgtttcatgaacaggcgtgttatatctgctaacccatatctagggggcacctccaacggctatgcccaccccagcgggacggcacttcattatgacgatgtcccgtgcatcaacggctcgctcaagggtaaaaagccccccgtggcgtctaatggggtcacaggaaaagggaagactctgagcagtcagccaaagaaagcggatcccgcggctgttgtgaaaaggacgggttcgaatgctgcccagtacaagtatggcaagaaccgggtagaagcagatgccaagcggctacagaccaaagaggaggagctgctgaagaggaaagaggccctgcggaataggctggcccagctccgcaaggaaagaaaagaccttcgagcggctattgaagtgaacgccggtatgaagggtgtgggtgactgcccagggtgcatgtttgtattagagactggagatttcattctgctttgcccaaaggacctattgctcaccaaggctgtcattttatttagtaagagtgggttatctcacagtgtttcttggggcttggaaacattgctggtaaccccgaggcaggtgcctgtgtggtcaaacatgcggcgtgcaggcagaggccagggccagacccacacgctgctcaccgaggcaggggaggtgctgggggacctgttccggcttctggcgctgacaacagagattgtctggaggatggcccctgtatccgcaggacgcagtagattctggtcaccgggtaggagggatcagctggatttctctacagagggtagcccacaggggtcagtaatattcagaagtccagacaagggtagaagcagcccctcgtttgttgagaagggacaggcgagagcaaggcagcatctgtcttgggatgcatcagggaagaggccaggctaatggaatacagacaccagagagggactgaagtcacagaaactgagtttgcagccagagtggcagccctgggccaggcgcgtgcaattcctgctggcgggagctggcgctcagctcctgagcctggggtggcaccgcttacctacgcatggcctcccttccagcccggtgcttagactacggaagactgctccttagattgagattgtactggcctgggctgggacgggggcttcagatgcctcagagccctgggcggtccagagaagaggctgtggccttcccatggctcgccgcgcggggaggagctgacgcacacccagcaggtggttaccagctccagccttgctggactttgtgcctcaatgatctgatgaagggaaatgcttttggagtttagaggagggaaggcaggtgttggcagggcaggtcaggctgaccctataggaggcccaggatgtggcctgcagtctgaggctgaccctacgggaggaggctgtgccagagaatgggacggggcatggagtttaatgagacagaagtagcatttctcccgtgttcccagcttgcaggatagtgaagatgcaggagggccaggagtgcttttggctttgaaaaagagaacctcgcctgccggccaccaccggcccaggccctgggcacaagtccgttcacctcttgggattggtgttctcatctgcccagtgggtgcatcttaggtcactgcagcaaacctcaaataaaataagtgaatgtgccttaaagaaatgtgtgccatgtccagtagagatgcaagctgagctactgttcattgcctcgggcgcaaataagatgactgaaggatcggcggagcattaggggaggacagggttcacactccaagaaggtggcagctttgggaactgtggagtttagggtccacgttttaaaatgagaacattgaggcccagagccaggagctcctggccttcgtcagaatcagcatctcctctttcctggtccgagtcctcaacggctgcagcaaagggaaatggtaggagaaggactctgatcccttagagaactgctgaatttaagtttcacaacgaggacctaagtcaggggagctcgacctcagacgttttgtggaagttcttcttggggaccaggtgccttctctgttgtttggagaacctgtgcctgccgcgggagtaacggcgtttctgggaattccaggcaggaagccgcaggcgatcctggaggagaagctgaagcagctggaggaggagtgccggcagaaggaggcggagcgtgtcagcctggagctggagctgacggaggtcaaggagagcctgaagaaagcgctggcgggcggagtcaccctggggctggccatcgagcccaagtcagggacatcgagtccacagtctccagtgttccggcaccggaccctggaaaactcgcccatctccagctgtgacaccagtgacaccgagggccccgtgccggtgaacagcgcggccgtcttgaagaagagccaggctgccccgggcagctccccctgccgagggcatgtgctgcggaaggccaaggaatgggaattgaagaacgggacctaggggacagcagcaccactccagcctcagagactgcacacccccttgcctgtatcctcatctgtgtgacggcaggaagctctgcccagagtggcctcagctgcacgactccagaggctccacgactgagctctgaggccagtgcctgtcccccaggcccacttgtattctttctactgtaaaatggcgcctttaaaaaagatgtaagactttggttcccaactttgttaaaaaacaaaaaaagtgatggaaaggtgtttgaaaggatgctatcaggcgaagtgacatctttctaaccagataggccattgctttcaccgattccaacccagccctggactgaggatggatggttccatgagcccccagatgaaaacctggattcgacagggaagagcttggatccccggctgccccgggcatgagtgtggctggccatgggcactgggctcgccttgcacgcccaccaggagggccaggggcatacgcagtcctgacgtggactttgtgtcttggcgtaccctctccacgtgcccgtccccctcgtcatcagaggtaaaggcatgagaaaatcgcgctgtgaaacgttttttaccttttattattattttttggacagatgcttttgtcaccaagacatgaaaagctgccattcttcttaacctgttttttaagaatgtctttttactgtgtgtcacacttagatcaaggagttttcagaggttccttattttattaattaattatttgtgctgcttttgacaggtagcagagggttttaatacttcactaacagtacaccctcctcccccttgggctagcatccccagcccttaatccacgtcggagccggcaggtgcttctcacaccaggagcctctgggggcaggggctggctcctcgccgctgtacaggacgtttactgctgcttggggccagggcagtcctttgaaagggaagcaagttccggaatttgttccctcatggaactataacaccttagagcaagaggcaggaattccagggcctcctgcccctccccttcctccagcttgtcaagttaaaccactaatgtgttggtgggcctggccgtgctgcctctcctgagtagggtgggtgcaagtagggcctctttcccagctttcttgcttgccttctgtgcaatatttcttggagaatttggatgcctaaggcataaaggaaaaaaacagagttcatagtttgagctggtatttaccccctgggtttaaaaatcagattaacttcttggtctcccggaggctgctgtcaggaattctccagtacgggaagatgcagtcacttatgacgaaataagtcacccctgaacgcctccgcaggcagattcatggagaccagtcccagtagcaaccgccccttccccaagcatagaatacagaggtgccatacttggtgtaagccttccttctgtccactgtccagaatgtcctttttcacacagaggaagagatggcgggaaaacactgactgactccttgggtttcccccagacatactttcagagcgctagctgtgtggtgcacgggactttacagttaggattcatgtttaaggtggtggcgcttgaggcctgcaagggccacgttggattactgaagcggaaagcggtctcccatgtataagaaaaagttttacaacacgaattggaagctgcttgagtccacctgaacttgaattgattgcaaagccatctgccgggaacggttttgggttcctgagccatcagccagcctttctttcccctctgatgcacgttcctcccggcctagtccgtggaggcccatcacaccagcatccgtgacgccagcttcccactaggacatccaggcaggtcgggcggggacgccacacgcctcagggccgtccgctgcactgccatagaggagccctccctccagtggtcacttcccaccattgcaggcagacttcccaccattgcaggcagctgggcccacttcatatcacacaaaatgaattttctataaagggaaaaaagtttgctcctccatagatttttgctgccttcgggtcaaatagtttccctggttgacgctcttgggccactctgattggcagcctgctttgccaaagagaactgtgtgaggttttggtggttagtaagagaagggggagatggccagcctgaagtcacggtcctggcccagcacaggtgggcagcagcgagctggcaggtgaagtgtgagcagcacgcaaagtgtcacgtgggccttagccgtcacccaccagcttcctcaccaggcaaggaggccccggagccttagcagggacttgcccgacggcacagctgattggtgctcgactcccagcatgcatattttgttgtaaaaacccaggtttgtaattcacatccacaaccctaagccttttaaagcggaggcaaacgttaacgaaccccatcgtggtccatggagcctttcaaaatgggtgccctggaggggcctgacagtgggttccttccatggcggatactcccttgaaatttcacattccatcaaagtttaaagcatttacttcagaataagttatttatgtgtatatgttcaataaatatagtttttaatttatatctgtacatattagacacacgcgagccatcttgccagaattctgacagtgatgtcattttattcccctcccaaaacatgccccaggaacaagcaccccttgcctctgtggcagctgcgagtgtgtctgatttcataacgaagccaggctgagggcaagaggcccgacaggcaggccagggtccccggagaagccggatttcttcgcaatgtcactggtacttagcagatggtcgtgttcacaggggctagccacctgtactacggtgccgaccgcaatgcgaggaatgtggtggccacgcgatggagctggccggaggacaggtcaggtgagggggccgacccctgcggggctcagggctccttccattctaaccttgagccacagtgtcactcttcagggctctgctcctggctctattttgttaaggtgtcatcagccttcaacctccatttatatatttttataatgttaagccactgaccaactttttcatagaaacaactatcagatttgagggctccctttgtccccctgacctgggcacaggcatgggccatggctccctcttcccagaatctgcggggaactggggcaaggcccatctgtctgcaaggctggtagctctctccctcggcttccagagtccacggcagttgcaaggtaaccagtgtggatctgctgagtcaccccaggcaccagacttaccccaggagcatgggccactgtccatggggccttccttgagaccttcccttggggctggcgggcggcggcttaccagctgggtcagtcccatctcgcccctctgtgcctatgccctggcgttgccaggcttaaccttcccctgtatcttactcatcccagaattattactggccatttctaaatagacaaaaactaccctaaaatgtggagatttactccttttgaaaagtctgtttcaaaaagtgtggcctcagctctggaggccacccccaggaaggagtttgaggttcattgtcattatgggccacagtttggtgcttgtgcacgggactcaaagggcagcgtcgaagctggggttaggtgtagggttgtgagcaaagctcccctgtttgtggccacaccttccctttccaaaaaggctattaattctactcacccactatttggggggatgtaaattttgcccacagactttgccacccaggtgaggtgctgtgttcatgcacggaactgatgtcattagacaccatccaaggatgggcagcctgcagtgtggccggcgactgccatccagagaaaaggcaccttgtgccacagggcggggccgacaccctgagctcacaggtggcccctgcattcaggtggatgtccatccttgaaacagcctcttctgggaacacagcactggaggtctccaggcatcagggttggccggcagggtgccctgcagcttacataaaggtcgtggcaatgtttcaatgttaaactaaactattgccttcctcttacttttcctaaaatgattttctaatgggaacagtcacttcaagttcatgacatagtttgaaggaggataattcattttttcctggttgtcactgtcttcttatccccttggtgggctgggttcatactgtgaaataaactaaaatgaaaccaaaacgttcctgccgtaaatacgtggcacagcactgcagaaaaagcagtcacctctattcgtgagtccccaagccatagcagggcgtctgtaaaagaagggaaactgcacccaggaagtggtgggcgtcagacgcatcctttcgcccgtagttcatgaaatagttccggctttggtcttccagaaaatctcaacttcaccgtgcacaagtgttaccgggtctttttagtgtagccatggaagatactttcaaaaggacatcttcagatcataagtcttaggaccaaaggtgtttttaatgagataatctttttgattttctaacaagaaaggaaatattcactttacattttaacatcaacttttaagtgatattcagaattaattgaccatggtgatacgttgtaaaatgttttcatattaagaatgtaattatttccttattgtattttttaaaagctaaagtcatatttaaaattctctttgaaagaaacaggcaaagaaacagcaaagatttttttaaattaaatatgttagtagtgcccacttcaaatgactgtaaatatattttcactgtttctcaatgtatttaattcataaagtaaaaattttatgaaaagaaacttgcaaggaaaatcctagttttcagtccactcgccccactttgtagtagcttcactgaatttcctgctttcctggttgaattttctactgtttcacgtggtgtaaccctagactggcgcccttggcgtgcccctttgtgtatgaataaacttctctccccc

SEQ ID NO: 289617 - DNA, 748 bp, Homo sapiens
gcccctcttgttttgctttgatctaagttctattagttatgagtagctttatctttaacccatctcgtttattttttgtatatacatctacatacattttatacattatattcatatatacatatatacaaatgtatatatgtttaaagccacgctataagaggaagtaaatgagaaacagacaaatgaagtggtagctggaggacgtgggaatcagtacaggttttcacgcctgtttcagaaatgggagattctacagcacgctcgacactaacacatcacatccataacatatcacatccaatagacaggacagccaaaaacacaaaacaaaaaaagaatcaaatacccacacccagacacaatactcaacaacacaaatacccgaccaaagtctttaagaaagcaaaagaggctgggcacagtggctcacacctgtaatcccagcactctaggaggccaaggtgggtggaccacttgaggtcaggagttcgagaccagcctggccaacatggcaaaacctcgtctctactgaaaatataaaaattagccaggcatggtggcacacgcctgtaatcccagcagtttgggaggctgaggcaggaggctcatttaaggtcaggagttcgagaccagcccgggcaacatggcaaaaccccgtctctactaaaaatacaaaaagttagccaggtgtggtggtgcacgcctgtagtccaagctactcgggaggctgaggcaggagagttac

SEQ ID NO: 289618 - DNA, 1367 bp, Homo sapiens
tctccccgcaacccctctggcctccaatcagggccctgctccgcggctggcgctcacccgcaacttcagttcccgtaacggttcctcccgccacccggccgctcctgcggatacctcaagccactagaactttcttccacttccgcttccgggtcgcttcaagagccgcctttaaaaaagaaacattccacgtcgggcacttctagccagttagagctatagagttgaggcgccccggacctcgacggcgtccttagtaggcgctcctttccggtccttcgcagggaagcccatgccattcataagagttctcgcgtatctcgacgacaagattcctgacgggaagaataagggccatccagggaagagtgacttcctttctctgctgcccggacccggaactcaaggacttaggcttgacggacctggcgtggggaagagttagaagacggacaagggaggggacgggaggcctccgagacagcgccggaagtacggttttcggagggatcagactcagactcacgtcgcactcctcgcagttggactggtgggaactgggaacactggagacctgatttctaactgacgctaccgtcgcggccgccgaacagtcctgggttctgagcctgccatccaaggaactcaggaggaggagttgacagtctcttcgttcctaaccagtgtgggacgacttcagcatgtctcaggccaccaagaggaagcatgtggtgaaggaggtgctaggggagcacatagtgccctccgaccagcagcagattgtcagggtactcaggaccccagggaacaatctgcatgaggtggagacagcccaagggcagcgcttcctggtgagcatgccctccaaataccgcaagaacatctggatcaagagaggggactttctcattgttgaccccattgaagagggagaaaaggtgaaggctgaaatctcgtttgtgctctgcaaggaccacgtgcgctctctgcagaaggaggggttttggcctgaggccttctctgaagtggctgagaaacacaacaacaggaacagacaaactcaaccagaactcccagctgagccacagttatcaggagaggagtccagctcagaagatgattctgacctgtttgttaacacaaaccgcagacagtatcatgagagtgaggaggagagtgaagaggaggaggcagcctgagactccaggacccaattctccacttgctcagggactggcccctggctcttctgggcttggacattcccagggtgctctgcacatcttcacccctgcatgaggacaaagcagggctcctctctgaactgatcttttgattcagagaattaaacccctggtgggttggtg

SEQ ID NO: 289619 - DNA, 2376 bp, Homo sapiens
tctccccgcaacccctctggcctccaatcagggccctgctccgcggctggcgctcacccgcaacttcagttcccgtaacggttcctcccgccacccggccgctcctgcggatacctcaagccactagaactttcttccacttccgcttccgggtcgcttcaagagccgcctttaaaaaagaaacattccacgtcgggcacttctagccagttagagctatagagttgaggcgccccggacctcgacggcgtccttagtaggcgctcctttccggtccttcgcagggaagcccatgccattcataagagttctcgcgtatctcgacgacaagattcctgacgggaagaataagggccatccagggaagagtgacttcctttctctgctgcccggacccggaactcaaggacttaggcttgacggacctggcgtggggaagagttagaagacggacaagggaggggacgggaggcctccgagacagcgccggaagtacggttttcggagggatcagactcagactcacgtcgcactcctcgcagttggactggtgggaactgggaacactggagacctgatttctaactgacgctaccgtcgcggccgccggcaagttcctttactgtgttttcttggttcagccttgaagtgagtcgtggacgatcctctctcagcgtccagcctagacggcggtgttgctccggcagcgttcctgggagccgagggccagagactaagtaacagtcctgggttctgagcctgccatccaaggaactcaggaggaggagttgacagtctcttcgttcctaaccagtgtgggacgacttcagcatgtctcaggccaccaagaggaagcatgtggtgaaggaggtgctaggggagcacatagtgccctccgaccagcagcagattgtcagggtactcaggaccccagggaacaatctgcatgaggtggagacagcccaagggcagcgcttcctggtgagcatgccctccaaataccgcaagaacatctggatcaagagaggggactttctcattgttgaccccattgaagagggagaaaaggtgaaggctgaaatctcgtttgtgctctgcaaggaccacgtgcgctctctgcagaaggaggggttttggcctgaggccttctctgaagtggctgagaaacacaacaacaggaacagacaaactcaaccagaactcccagctgagccacagttatcaggagaggagtccagctcagaagatgattctgacctgtttgttaacacaaaccgcagacagtatcatgagagtgaggaggagagtgaagaggaggaggcagcctgagactccaggacccaattctccacttgctcagggactggcccctggctcttctgggcttggacattcccagggtgctctgcacatcttcacccctgcatgaggacaaagcagggctcctctctgaactgatcttttgattcagagaattaaacccctggtgggttggtgacttgttctggtgtctgagtggctctctcgggggagggagattgtgatgaagtgaaaaactgctccctatttattagagaccttgtgggtgggtgggctgaatggggaggaaatgggaaatggctggagtctttcccaggtggtttgttctttcttattgggcacttagaaagtgccaggccgtgctctgggccttcttgcatgtgtttaacagctgggagcactcctgcttccttgcctgcttgcagttcataccaatttaagcattcaggatgacagccctaggacctaacacccacctgcctctaagagacgctcaggagcccatggtgcctcgtgctgttctccccacctttctagtcaccctgtgtacgggagtgctcacctccagctactgtgtccatccccacatacgacctcatctctcccactctgcaccatctatcacttccagaaggtggctggcaaatctctctatccttaactttgttttgaatggtccatccatctcctgactttatttgaaacctgattattccctgaggacattgattgtcttataaccttttaaatagaggctgcttttccaccctcacccttcattcttctaaccagccctgacattctcatgagtaaccttctgccttcacttccctcttgtgtagcatcaattccgtagtccaccctacacccctctgtctccctccattctgttccgctagtaaaaccctaaccctgggtaaacccaatcattcacctctgtgcccaaacccaagtcaccatcattaggtgagaaaacagccagcctggccaccagttgtaccttacgtttatcattacaaacctcagatgactggcttggctgttttgaatcctgta

SEQ ID NO: 289620 - DNA, 1826 bp, Homo sapiens
ttgtgtcttgaggatcccaatcacaatgttgtggagacagcgccggaagtacggttttcggagggatcagactcagactcacgtcgcactcctcgcagttggactggtgggaactgggaacactggagacctgatttctaactgacgctaccgtcgcggccgccgtaaaaggcccctccccatcttcagaacagtcctgggttctgagcctgccatccaaggaactcaggaggaggagttgacagtctcttcgttcctaaccagtgtgggacgacttcagcatgtctcaggccaccaagaggaagcatgtggtgaaggaggtgctaggggagcacatagtgccctccgaccagcagcagattgtcagggtactcaggaccccagggaacaatctgcatgaggtggagacagcccaagggcagcgcttcctggtgagcatgccctccaaataccgcaagaacatctggatcaagagaggggactttctcattgttgaccccattgaagagggagaaaaggtgaaggctgaaatctcgtttgtgctctgcaaggaccacgtgcgctctctgcagaaggaggggttttggcctgaggccttctctgaagtggctgagaaacacaacaacaggaacagacaaactcaaccagaactcccagctgagccacagttatcaggagaggagtccagctcagaagatgattctgacctgtttgttaacacaaaccgcagacagtatcatgagagtgaggaggagagtgaagaggaggaggcagcctgagactccaggacccaattctccacttgctcagggactggcccctggctcttctgggcttggacattcccagggtgctctgcacatcttcacccctgcatgaggacaaagcagggctcctctctgaactgatcttttgattcagagaattaaacccctggtgggttggtgacttgttctggtgtctgagtggctctctcgggggagggagattgtgatgaagtgaaaaactgctccctatttattagagaccttgtgggtgggtgggctgaatggggaggaaatgggaaatggctggagtctttcccaggtggtttgttctttcttattgggcacttagaaagtgccaggccgtgctctgggccttcttgcatgtgtttaacagctgggagcactcctgcttccttgcctgcttgcagttcataccaatttaagcattcaggatgacagccctaggacctaacacccacctgcctctaagagacgctcaggagcccatggtgcctcgtgctgttctccccacctttctagtcaccctgtgtacgggagtgctcacctccagctactgtgtccatccccacatacgacctcatctctcccactctgcaccatctatcacttccagaaggtggctggcaaatctctctatccttaactttgttttgaatggtccatccatctcctgactttatttgaaacctgattattccctgaggacattgattgtcttataaccttttaaatagaggctgcttttccaccctcacccttcattcttctaaccagccctgacattctcatgagtaaccttctgccttcacttccctcttgtgtagcatcaattccgtagtccaccctacacccctctgtctccctccattctgttccgctagtaaaaccctaaccctgggtaaacccaatcattcacctctgtgcccaaacccaagtcaccatcattaggtgagaaaacagccagcctggccaccagttgtaccttacgtttatcattacaaacctcagatgactggcttggctgttttgaatcctgta

SEQ ID NO: 289621 - DNA, 2301 bp, Homo sapiens
tctccccgcaacccctctggcctccaatcagggccctgctccgcggctggcgctcacccgcaacttcagttcccgtaacggttcctcccgccacccggccgctcctgcggatacctcaagccactagaactttcttccacttccgcttccgggtcgcttcaagagccgcctttaaaaaagaaacattccacgtcgggcacttctagccagttagagctatagagttgaggcgccccggacctcgacggcgtccttagtaggcgctcctttccggtccttcgcagggaagcccatgccattcataagagttctcgcgtatctcgacgacaagattcctgacgggaagaataagggccatccagggaagagtgacttcctttctctgctgcccggacccggaactcaaggacttaggcttgacggacctggcgtggggaagagttagaagacggacaagggaggggacgggaggcctccgagacagcgccggaagtacggttttcggagggatcagactcagactcacgtcgcactcctcgcagttggactggtgggaactgggaacactggagacctgatttctaactgacgctaccgtcgcggccgccggcaagttcctttactgtgttttcttggttcagccttgaagtgagtcgtggacgatcctctctcagcgtccagcctagacggcggtgttgctccggcagcgttcctgggagccgagggccagagactaagttgtgggacgacttcagcatgtctcaggccaccaagaggaagcatgtggtgaaggaggtgctaggggagcacatagtgccctccgaccagcagcagattgtcagggtactcaggaccccagggaacaatctgcatgaggtggagacagcccaagggcagcgcttcctggtgagcatgccctccaaataccgcaagaacatctggatcaagagaggggactttctcattgttgaccccattgaagagggagaaaaggtgaaggctgaaatctcgtttgtgctctgcaaggaccacgtgcgctctctgcagaaggaggggttttggcctgaggccttctctgaagtggctgagaaacacaacaacaggaacagacaaactcaaccagaactcccagctgagccacagttatcaggagaggagtccagctcagaagatgattctgacctgtttgttaacacaaaccgcagacagtatcatgagagtgaggaggagagtgaagaggaggaggcagcctgagactccaggacccaattctccacttgctcagggactggcccctggctcttctgggcttggacattcccagggtgctctgcacatcttcacccctgcatgaggacaaagcagggctcctctctgaactgatcttttgattcagagaattaaacccctggtgggttggtgacttgttctggtgtctgagtggctctctcgggggagggagattgtgatgaagtgaaaaactgctccctatttattagagaccttgtgggtgggtgggctgaatggggaggaaatgggaaatggctggagtctttcccaggtggtttgttctttcttattgggcacttagaaagtgccaggccgtgctctgggccttcttgcatgtgtttaacagctgggagcactcctgcttccttgcctgcttgcagttcataccaatttaagcattcaggatgacagccctaggacctaacacccacctgcctctaagagacgctcaggagcccatggtgcctcgtgctgttctccccacctttctagtcaccctgtgtacgggagtgctcacctccagctactgtgtccatccccacatacgacctcatctctcccactctgcaccatctatcacttccagaaggtggctggcaaatctctctatccttaactttgttttgaatggtccatccatctcctgactttatttgaaacctgattattccctgaggacattgattgtcttataaccttttaaatagaggctgcttttccaccctcacccttcattcttctaaccagccctgacattctcatgagtaaccttctgccttcacttccctcttgtgtagcatcaattccgtagtccaccctacacccctctgtctccctccattctgttccgctagtaaaaccctaaccctgggtaaacccaatcattcacctctgtgcccaaacccaagtcaccatcattaggtgagaaaacagccagcctggccaccagttgtaccttacgtttatcattacaaacctcagatgactggcttggctgttttgaatcctgta

SEQ ID NO: 289622 - DNA, 2067 bp, Homo sapiens
tctccccgcaacccctctggcctccaatcagggccctgctccgcggctggcgctcacccgcaacttcagttcccgtaacggttcctcccgccacccggccgctcctgcggatacctcaagccactagaactttcttccacttccgcttccgggtcgcttcaagagccgcctttaaaaaagaaacattccacgtcgggcacttctagccagttagagctatagagttgaggcgccccggacctcgacggcgtccttagtaggcgctcctttccggtccttcgcagggaagcccatgccattcataagagttctcgcgtatctcgacgacaagattcctgacgggaagaataagggccatccagggaagagtgacttcctttctctgctgcccggacccggaactcaaggacttaggcttgacggacctggcgtggggaagagttagaagacggacaagggaggggacgggaggcctccgagacagcgccggaagtacggttttcggagggatcagactcagactcacgtcgcactcctcgcagttggactggtgggaactgggaacactggagacctgatttctaactgacgctaccgtcgcggccgccggtactcaggaccccagggaacaatctgcatgaggtggagacagcccaagggcagcgcttcctggtgagcatgccctccaaataccgcaagaacatctggatcaagagaggggactttctcattgttgaccccattgaagagggagaaaaggtgaaggctgaaatctcgtttgtgctctgcaaggaccacgtgcgctctctgcagaaggaggggttttggcctgaggccttctctgaagtggctgagaaacacaacaacaggaacagacaaactcaaccagaactcccagctgagccacagttatcaggagaggagtccagctcagaagatgattctgacctgtttgttaacacaaaccgcagacagtatcatgagagtgaggaggagagtgaagaggaggaggcagcctgagactccaggacccaattctccacttgctcagggactggcccctggctcttctgggcttggacattcccagggtgctctgcacatcttcacccctgcatgaggacaaagcagggctcctctctgaactgatcttttgattcagagaattaaacccctggtgggttggtgacttgttctggtgtctgagtggctctctcgggggagggagattgtgatgaagtgaaaaactgctccctatttattagagaccttgtgggtgggtgggctgaatggggaggaaatgggaaatggctggagtctttcccaggtggtttgttctttcttattgggcacttagaaagtgccaggccgtgctctgggccttcttgcatgtgtttaacagctgggagcactcctgcttccttgcctgcttgcagttcataccaatttaagcattcaggatgacagccctaggacctaacacccacctgcctctaagagacgctcaggagcccatggtgcctcgtgctgttctccccacctttctagtcaccctgtgtacgggagtgctcacctccagctactgtgtccatccccacatacgacctcatctctcccactctgcaccatctatcacttccagaaggtggctggcaaatctctctatccttaactttgttttgaatggtccatccatctcctgactttatttgaaacctgattattccctgaggacattgattgtcttataaccttttaaatagaggctgcttttccaccctcacccttcattcttctaaccagccctgacattctcatgagtaaccttctgccttcacttccctcttgtgtagcatcaattccgtagtccaccctacacccctctgtctccctccattctgttccgctagtaaaaccctaaccctgggtaaacccaatcattcacctctgtgcccaaacccaagtcaccatcattaggtgagaaaacagccagcctggccaccagttgtaccttacgtttatcattacaaacctcagatgactggcttggctgttttgaatcctgta

SEQ ID NO: 289623 - DNA, 2354 bp, Homo sapiens
tctccccgcaacccctctggcctccaatcagggccctgctccgcggctggcgctcacccgcaacttcagttcccgtaacggttcctcccgccacccggccgctcctgcggatacctcaagccactagaactttcttccacttccgcttccgggtcgcttcaagagccgcctttaaaaaagaaacattccacgtcgggcacttctagccagttagagctatagagttgaggcgccccggacctcgacggcgtccttagtaggcgctcctttccggtccttcgcagggaagcccatgccattcataagagttctcgcgtatctcgacgacaagattcctgacgggaagaataagggccatccagggaagagtgacttcctttctctgctgcccggacccggaactcaaggacttaggcttgacggacctggcgtggggaagagttagaagacggacaagggaggggacgggaggcctccgagacagcgccggaagtacggttttcggagggatcagactcagactcacgtcgcactcctcgcagttggactggtgggaactgggaacactggagacctgatttctaactgacgctaccgtcgcggccgccggcaagttcctttactgtgttttcttggttcagccttgaagtgagtcgtggacgatcctctctcagcgtccagcctagacggcggtgttgctccggcagcgttcctgggagccgagggccagagactaagttaaaaggcccctccccatcttcagaacagtcctgggttctgagcctgccatccaaggaactcaggaggaggagttgacagtctcttcgttcctaaccagtgtgggacgacttcagcatgtctcaggccaccaagaggaagcatgtggtgaaggaggtgctaggggagcacatagtgccctccgaccagcagcagattgtcagggtactcaggaccccagggaacaatctgcatgaggtggagacagcccaagggcagcgcttcctggggactttctcattgttgaccccattgaagagggagaaaaggtgaaggctgaaatctcgtttgtgctctgcaaggaccacgtgcgctctctgcagaaggaggggttttggcctgaggccttctctgaagtggctgagaaacacaacaacaggaacagacaaactcaaccagaactcccagctgagccacagttatcaggagaggagtccagctcagaagatgattctgacctgtttgttaacacaaaccgcagacagtatcatgagagtgaggaggagagtgaagaggaggaggcagcctgagactccaggacccaattctccacttgctcagggactggcccctggctcttctgggcttggacattcccagggtgctctgcacatcttcacccctgcatgaggacaaagcagggctcctctctgaactgatcttttgattcagagaattaaacccctggtgggttggtgacttgttctggtgtctgagtggctctctcgggggagggagattgtgatgaagtgaaaaactgctccctatttattagagaccttgtgggtgggtgggctgaatggggaggaaatgggaaatggctggagtctttcccaggtggtttgttctttcttattgggcacttagaaagtgccaggccgtgctctgggccttcttgcatgtgtttaacagctgggagcactcctgcttccttgcctgcttgcagttcataccaatttaagcattcaggatgacagccctaggacctaacacccacctgcctctaagagacgctcaggagcccatggtgcctcgtgctgttctccccacctttctagtcaccctgtgtacgggagtgctcacctccagctactgtgtccatccccacatacgacctcatctctcccactctgcaccatctatcacttccagaaggtggctggcaaatctctctatccttaactttgttttgaatggtccatccatctcctgactttatttgaaacctgattattccctgaggacattgattgtcttataaccttttaaatagaggctgcttttccaccctcacccttcattcttctaaccagccctgacattctcatgagtaaccttctgccttcacttccctcttgtgtagcatcaattccgtagtccaccctacacccctctgtctccctccattctgttccgctagtaaaaccctaaccctgggtaaacccaatcattcacctctgtgcccaaacccaagtcaccatcattaggtgagaaaacagccagcctggccaccagttgtaccttacgtttatcattacaaacctcagatgactggcttggctgttttgaatcctgta

SEQ ID NO: 289624 - DNA, 1504 bp, Homo sapiens
tctccccgcaacccctctggcctccaatcagggccctgctccgcggctggcgctcacccgcaacttcagttcccgtaacggttcctcccgccacccggccgctcctgcggatacctcaagccactagaactttcttccacttccgcttccgggtcgcttcaagagccgcctttaaaaaagaaacattccacgtcgggcacttctagccagttagagctatagagttgaggcgccccggacctcgacggcgtccttagtaggcgctcctttccggtccttcgcagggaagcccatgccattcataagagttctcgcgtatctcgacgacaagattcctgacgggaagaataagggccatccagggaagagtgacttcctttctctgctgcccggacccggaactcaaggacttaggcttgacggacctggcgtggggaagagttagaagacggacaagggaggggacgggaggcctccgagacagcgccggaagtacggttttcggagggatcagactcagactcacgtcgcactcctcgcagttggactggtgggaactgggaacactggagacctgatttctaactgacgctaccgtcgcggccgccggcaagttcctttactgtgttttcttggttcagccttgaagtgagtcgtggacgatcctctctcagcgtccagcctagacggcggtgttgctccggcagcgttcctgggagccgagggccagagactaagtaacagtcctgggttctgagcctgccatccaaggaactcaggaggaggagttgacagtctcttcgttcctaaccagtgtgggacgacttcagcatgtctcaggccaccaagaggaagcatgtggtgaaggaggtgctaggggagcacatagtgccctccgaccagcagcagattgtcagggtactcaggaccccagggaacaatctgcatgaggtggagacagcccaagggcagcgcttcctggtgagcatgccctccaaataccgcaagaacatctggatcaagagaggggactttctcattgttgaccccattgaagagggagaaaaggtgaaggctgaaatctcgtttgtgctctgcaaggaccacgtgcgctctctgcagaaggaggggttttggcctgaggccttctctgaagtggctgagaaacacaacaacaggaacagacaaactcaaccagaactcccagctgagccacagttatcaggagaggagtccagctcagaagatgattctgacctgtttgttaacacaaaccgcagacagtatcatgagagtgaggaggagagtgaagaggaggaggcagcctgagactccaggacccaattctccacttgctcagggactggcccctgattcttacggccaaggtcgttaccattggattgttggggtcttgccccatgcatgggatcataacaggtctattggtttgtgagttaaattatttaagataagtgtgcctgaggtgggtttgtcttttgta

SEQ ID NO: 289625 - DNA, 1010 bp, Homo sapiens
gcccctcttgttttgctttgatctaagttctattagttatgagtagctttatctttaacccatctcgtttattttttgtatatacatctacatacattttatacattatattcatatatacatatatacaaatgtatatatgtttaaagccacgctataagaggaagtaaatgagaaacagacaaatgaagtggtagctggaggacgtgggaatcagtacaggttttcacgcctgtttcagaaatgggaaatggctggagtctttcccaggtggtttgttctttcttattgggcacttagaaagtgccaggccgtgctctgggccttcttgcatgtgtttaacagctgggagcactcctgcttccttgcctgcttgcagttcataccaatttaagcattcaggatgacagccctaggacctaacacccacctgcctctaagagacgctcaggagcccatggtgcctcgtgctgttctccccacctttctagtcaccctgtgtacgggagtgctcacctccagctactgtgtccatccccacatacgacctcatctctcccactctgcaccatctatcacttccagaaggtggctggcaaatctctctatccttaactttgttttgaatggtccatccatctcctgactttatttgaaacctgattattccctgaggacattgattgtcttataaccttttaaatagaggctgcttttccaccctcacccttcattcttctaaccagccctgacattctcatgagtaaccttctgccttcacttccctcttgtgtagcatcaattccgtagtccaccctacacccctctgtctccctccattctgttccgctagtaaaaccctaaccctgggtaaacccaatcattcacctctgtgcccaaacccaagtcaccatcattaggtgagaaaacagccagcctggccaccagttgtaccttacgtttatcattacaaacctcagatgactggcttggctgttttgaatcctgta

SEQ ID NO: 289626 - DNA, 1197 bp, Homo sapiens
tctccccgcaacccctctggcctccaatcagggccctgctccgcggctggcgctcacccgcaacttcagttcccgtaacggttcctcccgccacccggccgctcctgcggatacctcaagccactagaactttcttccacttccgcttccgggtcgcttcaagagccgcctttaaaaaagaaacattccacgtcgggcacttctagccagttagagctatagagttgaggcgccccggacctcgacggcgtccttagtaggcgctcctttccggtccttcgcagggaagcccatgccattcataagagttctcgcgtatctcgacgacaagattcctgacgggaagaataagggccatccagggaagagtgacttcctttctctgctgcccggacccggaactcaaggacttaggcttgacggacctggcgtggggaagagttagaagacggacaagggaggggacgggaggcctccgagacagcgccggaagtacggttttcggagggatcagactcagactcacgtcgcactcctcgcagttggactggtgggaactgggaacactggagacctgatttctaactgacgctaccgtcgcggccgccggcaagttcctttactgtgttttcttggttcagccttgaagtgagtcgtggacgatcctctctcagcgtccagcctagacggcggtgttgctccggcagcgttcctgggagccgagggccagagactaagtaacagtcctgggttctgagcctgccatccaaggaactcaggaggaggagttgacagtctcttcgttcctaaccagtgtgggacgacttcagcatgtctcaggccaccaagaggaagcatgtggtgaaggaggtgctaggggagcacatagtgccctccgaccagcagcagattgtcagggtactcaggaccccagggaacaatctgcatgagtaaccttctgccttcacttccctcttgtgtagcatcaattccgtagtccaccctacacccctctgtctccctccattctgttccgctagtaaaaccctaaccctgggtaaacccaatcattcacctctgtgcccaaacccaagtcaccatcattaggtgagaaaacagccagcctggccaccagttgtaccttacgtttatcattacaaacctcagatgactggcttggctgttttgaatcctgta

SEQ ID NO: 289627 - DNA, 501 bp, Homo sapiens
ccccatccttatgggtcgcccactctagttcgcctcattacatcctggcccactctgcaccatctatcacttccagaaggtggctggcaaatctctctatccttaactttgttttgaatggtccatccatctcctgactttatttgaaacctgattattccctgaggacattgattgtcttataaccttttaaatagaggctgcttttccaccctcacccttcattcttctaaccagccctgacattctcatgagtaaccttctgccttcacttccctcttgtgtagcatcaattccgtagtccaccctacacccctctgtctccctccattctgttccgctagtaaaaccctaaccctgggtaaacccaatcattcacctctgtgcccaaacccaagtcaccatcattaggtgagaaaacagccagcctggccaccagttgtaccttacgtttatcattacaaacctcagatgactggcttggctgttttgaatcctgta

SEQ ID NO: 289628 - DNA, 396 bp, Homo sapiens
taagcaaccgaatggacacatcattttattgccgagatttgacgcctgattattccctgaggacattgattgtcttataaccttttaaatagaggctgcttttccaccctcacccttcattcttctaaccagccctgacattctcatgagtaaccttctgccttcacttccctcttgtgtagcatcaattccgtagtccaccctacacccctctgtctccctccattctgttccgctagtaaaaccctaaccctgggtaaacccaatcattcacctctgtgcccaaacccaagtcaccatcattaggtgagaaaacagccagcctggccaccagttgtaccttacgtttatcattacaaacctcagatgactggcttggctgttttgaatcctgta

SEQ ID NO: 289629 - DNA, 567 bp, Homo sapiens
acgtcgcactcctcgcagttggactggtgggaactgggaacactggagacctgatttctaactgacgctaccgtcgcggccgccggcaagttcctttactgtgttttcttggttcagccttgaagtgagtcgtggacgatcctctctcagcgtccagcctagacggcggtgttgctccggcagcgttcctgggagccgagggccagagactaagtgtgggtgtttctctgagggtcttttctccgggatagacagggaggaggaaggaggacagcaactagagacgacagtgtttctttcggaaaccatcagtcttaagggtactggccttcgtcttctaagtacgcaagtcagaaatatgcaaatgtcgcagacaagcctgctcacctcaacctttaattaactagttcctggcttgaaccatcacggtggccacctaatttgtctccggctgtagtgtgttgccagactgaacttctctgttgtgtgactatgctagacttggggtgtacaagcgtgttgagaaagatacggtttatttcaaactccttccagagaggttgccag

SEQ ID NO: 289630 - DNA, 2400 bp, Homo sapiens
tctccccgcaacccctctggcctccaatcagggccctgctccgcggctggcgctcacccgcaacttcagttcccgtaacggttcctcccgccacccggccgctcctgcggatacctcaagccactagaactttcttccacttccgcttccgggtcgcttcaagagccgcctttaaaaaagaaacattccacgtcgggcacttctagccagttagagctatagagttgaggcgccccggacctcgacggcgtccttagtaggcgctcctttccggtccttcgcagggaagcccatgccattcataagagttctcgcgtatctcgacgacaagattcctgacgggaagaataagggccatccagggaagagtgacttcctttctctgctgcccggacccggaactcaaggacttaggcttgacggacctggcgtggggaagagttagaagacggacaagggaggggacgggaggcctccgagacagcgccggaagtacggttttcggagggatcagactcagactcacgtcgcactcctcgcagttggactggtgggaactgggaacactggagacctgatttctaactgacgctaccgtcgcggccgccggcaagttcctttactgtgttttcttggttcagccttgaagtgagtcgtggacgatcctctctcagcgtccagcctagacggcggtgttgctccggcagcgttcctgggagccgagggccagagactaagttaaaaggcccctccccatcttcagaacagtcctgggttctgagcctgccatccaaggaactcaggaggaggagttgacagtctcttcgttcctaaccagtgtgggacgacttcagcatgtctcaggccaccaagaggaagcatgtggtgaaggaggtgctaggggagcacatagtgccctccgaccagcagcagattgtcagggtactcaggaccccagggaacaatctgcatgaggtggagacagcccaagggcagcgcttcctggtgagcatgccctccaaataccgcaagaacatctggatcaagagaggggactttctcattgttgaccccattgaagagggagaaaaggtgaaggctgaaatctcgtttgtgctctgcaaggaccacgtgcgctctctgcagaaggaggggttttggcctgaggccttctctgaagtggctgagaaacacaacaacaggaacagacaaactcaaccagaactcccagctgagccacagttatcaggagaggagtccagctcagaagatgattctgacctgtttgttaacacaaaccgcagacagtatcatgagagtgaggaggagagtgaagaggaggaggcagcctgagactccaggacccaattctccacttgctcagggactggcccctggctcttctgggcttggacattcccagggtgctctgcacatcttcacccctgcatgaggacaaagcagggctcctctctgaactgatcttttgattcagagaattaaacccctggtgggttggtgacttgttctggtgtctgagtggctctctcgggggagggagattgtgatgaagtgaaaaactgctccctatttattagagaccttgtgggtgggtgggctgaatggggaggaaatgggaaatggctggagtctttcccaggtggtttgttctttcttattgggcacttagaaagtgccaggccgtgctctgggccttcttgcatgtgtttaacagctgggagcactcctgcttccttgcctgcttgcagttcataccaatttaagcattcaggatgacagccctaggacctaacacccacctgcctctaagagacgctcaggagcccatggtgcctcgtgctgttctccccacctttctagtcaccctgtgtacgggagtgctcacctccagctactgtgtccatccccacatacgacctcatctctcccactctgcaccatctatcacttccagaaggtggctggcaaatctctctatccttaactttgttttgaatggtccatccatctcctgactttatttgaaacctgattattccctgaggacattgattgtcttataaccttttaaatagaggctgcttttccaccctcacccttcattcttctaaccagccctgacattctcatgagtaaccttctgccttcacttccctcttgtgtagcatcaattccgtagtccaccctacacccctctgtctccctccattctgttccgctagtaaaaccctaaccctgggtaaacccaatcattcacctctgtgcccaaacccaagtcaccatcattaggtgagaaaacagccagcctggccaccagttgtaccttacgtttatcattacaaacctcagatgactggcttggctgttttgaatcctgta

SEQ ID NO: 289631 - DNA, 2270 bp, Homo sapiens
tctccccgcaacccctctggcctccaatcagggccctgctccgcggctggcgctcacccgcaacttcagttcccgtaacggttcctcccgccacccggccgctcctgcggatacctcaagccactagaactttcttccacttccgcttccgggtcgcttcaagagccgcctttaaaaaagaaacattccacgtcgggcacttctagccagttagagctatagagttgaggcgccccggacctcgacggcgtccttagtaggcgctcctttccggtccttcgcagggaagcccatgccattcataagagttctcgcgtatctcgacgacaagattcctgacgggaagaataagggccatccagggaagagtgacttcctttctctgctgcccggacccggaactcaaggacttaggcttgacggacctggcgtggggaagagttagaagacggacaagggaggggacgggaggcctccgagacagcgccggaagtacggttttcggagggatcagactcagactcacgtcgcactcctcgcagttggactggtgggaactgggaacactggagacctgatttctaactgacgctaccgtcgcggccgccgtaaaaggcccctccccatcttcagaacagtcctgggttctgagcctgccatccaaggaactcaggaggaggagttgacagtctcttcgttcctaaccagtgtgggacgacttcagcatgtctcaggccaccaagaggaagcatgtggtgaaggaggtgctaggggagcacatagtgccctccgaccagcagcagattgtcagggtactcaggaccccagggaacaatctgcatgaggtggagacagcccaagggcagcgcttcctggtgagcatgccctccaaataccgcaagaacatctggatcaagagaggggactttctcattgttgaccccattgaagagggagaaaaggtgaaggctgaaatctcgtttgtgctctgcaaggaccacgtgcgctctctgcagaaggaggggttttggcctgaggccttctctgaagtggctgagaaacacaacaacaggaacagacaaactcaaccagaactcccagctgagccacagttatcaggagaggagtccagctcagaagatgattctgacctgtttgttaacacaaaccgcagacagtatcatgagagtgaggaggagagtgaagaggaggaggcagcctgagactccaggacccaattctccacttgctcagggactggcccctggctcttctgggcttggacattcccagggtgctctgcacatcttcacccctgcatgaggacaaagcagggctcctctctgaactgatcttttgattcagagaattaaacccctggtgggttggtgacttgttctggtgtctgagtggctctctcgggggagggagattgtgatgaagtgaaaaactgctccctatttattagagaccttgtgggtgggtgggctgaatggggaggaaatgggaaatggctggagtctttcccaggtggtttgttctttcttattgggcacttagaaagtgccaggccgtgctctgggccttcttgcatgtgtttaacagctgggagcactcctgcttccttgcctgcttgcagttcataccaatttaagcattcaggatgacagccctaggacctaacacccacctgcctctaagagacgctcaggagcccatggtgcctcgtgctgttctccccacctttctagtcaccctgtgtacgggagtgctcacctccagctactgtgtccatccccacatacgacctcatctctcccactctgcaccatctatcacttccagaaggtggctggcaaatctctctatccttaactttgttttgaatggtccatccatctcctgactttatttgaaacctgattattccctgaggacattgattgtcttataaccttttaaatagaggctgcttttccaccctcacccttcattcttctaaccagccctgacattctcatgagtaaccttctgccttcacttccctcttgtgtagcatcaattccgtagtccaccctacacccctctgtctccctccattctgttccgctagtaaaaccctaaccctgggtaaacccaatcattcacctctgtgcccaaacccaagtcaccatcattaggtgagaaaacagccagcctggccaccagttgtaccttacgtttatcattacaaacctcagatgactggcttggctgttttgaatcctgta

SEQ ID NO: 289632 - DNA, 1361 bp, Homo sapiens
tctccccgcaacccctctggcctccaatcagggccctgctccgcggctggcgctcacccgcaacttcagttcccgtaacggttcctcccgccacccggccgctcctgcggatacctcaagccactagaactttcttccacttccgcttccgggtcgcttcaagagccgcctttaaaaaagaaacattccacgtcgggcacttctagccagttagagctatagagttgaggcgccccggacctcgacggcgtccttagtaggcgctcctttccggtccttcgcagggaagcccatgccattcataagagttctcgcgtatctcgacgacaagattcctgacgggaagaataagggccatccagggaagagtgacttcctttctctgctgcccggacccggaactcaaggacttaggcttgacggacctggcgtggggaagagttagaagacggacaagggaggggacgggaggcctccgagacagcgccggaagtacggttttcggagggatcagactcagactcacgtcgcactcctcgcagttggactggtgggaactgggaacactggagacctgatttctaactgacgctaccgtcgcggccgccggcaagttcctttactgtgttttcttggttcagccttgaagtgagtcgtggacgatcctctctcagcgtccagcctagacggcggtgttgctccggcagcgttcctgggagccgagggccagagactaagtaacagtcctgggttctgagcctgccatccaaggaactcaggaggaggagttgacagtctcttcgttcctaaccagtgtgggacgacttcagcatgtctcaggccaccaagaggaagcatgtggtgaaggaggtgctaggggagcacatagtgccctccgaccagcagcagattgtcagggtactcaggaccccagggaacaatctgcatgaggtggagacagcccaagggcagcgcttcctggtgagcatgccctccaaataccgcaagaacatctggatcaagagaggggactttctcattgttgaccccattgaagagggagaaaaggtgaaggctgaaatctcgtttgtgctctgcaaggaccacgtgcgctctctgcagaaggaggggttttggcctgaggccttctctgaagtggctgagaaacacaacaacaggaacagacaaattcaccagaatcccagtgagccacaagtttcaggagaggatccagatcagaaatgatctgacctgtcgtatacaaccggcgacgatctgaaggggcgggcattcaagaggggggcggaatccggccattcctgtcagaggccggcttggggggaacccgggcgttcccctta

SEQ ID NO: 289633 - DNA, 841 bp, Homo sapiens
ccattcgctcggcacgtctccttcttgctgccttgtgaagaatgtgtcttgcttacccttcgccttccaccattattgtgagtttcctgaggcctccccagccatgctgaactgctagtcaaatgaagcagtgggatatgctgcattttcaaaaagccttcccaggagactacagtgtttgtgctgggtcaagaatcacaaaaaaccaaaagaatatttaatatctctattggaacgactgagaattgcaaaagtaacaggcgtggcgtttcctttctttatggataactctaacattgtggctatgtttgagatgatggactcctcaggcagaggcaccatatcatttgtgcagtataaagaagccctaaaaaccctgggtctatgcactgaagatgaagatttacaagatgatggacataaaataactttggataaattcaaggaggaagtgaacaagaggatgaaggaaatatggtcagcattttaataacaccataaatccaagataataagtaattctataaagttttccagtttcattaattcagaatttcatcatataacttgaaatccaattggcttcctctttcttagaaacaaaaaccaaagaaacctttttctgaaagacattattttccagtattaggccaatttgtcctcaaattaagtagaatctcaacatcttgttgagccagtttgtaaattccaacttcatttaatgctgctgtggcaggaagctgccctgaagctgactgcagtacatctttcagcagtagtgcagaaccgacgttcaaattcaaaacaatacaggcttcttttatactgtttagggaaaaca

SEQ ID NO: 289634 - DNA, 1118 bp, Homo sapiens
gccctaagcctggatcgcggacagtgacgttggtccacacctcacctgccctctctgccctgctacatgccccaggcttgccctgaaccgtgagctctagaaattccaggtccgggtcgcagccacagggcagtcaggcgtgtcacgtgaccgcgccgggtagagggagacagagtcgcacggctgagacgccaggcagtcgcctagcaacagcgggacgcggagcgatggagaccagcagcagggagctccaagccgcggagtatttggaaaagcatcagatcaaggaggtggttagctacctcaccagcgccctccttttctttcggccggaaaaaccaaaagaatatttaatatctctattggaacgactgagaattgcaaaagtaacaggcgtggcgtttcctttctttatggataactctaacattgtggctatgtttgagatgatggactcctcaggcagaggcaccatatcatttgtgcagtataaagaagccctaaaaaccctgggtctatgcactgaagatgaagatttacaagatgatggacataaaataactttggataaattcaaggaggaagtgaacaagaggatgaaggaaatatgtgagaaaacaaagggaaaagattccgagtcatatcaaactgcagctgggctgctcctccttcattgaagtgattagcaagaattatctgaaacaaagaataattcatataacagttgtctttattatcacagcccaaaaacagtctattcttacttacttcttggtagatgtatacatccagcttctctacaagcatttgccagaaaattttaaataaggagaaacaaagctgctgctccaactgaagtaaatggtctcgtaacgtcagcagcaacgggcaagccgaactggacagggacatcactgcctgctctgactgagatggcaaggacaaccatctggaaaaaacacatttttaccaaaaaattttcatcagtttctatttttcaagtttttaaatcattttaaatttgaggaagtgttctgtcctagggcattttggataagaaaaaatatacagcctaacattaaaagctctatcagaaaataaatgtacctgtatttata

SEQ ID NO: 289635 - DNA, 988 bp, Homo sapiens
gccctaagcctggatcgcggacagtgacgttggtccacacctcacctgccctctctgccctgctacatgccccaggcttgccctgaaccgtgagctctagaaattccaggtccgggtcgcagccacagggcagtcaggcgtgtcacgtgaccgcgccgggtagagggagacagagtcgcacggctgagacgccaggcagtcgcctagcaacagcgggacgcggagcgatggagaccagcagcagggagctccaagccgcggagtatttggaaaagcatcagatcaaggaggtggttagctacctcaccagcgccctccttttctttcggccggaaaaaccaaaagaatatttaatatctctattggaacgactgagaattgcaaaagtaacaggcgtggcgtttcctttctttatggataactctaacattgtggctatgtttgagatgatggactcctcaggcagaggcaccatatcatttgtgcagtataaagaagccctaaaaaccctgggtctatgcactgaagatgaagatttacaagatgatggacataaaataactttggataaattcaaggaggaagtgaacaagaggatgaaggaaatatggtcagcattttaataacaccataaatccaagataataaatgtatacatccagcttctctacaagcatttgccagaaaattttaaataaggagaaacaaagctgctgctccaactgaagtaaatggtctcgtaacgtcagcagcaacgggcaagccgaactggacagggacatcactgcctgctctgactgagatggcaaggacaaccatctggaaaaaacacatttttaccaaaaaattttcatcagtttctatttttcaagtttttaaatcattttaaatttgaggaagtgttctgtcctagggcattttggataagaaaaaatatacagcctaacattaaaagctctatcagaaaataaatgtacctgtatttata

SEQ ID NO: 289636 - DNA, 823 bp, Homo sapiens
gccctaagcctggatcgcggacagtgacgttggtccacacctcacctgccctctctgccctgctacatgccccaggcttgccctgaaccgtgagctctagaaattccaggtccgggtcgcagccacagggcagtcaggcgtgtcacgtgaccgcgccgggtagagggagacagagtcgcacggctgagacgccaggcagtcgcctagcaacagcgggacgcggagcgatggagaccagcagcagggagctccaagccgcggagtatttggaaaagcatcagatcaaggaggtggttagctacctcaccagcgccctccttttctttcggccggccctaaaaaccctgggtctatgcactgaagatgaagatttacaagatgatggacataaaataactttggataaattcaaggaggaagtgaacaagaggatgaaggaaatatggtcagcattttaataacaccataaatccaagataataaatgtatacatccagcttctctacaagcatttgccagaaaattttaaataaggagaaacaaagctgctgctccaactgaagtaaatggtctcgtaacgtcagcagcaacgggcaagccgaactggacagggacatcactgcctgctctgactgagatggcaaggacaaccatctggaaaaaacacatttttaccaaaaaattttcatcagtttctatttttcaagtttttaaatcattttaaatttgaggaagtgttctgtcctagggcattttggataagaaaaaatatacagcctaacattaaaagctctatcagaaaataaatgtacctgtatttata

SEQ ID NO: 289637 - DNA, 817 bp, Homo sapiens
ccattcgctcggcacgtctccttcttgctgccttgtgaagaatgtgtcttgcttacccttcgccttccaccattattgtgagtttcctgaggcctccccagccatgctgaactgctagtcaaatgaagcagtgggatatgctgcattttcaaaaagccttcccaggagactacagtgtttgtgctgggtcaagaatcacaaaaaaccaaaagaatatttaatatctctattggaacgactgagaattgcaaaagtaacaggcgtggcgtttcctttctttatggataactctaacattgtggctatgtttgagatgatggactcctcaggcagaggcaccatatcatttgtgcagtataaagaagccctaaaaaccctgggtctatgcactgaagatgaagatttacaagatgatggacataaaataactttggataaattcaaggaggaagtgaacaagaggatgaaggaaatatgatgtatacatccagcttctctacaagcatttgccagaaaattttaaataaggagaaacaaagctgctgctccaactgaagtaaatggtctcgtaacgtcagcagcaacgggcaagccgaactggacagggacatcactgcctgctctgactgagatggcaaggacaaccatctggaaaaaacacatttttaccaaaaaattttcatcagtttctatttttcaagtttttaaatcattttaaatttgaggaagtgttctgtcctagggcattttggataagaaaaaatatacagcctaacattaaaagctctatcagaaaataaatgtacctgtatttata

SEQ ID NO: 289638 - DNA, 793 bp, Homo sapiens
ccattcgctcggcacgtctccttcttgctgccttgtgaagaatgtgtcttgcttacccttcgccttccaccattattgtgagtttcctgaggcctccccagccatgctgaactgctagtcaaatgaagcagtgggatatgctgcattttcaaaaagccttcccaggagactacagtgtttgtgctgggtcaagaatcacaaaaaaccaaaagaatatttaatatctctattggaacgactgagaattgcaaaagtaacaggcgtggcgtttcctttctttatggataactctaacattgtggctatgtttgagatgatggactcctcaggcagaggcaccatatcatttgtgcagtataaagaagccctaaaaaccctgggtctatgcactgaagatgaagatttacaagatgatggacataaaataactttggataaattcaaggaggaagtatgtatacatccagcttctctacaagcatttgccagaaaattttaaataaggagaaacaaagctgctgctccaactgaagtaaatggtctcgtaacgtcagcagcaacgggcaagccgaactggacagggacatcactgcctgctctgactgagatggcaaggacaaccatctggaaaaaacacatttttaccaaaaaattttcatcagtttctatttttcaagtttttaaatcattttaaatttgaggaagtgttctgtcctagggcattttggataagaaaaaatatacagcctaacattaaaagctctatcagaaaataaatgtacctgtatttata

SEQ ID NO: 289639 - DNA, 738 bp, Homo sapiens
tttttctaaaaaatgcccaggtccagtctctatagttttctattctatcatctgagatagggcatttgtatatgtaattatttaagtgttcaatgtcttaccttcttgctggactgtttatgaaaactaaggcctgtgtccccagcgcctagtacagtgcctttgctatagctgtttaataattgttaaatgactacttctatttgcgacatattttaatttcgtatcagaaagagctggaactattcttttgcagaaaaaccaaaagaatatttaatatctctattggaacgactgagaattgcaaaagtaacaggcgtggcgtttcctttctttatggataactctaacattgtggctatgtttgagatgatggactcctcaggcagaggcaccatatcatttgtgcagtataaagaaggtcagtacattctacaaattgaggtaatagtttgtggtcattccacagttttttctagcagaaaatacttctcactttgtaaaattctcacttcatttcttctcattattttacagccctaaaaaccctgggtctatgcactgaagatgaagatttacaagatgatggacataaaataactttggataaattcaaggaggaagtgtaagtttatttttaagtgacaaatattttaataaggtggcatgattttgaagcacaattaatacctttaaaacaggttcctatcttttgaaagaaatattttgttcccttga

SEQ ID NO: 289640 - DNA, 4091 bp, Homo sapiens
agcggggtgctgggatcccgggagggagcggagcggacctgggcttggtcgcctccaagccggcgggaccgagtgctttaggccgctcgaaagaaagttgctccgacccgggaaaaggagaagatgaaggaagccaaggatgcccgctataccaatgggcacctcttcaccaccatttcagtttcaggcatgaccatgtgctatgcctgtaacaagagcatcacagccaaggaagccctcatctgcccaacctgcaatgtgactatccacaaccgctgtaaagacaccctcgccaactgtaccaaggtcaagcagaagcaacagaaagcggccctgctgaagaacaacaccgccttgcagtccgtttctcttcgaagtaagacaaccatccgggagcggccaagctcggccatctacccctccgacagcttccggcagtccctcctgggctcccgccgtggccgctcctccttgtctttagccaagagtgtttctaccaccaacattgctggacatttcaatgatgagtctcccctggggctgcgccggatcctctcacagtccacagactccctcaacatgcggaaccgaaccctatccgtggaatccctcattgacgaagcagaggtaatctacagtgagctgatgagtgactttgagatggatgagaaggactttgcagctgactcttggagtcttgctgtggacagcagcttcctgcagcagcataaaaaggaggtgatgaagcagcaagatgtcatctatgagctaatccagacagagctgcaccatgtgaggacactgaagatcatgacccgcctcttccgcacggggatgctggaagagctacacttggagccaggagtggtccagggcctgttcccctgcgtggacgagctcagtgacatccatacacgcttcctcagccagctattagaacgccgacgccaggccctgtgccctggcagcacccggaactttgtcatccatcgcttgggtgatctgctcatcagccagttctcaggtcctagtgcggagcagatgtgtaagacctactcggagttctgcagccgccacagcaaggccttaaagctctataaggagctgtacgcccgagacaaacgcttccagcaattcatccggaaagtgacccgccccgccgtgctcaagcggcacggggtacaggagtgcatcctgctggtgactcagcgcatcaccaagtacccgttactcatcagccgcatcctgcagcattcccacgggatcgaggaggagcgccaggacctgaccacagcactggggctagtgaaggagctgctgtccaatgtggacgagggtatttatcagctggagaaaggggcccgtctgcaggagatctacaaccgcatggaccctcgggcccaaaccccagtgcctggcaagggcccctttggccgagaggaacttctgaggcgcaaactcatccacgatggctgcctgctctggaagacagcgacggggcgcttcaaagatgtgctagtgctgctgatgacagatgtactggtgtttctccaggaaaaggaccagaagtacatctttcctaccctggacaagccttcagtggtatcgctgcagaatctaatcgtacgagacattgccaaccaggagaaagggatgtttctgatcagcgcagccccacctgagatgtacgaggtgcacacagcatcccgggatgaccggagcacctggatccgggtcattcagcagagcgtgcgcacatgcccatccagggaggacttccccctgattgagacagaggatgaggcttacctgcggcgaattaagatggagttgcagcagaaggaccgggcactggtggagctgctgcgagagaaggtcgggctgtttgctgagatgacccatttccaggccgaagaggatggtggcagtgggatggccctgcccaccctgcccaggggccttttccgctctgagtcccttgagtcccctcgtggcgagcggctgctgcaggatgccatccgtgaggtggagggtctgaaagacctgctggtggggccaggagtggaactgctcttgacaccccgagagccagccctgcccttggaaccagacagcggtggtaacacgagtcctggggtcactgccaatggtgaggccagaaccttcaatggctccattgaactctgcagagctgactcagactctagccagagggatcgaaatggaaatcagctgagatcaccgcaagaggaggcgttacagcgattggtcaatctctatggacttctacatggcctacaggcagctgtggcccagcaggacactctgatggaagcccggttccctgagggccctgagcggcgggagaagctgtgccgagccaactctcgggatggggaggctggcagggctggggctgcccctgtggcccctgaaaagcaggccacggaactggcattactgcagcggcaacatgcgctgctgcaggaggagctacggcgctgccggcggctaggtgaagaacgggcaaccgaagctggcagcctggaggcccggctccgggagagtgagcaggcccgggcactgctggagcgtgaggccgaagaggctcgaaggcagctggccgccctgggccagaccgagccactcccagctgaggccccctgggcccgcagacctgtggatcctcggcggcgcagcctccccgcaggcgatgccctgtacttgagtttcaaccccccacagcccagccgaggcactgaccgcctggatctacctgtcactactcgctctgtccatcgaaactttgaggaccgagagaggcaggaactggggagccccgaagagcggctgcaagacagcagtgaccctgacactggcagcgaggaggaaggtagcagccgtctgtctccgccccacagtccacgagactttaccagaatgcaggacatcccggaggagacggagagccgcgacggggaggctgtagcctccgagagctaagggggcccctcccccctgccccgtgccccactgaagaacattactgagggggctaaccttggggactccaatttgccaatgatgagggaacatttgaaagaactgcaaattgtccttgccagctcttgggatccttggatacctggggccatttaagaagctaggggaattaggccacaacaccccctgggacatccgaaagctacaccacagatgccagtggttcatgccttcttcccgcaactttaggaaaatttatttatttattgtttattagttatggggggagaggggagatttaaaggaccagggacatgggaaccaagccatagggatcagagggccttgtccttgaacactactggggtatattcaggctcatccacgcagctgctgggttcttgccctaacggccctcccctgcaacatccgtcttggaggagaggctgcagccacagcaccctactgccctttaaataaaggagggctgtgggcagggccatgtccctttctcctctcccctcaacctcttactgctgttctccctttctccgtccttcatggaagccctgggagataacctggcttcctggagttgatggaataaaggttggggtggccataatggtttgttgggggtgagggaaaaaacccacagggaccagaatgttttgttgttcttttgttttcttttttgtaccaaagtcaactgcacgtgttttatatttttaagagatcgtaggcaattagagatcgaagcctcctatctccacatctctgaagaagttgaggggtgggggagagaatgacttctgccttcatctgcagtaacggggggacctatactgacctcttccccagccatttagaaacaagttctagggtgggttggaaaatctccaagagccctgacctcatcttccacctcagcaaccatgacctgaaacctcagcgtgaatttgggggatttttcagtggaacccttgcccccaaatgtcgaccagcccccaaatgtcgaagaattttcttcttgccaattttgttgtttaaaaaaaaaattcagggaaaattaaaaacctggaactcca

SEQ ID NO: 289641 - DNA, 2688 bp, Homo sapiens
tgtctctaggagggcccacacaggcaccctggatcccccagagagtagattggtgtgctcaggccgcaggctgactcagaggtagggcagtgggctctgcaggccacctggctggggttggtgggggtcctctctcctgccccagcttccactcagccaccacagttgccacaccatggggtggagacgtgggtcaccacgggcttgggagcaagcgccttctgcagcacaggaagccgaagctggggtcaggtgaggtcgctacccctgaacgtgttcctccggagatctacaaccgcatggaccctcgggcccaaaccccagtgcctggcaagggcccctttggccgagaggaacttctgaggcgcaaactcatccacgatggctgcctgctctggaagacagcgacggggcgcttcaaagatgtgctagtgctgctgatgacagatgtactggtgtttctccaggaaaaggaccagaagtacatctttcctaccctggacaagccttcagtggtatcgctgcagaatctaatcgtacgagacattgccaaccaggagaaagggatgtttctgatcagcgcagccccacctgagatgtacgaggtgcacacagcatcccgggatgaccggagcacctggatccgggtcattcagcagagcgtgcgcacatgcccatccagggaggacttccccctgattgagacagaggatgaggcttacctgcggcgaattaagatggagttgcagcagaaggaccgggcactggtggagctgctgcgagagaaggtcgggctgtttgctgagatgacccatttccaggccgaagaggatggtggcagtgggatggccctgcccaccctgcccaggggccttttccgctctgagtcccttgagtcccctcgtggcgagcggctgctgcaggatgccatccgtgaggtggagggtctgaaagacctgctggtggggccaggagtggaactgctcttgacaccccgagagccagccctgcccttggaaccagacagcggtggtaacacgagtcctggggtcactgccaatggtgaggccagaaccttcaatggctccattgaactctgcagagctgactcagactctagccagagggatcgaaatggaaatcagctgagatcaccgcaagaggaggcgttacagcgattggtcaatctctatggacttctacatggcctacaggcagctgtggcccagcaggacactctgatggaagcccggttccctgagggccctgagcggcgggagaagctgtgccgagccaactccccgcaggcgatgccctgtacttgagtttcaaccccccacagcccagccgaggcactgaccgcctggatctacctgtcactactcgctctgtccatcgaaactttgaggaccgagagaggcaggaactggggagccccgaagagcggctgcaagacagcagtgaccctgacactggcagcgaggaggaaggtagcagccgtctgtctccgccccacagtccacgagactttaccagaatgcaggacatcccggaggagacggagagccgcgacggggaggctgtagcctccgagagctaagggggcccctcccccctgccccgtgccccactgaagaacattactgagggggctaaccttggggactccaatttgccaatgatgagggaacatttgaaagaactgcaaattgtccttgccagctcttgggatccttggatacctggggccatttaagaagctaggggaattaggccacaacaccccctgggacatccgaaagctacaccacagatgccagtggttcatgccttcttcccgcaactttaggaaaatttatttatttattgtttattagttatggggggagaggggagatttaaaggaccagggacatgggaaccaagccatagggatcagagggccttgtccttgaacactactggggtatattcaggctcatccacgcagctgctgggttcttgccctaacggccctcccctgcaacatccgtcttggaggagaggctgcagccacagcaccctactgccctttaaataaaggagggctgtgggcagggccatgtccctttctcctctcccctcaacctcttactgctgttctccctttctccgtccttcatggaagccctgggagataacctggcttcctggagttgatggaataaaggttggggtggccataatggtttgttgggggtgagggaaaaaacccacagggaccagaatgttttgttgttcttttgttttcttttttgtaccaaagtcaactgcacgtgttttatatttttaagagatcgtaggcaattagagatcgaagcctcctatctccacatctctgaagaagttgaggggtgggggagagaatgacttctgccttcatctgcagtaacggggggacctatactgacctcttccccagccatttagaaacaagttctagggtgggttggaaaatctccaagagccctgacctcatcttccacctcagcaaccatgacctgaaacctcagcgtgaatttgggggatttttcagtggaacccttgcccccaaatgtcgaccagcccccaaatgtcgaagaattttcttcttgccaattttgttgtttaaaaaaaaaattcagggaaaattaaaaacctggaactcca

SEQ ID NO: 289642 - DNA, 4180 bp, Homo sapiens
ccgggcgaggggagtcagacttcctgtccccgagaccaacgcgtgcgggccgaacccctccccccgccttcccccaacaatacaggacgccggggtccgcgccgcgtcctccctggtccccccgtccgattatgtctcggatcgaatccctcacgcgggcgcggatcgaccggagcagagagctggcgagcaagacccgggaaaaggagaagatgaaggaagccaaggatgcccgctataccaatgggcacctcttcaccaccatttcagtttcaggcatgaccatgtgctatgcctgtaacaagagcatcacagccaaggaagccctcatctgcccaacctgcaatgtgactatccacaaccgctgtaaagacaccctcgccaactgtaccaaggtcaagcagaagcaacagaaagcggccctgctgaagaacaacaccgccttgcagtccgtttctcttcgaagtaagacaaccatccgggagcggccaagctcggccatctacccctccgacagcttccggcagtccctcctgggctcccgccgtggccgctcctccttgtctttagccaagagtgtttctaccaccaacattgctggacatttcaatgatgagtctcccctggggctgcgccggatcctctcacagtccacagactccctcaacatgcggaaccgaaccctatccgtggaatccctcattgacgaagcagaggtaatctacagtgagctgatgagtgactttgagatggatgagaaggactttgcagctgactcttggagtcttgctgtggacagcagcttcctgcagcagcataaaaaggaggtgatgaagcagcaagatgtcatctatgagctaatccagacagagctgcaccatgtgaggacactgaagatcatgacccgcctcttccgcacggggatgctggaagagctacacttggagccaggagtggtccagggcctgttcccctgcgtggacgagctcagtgacatccatacacgcttcctcagccagctattagaacgccgacgccaggccctgtgccctggcagcacccggaactttgtcatccatcgcttgggtgatctgctcatcagccagttctcaggtcctagtgcggagcagatgtgtaagacctactcggagttctgcagccgccacagcaaggccttaaagctctataaggagctgtacgcccgagacaaacgcttccagcaattcatccggaaagtgacccgccccgccgtgctcaagcggcacggggtacaggagtgcatcctgctggtgactcagcgcatcaccaagtacccgttactcatcagccgcatcctgcagcattcccacgggatcgaggaggagcgccaggacctgaccacagcactggggctagtgaaggagctgctgtccaatgtggacgagggtatttatcagctggagaaaggggcccgtctgcaggagatctacaaccgcatggaccctcgggcccaaaccccagtgcctggcaagggcccctttggccgagaggaacttctgaggcgcaaactcatccacgatggctgcctgctctggaagacagcgacggggcgcttcaaagatgtgctagtgctgctgatgacagatgtactggtgtttctccaggaaaaggaccagaagtacatctttcctaccctggacaagccttcagtggtatcgctgcagaatctaatcgtacgagacattgccaaccaggagaaagggatgtttctgatcagcgcagccccacctgagatgtacgaggtgcacacagcatcccgggatgaccggagcacctggatccgggtcattcagcagagcgtgcgcacatgcccatccagggaggacttccccctgattgagacagaggatgaggcttacctgcggcgaattaagatggagttgcagcagaaggaccgggcactggtggagctgctgcgagagaaggtcgggctgtttgctgagatgacccatttccaggccgaagaggatggtggcagtgggatggccctgcccaccctgcccaggggccttttccgctctgagtcccttgagtcccctcgtggcgagcggctgctgcaggatgccatccgtgaggtggagggtctgaaagacctgctggtggggccaggagtggaactgctcttgacaccccgagagccagccctgcccttggaaccagacagcggtggtaacacgagtcctggggtcactgccaatggtgaggccagaaccttcaatggctccattgaactctgcagagctgactcagactctagccagagggatcgaaatggaaatcagctgagatcaccgcaagaggaggcgttacagcgattggtcaatctctatggacttctacatggcctacaggcagctgtggcccagcaggacactctgatggaagcccggttccctgagggccctgagcggcgggagaagctgtgccgagccaactctcgggatggggaggctggcagggctggggctgcccctgtggcccctgaaaagcaggccacggaactggcattactgcagcggcaacatgcgctgctgcaggaggagctacggcgctgccggcggctaggtgaagaacgggcaaccgaagctggcagcctggaggcccggctccgggagagtgagcaggcccgggcactgctggagcgtgaggccgaagaggctcgaaggcagctggccgccctgggccagaccgagccactcccagctgaggccccctgggcccgcagacctgtggatcctcggcggcgcagcctccccgcaggcgatgccctgtacttgagtttcaaccccccacagcccagccgaggcactgaccgcctggatctacctgtcactactcgctctgtccatcgaaactttgaggaccgagagaggcaggaactggggagccccgaagagcggctgcaagacagcagtgaccctgacactggcagcgaggaggaaggtagcagccgtctgtctccgccccacagtccacgagactttaccagaatgcaggacatcccggaggagacggagagccgcgacggggaggctgtagcctccgagagctaagggggcccctcccccctgccccgtgccccactgaagaacattactgagggggctaaccttggggactccaatttgccaatgatgagggaacatttgaaagaactgcaaattgtccttgccagctcttgggatccttggatacctggggccatttaagaagctaggggaattaggccacaacaccccctgggacatccgaaagctacaccacagatgccagtggttcatgccttcttcccgcaactttaggaaaatttatttatttattgtttattagttatggggggagaggggagatttaaaggaccagggacatgggaaccaagccatagggatcagagggccttgtccttgaacactactggggtatattcaggctcatccacgcagctgctgggttcttgccctaacggccctcccctgcaacatccgtcttggaggagaggctgcagccacagcaccctactgccctttaaataaaggagggctgtgggcagggccatgtccctttctcctctcccctcaacctcttactgctgttctccctttctccgtccttcatggaagccctgggagataacctggcttcctggagttgatggaataaaggttggggtggccataatggtttgttgggggtgagggaaaaaacccacagggaccagaatgttttgttgttcttttgttttcttttttgtaccaaagtcaactgcacgtgttttatatttttaagagatcgtaggcaattagagatcgaagcctcctatctccacatctctgaagaagttgaggggtgggggagagaatgacttctgccttcatctgcagtaacggggggacctatactgacctcttccccagccatttagaaacaagttctagggtgggttggaaaatctccaagagccctgacctcatcttccacctcagcaaccatgacctgaaacctcagcgtgaatttgggggatttttcagtggaacccttgcccccaaatgtcgaccagcccccaaatgtcgaagaattttcttcttgccaattttgttgtttaaaaaaaaaattcagggaaaattaaaaacctggaactcca

SEQ ID NO: 289643 - DNA, 4255 bp, Homo sapiens
ccgggcgaggggagtcagacttcctgtccccgagaccaacgcgtgcgggccgaacccctccccccgccttcccccaacaatacaggacgccggggtccgcgccgcgtcctccctggtccccccgtccgattatgtctcggatcgaatccctcacgcgggcgcggatcgaccggagcagagagctggcgagcaagacccgggaaaaggagaagatgaaggaagccaaggatgcccgctataccaatgggcacctcttcaccaccatttcagtttcaggcatgaccatgtgctatgcctgtaacaagagcatcacagccaaggaagccctcatctgcccaacctgcaatgtgactatccacaaccgctgtaaagacaccctcgccaactgtaccaaggtcaagcagaagcaacagaaagcggccctgctgaagaacaacaccgccttgcagtccgtttctcttcgaagtaagacaaccatccgggagcggccaagctcggccatctacccctccgacagcttccggcagtccctcctgggctcccgccgtggccgctcctccttgtctttagccaagagtgtttctaccaccaacattgctggacatttcaatgatgagtctcccctggggctgcgccggatcctctcacagtccacagactccctcaacatgcggaaccgaaccctatccgtggaatccctcattgacgaagcagaggtaatctacagtgagctgatgagtgactttgagatggatgagaaggactttgcagctgactcttggagtcttgctgtggacagcagcttcctgcagcagcataaaaaggaggtgatgaagcagcaagatgtcatctatgagctaatccagacagagctgcaccatgtgaggacactgaagatcatgacccgcctcttccgcacggggatgctggaagagctacacttggagccaggagtggtccagggcctgttcccctgcgtggacgagctcagtgacatccatacacgcttcctcagccagctattagaacgccgacgccaggccctgtgccctggcagcacccggaactttgtcatccatcgcttgggtgatctgctcatcagccagttctcaggtcctagtgcggagcagatgtgtaagacctactcggagttctgcagccgccacagcaaggccttaaagctctataaggagctgtacgcccgagacaaacgcttccagcaattcatccggaaagtgacccgccccgccgtgctcaagcggcacggggtacaggagtgcatcctgctggtgactcagcgcatcaccaagtacccgttactcatcagccgcatcctgcagcattcccacgggatcgaggaggagcgccaggacctgaccacagcactggggctagtgaaggagctgctgtccaatgtggacgagggtatttatcagctggagaaaggggcccgtctgcaggagatctacaaccgcatggaccctcgggcccaaaccccagtgcctggcaagggcccctttggccgagaggaacttctgaggcgcaaactcatccacgatggctgcctgctctggaagacagcgacggggcgcttcaaagatgtgctagtgctgctgatgacagatgtactggtgtttctccaggaaaaggaccagaagtacatctttcctaccctggacaagccttcagtggtatcgctgcagaatctaatcgtacgagacattgccaaccaggagaaagggatgtttctgatcagcgcagccccacctgagatgtacgaggtgcacacagcatcccgggatgaccggagcacctggatccgggtcattcagcagagcgtgcgcacatgcccatccagggaggacttccccctgattgagacagaggatgaggcttacctgcggcgaattaagatggagttgcagcagaaggaccgggcactggtggagctgctgcgagagaaggtcgggctgtttgctgagatgacccatttccaggccgaagaggatggtggcagtgggatggccctgcccaccctgcccaggggccttttccgctctgagtcccttgagtcccctcgtggcgagcggctgctgcaggatgccatccgtgaggtggagggtctgaaagacctgctggtggggccaggagtggaactgctcttgacaccccgagagccagccctgcccttggaaccagacagcggtggtaacacgagtcctggggtcactgccaatggtgaggccagaaccttcaatggctccattgaactctgcagagctgactcagactctagccagagggatcgaaatggaaatcagctgagatcaccgcaagaggaggcgttacagcgattggtcaatctctatggacttctacatggcctacaggcagctgtggcccagcaggacactctgatggaagcccggttccctgagggccctgagcggcgggagaagctgtgccgagccaactctcgggatggggaggctggcagggctggggctgcccctgtggcccctgaaaagcaggccacggaactggcattactgcagcggcaacatgcgctgctgcaggaggagctacggcgctgccggcggctaggtgaagaacgggcaaccgaagctggcagcctggaggcccggctccgggagagtgagcaggcccgggcactgctggagcgtgaggccgaagaggctcgaaggcagctggccgccctgggccagaccgagccactcccagctgaggccccctgggcccgcagacctgtggatcctcggcggcgcagcctccccgcaggcgatgccctgtacttgagtttcaaccccccacagcccagccgaggcactgaccgcctggatctacctgtcactactcgctctgtccatcgaaactttgaggaccgagagaggcaggaactggggagccccgaagagcggctgcaagacagcagtgaccctgacactggcagcgaggaggaaggtagcagccgtctgtctccgccccacagtccacgagactttaccagaatgcaggacatcccggaggagacggagagccgcgacggggaggctgtagcctccgagagctaagggggcccctcccccctgccccgtgccccactgaagaacattactgagggggctaaccttggggactccaatttgccaatgatgagggaacatttgaaagaactgcaaattgtccttgccagctcttgggatccttggatacctggggccatttaagaagctaggggaattaggccacaacaccccctgggacatccgaaagctacaccacagatgccagtggttcatgccttcttcccgcaactttaggaaaatttatttatttattgtttattagttatggggggagaggggagatttaaaggaccagggacatgggaaccaagccatagggatcagagggccttgtccttgaacactactggggtatattcaggctcatccacgcagctgctgggttcttgccctaacggccctcccctgcaacatccgtcttggaggagaggctgcagccacagcaccctactgccctttaaataaaggagggctgtgggcagggccatgtccctttctcctctcccctcaacctcttactgctgttctccctttctccgtccttcatggaagccctgggagataacctggcttcctggagttgatggaataaaggttggggtggccataatggtttgttgggggtgagggaaaaaacccacagggaccagaatgttttgttgttcttttgttttcttttttgtaccaaagtcaactgcacgtgttttatatttttaagagatcgtaggcaattagagatcgaagcctcctatctccacatctctgaagaagttgaggggtgggggagagaatgacttctgccttcatctgcagtaacggggggacctatactgacctcttccccagccatttagaaacaagttctagggtgggttggaaaatctccaagagccctgacctcatcttccacctcagcaaccatgacctgaaacctcagcgtgaatttgggggatttttcagtggaacccttgcccccaaatgtcgaccagcccccaaatgtcgaagaattttcttcttgccaattttgttgtttaaaaaaaaaattcagggaaaattaaaaacctggaactccaaaaaaaagaagacaaagaaaagcaacaacacaaacaacaagcgtgggggcacacacttgggggggggggggaaaa

SEQ ID NO: 289644 - DNA, 4286 bp, Homo sapiens
agcggggtgctgggatcccgggagggagcggagcggacctgggcttggtcgcctccaagccggcgggaccgagtgctttaggccgctcgaaagaaagttgctccgacccgggaaaaggagaagatgaaggaagccaaggatgcccgctataccaatgggcacctcttcaccaccatttcagtttcaggcatgaccatgtgctatgcctgtaacaagagcatcacagccaaggaagccctcatctgcccaacctgcaatgtgactatccacaaccgctgtaaagacaccctcgccaactgtaccaaggtcaagcagaagcaacagaaagcggccctgctgaagaacaacaccgccttgcagtccgtttctcttcgaagtaagacaaccatccgggagcggccaagctcggccatctacccctccgacagcttccggcagtccctcctgggctcccgccgtggccgctcctccttgtctttagccaagagtgtttctaccaccaacattgctggacatttcaatgatgagtctcccctggggctgcgccggatcctctcacagtccacagactccctcaacatgcggaaccgaaccctatccgtggaatccctcattgacgaagcagaggtaatctacagtgagctgatgagtgactttgagatggatgagaaggactttgcagctgactcttggagtcttgctgtggacagcagcttcctgcagcagcataaaaaggaggtgatgaagcagcaagatgtcatctatgagctaatccagacagagctgcaccatgtgaggacactgaagatcatgacccgcctcttccgcacggggatgctggaagagctacacttggagccaggagtggtccagggcctgttcccctgcgtggacgagctcagtgacatccatacacgcttcctcagccagctattagaacgccgacgccaggccctgtgccctggcagcacccggaactttgtcatccatcgcttgggtgatctgctcatcagccagttctcaggtcctagtgcggagcagatgtgtaagacctactcggagttctgcagccgccacagcaaggccttaaagctctataaggagctgtacgcccgagacaaacgcttccagcaattcatccggaaagtgacccgccccgccgtgctcaagcggcacggggtacaggagtgcatcctgctggtgactcagcgcatcaccaagtacccgttactcatcagccgcatcctgcagcattcccacggtgagtaggcaggcccaggagagggccactgggagacggccacctggggtgaggaaaggctcggtatgaccacaggaagggtggggtcgggtgtgaaaccctgggcagcctctaaaggtggaatcaagacacgatgggaactggggtgtgagtgaaactggttgagccgttccccatgccaacccccggtgccagggatcgaggaggagcgccaggacctgaccacagcactggggctagtgaaggagctgctgtccaatgtggacgagggtatttatcagctggagaaaggggcccgtctgcaggagatctacaaccgcatggaccctcgggcccaaaccccagtgcctggcaagggcccctttggccgagaggaacttctgaggcgcaaactcatccacgatggctgcctgctctggaagacagcgacggggcgcttcaaagatgtgctagtgctgctgatgacagatgtactggtgtttctccaggaaaaggaccagaagtacatctttcctaccctggacaagccttcagtggtatcgctgcagaatctaatcgtacgagacattgccaaccaggagaaagggatgtttctgatcagcgcagccccacctgagatgtacgaggtgcacacagcatcccgggatgaccggagcacctggatccgggtcattcagcagagcgtgcgcacatgcccatccagggaggacttccccctgattgagacagaggatgaggcttacctgcggcgaattaagatggagttgcagcagaaggaccgggcactggtggagctgctgcgagagaaggtcgggctgtttgctgagatgacccatttccaggccgaagaggatggtggcagtgggatggccctgcccaccctgcccaggggccttttccgctctgagtcccttgagtcccctcgtggcgagcggctgctgcaggatgccatccgtgaggtggagggtctgaaagacctgctggtggggccaggagtggaactgctcttgacaccccgagagccagccctgcccttggaaccagacagcggtggtaacacgagtcctggggtcactgccaatggtgaggccagaaccttcaatggctccattgaactctgcagagctgactcagactctagccagagggatcgaaatggaaatcagctgagatcaccgcaagaggaggcgttacagcgattggtcaatctctatggacttctacatggcctacaggcagctgtggcccagcaggacactctgatggaagcccggttccctgagggccctgagcggcgggagaagctgtgccgagccaactctcgggatggggaggctggcagggctggggctgcccctgtggcccctgaaaagcaggccacggaactggcattactgcagcggcaacatgcgctgctgcaggaggagctacggcgctgccggcggctaggtgaagaacgggcaaccgaagctggcagcctggaggcccggctccgggagagtgagcaggcccgggcactgctggagcgtgaggccgaagaggctcgaaggcagctggccgccctgggccagaccgagccactcccagctgaggccccctgggcccgcagacctgtggatcctcggcggcgcagcctccccgcaggcgatgccctgtacttgagtttcaaccccccacagcccagccgaggcactgaccgcctggatctacctgtcactactcgctctgtccatcgaaactttgaggaccgagagaggcaggaactggggagccccgaagagcggctgcaagacagcagtgaccctgacactggcagcgaggaggaaggtagcagccgtctgtctccgccccacagtccacgagactttaccagaatgcaggacatcccggaggagacggagagccgcgacggggaggctgtagcctccgagagctaagggggcccctcccccctgccccgtgccccactgaagaacattactgagggggctaaccttggggactccaatttgccaatgatgagggaacatttgaaagaactgcaaattgtccttgccagctcttgggatccttggatacctggggccatttaagaagctaggggaattaggccacaacaccccctgggacatccgaaagctacaccacagatgccagtggttcatgccttcttcccgcaactttaggaaaatttatttatttattgtttattagttatggggggagaggggagatttaaaggaccagggacatgggaaccaagccatagggatcagagggccttgtccttgaacactactggggtatattcaggctcatccacgcagctgctgggttcttgccctaacggccctcccctgcaacatccgtcttggaggagaggctgcagccacagcaccctactgccctttaaataaaggagggctgtgggcagggccatgtccctttctcctctcccctcaacctcttactgctgttctccctttctccgtccttcatggaagccctgggagataacctggcttcctggagttgatggaataaaggttggggtggccataatggtttgttgggggtgagggaaaaaacccacagggaccagaatgttttgttgttcttttgttttcttttttgtaccaaagtcaactgcacgtgttttatatttttaagagatcgtaggcaattagagatcgaagcctcctatctccacatctctgaagaagttgaggggtgggggagagaatgacttctgccttcatctgcagtaacggggggacctatactgacctcttccccagccatttagaaacaagttctagggtgggttggaaaatctccaagagccctgacctcatcttccacctcagcaaccatgacctgaaacctcagcgtgaatttgggggatttttcagtggaacccttgcccccaaatgtcgaccagcccccaaatgtcgaagaattttcttcttgccaattttgttgtttaaaaaaaaaattcagggaaaattaaaaacctggaactcca

SEQ ID NO: 289645 - DNA, 3715 bp, Homo sapiens
aactactccgctgagctgcgcaatgcctcggccgtcatgaagaaccaggtggccaggttcaacgaccttcgcttcgtgggccgcagtgggcgagggaagagtttcaccctgaccatcactgtgttcaccaaccccacccaagtggcgacctaccaccgagccatcaaggtgaccgtggacggaccccgggagcccagacgtaaatgcggaaccgaaccctatccgtggaatccctcattgacgaagcagaggtaatctacagtgagctgatgagtgactttgagatggatgagaaggactttgcagctgactcttggagtcttgctgtggacagcagcttcctgcagcagcataaaaaggaggtgatgaagcagcaagatgtcatctatgagctaatccagacagagctgcaccatgtgaggacactgaagatcatgacccgcctcttccgcacggggatgctggaagagctacacttggagccaggagtggtccagggcctgttcccctgcgtggacgagctcagtgacatccatacacgcttcctcagccagctattagaacgccgacgccaggccctgtgccctggcagcacccggaactttgtcatccatcgcttgggtgatctgctcatcagccagttctcaggtcctagtgcggagcagatgtgtaagacctactcggagttctgcagccgccacagcaaggccttaaagctctataaggagctgtacgcccgagacaaacgcttccagcaattcatccggaaagtgacccgccccgccgtgctcaagcggcacggggtacaggagtgcatcctgctggtgactcagcgcatcaccaagtacccgttactcatcagccgcatcctgcagcattcccacgggatcgaggaggagcgccaggacctgaccacagcactggggctagtgaaggagctgctgtccaatgtggacgagggtatttatcagctggagaaaggggcccgtctgcaggagatctacaaccgcatggaccctcgggcccaaaccccagtgcctggcaagggcccctttggccgagaggaacttctgaggcgcaaactcatccacgatggctgcctgctctggaagacagcgacggggcgcttcaaagatgtgctagtgctgctgatgacagatgtactggtgtttctccaggaaaaggaccagaagtacatctttcctaccctggacaagccttcagtggtatcgctgcagaatctaatcgtacgagacattgccaaccaggagaaagggatgtttctgatcagcgcagccccacctgagatgtacgaggtgcacacagcatcccgggatgaccggagcacctggatccgggtcattcagcagagcgtgcgcacatgcccatccagggaggacttccccctgattgagacagaggatgaggcttacctgcggcgaattaagatggagttgcagcagaaggaccgggcactggtggagctgctgcgagagaaggtcgggctgtttgctgagatgacccatttccaggccgaagaggatggtggcagtgggatggccctgcccaccctgcccaggggccttttccgctctgagtcccttgagtcccctcgtggcgagcggctgctgcaggatgccatccgtgaggtggagggtctgaaagacctgctggtggggccaggagtggaactgctcttgacaccccgagagccagccctgcccttggaaccagacagcggtggtaacacgagtcctggggtcactgccaatggtgaggccagaaccttcaatggctccattgaactctgcagagctgactcagactctagccagagggatcgaaatggaaatcagctgagatcaccgcaagaggaggcgttacagcgattggtcaatctctatggacttctacatggcctacaggcagctgtggcccagcaggacactctgatggaagcccggttccctgagggccctgagcggcgggagaagctgtgccgagccaactctcgggatggggaggctggcagggctggggctgcccctgtggcccctgaaaagcaggccacggaactggcattactgcagcggcaacatgcgctgctgcaggaggagctacggcgctgccggcggctaggtgaagaacgggcaaccgaagctggcagcctggaggcccggctccgggagagtgagcaggcccgggcactgctggagcgtgaggccgaagaggctcgaaggcagctggccgccctgggccagaccgagccactcccagctgaggccccctgggcccgcagacctgtggatcctcggcggcgcagcctccccgcaggcgatgccctgtacttgagtttcaaccccccacagcccagccgaggcactgaccgcctggatctacctgtcactactcgctctgtccatcgaaactttgaggaccgagagaggcaggaactggggagccccgaagagcggctgcaagacagcagtgaccctgacactggcagcgaggaggaaggtagcagccgtctgtctccgccccacagtccacgagactttaccagaatgcaggacatcccggaggagacggagagccgcgacggggaggctgtagcctccgagagctaagggggcccctcccccctgccccgtgccccactgaagaacattactgagggggctaaccttggggactccaatttgccaatgatgagggaacatttgaaagaactgcaaattgtccttgccagctcttgggatccttggatacctggggccatttaagaagctaggggaattaggccacaacaccccctgggacatccgaaagctacaccacagatgccagtggttcatgccttcttcccgcaactttaggaaaatttatttatttattgtttattagttatggggggagaggggagatttaaaggaccagggacatgggaaccaagccatagggatcagagggccttgtccttgaacactactggggtatattcaggctcatccacgcagctgctgggttcttgccctaacggccctcccctgcaacatccgtcttggaggagaggctgcagccacagcaccctactgccctttaaataaaggagggctgtgggcagggccatgtccctttctcctctcccctcaacctcttactgctgttctccctttctccgtccttcatggaagccctgggagataacctggcttcctggagttgatggaataaaggttggggtggccataatggtttgttgggggtgagggaaaaaacccacagggaccagaatgttttgttgttcttttgttttcttttttgtaccaaagtcaactgcacgtgttttatatttttaagagatcgtaggcaattagagatcgaagcctcctatctccacatctctgaagaagttgaggggtgggggagagaatgacttctgccttcatctgcagtaacggggggacctatactgacctcttccccagccatttagaaacaagttctagggtgggttggaaaatctccaagagccctgacctcatcttccacctcagcaaccatgacctgaaacctcagcgtgaatttgggggatttttcagtggaacccttgcccccaaatgtcgaccagcccccaaatgtcgaagaattttcttcttgccaattttgttgtttaaaaaaaaaattcagggaaaattaaaaacctggaactcca

SEQ ID NO: 289646 - DNA, 3672 bp, Homo sapiens
gtatctctctcctgctctctgtctcacagcaacagaaagcggccctgctgaagaacaacaccgccttgcagtccgtttctcttcgaagtaagaacatttcaatgatgagtctcccctggggctgcgccggatcctctcacagtccacagactccctcaacatgcggaaccgaaccctatccgtggaatccctcattgacgaagcagaggtaatctacagtgagctgatgagtgactttgagatggatgagaaggactttgcagctgactcttggagtcttgctgtggacagcagcttcctgcagcagcataaaaaggaggtgatgaagcagcaagatgtcatctatgagctaatccagacagagctgcaccatgtgaggacactgaagatcatgacccgcctcttccgcacggggatgctggaagagctacacttggagccaggagtggtccagggcctgttcccctgcgtggacgagctcagtgacatccatacacgcttcctcagccagctattagaacgccgacgccaggccctgtgccctggcagcacccggaactttgtcatccatcgcttgggtgatctgctcatcagccagttctcaggtcctagtgcggagcagatgtgtaagacctactcggagttctgcagccgccacagcaaggccttaaagctctataaggagctgtacgcccgagacaaacgcttccagcaattcatccggaaagtgacccgccccgccgtgctcaagcggcacggggtacaggagtgcatcctgctggtgactcagcgcatcaccaagtacccgttactcatcagccgcatcctgcagcattcccacgggatcgaggaggagcgccaggacctgaccacagcactggggctagtgaaggagctgctgtccaatgtggacgagggtatttatcagctggagaaaggggcccgtctgcaggagatctacaaccgcatggaccctcgggcccaaaccccagtgcctggcaagggcccctttggccgagaggaacttctgaggcgcaaactcatccacgatggctgcctgctctggaagacagcgacggggcgcttcaaagatgtgctagtgctgctgatgacagatgtactggtgtttctccaggaaaaggaccagaagtacatctttcctaccctggacaagccttcagtggtatcgctgcagaatctaatcgtacgagacattgccaaccaggagaaagggatgtttctgatcagcgcagccccacctgagatgtacgaggtgcacacagcatcccgggatgaccggagcacctggatccgggtcattcagcagagcgtgcgcacatgcccatccagggaggacttccccctgattgagacagaggatgaggcttacctgcggcgaattaagatggagttgcagcagaaggaccgggcactggtggagctgctgcgagagaaggtcgggctgtttgctgagatgacccatttccaggccgaagaggatggtggcagtgggatggccctgcccaccctgcccaggggccttttccgctctgagtcccttgagtcccctcgtggcgagcggctgctgcaggatgccatccgtgaggtggagggtctgaaagacctgctggtggggccaggagtggaactgctcttgacaccccgagagccagccctgcccttggaaccagacagcggtggtaacacgagtcctggggtcactgccaatggtgaggccagaaccttcaatggctccattgaactctgcagagctgactcagactctagccagagggatcgaaatggaaatcagctgagatcaccgcaagaggaggcgttacagcgattggtcaatctctatggacttctacatggcctacaggcagctgtggcccagcaggacactctgatggaagcccggttccctgagggccctgagcggcgggagaagctgtgccgagccaactctcgggatggggaggctggcagggctggggctgcccctgtggcccctgaaaagcaggccacggaactggcattactgcagcggcaacatgcgctgctgcaggaggagctacggcgctgccggcggctaggtgaagaacgggcaaccgaagctggcagcctggaggcccggctccgggagagtgagcaggcccgggcactgctggagcgtgaggccgaagaggctcgaaggcagctggccgccctgggccagaccgagccactcccagctgaggccccctgggcccgcagacctgtggatcctcggcggcgcagcctccccgcaggcgatgccctgtacttgagtttcaaccccccacagcccagccgaggcactgaccgcctggatctacctgtcactactcgctctgtccatcgaaactttgaggaccgagagaggcaggaactggggagccccgaagagcggctgcaagacagcagtgaccctgacactggcagcgaggaggaaggtagcagccgtctgtctccgccccacagtccacgagactttaccagaatgcaggacatcccggaggagacggagagccgcgacggggaggctgtagcctccgagagctaagggggcccctcccccctgccccgtgccccactgaagaacattactgagggggctaaccttggggactccaatttgccaatgatgagggaacatttgaaagaactgcaaattgtccttgccagctcttgggatccttggatacctggggccatttaagaagctaggggaattaggccacaacaccccctgggacatccgaaagctacaccacagatgccagtggttcatgccttcttcccgcaactttaggaaaatttatttatttattgtttattagttatggggggagaggggagatttaaaggaccagggacatgggaaccaagccatagggatcagagggccttgtccttgaacactactggggtatattcaggctcatccacgcagctgctgggttcttgccctaacggccctcccctgcaacatccgtcttggaggagaggctgcagccacagcaccctactgccctttaaataaaggagggctgtgggcagggccatgtccctttctcctctcccctcaacctcttactgctgttctccctttctccgtccttcatggaagccctgggagataacctggcttcctggagttgatggaataaaggttggggtggccataatggtttgttgggggtgagggaaaaaacccacagggaccagaatgttttgttgttcttttgttttcttttttgtaccaaagtcaactgcacgtgttttatatttttaagagatcgtaggcaattagagatcgaagcctcctatctccacatctctgaagaagttgaggggtgggggagagaatgacttctgccttcatctgcagtaacggggggacctatactgacctcttccccagccatttagaaacaagttctagggtgggttggaaaatctccaagagccctgacctcatcttccacctcagcaaccatgacctgaaacctcagcgtgaatttgggggatttttcagtggaacccttgcccccaaatgtcgaccagcccccaaatgtcgaagaattttcttcttgccaattttgttgtttaaaaaaaaaattcagggaaaattaaaaacctggaactcca

SEQ ID NO: 289647 - DNA, 3513 bp, Homo sapiens
caacgatggtcctcagctcactgtggaatccctcattgacgaagcagaggtaatctacagtgagctgatgagtgactttgagatggatgagaaggactttgcagctgactcttggagtcttgctgtggacagcagcttcctgcagcagcataaaaaggaggtgatgaagcagcaagatgtcatctatgagctaatccagacagagctgcaccatgtgaggacactgaagatcatgacccgcctcttccgcacggggatgctggaagagctacacttggagccaggagtggtccagggcctgttcccctgcgtggacgagctcagtgacatccatacacgcttcctcagccagctattagaacgccgacgccaggccctgtgccctggcagcacccggaactttgtcatccatcgcttgggtgatctgctcatcagccagttctcaggtcctagtgcggagcagatgtgtaagacctactcggagttctgcagccgccacagcaaggccttaaagctctataaggagctgtacgcccgagacaaacgcttccagcaattcatccggaaagtgacccgccccgccgtgctcaagcggcacggggtacaggagtgcatcctgctggtgactcagcgcatcaccaagtacccgttactcatcagccgcatcctgcagcattcccacgggatcgaggaggagcgccaggacctgaccacagcactggggctagtgaaggagctgctgtccaatgtggacgagggtatttatcagctggagaaaggggcccgtctgcaggagatctacaaccgcatggaccctcgggcccaaaccccagtgcctggcaagggcccctttggccgagaggaacttctgaggcgcaaactcatccacgatggctgcctgctctggaagacagcgacggggcgcttcaaagatgtgctagtgctgctgatgacagatgtactggtgtttctccaggaaaaggaccagaagtacatctttcctaccctggacaagccttcagtggtatcgctgcagaatctaatcgtacgagacattgccaaccaggagaaagggatgtttctgatcagcgcagccccacctgagatgtacgaggtgcacacagcatcccgggatgaccggagcacctggatccgggtcattcagcagagcgtgcgcacatgcccatccagggaggacttccccctgattgagacagaggatgaggcttacctgcggcgaattaagatggagttgcagcagaaggaccgggcactggtggagctgctgcgagagaaggtcgggctgtttgctgagatgacccatttccaggccgaagaggatggtggcagtgggatggccctgcccaccctgcccaggggccttttccgctctgagtcccttgagtcccctcgtggcgagcggctgctgcaggatgccatccgtgaggtggagggtctgaaagacctgctggtggggccaggagtggaactgctcttgacaccccgagagccagccctgcccttggaaccagacagcggtggtaacacgagtcctggggtcactgccaatggtgaggccagaaccttcaatggctccattgaactctgcagagctgactcagactctagccagagggatcgaaatggaaatcagctgagatcaccgcaagaggaggcgttacagcgattggtcaatctctatggacttctacatggcctacaggcagctgtggcccagcaggacactctgatggaagcccggttccctgagggccctgagcggcgggagaagctgtgccgagccaactctcgggatggggaggctggcagggctggggctgcccctgtggcccctgaaaagcaggccacggaactggcattactgcagcggcaacatgcgctgctgcaggaggagctacggcgctgccggcggctaggtgaagaacgggcaaccgaagctggcagcctggaggcccggctccgggagagtgagcaggcccgggcactgctggagcgtgaggccgaagaggctcgaaggcagctggccgccctgggccagaccgagccactcccagctgaggccccctgggcccgcagacctgtggatcctcggcggcgcagcctccccgcaggcgatgccctgtacttgagtttcaaccccccacagcccagccgaggcactgaccgcctggatctacctgtcactactcgctctgtccatcgaaactttgaggaccgagagaggcaggaactggggagccccgaagagcggctgcaagacagcagtgaccctgacactggcagcgaggaggaaggtagcagccgtctgtctccgccccacagtccacgagactttaccagaatgcaggacatcccggaggagacggagagccgcgacggggaggctgtagcctccgagagctaagggggcccctcccccctgccccgtgccccactgaagaacattactgagggggctaaccttggggactccaatttgccaatgatgagggaacatttgaaagaactgcaaattgtccttgccagctcttgggatccttggatacctggggccatttaagaagctaggggaattaggccacaacaccccctgggacatccgaaagctacaccacagatgccagtggttcatgccttcttcccgcaactttaggaaaatttatttatttattgtttattagttatggggggagaggggagatttaaaggaccagggacatgggaaccaagccatagggatcagagggccttgtccttgaacactactggggtatattcaggctcatccacgcagctgctgggttcttgccctaacggccctcccctgcaacatccgtcttggaggagaggctgcagccacagcaccctactgccctttaaataaaggagggctgtgggcagggccatgtccctttctcctctcccctcaacctcttactgctgttctccctttctccgtccttcatggaagccctgggagataacctggcttcctggagttgatggaataaaggttggggtggccataatggtttgttgggggtgagggaaaaaacccacagggaccagaatgttttgttgttcttttgttttcttttttgtaccaaagtcaactgcacgtgttttatatttttaagagatcgtaggcaattagagatcgaagcctcctatctccacatctctgaagaagttgaggggtgggggagagaatgacttctgccttcatctgcagtaacggggggacctatactgacctcttccccagccatttagaaacaagttctagggtgggttggaaaatctccaagagccctgacctcatcttccacctcagcaaccatgacctgaaacctcagcgtgaatttgggggatttttcagtggaacccttgcccccaaatgtcgaccagcccccaaatgtcgaagaattttcttcttgccaattttgttgtttaaaaaaaaaattcagggaaaattaaaaacctggaactcca

SEQ ID NO: 289648 - DNA, 4023 bp, Homo sapiens
agcggggtgctgggatcccgggagggagcggagcggacctgggcttggtcgcctccaagccggcgggaccgagtgctttaggccgctcgaaagaaagttgctccgacccgggaaaaggagaagatgaaggaagccaaggatgcccgctataccaatgggcacctcttcaccaccatttcagtttcaggcatgaccatgtgctatgcctgtaacaagagcatcacagccaaggaagccctcatctgcccaacctgcaatgtgactatccacaaccgctgtaaagacaccctcgccaactgtaccaaggtcaagcagaagcaacagaaagcggccctgctgaagaacaacaccgccttgcagtccgtttctcttcgaagtaagacaaccatccgggagcggccaagctcggccatctacccctccgacagcttccggcagtccctcctgggctcccgccgtggccgctcctccttgtctttagccaagagtgtttctaccaccaacattgctggacatttcaatgatgagtctcccctggggctgcgccggatcctctcacagtccacagactccctcaacatgcggaaccgaaccctatccgtggaatccctcattgacgaagcagaggtaatctacagtgagctgatgagtgactttgagatggatgagaaggactttgcagctgactcttggagtcttgctgtggacagcagcttcctgcagcagcataaaaaggaggtgatgaagcagcaagatgtcatctatgagctaatccagacagagctgcaccatgtgaggacactgaagatcatgacccgcctcttccgcacggggatgctggaagagctacacttggagccaggagtggtccagggcctgttcccctgcgtggacgagctcagtgacatccatacacgcttcctcagccagctattagaacgccgacgccaggccctgtgccctggcagcacccggaactttgtcatccatcgcttgggtgatctgctcatcagccagttctcaggtcctagtgcggagcagatgtgtaagacctactcggagttctgcagccgccacagcaaggccttaaagctctataaggagctgtacgcccgagacaaacgcttccagcaattcatccggaaagtgacccgccccgccgtgctcaagcggcacggggtacaggagtgcatcctgctggtgactcagcgcatcaccaagtacccgttactcatcagccgcatcctgcagcattcccacgggatcgaggaggagcgccaggacctgaccacagcactggggctagtgaaggagctgctgtccaatgtggacgagggtatttatcagctggagaaaggggcccgtctgcaggagatctacaaccgcatggaccctcgggcccaaaccccagtgcctggcaagggcccctttggccgagaggaacttctgaggcgcaaactcatccacgatggctgcctgctctggaagacagcgacggggcgcttcaaagatgtgctagtgctgctgatgacagatgtactggtgtttctccaggaaaaggaccagaagtacatctttcctaccctggacaagccttcagtggtatcgctgcagaatctaatcgtacgagacattgccaaccaggagaaagggatgtttctgatcagcgcagccccacctgagatgtacgaggtgcacacagcatcccgggatgaccggagcacctggatccgggtcattcagcagagcgtgcgcactggagttgcagcagaaggaccgggcactggtggagctgctgcgagagaaggtcgggctgtttgctgagatgacccatttccaggccgaagaggatggtggcagtgggatggccctgcccaccctgcccaggggccttttccgctctgagtcccttgagtcccctcgtggcgagcggctgctgcaggatgccatccgtgaggtggagggtctgaaagacctgctggtggggccaggagtggaactgctcttgacaccccgagagccagccctgcccttggaaccagacagcggtggtaacacgagtcctggggtcactgccaatggtgaggccagaaccttcaatggctccattgaactctgcagagctgactcagactctagccagagggatcgaaatggaaatcagctgagatcaccgcaagaggaggcgttacagcgattggtcaatctctatggacttctacatggcctacaggcagctgtggcccagcaggacactctgatggaagcccggttccctgagggccctgagcggcgggagaagctgtgccgagccaactctcgggatggggaggctggcagggctggggctgcccctgtggcccctgaaaagcaggccacggaactggcattactgcagcggcaacatgcgctgctgcaggaggagctacggcgctgccggcggctaggtgaagaacgggcaaccgaagctggcagcctggaggcccggctccgggagagtgagcaggcccgggcactgctggagcgtgaggccgaagaggctcgaaggcagctggccgccctgggccagaccgagccactcccagctgaggccccctgggcccgcagacctgtggatcctcggcggcgcagcctccccgcaggcgatgccctgtacttgagtttcaaccccccacagcccagccgaggcactgaccgcctggatctacctgtcactactcgctctgtccatcgaaactttgaggaccgagagaggcaggaactggggagccccgaagagcggctgcaagacagcagtgaccctgacactggcagcgaggaggaaggtagcagccgtctgtctccgccccacagtccacgagactttaccagaatgcaggacatcccggaggagacggagagccgcgacggggaggctgtagcctccgagagctaagggggcccctcccccctgccccgtgccccactgaagaacattactgagggggctaaccttggggactccaatttgccaatgatgagggaacatttgaaagaactgcaaattgtccttgccagctcttgggatccttggatacctggggccatttaagaagctaggggaattaggccacaacaccccctgggacatccgaaagctacaccacagatgccagtggttcatgccttcttcccgcaactttaggaaaatttatttatttattgtttattagttatggggggagaggggagatttaaaggaccagggacatgggaaccaagccatagggatcagagggccttgtccttgaacactactggggtatattcaggctcatccacgcagctgctgggttcttgccctaacggccctcccctgcaacatccgtcttggaggagaggctgcagccacagcaccctactgccctttaaataaaggagggctgtgggcagggccatgtccctttctcctctcccctcaacctcttactgctgttctccctttctccgtccttcatggaagccctgggagataacctggcttcctggagttgatggaataaaggttggggtggccataatggtttgttgggggtgagggaaaaaacccacagggaccagaatgttttgttgttcttttgttttcttttttgtaccaaagtcaactgcacgtgttttatatttttaagagatcgtaggcaattagagatcgaagcctcctatctccacatctctgaagaagttgaggggtgggggagagaatgacttctgccttcatctgcagtaacggggggacctatactgacctcttccccagccatttagaaacaagttctagggtgggttggaaaatctccaagagccctgacctcatcttccacctcagcaaccatgacctgaaacctcagcgtgaatttgggggatttttcagtggaacccttgcccccaaatgtcgaccagcccccaaatgtcgaagaattttcttcttgccaattttgttgtttaaaaaaaaaattcagggaaaattaaaaacctggaactcca

SEQ ID NO: 289649 - DNA, 4347 bp, Homo sapiens
ccgggcgaggggagtcagacttcctgtccccgagaccaacgcgtgcgggccgaacccctccccccgccttcccccaacaatacaggacgccggggtccgcgccgcgtcctccctggtccccccgtccgattatgtctcggatcgaatccctcacgcgggcgcggatcgaccggagcagagagctggcgagcaagacccgggaaaaggagaagatgaaggaagccaaggatgcccgctataccaatgggcacctcttcaccaccatttcagtttcaggcatgaccatgtgctatgcctgtaacaagagcatcacagccaaggaagccctcatctgcccaacctgcaatgtgactatccacaaccgctgtaaagacaccctcgccaactgtaccaaggtcaagcagaagcaacagaaagcggccctgctgaagaacaacaccgccttgcagtccgtttctcttcgaagtaagacaaccatccgggagcggccaagctcggccatctacccctccgacagcttccggcagtccctcctgggctcccgccgtggccgctcctccttgtctttagccaagagtgtttctaccaccaacattgctggacatttcaatgatgagtctcccctggggctgcgccggatcctctcacagtccacagactccctcaacatgcggaaccgaaccctatccgtggaatccctcattgacgaagcagaggtaatctacagtgagctgatgagtgactttgagatggatgagaaggactttgcagctgactcttggagtcttgctgtggacagcagcttcctgcagcagcataaaaaggaggtgatgaagcagcaagatgtcatctatgagctaatccagacagagctgcaccatgtgaggacactgaagatcatgacccgcctcttccgcacggggatgctggaagagctacacttggagccaggagtggtccagggcctgttcccctgcgtggacgagctcagtgacatccatacacgcttcctcagccagctattagaacgccgacgccaggccctgtgccctggcagcacccggaactttgtcatccatcgcttgggtgatctgctcatcagccagttctcaggtcctagtgcggagcagatgtgtaagacctactcggagttctgcagccgccacagcaaggccttaaagctctataaggagctgtacgcccgagacaaacgcttccagcaattcatccggaaagtgacccgccccgccgtgctcaagcggcacggggtacaggagtgcatcctgctggtgactcagcgcatcaccaagtacccgttactcatcagccgcatcctgcagcattcccacgggatcgaggaggagcgccaggacctgaccacagcactggggctagtgaaggagctgctgtccaatgtggacgagggtatttatcagctggagaaaggggcccgtctgcaggagatctacaaccgcatggaccctcgggcccaaaccccagtgcctggcaagggcccctttggccgagaggaacttctgaggcgcaaactcatccacgatggctgcctgctctggaagacagcgacggggcgcttcaaagatgtgctagtgctgctgatgacagatgtactggtgtttctccaggaaaaggaccagaagtacatctttcctaccctggacaagccttcagtggtatcgctgcagaatctaatcgtacgagacattgccaaccaggagaaagggatgtttctgatcagcgcagccccacctgagatgtacgaggtgcacacagcatcccgggatgaccggagcacctggatccgggtcattcagcagagcgtgcgcacatgcccatccagggaggacttccccctgattgagacagaggatgaggcttacctgcggcgaattaagatggagttgcagcagaaggaccgggcactggtggagctgctgcgagagaaggtcgggctgtttgctgagatgacccatttccaggccgaagaggatggtggcagtgggatggccctgcccaccctgcccaggggccttttccgctctgagtcccttgagtcccctcgtggcgagcggctgctgcaggatgccatccgtgaggtggagggtctgaaagacctgctggtggggccaggagtggaactgctcttgacaccccgagagccagccctgcccttggaaccagacagcggtggtaacacgagtcctggggtcactgccaatggtgaggccagaaccttcaatggctccattgaactctgcagagctgactcagactctagccagagggatcgaaatggaaatcagctgagatcaccgcaagaggaggcgttacagcgattggtcaatctctatggacttctacatggcctacaggcagctgtggcccagcaggacactctgatggaagcccggttccctgagggccctgagcggcgggagaagctgtgccgagccaactctcgggatggggaggctggcagggctggggctgcccctgtggcccctgaaaagcaggccacggaactggcattactgcagcggcaacatgcgctgctgcaggaggagctacggcgctgccggcggctaggtgaagaacgggcaaccgaagctggcagcctggaggcccggctccgggagagtgagcaggcccgggcactgctggagcgtgaggccgaagaggctcgaaggcagctggccgccctgggccagaccgagccactcccagctgaggccccctgggcccgcagacctgtggatcctcggcggcgcagcctccccgcaggcgatgccctgtacttgagtttcaaccccccacagcccagccgaggcactgaccgcctggatctacctgtcactactcgctctgtccatcgaaactttgaggaccgagagaggcaggaactggggagccccgaagagcggctgcaagacagcagtgaccctgacactggcagcgaggaggaaggtagcagccgtctgtctccgccccacagtccacgagactttaccagaatgcaggacatcccggaggagacggagagccgcgacggggaggctgtagcctccgagagctaagggggcccctcccccctgccccgtgccccactgaagaacattactgagggggctaaccttggggactccaatttgccaatgatgagggaacatttgaaagaactgcaaattgtccttgccagctcttgggatccttggatacctggggccatttaagaagctaggggaattaggccacaacaccccctgggacatccgaaagctacaccacagatgccagtggttcatgccttcttcccgcaactttaggaaaatttatttatttattgtttattagttatggggggagaggggagatttaaaggaccagggacatgggaaccaagccatagggatcagagggccttgtccttgaacactactggggtatattcaggctcatccacgcagctgctgggttcttgccctaacggccctcccctgcaacatccgtcttggaggagaggctgcagccacagcaccctactgccctttaaataaaggagggctgtgggcagggccatgtccctttctcctctcccctcaacctcttactgctgttctccctttctccgtccttcatggaagccctgggagataacctggcttcctggagttgatggaataaaggttggggtggccataatggtttgttgggggtgagggaaaaaacccacagggaccagaatgttttgttgttcttttgttttcttttttgtaccaaagtcaactgcacgtgttttatatttttaagagatcgtaggcaattagagatcgaagcctcctatctccacatctctgaagaagttgaggggtgggggagagaatgacttctgccttcatctgcagtaacggggggacctatactgacctcttccccagccatttagaaacaagttctagggtgggttggaaaatctccaagagccctgacctcatcttccacctcagcaaccatgacctgaaacctcagcgtgaatttgggggatttttcagtggaacccttgcccccaaatgtcgaccagcccccaaatgtcgaagaattttcttcttgccaattttgttgtttaaaaaaaaaattcagggaaaattaaaaacctggaactccataaggtactgtcttccataatgtctgccaattctgaggaggatggtagtagagagccgggcagtgacctaagttcctctgaaaggggccttttcctctcaccgcaaggacagcctctgcctcactgaagagagggggcactaacaaaagtaaccactgcaaatcttt

SEQ ID NO: 289650 - DNA, 4111 bp, Homo sapiens
ccgggcgaggggagtcagacttcctgtccccgagaccaacgcgtgcgggccgaacccctccccccgccttcccccaacaatacaggacgccggggtccgcgccgcgtcctccctggtccccccgtccgattatgtctcggatcgaatccctcacgcgggcgcggatcgaccggagcagagagctggcgagcaagacccgggaaaaggagaagatgaaggaagccaaggatgcccgctataccaatgggcacctcttcaccaccatttcagtttcaggcatgaccatgtgctatgcctgtaacaagagcatcacagccaaggaagccctcatctgcccaacctgcaatgtgactatccacaaccgctgtaaagacaccctcgccaactgtaccaaggtcaagcagaagcaacagaaagcggccctgctgaagaacaacaccgccttgcagtccgtttctcttcgaagtaagacaaccatccgggagcggccaagctcggccatctacccctccgacagcttccggcagtccctcctgggctcccgccgtggccgctcctccttgtctttagccaagagtgtttctaccaccaacattgctggacatttcaatgatgagtctcccctggggctgcgccggatcctctcacagtccacagactccctcaacatgcggaaccgaaccctatccgtggaatccctcattgacgaagcagaggtaatctacagtgagctgatgagtgactttgagatggatgagaaggactttgcagctgactcttggagtcttgctgtggacagcagcttcctgcagcagcataaaaaggaggtgatgaagcagcaagatgtcatctatgagctaatccagacagagctgcaccatgtgaggacactgaagatcatgacccgcctcttccgcacggggatgctggaagagctacacttggagccaggagtggtccagggcctgttcccctgcgtggacgagctcagtgacatccatacacgcttcctcagccagctattagaacgccgacgccaggccctgtgccctggcagcacccggaactttgtcatccatcgcttgggtgatctgctcatcagccagttctcaggtcctagtgcggagcagatgtgtaagacctactcggagttctgcagccgccacagcaaggccttaaagctctataaggagctgtacgcccgagacaaacgcttccagcaattcatccggaaagtgacccgccccgccgtgctcaagcggcacggggtacaggagtgcatcctgctggtgactcagcgcatcaccaagtacccgttactcatcagccgcatcctgcagcattcccacgggatcgaggaggagcgccaggacctgaccacagcactggggctagtgaaggagctgctgtccaatgtggacgagggtatttatcagctggagaaaggggcccgtctgcaggagatctacaaccgcatggaccctcgggcccaaaccccagtgcctggcaagggcccctttggccgagaggaacttctgaggcgcaaactcatccacgatggctgcctgctctggaagacagcgacggggcgcttcaaagatgtgctagtgctgctgatgacagatgtactggtgtttctccaggaaaaggaccagaagtacatctttcctaccctggacaagccttcagtggtatcgctgcagaatctaatcgtacgagacattgccaaccaggagaaagggatgtttctgatcagcgcagccccacctgagatgtacgaggtgcacacagcatcccgggatgaccggagcacctggatccgggtcattcagcagagcgtgcgcacatgcccatccagggaggacttccccctgattgagacagaggatgaggcttacctgcggcgaattaagatggagttgcagcagaaggaccgggcactggtggagctgctgcgagagaaggtcgggctgtttgctgagatgacccatttccaggccgaagaggatggtggcagtgggatggccctgcccaccctgcccaggggccttttccgctctgagtcccttgagtcccctcgtggcgagcggctgctgcaggatgccatccgtgaggtggagggtctgaaagacctgctggtggggccaggagtggaactgctcttgacaccccgagagccagccctgcccttggaaccagacagcggtggtaacacgagtcctggggtcactgccaatggtgaggccagaaccttcaatggctccattgaactctgcagagctgactcagactctagccagagggatcgaaatggaaatcagctgagatcaccgcaagaggaggcgttacagcgattggtcaatctctatggacttctacatggcctacaggcagctgtggcccagcaggacactctgatggaagcccggttccctgagggccctgagcggcgggagaagctgtgccgagccaactctcgggatggggaggctggcagggctggggctgcccctgtggcccctgaaaagcaggccacggaactggcattactgcagcggcaacatgcgctgctgcaggaggagctacggcgctgccggcggctaggtgaagaacgggcaaccgaagctggcagcctggaggcccggctccgggagagtgagcaggcccgggcactgctggagcgtgaggccgaagaggctcgaaggcagctggccgccctgggccagaccgagccactcccagctgaggccccctgggcccgcagacctgtggatcctcggcggcgcagcctccccgcaggcgatgccctgtacttgagtttcaaccccccacagcccagccgaggcactgaccgcctggatctacctgtcactactcgctctgtccatcgaaactttgaggaccgagagaggcaggaactggggagccccgaagagcggctgcaagacagcagtgaccctgacactggcagcgaggaggaaggtagcagccgtctgtctccgccccacagtccacgagactttaccagaatgcaggacatcccggaggagacggagagccgcgacggggaggctgtagcctccgagagctaagggggcccctcccccctgccccgtgccccactgaagaacattactgagggggctaaccttggggactccaatttgccaatgatgagggaacatttgaaagaactgcaaattgtccttgccagctcttgggatccttggatacctggggccatttaagaagctaggggaattaggccacaacaccccctgggacatccgaaagctacaccacagatgccagtggttcatgccttcttcccgcaactttaggaaaatttatttatttattgtttattagttatggggggagaggggagatttaaaggaccagggacatgggaaccaagccatagggatcagagggccttgtccttgaacactactggggtatattcaggctcatccacgcagctgctgggttcttgccctaacggccctcccctgcaacatccgtcttggaggagaggctgcagccacagcaccctactgccctttaaataaaggagggctgtgggcagggccatgtccctttctcctctcccctcaacctcttactgctgttctccctttctccgtccttcatggaagccctgggagataacctggcttcctggagttgatggaataaaggttggggtggccataatggtttgttgggggtgagggaaaaaacccacagggaccagaatgttttgttgttcttttgttttcttttttgtaccaaagtcaactgcacgtgttttatatttttaagagaatgacttctgccttcatctgcagtaacggggggacctatactgacctcttccccagccatttagaaacaagttctagggtgggttggaaaatctccaagagccctgacctcatcttccacctcagcaaccatgacctgaaacctcagcgtgaatttgggggatttttcagtggaacccttgcccccaaatgtcgaccagcccccaaatgtcgaagaattttcttcttgccaattttgttgtttaaaaaaaaaattcagggaaaattaaaaacctggaactcca

SEQ ID NO: 289651 - DNA, 4121 bp, Homo sapiens
agcggggtgctgggatcccgggagggagcggagcggacctgggcttggtcgcctccaagccggcgggaccgagtgctttaggccgctcgaaagaaagttgctccgacccgggaaaaggagaagatgaaggaagccaaggatgcccgctataccaatgggcacctcttcaccaccatttcagtttcaggcatgaccatgtgctatgcctgtaacaagagcatcacagccaaggaagccctcatctgcccaacctgcaatgtgactatccacaaccgctgtaaagacaccctcgccaactgtaccaaggtcaagcagaagcaacagaaagcggccctgctgaagaacaacaccgccttgcagtccgtttctcttcgaagtaagacaaccatccgggagcggccaagctcggccatctacccctccgacagcttccggcagtccctcctgggctcccgccgtggccgctcctccttgtctttagccaagagtgtttctaccaccaacattgctggacatttcaatgatgagtctcccctggggctgcgccggatcctctcacagtccacagactccctcaacatgcggaaccgaaccctatccgtggaatccctcattgacgaagcagaggtaatctacagtgagctgatgagtgactttgagatggatgagaaggactttgcagctgactcttggagtcttgctgtggacagcagcttcctgcagcagcataaaaaggaggtgatgaagcagcaagatgtcatctatgagctaatccagacagagctgcaccatgtgaggacactgaagatcatgacccgcctcttccgcacggggatgctggaagagctacacttggagccaggagtggtccagggcctgttcccctgcgtggacgagctcagtgacatccatacacgcttcctcagccagctattagaacgccgacgccaggccctgtgccctggcagcacccggaactttgtcatccatcgcttgggtgatctgctcatcagccagttctcaggtcctagtgcggagcagatgtgtaagacctactcggagttctgcagccgccacagcaaggccttaaagctctataaggagctgtacgcccgagacaaacgcttccagcaattcatccggaaagtgacccgccccgccgtgctcaagcggcacggggtacaggagtgcatcctgctggtgactcagcgcatcaccaagtacccgttactcatcagccgcatcctgcagcattcccacgggatcgaggaggagcgccaggacctgaccacagcactggggctagtgaaggagctgctgtccaatgtggacgagggtatttatcagctggagaaaggggcccgtctgcaggagatctacaaccgcatggaccctcgggcccaaaccccagtgcctggcaagggcccctttggccgagaggaacttctgaggcgcaaactcatccacgatggctgcctgctctggaagacagcgacggggcgcttcaaagatgtgctagtgctgctgatgacagatgtactggtgtttctccaggaaaaggaccagaagtacatctttcctaccctggacaagccttcagtggtatcgctgcagaatctaatcgtacgagacattgccaaccaggagaaagggatgtttctgatcagcgcagccccacctgagatgtacgaggtgcacacagcatcccgggatgaccggagcacctggatccgggtcattcagcagagcgtgcgcacatgcccatccagggaggacttccccctgattgagacagaggatgaggcttacctgcggcgaattaagatggagttgcagcagaaggaccgggcactggtggagctgctgcgagagaaggtcgggctgtttgctgagatgacccatttccaggccgaagaggatggtggcagtgggatggccctgcccaccctgcccaggggccttttccgctctgagtcccttgagtcccctcgtggcgagcggctgctgcaggatgccatccgtgaggtggagggtctgaaagacctgctggtggggccaggagtggaactgctcttgacaccccgagagccagccctgcccttggaaccagacagcggtggtaacacgagtcctggggtcactgccaatggtgaggccagaaccttcaatggctccattgaactctgcagagctgactcagactctagccagagggatcgaaatggaaatcagctgagatcaccgcaagaggaggcgttacagcgattggtcaatctctatggacttctacatggcctacaggcagctgtggcccagcaggacactctgatggaagcccggttccctgagggccctgagcggcgggagaagctgtgccgagccaactctcgggatggggaggctggcagggctggggctgcccctgtggcccctgaaaagcaggccacggaactggcattactgcagcggcaacatgcgctgctgcaggaggagctacggcgctgccggcggctaggtgaagaacgggcaaccgaagctggcagcctggaggcccggctccgggagagtgagcaggcccgggcactgctggagcgtgaggccgaagaggctcgaaggcagctggccgccctgggccagaccgagccactcccagctgaggccccctgggcccgcagacctgtggatcctcggcggcgcagcctccccgcaggcgatgccctgtacttgagtttcaaccccccacagcccagccgaggcactgaccgcctggatctacctgtcactactcgctctgtccatcgaaactttgaggaccgagagaggcaggaactggggagccccgaagagcggctgcaagacagcagtgaccctgacactggcagcgaggaggaaggtagcagccgtctgtctccgccccacagtccacgaggtgagaccctggcggagacatggaccagagactttaccagaatgcaggacatcccggaggagacggagagccgcgacggggaggctgtagcctccgagagctaagggggcccctcccccctgccccgtgccccactgaagaacattactgagggggctaaccttggggactccaatttgccaatgatgagggaacatttgaaagaactgcaaattgtccttgccagctcttgggatccttggatacctggggccatttaagaagctaggggaattaggccacaacaccccctgggacatccgaaagctacaccacagatgccagtggttcatgccttcttcccgcaactttaggaaaatttatttatttattgtttattagttatggggggagaggggagatttaaaggaccagggacatgggaaccaagccatagggatcagagggccttgtccttgaacactactggggtatattcaggctcatccacgcagctgctgggttcttgccctaacggccctcccctgcaacatccgtcttggaggagaggctgcagccacagcaccctactgccctttaaataaaggagggctgtgggcagggccatgtccctttctcctctcccctcaacctcttactgctgttctccctttctccgtccttcatggaagccctgggagataacctggcttcctggagttgatggaataaaggttggggtggccataatggtttgttgggggtgagggaaaaaacccacagggaccagaatgttttgttgttcttttgttttcttttttgtaccaaagtcaactgcacgtgttttatatttttaagagatcgtaggcaattagagatcgaagcctcctatctccacatctctgaagaagttgaggggtgggggagagaatgacttctgccttcatctgcagtaacggggggacctatactgacctcttccccagccatttagaaacaagttctagggtgggttggaaaatctccaagagccctgacctcatcttccacctcagcaaccatgacctgaaacctcagcgtgaatttgggggatttttcagtggaacccttgcccccaaatgtcgaccagcccccaaatgtcgaagaattttcttcttgccaattttgttgtttaaaaaaaaaattcagggaaaattaaaaacctggaactcca

SEQ ID NO: 289652 - DNA, 2419 bp, Homo sapiens
agcggggtgctgggatcccgggagggagcggagcggacctgggcttggtcgcctccaagccggcgggaccgagtgctttaggccgctcgaaagaaagttgctccgacccgggaaaaggagaagatgaaggaagccaaggatgcccgctataccaatgggcacctcttcaccaccatttcagtttcaggcatgaccatgtgctatgcctgtaacaagagcatcacagccaaggaagccctcatctgcccaacctgcaatgtgactatccacaaccgctgtaaagacaccctcgccaactgtaccaaggtcaagcagaagcaacagaaagcggccctgctgaagaacaacaccgccttgcagtccgtttctcttcgaagtaagacaaccatccgggagcggccaagctcggccatctacccctccgacagcttccggcagtccctcctgggctcccgccgtggccgctcctccttgtctttagccaagagtgtttctaccaccaacattgctggacatttcaatgatgagtctcccctggggctgcgccggatcctctcacagtccacagactccctcaacatgcggaaccgaaccctatccgtggaatccctcattgacgaagcagaggtaatctacagtgagctgatgagtgactttgagatggatgagaaggactttgcagctgactcttggagtcttgctgtggacagcagcttcctgcagcagcataaaaaggaggtgatgaagcagcaagatgtcatctatgagctaatccagacagagctgcaccatgtgaggacactgaagatcatgacccgcctcttccgcacggggatgctggaagagctacacttggagccaggagtggtccagggcctgttcccctgcgtggacgagctcagtgacatccatacacgcttcctcagccagctattagaacgccgacgccaggccctgtgccctggcagcacccggaactttgtcatccatcgcttgggtgatctgctcatcagccagttctcaggtcctagtgcggagcagatgtgtaagacctactcggagttctgcagccgccacagcaaggccttaaagctctataaggagctgtacgcccgagacaaacgcttccagcaattcatccggaaagtgacccgccccgccgtgctcaagcggcacggggtacaggagtgcatcctgctggtgactcagcgcatcaccaagtacccgttactcatcagccgcatcctgcagcattcccacgggatcgaggaggagcgccaggacctgaccacagcactggggctagtgaaggagctgctgtccaatgtggacgagggtatttatcagctggagaaaggggcccgtctgcaggagatctacaaccgcatggaccctcgggcccaaaccccagtgcctggcaagggcccctttggccgagaggaacttctgaggcgcaaactcatccacgatggctgcctgctctggaagacagcgacggggcgcttcaaagatgtgctagtgctgctgatgacagatgtactggtgtttctccaggaaaaggaccagaagtacatctttcctaccctggacaagccttcagtggtatcgctgcagaatctaatcgtacgagacattgccaaccaggagaaagggatgtttctgatcagcgcagccccacctgagatgtacgaggtgcacacagcatcccgggatgaccggagcacctggatccgggtcattcagcagagcgtgcgcacatgcccatccagggaggacttccccctgattgagacagaggatgaggcttacctgcggcgaattaagatggagttgcagcagaaggaccgggcactggtggagctgctgcgagagaaggtcgggctgtttgctgagatgacccatttccaggccgaagaggatggtggcagtgggatggccctgcccaccctgcccaggggccttttccgctctgagtcccttgagtcccctcgtggcgagcggctgctgcaggatgccatccgtgaggtggagggtctgaaagacctgctggtggggccaggagtggaactgctcttgacaccccgagagccagccctgcccttggaaccagacagcggtggtaacacgagtcctggggtcactgccaatggtgaggccagaaccttcaatggctccattgaactctgcagagctgactcagactctagccagagggatcgaaatggaaatcagctgagatcaccgcaagaggaggcgttacagcgattggtcaatctctatggacttctacatggcctacaggcagctgtggcccagcaggacaaagagatctggacagaatcgccggacaggtggcagctgccaacaagaagcattagaacaaaccatgctgggttaataaattgcctcattcgtaaaa

SEQ ID NO: 289653 - DNA, 2530 bp, Homo sapiens
agcggggtgctgggatcccgggagggagcggagcggacctgggcttggtcgcctccaagccggcgggaccgagtgctttaggccgctcgaaagaaagttgctccgacccgggaaaaggagaagatgaaggaagccaaggatgcccgctataccaatgggcacctcttcaccaccatttcagtttcaggcatgaccatgtgctatgcctgtaacaagagcatcacagccaaggaagccctcatctgcccaacctgcaatgtgactatccacaaccgctgtaaagacaccctcgccaactgtaccaaggtcaagcagaagcaacagaaagcggccctgctgaagaacaacaccgccttgcagtccgtttctcttcgaagtaagacaaccatccgggagcggccaagctcggccatctacccctccgacagcttccggcagtccctcctgggctcccgccgtggccgctcctccttgtctttagccaagagtgtttctaccaccaacattgctggacatttcaatgatgagtctcccctggggctgcgccggatcctctcacagtccacagactccctcaacatgcggaaccgaaccctatccgtggaatccctcattgacgaagcagaggtaatctacagtgagctgatgagtgactttgagatggatgagaaggactttgcagctgactcttggagtcttgctgtggacagcagcttcctgcagcagcataaaaaggaggtgatgaagcagcaagatgtcatctatgagctaatccagacagagctgcaccatgtgaggacactgaagatcatgacccgcctcttccgcacggggatgctggaagagctacacttggagccaggagtggtccagggcctgttcccctgcgtggacgagctcagtgacatccatacacgcttcctcagccagctattagaacgccgacgccaggccctgtgccctggcagcacccggaactttgtcatccatcgcttgggtgatctgctcatcagccagttctcaggtcctagtgcggagcagatgtgtaagacctactcggagttctgcagccgccacagcaaggccttaaagctctataaggagctgtacgcccgagacaaacgcttccagcaattcatccggaaagtgacccgccccgccgtgctcaagcggcacggggtacaggagtgcatcctgctggtgactcagcgcatcaccaagtacccgttactcatcagccgcatcctgcagcattcccacgggatcgaggaggagcgccaggacctgaccacagcactggggctagtgaaggagctgctgtccaatgtggacgagggtatttatcagctggagaaaggggcccgtctgcaggagatctacaaccgcatggaccctcgggcccaaaccccagtgcctggcaagggcccctttggccgagaggaacttctgaggcgcaaactcatccacgatggctgcctgctctggaagacagcgacggggcgcttcaaagatgtgctagtgctgctgatgacagatgtactggtgtttctccaggaaaaggaccagaagtacatctttcctaccctggtgagacattcattcttcacctttctcagcacagacaagtgttttagtctcttcttgctttcctgcccaagcccacgagagctctggagtcccccagagtcaaacagctataattgttactattaccgtaataataaaaaataagagcagctcacaggtactgttactgtgcacaggcacttttacacctgtgggaaaagattattttcgtcctcattttatagatgatgaaagtaaagcttcaagtcagttaaataatttgtcaagggttgcacacatttctaagtcccttctggctggcaccagtgcctggctcttaactggtattgtaagatgactcttcagtcctttcagtccttgtccagaaggattgaaggcctaaatatgccaagggacaggattcccaggcttaatccttcctttcccctgactggcaggacaagccttcagtggtatcgctgcagaatctaatcgtacgagacattgccaaccaggagaaagggatgtttctgatcagcgcagccccacctgagatgtacgaggtgcacacagcatcccgggatgaccggagcacctggatccgggtcattcagcagagcgtgcgcacgtgagtgtctgcctgccgcctgcatgtgcttatgacctcagggtacctgcagcattagatcccaaccatagaactccctgggaacagaatccagcattcagaggtgggggaagaggttgagggagagacaaaatggcccaagactggaaaggtcacctatgttcttatgtcctgtaaagccacattttatacattgccaacctcaactccctttcaaattcagcatgagctgacaagcaagggaatactttgagctgtcacatggtggcatacctgccagccaacagtacaatttcagctgcattcacatgttcatctgtaggcagagggctgtta

SEQ ID NO: 289654 - DNA, 1480 bp, Homo sapiens
agcggggtgctgggatcccgggagggagcggagcggacctgggcttggtcgcctccaagccggcgggaccgagtgctttaggccgctcgaaagaaagttgctccgacccgggaaaaggagaagatgaaggaagccaaggatgcccgctataccaatgggcacctcttcaccaccatttcagtttcaggcatgaccatgtgctatgcctgtaacaagagcatcacagccaaggaagccctcatctgcccaacctgcaatgtgactatccacaaccgctgtaaagacaccctcgccaactgtaccaaggtcaagcagaagcaacagaaagcggccctgctgaagaacaacaccgccttgcagtccgtttctcttcgaagtaagacaaccatccgggagcggccaagctcggccatctacccctccgacagcttccggcagtccctcctgggctcccgccgtggccgctcctccttgtctttagccaagagtgtttctaccaccaacattgctggacatttcaatgatgagtctcccctggggctgcgccggatcctctcacagtccacagactccctcaacatgcggaaccgaaccctatccgtggaatccctcattgacgaagcagaggtaatctacagtgagctgatgagtgactttgagatggatgagaaggactttgcagctgactcttggagtcttgctgtggacagcagcttcctgcagcagcataaaaaggaggtgatgaagcagcaagatgtcatctatgagctaatccagacagagctgcaccatgtgaggacactgaagatcatgacccgcctcttccgcacggggatgctggaagagctacacttggagccaggagtggtccagggcctgttcccctgcgtggacgagctcagtgacatccatacacgcttcctcagccagctattagaacgccgacgccaggccctgtgccctggcagcacccggaactttgtcatccatcgcttgggtgatctgctcatcagccagttctcaggtcctagtgcggagcagatgtgtaagacctactcggagttctgcagccgccacagcaaggccttaaagctctataaggagctgtacgcccgagacaaacgcttccagcaattcatccggaaagtgacccgccccgccgtgctcaagcggcacggggtacaggagtgcatcctgctggtgactcagcgcatcaccaagtacccgttactcatcagccgcatcctgcagcattcccacggtgagtaggcaggcccaggagagggccactgggagacggccacctggggtgaggaaaggctcggtatgaccacaggaagggtggggtcgggtgtgaaaccctgggcagcctctaaaggtggaatcaagacacgatgggaactggggtgtgagtgaaactggttgagccgttccccatgccaacccccggtgccagttgggcgctctccggtaccactca

SEQ ID NO: 289655 - DNA, 894 bp, Homo sapiens
agagaggggacccccaccaaagtgctggactgggttcttaaaggggccacctgaagcaggactttttcccacactgaagtcaccaactgacagcagaaacaggtcccccatctttgggatatctcccagttctgctcccagtagaatgtctaagaaatctttgatgaccagtgcaatctgtggaggttatacacttggaggaagggacagcacacgctgatggtttgcagtggtgggaagaccatctgatccagaggcaggaagataagtaaaatgacttcttagagccccttcctgctttcccagctcccctcccccatctcaagcatctgatcccagacctatttcagaatctcctatctctttgctcagtggaagcagtgatatgacatgatgtgatctcatttgagggctaaataaagccattgtgtgagacccagccctggcctctcccctgcaccatttcctgagctcaagaggctaagggaaaatgggaggggggctaggagagttaatctaatggaaaaagaagcaacacgatgatgggacccccagtttgaatttcagacagtggaggagggaatattgctaggagggagttgaggaagccttgttaaacctcatctctttgagggacagaataaaaagtattggcatcatagcatagccatttagaaacaagttctagggtgggttggaaaatctccaagagccctgacctcatcttccacctcagcaaccatgacctgaaacctcagcgtgaatttgggggatttttcagtggaacccttgcccccaaatgtcgaccagcccccaaatgtcgaagaattttcttcttgccaattttgttgtttaaaaaaaaaattcagggaaaattaaaaacctggaactcca

SEQ ID NO: 289656 - DNA, 187 bp, Homo sapiens
ccaagagtgtttctaccaccaacattgctgggtgagcctctgtttggggaaaggggcagccagagagtgtggcagtggaggccaagggggtgctgagaggtccctttccatccctgagttcagaactgtagacagacaaataaggagaacttagggggaccgcctcttggatcctggctttggttcc

SEQ ID NO: 289657 - DNA, 632 bp, Homo sapiens
gccagtgcagggggcattcccccagatgcccaagtgtcccacatgtgggggtgaatggcattcccctcagggtcctgtgtcattcctgttctcacctcttcctctttccccacagtggagggtctgaaagacctgctggtggggccaggagtggaactgctcttgacaccccgagagccagccctgcccttggaaccagacagcggtggtaacacgagtcctggggtcactgccagtgagtaccagggcaggggaccaaggtagtaggtgggaggggccaaagttagtagagtggtaccagggatcaagtggtatcagggccccagggaagtgagctcagccatccttttctccttctcaacagatggtgaggccagaaccttcaatggctccattgaactctgcagagctgactcagactctagccagagggtaggtcctcaagaggttctgggacttggcaagagggtgggagagggacagccagcctctggatcctcaacacaaagctgtcaggggcaggcacccaggatttgtgtgcctgctgactccccattcttgcccatttctgcaggatcgaaatggaaatcagctgagatcaccgcaagaggtgagatgggaattgatggtat

SEQ ID NO: 289658 - DNA, 4074 bp, Homo sapiens
gctgggcagtgcccatgctgggatgtgctgctgctgtggctgctgcccgctgctggcccacctagagcaggggtcacttcgagagaggacccgggaaaaggagaagatgaaggaagccaaggatgcccgctataccaatgggcacctcttcaccaccatttcagtttcaggcatgaccatgtgctatgcctgtaacaagagcatcacagccaaggaagccctcatctgcccaacctgcaatgtgactatccacaaccgctgtaaagacaccctcgccaactgtaccaaggtcaagcagaagcaacagaaagcggccctgctgaagaacaacaccgccttgcagtccgtttctcttcgaagtaagacaaccatccgggagcggccaagctcggccatctacccctccgacagcttccggcagtccctcctgggctcccgccgtggccgctcctccttgtctttagccaagagtgtttctaccaccaacattgctggacatttcaatgatgagtctcccctggggctgcgccggatcctctcacagtccacagactccctcaacatgcggaaccgaaccctatccgtggaatccctcattgacgaagcagaggtaatctacagtgagctgatgagtgactttgagatggatgagaaggactttgcagctgactcttggagtcttgctgtggacagcagcttcctgcagcagcataaaaaggaggtgatgaagcagcaagatgtcatctatgagctaatccagacagagctgcaccatgtgaggacactgaagatcatgacccgcctcttccgcacggggatgctggaagagctacacttggagccaggagtggtccagggcctgttcccctgcgtggacgagctcagtgacatccatacacgcttcctcagccagctattagaacgccgacgccaggccctgtgccctggcagcacccggaactttgtcatccatcgcttgggtgatctgctcatcagccagttctcaggtcctagtgcggagcagatgtgtaagacctactcggagttctgcagccgccacagcaaggccttaaagctctataaggagctgtacgcccgagacaaacgcttccagcaattcatccggaaagtgacccgccccgccgtgctcaagcggcacggggtacaggagtgcatcctgctggtgactcagcgcatcaccaagtacccgttactcatcagccgcatcctgcagcattcccacgggatcgaggaggagcgccaggacctgaccacagcactggggctagtgaaggagctgctgtccaatgtggacgagggtatttatcagctggagaaaggggcccgtctgcaggagatctacaaccgcatggaccctcgggcccaaaccccagtgcctggcaagggcccctttggccgagaggaacttctgaggcgcaaactcatccacgatggctgcctgctctggaagacagcgacggggcgcttcaaagatgtgctagtgctgctgatgacagatgtactggtgtttctccaggaaaaggaccagaagtacatctttcctaccctggacaagccttcagtggtatcgctgcagaatctaatcgtacgagacattgccaaccaggagaaagggatgtttctgatcagcgcagccccacctgagatgtacgaggtgcacacagcatcccgggatgaccggagcacctggatccgggtcattcagcagagcgtgcgcacatgcccatccagggaggacttccccctgattgagacagaggatgaggcttacctgcggcgaattaagatggagttgcagcagaaggaccgggcactggtggagctgctgcgagagaaggtcgggctgtttgctgagatgacccatttccaggccgaagaggatggtggcagtgggatggccctgcccaccctgcccaggggccttttccgctctgagtcccttgagtcccctcgtggcgagcggctgctgcaggatgccatccgtgaggtggagggtctgaaagacctgctggtggggccaggagtggaactgctcttgacaccccgagagccagccctgcccttggaaccagacagcggtggtaacacgagtcctggggtcactgccaatggtgaggccagaaccttcaatggctccattgaactctgcagagctgactcagactctagccagagggatcgaaatggaaatcagctgagatcaccgcaagaggaggcgttacagcgattggtcaatctctatggacttctacatggcctacaggcagctgtggcccagcaggacactctgatggaagcccggttccctgagggccctgagcggcgggagaagctgtgccgagccaactctcgggatggggaggctggcagggctggggctgcccctgtggcccctgaaaagcaggccacggaactggcattactgcagcggcaacatgcgctgctgcaggaggagctacggcgctgccggcggctaggtgaagaacgggcaaccgaagctggcagcctggaggcccggctccgggagagtgagcaggcccgggcactgctggagcgtgaggccgaagaggctcgaaggcagctggccgccctgggccagaccgagccactcccagctgaggccccctgggcccgcagacctgtggatcctcggcggcgcagcctccccgcaggcgatgccctgtacttgagtttcaaccccccacagcccagccgaggcactgaccgcctggatctacctgtcactactcgctctgtccatcgaaactttgaggaccgagagaggcaggaactggggagccccgaagagcggctgcaagacagcagtgaccctgacactggcagcgaggaggaaggtagcagccgtctgtctccgccccacagtccacgagactttaccagaatgcaggacatcccggaggagacggagagccgcgacggggaggctgtagcctccgagagctaagggggcccctcccccctgccccgtgccccactgaagaacattactgagggggctaaccttggggactccaatttgccaatgatgagggaacatttgaaagaactgcaaattgtccttgccagctcttgggatccttggatacctggggccatttaagaagctaggggaattaggccacaacaccccctgggacatccgaaagctacaccacagatgccagtggttcatgccttcttcccgcaactttaggaaaatttatttatttattgtttattagttatggggggagaggggagatttaaaggaccagggacatgggaaccaagccatagggatcagagggccttgtccttgaacactactggggtatattcaggctcatccacgcagctgctgggttcttgccctaacggccctcccctgcaacatccgtcttggaggagaggctgcagccacagcaccctactgccctttaaataaaggagggctgtgggcagggccatgtccctttctcctctcccctcaacctcttactgctgttctccctttctccgtccttcatggaagccctgggagataacctggcttcctggagttgatggaataaaggttggggtggccataatggtttgttgggggtgagggaaaaaacccacagggaccagaatgttttgttgttcttttgttttcttttttgtaccaaagtcaactgcacgtgttttatatttttaagagatcgtaggcaattagagatcgaagcctcctatctccacatctctgaagaagttgaggggtgggggagagaatgacttctgccttcatctgcagtaacggggggacctatactgacctcttccccagccatttagaaacaagttctagggtgggttggaaaatctccaagagccctgacctcatcttccacctcagcaaccatgacctgaaacctcagcgtgaatttgggggatttttcagtggaacccttgcccccaaatgtcgaccagcccccaaatgtcgaagaattttcttcttgccaattttgttgtttaaaaaaaaaattcagggaaaattaaaaacctggaactcca

SEQ ID NO: 289659 - DNA, 562 bp, Homo sapiens
tgaaggatattgagatactggttggagaactgaaaagaaatgtagatgggtgcaggggtggaggaaattaactcgggtcgtggtgctgaaagaggccagttggtggtggatctcctgaaggggactcatgggtgagccccaggggggagagctgctgccttcagccaagcagaacctccaatcttcacactactcagtccctgacctgctgttcttcctgcccactgtccacagcccagccgaggcactgaccgcctggatctacctgtcactactcgctctgtccatcgaaactttgaggaccgagagaggcaggaactggggagccccgaagagcggctgcaagacagcagtgaccctgacactggcagcgaggaggaaggtagcagccgtctgtctccgccccacagtccacgaggtgagaccctggcggagacatggaccagaggtagagtgcagcctgggtacgtgtgagcttgtataactctagggctcctgtatagaagcaggaggggcctctctcctccaactggttggtgattcccaacctttagaagtaaaa

SEQ ID NO: 289660 - DNA, 4101 bp, Homo sapiens
acagcagctcgggggtgagcagagctagggctgggaaggtggagtgaggacgcagagacctagagccagtgtagatgatgtggcaacatggaggcagcccagccgtaggggccagacccgggaaaaggagaagatgaaggaagccaaggatgcccgctataccaatgggcacctcttcaccaccatttcagtttcaggcatgaccatgtgctatgcctgtaacaagagcatcacagccaaggaagccctcatctgcccaacctgcaatgtgactatccacaaccgctgtaaagacaccctcgccaactgtaccaaggtcaagcagaagcaacagaaagcggccctgctgaagaacaacaccgccttgcagtccgtttctcttcgaagtaagacaaccatccgggagcggccaagctcggccatctacccctccgacagcttccggcagtccctcctgggctcccgccgtggccgctcctccttgtctttagccaagagtgtttctaccaccaacattgctggacatttcaatgatgagtctcccctggggctgcgccggatcctctcacagtccacagactccctcaacatgcggaaccgaaccctatccgtggaatccctcattgacgaagcagaggtaatctacagtgagctgatgagtgactttgagatggatgagaaggactttgcagctgactcttggagtcttgctgtggacagcagcttcctgcagcagcataaaaaggaggtgatgaagcagcaagatgtcatctatgagctaatccagacagagctgcaccatgtgaggacactgaagatcatgacccgcctcttccgcacggggatgctggaagagctacacttggagccaggagtggtccagggcctgttcccctgcgtggacgagctcagtgacatccatacacgcttcctcagccagctattagaacgccgacgccaggccctgtgccctggcagcacccggaactttgtcatccatcgcttgggtgatctgctcatcagccagttctcaggtcctagtgcggagcagatgtgtaagacctactcggagttctgcagccgccacagcaaggccttaaagctctataaggagctgtacgcccgagacaaacgcttccagcaattcatccggaaagtgacccgccccgccgtgctcaagcggcacggggtacaggagtgcatcctgctggtgactcagcgcatcaccaagtacccgttactcatcagccgcatcctgcagcattcccacgggatcgaggaggagcgccaggacctgaccacagcactggggctagtgaaggagctgctgtccaatgtggacgagggtatttatcagctggagaaaggggcccgtctgcaggagatctacaaccgcatggaccctcgggcccaaaccccagtgcctggcaagggcccctttggccgagaggaacttctgaggcgcaaactcatccacgatggctgcctgctctggaagacagcgacggggcgcttcaaagatgtgctagtgctgctgatgacagatgtactggtgtttctccaggaaaaggaccagaagtacatctttcctaccctggacaagccttcagtggtatcgctgcagaatctaatcgtacgagacattgccaaccaggagaaagggatgtttctgatcagcgcagccccacctgagatgtacgaggtgcacacagcatcccgggatgaccggagcacctggatccgggtcattcagcagagcgtgcgcacatgcccatccagggaggacttccccctgattgagacagaggatgaggcttacctgcggcgaattaagatggagttgcagcagaaggaccgggcactggtggagctgctgcgagagaaggtcgggctgtttgctgagatgacccatttccaggccgaagaggatggtggcagtgggatggccctgcccaccctgcccaggggccttttccgctctgagtcccttgagtcccctcgtggcgagcggctgctgcaggatgccatccgtgaggtggagggtctgaaagacctgctggtggggccaggagtggaactgctcttgacaccccgagagccagccctgcccttggaaccagacagcggtggtaacacgagtcctggggtcactgccaatggtgaggccagaaccttcaatggctccattgaactctgcagagctgactcagactctagccagagggatcgaaatggaaatcagctgagatcaccgcaagaggaggcgttacagcgattggtcaatctctatggacttctacatggcctacaggcagctgtggcccagcaggacactctgatggaagcccggttccctgagggccctgagcggcgggagaagctgtgccgagccaactctcgggatggggaggctggcagggctggggctgcccctgtggcccctgaaaagcaggccacggaactggcattactgcagcggcaacatgcgctgctgcaggaggagctacggcgctgccggcggctaggtgaagaacgggcaaccgaagctggcagcctggaggcccggctccgggagagtgagcaggcccgggcactgctggagcgtgaggccgaagaggctcgaaggcagctggccgccctgggccagaccgagccactcccagctgaggccccctgggcccgcagacctgtggatcctcggcggcgcagcctccccgcaggcgatgccctgtacttgagtttcaaccccccacagcccagccgaggcactgaccgcctggatctacctgtcactactcgctctgtccatcgaaactttgaggaccgagagaggcaggaactggggagccccgaagagcggctgcaagacagcagtgaccctgacactggcagcgaggaggaaggtagcagccgtctgtctccgccccacagtccacgagactttaccagaatgcaggacatcccggaggagacggagagccgcgacggggaggctgtagcctccgagagctaagggggcccctcccccctgccccgtgccccactgaagaacattactgagggggctaaccttggggactccaatttgccaatgatgagggaacatttgaaagaactgcaaattgtccttgccagctcttgggatccttggatacctggggccatttaagaagctaggggaattaggccacaacaccccctgggacatccgaaagctacaccacagatgccagtggttcatgccttcttcccgcaactttaggaaaatttatttatttattgtttattagttatggggggagaggggagatttaaaggaccagggacatgggaaccaagccatagggatcagagggccttgtccttgaacactactggggtatattcaggctcatccacgcagctgctgggttcttgccctaacggccctcccctgcaacatccgtcttggaggagaggctgcagccacagcaccctactgccctttaaataaaggagggctgtgggcagggccatgtccctttctcctctcccctcaacctcttactgctgttctccctttctccgtccttcatggaagccctgggagataacctggcttcctggagttgatggaataaaggttggggtggccataatggtttgttgggggtgagggaaaaaacccacagggaccagaatgttttgttgttcttttgttttcttttttgtaccaaagtcaactgcacgtgttttatatttttaagagatcgtaggcaattagagatcgaagcctcctatctccacatctctgaagaagttgaggggtgggggagagaatgacttctgccttcatctgcagtaacggggggacctatactgacctcttccccagccatttagaaacaagttctagggtgggttggaaaatctccaagagccctgacctcatcttccacctcagcaaccatgacctgaaacctcagcgtgaatttgggggatttttcagtggaacccttgcccccaaatgtcgaccagcccccaaatgtcgaagaattttcttcttgccaattttgttgtttaaaaaaaaaattcagggaaaattaaaaacctggaactcca

SEQ ID NO: 289661 - DNA, 3568 bp, Homo sapiens
ccatctgtatcacagacaggtgccggatcctctcacagtccacagactccctcaacatgcggaaccgaaccctatccgtggaatccctcattgacgaagcagaggtaatctacagtgagctgatgagtgactttgagatggatgagaaggactttgcagctgactcttggagtcttgctgtggacagcagcttcctgcagcagcataaaaaggaggtgatgaagcagcaagatgtcatctatgagctaatccagacagagctgcaccatgtgaggacactgaagatcatgacccgcctcttccgcacggggatgctggaagagctacacttggagccaggagtggtccagggcctgttcccctgcgtggacgagctcagtgacatccatacacgcttcctcagccagctattagaacgccgacgccaggccctgtgccctggcagcacccggaactttgtcatccatcgcttgggtgatctgctcatcagccagttctcaggtcctagtgcggagcagatgtgtaagacctactcggagttctgcagccgccacagcaaggccttaaagctctataaggagctgtacgcccgagacaaacgcttccagcaattcatccggaaagtgacccgccccgccgtgctcaagcggcacggggtacaggagtgcatcctgctggtgactcagcgcatcaccaagtacccgttactcatcagccgcatcctgcagcattcccacgggatcgaggaggagcgccaggacctgaccacagcactggggctagtgaaggagctgctgtccaatgtggacgagggtatttatcagctggagaaaggggcccgtctgcaggagatctacaaccgcatggaccctcgggcccaaaccccagtgcctggcaagggcccctttggccgagaggaacttctgaggcgcaaactcatccacgatggctgcctgctctggaagacagcgacggggcgcttcaaagatgtgctagtgctgctgatgacagatgtactggtgtttctccaggaaaaggaccagaagtacatctttcctaccctggacaagccttcagtggtatcgctgcagaatctaatcgtacgagacattgccaaccaggagaaagggatgtttctgatcagcgcagccccacctgagatgtacgaggtgcacacagcatcccgggatgaccggagcacctggatccgggtcattcagcagagcgtgcgcacatgcccatccagggaggacttccccctgattgagacagaggatgaggcttacctgcggcgaattaagatggagttgcagcagaaggaccgggcactggtggagctgctgcgagagaaggtcgggctgtttgctgagatgacccatttccaggccgaagaggatggtggcagtgggatggccctgcccaccctgcccaggggccttttccgctctgagtcccttgagtcccctcgtggcgagcggctgctgcaggatgccatccgtgaggtggagggtctgaaagacctgctggtggggccaggagtggaactgctcttgacaccccgagagccagccctgcccttggaaccagacagcggtggtaacacgagtcctggggtcactgccaatggtgaggccagaaccttcaatggctccattgaactctgcagagctgactcagactctagccagagggatcgaaatggaaatcagctgagatcaccgcaagaggaggcgttacagcgattggtcaatctctatggacttctacatggcctacaggcagctgtggcccagcaggacactctgatggaagcccggttccctgagggccctgagcggcgggagaagctgtgccgagccaactctcgggatggggaggctggcagggctggggctgcccctgtggcccctgaaaagcaggccacggaactggcattactgcagcggcaacatgcgctgctgcaggaggagctacggcgctgccggcggctaggtgaagaacgggcaaccgaagctggcagcctggaggcccggctccgggagagtgagcaggcccgggcactgctggagcgtgaggccgaagaggctcgaaggcagctggccgccctgggccagaccgagccactcccagctgaggccccctgggcccgcagacctgtggatcctcggcggcgcagcctccccgcaggcgatgccctgtacttgagtttcaaccccccacagcccagccgaggcactgaccgcctggatctacctgtcactactcgctctgtccatcgaaactttgaggaccgagagaggcaggaactggggagccccgaagagcggctgcaagacagcagtgaccctgacactggcagcgaggaggaaggtagcagccgtctgtctccgccccacagtccacgagactttaccagaatgcaggacatcccggaggagacggagagccgcgacggggaggctgtagcctccgagagctaagggggcccctcccccctgccccgtgccccactgaagaacattactgagggggctaaccttggggactccaatttgccaatgatgagggaacatttgaaagaactgcaaattgtccttgccagctcttgggatccttggatacctggggccatttaagaagctaggggaattaggccacaacaccccctgggacatccgaaagctacaccacagatgccagtggttcatgccttcttcccgcaactttaggaaaatttatttatttattgtttattagttatggggggagaggggagatttaaaggaccagggacatgggaaccaagccatagggatcagagggccttgtccttgaacactactggggtatattcaggctcatccacgcagctgctgggttcttgccctaacggccctcccctgcaacatccgtcttggaggagaggctgcagccacagcaccctactgccctttaaataaaggagggctgtgggcagggccatgtccctttctcctctcccctcaacctcttactgctgttctccctttctccgtccttcatggaagccctgggagataacctggcttcctggagttgatggaataaaggttggggtggccataatggtttgttgggggtgagggaaaaaacccacagggaccagaatgttttgttgttcttttgttttcttttttgtaccaaagtcaactgcacgtgttttatatttttaagagatcgtaggcaattagagatcgaagcctcctatctccacatctctgaagaagttgaggggtgggggagagaatgacttctgccttcatctgcagtaacggggggacctatactgacctcttccccagccatttagaaacaagttctagggtgggttggaaaatctccaagagccctgacctcatcttccacctcagcaaccatgacctgaaacctcagcgtgaatttgggggatttttcagtggaacccttgcccccaaatgtcgaccagcccccaaatgtcgaagaattttcttcttgccaattttgttgtttaaaaaaaaaattcagggaaaattaaaaacctggaactcca

SEQ ID NO: 289662 - DNA, 3617 bp, Homo sapiens
agctacaagttgttactacactggcacatattgcttgaacatttcaatgatgagtctcccctggggctgcgccggatcctctcacagtccacagactccctcaacatgcggaaccgaaccctatccgtggaatccctcattgacgaagcagaggtaatctacagtgagctgatgagtgactttgagatggatgagaaggactttgcagctgactcttggagtcttgctgtggacagcagcttcctgcagcagcataaaaaggaggtgatgaagcagcaagatgtcatctatgagctaatccagacagagctgcaccatgtgaggacactgaagatcatgacccgcctcttccgcacggggatgctggaagagctacacttggagccaggagtggtccagggcctgttcccctgcgtggacgagctcagtgacatccatacacgcttcctcagccagctattagaacgccgacgccaggccctgtgccctggcagcacccggaactttgtcatccatcgcttgggtgatctgctcatcagccagttctcaggtcctagtgcggagcagatgtgtaagacctactcggagttctgcagccgccacagcaaggccttaaagctctataaggagctgtacgcccgagacaaacgcttccagcaattcatccggaaagtgacccgccccgccgtgctcaagcggcacggggtacaggagtgcatcctgctggtgactcagcgcatcaccaagtacccgttactcatcagccgcatcctgcagcattcccacgggatcgaggaggagcgccaggacctgaccacagcactggggctagtgaaggagctgctgtccaatgtggacgagggtatttatcagctggagaaaggggcccgtctgcaggagatctacaaccgcatggaccctcgggcccaaaccccagtgcctggcaagggcccctttggccgagaggaacttctgaggcgcaaactcatccacgatggctgcctgctctggaagacagcgacggggcgcttcaaagatgtgctagtgctgctgatgacagatgtactggtgtttctccaggaaaaggaccagaagtacatctttcctaccctggacaagccttcagtggtatcgctgcagaatctaatcgtacgagacattgccaaccaggagaaagggatgtttctgatcagcgcagccccacctgagatgtacgaggtgcacacagcatcccgggatgaccggagcacctggatccgggtcattcagcagagcgtgcgcacatgcccatccagggaggacttccccctgattgagacagaggatgaggcttacctgcggcgaattaagatggagttgcagcagaaggaccgggcactggtggagctgctgcgagagaaggtcgggctgtttgctgagatgacccatttccaggccgaagaggatggtggcagtgggatggccctgcccaccctgcccaggggccttttccgctctgagtcccttgagtcccctcgtggcgagcggctgctgcaggatgccatccgtgaggtggagggtctgaaagacctgctggtggggccaggagtggaactgctcttgacaccccgagagccagccctgcccttggaaccagacagcggtggtaacacgagtcctggggtcactgccaatggtgaggccagaaccttcaatggctccattgaactctgcagagctgactcagactctagccagagggatcgaaatggaaatcagctgagatcaccgcaagaggaggcgttacagcgattggtcaatctctatggacttctacatggcctacaggcagctgtggcccagcaggacactctgatggaagcccggttccctgagggccctgagcggcgggagaagctgtgccgagccaactctcgggatggggaggctggcagggctggggctgcccctgtggcccctgaaaagcaggccacggaactggcattactgcagcggcaacatgcgctgctgcaggaggagctacggcgctgccggcggctaggtgaagaacgggcaaccgaagctggcagcctggaggcccggctccgggagagtgagcaggcccgggcactgctggagcgtgaggccgaagaggctcgaaggcagctggccgccctgggccagaccgagccactcccagctgaggccccctgggcccgcagacctgtggatcctcggcggcgcagcctccccgcaggcgatgccctgtacttgagtttcaaccccccacagcccagccgaggcactgaccgcctggatctacctgtcactactcgctctgtccatcgaaactttgaggaccgagagaggcaggaactggggagccccgaagagcggctgcaagacagcagtgaccctgacactggcagcgaggaggaaggtagcagccgtctgtctccgccccacagtccacgagactttaccagaatgcaggacatcccggaggagacggagagccgcgacggggaggctgtagcctccgagagctaagggggcccctcccccctgccccgtgccccactgaagaacattactgagggggctaaccttggggactccaatttgccaatgatgagggaacatttgaaagaactgcaaattgtccttgccagctcttgggatccttggatacctggggccatttaagaagctaggggaattaggccacaacaccccctgggacatccgaaagctacaccacagatgccagtggttcatgccttcttcccgcaactttaggaaaatttatttatttattgtttattagttatggggggagaggggagatttaaaggaccagggacatgggaaccaagccatagggatcagagggccttgtccttgaacactactggggtatattcaggctcatccacgcagctgctgggttcttgccctaacggccctcccctgcaacatccgtcttggaggagaggctgcagccacagcaccctactgccctttaaataaaggagggctgtgggcagggccatgtccctttctcctctcccctcaacctcttactgctgttctccctttctccgtccttcatggaagccctgggagataacctggcttcctggagttgatggaataaaggttggggtggccataatggtttgttgggggtgagggaaaaaacccacagggaccagaatgttttgttgttcttttgttttcttttttgtaccaaagtcaactgcacgtgttttatatttttaagagatcgtaggcaattagagatcgaagcctcctatctccacatctctgaagaagttgaggggtgggggagagaatgacttctgccttcatctgcagtaacggggggacctatactgacctcttccccagccatttagaaacaagttctagggtgggttggaaaatctccaagagccctgacctcatcttccacctcagcaaccatgacctgaaacctcagcgtgaatttgggggatttttcagtggaacccttgcccccaaatgtcgaccagcccccaaatgtcgaagaattttcttcttgccaattttgttgtttaaaaaaaaaattcagggaaaattaaaaacctggaactcca

SEQ ID NO: 289663 - DNA, 4528 bp, Homo sapiens
agcggggtgctgggatcccgggagggagcggagcggacctgggcttggtcgcctccaagccggcgggaccgagtgctttaggccgctcgaaagaaagttgctccgacccgggaaaaggagaagatgaaggaagccaaggatgcccgctataccaatgggcacctcttcaccaccatttcagtttcaggcatgaccatgtgctatgcctgtaacaagagcatcacagccaaggaagccctcatctgcccaacctgcaatgtgactatccacaaccgctgtaaagacaccctcgccaactgtaccaaggtcaagcagaagcaacagaaagcggccctgctgaagaacaacaccgccttgcagtccgtttctcttcgaagtaagacaaccatccgggagcggccaagctcggccatctacccctccgacagcttccggcagtccctcctgggctcccgccgtggccgctcctccttgtctttagccaagagtgtttctaccaccaacattgctggacatttcaatgatgagtctcccctggggctgcgccggatcctctcacagtccacagactccctcaacatgcggaaccgaaccctatccgtggaatccctcattgacgaagcagaggtaatctacagtgagctgatgagtgactttgagatggatgagaaggactttgcagctgactcttggagtcttgctgtggacagcagcttcctgcagcagcataaaaaggaggtgatgaagcagcaagatgtcatctatgagctaatccagacagagctgcaccatgtgaggacactgaagatcatgacccgcctcttccgcacggggatgctggaagagctacacttggagccaggagtggtccagggcctgttcccctgcgtggacgagctcagtgacatccatacacgcttcctcagccagctattagaacgccgacgccaggccctgtgccctggcagcacccggaactttgtcatccatcgcttgggtgatctgctcatcagccagttctcaggtcctagtgcggagcagatgtgtaagacctactcggagttctgcagccgccacagcaaggccttaaagctctataaggagctgtacgcccgagacaaacgcttccagcaattcatccggaaagtgacccgccccgccgtgctcaagcggcacggggtacaggagtgcatcctgctggtgactcagcgcatcaccaagtacccgttactcatcagccgcatcctgcagcattcccacgggatcgaggaggagcgccaggacctgaccacagcactggggctagtgaaggagctgctgtccaatgtggacgagggtatttatcagctggagaaaggggcccgtctgcaggagatctacaaccgcatggaccctcgggcccaaaccccagtgcctggcaagggcccctttggccgagaggaacttctgaggcgcaaactcatccacgatggctgcctgctctggaagacagcgacggggcgcttcaaagatgtgctagtgctgctgatgacagatgtactggtgtttctccaggaaaaggaccagaagtacatctttcctaccctggtgagacattcattcttcacctttctcagcacagacaagtgttttagtctcttcttgctttcctgcccaagcccacgagagctctggagtcccccagagtcaaacagctataattgttactattaccgtaataataaaaaataagagcagctcacaggtactgttactgtgcacaggcacttttacacctgtgggaaaagattattttcgtcctcattttatagatgatgaaagtaaagcttcaagtcagttaaataatttgtcaagggttgcacacatttctaagtcccttctggctggcaccagtgcctggctcttaactggtattgtaagatgactcttcagtcctttcagtccttgtccagaaggattgaaggcctaaatatgccaagggacaggattcccaggcttaatccttcctttcccctgactggcaggacaagccttcagtggtatcgctgcagaatctaatcgtacgagacattgccaaccaggagaaagggatgtttctgatcagcgcagccccacctgagatgtacgaggtgcacacagcatcccgggatgaccggagcacctggatccgggtcattcagcagagcgtgcgcacatgcccatccagggaggacttccccctgattgagacagaggatgaggcttacctgcggcgaattaagatggagttgcagcagaaggaccgggcactggtggagctgctgcgagagaaggtcgggctgtttgctgagatgacccatttccaggccgaagaggatggtggcagtgggatggccctgcccaccctgcccaggggccttttccgctctgagtcccttgagtcccctcgtggcgagcggctgctgcaggatgccatccgtgaggtggagggtctgaaagacctgctggtggggccaggagtggaactgctcttgacaccccgagagccagccctgcccttggaaccagacagcggtggtaacacgagtcctggggtcactgccaatggtgaggccagaaccttcaatggctccattgaactctgcagagctgactcagactctagccagagggatcgaaatggaaatcagctgagatcaccgcaagaggaggcgttacagcgattggtcaatctctatggacttctacatggcctacaggcagctgtggcccagcaggacactctgatggaagcccggttccctgagggccctgagcggcgggagaagctgtgccgagccaactctcgggatggggaggctggcagggctggggctgcccctgtggcccctgaaaagcaggccacggaactggcattactgcagcggcaacatgcgctgctgcaggaggagctacggcgctgccggcggctaggtgaagaacgggcaaccgaagctggcagcctggaggcccggctccgggagagtgagcaggcccgggcactgctggagcgtgaggccgaagaggctcgaaggcagctggccgccctgggccagaccgagccactcccagctgaggccccctgggcccgcagacctgtggatcctcggcggcgcagcctccccgcaggcgatgccctgtacttgagtttcaaccccccacagcccagccgaggcactgaccgcctggatctacctgtcactactcgctctgtccatcgaaactttgaggaccgagagaggcaggaactggggagccccgaagagcggctgcaagacagcagtgaccctgacactggcagcgaggaggaaggtagcagccgtctgtctccgccccacagtccacgagactttaccagaatgcaggacatcccggaggagacggagagccgcgacggggaggctgtagcctccgagagctaagggggcccctcccccctgccccgtgccccactgaagaacattactgagggggctaaccttggggactccaatttgccaatgatgagggaacatttgaaagaactgcaaattgtccttgccagctcttgggatccttggatacctggggccatttaagaagctaggggaattaggccacaacaccccctgggacatccgaaagctacaccacagatgccagtggttcatgccttcttcccgcaactttaggaaaatttatttatttattgtttattagttatggggggagaggggagatttaaaggaccagggacatgggaaccaagccatagggatcagagggccttgtccttgaacactactggggtatattcaggctcatccacgcagctgctgggttcttgccctaacggccctcccctgcaacatccgtcttggaggagaggctgcagccacagcaccctactgccctttaaataaaggagggctgtgggcagggccatgtccctttctcctctcccctcaacctcttactgctgttctccctttctccgtccttcatggaagccctgggagataacctggcttcctggagttgatggaataaaggttggggtggccataatggtttgttgggggtgagggaaaaaacccacagggaccagaatgttttgttgttcttttgttttcttttttgtaccaaagtcaactgcacgtgttttatatttttaagagatcgtaggcaattagagatcgaagcctcctatctccacatctctgaagaagttgaggggtgggggagagaatgacttctgccttcatctgcagtaacggggggacctatactgacctcttccccagccatttagaaacaagttctagggtgggttggaaaatctccaagagccctgacctcatcttccacctcagcaaccatgacctgaaacctcagcgtgaatttgggggatttttcagtggaacccttgcccccaaatgtcgaccagcccccaaatgtcgaagaattttcttcttgccaattttgttgtttaaaaaaaaaattcagggaaaattaaaaacctggaactcca

SEQ ID NO: 289664 - DNA, 4593 bp, Homo sapiens
ccgggcgaggggagtcagacttcctgtccccgagaccaacgcgtgcgggccgaacccctccccccgccttcccccaacaatacaggacgccggggtccgcgccgcgtcctccctggtccccccgtccgattatgtctcggatcgaatccctcacgcgggcgcggatcgaccggagcagagagctggcgagcaagacccgggaaaaggagaagatgaaggaagccaaggatgcccgctataccaatgggcacctcttcaccaccatttcagtttcaggcatgaccatgtgctatgcctgtaacaagagcatcacagccaaggaagccctcatctgcccaacctgcaatgtgactatccacaaccgctgtaaagacaccctcgccaactgtaccaaggtcaagcagaagcaacagaaagcggccctgctgaagaacaacaccgccttgcagtccgtttctcttcgaagtaagacaaccatccgggagcggccaagctcggccatctacccctccgacagcttccggcagtccctcctgggctcccgccgtggccgctcctccttgtctttagccaagagtgtttctaccaccaacattgctggacatttcaatgatgagtctcccctggggctgcgccggatcctctcacagtccacagactccctcaacatgcggaaccgaaccctatccgtggaatccctcattgacgaagcagaggtaatctacagtgagctgatgagtgactttgagatggatgagaaggactttgcagctgactcttggagtcttgctgtggacagcagcttcctgcagcagcataaaaaggaggtgatgaagcagcaagatgtcatctatgagctaatccagacagagctgcaccatgtgaggacactgaagatcatgacccgcctcttccgcacggggatgctggaagagctacacttggagccaggagtggtccagggcctgttcccctgcgtggacgagctcagtgacatccatacacgcttcctcagccagctattagaacgccgacgccaggccctgtgccctggcagcacccggaactttgtcatccatcgcttgggtgatctgctcatcagccagttctcaggtcctagtgcggagcagatgtgtaagacctactcggagttctgcagccgccacagcaaggccttaaagctctataaggagctgtacgcccgagacaaacgcttccagcaattcatccggaaagtgacccgccccgccgtgctcaagcggcacggggtacaggagtgcatcctgctggtgactcagcgcatcaccaagtacccgttactcatcagccgcatcctgcagcattcccacgggatcgaggaggagcgccaggacctgaccacagcactggggctagtgaaggagctgctgtccaatgtggacgagggtatttatcagctggagaaaggggcccgtctgcaggagatctacaaccgcatggaccctcgggcccaaaccccagtgcctggcaagggcccctttggccgagaggaacttctgaggcgcaaactcatccacgatggctgcctgctctggaagacagcgacggggcgcttcaaagatgtgctagtgctgctgatgacagatgtactggtgtttctccaggaaaaggaccagaagtacatctttcctaccctggacaagccttcagtggtatcgctgcagaatctaatcgtacgagacattgccaaccaggagaaagggatgtttctgatcagcgcagccccacctgagatgtacgaggtgcacacagcatcccgggatgaccggagcacctggatccgggtcattcagcagagcgtgcgcacatgcccatccagggaggacttccccctgattgagacagaggatgaggcttacctgcggcgaattaagatggagttgcagcagaaggaccgggcactggtggagctgctgcgagagaaggtcgggctgtttgctgagatgacccatttccaggccgaagaggatggtggcagtgggatggccctgcccaccctgcccaggggccttttccgctctgagtcccttgagtcccctcgtggcgagcggctgctgcaggatgccatccgtgaggtggagggtctgaaagacctgctggtggggccaggagtggaactgctcttgacaccccgagagccagccctgcccttggaaccagacagcggtggtaacacgagtcctggggtcactgccaatggtgaggccagaaccttcaatggctccattgaactctgcagagctgactcagactctagccagagggatcgaaatggaaatcagctgagatcaccgcaagaggaggcgttacagcgattggtcaatctctatggacttctacatggcctacaggcagctgtggcccagcaggacactctgatggaagcccggttccctgagggccctgagcggcgggagaagctgtgccgagccaactctcgggatggggaggctggcagggctggggctgcccctgtggcccctgaaaagcaggccacggaactggcattactgcagcggcaacatgcgctgctgcaggaggagctacggcgctgccggcggctaggtgaagaacgggcaaccgaagctggcagcctggaggcccggctccgggagagtgagcaggcccgggcactgctggagcgtgaggccgaagaggctcgaaggcagctggccgccctgggccagaccgagccactcccagctgaggccccctgggcccgcagacctgtggatcctcggcggcgcagcctccccgcaggcgatgccctgtacttgagtttcaaccccccacagcccagccgaggcactgaccgcctggatctacctgtcactactcgctctgtccatcgaaactttgaggaccgagagaggcaggaactggggagccccgaagagcggctgcaagacagcagtgaccctgacactggcagcgaggaggaaggtagcagccgtctgtctccgccccacagtccacgagactttaccagaatgcaggacatcccggaggagacggagagccgcgacggggaggctgtagcctccgagagctaagggggcccctcccccctgccccgtgccccactgaagaacattactgagggggctaaccttggggactccaatttgccaatgatgagggaacatttgaaagaactgcaaattgtccttgccagctcttgggatccttggatacctggggccatttaagaagctaggggaattaggccacaacaccccctgggacatccgaaagctacaccacagatgccagtggttcatgccttcttcccgcaactttaggaaaatttatttatttattgtttattagttatggggggagaggggagatttaaaggaccagggacatgggaaccaagccatagggatcagagggccttgtccttgaacactactggggtatattcaggctcatccacgcagctgctgggttcttgccctaacggccctcccctgcaacatccgtcttggaggagaggctgcagccacagcaccctactgccctttaaataaaggagggctgtgggcagggccatgtccctttctcctctcccctcaacctcttactgctgttctccctttctccgtccttcatggaagccctgggagataacctggcttcctggagttgatggaataaaggttggggtggccataatggtttgttgggggtgagggaaaaaacccacagggaccagaatgttttgttgttcttttgttttcttttttgtaccaaagtcaactgcacgtgttttatatttttaagagatcgtaggcaattagagatcgaagcctcctatctccacatctctgaagaagttgaggggtgggggagagaatgacttctgccttcatctgcagtaacggggggacctatactgacctcttccccagccatttagaaacaagttctagggtgggttggaaaatctccaagagccctgacctcatcttccacctcagcaaccatgacctgaaacctcagcgtgaatttgggggatttttcagtggaacccttgcccccaaatgtcgaccagcccccaaatgtcgaagaattttcttcttgccaattttgttgtttaaaaaaaaaattcagggaaaattaaaaacctggaactccaaaaaaaaaaaaaaaaaaaaaaaaaaaaaaaaaaaaaaaaaaaaaaaaaaaaaaagccaaaaaacaaaaaacaaaaaaaacaacaaaaaaaaaaaaaacataggaagcagaagcgaaaacaaaaaaagacaaaagaaacatggaacaacacgagcgtggccgccggagaacaagggaaaagagacacggaggagatataacacaacggggcagcaacaacacaacgggggggaaacacagagaggaggcgcagacaaaaatgcacaaaaggggaagcagtcacgaaggaaacaaaagagggggagaaataaacaaggaggagacgacaaaggaagacagagaggacagaaataaacacgcaacagtggggaacagagagagacacaaagaaagcacacagagagggaaaaaaaa

SEQ ID NO: 289665 - DNA, 4068 bp, Homo sapiens
ccgggcgaggggagtcagacttcctgtccccgagaccaacgcgtgcgggccgaacccctccccccgccttcccccaacaatacaggacgccggggtccgcgccgcgtcctccctggtccccccgtccgattatgtctcggatcgaatccctcacgcgggcgcggatcgaccggagcagagagctggcgagcaagacccgggaaaaggagaagatgaaggaagccaaggatgcccgctataccaatgggcacctcttcaccaccatttcagtttcaggcatgaccatgtgctatgcctgtaacaagagcatcacagccaaggaagccctcatctgcccaacctgcaatgtgactatccacaaccgctgtaaagacaccctcgccaactgtaccaaggtcaagcagaagcaacagaaagcggccctgctgaagaacaacaccgccttgcagtccgtttctcttcgaagtaagacaaccatccgggagcggccaagctcggccatctacccctccgacagcttccggcagtccctcctgggctcccgccgtggccgctcctccttgtctttagccaagagtgtttctaccaccaacattgctggacatttcaatgatgagtctcccctggggctgcgccggatcctctcacagtccacagactccctcaacatgcggaaccgaaccctatccgtggaatccctcattgacgaagcagaggtaatctacagtgagctgatgagtgactttgagatggatgagaaggactttgcagctgactcttggagtcttgctgtggacagcagcttcctgcagcagcataaaaaggaggtgatgaagcagcaagatgtcatctatgagctaatccagacagagctgcaccatgtgaggacactgaagatcatgacccgcctcttccgcacggggatgctggaagagctacacttggagccaggagtggtccagggcctgttcccctgcgtggacgagctcagtgacatccatacacgcttcctcagccagctattagaacgccgacgccaggccctgtgccctggcagcacccggaactttgtcatccatcgcttgggtgatctgctcatcagccagttctcaggtcctagtgcggagcagatgtgtaagacctactcggagttctgcagccgccacagcaaggccttaaagctctataaggagctgtacgcccgagacaaacgcttccagcaattcatccggaaagtgacccgccccgccgtgctcaagcggcacggggtacaggagtgcatcctgctggtgactcagcgcatcaccaagtacccgttactcatcagccgcatcctgcagcattcccacgggatcgaggaggagcgccaggacctgaccacagcactggggctagtgaaggagctgctgtccaatgtggacgagggtatttatcagctggagaaaggggcccgtctgcaggagatctacaaccgcatggaccctcgggcccaaaccccagtgcctggcaagggcccctttggccgagaggaacttctgaggcgcaaactcatccacgatggctgcctgctctggaagacagcgacggggcgcttcaaagatgtgctagtgctgctgatgacagatgtactggtgtttctccaggaaaaggaccagaagtacatctttcctaccctggacaagccttcagtggtatcgctgcagaatctaatcgtacgagacattgccaaccaggagaaagggatgtttctgatcagcgcagccccacctgagatgtacgaggtgcacacagcatcccgggatgaccggagcacctggatccgggtcattcagcagagcgtgcgcacatgcccatccagggaggacttccccctgattgagacagaggatgaggcttacctgcggcgaattaagatggagttgcagcagaaggaccgggcactggtggagctgctgcgagagaaggtcgggctgtttgctgagatgacccatttccaggccgaagaggatggtggcagtgggatggccctgcccaccctgcccaggggccttttccgctctgagtcccttgagtcccctcgtggcgagcggctgctgcaggatgccatccgtgaggtggagggtctgaaagacctgctggtggggccaggagtggaactgctcttgacaccccgagagccagccctgcccttggaaccagacagcggtggtaacacgagtcctggggtcactgccaatggtgaggccagaaccttcaatggctccattgaactctgcagagctgactcagactctagccagagggatcgaaatggaaatcagctgagatcaccgcaagaggaggcgttacagcgattggtcaatctctatggacttctacatggcctacaggcagctgtggcccagcaggacactctgatggaagcccggttccctgagggccctgagcggcgggagaagctgtgccgagccaactctcgggatggggaggctggcagggctggggctgcccctgtggcccctgaaaagcaggccacggaactggcattactgcagcggcaacatgcgctgctgcaggaggagctacggcgctgccggcggctaggtgaagaacgggcaaccgaagctggcagcctggaggcccggctccgggagagtgagcaggcccgggcactgctggagcgtgaggccgaagaggctcgaaggcagctggccgccctgggccagaccgagccactcccagctgaggccccctgggcccgcagacctgtggatcctcggcggcgcagcctccccgcaggcgatgccctgtacttgagtttcaaccccccacagcccagccgaggcactgaccgcctggatctacctgtcactactcgctctgtccatcgaaactttgaggaccgagagaggcaggaactggggagccccgaagagcggctgcaagacagcagtgaccctgacactggcagcgaggaggaaggtagcagccgtctgtctccgccccacagtccacgagactttaccagaatgcaggacatcccggaggagacggagagccgcgacggggaggctgtagcctccgagagctaagggggcccctcccccctgccccgtgccccactgaagaacattactgagggggctaaccttggggactccaatttgccaatgatgagggaacatttgaaagaactgcaaattgtccttgccagctcttgggatccttggatacctggggccatttaagaagctaggggaattaggccacaacaccccctgggacatccgaaagctacaccacagatgccagtggttcatgccttcttcccgcaactttaggaaaatttatttatttattgtttattagttatggggggagaggggagatttaaaggaccagggacatgggaaccaagccatagggatcagagggccttgtccttgaacactactggggtatattcaggctcatccacgcagctgctgggttcttgccctaacggccctcccctgcaacatccgtcttggaggagaggctgcagccacagcaccctactgccctttaaataaaggagggctgtgggcagggccatgtccctttctcctctcccctcaacctcttactgctgttctccctttctccgtccttcatggaagccctgggagataacctggcttcctggagttgatggaataaaggttggggtggccataatggtttgttgggggtgagggaaaaaacccacagggaccagaatgttttgttgttcttttgttttcttttttgtaccaaagtcaactgcacgtgttttatatttttaagagatcgtaggcaattagagatcgaagcctcctatctccacatctctgaagaagttgaggggtgggggagagaatgacttctgccttcatctgcagtaacggggggacctatactgacctcttccccagcccctttttgaatacaaggttactttgggggtgtggtttggcaataagtggtttcctcgtagttctctaaaaactacaagttcttttggatcccatctaatcgttctacctattc

SEQ ID NO: 289666 - DNA, 3527 bp, Homo sapiens
agcggggtgctgggatcccgggagggagcggagcggacctgggcttggtcgcctccaagccggcgggaccgagtgctttaggccgctcgaaagaaagttgctccgacccgggaaaaggagaagatgaaggaagccaaggatgcccgctataccaatgggcacctcttcaccaccatttcagtttcaggcatgaccatgtgctatgcctgtaacaagagcatcacagccaaggaagccctcatctgcccaacctgcaatgtgactatccacaaccgctgtaaagacaccctcgccaactgtaccaaggtcaagcagaagcaacagaaagcggccctgctgaagaacaacaccgccttgcagtccgtttctcttcgaagtaagacaaccatccgggagcggccaagctcggccatctacccctccgacagcttccggcagtccctcctgggctcccgccgtggccgctcctccttgtctttagccaagagtgtttctaccaccaacattgctggacatttcaatgatgagtctcccctggggctgcgccggatcctctcacagtccacagactccctcaacatgcggaaccgaaccctatccgtggaatccctcattgacgaagcagaggtaatctacagtgagctgatgagtgactttgagatggatgagaaggactttgcagctgactcttggagtcttgctgtggacagcagcttcctgcagcagcataaaaaggaggtgatgaagcagcaagatgtcatctatgagctaatccagacagagctgcaccatgtgaggacactgaagatcatgacccgcctcttccgcacggggatgctggaagagctacacttggagccaggagtggtccagggcctgttcccctgcgtggacgagctcagtgacatccatacacgcttcctcagccagctattagaacgccgacgccaggccctgtgccctggcagcacccggaactttgtcatccatcgcttgggtgatctgctcatcagccagttctcaggtcctagtgcggagcagatgtgtaagacctactcggagttctgcagccgccacagcaaggccttaaagctctataaggagctgtacgcccgagacaaacgcttccagcaattcatccggaaagtgacccgccccgccgtgctcaagcggcacggggtacaggagtgcatcctgctggtgactcagcgcatcaccaagtacccgttactcatcagccgcatcctgcagcattcccacgggatcgaggaggagcgccaggacctgaccacagcactggggctagtgaaggagctgctgtccaatgtggacgagggtatttatcagctggagaaaggggcccgtctgcaggagatctacaaccgcatggaccctcgggcccaaaccccagtgcctggcaagggcccctttggccgagaggaacttctgaggcgcaaactcatccacgatggctgcctgctctggaagacagcgacggggcgcttcaaagatgtgctagtgctgctgatgacagatgtactggtgtttctccaggaaaaggaccagaagtacatctttcctaccctggacaagccttcagtggtatcgctgcagaatctaatcgtacgagacattgccaaccaggagaaagggatgtttctgatcagcgcagccccacctgagatgtacgaggtgcacacagcatcccgggatgaccggagcacctggatccgggtcattcagcagagcgtgcgcacatgcccatccagggaggacttccccctgattgagacagaggatgaggcttacctgcggcgaattaagatggagttgcagcagaaggaccgggcactggtggagctgctgcgagagaaggtcgggctgtttgctgagatgacccatttccaggccgaagaggatggtggcagtgggatggccctgcccaccctgcccaggggccttttccgctctgagtcccttgagtcccctcgtggcgagcggctgctgcaggatgccatccgtgaggtggagggtctgaaagacctgctggtggggccaggagtggaactgctcttgacaccccgagagccagccctgcccttggaaccagacagcggtggtaacacgagtcctggggtcactgccaatggtgaggccagaaccttcaatggctccattgaactctgcagagctgactcagactctagccagagggatcgaaatggaaatcagctgagatcaccgcaagaggaggcgttacagcgattggtcaatctctatggacttctacatggcctacaggcagctgtggcccagcaggacactctgatggaagcccggttccctgagggccctgagcggcgggagaagctgtgccgagccaactctcgggatggggaggctggcagggctggggctgcccctgtggcccctgaaaagcaggccacggaactggcattactgcagcggcaacatgcgctgctgcaggaggagctacggcgctgccggcggctaggtgaagaacgggcaaccgaagctggcagcctggaggcccggctccgggagagtgagcaggcccgggcactgctggagcgtgaggccgaagaggctcgaaggcagctggccgccctgggccagaccgagccactcccagctgaggccccctgggcccgcagacctgtggatcctcggcggcgcagcctccccgcaggcgatgccctgtacttgagtttcaaccccccacagcccagccgaggcactgaccgcctggatctacctgtcactactcgctctgtccatcgaaactttgaggaccgagagaggcaggaactggggagccccgaagagcggctgcaagacagcagtgaccctgacactggcagcgaggaggaaggtagcagccgtctgtctccgccccacagtccacgagactttaccagaatgcaggacatcccggaggagacggagagccgcgacggggaggctgtagcctccgagagctaagggggcccctcccccctgccccgtgccccactgaagaacattactgagggggctaaccttggggactccaatttgccaatgatgagggaacatttgaaagaactgcaaattgtccttgccagctcttgggatccttggatacctggggccatttaagaagctaggggaattaggccacaacaccccctgggacatccgaaagctacaccacagatgccagtggttcatgccttcttcccgcaactttaggaaaatttatttatttattgtttattagttatggggggagaggggagatttaaaggaccagggacatgggaaccaagccatagggatcagagggccttgtccttgaacactactggggtatcatgacctgaaacctcagcgtgaatttgggggatttttcagtggaacccttgcccccaaatgtcgaccagcccccaaatgtcgaagaattttcttcttgccaattttgttgtttaaaaaaaaaattcagggaaaattaaaaacctggaactcca

SEQ ID NO: 289667 - DNA, 1463 bp, Homo sapiens
agcggggtgctgggatcccgggagggagcggagcggacctgggcttggtcgcctccaagccggcgggaccgagtgctttaggccgctcgaaagaaagttgctccgacccgggaaaaggagaagatgaaggaagccaaggatgcccgctataccaatgggcacctcttcaccaccatttcagtttcaggcatgaccatgtgctatgcctgtaacaagagcatcacagccaaggaagccctcatctgcccaacctgcaatgtgactatccacaaccgctgtaaagacaccctcgccaactgtaccaaggtcaagcagaagcaacagaaagcggccctgctgaagaacaacaccgccttgcagtccgtttctcttcgaagtaagacaaccatccgggagcggccaagctcggccatctacccctccgacagcttccggcagtccctcctgggctcccgccgtggccgctcctccttgtctttagccaagagtgtttctaccaccaacattgctggacatttcaatgatgagtctcccctggggctgcgccggatcctctcacagtccacagactccctcaacatgcggaaccgaaccctatccgtggaatccctcattgacgaagcagaggtaatctacagtgagctgatgagtgactttgagatggatgagaaggactttgcagctgactcttggagtcttgctgtggacagcagcttcctgcagcagcataaaaaggaggtgatgaagcagcaagatgtcatctatgagctaatccagacagagctgcaccatgtgaggacactgaagatcatgacccgcctcttccgcacggggatgctggaagagctacacttggagccaggagtggtccagggcctgttcccctgcgtggacgagctcagtgacatccatacacgcttcctcagccagctattagaacgccgacgccaggccctgtgccctggcagcacccggaactttgtcatccatcgcttgggtgatctgctcatcagccagttctcaggtcctagtgcggagcagatgtgtaagacctactcggagttctgcagccgccacagcaaggccttaaagctctataaggagctgtacgcccgagacaaacgcttccagcaattcatccggaaagtgacccgccccgccgtgctcaagcggcacggggtacaggagtgcatcctgctggtgactcagcgcatcaccaagtacccgttactcatcagccgcatcctgcagcattcccacgggatcgaggaggagcgccaggacctgaccacagcactggggctagtgaaggagctgctgtccaatgtggacgagggtatttatcagctggagaaaggggcccgtctgcaggagatctacaaccgcatggacccgcgcactgaggcgcaaactcatcccgatattgacagatgtactggtgttctccaggaaagacccaagaa

SEQ ID NO: 289668 - DNA, 838 bp, Homo sapiens
agcggggtgctgggatcccgggagggagcggagcggacctgggcttggtcgcctccaagccggcgggaccgagtgctttaggccgctcgaaagaaagttgctccgacccgggaaaaggagaagatgaaggaagccaaggatgcccgctataccaatgggcacctcttcaccaccatttcagtttcaggcatgaccatgtgctatgcctgtaacaagagcatcacagccaaggaagccctcatctgcccaacctgcaatgtgactatccacaaccgctgtaaagacaccctcgccaactgtaccaaggtcaagcagaagcaacagaaagcggccctgctgaagaacaacaccgccttgcagtccgtttctcttcgaagtaagaacatttcaatgatgagtctcccctggggctgcgccggatcctctcacagtccacagactccctcaacatgcggaaccgaaccctatccgtggaatccctcattgacgaagcagaggtaatctacagtgagctgatgagtgactttgagatggatgagaaggactttgcagctgactcttggagtcttgctgtggacagcagcttcctgcagcagcataaaaaggaggtgatgaagcagcaagatgtcatctatgagctaatccagacagagctgcaccatgtgaggacactgaagatcatgacccgcctcttccgcacggggatgctggaagagctacacttggagccaggagtggtccagggcctgttcccctgcgtggacgagctcagtgacatccatacacgcttcctcagttccagctcaagttctagggatcctctagatcacctcagcaa

SEQ ID NO: 289669 - DNA, 743 bp, Homo sapiens
atccgtggatttccgtagagttaacttaacatatgtattgggtggtctgtttgctgcccaattttttaagtggctgccttttatcacttctgctgatagtctcccatttgtggcattataaagcaggctaatgagaatttctggaactgacccgtcttcgagagactgacatgcggatgtactttcactacaagacatttctgacacgctcatttgggagtcacagacacattttatcttgtgaattgttccttgtactgtattctgaaccaagatctggaagccctccaacattttcaaaacagaactgcttattaatatagagaaaaagaagcagcatcaggataataaacacccaaacagctgacaaaaacccaactgcctctggagatacttttctaaaacagaggaaaagaagtgcagaaaggaagaactgggaagtgatgttggcccaggcagattctaaccctctaagttccacagtctacaagcaagagtgcattaaggcccacatagactgcattctctgtgattccagtgataacttaaggaaagcttcctgctgactcaaaaggatttttcttcttctgaactcctattatgggaatggatgaaatcacttacagagccacagaaggaaacaaagcaaagccaggatcatgagttggattatctggaggcctaggccaatggggagttattgcttgcagtcactgatcaagcaaataaacttttccttcttt

SEQ ID NO: 289670 - DNA, 539 bp, Homo sapiens
atccgtggatttccgtagagttaacttaacatatgtattgggtggtctgtttgctgcccaattttttaagtggctgccttttatcacttctgctgatagtctcccatttgtggcattataaagcaggctaatgagaatttctggaactgacccgtcttcgagagactgacatgcggatgtactttcactacaagacatttctgacacgctcatttgggagtcacagacacattttatcttgtgaattgttccttgtactgtattctgaaccaagatctggaagccctccaacattttcaaaacagaactgcttattaatatagagaaaaagaagcagcatcaggataataaacacccaaacagctgacaaaaacccaactgcctctggagatacttttctaaaacagatgcagaagatccagtgggcaatttcatttcataatcttgattggcacccacacccttgccccaacttctgactctttggactgtaccataaaaaggaaataaacctttactatattaaagcactgacattt

SEQ ID NO: 289671 - DNA, 447 bp, Homo sapiens
aatctgcccaactgaataaaccatttatgcctagtgttccattactggaacgctaagcttatgggagttatttagttgtgcaaatgaaagccatctgacagttggctcacattgaacacctgtggagattaaggacgaggacaactatattgatgggcttggatgaactggggcagggcagctcatatttcgggagccaggagaacgagtgagtgctaaaacctcctgttttctgtgttaaacattccgtccctgtttgagacatcagtatgtacagttaacttttgttgagtgtttagcaggtactagggacatactagtgttttccttaatgtatttaatcttcataattatgaaatgggtgctattattagccccatcttatagatgaggcaactgaggttcagggataaagtaataaaattgcctggggtcacccagccacta

SEQ ID NO: 289672 - DNA, 5416 bp, Homo sapiens
tcgaagtggacttccgggtcacggcggagctggctctcacgtggaggcggggaaatttcgcccaccggaatgatcaccaagacacacaaagtagaccttgggctcccagagaagaaaaagaagaagaaagtggtcaaagaaccagagactcgatactcagttttaaacaatgatgattactttgctgatgtttctcctttaagagctacatccccctctaagagtgtggcccatgggcaggcacctgagatgcctctagtgaagaaaaagaagaagaaaaagaagggtgtcagcaccctttgcgaggagcatgtagaacctgagaccacgctgcctgctagacggacagagaagtcacccagcctcaggaagcaggtgtttggccacttggagttcctcagtggggaaaagaaaaataagaagtcacctctagccatgtcccatgcctctggggtgaaaacctccccagaccctagacagggtgaggaggaaaccagagttggcaagaagctcaaaaaacacaagaaggaaaaaaagggggcccaggaccccacagccttctcggtccaggacccttggttctgtgaggccagggaggccagggatgttggggacacttgctcagtggggaagaaggatgaggaacaggcagccttggggcagaaacggaagcggaagagccccagagaacacaatgggaaggtgaagaagaaaaaaaaaatccaccaggagggagatgccctcccaggccactccaagccctccaggtccatggagagcagccctaggaaaggaagtaaaaagaagccagtcaaagttgaggctccggaatacatccccataagtgatgaccctaaggcctccgcaaagaaaaagatgaagtccaaaaagaaggtagagcagccagtcatcgaggagccagctctgaaaaggaagaaaaagaagaagaggaaagagagtggggtagcaggagacccttggaaggaggaaacagacacggacttagaggtggtgttggaaaaaaaaggcaacatggatgaggcgcacatagaccaggtgaggcgaaaggccttgcaagaagagatcgatcgcgagtcaggcaaaacggaagcttctgaaaccaggaagtggacgggaacccagtttggccagtgggatactgctggttttgagaacgaggaccaaaaactgaaatttctcagacttatgggtggcttcaaaaacctgtccccttcgttcagccgccccgccagcacgattgcaaggcccaacatggccctcggcaagaaggcggctgacagcctgcagcagaatctgcagcgggactacgaccgggccatgagctggaagtacagccggggagccggcctcggcttctccaccgcccccaacaagatcttttacattgacaggaacgcttccaagtcagtcaagctggaagattaaactctagagttttgtccccccaaaactgccacaattgctttgattattccatttatgctggagattacaaattttttttgtgaaaaaatcagatcttggtgaggacctcgagcagtaagatataaataactcccataagcttagcgttccagtaatggaacactaggcataaatggtttattcagttgtgcaaatgaaagccatctgacagttggctcacattgaacacctgtggagattaaggacgaggacaactatattgatgggcttggatgaactggggcagggcagctcatatttcgggagccaggagaacgagtgagtgctaaaacctcctgttttctgtgttaaacattccgtccctgtttgagacatcagtatgtacagttaacttttgttgagtgtttagcaggtactagggacatactagtgttttccttaatgtatttaatcttcataattatgaaatgggtgctattattagccccatcttatagatgaggcaactgaggttcagggataaagtaataaaattgcctggggtcacccagccactaagtgcagggtgttgtacttttgtacccgaagccctaagttcactattcgccactctgaatgtcccctttagggaatttccaccagaatcctcgttggggattgaaatgtctttagatggaggaaaaagttttatgacaagtctgcatctctgataaaaagtggagtgaatgaggaacggagaatcgcaagctccttttccttccttttcctttcccctgtcatagagcagctgtaggcagagaggtgtctgagttgttaccaaacacatgtgactgagctgctgctgctgggaaatgtgcctctaaaccagtcctgccttttccactggtgtcccttcggccctaagtgctgaggtaggatttttgtgctttgactggattctgaacaaggcattttaggaagagtggttagtcccgcaaatgaatcaatggcagatcccagggacgtgtgtgtgtgttttgagataggctctcactctgtcacccaggctggagtgtagtggcatatcacggcttgttgcaaccactacctatccagcttaagtgatcctcccacctcagcctcccaagtagctgggactgtgggtgtgcaccacaacaaccagctagtgtttaaaattttttgtagagatggggtctcactatattgtccaggctagtcccaaactcctggactcaactcatgctcctgcctcagcccccaagagctgggatcacaggtgtgagccactgtgcccagccccagggatgtgtctgatgagattcttttttatcacaaggaagagaatcccaggtgacttctgtaggtggatattgaatgccaggaggagatgaacgtgtggagatgacacgggaagttgcctcatcggctgtggggacagcgtttccaagcctggactctacagcaagcctcaaagagctccaggtccagtggcccaagtcgcatgtgaccatctgtgaccaccttctttccactcacctagctttttgcatcccaaaatacaggttctgactgggacattttcacgatcgtttggcctgaacatgcctcctacagacatcccagcccaggcaggcctcgatggccagaaagttcagtctcacgtggcaggaaggcctgattagggcctggttcaacagctcgccaaggaagcattctctccatcatctccagtgttggcttcatcaaggctagtacaaagatggcagtaacagttccaggcagcatatcaagaccctagaacattccagaggaagaaaagcctttttgtgtctcaaggaaacttccagaagcctccattgctgggcaatgagtcatctgcccatagctgcacccgcccctgtcatgggaaggctggtgattcccttcagtcaagaagagtggatgctggtgaagtggccatggtgtccacagctgcccattgggcagaggtgaggcaggcacttcaggcagtttccctggctctgaaccctgatccgcaagcattggccaggtcaatagttggacaagtatgtgctacaaggacctacttgggccacttccctcaggacgtgaacttgtcctgcctttctttcctggattcaaccttgagatacataatgggagaggccgtggaaagcccaagaggcagtgttctggatttgagtgagtgccttctgggcacctcctcctttgatggagaaacaaatccctcctgaccttgagcaacactacaggaatgtgcctggtgtaaacaggaaccagccgttcgtttctttttttttgagatggagtctcacggtcgcgcaggctggagtgtggtggcgtgatctcggctcattgtaacctctgcttcctgggttcaagcgattcttgtgcctcagtctcctgagtagctggaatcggccgtttactactcatagtttttatcttgccaagaggtcaccctgacgttggcctgccttagctctgttaaaaaggttgtgctctgccaggtgcggtgactcacgcctgtaatcccagcactttgggaggccaaggtgggcggatcacgaggtcaagagttcgagaccagcctgaccaacatggtgaaaccccgtctctactaaaaatacaaaaattagctgggtgggtgtggtgtcacgggcttgtaatcccggctactcaggaggctgacaggagaatcgcttgaacccgggaggtggaggttgtagtgagctgggatggtgccactgcacactctagccccgggcaacagaatgagactctgtctcaaaaacaaacaaaaaaaaactgtctttgggtgattgtggagaggtgatcatatgtccgctgtgttgctcccatccaagccctggtgactggtagctctcatgagggtgtgatggtcaggccttgcccctggtgtaaattctgtctgtaataggctgtgactttctaactcaacatcaccactggcttaggagttccatttgcacagggggagctttattgcttttctatatacataagaactttacgtctcaccagtggaggttgggcagccaagacaccacaatgctgggtgtcttcagaatggacttaatcttgtccttttgctttctgccagtgcagatcaccatctctcagatgagcaggaccccaccctctggcagtcttgtcttgggagaatcactctgagctcccatcctttgtaaattaacattggtttgagcaccaccctccatcacggctgcagtgagccatgattgcaccactgtgttccagcctgggtgacagagcaagaccccattccaaaaaaaaaaaaaaatttgccaaatagacacagtcctcacaaaagaagttggcagaataacaccccttcctaccacatctcctcagaacctgtgtatttgttaggttacgaaacaaaagggaattaagtttgctaatcagctgaccttaaaacaggaagaggatcccgtgtttctgggtgggccggaggaatcacaaagatccctaaatgtggaagaggaaggcaaaaaagagtccacatcaaagagacttaagaaagacttgactagacactgctggttttgaagatgggaagggaagggtcagaagccaaggaatgtgtgtgctgtctagaagctggaaaaggcaaggaagtagattctcccctagagcctcccagaaggagcgtagccctgctgatgccttaattttagctcagtgagaccaggcggacttaagacctatagaaccgtcagatgacaacattatgttttaagccgctacaattgtggcaatttgttaaagtaacaatagaagacctaatgtaagtctcatgtggaagttgccatggttttgtttttctttctttctttttttttttttgagacagtctcactctcactcccaccccaggctgggcaacaagagtgaaactgtctca

SEQ ID NO: 289673 - DNA, 5588 bp, Homo sapiens
gctaaagaggaggatgctatacttttctaaatggcaagagatggggagagaaggggattaagagttgacccgcaacctcccggtggattctttgttcttaccagatctcttggccactcccctattctgaagtcgtcttggctctcttgactgctcccctattctgaagtcgtcttggctctcttgactgctcccctattctgaagtcgtcttggctctcctgactacactatttcaaggaatgatcaccaagacacacaaagtagaccttgggctcccagagaagaaaaagaagaagaaagtggtcaaagaaccagagactcgatactcagttttaaacaatgatgattactttgctgatgtttctcctttaagagctacatccccctctaagagtgtggcccatgggcaggcacctgagatgcctctagtgaagaaaaagaagaagaaaaagaagggtgtcagcaccctttgcgaggagcatgtagaacctgagaccacgctgcctgctagacggacagagaagtcacccagcctcaggaagcaggtgtttggccacttggagttcctcagtggggaaaagaaaaataagaagtcacctctagccatgtcccatgcctctggggtgaaaacctccccagaccctagacagggtgaggaggaaaccagagttggcaagaagctcaaaaaacacaagaaggaaaaaaagggggcccaggaccccacagccttctcggtccaggacccttggttctgtgaggccagggaggccagggatgttggggacacttgctcagtggggaagaaggatgaggaacaggcagccttggggcagaaacggaagcggaagagccccagagaacacaatgggaaggtgaagaagaaaaaaaaaatccaccaggagggagatgccctcccaggccactccaagccctccaggtccatggagagcagccctaggaaaggaagtaaaaagaagccagtcaaagttgaggctccggaatacatccccataagtgatgaccctaaggcctccgcaaagaaaaagatgaagtccaaaaagaaggtagagcagccagtcatcgaggagccagctctgaaaaggaagaaaaagaagaagaggaaagagagtggggtagcaggagacccttggaaggaggaaacagacacggacttagaggtggtgttggaaaaaaaaggcaacatggatgaggcgcacatagaccaggtgaggcgaaaggccttgcaagaagagatcgatcgcgagtcaggcaaaacggaagcttctgaaaccaggaagtggacgggaacccagtttggccagtgggatactgctggttttgagaacgaggaccaaaaactgaaatttctcagacttatgggtggcttcaaaaacctgtccccttcgttcagccgccccgccagcacgattgcaaggcccaacatggccctcggcaagaaggcggctgacagcctgcagcagaatctgcagcgggactacgaccgggccatgagctggaagtacagccggggagccggcctcggcttctccaccgcccccaacaagatcttttacattgacaggaacgcttccaagtcagtcaagctggaagattaaactctagagttttgtccccccaaaactgccacaattgctttgattattccatttatgctggagattacaaattttttttgtgaaaaaatcagatcttggtgaggacctcgagcagtaagatataaataactcccataagcttagcgttccagtaatggaacactaggcataaatggtttattcagttgtgcaaatgaaagccatctgacagttggctcacattgaacacctgtggagattaaggacgaggacaactatattgatgggcttggatgaactggggcagggcagctcatatttcgggagccaggagaacgagtgagtgctaaaacctcctgttttctgtgttaaacattccgtccctgtttgagacatcagtatgtacagttaacttttgttgagtgtttagcaggtactagggacatactagtgttttccttaatgtatttaatcttcataattatgaaatgggtgctattattagccccatcttatagatgaggcaactgaggttcagggataaagtaataaaattgcctggggtcacccagccactaagtgcagggtgttgtacttttgtacccgaagccctaagttcactattcgccactctgaatgtcccctttagggaatttccaccagaatcctcgttggggattgaaatgtctttagatggaggaaaaagttttatgacaagtctgcatctctgataaaaagtggagtgaatgaggaacggagaatcgcaagctccttttccttccttttcctttcccctgtcatagagcagctgtaggcagagaggtgtctgagttgttaccaaacacatgtgactgagctgctgctgctgggaaatgtgcctctaaaccagtcctgccttttccactggtgtcccttcggccctaagtgctgaggtaggatttttgtgctttgactggattctgaacaaggcattttaggaagagtggttagtcccgcaaatgaatcaatggcagatcccagggacgtgtgtgtgtgttttgagataggctctcactctgtcacccaggctggagtgtagtggcatatcacggcttgttgcaaccactacctatccagcttaagtgatcctcccacctcagcctcccaagtagctgggactgtgggtgtgcaccacaacaaccagctagtgtttaaaattttttgtagagatggggtctcactatattgtccaggctagtcccaaactcctggactcaactcatgctcctgcctcagcccccaagagctgggatcacaggtgtgagccactgtgcccagccccagggatgtgtctgatgagattcttttttatcacaaggaagagaatcccaggtgacttctgtaggtggatattgaatgccaggaggagatgaacgtgtggagatgacacgggaagttgcctcatcggctgtggggacagcgtttccaagcctggactctacagcaagcctcaaagagctccaggtccagtggcccaagtcgcatgtgaccatctgtgaccaccttctttccactcacctagctttttgcatcccaaaatacaggttctgactgggacattttcacgatcgtttggcctgaacatgcctcctacagacatcccagcccaggcaggcctcgatggccagaaagttcagtctcacgtggcaggaaggcctgattagggcctggttcaacagctcgccaaggaagcattctctccatcatctccagtgttggcttcatcaaggctagtacaaagatggcagtaacagttccaggcagcatatcaagaccctagaacattccagaggaagaaaagcctttttgtgtctcaaggaaacttccagaagcctccattgctgggcaatgagtcatctgcccatagctgcacccgcccctgtcatgggaaggctggtgattcccttcagtcaagaagagtggatgctggtgaagtggccatggtgtccacagctgcccattgggcagaggtgaggcaggcacttcaggcagtttccctggctctgaaccctgatccgcaagcattggccaggtcaatagttggacaagtatgtgctacaaggacctacttgggccacttccctcaggacgtgaacttgtcctgcctttctttcctggattcaaccttgagatacataatgggagaggccgtggaaagcccaagaggcagtgttctggatttgagtgagtgccttctgggcacctcctcctttgatggagaaacaaatccctcctgaccttgagcaacactacaggaatgtgcctggtgtaaacaggaaccagccgttcgtttctttttttttgagatggagtctcacggtcgcgcaggctggagtgtggtggcgtgatctcggctcattgtaacctctgcttcctgggttcaagcgattcttgtgcctcagtctcctgagtagctggaatcggccgtttactactcatagtttttatcttgccaagaggtcaccctgacgttggcctgccttagctctgttaaaaaggttgtgctctgccaggtgcggtgactcacgcctgtaatcccagcactttgggaggccaaggtgggcggatcacgaggtcaagagttcgagaccagcctgaccaacatggtgaaaccccgtctctactaaaaatacaaaaattagctgggtgggtgtggtgtcacgggcttgtaatcccggctactcaggaggctgacaggagaatcgcttgaacccgggaggtggaggttgtagtgagctgggatggtgccactgcacactctagccccgggcaacagaatgagactctgtctcaaaaacaaacaaaaaaaaactgtctttgggtgattgtggagaggtgatcatatgtccgctgtgttgctcccatccaagccctggtgactggtagctctcatgagggtgtgatggtcaggccttgcccctggtgtaaattctgtctgtaataggctgtgactttctaactcaacatcaccactggcttaggagttccatttgcacagggggagctttattgcttttctatatacataagaactttacgtctcaccagtggaggttgggcagccaagacaccacaatgctgggtgtcttcagaatggacttaatcttgtccttttgctttctgccagtgcagatcaccatctctcagatgagcaggaccccaccctctggcagtcttgtcttgggagaatcactctgagctcccatcctttgtaaattaacattggtttgagcaccaccctccatcacggctgcagtgagccatgattgcaccactgtgttccagcctgggtgacagagcaagaccccattccaaaaaaaaaaaaaaatttgccaaatagacacagtcctcacaaaagaagttggcagaataacaccccttcctaccacatctcctcagaacctgtgtatttgttaggttacgaaacaaaagggaattaagtttgctaatcagctgaccttaaaacaggaagaggatcccgtgtttctgggtgggccggaggaatcacaaagatccctaaatgtggaagaggaaggcaaaaaagagtccacatcaaagagacttaagaaagacttgactagacactgctggttttgaagatgggaagggaagggtcagaagccaaggaatgtgtgtgctgtctagaagctggaaaaggcaaggaagtagattctcccctagagcctcccagaaggagcgtagccctgctgatgccttaattttagctcagtgagaccaggcggacttaagacctatagaaccgtcagatgacaacattatgttttaagccgctacaattgtggcaatttgttaaagtaacaatagaagacctaatgtaagtctcatgtggaagttgccatggttttgtttttctttctttctttttttttttttgagacagtctcactctcactcccaccccaggctgggcaacaagagtgaaactgtctca

SEQ ID NO: 289674 - DNA, 2003 bp, Homo sapiens
tcgaagtggacttccgggtcacggcggagctggctctcacgtggaggcggggaaatttcgcccaccggaatgatcaccaagacacacaaagtagaccttgggctcccagagaagaaaaagaagaagaaagtggtcaaagaaccagagactcgatactcagttttaaacaatgatgattactttgctgatgtttctcctttaagagctacatccccctctaagagtgtggcccatgggcaggcacctgagatgcctctagtgaagaaaaagaagaagaaaaagaagggtgtcagcaccctttgcgaggagcatgtagaacctgagaccacgctgcctgctagacggacagagaagtcacccagcctcaggaagcaggtgtttggccacttggagttcctcagtggggaaaagaaaaataagaagtcacctctagccatgtcccatgcctctggggtgaaaacctccccagaccctagacagggtgaggaggaaaccagagttggcaagaagctcaaaaaacacaagaaggaaaaaaagggggcccaggaccccacagccttctcggtccaggacccttggttctgtgaggccagggaggccagggatgttggggacacttgctcagtggggaagaaggatgaggaacaggcagccttggggcagaaacggaagcggaagagccccagagaacacaatgggaaggtgaagaagaaaaaaaaaatccaccaggagggagatgccctcccaggccactccaagccctccaggtccatggagagcagccctaggaaaggaagtaaaaagaagccagtcaaagttgaggctccggaatacatccccataagtgatgaccctaaggcctccgcaaagaaaaagatgaagtccaaaaagaaggtagagcagccagtcatcgaggagccagctctgaaaaggaagaaaaagaagaagaggaaagagagtggggtagcaggagacccttggaaggaggaaacagacacggacttagaggtggtgttggaaaaaaaaggcaacatggatgaggcgcacatagaccaggtgaggcgaaaggccttgcaagaagagatcgatcgcgagtcaggcaaaacggaagcttctgaaaccaggaagtggacgggaacccagtttggccagtgggatactgctggttttgagaacgaggaccaaaaactgaaatttctcagacttatgggtggcttcaaaaacctgtccccttcgttcagccgccccgccagcacgattgcaaggcccaacatggccctcggcaagaaggcggctgacagcctgcagcagaatctgcagcgggactacgaccgggccatgagctggaagtacagccggggagccggcctcggcttctccaccgcccccaacaagatcttttacattgacaggaacgcttccaagtcagtcaagctggaagattaaactctagagttttgtccccccaaaactgccacaattgctttgattattccatttatgctggagattacaaattttttttgtgaaaaaatcagatcttggtgaggacctcgagcagtaagatataaataactcccataagcttagcgttccagtaatggaacactaggcataaatggtttattcagttgtgcaaatgaaagccatctgacagttggctcacattgaacacctgtggagattaaggacgaggacaactatattgatgggcttggatgaactggggcagggcagctcatatttcgggagccaggagaacgagtgagtgctaaaacctcctgttttctgtgttaaacattccgtccctgtttgagacatcagtatgtacagttaacttttgttgagtgtttagcaggtactagggacatactagtgttttccttaatgtatttaatcttcataattatgaaatgggtgctattattagccccatcttatagatgaggcaactgaggttcagggataaagtaataaaattgcctggggtcacccagccacta

SEQ ID NO: 289675 - DNA, 5017 bp, Homo sapiens
ctcccaaagtcccagctgcttcatctgtaagtgacagtaaggtcacccctgcaaagggcggggattcagtaagatgacgaagctctgtgcccacagatggtcattactcatgaaatggaagaaactcaccagtcagtgaggtcgaggaatgaagggtaccccagcagggacaagccttgctttaatgcaagtacagctgaaaactgaaaggcttcagctcacctctttcagatgtgtcctcaaactacccaaagctgcagtcagaaacggaagcggaagagccccagagaacacaatgggaaggtgaagaagaaaaaaaaaatccaccaggagggagatgccctcccaggccactccaagccctccaggtccatggagagcagccctaggaaaggaagtaaaaagaagccagtcaaagttgaggctccggaatacatccccataagtgatgaccctaaggcctccgcaaagaaaaagatgaagtccaaaaagaaggtagagcagccagtcatcgaggagccagctctgaaaaggaagaaaaagaagaagaggaaagagagtggggtagcaggagacccttggaaggaggaaacagacacggacttagaggtggtgttggaaaaaaaaggcaacatggatgaggcgcacatagaccaggtgaggcgaaaggccttgcaagaagagatcgatcgcgagtcaggcaaaacggaagcttctgaaaccaggaagtggacgggaacccagtttggccagtgggatactgctggttttgagaacgaggaccaaaaactgaaatttctcagacttatgggtggcttcaaaaacctgtccccttcgttcagccgccccgccagcacgattgcaaggcccaacatggccctcggcaagaaggcggctgacagcctgcagcagaatctgcagcgggactacgaccgggccatgagctggaagtacagccggggagccggcctcggcttctccaccgcccccaacaagatcttttacattgacaggaacgcttccaagtcagtcaagctggaagattaaactctagagttttgtccccccaaaactgccacaattgctttgattattccatttatgctggagattacaaattttttttgtgaaaaaatcagatcttggtgaggacctcgagcagtaagatataaataactcccataagcttagcgttccagtaatggaacactaggcataaatggtttattcagttgtgcaaatgaaagccatctgacagttggctcacattgaacacctgtggagattaaggacgaggacaactatattgatgggcttggatgaactggggcagggcagctcatatttcgggagccaggagaacgagtgagtgctaaaacctcctgttttctgtgttaaacattccgtccctgtttgagacatcagtatgtacagttaacttttgttgagtgtttagcaggtactagggacatactagtgttttccttaatgtatttaatcttcataattatgaaatgggtgctattattagccccatcttatagatgaggcaactgaggttcagggataaagtaataaaattgcctggggtcacccagccactaagtgcagggtgttgtacttttgtacccgaagccctaagttcactattcgccactctgaatgtcccctttagggaatttccaccagaatcctcgttggggattgaaatgtctttagatggaggaaaaagttttatgacaagtctgcatctctgataaaaagtggagtgaatgaggaacggagaatcgcaagctccttttccttccttttcctttcccctgtcatagagcagctgtaggcagagaggtgtctgagttgttaccaaacacatgtgactgagctgctgctgctgggaaatgtgcctctaaaccagtcctgccttttccactggtgtcccttcggccctaagtgctgaggtaggatttttgtgctttgactggattctgaacaaggcattttaggaagagtggttagtcccgcaaatgaatcaatggcagatcccagggacgtgtgtgtgtgttttgagataggctctcactctgtcacccaggctggagtgtagtggcatatcacggcttgttgcaaccactacctatccagcttaagtgatcctcccacctcagcctcccaagtagctgggactgtgggtgtgcaccacaacaaccagctagtgtttaaaattttttgtagagatggggtctcactatattgtccaggctagtcccaaactcctggactcaactcatgctcctgcctcagcccccaagagctgggatcacaggtgtgagccactgtgcccagccccagggatgtgtctgatgagattcttttttatcacaaggaagagaatcccaggtgacttctgtaggtggatattgaatgccaggaggagatgaacgtgtggagatgacacgggaagttgcctcatcggctgtggggacagcgtttccaagcctggactctacagcaagcctcaaagagctccaggtccagtggcccaagtcgcatgtgaccatctgtgaccaccttctttccactcacctagctttttgcatcccaaaatacaggttctgactgggacattttcacgatcgtttggcctgaacatgcctcctacagacatcccagcccaggcaggcctcgatggccagaaagttcagtctcacgtggcaggaaggcctgattagggcctggttcaacagctcgccaaggaagcattctctccatcatctccagtgttggcttcatcaaggctagtacaaagatggcagtaacagttccaggcagcatatcaagaccctagaacattccagaggaagaaaagcctttttgtgtctcaaggaaacttccagaagcctccattgctgggcaatgagtcatctgcccatagctgcacccgcccctgtcatgggaaggctggtgattcccttcagtcaagaagagtggatgctggtgaagtggccatggtgtccacagctgcccattgggcagaggtgaggcaggcacttcaggcagtttccctggctctgaaccctgatccgcaagcattggccaggtcaatagttggacaagtatgtgctacaaggacctacttgggccacttccctcaggacgtgaacttgtcctgcctttctttcctggattcaaccttgagatacataatgggagaggccgtggaaagcccaagaggcagtgttctggatttgagtgagtgccttctgggcacctcctcctttgatggagaaacaaatccctcctgaccttgagcaacactacaggaatgtgcctggtgtaaacaggaaccagccgttcgtttctttttttttgagatggagtctcacggtcgcgcaggctggagtgtggtggcgtgatctcggctcattgtaacctctgcttcctgggttcaagcgattcttgtgcctcagtctcctgagtagctggaatcggccgtttactactcatagtttttatcttgccaagaggtcaccctgacgttggcctgccttagctctgttaaaaaggttgtgctctgccaggtgcggtgactcacgcctgtaatcccagcactttgggaggccaaggtgggcggatcacgaggtcaagagttcgagaccagcctgaccaacatggtgaaaccccgtctctactaaaaatacaaaaattagctgggtgggtgtggtgtcacgggcttgtaatcccggctactcaggaggctgacaggagaatcgcttgaacccgggaggtggaggttgtagtgagctgggatggtgccactgcacactctagccccgggcaacagaatgagactctgtctcaaaaacaaacaaaaaaaaactgtctttgggtgattgtggagaggtgatcatatgtccgctgtgttgctcccatccaagccctggtgactggtagctctcatgagggtgtgatggtcaggccttgcccctggtgtaaattctgtctgtaataggctgtgactttctaactcaacatcaccactggcttaggagttccatttgcacagggggagctttattgcttttctatatacataagaactttacgtctcaccagtggaggttgggcagccaagacaccacaatgctgggtgtcttcagaatggacttaatcttgtccttttgctttctgccagtgcagatcaccatctctcagatgagcaggaccccaccctctggcagtcttgtcttgggagaatcactctgagctcccatcctttgtaaattaacattggtttgagcaccaccctccatcacggctgcagtgagccatgattgcaccactgtgttccagcctgggtgacagagcaagaccccattccaaaaaaaaaaaaaaatttgccaaatagacacagtcctcacaaaagaagttggcagaataacaccccttcctaccacatctcctcagaacctgtgtatttgttaggttacgaaacaaaagggaattaagtttgctaatcagctgaccttaaaacaggaagaggatcccgtgtttctgggtgggccggaggaatcacaaagatccctaaatgtggaagaggaaggcaaaaaagagtccacatcaaagagacttaagaaagacttgactagacactgctggttttgaagatgggaagggaagggtcagaagccaaggaatgtgtgtgctgtctagaagctggaaaaggcaaggaagtagattctcccctagagcctcccagaaggagcgtagccctgctgatgccttaattttagctcagtgagaccaggcggacttaagacctatagaaccgtcagatgacaacattatgttttaagccgctacaattgtggcaatttgttaaagtaacaatagaagacctaatgtaagtctcatgtggaagttgccatggttttgtttttctttctttctttttttttttttgagacagtctcactctcactcccaccccaggctgggcaacaagagtgaaactgtctca

SEQ ID NO: 289676 - DNA, 4710 bp, Homo sapiens
tagggaggtggggggaaatgcttagtgtagggtggtggggggagtgcgctgttgtgaagtgaggcacactgtgccgtgtgccatgagttaggaaaggaggaggaaggcagaaaggcagctctgtgcagaggtgggcagtggtgttggctggacctgggctggaattctgggggtcactagttaggtttctgtctccagctaagctgcagacctctattttctcctctgtgcaatgggaataacaacagtgtttctcatagggctgtctttaggattaacggaataatccgttgttgagcttattagcactgtgcctggtacacagcagccatctaatctgctgggccctccctgatgagggtgggggtcaagggaaggaaagggctttgaactcaaggaaaatagccacctttttcctctcctcacagggaacccagtttggccagtgggatactgctggttttgagaacgaggaccaaaaactgaaatttctcagacttatgggtggcttcaaaaacctgtccccttcgttcagccgccccgccagcacgattgcaaggcccaacatggccctcggcaagaaggcggctgacagcctgcagcagaatctgcagcgggactacgaccgggccatgagctggaagtacagccggggagccggcctcggcttctccaccgcccccaacaagatcttttacattgacaggaacgcttccaagtcagtcaagctggaagattaaactctagagttttgtccccccaaaactgccacaattgctttgattattccatttatgctggagattacaaattttttttgtgaaaaaatcagatcttggtgaggacctcgagcagtaagatataaataactcccataagcttagcgttccagtaatggaacactaggcataaatggtttattcagttgtgcaaatgaaagccatctgacagttggctcacattgaacacctgtggagattaaggacgaggacaactatattgatgggcttggatgaactggggcagggcagctcatatttcgggagccaggagaacgagtgagtgctaaaacctcctgttttctgtgttaaacattccgtccctgtttgagacatcagtatgtacagttaacttttgttgagtgtttagcaggtactagggacatactagtgttttccttaatgtatttaatcttcataattatgaaatgggtgctattattagccccatcttatagatgaggcaactgaggttcagggataaagtaataaaattgcctggggtcacccagccactaagtgcagggtgttgtacttttgtacccgaagccctaagttcactattcgccactctgaatgtcccctttagggaatttccaccagaatcctcgttggggattgaaatgtctttagatggaggaaaaagttttatgacaagtctgcatctctgataaaaagtggagtgaatgaggaacggagaatcgcaagctccttttccttccttttcctttcccctgtcatagagcagctgtaggcagagaggtgtctgagttgttaccaaacacatgtgactgagctgctgctgctgggaaatgtgcctctaaaccagtcctgccttttccactggtgtcccttcggccctaagtgctgaggtaggatttttgtgctttgactggattctgaacaaggcattttaggaagagtggttagtcccgcaaatgaatcaatggcagatcccagggacgtgtgtgtgtgttttgagataggctctcactctgtcacccaggctggagtgtagtggcatatcacggcttgttgcaaccactacctatccagcttaagtgatcctcccacctcagcctcccaagtagctgggactgtgggtgtgcaccacaacaaccagctagtgtttaaaattttttgtagagatggggtctcactatattgtccaggctagtcccaaactcctggactcaactcatgctcctgcctcagcccccaagagctgggatcacaggtgtgagccactgtgcccagccccagggatgtgtctgatgagattcttttttatcacaaggaagagaatcccaggtgacttctgtaggtggatattgaatgccaggaggagatgaacgtgtggagatgacacgggaagttgcctcatcggctgtggggacagcgtttccaagcctggactctacagcaagcctcaaagagctccaggtccagtggcccaagtcgcatgtgaccatctgtgaccaccttctttccactcacctagctttttgcatcccaaaatacaggttctgactgggacattttcacgatcgtttggcctgaacatgcctcctacagacatcccagcccaggcaggcctcgatggccagaaagttcagtctcacgtggcaggaaggcctgattagggcctggttcaacagctcgccaaggaagcattctctccatcatctccagtgttggcttcatcaaggctagtacaaagatggcagtaacagttccaggcagcatatcaagaccctagaacattccagaggaagaaaagcctttttgtgtctcaaggaaacttccagaagcctccattgctgggcaatgagtcatctgcccatagctgcacccgcccctgtcatgggaaggctggtgattcccttcagtcaagaagagtggatgctggtgaagtggccatggtgtccacagctgcccattgggcagaggtgaggcaggcacttcaggcagtttccctggctctgaaccctgatccgcaagcattggccaggtcaatagttggacaagtatgtgctacaaggacctacttgggccacttccctcaggacgtgaacttgtcctgcctttctttcctggattcaaccttgagatacataatgggagaggccgtggaaagcccaagaggcagtgttctggatttgagtgagtgccttctgggcacctcctcctttgatggagaaacaaatccctcctgaccttgagcaacactacaggaatgtgcctggtgtaaacaggaaccagccgttcgtttctttttttttgagatggagtctcacggtcgcgcaggctggagtgtggtggcgtgatctcggctcattgtaacctctgcttcctgggttcaagcgattcttgtgcctcagtctcctgagtagctggaatcggccgtttactactcatagtttttatcttgccaagaggtcaccctgacgttggcctgccttagctctgttaaaaaggttgtgctctgccaggtgcggtgactcacgcctgtaatcccagcactttgggaggccaaggtgggcggatcacgaggtcaagagttcgagaccagcctgaccaacatggtgaaaccccgtctctactaaaaatacaaaaattagctgggtgggtgtggtgtcacgggcttgtaatcccggctactcaggaggctgacaggagaatcgcttgaacccgggaggtggaggttgtagtgagctgggatggtgccactgcacactctagccccgggcaacagaatgagactctgtctcaaaaacaaacaaaaaaaaactgtctttgggtgattgtggagaggtgatcatatgtccgctgtgttgctcccatccaagccctggtgactggtagctctcatgagggtgtgatggtcaggccttgcccctggtgtaaattctgtctgtaataggctgtgactttctaactcaacatcaccactggcttaggagttccatttgcacagggggagctttattgcttttctatatacataagaactttacgtctcaccagtggaggttgggcagccaagacaccacaatgctgggtgtcttcagaatggacttaatcttgtccttttgctttctgccagtgcagatcaccatctctcagatgagcaggaccccaccctctggcagtcttgtcttgggagaatcactctgagctcccatcctttgtaaattaacattggtttgagcaccaccctccatcacggctgcagtgagccatgattgcaccactgtgttccagcctgggtgacagagcaagaccccattccaaaaaaaaaaaaaaatttgccaaatagacacagtcctcacaaaagaagttggcagaataacaccccttcctaccacatctcctcagaacctgtgtatttgttaggttacgaaacaaaagggaattaagtttgctaatcagctgaccttaaaacaggaagaggatcccgtgtttctgggtgggccggaggaatcacaaagatccctaaatgtggaagaggaaggcaaaaaagagtccacatcaaagagacttaagaaagacttgactagacactgctggttttgaagatgggaagggaagggtcagaagccaaggaatgtgtgtgctgtctagaagctggaaaaggcaaggaagtagattctcccctagagcctcccagaaggagcgtagccctgctgatgccttaattttagctcagtgagaccaggcggacttaagacctatagaaccgtcagatgacaacattatgttttaagccgctacaattgtggcaatttgttaaagtaacaatagaagacctaatgtaagtctcatgtggaagttgccatggttttgtttttctttctttctttttttttttttgagacagtctcactctcactcccaccccaggctgggcaacaagagtgaaactgtctca

SEQ ID NO: 289677 - DNA, 4683 bp, Homo sapiens
gctaaagaggaggatgctatacttttctaaatggcaagagatggggagagaaggggattaagagttgacccgcaacctcccggtggattctttgttcttaccagatctcttggccactcccctattctgaagtcgtcttggctctcttgactgctcccctattctgaagtcgtcttggctctcttgactgctcccctattctgaagtcgtcttggctctcctgactacactatttcaaggaatgatcaccaagacacacaaagtagaccttgggctcccagagaagaaaaagaagaagaaagtggtcaaagaaccagagactcgatactcagttttaaacaatgatgattactttgctgatgtttctcctttaagagctacatccccctctaagagtgtggcccatgggcaggcacctgagatgcctctagtgaagaaaaagaagaagaaaaagaagggtgtcagcaccctttgcgaggagcatgtagaacctgtccccttcgttcagccgccccgccagcacgattgcaaggcccaacatggccctcggcaagaaggcggctgacagcctgcagcagaatctgcagcgggactacgaccgggccatgagctggaagtacagccggggagccggcctcggcttctccaccgcccccaacaagatcttttacattgacaggaacgcttccaagtcagtcaagctggaagattaaactctagagttttgtccccccaaaactgccacaattgctttgattattccatttatgctggagattacaaattttttttgtgaaaaaatcagatcttggtgaggacctcgagcagtaagatataaataactcccataagcttagcgttccagtaatggaacactaggcataaatggtttattcagttgtgcaaatgaaagccatctgacagttggctcacattgaacacctgtggagattaaggacgaggacaactatattgatgggcttggatgaactggggcagggcagctcatatttcgggagccaggagaacgagtgagtgctaaaacctcctgttttctgtgttaaacattccgtccctgtttgagacatcagtatgtacagttaacttttgttgagtgtttagcaggtactagggacatactagtgttttccttaatgtatttaatcttcataattatgaaatgggtgctattattagccccatcttatagatgaggcaactgaggttcagggataaagtaataaaattgcctggggtcacccagccactaagtgcagggtgttgtacttttgtacccgaagccctaagttcactattcgccactctgaatgtcccctttagggaatttccaccagaatcctcgttggggattgaaatgtctttagatggaggaaaaagttttatgacaagtctgcatctctgataaaaagtggagtgaatgaggaacggagaatcgcaagctccttttccttccttttcctttcccctgtcatagagcagctgtaggcagagaggtgtctgagttgttaccaaacacatgtgactgagctgctgctgctgggaaatgtgcctctaaaccagtcctgccttttccactggtgtcccttcggccctaagtgctgaggtaggatttttgtgctttgactggattctgaacaaggcattttaggaagagtggttagtcccgcaaatgaatcaatggcagatcccagggacgtgtgtgtgtgttttgagataggctctcactctgtcacccaggctggagtgtagtggcatatcacggcttgttgcaaccactacctatccagcttaagtgatcctcccacctcagcctcccaagtagctgggactgtgggtgtgcaccacaacaaccagctagtgtttaaaattttttgtagagatggggtctcactatattgtccaggctagtcccaaactcctggactcaactcatgctcctgcctcagcccccaagagctgggatcacaggtgtgagccactgtgcccagccccagggatgtgtctgatgagattcttttttatcacaaggaagagaatcccaggtgacttctgtaggtggatattgaatgccaggaggagatgaacgtgtggagatgacacgggaagttgcctcatcggctgtggggacagcgtttccaagcctggactctacagcaagcctcaaagagctccaggtccagtggcccaagtcgcatgtgaccatctgtgaccaccttctttccactcacctagctttttgcatcccaaaatacaggttctgactgggacattttcacgatcgtttggcctgaacatgcctcctacagacatcccagcccaggcaggcctcgatggccagaaagttcagtctcacgtggcaggaaggcctgattagggcctggttcaacagctcgccaaggaagcattctctccatcatctccagtgttggcttcatcaaggctagtacaaagatggcagtaacagttccaggcagcatatcaagaccctagaacattccagaggaagaaaagcctttttgtgtctcaaggaaacttccagaagcctccattgctgggcaatgagtcatctgcccatagctgcacccgcccctgtcatgggaaggctggtgattcccttcagtcaagaagagtggatgctggtgaagtggccatggtgtccacagctgcccattgggcagaggtgaggcaggcacttcaggcagtttccctggctctgaaccctgatccgcaagcattggccaggtcaatagttggacaagtatgtgctacaaggacctacttgggccacttccctcaggacgtgaacttgtcctgcctttctttcctggattcaaccttgagatacataatgggagaggccgtggaaagcccaagaggcagtgttctggatttgagtgagtgccttctgggcacctcctcctttgatggagaaacaaatccctcctgaccttgagcaacactacaggaatgtgcctggtgtaaacaggaaccagccgttcgtttctttttttttgagatggagtctcacggtcgcgcaggctggagtgtggtggcgtgatctcggctcattgtaacctctgcttcctgggttcaagcgattcttgtgcctcagtctcctgagtagctggaatcggccgtttactactcatagtttttatcttgccaagaggtcaccctgacgttggcctgccttagctctgttaaaaaggttgtgctctgccaggtgcggtgactcacgcctgtaatcccagcactttgggaggccaaggtgggcggatcacgaggtcaagagttcgagaccagcctgaccaacatggtgaaaccccgtctctactaaaaatacaaaaattagctgggtgggtgtggtgtcacgggcttgtaatcccggctactcaggaggctgacaggagaatcgcttgaacccgggaggtggaggttgtagtgagctgggatggtgccactgcacactctagccccgggcaacagaatgagactctgtctcaaaaacaaacaaaaaaaaactgtctttgggtgattgtggagaggtgatcatatgtccgctgtgttgctcccatccaagccctggtgactggtagctctcatgagggtgtgatggtcaggccttgcccctggtgtaaattctgtctgtaataggctgtgactttctaactcaacatcaccactggcttaggagttccatttgcacagggggagctttattgcttttctatatacataagaactttacgtctcaccagtggaggttgggcagccaagacaccacaatgctgggtgtcttcagaatggacttaatcttgtccttttgctttctgccagtgcagatcaccatctctcagatgagcaggaccccaccctctggcagtcttgtcttgggagaatcactctgagctcccatcctttgtaaattaacattggtttgagcaccaccctccatcacggctgcagtgagccatgattgcaccactgtgttccagcctgggtgacagagcaagaccccattccaaaaaaaaaaaaaaatttgccaaatagacacagtcctcacaaaagaagttggcagaataacaccccttcctaccacatctcctcagaacctgtgtatttgttaggttacgaaacaaaagggaattaagtttgctaatcagctgaccttaaaacaggaagaggatcccgtgtttctgggtgggccggaggaatcacaaagatccctaaatgtggaagaggaaggcaaaaaagagtccacatcaaagagacttaagaaagacttgactagacactgctggttttgaagatgggaagggaagggtcagaagccaaggaatgtgtgtgctgtctagaagctggaaaaggcaaggaagtagattctcccctagagcctcccagaaggagcgtagccctgctgatgccttaattttagctcagtgagaccaggcggacttaagacctatagaaccgtcagatgacaacattatgttttaagccgctacaattgtggcaatttgttaaagtaacaatagaagacctaatgtaagtctcatgtggaagttgccatggttttgtttttctttctttctttttttttttttgagacagtctcactctcactcccaccccaggctgggcaacaagagtgaaactgtctca

SEQ ID NO: 289678 - DNA, 1383 bp, Homo sapiens
tcgaagtggacttccgggtcacggcggagctggctctcacgtggaggcggggaaatttcgcccaccggaatgatcaccaagacacacaaagtagaccttgggctcccagagaagaaaaagaagaagaaagtggtcaaagaaccagagactcgatactcagttttaaacaatgatgattactttgctgatgtttctcctttaagagctacatccccctctaagagtgtggcccatgggcaggcacctgagatgcctctagtgaagaaaaagaagaagaaaaagaagggtgtcagcaccctttgcgaggagcatgtagaacctgagaccacgctgcctgctagacggacagagaagtcacccagcctcaggaagcaggtgtttggccacttggagttcctcagtggggaaaagaaaaataagaagtcacctctagccatgtcccatgcctctggggtgaaaacctccccagaccctagacagggtgaggaggaaaccagagttggcaagaagctcaaaaaacacaagaaggaaaaaaagggggcccaggaccccacagccttctcggtccaggacccttggttctgtgaggccagggaggccagggatgttggggacacttgctcagtggggaagaaggatgaggaacaggcagccttggggcagaaacggaagcggaagagccccagagaacacaatgggaaggtgaagaagaaaaaaaaaatccaccaggagggagatgccctcccaggccactccaagccctccaggtccatggagagcagccctaggaaaggaagtaaaaagaagccagtcaaagttgaggctccggaatacatccccataagtgatgaccctaaggcctccgcaaagaaaaagatgaagtccaaaaagaaggtagagcagccagtcatcgaggagccagctctgaaaaggaagaaaaagaagaagaggaaagagagtggggtagcaggagacccttggaaggaggaaacagacacggacttagaggtggtgttggaaaaaaaaggcaacatggatgaggcgcacatagaccaggtgaggcgaaaggccttgcaagaagagatcgatcgcgagtcaggcaaaacggaagcttctgaaaccaggaagtggacggtaagtttggggctagggctctgcgaggaggtggcacgctcggcctcccgacgcttcccctcgcctccagcatgaggagtggagcaggagaaccaagtatgtccaggccccagaggcagccctagcctgcagcaggctccctccacagcagaatttgtcctgagctaatttccttccttctgaaaagggcgcttgcctccctcctagagagctggcccggtgagataagctgcctgaacctttgtctca

SEQ ID NO: 289679 - DNA, 3860 bp, Homo sapiens
aatctgcccaactgaataaaccatttatgcctagtgttccattactggaacgctaagcttatgggagttatttagttgtgcaaatgaaagccatctgacagttggctcacattgaacacctgtggagattaaggacgaggacaactatattgatgggcttggatgaactggggcagggcagctcatatttcgggagccaggagaacgagtgagtgctaaaacctcctgttttctgtgttaaacattccgtccctgtttgagacatcagtatgtacagttaacttttgttgagtgtttagcaggtactagggacatactagtgttttccttaatgtatttaatcttcataattatgaaatgggtgctattattagccccatcttatagatgaggcaactgaggttcagggataaagtaataaaattgcctggggtcacccagccactaagtgcagggtgttgtacttttgtacccgaagccctaagttcactattcgccactctgaatgtcccctttagggaatttccaccagaatcctcgttggggattgaaatgtctttagatggaggaaaaagttttatgacaagtctgcatctctgataaaaagtggagtgaatgaggaacggagaatcgcaagctccttttccttccttttcctttcccctgtcatagagcagctgtaggcagagaggtgtctgagttgttaccaaacacatgtgactgagctgctgctgctgggaaatgtgcctctaaaccagtcctgccttttccactggtgtcccttcggccctaagtgctgaggtaggatttttgtgctttgactggattctgaacaaggcattttaggaagagtggttagtcccgcaaatgaatcaatggcagatcccagggacgtgtgtgtgtgttttgagataggctctcactctgtcacccaggctggagtgtagtggcatatcacggcttgttgcaaccactacctatccagcttaagtgatcctcccacctcagcctcccaagtagctgggactgtgggtgtgcaccacaacaaccagctagtgtttaaaattttttgtagagatggggtctcactatattgtccaggctagtcccaaactcctggactcaactcatgctcctgcctcagcccccaagagctgggatcacaggtgtgagccactgtgcccagccccagggatgtgtctgatgagattcttttttatcacaaggaagagaatcccaggtgacttctgtaggtggatattgaatgccaggaggagatgaacgtgtggagatgacacgggaagttgcctcatcggctgtggggacagcgtttccaagcctggactctacagcaagcctcaaagagctccaggtccagtggcccaagtcgcatgtgaccatctgtgaccaccttctttccactcacctagctttttgcatcccaaaatacaggttctgactgggacattttcacgatcgtttggcctgaacatgcctcctacagacatcccagcccaggcaggcctcgatggccagaaagttcagtctcacgtggcaggaaggcctgattagggcctggttcaacagctcgccaaggaagcattctctccatcatctccagtgttggcttcatcaaggctagtacaaagatggcagtaacagttccaggcagcatatcaagaccctagaacattccagaggaagaaaagcctttttgtgtctcaaggaaacttccagaagcctccattgctgggcaatgagtcatctgcccatagctgcacccgcccctgtcatgggaaggctggtgattcccttcagtcaagaagagtggatgctggtgaagtggccatggtgtccacagctgcccattgggcagaggtgaggcaggcacttcaggcagtttccctggctctgaaccctgatccgcaagcattggccaggtcaatagttggacaagtatgtgctacaaggacctacttgggccacttccctcaggacgtgaacttgtcctgcctttctttcctggattcaaccttgagatacataatgggagaggccgtggaaagcccaagaggcagtgttctggatttgagtgagtgccttctgggcacctcctcctttgatggagaaacaaatccctcctgaccttgagcaacactacaggaatgtgcctggtgtaaacaggaaccagccgttcgtttctttttttttgagatggagtctcacggtcgcgcaggctggagtgtggtggcgtgatctcggctcattgtaacctctgcttcctgggttcaagcgattcttgtgcctcagtctcctgagtagctggaatcggccgtttactactcatagtttttatcttgccaagaggtcaccctgacgttggcctgccttagctctgttaaaaaggttgtgctctgccaggtgcggtgactcacgcctgtaatcccagcactttgggaggccaaggtgggcggatcacgaggtcaagagttcgagaccagcctgaccaacatggtgaaaccccgtctctactaaaaatacaaaaattagctgggtgggtgtggtgtcacgggcttgtaatcccggctactcaggaggctgacaggagaatcgcttgaacccgggaggtggaggttgtagtgagctgggatggtgccactgcacactctagccccgggcaacagaatgagactctgtctcaaaaacaaacaaaaaaaaactgtctttgggtgattgtggagaggtgatcatatgtccgctgtgttgctcccatccaagccctggtgactggtagctctcatgagggtgtgatggtcaggccttgcccctggtgtaaattctgtctgtaataggctgtgactttctaactcaacatcaccactggcttaggagttccatttgcacagggggagctttattgcttttctatatacataagaactttacgtctcaccagtggaggttgggcagccaagacaccacaatgctgggtgtcttcagaatggacttaatcttgtccttttgctttctgccagtgcagatcaccatctctcagatgagcaggaccccaccctctggcagtcttgtcttgggagaatcactctgagctcccatcctttgtaaattaacattggtttgagcaccaccctccatcacggctgcagtgagccatgattgcaccactgtgttccagcctgggtgacagagcaagaccccattccaaaaaaaaaaaaaaatttgccaaatagacacagtcctcacaaaagaagttggcagaataacaccccttcctaccacatctcctcagaacctgtgtatttgttaggttacgaaacaaaagggaattaagtttgctaatcagctgaccttaaaacaggaagaggatcccgtgtttctgggtgggccggaggaatcacaaagatccctaaatgtggaagaggaaggcaaaaaagagtccacatcaaagagacttaagaaagacttgactagacactgctggttttgaagatgggaagggaagggtcagaagccaaggaatgtgtgtgctgtctagaagctggaaaaggcaaggaagtagattctcccctagagcctcccagaaggagcgtagccctgctgatgccttaattttagctcagtgagaccaggcggacttaagacctatagaaccgtcagatgacaacattatgttttaagccgctacaattgtggcaatttgttaaagtaacaatagaagacctaatgtaagtctcatgtggaagttgccatggttttgtttttctttctttctttttttttttttgagacagtctcactctcactcccaccccaggctgggcaacaagagtgaaactgtctca

SEQ ID NO: 289680 - DNA, 2020 bp, Homo sapiens
  misc_feature (28)..(29): n is a, c, g, or t
tgagacagtttcactcttgttgcccagnnggttcctgtttacagcaggcacttcaggcagtttccctggctctgaaccctgatccgcaagcattggccaggtcaatagttggacaagtatgtgctacaaggacctacttgggccacttccctcaggacgtgaacttgtcctgcctttctttcctggattcaaccttgagatacataatgggagaggccgtggaaagcccaagaggcagtgttctggatttgagtgagtgccttctgggcacctcctcctttgatggagaaacaaatccctcctgaccttgagcaacactacaggaatgtgcctggtgtaaacaggaaccagccgttcgtttctttttttttgagatggagtctcacggtcgcgcaggctggagtgtggtggcgtgatctcggctcattgtaacctctgcttcctgggttcaagcgattcttgtgcctcagtctcctgagtagctggaatcggccgtttactactcatagtttttatcttgccaagaggtcaccctgacgttggcctgccttagctctgttaaaaaggttgtgctctgccaggtgcggtgactcacgcctgtaatcccagcactttgggaggccaaggtgggcggatcacgaggtcaagagttcgagaccagcctgaccaacatggtgaaaccccgtctctactaaaaatacaaaaattagctgggtgggtgtggtgtcacgggcttgtaatcccggctactcaggaggctgacaggagaatcgcttgaacccgggaggtggaggttgtagtgagctgggatggtgccactgcacactctagccccgggcaacagaatgagactctgtctcaaaaacaaacaaaaaaaaactgtctttgggtgattgtggagaggtgatcatatgtccgctgtgttgctcccatccaagccctggtgactggtagctctcatgagggtgtgatggtcaggccttgcccctggtgtaaattctgtctgtaataggctgtgactttctaactcaacatcaccactggcttaggagttccatttgcacagggggagctttattgcttttctatatacataagaactttacgtctcaccagtggaggttgggcagccaagacaccacaatgctgggtgtcttcagaatggacttaatcttgtccttttgctttctgccagtgcagatcaccatctctcagatgagcaggaccccaccctctggcagtcttgtcttgggagaatcactctgagctcccatcctttgtaaattaacattggtttgagcaccaccctccatcacggctgcagtgagccatgattgcaccactgtgttccagcctgggtgacagagcaagaccccattccaaaaaaaaaaaaaaatttgccaaatagacacagtcctcacaaaagaagttggcagaataacaccccttcctaccacatctcctcagaacctgtgtatttgttaggttacgaaacaaaagggaattaagtttgctaatcagctgaccttaaaacaggaagaggatcccgtgtttctgggtgggccggaggaatcacaaagatccctaaatgtggaagaggaaggcaaaaaagagtccacatcaaagagacttaagaaagacttgactagacactgctggttttgaagatgggaagggaagggtcagaagccaaggaatgtgtgtgctgtctagaagctggaaaaggcaaggaagtagattctcccctagagcctcccagaaggagcgtagccctgctgatgccttaattttagctcagtgagaccaggcggacttaagacctatagaaccgtcagatgacaacattatgttttaagccgctacaattgtggcaatttgttaaagtaacaatagaagacctaatgtaagtctcatgtggaagttgccatggttttgtttttctttctttctttttttttttttgagacagtctcactctcactcccaccccaggctgggcaacaagagtgaaactgtctca

SEQ ID NO: 289681 - DNA, 1782 bp, Homo sapiens
gtataaattgtcagatagaaatggattagccagatagtaacctacctagcgatttctctttcaaaacccttgagcaacactacaggaatgtgcctggtgtaaacaggaaccagccgttcgtttctttttttttgagatggagtctcacggtcgcgcaggctggagtgtggtggcgtgatctcggctcattgtaacctctgcttcctgggttcaagcgattcttgtgcctcagtctcctgagtagctggaatcggccgtttactactcatagtttttatcttgccaagaggtcaccctgacgttggcctgccttagctctgttaaaaaggttgtgctctgccaggtgcggtgactcacgcctgtaatcccagcactttgggaggccaaggtgggcggatcacgaggtcaagagttcgagaccagcctgaccaacatggtgaaaccccgtctctactaaaaatacaaaaattagctgggtgggtgtggtgtcacgggcttgtaatcccggctactcaggaggctgacaggagaatcgcttgaacccgggaggtggaggttgtagtgagctgggatggtgccactgcacactctagccccgggcaacagaatgagactctgtctcaaaaacaaacaaaaaaaaactgtctttgggtgattgtggagaggtgatcatatgtccgctgtgttgctcccatccaagccctggtgactggtagctctcatgagggtgtgatggtcaggccttgcccctggtgtaaattctgtctgtaataggctgtgactttctaactcaacatcaccactggcttaggagttccatttgcacagggggagctttattgcttttctatatacataagaactttacgtctcaccagtggaggttgggcagccaagacaccacaatgctgggtgtcttcagaatggacttaatcttgtccttttgctttctgccagtgcagatcaccatctctcagatgagcaggaccccaccctctggcagtcttgtcttgggagaatcactctgagctcccatcctttgtaaattaacattggtttgagcaccaccctccatcacggctgcagtgagccatgattgcaccactgtgttccagcctgggtgacagagcaagaccccattccaaaaaaaaaaaaaaatttgccaaatagacacagtcctcacaaaagaagttggcagaataacaccccttcctaccacatctcctcagaacctgtgtatttgttaggttacgaaacaaaagggaattaagtttgctaatcagctgaccttaaaacaggaagaggatcccgtgtttctgggtgggccggaggaatcacaaagatccctaaatgtggaagaggaaggcaaaaaagagtccacatcaaagagacttaagaaagacttgactagacactgctggttttgaagatgggaagggaagggtcagaagccaaggaatgtgtgtgctgtctagaagctggaaaaggcaaggaagtagattctcccctagagcctcccagaaggagcgtagccctgctgatgccttaattttagctcagtgagaccaggcggacttaagacctatagaaccgtcagatgacaacattatgttttaagccgctacaattgtggcaatttgttaaagtaacaatagaagacctaatgtaagtctcatgtggaagttgccatggttttgtttttctttctttctttttttttttttgagacagtctcactctcactcccaccccaggctgggcaacaagagtgaaactgtctca

SEQ ID NO: 289682 - DNA, 1227 bp, Homo sapiens
gatatacccgggagaggggacccagtacaacactaaaagtccgggaaaaaaataaaggctctgtctcaaaaacaaacaaaaaaaaactgtctttgggtgattgtggagaggtgatcatatgtccgctgtgttgctcccatccaagccctggtgactggtagctctcatgagggtgtgatggtcaggccttgcccctggtgtaaattctgtctgtaataggctgtgactttctaactcaacatcaccactggcttaggagttccatttgcacagggggagctttattgcttttctatatacataagaactttacgtctcaccagtggaggttgggcagccaagacaccacaatgctgggtgtcttcagaatggacttaatcttgtccttttgctttctgccagtgcagatcaccatctctcagatgagcaggaccccaccctctggcagtcttgtcttgggagaatcactctgagctcccatcctttgtaaattaacattggtttgagcaccaccctccatcacggctgcagtgagccatgattgcaccactgtgttccagcctgggtgacagagcaagaccccattccaaaaaaaaaaaaaaatttgccaaatagacacagtcctcacaaaagaagttggcagaataacaccccttcctaccacatctcctcagaacctgtgtatttgttaggttacgaaacaaaagggaattaagtttgctaatcagctgaccttaaaacaggaagaggatcccgtgtttctgggtgggccggaggaatcacaaagatccctaaatgtggaagaggaaggcaaaaaagagtccacatcaaagagacttaagaaagacttgactagacactgctggttttgaagatgggaagggaagggtcagaagccaaggaatgtgtgtgctgtctagaagctggaaaaggcaaggaagtagattctcccctagagcctcccagaaggagcgtagccctgctgatgccttaattttagctcagtgagaccaggcggacttaagacctatagaaccgtcagatgacaacattatgttttaagccgctacaattgtggcaatttgttaaagtaacaatagaagacctaatgtaagtctcatgtggaagttgccatggttttgtttttctttctttctttttttttttttgagacagtctcactctcactcccaccccaggctgggcaacaagagtgaaactgtctca

SEQ ID NO: 289683 - DNA, 541 bp, Homo sapiens
ccaagccctttccatgggttatctcatttactccctccaacacccttttgaggagggaggtgttatattcccccattttccagatggagaaattgaggctcagggaggttagctgatttacttaaggtgagagaggcatttaggtttgaacctagggctgtgtggatttaaaatttacgctgtttctgtagtatttctttttttgctttaaaggaatcatgtccattttccctgtcccacaacgctttgaccacccactcaaagaaacatggctcttggcaatgcttagtagaattgaacacaggatggcttggtatgggataacttgtaccatttgttttttcaggaatgatcaccaagacacacaaagtagaccttgggctcccagagaagaaaaagaagaagaaagtggtcaaagaaccagagactcgatactcagttttaaacaatgatgattactttgctgatgtttctcctttaagagctacatccccctctaagagtgtggcccatgggcaggcacctgagatgcctctagtga

SEQ ID NO: 289684 - DNA, 925 bp, Homo sapiens
agagccgtcgctggactcatattaaacagtactgcgacagaacgaaaaagcaagataaaaatagtatggccggatcttttttaaaatgggaccactgcgcaagttacgcctgcgtattgcagggaaggaccgtaaaaggctgtggtgctgatcaacgaaggatttctcggagaaaattcctcctttgcggaaatgtccgtagaaacgcaccttttttttttcctgccaggacaaaccgccggcgatatccgttcatgtgaaagtgtttactaacattctctgaagactcactgggttctcagctcgagaacgttcctgtcacaagacgtttaggaggcaggatgccggtacaatgtatttatgttcttgtaaactgttgcattaacagtgcacttcaagtgggcacatttgtcgttggattttttaccaactcgagcttggactttaggacggggaaaagaagtgctaaatgtttttgaataaaacctttactgcacatgataaacatcccttaaaaattacctaggagcaccctaaattttaaaatgatcacaaagacctggacagattacagtaaaccttcaacatcgctaaacacacgtaccataaatcaaaagaaacacactgctaatgatccgttttttgatgtggaaatatcatgctgtttttaagggaaattatactttattgcgatgttttatttcaaaacaagatgttacactttatttcctataattttatttacaatattttacacccgttaagcaaaaatccccctacattgctattctgtttttttttaatcagttcactactgtagtatctttttgttctccatatatttttgaaaaatacgcaaaagagttctgcagaacttatcaggttggactctgtgaagcctgcaggccagaattgctaaggtgac

SEQ ID NO: 289685 - DNA, 2024 bp, Homo sapiens
ctcttcatagctgagcctgtccggcagtgcggcggatgtacggatgattcagtggctggcaggaagcccgccctgcccgcccgccagtgtcagtggtgttggcatcagcttgggcaggtgtgcgggctcaggatggggcggccgtggtgaggaaccctggactctcagagatggaatttcaccgtgttgcctaggctggtctggagctcttgatctcaagcgatcctccctgcctcggcctcccaacgtgctgggattataggcgtgagccaccgctcctggccagggtctgttcctagttgcaacagttcttggaaacccactcgagagggccacgcctccattcaccaggccacgcatcacaagaggcaacaccaggagccaacatgagctcggggactgaactgctgtggcccggagcagcgctgctggtgctgttgggggtggcagccagtctgtgtgtgcgctgctcacgcccaggtgcaaagaggtcagagaaaatctaccagcagagaagtctgcgtgaggaccaacagagctttacggggtcccggacctactccttggtcgggcaggcatggccaggacccctggcggacatggcacccacaaggaaggacaagctgttgcaattctaccccagcctggaggatccagcatcttccaggtaccagaacttcagcaaaggaagcagacacgggtcggaggaagcctacatagaccccattgccatggagtattacaactgggggcggttctcgaagcccccagaagatgatgatgccaattcctacgagaatgtgctcatttgcaagcagaaaaccacagagacaggtgcccagcaggagggcataggtggcctctgcagaggggacctcagcctgtcactggccctgaagactggccccacttctggtctctgtccctctgcctccccggaagaagatgaggaatctgaggattatcagaactcagcatccatccatcagtggcgcgagtccaggaaggtcatggggcaactccagagagaagcatcccctggcccggtgggaagcccagacgaggaggacggggaaccggattacgtgaatggggaggtggcagccacagaagcctagggcagaccaagaagaaaggagccaaggcaaagagggaccactgtgctcatggacccatcgctgccttccaaggaccatttcccagagctactcaacttttaagcccctgccatggttgctcctggaaggagaaccagccaccctgaggaccacctggccatgcgtgcacagcctgggaaaagacagttactcacgggagctgcaggcccgtcaccaagccctctcccgacccaggctttgtggggcaggcacctggtaccaagggtaacccggctcctggtatggacggatgcgcaggatttaggataagctgtcacccagtccccataacaaaaccactgtccaacactggtatctgtgttcttttgtgctatgaatttggattcctaattgctattgttggttgctggggttttaaatgattgataagcttgtacagttaacttatagagggggagccatatttaacattctggatttcagagtagagatttctgtgttgtctcctagaaagcattacatgtagtttatttcagcatccttgttgggtggggccctggctctcttcccctttggtgggacctcccctttctttgggcttcagttcactcaggaagaaatgaggctgtcgccatctttatgtgcttccagtggaaatgtcacttgctacagacaatagtgcatgagagtctagagaagtagtgaccagaacagggcagagtaggtcccctccatggccctgaatcctcctctgctccagggctggcctctgcagagctgattaaacagtgttgtgactgtctcatgggaagagctggggcccagagggaccttgagtcagaaatgttgccagaaaaagtatctcctccaaccaaaacatctcaataaaaccattttagttgaaaa

SEQ ID NO: 289686 - DNA, 1954 bp, Homo sapiens
ctcttcatagctgagcctgtccggcagtgcggcggatgtacggatgattcagtggctggcaggaagcccgccctgcccgcccgccagtgtcagtggtgttggcatcagcttgggcaggtgtgcgggctcaggatggggcggccgtggtgaggaaccctggactctcagagatggaatttcaccgtgttgcctaggctggtctggagctcttgatctcaagcgatcctccctgcctcggcctcccaacgtgctgggattataggcgtgagccaccgctcctggccaggcatcacaagaggcaacaccaggagccaacatgagctcggggactgaactgctgtggcccggagcagcgctgctggtgctgttgggggtggcagccagtctgtgtgtgcgctgctcacgcccaggtgcaaagaggtcagagaaaatctaccagcagagaagtctgcgtgaggaccaacagagctttacggggtcccggacctactccttggtcgggcaggcatggccaggacccctggcggacatggcacccacaaggaaggacaagctgttgcaattctaccccagcctggaggatccagcatcttccaggtaccagaacttcagcaaaggaagcagacacgggtcggaggaagcctacatagaccccattgccatggagtattacaactgggggcggttctcgaagcccccagaagatgatgatgccaattcctacgagaatgtgctcatttgcaagcagaaaaccacagagacaggtgcccagcaggagggcataggtggcctctgcagaggggacctcagcctgtcactggccctgaagactggccccacttctggtctctgtccctctgcctccccggaagaagatgaggaatctgaggattatcagaactcagcatccatccatcagtggcgcgagtccaggaaggtcatggggcaactccagagagaagcatcccctggcccggtgggaagcccagacgaggaggacggggaaccggattacgtgaatggggaggtggcagccacagaagcctagggcagaccaagaagaaaggagccaaggcaaagagggaccactgtgctcatggacccatcgctgccttccaaggaccatttcccagagctactcaacttttaagcccctgccatggttgctcctggaaggagaaccagccaccctgaggaccacctggccatgcgtgcacagcctgggaaaagacagttactcacgggagctgcaggcccgtcaccaagccctctcccgacccaggctttgtggggcaggcacctggtaccaagggtaacccggctcctggtatggacggatgcgcaggatttaggataagctgtcacccagtccccataacaaaaccactgtccaacactggtatctgtgttcttttgtgctatgaatttggattcctaattgctattgttggttgctggggttttaaatgattgataagcttgtacagttaacttatagagggggagccatatttaacattctggatttcagagtagagatttctgtgttgtctcctagaaagcattacatgtagtttatttcagcatccttgttgggtggggccctggctctcttcccctttggtgggacctcccctttctttgggcttcagttcactcaggaagaaatgaggctgtcgccatctttatgtgcttccagtggaaatgtcacttgctacagacaatagtgcatgagagtctagagaagtagtgaccagaacagggcagagtaggtcccctccatggccctgaatcctcctctgctccagggctggcctctgcagagctgattaaacagtgttgtgactgtctcatgggaagagctggggcccagagggaccttgagtcagaaatgttgccagaaaaagtatctcctccaaccaaaacatctcaataaaaccattttagttgaaaa

SEQ ID NO: 289687 - DNA, 2542 bp, Homo sapiens
  misc_feature (2248)..(2248): n is a, c, g, or t
ctcttcatagctgagcctgtccggcagtgcggcggatgtacggatgattcagtggctggcaggaagcccgccctgcccgcccgccagtgtcagtggtgttggcatcagcttgggcaggtgtgcgggctcaggatggggcggccgtggtgaggaaccctggactctcagagatggaatttcaccgtgttgcctaggctggtctggagctcttgatctcaagcgatcctccctgcctcggcctcccaacgtgctgggattataggcgtgagccaccgctcctggccagggtctgttcctagttgcaacagttcttggaaacccactcgagagggccacgcctccattcaccaggccacgcatcacaagaggcaacaccaggagccaacatgagctcggggactgaactgctgtggcccggagcagcgctgctggtgctgttgggggtggcagccagtctgtgtgtgcgctgctcacgcccaggtgcaaagaggtcagagaaaatctaccagcagagaagtctgcgtgaggaccaacagagctttacggggtcccggacctactccttggtcgggcaggcatggccaggacccctggcggacatggcacccacaaggaaggacaagctgttgcaattctaccccagcctggaggatccagcatcttccaggtaccagaacttcagcaaaggaagcagacacgggtcggaggaagcctacatagaccccattgccatggagtattacaactgggggcggttctcgaagcccccagaagatgatgatgccaattcctacgagaatgtgctcatttgcaagcagaaaaccacagagacaggtgcccagcaggagggcataggtggcctctgcagaggggacctcagcctgtcactggccctgaagactggccccacttctggtctctgtccctctgcctccccggaagaagatgaggaatctgaggattatcagaactcagcatccatccatcagtggcgcgagtccaggaaggtcatggggcaactccagagagaagcatcccctggcccggtgggaagcccagacgaggaggacggggaaccggattacgtgaatggggaggtggcagccacagaagcctagggcagaccaagaagaaaggagccaaggcaaagagggaccactgtgctcatggacccatcgctgccttccaaggaccatttcccagagctactcaacttttaagcccctgccatggttgctcctggaaggagaaccagccaccctgaggaccacctggccatgcgtgcacagcctgggaaaagacagttactcacgggagctgcaggcccgtcaccaagccctctcccgacccaggctttgtggggcaggcacctggtaccaagggtaacccggctcctggtatggacggatgcgcaggatttaggataagctgtcacccagtccccataacaaaaccactgtccaacactggtatctgtgttcttttgtgctatgaatttggattcctaattgctattgttggttgctggggttttaaatgattgataagcttgtacagttaacttatagagggggagccatatttaacattctggatttcagagtagagatttctgtgttgtctcctagaaagcattacatgtagtttatttcagcatccttgttgggtggggccctggctctcttcccctttggtgggacctcccctttctttgggcttcagttcactcaggaagaaatgaggctgtcgccatctttatgtgcttccagtggaaatgtcacttgctacagacaatagtgcatgagagtctagagaagtagtgaccagaacagggcagagtaggtcccctccatggccctgaatcctcctctgctccagggctggcctctgcagagctgattaaacagtgttgtgactgtctcatgggaagagctggggcccagagggaccttgagtcagaaatgttgccagaaaaagtatctcctccaaccaaaacatctcaataaaaccattttagttgaaaaaaaccaacaaaatcataaggcaaagaggaactgttggcaacggagtacggggttgtgggccatgaaatcctgggggggagtcccaaaggggggtggagaaagcaccaggggggaataggggaatggcctccgaaccactccgttttatgattgccccgtgcggggacacgcacaagggggggcccccaatgggaggtgccggcggaacatggacgataaccggnggcggaacccacgctctttatgtgttcgtcagcgtgcgcacacaggcacaacacctgtggtgtgtaggaggggggccccccaaaaaagaggttgggggggttaaatggccaaaaaacaacaagagaggaagaggaagacacacacactatctcttctagtaacaaacaacaacaagggtgtgtggacagacacatacactatatggtggcagcgggagcagcacacagaacaaagtagaatatctagtgacgtgcgtagtcgggactacacacaagtacgtagtagagtagaga

SEQ ID NO: 289688 - DNA, 2495 bp, Homo sapiens
  misc_feature (2138)..(2138): n is a, c, g, or t
  misc_feature (2392)..(2392): n is a, c, g, or t
ctcttcatagctgagcctgtccggcagtgcggcggatgtacggatgattcagtggctggcaggaagcccgccctgcccgcccgccagtgtcagtggtgttggcatcagcttgggcaggtgtgcgggctcaggatggggcggccgtggtgaggaaccctggactctcagcatcacaagaggcaacaccaggagccaacatgagctcggggactgaactgctgtggcccggagcagcgctgctggtgctgttgggggtggcagccagtctgtgtgtgcgctgctcacgcccaggtgcaaagaggtcagagaaaatctaccagcagagaagtctgcgtgaggaccaacagagctttacggggtcccggacctactccttggtcgggcaggcatggccaggacccctggcggacatggcacccacaaggaaggacaagctgttgcaattctaccccagcctggaggatccagcatcttccaggtaccagaacttcagcaaaggaagcagacacgggtcggaggaagcctacatagaccccattgccatggagtattacaactgggggcggttctcgaagcccccagaagatgatgatgccaattcctacgagaatgtgctcatttgcaagcagaaaaccacagagacaggtgcccagcaggagggcataggtggcctctgcagaggggacctcagcctgtcactggccctgaagactggccccacttctggtctctgtccctctgcctccccggaagaagatgaggaatctgaggattatcagaactcagcatccatccatcagtggcgcgagtccaggaaggtcatggggcaactccagagagaagcatcccctggcccggtgggaagcccagacgaggaggacggggaaccggattacgtgaatggggaggtggcagccacagaagcctagggcagaccaagaagaaaggggcgtcaggcagggaattctggtgacttcaggggcaaagaagtgggcaccgggtgggtctcccaactccactgcatcctcctggctgcgaccttggaccaagtgacaacctcccagaacttagttcctcacttggtgcccacctctcagagaagacatcgcacacacggccgggcacggtggctcacgcctgtaatcccggcactttgggaggccgaggcaggcagatcacctgaggtcacgagttcgagaccagcctggccaacatggtgaaacttcatctctactaaaaacacaaaaaattagccaggcatggtggtgggtgcctgtagtcccagttagttgggaggctgaggcaggagaatcatttgaaccctgaaggcggaggttgcggtgagttaagatcacatgcactcaaccctgggtgacagagcgagactccgtctcaataaataaataaaaaaacagacattgcacacaaagcctcagcccagcaggcactcggtcaatgctggaaacagacaggaggcagggacgttgggaaatgtaacagtggctgagacgcgctgaggagccaccgcaggccagtgagatggtgcggcgctaagcgctcacacgtgcaccatctcttagcacccaaagccacagagcagttaagccacctgcccaaggccacatcttgaagtaaggggaggaggagatggaatccccagtggtcagacatcagacatcaaagcctaggctgggtctactgcttgggaagcacgatggacccccagagggccttgaaggctgcccaaagtccccatctgggagacccaggccgtcatctcagcgagcaggctggagggtggaaaccacagtgaacctgggtggtcaagagtcagccccagaggcaggtgcaggagtttgagccaaatgtgcagagccccacgtcattcattcaaccagtatccactgggcccctgctacgggcaagtcctgctctaggtgctgggaacaccaacataaagaacagcaaacccctgaccccttagaacttgcattctggtaggagagagaaaacagatagggctggacacagcggtcatgcctataaatcccagcacttcgggaggctgaggcgggaggatcctttgagcctctgagtttgaggccagcctgggcaacatagcaagacctctctctctncaaaaactttttttttttttttttgagacagagtatcactgtcactcaggctggagtgcagtggcgccatctcggctcactgcaacctccacctcctgggttcaagcgattctcgtgcctcagccttccaagtagctgggattacaggcacacgccaccatgtccagcctctataaaaacatttaaaattagccaggcatggtggtggatgccctagagtcccactgacttgggaggctgaggtgggaagatcncttgagcctgggaggtcaaggttgcaatgagccatggttgctgcagtgagctgtggtcgtgccactgcactcaagcctgggcaacagagcaagaccccatctc

SEQ ID NO: 289689 - DNA, 825 bp, Homo sapiens
tctgttgatggacacttagatttcttccaaatcttggctgttgtgaacagtggcgcaataaatatggcagtgcaggtatctcttcgaggtacaaaattcctttctttggggtatatacccggcagtgggattgctggatcatatggtagctcaatttttagttttgtgaggaacctccaaaccattttccatagtgggtgtagtaatttatgttcccaccagtagggtacaagggttcccttttcttcacatccttgccagcatttgttatttatatcacagttcaaaaaaataatgtaatataccaaaaacgattgagttgtggggaaaaaaaaatataagtgcactagaatttatgcaactgaacaggaactgtctagtttgttgtcttttttttttttttttttgagacagggtgtcattctgtcacccaggctgcagttcagtggcgtgatctcggctcactgcaacctccacctcccgggttcaagcgtcagcctcccgagtatctgggatttacaggcgcagccgtgcattgaaagtaatggtaaaaaccacaattacttttgtgccaacctaataccatcccacaccagtgtcccacagtcacacccccccttgtggttaaactttctctcagcagctgttgaaaagtttttcctctctccgataattctgctgatggcctctgcagagctgattaaacagtgttgtgactgtctcatgggaagagctggggcccagagggaccttgagtcagaaatgttgccagaaaaagtatctcctccaaccaaaacatctcaataaaaccattttagttgaaaa

SEQ ID NO: 289690 - DNA, 1878 bp, Homo sapiens
ctcttcatagctgagcctgtccggcagtgcggcggatgtacggatgattcagtggctggcaggaagcccgccctgcccgcccgccagtgtcagtggtgttggcatcagcttgggcaggtgtgcgggctcaggatggggcggccgtggtgaggaaccctggactctcagagatggaatttcaccgtgttgcctaggctggtctggagctcttgatctcaagcgatcctccctgcctcggcctcccaacgtgctgggattataggcgtgagccaccgctcctggccagggtctgttcctagttgcaacagttcttggaaacccactcgagagggccacgcctccattcaccaggccacgcatcacaagaggcaacaccaggagccaacatgagctcggggactgaactgctgtggcccggagcagcgctgctggtgctgttgggggtggcagccagtctgtgtgtgcgctgctcacgcccaggtgcaaagaggtcagagaaaatctaccagcagagaagtctgcgtgaggaccaacagagctttacggggtcccggacctactccttggtcgggcaggcatggccaggacccctggcggacatggcacccacaaggaaggacaagctgttgcaattctaccccagcctggaggatccagcatcttccaggtaccagaacttcagcaaaggaagcagacacgggtcggaggaagcctacatagaccccattgccatggagtattacaactgggggcggttctcgaagcccccagaagatgatgatgccaattcctacgagaatgtgctcatttgcaagcagaaaaccacagagacaggtgcccagcaggagggcataggtggcctctgcagaggggacctcagcctgtcactggccctgaagactggccccacttctggtctctgtccctctgcctccccggaagaagatgaggaatctgaggattatcagaactcagcatccatccatcagtggcgcgagtccaggaaggtcatggggcaactccagagagaagcatcccctggcccggtgggaagcccagacgaggaggacggggaaccggattacgtgaatggggaggtggcagccacagaagcctagggcagaccaagaagaaaggagccaaggcaaagagggaccactgtgctcatggacccatcgctgccttccaaggaccatttcccagagctactcaacttttaagcccctgccatggttgctcctggaaggagaaccagccaccctgaggaccacctggccatgcgtgcacagcctgggaaaagacagttactcacgggagctgcaggcccgtcaccaagccctctcccgacccaggctttgtggggcaggcacctggtaccaagggtaacccggctcctggtatggacggatgcgcaggatttaggataagctgtcacccagtccccataacaaaaccactgtccaacactggtatctgtgttcttttgtgctatgaatttggattcctaattgctattgttggttgctggggttttaaatgattgataagcttgtacagttaacttatagagggggagccatatttaacattctggatttcagagtagagatttctgtgttgtctcctagaaagcattacatgtagtttatttcagcatccttgttgggtggggccctggctctcttcccctttggtgggaccctccatggccctgaatcctcctctgctccagggctggcctctgcagagctgattaaacagtgttgtgactgtctcatgggaagagctggggcccagagggaccttgagtcagaaatgttgccagaaaaagtatctcctccaaccaaaacatctcaataaaaccattttagttgaaaa

SEQ ID NO: 289691 - DNA, 381 bp, Homo sapiens
cctagaagactacttgagttattcagctctgccggtggcctgcgcgcgcccttgtgactcccctttctttgggcttcagttcactcaggaagaaatgaggctgtcgccatctttatgtgcttccagtggaaatgtcacttgctacagacaatagtgcatgagagtctagagaagtagtgaccagaacagggcagagtaggtcccctccatggccctgaatcctcctctgctccagggctggcctctgcagagctgattaaacagtgttgtgactgtctcatgggaagagctggggcccagagggaccttgagtcagaaatgttgccagaaaaagtatctcctccaaccaaaacatctcaataaaaccattttagttgaaaa

SEQ ID NO: 289692 - DNA, 179 bp, Homo sapiens
aaagcaattagctgggtctttcttccagatccagcatcttccaggtaccagaacttcagcaaaggtaggtaggctcctggagaaagggggaggccatggtgggggccacacccaggggctcaggcccaattctcgcctcctcccgcaggaagcagacacgggtcggaggaagcctacat

SEQ ID NO: 289693 - DNA, 1835 bp, Homo sapiens
ctcttcatagctgagcctgtccggcagtgcggcggatgtacggatgattcagtggctggcaggaagcccgccctgcccgcccgccagtgtcagtggtgttggcatcagcttgggcaggtgtgcgggctcaggatggggcggccgtggtgaggaaccctggactctcagcatcacaagaggcaacaccaggagccaacatgagctcggggactgaactgctgtggcccggagcagcgctgctggtgctgttgggggtggcagccagtctgtgtgtgcgctgctcacgcccaggtgcaaagaggtcagagaaaatctaccagcagagaagtctgcgtgaggaccaacagagctttacggggtcccggacctactccttggtcgggcaggcatggccaggacccctggcggacatggcacccacaaggaaggacaagctgttgcaattctaccccagcctggaggatccagcatcttccaggtaccagaacttcagcaaaggaagcagacacgggtcggaggaagcctacatagaccccattgccatggagtattacaactgggggcggttctcgaagcccccagaagatgatgatgccaattcctacgagaatgtgctcatttgcaagcagaaaaccacagagacaggtgcccagcaggagggcataggtggcctctgcagaggggacctcagcctgtcactggccctgaagactggccccacttctggtctctgtccctctgcctccccggaagaagatgaggaatctgaggattatcagaactcagcatccatccatcagtggcgcgagtccaggaaggtcatggggcaactccagagagaagcatcccctggcccggtgggaagcccagacgaggaggacggggaaccggattacgtgaatggggaggtggcagccacagaagcctagggcagaccaagaagaaaggagccaaggcaaagagggaccactgtgctcatggacccatcgctgccttccaaggaccatttcccagagctactcaacttttaagcccctgccatggttgctcctggaaggagaaccagccaccctgaggaccacctggccatgcgtgcacagcctgggaaaagacagttactcacgggagctgcaggcccgtcaccaagccctctcccgacccaggctttgtggggcaggcacctggtaccaagggtaacccggctcctggtatggacggatgcgcaggatttaggataagctgtcacccagtccccataacaaaaccactgtccaacactggtatctgtgttcttttgtgctatgaatttggattcctaattgctattgttggttgctggggttttaaatgattgataagcttgtacagttaacttatagagggggagccatatttaacattctggatttcagagtagagatttctgtgttgtctcctagaaagcattacatgtagtttatttcagcatccttgttgggtggggccctggctctcttcccctttggtgggacctcccctttctttgggcttcagttcactcaggaagaaatgaggctgtcgccatctttatgtgcttccagtggaaatgtcacttgctacagacaatagtgcatgagagtctagagaagtagtgaccagaacagggcagagtaggtcccctccatggccctgaatcctcctctgctccagggctggcctctgcagagctgattaaacagtgttgtgactgtctcatgggaagagctggggcccagagggaccttgagtcagaaatgttgccagaaaaagtatctcctccaaccaaaacatctcaataaaaccattttagttgaaaa

SEQ ID NO: 289694 - DNA, 1779 bp, Homo sapiens
ctcttcatagctgagcctgtccggcagtgcggcggatgtacggatgattcagtggctggcaggaagcccgccctgcccgcccgccagtgtcagtggtgttggcatcagcttgggcaggtgtgcgggctcaggatggggcggccgtggtgaggaaccctggactctcagcatcacaagaggcaacaccaggagccaacatgagctcggggactgaactgctgtggcccggagcagcgctgctggtgctgttgggggtggcagccagtctgtgtgtgcgctgctcacgcccaggtgcaaagaggtcagagaaaatctaccagcagagaagtctgcgtgaggaccaacagagctttacggggtcccggacctactccttggtcgggcaggcatggccaggacccctggcggacatggcacccacaaggaaggacaagctgttgcaattctaccccagcctggaggatccagcatcttccaggtaccagaacttcagcaaaggaagcagacacgggtcggaggaagcctacatatgatgatgccaattcctacgagaatgtgctcatttgcaagcagaaaaccacagagacaggtgcccagcaggagggcataggtggcctctgcagaggggacctcagcctgtcactggccctgaagactggccccacttctggtctctgtccctctgcctccccggaagaagatgaggaatctgaggattatcagaactcagcatccatccatcagtggcgcgagtccaggaaggtcatggggcaactccagagagaagcatcccctggcccggtgggaagcccagacgaggaggacggggaaccggattacgtgaatggggaggtggcagccacagaagcctagggcagaccaagaagaaaggagccaaggcaaagagggaccactgtgctcatggacccatcgctgccttccaaggaccatttcccagagctactcaacttttaagcccctgccatggttgctcctggaaggagaaccagccaccctgaggaccacctggccatgcgtgcacagcctgggaaaagacagttactcacgggagctgcaggcccgtcaccaagccctctcccgacccaggctttgtggggcaggcacctggtaccaagggtaacccggctcctggtatggacggatgcgcaggatttaggataagctgtcacccagtccccataacaaaaccactgtccaacactggtatctgtgttcttttgtgctatgaatttggattcctaattgctattgttggttgctggggttttaaatgattgataagcttgtacagttaacttatagagggggagccatatttaacattctggatttcagagtagagatttctgtgttgtctcctagaaagcattacatgtagtttatttcagcatccttgttgggtggggccctggctctcttcccctttggtgggacctcccctttctttgggcttcagttcactcaggaagaaatgaggctgtcgccatctttatgtgcttccagtggaaatgtcacttgctacagacaatagtgcatgagagtctagagaagtagtgaccagaacagggcagagtaggtcccctccatggccctgaatcctcctctgctccagggctggcctctgcagagctgattaaacagtgttgtgactgtctcatgggaagagctggggcccagagggaccttgagtcagaaatgttgccagaaaaagtatctcctccaaccaaaacatctcaataaaaccattttagttgaaaa

SEQ ID NO: 289695 - DNA, 2097 bp, Homo sapiens
ctcttcatagctgagcctgtccggcagtgcggcggatgtacggatgattcagtggctggcaggaagcccgccctgcccgcccgccagtgtcagtggtgttggcatcagcttgggcaggtgtgcgggctcaggatggggcggccgtggtgaggaaccctggactctcagagatggaatttcaccgtgttgcctaggctggtctggagctcttgatctcaagcgatcctccctgcctcggcctcccaacgtgctgggattataggcgtgagccaccgctcctggccagggtctgttcctagttgcaacagttcttggaaacccactcgagagggccacgcctccattcaccaggccacgcatcacaagaggcaacaccaggagccaacatgagctcggggactgaactgctgtggcccggagcagcgctgctggtgctgttgggggtggcagccagtctgtgtgtgcgctgctcacgcccaggtgcaaagaggtcagagaaaatctaccagcagagaagtctgcgtgaggaccaacagagctttacggggtcccggacctactccttggtcgggcaggcatggccaggacccctggcggacatggcacccacaaggaaggacaagctgttgcaattctaccccagcctggaggatccagcatcttccaggtaccagaacttcagcaaaggaagcagacacgggtcggaggaagcctacatagaccccattgccatggagtattacaactgggggcggttctcgaagcccccagaagatgatgatgccaattcctacgagaatgtgctcatttgcaagcagaaaaccacagagacaggtgcccagcaggagggcataggtggcctctgcagaggggacctcagcctgtcactggccctgaagactggccccacttctggtctctgtccctctgcctccccggaagaagatgaggaatctgaggattatcagaactcagcatccatccatcagtggcgcgagtccaggaaggtcatggggcaactccagagagaagcatcccctggcccggtgggaagcccagacgaggaggacggggaaccggattacgtgaatggggaggtggcagccacagaagcctagggcagaccaagaagaaaggagccaaggcaaagagggaccactgtgctcatggacccatcgctgccttccaaggaccatttcccagagctactcaacttttaagcccctgccatggttgctcctggaaggagaaccagccaccctgaggaccacctggccatgcgtgcacagcctgggaaaagacagttactcacgggagctgcaggcccgtcaccaagccctctcccgacccaggctttgtggggcaggcacctggtaccaagggtaacccggctcctggtatggacggatgcgcaggatttaggataagctgtcacccagtccccataacaaaaccactgtccaacactggtatctgtgttcttttgtgctatgaatttggattcctaattgctattgttggttgctggggttttaaatgattgataagcttgtacagttaacttatagagggggagccatatttaacattctggatttcagagtagagatttctgtgttgtctcctagaaagcattacatgtagtttatttcagcatccttgttgggtggggccctggctctcttcccctttggtgggacctcccctttctttgggcttcagttcactcaggaagaaatgaggctgtcgccatctttatgtgcttccagtggaaatgtcacttgctacagacaatagtgcatgagagtctagagaagtagtgaccagaacagggcagagtaggtcccctccatggccctgaatcctcctctgctccagggctggcctctgcagagctgattaaacagtgttgtgactgtctcatgggaagagctggggcccagagggaccttgagtcagaaatgttgccagaaaaagtatctcctccaaccaaaacatctcaataaaaccattttagttgaaaagcagtgattatcctgtgtctcctttctcctgcttcaggtaaaaaaccttttataaaaatataaaaattagccg

SEQ ID NO: 289696 - DNA, 1649 bp, Homo sapiens
  misc_feature (153)..(153): n is a, c, g, or t
tttcatcctgcgctacgctgtctatactcgttcgtcttctgcttgctgttcgctctgtctgtcgtgtgtgtcctccttcgttctgctgtcgtctatgtctctgtcgctctgcatctatcctcgcttcattgttgctccctctcttctgtctcnctgtcctccgtattcttcgtctcgtcttcttgtttcgtctgcttctcttcgtcgttcgtgtctgttcttccgtctgcttttccttgtctgtttttgcgctgcttcgctcgtctctcgtctctttctctttcgtggtctgcctgctgtctctcttcgtcgtcttctcttcgctttctgcgcctctgtgttcctctgtcctctttctcctgccccatctctccttgcgccggtcttcctatgctctcttcctctctgctctctctcctctctctgtctcctcgttcgcgctcgtcctgtttggtgcttggtctcgtccagcttgtttcttctcctcttctctccttccttcgtttttctttctgttggtttcattgctgttctttgtgttgtttttcgtttttcgttgcggtgtgttctggttctgtttgtgtctttgctgttcgttgtgtgtgcgtggttggtgttatgtgttctggagtcggctctgactggctgcgcgctgtggtcgtgttgtgtgttgtgttctgggcttggtgtgctatgttggttcgttgtctcgtgtgcgtgttcgttttgtttgtgtgatgcgtcgtcggtccggtgtggcgtcgtgttgtgtcttgttttcctcgttctgtgcttgtttcgtttgttttgttgttttctcggcgcggctgggtcgtgagtgtggcgcggtctgtggtgccgttggttttggtctcgtgcttgatgcgcgtgcgcgtgctgcttcgtctctcgacgggtggcggttgttcgcgtctctgtgtctctctgattgtgttgtgcgagccacgcctcctctggtgttctttgtgttgtttttttctgttttttgttgttttttttgcttttttttttttttttttttttttttttttttttctttttttttttttttttttttttttttttttttttttttttctgtgttcttttgtgctatgaatttggattcctaattgctattgttggttgctggggttttaaatgattgataagcttgtacagttaacttatagagggggagccatatttaacattctggatttcagagtagagatttctgtgttgtctcctagaaagcattacatgtagtttatttcagcatccttgttgggtggggccctggctctcttcccctttggtgggacctcccctttctttgggcttcagttcactcaggaagaaatgaggctgtcgccatctttatgtgcttccagtggaaatgtcacttgctacagacaatagtgcatgagagtctagagaagtagtgaccagaacagggcagagtaggtcccctccatggccctgaatcctcctctgctccagggctggcctctgcagagctgattaaacagtgttgtgactgtctcatgggaagagctggggcccagagggaccttgagtcagaaatgttgccagaaaaagtatctcctccaaccaaaacatctcaataaaaccattttagttgaaaa

SEQ ID NO: 289697 - DNA, 1947 bp, Homo sapiens
gctgctggtcatatgtcttcatctctgactctggagaggtgggataaaaggatgttccactttgtctccctcttttttgtcccagagagttagggaaattgaaaagggacagtccagacctcacactggtaggggagatcccttggataggtttcctgctccccgctgtaaactcctttgtgccctgtttccccaaccccagttcatgagttggcagatcccctctccacagaaggcagcctgtagatggagaaactgaggcacaaactaggggctcaaacacctcttgctcctggattctctgaatcagtttctcttgaaggtcataagaatgttctcctctaatcagtcccattcttctcaatcctctgaggaggcttcagggtgactttgggaggagtggcttccagaggaggagcagctgggactgagtcatggcaggaagctgaggagggcgggagatcacaccagacaattataaaagaagagctggtcctgaagctcacaaccgtaacagccaccagacaagcttcagtggccggcccttcacatccagacttgcctgagaggacccacctctgagtgtccagtggtcagttgccccaggatggggaccacagccagagcagccttggtcttgacctatttggctgttgcttctgctgcctctgagggaggcttcacggctacaggacagaggcagctgaggccagagcactttcaagaagttggctacgcagctcccccctccccacccctatcccgaagcctccccatggatcaccctgactcctctcagcatggccctccctttgagggacagagtcaagtgcagccccctccctctcaggaggccacccctctccaacaggaaaagctgctacctgcccaactccctgctgaaaaggaagtgggtccccctctccctcaggaagctgtccccctccaaaaagagctgccctctctccagcaccccaatgaacagaaggaaggaacgccagctccatttggggaccagagccatccagaacctgagtcctggaatgcagcccagcactgccaacaggaccggtcccaagggggctggggccaccggctggatggcttcccccctgggcggccttctccagacaatctgaaccaaatctgccttcctaaccgtcagcatgtggtatatggtccctggaacctaccacagtccagctactcccacctcactcgccagggtgagaccctcaatttcctggagattggatattcccgctgctgccactgccgcagccacacaaaccgcctagagtgtgccaaacttgtgtgggaggatacccttgacaaatactgtgaccgggagtatgctgtgaagacccaccaccacttgtgttgccgccaccctcccagccctactcgggatgagtgctttgcccgtcgggctccttaccccaactatgaccgggacatcttgaccattgacatcagtcgagtcacccccaacctcatgggccacctctgtggaaaccaaagagttctcaccaagcataaacatattcctgggctgatccacaacatgactgcccgctgctgtgacctgccatttccagaacaggcctgctgtgcagaggaggagaaattaaccttcatcaatgatctgtgtggtccccgacgtaacatctggcgagaccctgccctctgctgttacctgagtcctggggatgaacaggtcaactgcttcaacatcaattatctgaggaacgtggctctagtgtctggagacactgagaacgccaagggccagggggagcagggctcaactggaggaacaaatatcagctccacctctgagcccaaggaagaatgagtcaccccagagccctagagggtcagatggggggaaccccaccctgccccacccatctgaacactcattacactaaacacctcttggatttg

SEQ ID NO: 289698 - DNA, 399 bp, Homo sapiens
ctgtcttcagccagtgcctgtctcatatgtgggcgggactctgagcagcctggcagcgagggtatgtataaaatgcttggcctgcaccagggctagggagaggacgacaccaagcgccggcactttgggtggctccttgggtggctcgttgggtggctcctcgggtggcacctggagtggctcgttgcgtggcacatcgggaggctcatcgggtggcccttcgtgtggctccgtcgggggaacaatcacacctgtacatggaaggctcgtggtgtgggaggatacccttgacaaatactgtgaccgggagtatgctgtgaagacccaccaccacttgtgtccccacgagccacgcgagagacactgatcgagccacccgaagagtccggacggacagat

SEQ ID NO: 289699 - DNA, 2552 bp, Homo sapiens
gctgctggtcatatgtcttcatctctgactctggagaggtgggataaaaggatgttccactttgtctccctcttttttgtcccagagagttagggaaattgaaaagggacagtccagacctcacactggtaggggagatcccttggataggtttcctgctccccgctgtaaactcctttgtgccctgtttccccaaccccagttcatgagttggcagatcccctctccacagaaggcagcctgtagatggagaaactgaggcacaaactaggggctcaaacacctcttgctcctggattctctgaatcagtttctcttgaaggtcataagaatgttctcctctaatcagtcccattcttctcaatcctctgaggaggcttcagggtgactttgggaggagtggcttccagaggaggagcagctgggactgagtcatggcaggaagctgaggagggcgggagatcacaccagacaattataaaagaagagctggtcctgaagctcacaaccgtaacagccaccagacaagcttcagtggccggcccttcacatccagacttgcctgagaggacccacctctgagtgtccagtggtcagttgccccaggatggggaccacagccagagcagccttggtcttgacctatttggctgttgcttctgctgcctctgagggaggcttcacggctacaggacagaggcagctgaggccagagcactttcaagaagttggctacgcagctcccccctccccacccctatcccgaagcctccccatggatcaccctgactcctctcagcatggccctccctttgagggacagagtcaagtgcagccccctccctctcaggaggccacccctctccaacaggaaaagctgctacctgcccaactccctgctgaaaaggaagtgggtccccctctccctcaggaagctgtccccctccaaaaagagctgccctctctccagcaccccaatgaacagaaggaaggaacgccagctccatttggggaccagagccatccagaacctgagtcctggaatgcagcccagcactgccaacaggaccggtcccaagggggctggggccaccggctggatggcttcccccctgggcggccttctccagacaatctgaaccaaatctgccttcctaaccgtcagcatgtggtatatggtccctggaacctaccacagtccagctactcccacctcactcgccagggtgagaccctcaatttcctggagattggatattcccgctgctgccactgccgcagccacacaaaccgcctagagtgtgccaaacttgtgtgggaggaagcaatgagccgattctgtgaggccgagttctcggtcaagacccgaccccactggtgctgcacgcggcagggggaggctcggttctcctgcttccaggaggaagctccccagccacactaccagctccgggcctgccccagccatcagcctgatatttcctcgggtcttgagctgcctttccctcctggggtgcccacattggacaatatcaagaacatctgccacctgaggcgcttccgctctgtgccacgcaacctgccagctactgaccccctacaaagggagctgctggcactgatccagctggagagggagttccagcgctgctgccgccaggggaacaatcacacctgtacatggaaggcctgggaggatacccttgacaaatactgtgaccgggagtatgctgtgaagacccaccaccacttgtgttgccgccaccctcccagccctactcgggatgagtgctttgcccgtcgggctccttaccccaactatgaccgggacatcttgaccattgacatcagtcgagtcacccccaacctcatgggccacctctgtggaaaccaaagagttctcaccaagcataaacatattcctgggctgatccacaacatgactgcccgctgctgtgacctgccatttccagaacaggcctgctgtgcagaggaggagaaattaaccttcatcaatgatctgtgtggtccccgacgtaacatctggcgagaccctgccctctgctgttacctgagtcctggggatgaacaggtcaactgcttcaacatcaattatctgaggaacgtggctctagtgtctggagacactgagaacgccaagggccagggggagcagggctcaactggaggaacaaatatcagctccacctctgagcccaaggaagaatgagtcaccccagagccctagagggtcagatggggggaaccccaccctgccccacccatctgaacactcattacactaaacacctcttggatttggtgtcctcattgtctatctaatgtctcacccgcagtgttttaagtggatcttggtgccctggcccaggagggcactggcgttttcagacacaccacagacaaacacaccctcctaagcctgcttgtatttccttcagtgcctggcccctgaggcccacggccctgcccccttcactgagcagatgttcacaggctgtgggatgcgaccataactaaacagcttgacgtca

SEQ ID NO: 289700 - DNA, 2710 bp, Homo sapiens
gctgctggtcatatgtcttcatctctgactctggagaggtgggataaaaggatgttccactttgtctccctcttttttgtcccagagagttagggaaattgaaaagggacagtccagacctcacactggtaggggagatcccttggataggtttcctgctccccgctgtaaactcctttgtgccctgtttccccaaccccagttcatgagttggcagatcccctctccacagaaggcagcctgtagatggagaaactgaggcacaaactaggggctcaaacacctcttgctcctggattctctgaatcagtttctcttgaaggtcataagaatgttctcctctaatcagtcccattcttctcaatcctctgaggaggcttcagggtgactttgggaggagtggcttccagaggaggagcagctgggactgagtcatggcaggaagctgaggagggcgggagatcacaccagacaattataaaagaagagctggtcctgaagctcacaaccgtaacagccaccagacaagcttcagtggccggcccttcacatccagacttgcctgagaggacccacctctgagtgtccagtggtcagttgccccaggatggggaccacagccagagcagccttggtcttgacctatttggctgttgcttctgctgcctctgagggaggcttcacggctacaggacagaggcagctgaggccagagcactttcaagaagttggctacgcagctcccccctccccacccctatcccgaagcctccccatggatcaccctgactcctctcagcatggccctccctttgagggacagagtcaagtgcagccccctccctctcaggaggccacccctctccaacaggaaaagctgctacctgcccaactccctgctgaaaaggaagtgggtccccctctccctcaggaagctgtccccctccaaaaagagctgccctctctccagcaccccaatgaacagaaggaaggaacgccagctccatttggggaccagagccatccagaacctgagtcctggaatgcagcccagcactgccaacaggaccggtcccaagggggctggggccaccggctggatggcttcccccctgggcggccttctccagacaatctgaaccaaatctgccttcctaaccgtcagcatgtggtatatggtccctggaacctaccacagtccagctactcccacctcactcgccagggtgagaccctcaatttcctggagattggatattcccgctgctgccactgccgcagccacacaaaccgcctagagtgtgccaaacttgtgtgggaggaagcaatgagccgattctgtgaggccgagttctcggtcaagacccgaccccactggtgctgcacgcggcagggggaggctcggttctcctgcttccaggaggaagctccccagccacactaccagctccgggcctgccccagccatcagcctgatatttcctcgggtcttgagctgcctttccctcctggggtgcccacattggacaatatcaagaacatctgccacctgaggcgcttccgctctgtgccacgcaacctgccagctactgaccccctacaaagggagctgctggcactgatccagctggagagggagttccagcgctgctgccgccaggggaacaatcacacctgtacatggaaggcctgggaggatacccttgacaaatactgtgaccgggagtatgctgtgaagacccaccaccacttgtgttgccgccaccctcccagccctactcgggatgagtgctttgcccgtcgggctccttaccccaactatgaccgggacatcttgaccattgacatcagtcgagtcacccccaacctcatgggccacctctgtggaaaccaaagagttctcaccaagcataaacatattcctgggctgatccacaacatgactgcccgctgctgtgacctgccatttccagaacaggcctgctgtgcagaggaggagaaattaaccttcatcaatgatctgtgtggtccccgacgtaacatctggcgagaccctgccctctgctgttacctgagtcctggggatgaacaggtcaactgcttcaacatcaattatctgaggaacgtggctctagtgtctggagacactgagaacgccaagggccagggggagcagggctcaactggaggaacaaatatcagctccacctctgagcccaaggaagaatgagtcaccccagagccctagagggtcagatggggggaaccccaccctgccccacccatctgaacactcattacactaaacacctcttggatttggtgtcctcattgtctatctaatgtctcacccgcagtgttttaagtggatcttggtgccctggcccaggagggcactggcgttttcagacacaccacagacaaacacaccctcctaagcctgcttgtatttccttcagtgcctggcccctgaggcccacggccctgcccccttcactgagcagatgttcacaggctgtgggatgcgaccataactaaacagcttgacgtcactttgccatcttgaatttattcacatattttgaaaggagtgccaccttgttagctagctatcaggactcaaagaagatatggttcttggccttggtgagcccccaaaatgccacagcccagcctaacatttttaaagcttcacttttgatccttagaa

SEQ ID NO: 289701 - DNA, 2322 bp, Homo sapiens
gctgctggtcatatgtcttcatctctgactctggagaggtgggataaaaggatgttccactttgtctccctcttttttgtcccagagagttagggaaattgaaaagggacagtccagacctcacactggtaggggagatcccttggataggtttcctgctccccgctgtaaactcctttgtgccctgtttccccaaccccagttcatgagttggcagatcccctctccacagaaggcagcctgtagatggagaaactgaggcacaaactaggggctcaaacacctcttgctcctggattctctgaatcagtttctcttgaaggtcataagaatgttctcctctaatcagtcccattcttctcaatcctctgaggaggcttcagggtgactttgggaggagtggcttccagaggaggagcagctgggactgagtcatggcaggaagctgaggagggcgggagatcacaccagacaattataaaagaagagctggtcctgaagctcacaaccgtaacagccaccagacaagcttcagtggccggcccttcacatccagacttgcctgagaggacccacctctgagtgtccagtggtcagttgccccaggatggggaccacagccagagcagccttggtcttgacctatttggctgttgcttctgctgcctctgagggaggcttcacggctacaggacagaggcagctgaggccagagcactttcaagaagttggctacgcagctcccccctccccacccctatcccgaagcctccccatggatcaccctgactcctctcagcatggccctccctttgagggacagagtcaagtgcagccccctccctctcaggaggccacccctctccaacaggaaaagctgctacctgcccaactccctgctgaaaaggaagtgggtccccctctccctcaggaagctgtccccctccaaaaagagctgccctctctccagcaccccaatgaacagaaggaaggaacgccagctccatttggggaccagagccatccagaacctgagtcctggaatgcagcccagcactgccaacaggaccggtcccaagggggctggggccaccggctggatggcttcccccctgggcggccttctccagacaatctgaaccaaatctgccttcctaaccgtcagcatgtggtatatggtccctggaacctaccacagtccagctactcccacctcactcgccagggtgagaccctcaatttcctggagattggatattcccgctgctgccactgccgcagccacacaaaccgcctagagtgtgccaaacttgtgtgggaggaagcaatgagccgattctgtgaggccgagttctcggtcaagacccgaccccactggtgctgcacgcggcagggggaggctcggttctcctgcttccaggaggaagctccccagccacactaccagctccgggcctgccccagccatcagcctgatatttcctcgggtcttgagctgcctttccctcctggggtgcccacattggacaatatcaagaacatctgccacctgaggcgcttccgctctgtgccacgcaacctgccagctactgaccccctacaaagggagctgctggcactgatccagctggagagggagttccagcgctgctgccgccaggggaacaatcacacctgtacatggaaggcctgggaggatacccttgacaaatactgtgaccgggagtatgctgtgaagacccaccaccacttgtgttgccgccaccctcccagccctactcgggatgagtgctttgcccgtcgggctccttaccccaactatgaccgggacatcttgaccattgacatcagtcgagtcacccccaacctcatgggccacctctgtggaaaccaaagagttctcaccaagcataaacatattcctgggctgatccacaacatgactgcccgctgctgtgacctgccatttccagaacaggcctgctgtgcagaggaggagaaattaaccttcatcaatgatctgtgtggtccccgacgtaacatctggcgagaccctgccctctgctgttacctgagtcctggggatgaacaggtcaactgcttcaacatcaattatctgaggaacgtggctctagtgtctggagacactgagaacgccaagggccagggggagcagggctcaactggaggaacaaatatcagctccacctctgagcccaaggaagaatgagtcaccccagagccctagagggtcagatggggggaaccccaccctgccccacccatctgaacactcattacactaaacacctcttggatttg

SEQ ID NO: 289702 - DNA, 2350 bp, Homo sapiens
gctgctggtcatatgtcttcatctctgactctggagaggtgggataaaaggatgttccactttgtctccctcttttttgtcccagagagttagggaaattgaaaagggacagtccagacctcacactggtaggggagatcccttggataggtttcctgctccccgctgtaaactcctttgtgccctgtttccccaaccccagttcatgagttggcagatcccctctccacagaaggcagcctgtagatggagaaactgaggcacaaactaggggctcaaacacctcttgctcctggattctctgaatcagtttctcttgaaggtcataagaatgttctcctctaatcagtcccattcttctcaatcctctgaggaggcttcagggtgactttgggaggagtggcttccagaggaggagcagctgggactgagtcatggcaggaagctgaggagggcgggagatcacaccagacaattataaaagaagagctggtcctgaagctcacaaccgtaacagccaccagacaagcttcagtggccggcccttcacatccagacttgcctgagaggacccacctctgagtgtccagtggtcagttgccccaggatggggaccacagccagagcagccttggtcttgacctatttggctgttgcttctgctgcctctgagggaggcttcacggctacaggacagaggcagctgaggccagagcactttcaagaagttggctacgcagctcccccctccccacccctatcccgaagcctccccatggatcaccctgactcctctcagcatggccctccctttgagggacagagtcaagtgcagccccctccctctcaggaggccacccctctccaacaggaaaagctgctacctgcccaactccctgctgaaaaggaagtgggtccccctctccctcaggaagctgtccccctccaaaaagagctgccctctctccagcaccccaatgaacagaaggaaggaacgccagctccatttggggaccagagccatccagaacctgagtcctggaatgcagcccagcactgccaacaggaccggtcccaagggggctggggccaccggctggatggcttcccccctgggcggccttctccagacaatctgaaccaaatctgccttcctaaccgtcagcatgtggtatatggtccctggaacctaccacagtccagctactcccacctcactcgccagggtgagaccctcaatttcctggagattggatattcccgctgctgccactgccgcagccacacaaaccgcctagagtgtgccaaacttgtgtgggaggaagcaatgagccgattctgtgaggccgagttctcggtcaagacccgaccccactggtgctgcacgcggcagggggaggctcggttctcctgcttccaggaggaagctccccagccacactaccagctccgggcctgccccagccatcagcctgatatttcctcgggtcttgagctgcctttccctcctggggtgcccacattggacaatatcaagaacatctgccacctgaggcgcttccgctctgtgccacgcaacctgccagctactgaccccctacaaagggagctgctggcactgatccagctggagagggagttccagcgctgctgccgccaggggaacaatcacacctgtacatggaaggcctgggaggatacccttgacaaatactgtgaccgggagtatgctgtgaagacccaccaccacttgtgttgccgccaccctcccagccctactcgggatgagtgctttgcccgtcgggctccttaccccaactatgaccgggacatcttgaccattgacatcagtcgagtcacccccaacctcatgggccacctctgtggaaaccaaagagttctcaccaagcataaacatattcctgggctgatccacaacatgactgcccgctgctgtgacctgccatttccagaacaggcctgctgtgcagaggaggagaaattaaccttcatcaatgatctgtgtggtccccgacgtaacatctggcgagaccctgccctctgctgttacctgagtcctggggatgaacaggtcaactgcttcaacatcaattatctgaggaacgtggctctagtgtctggagacactgagaacgccaagggccagggggagcagggctcaactggaggaacaaatatcagctccacctctgagcccaaggaagaatgagtcaccccagagccctagagggtcagatggggggaaccccaccctgccccacccatctgaacactcattacactaaacacctcttggatttgaagcagttgacctgttcatccgtcgacg

SEQ ID NO: 289703 - DNA, 2016 bp, Homo sapiens
tcccaaggaacgtgtgtccccttggaagaaagggacccacctctgagtgtccagtggtcagttgccccaggatggggaccacagccagagcagccttggtcttgacctatttggctgttgcttctgctgcctctgagggaggcttcacggctacaggacagaggcagctgaggccagagcactttcaagaagttggctacgcagctcccccctccccacccctatcccgaagcctccccatggatcaccctgactcctctcagcatggccctccctttgagggacagagtcaagtgcagccccctccctctcaggaggccacccctctccaacaggaaaagctgctacctgcccaactccctgctgaaaaggaagtgggtccccctctccctcaggaagctgtccccctccaaaaagagctgccctctctccagcaccccaatgaacagaaggaaggaacgccagctccatttggggaccagagccatccagaacctgagtcctggaatgcagcccagcactgccaacaggaccggtcccaagggggctggggccaccggctggatggcttcccccctgggcggccttctccagacaatctgaaccaaatctgccttcctaaccgtcagcatgtggtatatggtccctggaacctaccacagtccagctactcccacctcactcgccagggtgagaccctcaatttcctggagattggatattcccgctgctgccactgccgcagccacacaaaccgcctagagtgtgccaaacttgtgtgggaggaagcaatgagccgattctgtgaggccgagttctcggtcaagacccgaccccactggtgctgcacgcggcagggggaggctcggttctcctgcttccaggaggaagctccccagccacactaccagctccgggcctgccccagccatcagcctgatatttcctcgggtcttgagctgcctttccctcctggggtgcccacattggacaatatcaagaacatctgccacctgaggcgcttccgctctgtgccacgcaacctgccagctactgaccccctacaaagggagctgctggcactgatccagctggagagggagttccagcgctgctgccgccaggggaacaatcacacctgtacatggaaggcctgggaggatacccttgacaaatactgtgaccgggagtatgctgtgaagacccaccaccacttgtgttgccgccaccctcccagccctactcgggatgagtgctttgcccgtcgggctccttaccccaactatgaccgggacatcttgaccattgacatcagtcgagtcacccccaacctcatgggccacctctgtggaaaccaaagagttctcaccaagcataaacatattcctgggctgatccacaacatgactgcccgctgctgtgacctgccatttccagaacaggcctgctgtgcagaggaggagaaattaaccttcatcaatgatctgtgtggtccccgacgtaacatctggcgagaccctgccctctgctgttacctgagtcctggggatgaacaggtcaactgcttcaacatcaattatctgaggaacgtggctctagtgtctggagacactgagaacgccaagggccagggggagcagggctcaactggaggaacaaatatcagctccacctctgagcccaaggaagaatgagtcaccccagagccctagagggtcagatggggggaaccccaccctgccccacccatctgaacactcattacactaaacacctcttggatttggtgtcctcattgtctatctaatgtctcacccgcagtgttttaagtggatcttggtgccctggcccaggagggcactggcgttttcagacacaccacagacaaacacaccctcctaagcctgcttgtatttccttcagtgcctggcccctgaggcccacggccctgcccccttcactgagcagatgttcacaggctgtgggatgcgaccataactaaacagcttgacgtca

SEQ ID NO: 289704 - DNA, 2843 bp, Homo sapiens
gctgctggtcatatgtcttcatctctgactctggagaggtgggataaaaggatgttccactttgtctccctcttttttgtcccagagagttagggaaattgaaaagggacagtccagacctcacactggtaggggagatcccttggataggtttcctgctccccgctgtaaactcctttgtgccctgtttccccaaccccagttcatgagttggcagatcccctctccacagaaggcagcctgtagatggagaaactgaggcacaaactaggggctcaaacacctcttgctcctggattctctgaatcagtttctcttgaaggtcataagaatgttctcctctaatcagtcccattcttctcaatcctctgaggaggcttcagggtgactttgggaggagtggcttccagaggaggagcagctgggactgagtcatggcaggaagctgaggagggcgggagatcacaccagacaattataaaagaagagctggtcctgaagctcacaaccgtaacagccaccagacaagcttcagtggccggcccttcacatccagacttgcctgagaggacccacctctgagtgtccagtggtcagttgccccaggatggggaccacagccagagcagccttggtcttgacctatttggctgttgcttctgctgcctctgagggaggcttcacggctacaggacagaggcagctgaggccagagcactttcaagaagttggctacgcagctcccccctccccacccctatcccgaagcctccccatggatcaccctgactcctctcagcatggccctccctttgagggacagagtcaagtgcagccccctccctctcaggaggccacccctctccaacaggaaaagctgctacctgcccaactccctgctgaaaaggaagtgggtccccctctccctcaggaagctgtccccctccaaaaagagctgccctctctccagcaccccaatgaacagaaggaaggaacgccagctccatttggggaccagagccatccagaacctgagtcctggaatgcagcccagcactgccaacaggaccggtcccaagggggctggggccaccggctggatggcttcccccctgggcggccttctccagacaatctgaaccaaatctgccttcctaaccgtcagcatgtggtatatggtccctggaacctaccacagtccagctactcccacctcactcgccagggtgagaccctcaatttcctggagattggatattcccgctgctgccactgccgcagccacacaaaccgcctagagtgtgccaaacttgtgtgggaggaagcaatgagccgattctgtgaggccgagttctcggtcaagacccgaccccactggtgctgcacgcggcagggggaggctcggttctcctgcttccaggaggaagctccccagccacactaccagctccgggcctgccccagccatcagcctgatatttcctcgggtcttgagctgcctttccctcctggggtgcccacattggacaatatcaagaacatctgccacctgaggcgcttccgctctgtgccacgcaacctgccagctactgaccccctacaaagggagctgctggcactgatccagctggagagggagttccagcgctgctgccgccaggggaacaatcacacctgtacatggaaggccgtaagtgggcgtcccagcctccctgagagcctgtttgcctgcctgcccatcttcgacctctgatcctgccagtccatccatccatgtaccccccctgctgtgagtgcgtccacccgttcatctgcttgtggctgtccgtccatccattgtgtttgtcacctgagtttgttcatcttgagcttcgtactacacttctggcctcctccactcatgatccacacacgcatctgtctaccatccatccatccgtccagctctggcctcacctgaccttctccatccactgttccagctcatctcccggcaccagcttggaacctcatccaggcttccacccgtccaccttcccaagcccacacatcaacagttgcctcctaaccctctacttttttgccattccctttgggcctctcgggctgggagcccctcatctagttgccagggacgataagggaagtcgatggtcaggagagaaggggccaagtgtccagcttctgacttccctctctctggtccacagttgggaggatacccttgacaaatactgtgaccgggagtatgctgtgaagacccaccaccacttgtgttgccgccaccctcccagccctactcgggatgagtgctttgcccgtcgggctccttaccccaactatgaccgggacatcttgaccattgacatcagtcgagtcacccccaacctcatgggccacctctgtggaaaccaaagagttctcaccaagcataaacatattcctgggctgatccacaacatgactgcccgctgctgtgacctgccatttccagaacaggcctgctgtgcagaggaggagaaattaaccttcatcaatgatctgtgtggtccccgacgtaacatctggcgagaccctgccctctgctgttacctgagtcctggggatgaacaggtcaactgcttcaacatcaattatctgaggaacgtggctctagtgtctggagacactgagaacgccaagggccagggggagcagggctcaactggaggaacaaatatcagctccacctctgagcccaaggaagaatgagtcaccccagagccctagagggtcagatggggggaaccccaccctgccccacccatctgaacactcattacactaaacacctcttggatttg

SEQ ID NO: 289705 - DNA, 2636 bp, Homo sapiens
gctgctggtcatatgtcttcatctctgactctggagaggtgggataaaaggatgttccactttgtctccctcttttttgtcccagagagttagggaaattgaaaagggacagtccagacctcacactggtaggggagatcccttggataggtttcctgctccccgctgtaaactcctttgtgccctgtttccccaaccccagttcatgagttggcagatcccctctccacagaaggcagcctgtagatggagaaactgaggcacaaactaggggctcaaacacctcttgctcctggattctctgaatcagtttctcttgaaggtcataagaatgttctcctctaatcagtcccattcttctcaatcctctgaggaggcttcagggtgactttgggaggagtggcttccagaggaggagcagctgggactgagtcatggcaggaagctgaggagggcgggagatcacaccagacaattataaaagaagagctggtcctgaagctcacaaccgtaacagccaccagacaagcttcagtggccggcccttcacatccagacttgcctgagaggacccacctctgagtgtccagtggtcagttgccccaggatggggaccacagccagagcagccttggtcttgacctatttggctgttgcttctgctgcctctgagggaggcttcacggctacaggacagaggcagctgaggccagagcactttcaagaagttggctacgcagctcccccctccccacccctatcccgaagcctccccatggatcaccctgactcctctcagcatggccctccctttgagggacagagtcaaggtggaaaggagggaagaggccctcgcccccactcccagccctggctaggagaaagggtgggctgctcacacattcccccttctatgcagccccctccctctcaggaggccacccctctccaacaggaaaagctgctacctgcccaactccctgctgaaaaggaagtgggtccccctctccctcaggaagctgtccccctccaaaaagagctgccctctctccagcaccccaatgaacagaaggaaggaacgccagctccatttggggaccagagccatccagaacctgagtcctggaatgcagcccagcactgccaacaggaccggtcccaagggggctggggccaccggctggatggcttcccccctgggcggccttctccagacaatctgaaccaaatctgccttcctaaccgtcagcatgtggtatatggtccctggaacctaccacagtccagctactcccacctcactcgccagggtgagaccctcaatttcctggagattggatattcccgctgctgccactgccgcagccacacaaaccgcctagagtgtgccaaacttgtgtgggaggaagcaatgagccgattctgtgaggccgagttctcggtcaagacccgaccccactggtgctgcacgcggcagggggaggctcggttctcctgcttccaggaggaagctccccagccacactaccagctccgggcctgccccagccatcagcctgatatttcctcgggtcttgagctgcctttccctcctggggtgcccacattggacaatatcaagaacatctgccacctgaggcgcttccgctctgtgccacgcaacctgccagctactgaccccctacaaagggagctgctggcactgatccagctggagagggagttccagcgctgctgccgccaggggaacaatcacacctgtacatggaaggcctgggaggatacccttgacaaatactgtgaccgggagtatgctgtgaagacccaccaccacttgtgttgccgccaccctcccagccctactcgggatgagtgctttgcccgtcgggctccttaccccaactatgaccgggacatcttgaccattgacatcagtcgagtcacccccaacctcatgggccacctctgtggaaaccaaagagttctcaccaagcataaacatattcctgggctgatccacaacatgactgcccgctgctgtgacctgccatttccagaacaggcctgctgtgcagaggaggagaaattaaccttcatcaatgatctgtgtggtccccgacgtaacatctggcgagaccctgccctctgctgttacctgagtcctggggatgaacaggtcaactgcttcaacatcaattatctgaggaacgtggctctagtgtctggagacactgagaacgccaagggccagggggagcagggctcaactggaggaacaaatatcagctccacctctgagcccaaggaagaatgagtcaccccagagccctagagggtcagatggggggaaccccaccctgccccacccatctgaacactcattacactaaacacctcttggatttggtgtcctcattgtctatctaatgtctcacccgcagtgttttaagtggatcttggtgccctggcccaggagggcactggcgttttcagacacaccacagacaaacacaccctcctaagcctgcttgtatttccttcagtgcctggcccctgaggcccacggccctgcccccttcactgagcagatgttcacaggctgtgggatgcgaccataactaaacagcttgacgtca

SEQ ID NO: 289706 - DNA, 2708 bp, Homo sapiens
gctgctggtcatatgtcttcatctctgactctggagaggtgggataaaaggatgttccactttgtctccctcttttttgtcccagagagttagggaaattgaaaagggacagtccagacctcacactggtaggggagatcccttggataggtttcctgctccccgctgtaaactcctttgtgccctgtttccccaaccccagttcatgagttggcagatcccctctccacagaaggcagcctgtagatggagaaactgaggcacaaactaggggctcaaacacctcttgctcctggattctctgaatcagtttctcttgaaggtcataagaatgttctcctctaatcagtcccattcttctcaatcctctgaggaggcttcagggtgactttgggaggagtggcttccagaggaggagcagctgggactgagtcatggcaggaagctgaggagggcgggagatcacaccagacaattataaaagaagagctggtcctgaagctcacaaccgtaacagccaccagacaagcttcagtggccggcccttcacatccagacttgcctgagaggacccacctctgagtgtccagtggtcagttgccccaggatggggaccacagccagagcagccttggtcttgacctatttggctgttgcttctgctgcctctgagggaggcttcacggctacaggacagaggcagctgaggccagagcactttcaagaagttggctacgcagctcccccctccccacccctatcccgaagcctccccatggatcaccctgactcctctcagcatggccctccctttgagggacagagtcaaggtaaggtcaccatcccatgccctcctcagtgaccctccaggtttctaatctggcctatatcccacttttcaggtggaaaggagggaagaggccctcgcccccactcccagccctggctaggagaaagggtgggctgctcacacattcccccttctatgcagccccctccctctcaggaggccacccctctccaacaggaaaagctgctacctgcccaactccctgctgaaaaggaagtgggtccccctctccctcaggaagctgtccccctccaaaaagagctgccctctctccagcaccccaatgaacagaaggaaggaacgccagctccatttggggaccagagccatccagaacctgagtcctggaatgcagcccagcactgccaacaggaccggtcccaagggggctggggccaccggctggatggcttcccccctgggcggccttctccagacaatctgaaccaaatctgccttcctaaccgtcagcatgtggtatatggtccctggaacctaccacagtccagctactcccacctcactcgccagggtgagaccctcaatttcctggagattggatattcccgctgctgccactgccgcagccacacaaaccgcctagagtgtgccaaacttgtgtgggaggaagcaatgagccgattctgtgaggccgagttctcggtcaagacccgaccccactggtgctgcacgcggcagggggaggctcggttctcctgcttccaggaggaagctccccagccacactaccagctccgggcctgccccagccatcagcctgatatttcctcgggtcttgagctgcctttccctcctggggtgcccacattggacaatatcaagaacatctgccacctgaggcgcttccgctctgtgccacgcaacctgccagctactgaccccctacaaagggagctgctggcactgatccagctggagagggagttccagcgctgctgccgccaggggaacaatcacacctgtacatggaaggcctgggaggatacccttgacaaatactgtgaccgggagtatgctgtgaagacccaccaccacttgtgttgccgccaccctcccagccctactcgggatgagtgctttgcccgtcgggctccttaccccaactatgaccgggacatcttgaccattgacatcagtcgagtcacccccaacctcatgggccacctctgtggaaaccaaagagttctcaccaagcataaacatattcctgggctgatccacaacatgactgcccgctgctgtgacctgccatttccagaacaggcctgctgtgcagaggaggagaaattaaccttcatcaatgatctgtgtggtccccgacgtaacatctggcgagaccctgccctctgctgttacctgagtcctggggatgaacaggtcaactgcttcaacatcaattatctgaggaacgtggctctagtgtctggagacactgagaacgccaagggccagggggagcagggctcaactggaggaacaaatatcagctccacctctgagcccaaggaagaatgagtcaccccagagccctagagggtcagatggggggaaccccaccctgccccacccatctgaacactcattacactaaacacctcttggatttggtgtcctcattgtctatctaatgtctcacccgcagtgttttaagtggatcttggtgccctggcccaggagggcactggcgttttcagacacaccacagacaaacacaccctcctaagcctgcttgtatttccttcagtgcctggcccctgaggcccacggccctgcccccttcactgagcagatgttcacaggctgtgggatgcgaccataactaaacagcttgacgtca

SEQ ID NO: 289707 - DNA, 2427 bp, Homo sapiens
gctgctggtcatatgtcttcatctctgactctggagaggtgggataaaaggatgttccactttgtctccctcttttttgtcccagagagttagggaaattgaaaagggacagtccagacctcacactggtaggggagatcccttggataggtttcctgctccccgctgtaaactcctttgtgccctgtttccccaaccccagttcatgagttggcagatcccctctccacagaaggcagcctgtagatggagaaactgaggcacaaactaggggctcaaacacctcttgctcctggattctctgaatcagtttctcttgaaggtcataagaatgttctcctctaatcagtcccattcttctcaatcctctgaggaggcttcagggtgactttgggaggagtggcttccagaggaggagcagctgggactgagtcatggcaggaagctgaggagggcgggagatcacaccagacaattataaaagaagagctggtcctgaagctcacaaccgtaacagccaccagacaagcttcagtggccggcccttcacatccagacttgcctgagaggacccacctctgagtgtccagtggtcagttgccccaggatggggaccacagccagagcagccttggtcttgacctatttggctgttgcttctgctgcctctgagggaggcttcacggctacaggacagaggcagctgaggccagagcactttcaagaagttggctacgcagctcccccctccccacccctatcccgaagcctccccatggatcaccctgactcctctcagcatggccctccctttgagggacagagtcaaggtaaggtcaccatcccatgccctcctcagtgaccctccaggtttctaatctggcctatatcccacttttcaggtggaaaggagggaagaggccctcgcccccactcccagccctggctaggagaaagggtgggctgctcacacattcccccttctacctgggcggccttctccagacaatctgaaccaaatctgccttcctaaccgtcagcatgtggtatatggtccctggaacctaccacagtccagctactcccacctcactcgccagggtgagaccctcaatttcctggagattggatattcccgctgctgccactgccgcagccacacaaaccgcctagagtgtgccaaacttgtgtgggaggaagcaatgagccgattctgtgaggccgagttctcggtcaagacccgaccccactggtgctgcacgcggcagggggaggctcggttctcctgcttccaggaggaagctccccagccacactaccagctccgggcctgccccagccatcagcctgatatttcctcgggtcttgagctgcctttccctcctggggtgcccacattggacaatatcaagaacatctgccacctgaggcgcttccgctctgtgccacgcaacctgccagctactgaccccctacaaagggagctgctggcactgatccagctggagagggagttccagcgctgctgccgccaggggaacaatcacacctgtacatggaaggcctgggaggatacccttgacaaatactgtgaccgggagtatgctgtgaagacccaccaccacttgtgttgccgccaccctcccagccctactcgggatgagtgctttgcccgtcgggctccttaccccaactatgaccgggacatcttgaccattgacatcagtcgagtcacccccaacctcatgggccacctctgtggaaaccaaagagttctcaccaagcataaacatattcctgggctgatccacaacatgactgcccgctgctgtgacctgccatttccagaacaggcctgctgtgcagaggaggagaaattaaccttcatcaatgatctgtgtggtccccgacgtaacatctggcgagaccctgccctctgctgttacctgagtcctggggatgaacaggtcaactgcttcaacatcaattatctgaggaacgtggctctagtgtctggagacactgagaacgccaagggccagggggagcagggctcaactggaggaacaaatatcagctccacctctgagcccaaggaagaatgagtcaccccagagccctagagggtcagatggggggaaccccaccctgccccacccatctgaacactcattacactaaacacctcttggatttggtgtcctcattgtctatctaatgtctcacccgcagtgttttaagtggatcttggtgccctggcccaggagggcactggcgttttcagacacaccacagacaaacacaccctcctaagcctgcttgtatttccttcagtgcctggcccctgaggcccacggccctgcccccttcactgagcagatgttcacaggctgtgggatgcgaccataactaaacagcttgacgtca

SEQ ID NO: 289708 - DNA, 1744 bp, Homo sapiens
gctgctggtcatatgtcttcatctctgactctggagaggtgggataaaaggatgttccactttgtctccctcttttttgtcccagagagttagggaaattgaaaagggacagtccagacctcacactggtaggggagatcccttggataggtttcctgctccccgctgtaaactcctttgtgccctgtttccccaaccccagttcatgagttggcagatcccctctccacagaaggcagcctgtagatggagaaactgaggcacaaactaggggctcaaacacctcttgctcctggattctctgaatcagtttctcttgaaggtcataagaatgttctcctctaatcagtcccattcttctcaatcctctgaggaggcttcagggtgactttgggaggagtggcttccagaggaggagcagctgggactgagtcatggcaggaagctgaggagggcgggagatcacaccagacaattataaaagaagagctggtcctgaagctcacaaccgtaacagccaccagacaagcttcagtggccggcccttcacatccagacttgcctgagaggacccacctctgagtgtccagtggtcagttgccccaggatggggaccacagccagagcagccttggtcttgacctatttggctgttgcttctgctgcctctgagggaggcttcacggctacaggacagaggcagctgaggccagagcactttcaagaagttggctacgcagctcccccctccccacccctatcccgaagcctccccatggatcaccctgactcctctcagcatggccctccctttgagggacagagtcaagtgcagccccctccctctcaggaggccacccctctccaacaggaaaagctgctacctgcccaactccctgctgaaaaggaagtgggtccccctctccctcaggaagctgtccccctccaaaaagagctgccctctctccagcaccccaatgaacagaaggaaggaacgccagctccatttggggaccagagccatccagaacctgagtcctggaatgcagcccagcactgccaacaggaccggtcccaagggggctggggccaccggctggatggcttcccccctgggcggccttctccagacaatctgaaccaaatctgccttcctaaccgtcagcatgtggtatatggtccctggaacctaccacagtccagctactcccacctcactcgccagggtgagaccctcaatttcctggagattggatattcccgctgctgccactgccgcagccacacaaaccgcctagagtgtgccaaacttgtgtgggaggaagcaatgagccgattctgtgaggccgagttctcggtcaagacccgaccccactggtgctgcacgcggcagggggaggctcggttctcctgcttccaggaggaagctccccagccacactaccagctccgggcctgccccagccatcagcctgatatttcctcgggtcttgagctgcctttccctcctggggtgcccacattggacaatatcaagaacatctgccacctgaggcgcttccgctctgtgccacgcaacctgccagctactgaccccctacaaagggagctgctggcactgatccagctggagagggagttccagcgctgctgccgccaggggaacaatcacacctgtacatggaaggcctgggagataccctgacaatactgtgaccgggatatccttgatatggaggcttac

SEQ ID NO: 289709 - DNA, 665 bp, Homo sapiens
caggattccgtcgatactcagatcatggaaggctgggaggatacccttgacaaatactgtgaccgggagtatgctgtgaagacccaccaccacttgtgttgccgccaccctcccagccctactcgggatgagtgctttgcccgtcgggctccttaccccaactatgaccgggacatcttgaccattgacatcagtcgagtcacccccaacctcatgggccacctctgtggaaaccaaagagttctcaccaagcataaacatattcctgggctgatccacaacatgactgcccgctgctgtgacctgccatttccagaacaggcctgctgtgcagaggaggagaaattaaccttcatcaatgatctgtgtggtccccgacgtaacatctggcgagaccctgccctctgctgttacctgagtcctggggatgaacaggtcaactgcttcaacatcaattatctgaggaacgtggctctagtgtctggagacactgagaacgccaagggccagggggagcagggctcaactggaggaacaaatatcagctccacctctgagcccaaggaagaatgagtcaccccagagccctagagggtcagatggggggaaccccaccctgccccacccatctgaacactcattacactaaacacctcttggatttg

SEQ ID NO: 289710 - DNA, 1316 bp, Homo sapiens
gctgctggtcatatgtcttcatctctgactctggagaggtgggataaaaggatgttccactttgtctccctcttttttgtcccagagagttagggaaattgaaaagggacagtccagacctcacactggtaggggagatcccttggataggtttcctgctccccgctgtaaactcctttgtgccctgtttccccaaccccagttcatgagttggcagatcccctctccacagaaggcagcctgtagatggagaaactgaggcacaaactaggggctcaaacacctcttgctcctggattctctgaatcagtttctcttgaaggtcataagaatgttctcctctaatcagtcccattcttctcaatcctctgaggaggcttcagggtgactttgggaggagtggcttccagaggaggagcagctgggactgagtcatggcaggaagctgaggagggcgggagatcacaccagacaattataaaagaagagctggtcctgaagctcacaaccgtaacagccaccagacaagcttcagtggccggcccttcacatccagacttgcctgagaggacccacctctgagtgtccagtggtcagttgccccaggatggggaccacagccagagcagccttggtcttgacctatttggctgttgcttctgctgcctctgagggaggcttcacggctacaggacagaggcagctgaggccagagcactttcaagaagttggctacgcagctcccccctccccacccctatcccgaagcctccccatggatcaccctgactcctctcagcatggccctccctttgagggacagagtcaagtgcagccccctccctctcaggaggccacccctctccaacaggaaaagctgctacctgcccaactccctgctgaaaaggaagtgggtccccctctccctcaggaagctgtccccctccaaaaagagctgccctctctccagcaccccaatgaacagaaggaaggaacgccagctccatttggggaccagagccatccagaacctgagtcctggaatgcagcccagcactgccaacaggaccggtcccaagggggctggggccaccggctggatggcttcccccctgggcggccttctccagacaatcttggtgccctggcccaggagggcactggcgttttcagacacaccacagacaaacacaccctcctaagcctgcttgtatttccttcagtgcctggcccctgaggcccacggccctgcccccttcactgagcagatgttcacaggctgtgggatgcgaccataactaaacagcttgacgtca

SEQ ID NO: 289711 - DNA, 530 bp, Homo sapiens
cacctctgtcagagtaaggatcttttcttctccacattccaatacctttgaaaacacacggggggaggaaagggaaaataaacaaatcacgggtgtttacagaatagcaaaaaaagtatgcagctagtaatgaaaaaacaagtcagcgttactgaatgggtataaagtttcagttgtgtaagatgaaaaagttcagaagatcggttgcataacaatgtgaatgtgctgaccactactggacaggagatataaagatagttacgaaggagcaccgtttaagaaccagataatagaaggaggatacgaccatacagtcaccccttggtgttctcaagggatcgggtccaggaccctgcctggataccaaaatccgcacctactcaagtcttgcggtctgccccgcggaaactgcagacacgaaaaattggcccccagtatccatgagtttcgcatccctcaaatactgtactttctacccgtaactggacctgtgcagttctgacttcaactattaaaatttgaaaggcaaa

SEQ ID NO: 289712 - DNA, 634 bp, Homo sapiens
ctaaaatggaataataatgaaaggtcatttgttgtttttgggttaatgagtcaatgtggttagaacatccctgaagtaagtgctcaataaacactggctattgttgatactgttaactattattatcaacagccaggtttgggcaccatgtgataagatgacctgcaggtctggccttggatttctgcagaggtttgttgggaaggcatcacttaggaggctggcagaccatgagaaagtctcacctggaagcggtggaagtcctgcggcttgaagtcattgggggagcagccgcaccagtccacgatgtgcttgtactggcacttgcagcccagcttgcgattccagttggtgatgcgcaggttgttgtccaccatggtgtcgcagtgggggctgttctccaggaccgtatggaagaaggactgcaggggagagagggacccagcctgagacctctcccagcctcccacagatgaactggggtgggaaatggtgaacccttgctctgagttcatgtaagaactggttgtttaaaagaatgtggcatctcatcagaagctgggcggcttcctgtacagcttgcagaactgcaagccaaataaacctcttttctttataaattaaaaaaaaaaga

SEQ ID NO: 289713 - DNA, 932 bp, Homo sapiens
gtgtttccggcttttgaagttatgtctgccgaaaaccacatctggttcaccgccgcctcaacagacacacaatgaaatacaaaaggctaattctgctgtgtacgcaatccatgtttctttccccagaggattccagatggagtgaactcagtagaggcggtgcttcgacggctgatgatcttgcggagaggagagaggagcattagttacggttttaagtcccggctgaactggcaggggttacatgacctcagactcagggacttgtaaaggatgtgcatgcttctcctttgccttccaccgtgattgtaagtttcctgaggccttcccagtcaatgcagaagcggctcaccggcagctgttctccccatccgtgtgcagggacgtctcggcccgtcgaagacccaggcgggcaaaggagtggtacaagccaggtttgggcaccatgtgataagatgacctgcaggtctggccttggatttctgcagaggtttgttgggaaggcatcacttaggaggctggcagaccatgagaaagtctcacctggaagcggtggaagtcctgcggcttgaagtcattgggggagcagccgcaccagtccacgatgtgcttgtactggcacttgcagcccagcttgcgattccagttggtgatgcgcaggttgttgtccaccatggtgtcgcagtgggggctgttctccaggaccgtatggaagaaggactgcaggggagagagggacccagcctgagacctctcccagcctcccacagatgaactggggtgggaaatggtgaacccttgctctgagttcatgtaagaactggttgtttaaaagaatgtggcatctcatcagaagctgggcggcttcctgtacagcttgcagaactgcaagccaaataaacctcttttctttataaattaaaaaaaaaaga

SEQ ID NO: 289714 - DNA, 731 bp, Homo sapiens
gtgtttccggcttttgaagttatgtctgccgaaaaccacatctggttcaccgccgcctcaacagacacacaatgaaatacaaaaggctaattctgctgtgtacgcaatccatgtttctttccccagaggattccagatggagtgaactcagtagaggcggtgcttcgacggctgatgatcttgcggagaggagagaggagcattagttacggttttaagtcccggctgaactggcaggggttacatgacctcagactcagggccttgttaaggatgtgcatgcttctcctttgccttccaccgtgattgtaagtttcctgaggccttcccagcaatgcagaaccgtaagtcaattaaacctctttcctttatacgttatccagtctctgggaagttctttatggcaatgtgaaaaatggcctaatataatacatacttgtttctcttgggtataactctaagattgaaactggggtcttatttaattttattgggaactggcaaattgtgttccagagtaattgagttactctgtattttatattcccattagcattgtgtgggagttccagtcactctacatccttgccaatacgtctattattcttttttattccatcccagtctacaggaaaactggatgcttattttctccatcagagttttccgccatgttgtactttctgccatattgtatatatgttgctgttcctactggggacatatacacc

SEQ ID NO: 289715 - DNA, 1042 bp, Homo sapiens
cgtcaaataaacgaatgagtggaaaaattcttaatcctgtccccaggaaaagccgaggttgcaggtgcctcatgaggctgaccttgcttttggaaccagagagagcagtcaccgtgccagcctgtgagagtgaagtctctgccgatccctaagagaagagccaacgtttcactctaaacgcatgctccttctgctttaccggtcattctcaagtctgactacaaattagaatcatctggggcgtttaaacacagaggcctgagccctgcctcagacagaataaatcaaagtctccaggagctgtgcccatgaactctttttttcctttttaaagctccccaggtgattctaaagtcagccaggattgagaaccactatgccacactgttgcttttgttcaaggtaactaaatgggctcttaaatgtgtcagctgtaaatgattaaacttgcagtataaatgcttattactgccacattgtaattatattcacgatgatttccactcgcgctctctcagttggatgtcttttaaatgaaagactgcaagtcttttacatctttataaaacagaactagcaaaccaaaaacaacatttgccaactgaggagaaacaagagttgtgaaattctgggggtggtgttgctttagtgtggcaaacagaactactcataaattatccctgctcaagtgctgggtccaagaagaatttcagtctctctctactctgcacctgtgttcaggctgtatttcttggcaattgtcaccttataaattctaccaaatgtataattgtataagaactgtggtataaaaagcaatttgtttctagtgggaaaccttagaactgggcctaaagcaaaataaagtgaattttgtcctaaggcagacagccccagtagagaattactgcctccaaactttcagcctcctggaatagccttggcatgtcaaatttcatttagttcatgatgtaagagacattttattcaaagttagaagaactacttagagcaaaagtaaataaaaactatttgtcatcta

SEQ ID NO: 289716 - DNA, 1953 bp, Homo sapiens
ccgcgttgggggggacactggggctgggggggtttgttgggctggtgagttttcgaggtgactgtgctgtgctcggtgaggggacgcccagagagccctgacccggggtcactccgtcgccgttctcctcttgtctacgtgctggacccggtgctacctttttacccacacttaagtgacgcaaaatgcccttcaatggcgagaagcagtgtgtgggagaggaccagccaagcgattctgattcttcccggttttccgaaagcatggcttcgctcagtgactatgaatgctccaggcagagctttgcaagtgactcctccagcaaatccagctctcctgcttcaacaagccctccaagggttgtaacatttgatgaagtgatggctacagcaaggaacttatcaaacttgactcttgctcatgagattgctgtaaatgagaactttcaattgaaacaagaggctctcccagaaaagagtttggctggtcgagtgaagcacattgttcaccaggccttctgggacgtcttggattcagaactaaatgctgaccctcctgagtttgaacatgccatcaaactgtttgaagaaatcagagagattcttctctcttttctcactcccggtggcaaccggcttcgcaaccaaatctgtgaagttttggacacagacctcattaggcagcaggctgagcacagtgctgttgacatccaaggcctggccaactatgtcatcagtacgatgggaaagctgtgtgctcccgtgcgagataatgatatcagagagttaaaggctactggcaacatcgtggaggtgctgagacaaatattccatgtcctggacctcatgcaaatggacatggccaattttacaattatgagtctcagaccgcaccttcaacgccagttggtggaatatgagagaaccaagttccaggaaattttggaagaaactccaagaaaagccgaggttgcaggtgcctcatgaggctgaccttgcttttggaaccagagagagcagtcaccgtgccagcctgtgagagtgaagtctctgccgatccctaagagaagagccaacgtttcactctaaacgcatgctccttctgctttaccggtcattctcaagtctgactacaaattagaatcatctggggcgtttaaacacagaggcctgagccctgcctcagacagaataaatcaaagtctccaggagctgtgcccatgaactctttttttcctttttaaagctccccaggtgattctaaagtcagccaggattgagaaccactatgccacactgttgcttttgttcaaggtaactaaatgggctcttaaatgtgtcagctgtaaatgattaaacttgcagtataaatgcttattactgccacattgtaattatattcacgatgatttccactcgcgctctctcagttggatgtcttttaaatgaaagactgcaagtcttttacatctttataaaacagaactagcaaaccaaaaacaacatttgccaactgaggagaaacaagagttgtgaaattctgggggtggtgttgctttagtgtggcaaacagaactactcataaattatccctgctcaagtgctgggtccaagaagaatttcagtctctctctactctgcacctgtgttcaggctgtatttcttggcaattgtcaccttataaattctaccaaatgtataattgtataagaactgtggtataaaaagcaatttgtttctagtgggaaaccttagaactgggcctaaagcaaaataaagtgaattttgtcctaaggcagacagccccagtagagaattactgcctccaaactttcagcctcctggaatagccttggcatgtcaaatttcatttagttcatgatgtaagagacattttattcaaagttagaagaactacttagagcaaaagtaaataaaaactatttgtcatcta

SEQ ID NO: 289717 - DNA, 1128 bp, Homo sapiens
ccgcgttgggggggacactggggctgggggggtttgttgggctggtgagttttcgaggtgactgtgctgtgctcggtgaggggacgcccagagagccctgacccggggtcactccgtcgccgttctcctcttgtctacgtgctggacccggtgctacctttttacccacacttaagtgacgcaaaatgcccttcaatggcgagaagcagtgtgtgggagaggaccagccaagcgattctgattcttcccggttttccgaaagcatggcttcgctcagtgactatgaatgctccaggcagagctttgcaagtgactcctccagcaaatccagctctcctgcttcaacaagccctccaagggttgtaacatttgatgaagtgatggctacagcaaggaacttatcaaacttgactcttgctcatgagattgctgtaaatgagaactttcaattgaaacaagaggctctcccagaaaagagtttggctggtcgagtgaagcacattgttcaccaggccttctgggacgtcttggattcagaactaaatgctgaccctcctgagtttgaacatgccatcaaactgtttgaagaaatcagagagattcttctctcttttctcactcccggtggcaaccggcttcgcaaccaaatctgtgaagttttggacacagacctcattaggcagcaggctgagcacagtgctgttgacatccaaggcctggccaactatgtcatcagtacgatgggaaagctgtgtgctcccgtgcgagataatgatatcagagagttaaaggctactggcaacatcgtggaggtgctgagacaaatattccatgtcctggacctcatgcaaatggacatggccaattttacaattatgagtctcagaccgcaccttcaacgccagttggtggaatatgagagaaccaagttccaggaaattttggaagaaactccaagtgctcttgatcagactacagaatggataaaagaatctgtaaatgaagaattattttctctttctgagagtgctttaactcctggggccgaaaatacctccaagccaagcctgagccctactttggtgctaaataatagttacttgaaactgttacagtgggattatcaga

SEQ ID NO: 289718 - DNA, 2092 bp, Homo sapiens
ccgcgttgggggggacactggggctgggggggtttgttgggctggtgagttttcgaggtgactgtgctgtgctcggtgaggggacgcccagagagccctgacccggggtcactccgtcgccgttctcctcttgtctacgtgctggacccgggatttcatgcatcaccctgacagccagtggaagttgcctgatttgaagaggcccagggccgaagatacccagtcatgtgtggaagcagcttcaatgccattttgtgagaggttgagggccccagagggggaagcacaggtgctacctttttacccacacttaagtgacgcaaaatgcccttcaatggcgagaagcagtgtgtgggagaggaccagccaagcgattctgattcttcccggttttccgaaagcatggcttcgctcagtgactatgaatgctccaggcagagctttgcaagtgactcctccagcaaatccagctctcctgcttcaacaagccctccaagggttgtaacatttgatgaagtgatggctacagcaaggaacttatcaaacttgactcttgctcatgagattgctgtaaatgagaactttcaattgaaacaagaggctctcccagaaaagagtttggctggtcgagtgaagcacattgttcaccaggccttctgggacgtcttggattcagaactaaatgctgaccctcctgagtttgaacatgccatcaaactgtttgaagaaatcagagagattcttctctcttttctcactcccggtggcaaccggcttcgcaaccaaatctgtgaagttttggacacagacctcattaggcagcaggctgagcacagtgctgttgacatccaaggcctggccaactatgtcatcagtacgatgggaaagctgtgtgctcccgtgcgagataatgatatcagagagttaaaggctactggcaacatcgtggaggtgctgagacaaatattccatgtcctggacctcatgcaaatggacatggccaattttacaattatgagtctcagaccgcaccttcaacgccagttggtggaatatgagagaaccaagttccaggaaattttggaagaaactccaagaaaagccgaggttgcaggtgcctcatgaggctgaccttgcttttggaaccagagagagcagtcaccgtgccagcctgtgagagtgaagtctctgccgatccctaagagaagagccaacgtttcactctaaacgcatgctccttctgctttaccggtcattctcaagtctgactacaaattagaatcatctggggcgtttaaacacagaggcctgagccctgcctcagacagaataaatcaaagtctccaggagctgtgcccatgaactctttttttcctttttaaagctccccaggtgattctaaagtcagccaggattgagaaccactatgccacactgttgcttttgttcaaggtaactaaatgggctcttaaatgtgtcagctgtaaatgattaaacttgcagtataaatgcttattactgccacattgtaattatattcacgatgatttccactcgcgctctctcagttggatgtcttttaaatgaaagactgcaagtcttttacatctttataaaacagaactagcaaaccaaaaacaacatttgccaactgaggagaaacaagagttgtgaaattctgggggtggtgttgctttagtgtggcaaacagaactactcataaattatccctgctcaagtgctgggtccaagaagaatttcagtctctctctactctgcacctgtgttcaggctgtatttcttggcaattgtcaccttataaattctaccaaatgtataattgtataagaactgtggtataaaaagcaatttgtttctagtgggaaaccttagaactgggcctaaagcaaaataaagtgaattttgtcctaaggcagacagccccagtagagaattactgcctccaaactttcagcctcctggaatagccttggcatgtcaaatttcatttagttcatgatgtaagagacattttattcaaagttagaagaactacttagagcaaaagtaaataaaaactatttgtcatcta

SEQ ID NO: 289719 - DNA, 857 bp, Homo sapiens
gggaaatcttagatggttgtcctgctaccttaactgtgaagaaactggacaagttgtccttgtccccagtgggtgtctcagcacccatggtcaccagcccagtcagggactttgctcttcttacctgccaacggataatgagttaatctcagtggttcccacttgaggaggctccctgccgtggtccttttcctctcttctctagggatttcatgcatcaccctgacagccagtggaagttgcctgatttgaagaggcccagggccgaagatacccagtcatgtgtggaagcagcttcaatgccattttgtgagaggttgagggccccagagggggaagcacaggtgctacctttttacccacacttaagtgacgcaaaatgcccttcaatggcgagaagcagtgtgtgggagaggaccagccaagcgattctgattcttcccggttttccgaaagcatggcttcgctcagtgactatgaatgctccaggcagagctttgcaagtgactcctccagcaaatccagctctcctgcttcaacaagccctccaagggttgtaacatttgatgaagtgatggctacagcaaggaacttatcaaacttgactcttgctcatgagattgctgtaaatgagaactttcaattgaaacaagaggctctcccagaaaagagtttggctggtcgagtgaagcacattgttcaccaggccttctgggacgtcttggattcagaactaaatgctgaccctcctgagtttgaacatgccatcaaactgtttgaagaaatcagagaggcaagttgctttgttgtctgtgtcagttagcgtcttactccaggtgggctgctataacagactg

SEQ ID NO: 289720 - DNA, 1076 bp, Homo sapiens
ccgcgttgggggggacactggggctgggggggtttgttgggctggtgagttttcgaggtgactgtgctgtgctcggtgaggggacgcccagagagccctgacccggggtcactccgtcgccgttctcctcttgtctacgtgctggacccggtgctacctttttacccacacttaagtgacgcaaaatgcccttcaatggcgagaagcagtgtgtgggagaggaccagccaagcgattctgattcttcccggttttccgaaagcatggcttcgctcagtgactatgaatgctccaggcagagctttgcaagtgactcctccagcaaatccagctctcctgcttcaacaagccctccaagggttgtaacatttgatgaagtgatggctacagcaaggaacttatcaaacttgactcttgctcatgagattgctgtaaatgagaactttcaattgaaacaagaggctctcccagaaaagagtttggctggtcgagtgaagcacattgttcaccaggccttctgggacgtcttggattcagaactaaatgctgaccctcctgagtttgaacatgccatcaaactgtttgaagaaatcagagagattcttctctcttttctcactcccggtggcaaccggcttcgcaaccaaatctgtgaagttttggacacagacctcattaggcagcaggctgagcacagtgctgttgacatccaaggcctggccaactatgtcatcagtacgatgggaaagctgtgtgctcccgtgcgagataatgatatcagagagttaaaggctactggcaacatcgtggaggtgctgagacaaatattccatgtcctggacctcatgcaaatggacatggccaattttacaattatgagtctcagaccgcaccttcaacgccagttggtggaatatgagagaaccaagttccaggaaattttggaagaaactccaagaactgtgctaagcactattcgtttcttcattcattcaagatatatttattgagtgcctcctgtgtttcagacactgcttaggtgcagtggatactgcagcgaacagaatggaatacag

SEQ ID NO: 289721 - DNA, 2147 bp, Homo sapiens
gggaaatcttagatggttgtcctgctaccttaactgtgaagaaactggacaagttgtccttgtccccagtgggtgtctcagcacccatggtcaccagcccagtcagggactttgctcttcttacctgccaacggataatgagttaatctcagtggttcccacttgaggaggctccctgccgtggtccttttcctctcttctctagggatttcatgcatcaccctgacagccagtggaagttgcctgatttgaagaggcccagggccgaagatacccagtcatgtgtggaagcagcttcaatgccattttgtgagaggttgagggccccagagggggaagcacaggtgctacctttttacccacacttaagtgacgcaaaatgcccttcaatggcgagaagcagtgtgtgggagaggaccagccaagcgattctgattcttcccggttttccgaaagcatggcttcgctcagtgactatgaatgctccaggcagagctttgcaagtgactcctccagcaaatccagctctcctgcttcaacaagccctccaagggttgtaacatttgatgaagtgatggctacagcaaggaacttatcaaacttgactcttgctcatgagattgctgtaaatgagaactttcaattgaaacaagaggctctcccagaaaagagtttggctggtcgagtgaagcacattgttcaccaggccttctgggacgtcttggattcagaactaaatgctgaccctcctgagtttgaacatgccatcaaactgtttgaagaaatcagagagattcttctctcttttctcactcccggtggcaaccggcttcgcaaccaaatctgtgaagttttggacacagacctcattaggcagcaggctgagcacagtgctgttgacatccaaggcctggccaactatgtcatcagtacgatgggaaagctgtgtgctcccgtgcgagataatgatatcagagagttaaaggctactggcaacatcgtggaggtgctgagacaaatattccatgtcctggacctcatgcaaatggacatggccaattttacaattatgagtctcagaccgcaccttcaacgccagttggtggaatatgagagaaccaagttccaggaaattttggaagaaactccaagaaaagccgaggttgcaggtgcctcatgaggctgaccttgcttttggaaccagagagagcagtcaccgtgccagcctgtgagagtgaagtctctgccgatccctaagagaagagccaacgtttcactctaaacgcatgctccttctgctttaccggtcattctcaagtctgactacaaattagaatcatctggggcgtttaaacacagaggcctgagccctgcctcagacagaataaatcaaagtctccaggagctgtgcccatgaactctttttttcctttttaaagctccccaggtgattctaaagtcagccaggattgagaaccactatgccacactgttgcttttgttcaaggtaactaaatgggctcttaaatgtgtcagctgtaaatgattaaacttgcagtataaatgcttattactgccacattgtaattatattcacgatgatttccactcgcgctctctcagttggatgtcttttaaatgaaagactgcaagtcttttacatctttataaaacagaactagcaaaccaaaaacaacatttgccaactgaggagaaacaagagttgtgaaattctgggggtggtgttgctttagtgtggcaaacagaactactcataaattatccctgctcaagtgctgggtccaagaagaatttcagtctctctctactctgcacctgtgttcaggctgtatttcttggcaattgtcaccttataaattctaccaaatgtataattgtataagaactgtggtataaaaagcaatttgtttctagtgggaaaccttagaactgggcctaaagcaaaataaagtgaattttgtcctaaggcagacagccccagtagagaattactgcctccaaactttcagcctcctggaatagccttggcatgtcaaatttcatttagttcatgatgtaagagacattttattcaaagttagaagaactacttagagcaaaagtaaataaaaactatttgtcatcta

SEQ ID NO: 289722 - DNA, 1482 bp, Homo sapiens
gcaagaggagaggcataaatttaggatctcacccttcattccacagacacacacagcctctctgcccacctctgcttcctctaggaacacaggagttccagatcacatcgagttcaccatgaattcactcagtgaagccaacaccaagttcatgttcgatctgttccaacagttcagaaaatcaaaagagaacaacatcttctattcccctatcagcatcacatcagcattagggatggtcctcttaggagccaaagacaacactgcacaacaaattagcaaggttcttcactttgatcaagtcacagagaacaccacagaaaaagctgcaacatatcatgttgataggtcaggaaatgttcatcaccagtttcaaaagcttctgactgaattcaacaaatccactgatgcatatgagctgaagatcgccaacaagctcttcggagaaaagacgtatcaatttttacaggaatatttagatgccatcaagaaattttaccagaccagtgtggaatctactgattttgcaaatgctccagaagaaagtcgaaagaagattaactcctgggtggaaagtcaaacgaatgaaaaaattaaaaacctatttcctgatgggactattggcaatgatacgacactggttcttgtgaacgcaatctatttcaaagggcagtgggagaataaatttaaaaaagaaaacactaaagaggaaaaattttggccaaacaaggatgtacaggccaaggtcctggaaataccatacaaaggcaaagatctaagcatgattgtgctgctgccaaatgaaatcgatggtctgcagaagcttgaagagaaactcactgctgagaaattgatggaatggacaagtttgcagaatatgagagagacatgtgtcgatttacacttacctcggttcaaaatggaagagagctatgacctcaaggacacgttgagaaccatgggaatggtgaatatcttcaatggggatgcagacctctcaggcatgacctggagccacggtctctcagtatctaaagtcctacacaaggcctttgtggaggtcactgaggagggagtggaagctgcagctgccaccgctgtagtagtagtcgaattatcatctccttcaactaatgaagagttctgttgtaatcaccctttcctattcttcataaggcaaaataagaccaacagcatcctcttctatggcagattctcatccccatagatgcaattagtctgtcactccatttagaaaatgttcacctagaggtgttctggtaaactgattgctggcaacaacagattctcttggctcatatttcttttctatctcatcttgatgatgatagtcatcatcaagaatttaatgattaaaatagcatgcctttctctctttctcttaataagcccacatataaatgtacttttccttccagaaaaatttcccttgaggaaaaatgtccaagataagatgaatca

SEQ ID NO: 289723 - DNA, 1416 bp, Homo sapiens
gcaagaggagaggcataaatttaggatctcacccttcattccacagacacacacagcctctctgcccacctctgcttcctctaggaacacaggagttccagatcacatcgagttcaccatgaattcactcagtgaagccaacaccaagttcatgttcgatctgttccaacagttcagaaaatcaaaagagaacaacatcttctattcccctatcagcatcacatcagcattagggatggtcctcttaggagccaaagacaacactgcacaacaaattagcaaggttcttcactttgatcaagtcacagagaacaccacagaaaaagctgcaacatatcatgaatatttagatgccatcaagaaattttaccagaccagtgtggaatctactgattttgcaaatgctccagaagaaagtcgaaagaagattaactcctgggtggaaagtcaaacgaatgaaaaaattaaaaacctatttcctgatgggactattggcaatgatacgacactggttcttgtgaacgcaatctatttcaaagggcagtgggagaataaatttaaaaaagaaaacactaaagaggaaaaattttggccaaacaagaatacatacaaatctgtacagatgatgaggcaatacaattcctttaattttgccttgctggaggatgtacaggccaaggtcctggaaataccatacaaaggcaaagatctaagcatgattgtgctgctgccaaatgaaatcgatggtctgcagaagcttgaagagaaactcactgctgagaaattgatggaatggacaagtttgcagaatatgagagagacatgtgtcgatttacacttacctcggttcaaaatggaagagagctatgacctcaaggacacgttgagaaccatgggaatggtgaatatcttcaatggggatgcagacctctcaggcatgacctggagccacggtctctcagtatctaaagtcctacacaaggcctttgtggaggtcactgaggagggagtggaagctgcagctgccaccgctgtagtagtagtcgaattatcatctccttcaactaatgaagagttctgttgtaatcaccctttcctattcttcataaggcaaaataagaccaacagcatcctcttctatggcagattctcatccccatagatgcaattagtctgtcactccatttagaaaatgttcacctagaggtgttctggtaaactgattgctggcaacaacagattctcttggctcatatttcttttctatctcatcttgatgatgatagtcatcatcaagaatttaatgattaaaatagcatgcctttctctctttctcttaataagcccacatataaatgtacttttccttccagaaaaatttcccttgaggaaaaatgtccaagataagatgaatca

SEQ ID NO: 289724 - DNA, 432 bp, Homo sapiens
  misc_feature (19)..(19): n is a, c, g, or t
  misc_feature (21)..(23): n is a, c, g, or t
  misc_feature (46)..(46): n is a, c, g, or t
atatttgagtgtttttatntnnnaacgattatattagtgtgatggngtggaaagtaagtggtattagtttgaggaaaaagaatcttcaggcctctgctcttgtgagagtaatttctcttaacaccgacagtgcagcaatacaactaccaccacctttcaattattgagaggcaatcatctaaagcatttggcaagtgatccacttacggagccaagctaagggagctgaagagaagaggccgccgccccaacccagagctgcttgacagggttgtctggggaatacaaccttaccctgtcaaatgcctttcaatgtttttcttctccttccttacccccgtttcatcgtgtacctgcaatgggactctatttctgtaaaagcaagataaaggaacacaaaatgtactctttccctaattggataaagtgaga

SEQ ID NO: 289725 - DNA, 827 bp, Homo sapiens
  misc_feature (121)..(121): n is a, c, g, or t
cgttgggtttctctaacgacagtcttgggaaatgagtcagtagggaggttcgtcctctcccctctctaaagtaagggctgcggagtatccatttctgtggccaccgagccgcatttttttntttttgtatgaataggatttttattaatggtatctggtctgtggctacaatgttatattttgctgtgcttgacagattttttaccattgagatgtttatggaagaaagtttgaatttgctgccaggcatctacctgtgcctttgagtgagcctttggctcacctccatagaatattgcctcacccaaaacagcgtgcacagaagctctagaaggaggaaaataaggtgggtcaatacagtgaccagtttctgggtaacagattatctggggtctttctttcccatgagcttgtagcctttcagaggctatctgagcatagaattcactcttccagctttgatcatccatgccaacaataaacaagaagggcacctgcgccttttccaatggaacaagactttggtgattgtgttcctccagtggattgctccaagtgtccataaaagtgagaaatcctgacttagtgatttttacttttcctagatcatcgacaagtttaggaataatcatatccttgtaatgtagaggagctactgtgttggctacacaggcattgataagtacagtggctgtgatgcccttcaagaaagaagccattgagagacacaggtcacctcctttggaaaatccaagaagcgcaatactaggacgttcacgtcaagggtgttggtgtggggggtcgtctgtaatgcgtgtggaagggtg

SEQ ID NO: 289726 - DNA, 872 bp, Homo sapiens
  misc_feature (121)..(121): n is a, c, g, or t
cgttgggtttctctaacgacagtcttgggaaatgagtcagtagggaggttcgtcctctcccctctctaaagtaagggctgcggagtatccatttctgtggccaccgagccgcatttttttntttttgtatgaataggatttttattaatggtatctggtctgtggctacaatgttatattttgctgtgcttgacagattttttaccattgagatgtttatggaagaaagtttgaatttgctgccaggcatctacctgtgcctttgagtgagcctttggctcacctccatagaatattgcctcacccaaaacagcgtgcacagaagctctagaaggaggaaaataaggtgatcaccagaacgcacctttggatgctgcagcataaagtccacggcttcttcaaagtactccagatgtacatcattcagatcttcggggaggtcttcaaatctgaaataagccagggcaagcacagcaaaaccatgtccggccaggaggctggccctgtattcacaaaggcccctgctgctcccaaacagatcaatgatcccaggaaagggccccctgcctggagaacatcacaaatcacagggagctttagtttctcaaaagacagtaagcaaacaagtttttgaagccaaggagattgggggtagagagattggcagagaaagaacaaaatgtcttattttctcaaacaataatgataatatagagggataaaaaactacatattgggtacaatgtatactactcaggcgacaggtgcactaaaatctcagcgttcatcactgtacagttcatccgtgtaaccccaaaccacctgtacaccaaaaggtattgaaattaaaaaaaaaatttttttttgacagt

SEQ ID NO: 289727 - DNA, 823 bp, Homo sapiens
tgaggaatgcagctgggaggctgccagcaaatgccaaggggcctctgggtcccaggctagcaccccacagcaccccacaggggcaggcaggcctccagaggctctcctggaatccaaaaagccacttcctcgctaagcctccggtttcccgtctgcaaagtggcgatgatcattcctgctgcccttcctgactgagctgtctgaggacccagggttccaggggcaggtctcccaggatgagattttgctttctcttgaaacccatgcgttcctagaatctgttctgtgtttcattgtaggaggctctggccaggcctgggtgtggcaggatagaaatgaaagttgtcctggcaacacacaagatttcatcaacatttccatccccagcagctcctgggccaagcctcatcttgcccagtgtggcctgtcaagatgacggcctggaagagaagccagactgggcagccaggcctctgcccctccccttgcctggtggcacagccagcactggctcactgggaaagctcacaactcctcacagcgatctggtatcttgagcgtcagtttctggccgaaactgggggctcctgactgaactccctcccacctagaaaaccttctgtgcagtctgattgctccaacacccacagagcaggattcaggtatcccggagaccttgggaggtccccatccagaggtctgctgtcctgccaggcttggggcagcagggactgggaccccactcagacctctctggggcaaatgttttggttctcacaacagccctagtgaaatcaatcctagatactcccatttggtccca

SEQ ID NO: 289728 - DNA, 479 bp, Homo sapiens
attgcaggcaggtaacaagaagagagaattcatcctcctgtgagtggtaggcacccaggactgacctgcatgaaactgcaggcctacccaaccctttgtgtctgctgagagaagtctgccatggaccacacaccacctgacgtgaggggcacaggacaccacttctaaagtctcctaaacaaggtccctgaatagcaagccagaccaaggacaagtctagtgtgcccgagtgacacctccaggagtttgaagataaggcacatcactcactgtgacagttgggggatctcatagccagactggatattggagatgccagcagctactgcagcagtgaccatcagcctgggcttgttgatctgcttggcctcctgctcaaaagcttcacgcatttcctacagaataataaggcataataggacatctatgatgctgattttagctccttaaataatactaataaacatatgtctgtataa

SEQ ID NO: 289729 - DNA, 1637 bp, Homo sapiens
aacaacagccctgctctggtccctccaaaagccgacgaatccacacaagactaaagatgaagaagaggacaacaagcccagctctaatcacactccagaagataactagtctacgcacagccaaaacttaaaaactcatcagtctttcccagagacagattgaacttcaaggtaaaagtgaattttcagatgcggacaagctaacttctaaggattatgagtaattcgactcatcttttaaatatccagaaaacctcatttttagtgaaagagtggagataaaagaatattaagagtccagaaactggtgttctggctgtggccctgccttagactgtctcactttgtagtcactttatgcaggaaacgtgcccgggcatcttgaaatggatgagttctcttctggagatatgtctcatgtgtacgcatatctggagatatgcctcttgtgggtgctgctgcagctgctgtgcccatctcatatcaatacccaagcttttctcatgacgaaccagatgactcttggtaaccaggtttgctccccagcttctaatttcaatatgatgagaagttacataacatttactcctttgtaaaggtttctctgtcatcagacaaaactctgaatagaaaccggtgggtaatccagtgtactggtttttcctaatgtatttggtactatagtgtatgaaccgagaataatcgagtcaagtgaaacccccttttccagtcataaaatgtctcattcattatactaaaaggagctgttcttttaaaaaagccttcttatttttctactaaatttttagataagtataacctactatattcctcaaatctaggcttacatttgagaagggtaagctgtgttttttcctccgaagagttgggctgtgatctttacaacgagacgtcgtttttcccagcatatttctgttttctacctaaacattaagatacacatttttctaggcattagaaatagtacaatattgcctgtggtctttccatttgacacctgtggctggaatatatgtgtcgctccagaatttatatgttggaatttaaatgcccctgtgtgatagaattaaaaagtggggactttgggaggaggttaagagtgcaattagagaccttataaaagaactcaatggaagtagctaggctttttagcccttccaccattagaggacactgtatttgtcctctctggagaacacagcaacaaggtgccatcttggaagaagagacccaccttcaccagacattggacctattagtgccttgatcttggacttcccagtgtctaaaactgtaagaaatttatttctttccagtttcataagttacccagtccaaggtactgtgttatagcatcaggaacatactgagatggcatatttattgtggaaattttggtcctcatacttaatgaatgggcttcaagtatttcgttagtttttaaaaacagggctcctcctttacaattgatctcatttttattttttaaaagttagcttttacaacatagaactggaaaaaatctctactcagacctctagagtgtcctagattttgtggcagaatcactatggataatttataggtgcttgtgatctcatctgtgtattatttac

SEQ ID NO: 289730 - DNA, 328 bp, Homo sapiens
tgtctttagcggcaaaggggaactataaagacatatctaaagaaaaatggcttaacataatcgtttatgttaaatgatttagttttcatcagaattcaataaaatttggataaatctgcaccaaatttagttagatcatgaaacgctgagagatcacttcctgttctacctgcttgacttacggaacattttcacagtaactattaataagacacaactaattttctaatacctcactttcaattgagagattacttaaatgctcacttaacccatgggaatctcaatatagatgaaaaaacaagacttgcccaatctagttcagaaa

SEQ ID NO: 289731 - DNA, 1164 bp, Homo sapiens
ctagggggaaggagaagggatcagaagcgggagctgaggggagagagaggccggtcctggtctggccgctgcggctgctagcccgaggtctccaagccgggctgcggctccatcctcggctcctgggcaccgtctgcgaggctccgccgaccagagtgagaaagccgcgggcggcgaccgccgcatcatgtcagccaaggacgagcgggccagggagatcctgaggggcttcaaactaaattggatgaaccttcgggatgctgagacagggaagatactctggcaaggaacagaagacctgtctgtccctggtgtggagcatgaagcccgtgttcccaagaaaatcctcaagtgcaaggcagtgtctcgagaacttaatttttcttcgacagaacaaatggaaaaattccgcctggaacaaaaagtttacttcaaagggcaatgcctagaagaatggttcttcgagtttggctttgtgatccctaactccacaaatacctggcagtccttgatagaggcagcacccgagtcccagatgatgccagcaagcgtcttaactgggaacgttatcatagaaacaaagttttttgacgacgatcttcttgtaagcacatccagagtgagacttttctatgtttgaaagaagaatgtgtgtacatttcaagaatttgggttttttggagggaggaggaaactgtttacttttttcctccacacgtttgatttttgacacatacacccctaattccctcaacagcagaacctacctgcagccaccaggggaccagctctgtgtaggtaaccagatggctctttttcccaagccaccatcttccagctgaccagactaaactcccaaccccagaccagggcaggggacaggtctcaagtccttcccagcatacacacagggaacaaacacataccacaaaccggtaactgtacctgtcaccctccttgtctcctccttgggccctacaggctacacatctacctttggcccctggttttggaaaaattccgtgttcctgacccatgtttagttttttcctaccatttctatttcatacattctcatacatttaacttgtaaaatagactgtgatattattacataatgtaattaaaaatatgaattaaaatattcctacagtctttagcatg

SEQ ID NO: 289732 - DNA, 902 bp, Homo sapiens
ctagggggaaggagaagggatcagaagcgggagctgaggggagagagaggccggtcctggtctggccgctgcggctgctagcccgaggtctccaagccgggctgcggctccatcctcggctcctgggcaccgtctgcgaggctccgccgaccagagtgagaaagccgcgggcggcgaccgccgcatcatgtcagccaaggacgagcgggccagggagatcctgaggggcttcaaactaaattggatgaaccttcgggatgctgagacagggaagatactctggcaaggaacagaagacctgtctgtccctggtgtggagcatgaagcccgtgttcccaagaaaatcctcaagtgcaaggcagtgtctcgagaacttaatttttcttcgacagaacaaatggaaaaattccgcctggaacaaaaagtttacttcaaagggcaatgcctagaagaatggttcttcgagtttggctttgtgatccctaactccacaaatacctggcagtccttgatagaggcagcacccgagtcccagatgatgccagcaagcgtcttaactgggaacgttatcatagaaacaaagttttttgacgacgatcttcttgtaagcacatccagagtgagacttttctatgtttgaaagaagaatgtgtgtacatttcaagaagatcgtcgtctaaaaaacatttgtttctatgataacgttcccagttaagacgcttgctggcatcatctgggactcgggtgctgcctctatcaaggactgccaggtatttgtggagttagggatcacaaagccaaactcgaagaaccattcttctagcattgccctttgaagtaaactttttgttccaggaggaatttttccatttgttctgtcgaagaaaaattaagttctcgag

SEQ ID NO: 289733 - DNA, 748 bp, Homo sapiens
ctagggggaaggagaagggatcagaagcgggagctgaggggagagagaggccggtcctggtctggccgctgcggctgctagcccgaggtctccaagccgggctgcggctccatcctcggctcctgggcaccgtctgcgaggctccgccgaccagagtgagaaagccgcgggcggcgaccgccgcatcatgtcagccaaggacgagcgggccagggagatcctgaggggcttcaaactacagtaaaccggaaactggagaattgagagatttcagaagcaacgttttcatctgattggaaataccgtattgctgaaaagaagaaaggcctttttaatggcttttgaacaaagcagaaaagtttgagcttctcaccttcagtcttagctcttgaacctgttgagaaagaggataagagacaaatacggaaaagagtttcagaaagcagaatctgtgtcagcccactggaaggaaaagcgaatcaaccgattcagtgatgttagtgcatccagaaacaggcttttgggaaaagcttgacctgagctgattaaatcctgaagcacaagggaagcagccacatcaaaaagttagcatgagagcagtggcgtgctcatcctctggtagcctttactgggcatttgtggagtaagagagaaaagaaaagcaggaatgttaagatatgctactaccttcaggaaaaagtaaaattaatgttttagtaagaaactgactattgtccaccttttattg

SEQ ID NO: 289734 - DNA, 1203 bp, Homo sapiens
ctagggggaaggagaagggatcagaagcgggagctgaggggagagagaggccggtcctggtctggccgctgcggctgctagcccgaggtctccaagccgggctgcggctccatcctcggctcctgggcaccgtctgcgaggctccgccgaccagagtgagaaagccgcgggcggcgaccgccgcatcatgtcagccaaggacgagcgggccagggagatcctgaggggcttcaaactaaattggatgaaccttcgggatgctgagacagggaagatactctggcaaggaacagaagacctgtctgtccctggtgtggagcatgaagcccgtgttcccaagaaaatcctcaagtgcaaggcagtgtctcgagaacttaatttttcttcgacagaacaaatggaaaaattccgcctggaacaaaaagtttacttcaaagggcaatgcctagaaggtattctgctgcctacatgcctgaaatcagggcttagggcgaccaggacaaaaggcaacaatacccagtgaactaaagcagtgctttgataacattccttttacaactcagtttgtggtaggattcctacactctgcaagactgtgaatccccagtgaaacaaaccaaaacaaagctagccactacaaggggctttgaggtctctgacactgggagcgtggatggtggtgcctggtttaggcactgacgttgtattgtgatatgatcatggaggaagctgctatgagcagggcctagtacagtgctctacatacagtatcatacagatttgactggcaaggccactctgcattgaattctcaccatgcagtgtaaagggcacataagccccttcaagctaattccaagtgaatttaactatgtatctatatatagttcacatctagcctacctctaagaaaatgctgcttatattgtgtcctgctcgctggtcctagtcctttagacctcaaagcatgagaagcaagcctttggtgtggttcagaggacaacctgagcaggcttccctgtcttttttacgcccctggtccctggttttggaaaaattccgtgttcctgacccatgtttagttttttcctaccatttctatttcatacattctcatacatttaacttgtaaaatagactgtgatattattacataatgtaattaaaaatatgaattaaaatattcctacagtctttagcatg

SEQ ID NO: 289735 - DNA, 1192 bp, Homo sapiens
ctagggggaaggagaagggatcagaagcgggagctgaggggagagagaggccggtcctggtctggccgctgcggctgctagcccgaggtctccaagccgggctgcggctccatcctcggctcctgggcaccgtctgcgaggctccgccgaccagagtgagaaagccgcgggcggcgaccgccgcatcatgtcagccaaggacgagcgggccagggagatcctgaggggcttcaaactaaattggatgaaccttcgggatgctgagacagggaagatactctggcaaggaacagaagacctgtctgtccctggtgtggagcatgaagcccgtgttcccaagaaaatcctcaagtgcaaggcagtgtctcgagaacttaatttttcttcgacagaacaaatggaaaaattccgcctggaacaaaaagtttacttcaaagggcaatgcctagaagaatggttcttcgagtttggctttgtgatccctaactccacaaatacctggcagtccttgatagaggcagcacccgagtcccagatgatgccagcaagcgtcttaactgggaacgttatcatagaaacaaagttttttgacgacgatcttcttgtaagcacatccagagtgagacttttctatgtttgaaagaagaatgtgtgtacatttcaagaatttgggttttttggagggaggaggaaactgtttacttttttcctccacacgtttgatttttgacacatacacccctaattccctcaacagcagaacctacctgcagccaccaggggaccagctctgtgtaggtaaccagatggctctttttcccaagccaccatcttccagctgaccagactaaactcccaaccccagaccagggcaggggacaggtctcaagtccttcccagcatacacacagggaacaaacacataccacaaaccggtaactgtacctgtcaccctccttgtctcctccttgggccctacaggctacacatctacctttggcccctggttttggaaaaattccgtgttcctgacccatgtttagttttttcctaccatttctatttcatacattctcatacatttaacttgtaaaatagactgtgatattattacataatgtaattaaaaatatgaattaaaatattcctacagtctttagcatgaaaaaaaaataaaataaagaaaaataga

SEQ ID NO: 289736 - DNA, 1219 bp, Homo sapiens
ggcggggagggggtggctaggggcccaaggagaggaatgcggcctagacggtactgcagcccaaccgtcgccatcgccatcccgggccccaaatcctccccttaggctgtgctttctctctcaggagctccccatggctactgcgctacccctgggcaccgagatacattaagcctactaactaccacttattgagcgttttaccatgtgccagccttaccatgatttgcagatgtctgagttccatgtaaacagaagttaactctctgcgggctgtcatcttcttttgaggaaattggatgaaccttcgggatgctgagacagggaagatactctggcaaggaacagaagacctgtctgtccctggtgtggagcatgaagcccgtgttcccaagaaaatcctcaagtgcaaggcagtgtctcgagaacttaatttttcttcgacagaacaaatggaaaaattccgcctggaacaaaaagtttacttcaaagggcaatgcctagaagaatggttcttcgagtttggctttgtgatccctaactccacaaatacctggcagtccttgatagaggcagcacccgagtcccagatgatgccagcaagcgtcttaactgggaacgttatcatagaaacaaagttttttgacgacgatcttcttgtaagcacatccagagtgagacttttctatgtttgaaagaagaatgtgtgtacatttcaagaatttgggttttttggagggaggaggaaactgtttacttttttcctccacacgtttgatttttgacacatacacccctaattccctcaacagcagaacctacctgcagccaccaggggaccagctctgtgtaggtaaccagatggctctttttcccaagccaccatcttccagctgaccagactaaactcccaaccccagaccagggcaggggacaggtctcaagtccttcccagcatacacacagggaacaaacacataccacaaaccggtaactgtacctgtcaccctccttgtctcctccttgggccctacaggctacacatctacctttggcccctggttttggaaaaattccgtgttcctgacccatgtttagttttttcctaccatttctatttcatacattctcatacatttaacttgtaaaatagactgtgatattattacataatgtaattaaaaatatgaattaaaatattcctacagtctttagcatg

SEQ ID NO: 289737 - DNA, 1058 bp, Homo sapiens
ctagggggaaggagaagggatcagaagcgggagctgaggggagagagaggccggtcctggtctggccgctgcggctgctagcccgaggtctccaagccgggctgcggctccatcctcggctcctgggcaccgtctgcgaggctccgccgaccagagtgagaaagccgcgggcggcgaccgccgcatcatgtcagccaaggacgagcgggccagggagatcctgaggggcttcaaactaaattggatgaaccttcgggatgctgagacagggaagatactctggcaaggaacagaagacctgtctgtccctggtgtggagcatgaagcccgtgttcccaagaaaatcctcaagtgcaaggcagtgtctcgagaacttaatttttcttcgacagaacaaatggaaaaattccgcctggaacaaaaagtttacttcaaagggcaatgcctagaagtgggaacgttatcatagaaacaaagttttttgacgacgatcttcttgtaagcacatccagagtgagacttttctatgtttgaaagaagaatgtgtgtacatttcaagaatttgggttttttggagggaggaggaaactgtttacttttttcctccacacgtttgatttttgacacatacacccctaattccctcaacagcagaacctacctgcagccaccaggggaccagctctgtgtaggtaaccagatggctctttttcccaagccaccatcttccagctgaccagactaaactcccaaccccagaccagggcaggggacaggtctcaagtccttcccagcatacacacagggaacaaacacataccacaaaccggtaactgtacctgtcaccctccttgtctcctccttgggccctacaggctacacatctacctttggcccctggttttggaaaaattccgtgttcctgacccatgtttagttttttcctaccatttctatttcatacattctcatacatttaacttgtaaaatagactgtgatattattacataatgtaattaaaaatatgaattaaaatattcctacagtctttagcatg

SEQ ID NO: 289738 - DNA, 331 bp, Homo sapiens
aatgcctagaaggtattctgctgcctacatgcctgaaatcagggcttagggcgaccaggacaaaaggcaacaatacccagtgaactaaagcagtgctttgataacattccttttacaactcagtttgtggtaggattcctacactctgcaagactgtgaatccccagtgaaacaaaccaaaacaaagctagccactacaaggggctttgaggtctctgacactgggagcgtggatggtggtgcctggtttaggcactgacgttgtattgtgatatgatcatggaggaagctgctatgagcagggcctagtacagtgctctacatacagtat

SEQ ID NO: 289739 - DNA, 419 bp, Homo sapiens
ggctcactctagagagggagacaaagagcccttaaactttatactggggcacctgctcaccccggcttttccttcttccttcagaatggttcttcgagtttggctttgtgatccctaactccacaaatacctggcagtccttgatagaggcagcacccgagtcccagatgatgccagcaagcgtcttaacgtgagtgagcaggtctcaggaaattatgaagtgtgtctagaaacaggcattccaggcaggtgggactcctggtgccattcagtgggcagagagctcggttgagaaatagagtaaaagagtatccaagggtatctaggtttccaggttcctgacctttttcatatgaaaaagacagtatgatagagtagaaagaataaaaaactaaaaataaaaataaaactttagatta

SEQ ID NO: 289740 - DNA, 4113 bp, Homo sapiens
caaagagcggctcgcgcgctggcctgggctctaaccgaggagagatcccgggagaactccagagctccgggggagcgctcctcggaagaccggggccaacatgcctgtgcgcagggggcatgtggcaccacaaaatacatttctggggaccatcattcggaaatttgaagggcaaaataaaaaatttatcattgcaaatgccagagtgcagaactgtgccatcatttattgcaacgatgggttctgtgagatgactggtttctccaggccagatgtcatgcaaaagccatgcacctgcgactttctccatggacccgagaccaagaggcatgatattgcccaaattgcccaggcattgctggggtcagaagagaggaaagtggaggtcacctactatcacaaaaatgggtccacttttatttgtaacactcacataattccagtgaaaaaccaagagggcgtggctatgatgttcatcattaattttgaatatgtgacggataatgaaaacgctgccaccccagagagggtaaacccaatattaccaatcaaaactgtaaaccggaaattttttgggttcaaattccctggtctgagagttctcacttacagaaagcagtccttaccacaagaagaccccgatgtggtggtcatcgattcatctaaacacagtgatgattcagtagccatgaagcattttaagtctcctacaaaagaaagctgcagcccctctgaagcagatgacacaaaagctttgatacagcccagcaaatgttctcccttggtgaatatatccggacctcttgaccattcctctcccaaaaggcaatgggaccgactctaccctgacatgctgcagtcaagttcccagctgtcccattccagatcaagggaaagcttatgtagtatacggagagcatcttcggtccatgatatagaaggattcggcgtccaccccaagaacatatttagagaccgacatgccagcgaagacaatggtcgcaatgtcaaagggccttttaatcatatcaagtcaagcctcctgggatccacatcagattcaaacctcaacaaatacagcaccattaacaagattccacagctcactctgaatttttcagaggtcaaaactgagaaaaagaattcatcacctccttcttcagataaaaccattattgcacccaaggttaaagatcgaacacacaatgtgactgagaaagtgacccaggttctctctttaggagcagatgtcctacctgaatacaaactgcagacaccacgcatcaacaagtttacgatattgcactacagccctttcaaggcagtctgggactggcttatcctgctgttggtcatatacactgctatatttactccctactctgcagccttcctcctcaatgacagagaagaacagaagagacgagaatgtggctattcttgtagccctttgaatgtggtagacttgattgtggatattatgtttatcatagatattttaataaacttcagaacaacatatgttaatcagaatgaagaagtggtaagtgatcccgccaaaatagcaatacactacttcaaaggctggttcctgattgacatggttgcagcaattccttttgacttgctgatttttggatcaggttctgatgagacaacaacattaattggtcttttgaagactgcccgactcctccgtcttgtgcgcgtggccaggaaactggatcgatattcagaatatggcgctgctgttctaatgctctcaatgtgcatctttgccctgaatgcacactggctggcttgcatttggtatgcgattgggaatgtagaaaggccttacctgactgacaaaatcggatggttggattccttaggacagcaaattgggaaacgttacaatgacagtgactcaagttctggaccatccattaaagacaaatacgtcacagcactttattttaccttcagcagtttaaccagtgtaggattcgggaatgtgtctcctaacacgaattcggagaaaatcttttcaatttgtgtcatgttgattggctcactaatgtatgcaagcatttttgggaatgtatctgcaattatccaaagactatactcgggaactgccaggtaccacatgcagatgctgcgagtaaaagagttcattcgctttcaccaaatccccaaccctctgaggcaacgtcttgaagaatatttccagcacgcatggacttacaccaatggcattgacatgaacatggtcctaaagggtttcccagaatgcttacaagcagacatttgtctacatctcaaccagacattgctgcaaaactgcaaagcctttcggggggcaagtaaaggttgccttagagctttggcaatgaagttcaaaaccacccatgcactccaaggagacaccctcgttcactgtggggatgtcctcactgcactttatttcttatccagaggctccattgaaatctcaaagaatgacatggtggtggctattctgggaaaaaatgatatatttggagaaatggttcatctttatgccaaacctggaaagtctaatgcagatgtaagagccctcacatactgtgacttgcataagattcagcgagaagacttgttagaggttttggatatgtatcctgagttttctgatcactttctaacaaacctagagttgactttcaacctaaggcatgagagcgcaaaggctgatctcctacgatcacaatccatgaatgattcagaaggagacaactgtaaactaagaagaaggaaattgtcatttgaaagtgaaggagagaaagaaaacagtacaaatgatcctgaagactctgcagataccataagacattatcagagttccaagagacactttgaagagaaaaaaagcagatcctcatctttcatctcctccattgatgatgaacaaaagccgctcttctcaggaatagtagactcttctccaggaatagggaaagcatctgggctcgattttgaagaaacagtgcccacctcaggaagaatgcacatagataaaagaagtcactcttgcaaagatatcactgacatgcgaagctgggaacgagaaaatgcacatccccagcctgaagactccagtccatctgcacttcagcgagctgcctggggtatctctgaaaccgaaagcgacctcacctacggggaagtggaacaaagattagatctgctccaggagcaacttaacaggcttgaatcccaaatgaccactgacatccagaccatcttacagttgctgcagaaacaaaccactgtggtccccccagcctacagtatggtaacagcaggatcagaatatcagagacccatcatccagctgatgagaaccagtcaaccggaagcatccatcaaaactgaccgaagtttcagcccttcctcacaatgtcctgaatttctagaccttgaaaaatctaaacttaaatccaaagaatccctttcaagtggggtgcatctgaacacagcttcagaagacaacttgacttcacttttaaaacaagacagtgatctctctttagagcttcacctgcggcaaagaaaaacttacgttcatccaattaggcatccttctttgccagattcatccctaagcactgtaggaatcgtgggtcttcataggcatgtttctgatcctggtcttccagggaaataatcattttgtactatttactccacatacaatgtaagtgcttttaatggctgttttcctttttctatttaaatcctctctacttgactcaggggctcacaaggtaccattatatgcaaaagtactgtatattttcctaaattgaagcttgtaaggtaaaactgagcagttaggatgtaaatatacataagaacttttggttccaaatgttaaaactgccagcatctcacggcaccttattttttatttttattttttaaatcacatgcatgttaggaaactccaatttctcttgcatggagactcctatttactgcttttactaaaccagtacttcgttatgaaaatgccttccacgcaaataagaaaccaagggataaaactgttcatggatgcaactcaaattcagatgatcatcaaggcat

SEQ ID NO: 289741 - DNA, 3872 bp, Homo sapiens
gaatgaagaaggccaggagtaaaaatatagagagaagtgaagactggaaaactggagaacatctttatcttatttgaagtggcccataacccttcagctctacttcatggcagggacattttattttcttccatatagacctaatattttgcaaataattgcctgccaatggttcttcaagtgtgagaccatcagcatcaccttgcaatgtgtttgaagtgcaagttcttgggccctacaccagaacaactgattcggaaacacagaaattcaccaagctgtgttttaacaaacacttcaggtcattctgatgcccaagaagggaaattttttgggttcaaattccctggtctgagagttctcacttacagaaagcagtccttaccacaagaagaccccgatgtggtggtcatcgattcatctaaacacagtgatgattcagtagccatgaagcattttaagtctcctacaaaagaaagctgcagcccctctgaagcagatgacacaaaagctttgatacagcccagcaaatgttctcccttggtgaatatatccggacctcttgaccattcctctcccaaaaggcaatgggaccgactctaccctgacatgctgcagtcaagttcccagctgtcccattccagatcaagggaaagcttatgtagtatacggagagcatcttcggtccatgatatagaaggattcggcgtccaccccaagaacatatttagagaccgacatgccagcgaagacaatggtcgcaatgtcaaagggccttttaatcatatcaagtcaagcctcctgggatccacatcagattcaaacctcaacaaatacagcaccattaacaagattccacagctcactctgaatttttcagaggtcaaaactgagaaaaagaattcatcacctccttcttcagataaaaccattattgcacccaaggttaaagatcgaacacacaatgtgactgagaaagtgacccaggttctctctttaggagcagatgtcctacctgaatacaaactgcagacaccacgcatcaacaagtttacgatattgcactacagccctttcaaggcagtctgggactggcttatcctgctgttggtcatatacactgctatatttactccctactctgcagccttcctcctcaatgacagagaagaacagaagagacgagaatgtggctattcttgtagccctttgaatgtggtagacttgattgtggatattatgtttatcatagatattttaataaacttcagaacaacatatgttaatcagaatgaagaagtggtaagtgatcccgccaaaatagcaatacactacttcaaaggctggttcctgattgacatggttgcagcaattccttttgacttgctgatttttggatcaggttctgatgagacaacaacattaattggtcttttgaagactgcccgactcctccgtcttgtgcgcgtggccaggaaactggatcgatattcagaatatggcgctgctgttctaatgctctcaatgtgcatctttgccctgaatgcacactggctggcttgcatttggtatgcgattgggaatgtagaaaggccttacctgactgacaaaatcggatggttggattccttaggacagcaaattgggaaacgttacaatgacagtgactcaagttctggaccatccattaaagacaaatacgtcacagcactttattttaccttcagcagtttaaccagtgtaggattcgggaatgtgtctcctaacacgaattcggagaaaatcttttcaatttgtgtcatgttgattggctcactaatgtatgcaagcatttttgggaatgtatctgcaattatccaaagactatactcgggaactgccaggtaccacatgcagatgctgcgagtaaaagagttcattcgctttcaccaaatccccaaccctctgaggcaacgtcttgaagaatatttccagcacgcatggacttacaccaatggcattgacatgaacatggtcctaaagggtttcccagaatgcttacaagcagacatttgtctacatctcaaccagacattgctgcaaaactgcaaagcctttcggggggcaagtaaaggttgccttagagctttggcaatgaagttcaaaaccacccatgcactccaaggagacaccctcgttcactgtggggatgtcctcactgcactttatttcttatccagaggctccattgaaatctcaaagaatgacatggtggtggctattctgggaaaaaatgatatatttggagaaatggttcatctttatgccaaacctggaaagtctaatgcagatgtaagagccctcacatactgtgacttgcataagattcagcgagaagacttgttagaggttttggatatgtatcctgagttttctgatcactttctaacaaacctagagttgactttcaacctaaggcatgagagcgcaaaggctgatctcctacgatcacaatccatgaatgattcagaaggagacaactgtaaactaagaagaaggaaattgtcatttgaaagtgaaggagagaaagaaaacagtacaaatgatcctgaagactctgcagataccataagacattatcagagttccaagagacactttgaagagaaaaaaagcagatcctcatctttcatctcctccattgatgatgaacaaaagccgctcttctcaggaatagtagactcttctccaggaatagggaaagcatctgggctcgattttgaagaaacagtgcccacctcaggaagaatgcacatagataaaagaagtcactcttgcaaagatatcactgacatgcgaagctgggaacgagaaaatgcacatccccagcctgaagactccagtccatctgcacttcagcgagctgcctggggtatctctgaaaccgaaagcgacctcacctacggggaagtggaacaaagattagatctgctccaggagcaacttaacaggcttgaatcccaaatgaccactgacatccagaccatcttacagttgctgcagaaacaaaccactgtggtccccccagcctacagtatggtaacagcaggatcagaatatcagagacccatcatccagctgatgagaaccagtcaaccggaagcatccatcaaaactgaccgaagtttcagcccttcctcacaatgtcctgaatttctagaccttgaaaaatctaaacttaaatccaaagaatccctttcaagtggggtgcatctgaacacagcttcagaagacaacttgacttcacttttaaaacaagacagtgatctctctttagagcttcacctgcggcaaagaaaaacttacgttcatccaattaggcatccttctttgccagattcatccctaagcactgtaggaatcgtgggtcttcataggcatgtttctgatcctggtcttccagggaaataatcattttgtactatttactccacatacaatgtaagtgcttttaatggctgttttcctttttctatttaaatcctctctacttgactcaggggctcacaaggtaccattatatgcaaaagtactgtatattttcctaaattgaagcttgtaaggtaaaactgagcagttaggatgtaaatatacataagaacttttggttccaaatgttaaaactgccagcatctcacggcaccttattttttatttttattttttaaatcacatgcatgttaggaaactccaatttctcttgcatggagactcctatttactgcttttactaaaccagtacttcgttatgaaaatgccttccacgcaaataagaaaccaagggataaaactgttcatggatgcaactcaaattcagatgatcatcaaggcat

SEQ ID NO: 289742 - DNA, 1302 bp, Homo sapiens
gaatgaagaaggccaggagtaaaaatatagagagaagtgaagactggaaaactggagaacatctttatcttatttgaagtggcccataacccttcagctctacttcatggcagggacattttattttcttccatatagacctaatattttgcaaataattgcctgccaatggttcttcaagtgtgagaccatcagcatcaccttgcaatgtgtttgaagtgcaagttcttgggccctacaccagaacaactgattcggaaacacagaaattcaccaagctgtgttttaacaaacacttcaggtcattctgatgcccaagaagggaaattttttgggttcaaattccctggtctgagagttctcacttacagaaagcagtccttaccacaagaagaccccgatgtggtggtcatcgattcatctaaacacagtgatgattcagtagccatgaagcattttaagtctcctacaaaagaaagctgcagcccctctgaagcagatgacacaaaagctttgatacagcccagcaaatgttctcccttggtgaatatatccggacctcttgaccattcctctcccaaaaggcaatgggaccgactctaccctgacatgctgcagtcaagttcccagctgtcccattccagatcaagggaaagcttatgtagtatacggagagcatcttcggtccatgatatagaaggattcggcgtccaccccaagaacatatttagagaccgacatgccagcgaagacaatggtcgcaatgtcaaagggccttttaatcatatcaagtcaagcctcctgggatccacatcagattcaaacctcaacaaatacagcaccattaacaagattccacagctcactctgaatttttcagaggtcaaaactgagaaaaagaattcatcacctccttcttcagataaaaccattattgcacccaaggttaaagatcgaacacacaatgtgactgagaaagtgacccaggatctctttatccctacatcacgagggccttagtagaacacctggcagaatggagttcatcaaatgtttgctgaataaatgagtgcataaatggatggaagagttagccaagggaagggataagaattccaggtagaaaaaaacacaagaacaaagttatgaaagcagtaaagtccatatgactttttagaacaagtggttttctgagctggcgagaggctagtctggaaaatttaccttcaaaataacacttttctaccttttcacataagtgccatgggggtttgagtaaaatgcaacagtttccatcaaaag

SEQ ID NO: 289743 - DNA, 229 bp, Homo sapiens
gggaactgccaggtaccacatgcagatgctgcgagtaaaagagttcattcgctttcaccaaatccccaaccctctgaggcaacgtcttgaagaatatttccagcacgcatggacttacaccaatggcattgacatgaacatggtatgtatgtctgttttccaaaatgaaagtgccgcaggcattatagtgatagccaaaatggaataaaagccggaatcaccagctttg

SEQ ID NO: 289744 - DNA, 208 bp, Homo sapiens
acaatggtcgcaatgtcaaaggtaatgtacaaactcaaatttcaccatctgatgttcaacctgcccctttactcggcatgttaacttgcctgctgtatgccctgttcagtgcaacatcttcatgctgcccttagctatttggggtgcctggtggagacatcatggcttgattttgctacagacattgttatttctctgctgtgttacc

SEQ ID NO: 289745 - DNA, 959 bp, Homo sapiens
ctttttttagataagcatacacttcctttatttatttttcttaatttaagtattgtgtggttatggatcgtttacagcagtgtatgaaactttaagatacctagaaaaatgcaagttaaattaagacattataggtatattttaggtttgtgtagcacatagcaaatagtctagatgaacagatgagacacgtaacaacactgaatagttacagctgtgcactattttaaacgaatgaccagacactaaaatttgattattttttccatttgtagttatgcagaagttagggctgaaagacgacgagaacttggcattgaagagtctcttcctgagacagctgctgacaaagtatgtttcttataattaaaaaaaattatttttaatttctccccaataaaagatgaaactcaataattaataggaaaactatttttcaaaaatactttatttcctcacttataacagggatgtgattatactttactacttatttttaatttaatattttagagtctcacctgcctctaaaaagaaaattggatgagagatgtgtctgatctcaaaactaccatttattcccagtgatgtactagtctctggctaggttatttatatgaattatgaaatataatttacacatcagatatttttatcgggtaggtaatatccccactttgaaaatactgaaattggggtttcaagaggggaaaaaaaaatcttccctaaagacactggctgggaaattatagtcagaattggaactctggtttcttttttgttatatcaggtcagaagtatagtatattagttatctatagctgtgtaacaacttactccaaaatttagtgatataaaacaacacacttgttatctcctagtttggtgagtcaagagtccaggcacagtttagctggaccctctacttcagattctttcatgaggctgtaatcaaggtg

SEQ ID NO: 289746 - DNA, 5826 bp, Homo sapiens
ccccccccccggccccctggagcgagaggcgaaggaaatctggccgccgccgccgcgagcgctcccgaatttttacttgttcctgcaaagctgctggagctcagaagctgattctatcacattgtaagatgcctttggataattctacagtcctcttaaatgaatctttagaacttggcaagtctcactagataccttcaatcatcattttgagctcaaagaattctgagacttatggttggtcatatagaagagtaccttgaacctatagtttcctgaagaatcagtttaaaagatccaaggagtacaaaaggagaagtacaaatgtctactacaagacgaaaacgtagtatgttatgttgtttaccgtaagctgtagtaaaatgagctcgattgttgacagagatgacagtagtatttttgatgggttggtggaagaagatgacaaggacaaagcgaaaagagtatctagaaacaaatctgaaaagaaacgtagagatcaatttaatgttctcattaaagaactgggatccatgcttcctggtaatgctagaaagatggacaaatctactgttctgcagaaaagcattgattttttacgaaaacataaagaaatcactgcacagtcagatgctagtgaaattcgacaggactggaaacctacattccttagtaatgaagagtttacacaattaatgttagaggctcttgatggtttttttttagcaatcatgacagatggaagcataatatatgtgtctgagagtgtaacttcattacttgaacatttaccatctgatcttgtggatcaaagtatatttaattttatcccagaaggggaacattcagaggtttataaaatactctctactcatctgctggaaagtgattcattaaccccagaatatttaaaatcaaaaaatcagttagaattctgttgtcacatgctgcgaggaacaatagacccaaaggagccatctacctatgaatatgtaaaatttataggaaatttcaaatctttaaacagtgtatcctcttcagcacacaatggttttgaaggaactatacaacgcacacataggccatcttatgaagatagagtttgttttgtagctactgtcaggttagctacacctcagttcatcaaggaaatgtgcactgttgaagaacccaatgaagagtttacatctagacatagtttagaatggaagtttctgtttctagatcacagggcaccacccataatagggtatttgccatttgaagttctgggaacatcaggctatgattactatcatgtggatgacctagaaaatttggcaaaatgtcatgagcacttaatgcaatatgggaaaggcaaatcatgttattataggttcctgactaaggggcaacagtggatttggcttcagactcattattatatcacttaccatcagtggaattcaaggccagagtttattgtttgtactcacactgtagtaagttatgcagaagttagggctgaaagacgacgagaacttggcattgaagagtctcttcctgagacagctgctgacaaaagccaagattctgggtcagataatcgtataaacacagtcagtctcaaggaagcattggaaaggtttgatcacagcccaaccccttctgcctcttctcggagttcaagaaaatcatctcacacggccgtctcagacccttcctcaacaccaaccaagatcccgacggatacgagcactccacccaggcagcatttaccagctcatgagaagatggtgcaaagaaggtcatcatttagtagtcagtccataaattcccagtctgttggttcatcattaacacagccagtgatgtctcaagctacaaatttaccaattccacaaggcatgtcccagtttcagttttcagctcaattaggagccatgcaacatctgaaagaccaattggaacaacggacacgcatgatagaagcaaatattcatcggcaacaagaagaactaagaaaaattcaagaacaacttcagatggtccatggtcaggggctgcagatgtttttgcaacaatcaaatcctgggttgaattttggttccgttcaactttcttctggaaattcatctaacatccagcaacttgcacctataaatatgcaaggccaagttgttcctactaaccagattcaaagtggaatgaatactggacacattggcacaactcagcacatgatacaacaacagactttacagagtacatcaactcagagtcaacaaaatgtactgagtgggcacagtcagcaaacatctctacccagtcagacacagagcactcttacagccccactgtataacactatggtgatttctcagcctgcagccggaagcatggtccagattccatctagtatgccacaaaacagcacccagagtgctgcagtaactacattcactcaggacaggcagataagattttctcaaggtcaacaacttgtgaccaaattagtgactgctcctgtagcttgtggggcagtcatggtacctagtactatgcttatgggccaggtggtgactgcatatcctacttttgctacacaacagcaacagtcacagacattgtcagtaacgcagcagcagcagcagcagagctcccaggagcagcagctcacttcagttcagcaaccatctcaggctcagctgacccagccaccgcaacaatttttacagacttctaggttgctccatgggaatccctcaactcaactcattctctctgctgcatttcctctacaacagagcaccttccctcagtcacatcaccagcaacatcagtctcagcaacagcagcaactcagccggcacaggactgacagcttgcccgacccttccaaggttcaaccacagtagcacacgtgcttcctctcttgacatcaagggaggaaggggatggcccattaagagttactcagatgacctgaggaaaggagggaaagttccagcagtttcatgagatgcagtattgagtgttctagttcctggaattagttggcagagaaaatgctgcctagtgctacagatgtacattaaataccagccagcaggaggtgatcataggggcacagccagttctgacagtgttttaggtgcctggatattttttgatggaaaaagaatatattgccaaatattaagaagctcagctatgaaatgacctccagggaatcagaaaggcactaatgatgttagtaacttttagtggttctgtgcctcttatcaagtgttacagaggacataccactgccatgtcaggggtttgcttacagtgatgccatgaagacagtccagtagacttggtagcgaccccctcccccaacccctctcccttttcagataatgatggaacagtaattactttcagaatgttgtgtgggttcaaattctctatgtacagatgatgtaaaaatatgtatatgtctagataaaaggagagaaagcaaaacattttgtatgctgcatgaaagcgttatctcttccttacaggtgtgagcacctttcctgaaattctgacaccatgtgcaaactgatccatcctgtttttccttttgtttacaacacagtagtgttctgttcacttttccggggcacaagtttttttgttcatactttggctgtgatgtcacagtttgttcagtgaggtatgatgtgctgctgggaatggatttttttttttcaggttaaattattgatacaacaggattttcaagttattcagaaatatccctcatttcattatttttcaattatgtttgaaaataggatttgcactgctttattttaggtggctgggagttttgattgcatattttgttatagttcatagttggaaatatttgcgtaaatggttttcaacaagcctgaaagtaatttcaagaatgtttcagttatagaggtaaaatttgcacacaaaacatcttaggcactttttaacattctcaatcatgggaattttaacttttgggatttgttgaaatcttttttattatccttcacaatttcaatgcttcttttagtcagaaatgattcagggttatttgaggggaaaaaaccccatagtgccttgattttaattcaggtgataactcaccatcttgaagtcattgtccggtttccgtagcagttttgaaaccttagtacctttttaacagcatgtgggtgtcagtgtcattattagtctcctaataagttcctctgaagactgctatcagtctcttggactggagttacaaataatttagaaataaaagatgataacctaacactatcatagttattaatgtgatcctaaaattgtttcctaaatcagcatttttctttagtcatttaagaatttaccagaaatatttgctcaatatgatcttgatattcctacaaagaaaaaagaaggggtagggatttggctatgccttcactacaacattagaatattgtaactcacatgccttctaaacgtgaactaagatttcctttggcaatatcatattctaaaagtaataaattccaatacaagttacatacatttaaaaaacattttacagattttatggtactaatgaaatttacagtgatagaacaaaagaggattagtagaaaatacattattagaatataaaaaatgttattactgaggaaagggaggagaggacaagtgtaataaatcaaaattgacctcaaaagaaaatgtgtaacagagttgaggttgttaaaacagaaaaggttctgaataatgaagattaacctaatgcagaattgctaggtaaagaggtcaggggaatgctaagccagttcttaagacttctctgtcctctgctttgctgttatccttaaggcatatactttgtctttctgcagaaaattctacctggctacaattactttgaacattaatgttgaaaaagaaaacaaccaaagaaaattggtacttacccttctacaaaagaagtgtgactagatatcaatcagtaattaacatatcaaggagctcttctagctaaatgaccatccagtagagatttcccacattcccatgaatatcaagaatagttgtcagaatatgtatgtacctgagcatatgtacacagacaagggggatgttgtggaatatggcaatagcattgttcttctcccctttcaaattgcctttcttgaccttatgccattccatatatatctgagttgtgcctcatttatttattggcaatacctagtgatacggatttagctaacaaaagatatgaagaactattatattgaggcctgtcctctacataccacacttaaaagatggtgaactgtgagtactacttaggttgacagcaacaaagcataagacaagccccaggtaaacgtctaaactgtttactcacattgtcctactccagccccttcaattatttcccatctccacaaatagtcgggggaaaaaattaaaattttcctttatgattcttactgttcttcgcagctcatcttttcctgcttagaattaaccattgctaatttaaaggagcagctagctgcttttctgtcagtctgaagcgtagtagtggaagaggtagtaagcaccagctgcctctttgctgctttgttttcctcctgattctcttaaatttgggttgcaaagctatcccgccccccaccctgccccatgaaacttgagcattcaaatgaagattcagcagtgtctgttcttcatttctatagccaaagctgttagttaaaatcccaaatctatagcatttaaagataccaaatagaaacaccttccagctttaaaaaa

SEQ ID NO: 289747 - DNA, 6091 bp, Homo sapiens
atttaaggagagctgggaacggatcccttaggttcaggaagcttctgtgcaagctgcgaggaaaaaaacttctgaggtaataaataggattatcccgtatcgaaggcctttttggacaggtggtgtgtggtggccttggtatgtgctttctcgtgttacatcgcgccatcattggtatatggttagtgtgttggttagtaggcctagtatgaggagcgttatggagtggaagtgaaaccacatgcctatcatatagtaaaacccagcccatgacccctaacagggccctctcagccctcctaatgacctccggcgccgccgcaagccacacgaatttttacttgttcctgcaaagctgctggagctcagaagctgattctatcacattgtaagatgcctttggataattctacagtcctcttaaatgaatctttagaacttggcaagtctcactagataccttcaatcatcattttgagctcaaagaattctgagacttatggttggtcatatagaagagtaccttgaacctatagtttcctgaagaatcagtttaaaagatccaaggagtacaaaaggagaagtacaaatgtctactacaagacgaaaacgtagtatgttatgttgtttaccgtaagctgtagtaaaatgagctcgattgttgacagagatgacagtagtatttttgatgggttggtggaagaagatgacaaggacaaagcgaaaagagtatctagaaacaaatctgaaaagaaacgtagagatcaatttaatgttctcattaaagaactgggatccatgcttcctggtaatgctagaaagatggacaaatctactgttctgcagaaaagcattgattttttacgaaaacataaagaaatcactgcacagtcagatgctagtgaaattcgacaggactggaaacctacattccttagtaatgaagagtttacacaattaatgttagaggctcttgatggtttttttttagcaatcatgacagatggaagcataatatatgtgtctgagagtgtaacttcattacttgaacatttaccatctgatcttgtggatcaaagtatatttaattttatcccagaaggggaacattcagaggtttataaaatactctctactcatctgctggaaagtgattcattaaccccagaatatttaaaatcaaaaaatcagttagaattctgttgtcacatgctgcgaggaacaatagacccaaaggagccatctacctatgaatatgtaaaatttataggaaatttcaaatctttaaacagtgtatcctcttcagcacacaatggttttgaaggaactatacaacgcacacataggccatcttatgaagatagagtttgttttgtagctactgtcaggttagctacacctcagttcatcaaggaaatgtgcactgttgaagaacccaatgaagagtttacatctagacatagtttagaatggaagtttctgtttctagatcacagggcaccacccataatagggtatttgccatttgaagttctgggaacatcaggctatgattactatcatgtggatgacctagaaaatttggcaaaatgtcatgagcacttaatgcaatatgggaaaggcaaatcatgttattataggttcctgactaaggggcaacagtggatttggcttcagactcattattatatcacttaccatcagtggaattcaaggccagagtttattgtttgtactcacactgtagtaagttatgcagaagttagggctgaaagacgacgagaacttggcattgaagagtctcttcctgagacagctgctgacaaaagccaagattctgggtcagataatcgtataaacacagtcagtctcaaggaagcattggaaaggtttgatcacagcccaaccccttctgcctcttctcggagttcaagaaaatcatctcacacggccgtctcagacccttcctcaacaccaaccaagatcccgacggatacgagcactccacccaggcagcatttaccagctcatgagaagatggtgcaaagaaggtcatcatttagtagtcagtccataaattcccagtctgttggttcatcattaacacagccagtgatgtctcaagctacaaatttaccaattccacaaggcatgtcccagtttcagttttcagctcaattaggagccatgcaacatctgaaagaccaattggaacaacggacacgcatgatagaagcaaatattcatcggcaacaagaagaactaagaaaaattcaagaacaacttcagatggtccatggtcaggggctgcagatgtttttgcaacaatcaaatcctgggttgaattttggttccgttcaactttcttctggaaattcatctaacatccagcaacttgcacctataaatatgcaaggccaagttgttcctactaaccagattcaaagtggaatgaatactggacacattggcacaactcagcacatgatacaacaacagactttacagagtacatcaactcagagtcaacaaaatgtactgagtgggcacagtcagcaaacatctctacccagtcagacacagagcactcttacagccccactgtataacactatggtgatttctcagcctgcagccggaagcatggtccagattccatctagtatgccacaaaacagcacccagagtgctgcagtaactacattcactcaggacaggcagataagattttctcaaggtcaacaacttgtgaccaaattagtgactgctcctgtagcttgtggggcagtcatggtacctagtactatgcttatgggccaggtggtgactgcatatcctacttttgctacacaacagcaacagtcacagacattgtcagtaacgcagcagcagcagcagcagagctcccaggagcagcagctcacttcagttcagcaaccatctcaggctcagctgacccagccaccgcaacaatttttacagacttctaggttgctccatgggaatccctcaactcaactcattctctctgctgcatttcctctacaacagagcaccttccctcagtcacatcaccagcaacatcagtctcagcaacagcagcaactcagccggcacaggactgacagcttgcccgacccttccaaggttcaaccacagtagcacacgtgcttcctctcttgacatcaagggaggaaggggatggcccattaagagttactcagatgacctgaggaaaggagggaaagttccagcagtttcatgagatgcagtattgagtgttctagttcctggaattagttggcagagaaaatgctgcctagtgctacagatgtacattaaataccagccagcaggaggtgatcataggggcacagccagttctgacagtgttttaggtgcctggatattttttgatggaaaaagaatatattgccaaatattaagaagctcagctatgaaatgacctccagggaatcagaaaggcactaatgatgttagtaacttttagtggttctgtgcctcttatcaagtgttacagaggacataccactgccatgtcaggggtttgcttacagtgatgccatgaagacagtccagtagacttggtagcgaccccctcccccaacccctctcccttttcagataatgatggaacagtaattactttcagaatgttgtgtgggttcaaattctctatgtacagatgatgtaaaaatatgtatatgtctagataaaaggagagaaagcaaaacattttgtatgctgcatgaaagcgttatctcttccttacaggtgtgagcacctttcctgaaattctgacaccatgtgcaaactgatccatcctgtttttccttttgtttacaacacagtagtgttctgttcacttttccggggcacaagtttttttgttcatactttggctgtgatgtcacagtttgttcagtgaggtatgatgtgctgctgggaatggatttttttttttcaggttaaattattgatacaacaggattttcaagttattcagaaatatccctcatttcattatttttcaattatgtttgaaaataggatttgcactgctttattttaggtggctgggagttttgattgcatattttgttatagttcatagttggaaatatttgcgtaaatggttttcaacaagcctgaaagtaatttcaagaatgtttcagttatagaggtaaaatttgcacacaaaacatcttaggcactttttaacattctcaatcatgggaattttaacttttgggatttgttgaaatcttttttattatccttcacaatttcaatgcttcttttagtcagaaatgattcagggttatttgaggggaaaaaaccccatagtgccttgattttaattcaggtgataactcaccatcttgaagtcattgtccggtttccgtagcagttttgaaaccttagtacctttttaacagcatgtgggtgtcagtgtcattattagtctcctaataagttcctctgaagactgctatcagtctcttggactggagttacaaataatttagaaataaaagatgataacctaacactatcatagttattaatgtgatcctaaaattgtttcctaaatcagcatttttctttagtcatttaagaatttaccagaaatatttgctcaatatgatcttgatattcctacaaagaaaaaagaaggggtagggatttggctatgccttcactacaacattagaatattgtaactcacatgccttctaaacgtgaactaagatttcctttggcaatatcatattctaaaagtaataaattccaatacaagttacatacatttaaaaaacattttacagattttatggtactaatgaaatttacagtgatagaacaaaagaggattagtagaaaatacattattagaatataaaaaatgttattactgaggaaagggaggagaggacaagtgtaataaatcaaaattgacctcaaaagaaaatgtgtaacagagttgaggttgttaaaacagaaaaggttctgaataatgaagattaacctaatgcagaattgctaggtaaagaggtcaggggaatgctaagccagttcttaagacttctctgtcctctgctttgctgttatccttaaggcatatactttgtctttctgcagaaaattctacctggctacaattactttgaacattaatgttgaaaaagaaaacaaccaaagaaaattggtacttacccttctacaaaagaagtgtgactagatatcaatcagtaattaacatatcaaggagctcttctagctaaatgaccatccagtagagatttcccacattcccatgaatatcaagaatagttgtcagaatatgtatgtacctgagcatatgtacacagacaagggggatgttgtggaatatggcaatagcattgttcttctcccctttcaaattgcctttcttgaccttatgccattccatatatatctgagttgtgcctcatttatttattggcaatacctagtgatacggatttagctaacaaaagatatgaagaactattatattgaggcctgtcctctacataccacacttaaaagatggtgaactgtgagtactacttaggttgacagcaacaaagcataagacaagccccaggtaaacgtctaaactgtttactcacattgtcctactccagccccttcaattatttcccatctccacaaatagtcgggggaaaaaattaaaattttcctttatgattcttactgttcttcgcagctcatcttttcctgcttagaattaaccattgctaatttaaaggagcagctagctgcttttctgtcagtctgaagcgtagtagtggaagaggtagtaagcaccagctgcctctttgctgctttgttttcctcctgattctcttaaatttgggttgcaaagctatcccgccccccaccctgccccatgaaacttgagcattcaaatgaagattcagcagtgtctgttcttcatttctatagccaaagctgttagttaaaatcccaaatctatagcatttaaagataccaaatagaaacaccttccagctttaaaaaa

SEQ ID NO: 289748 - DNA, 6407 bp, Homo sapiens
cgcccaatgccgcggggcggccagctcctccggggaacccccgccctcccggcgcccggcccgcgtgcgcagtccgcagtccgaacggccgccgttgccggcgcgggctggttccgttagtggtggtggttccggggttccgttcctaggcagcgcgcggctattagcgtctgactccagcgaccgcgcgcgggttcgagggttggcggcgaggcgctcggtttctcttcttccgtccacccgcgcttcccgttccccgtcaccgccgctggcgtttgtagatttctttccgccagtgaagctgggttttctggagttggctctggcgctctggcccctggagtgtaatttcctacacgcagcgccgcagagtttatattctttgaaagtgtttgtagctttgtagaggtcctcttgttgatggtaggtgagcctaattctgcaagataaaagcctagtctctgacctggcagatgaaagatcaaatcagattgtggtttcctgctattagaatgccgtgctattagactttaaggctttttagccttctttaaaaaataaaaaaatttttacagtggaagaaaagcacaagaagtaaacttttacagtcgttgatttgactataacgctgatccccccaaatcaaagaatttttacttgttcctgcaaagctgctggagctcagaagctgattctatcacattgtaagatgcctttggataattctacagtcctcttaaatgaatctttagaacttggcaagtctcactagataccttcaatcatcattttgagctcaaagaattctgagacttatggttggtcatatagaagagtaccttgaacctatagtttcctgaagaatcagtttaaaagatccaaggagtacaaaaggagaagtacaaatgtctactacaagacgaaaacgtagtatgttatgttgtttaccgtaagctgtagtaaaatgagctcgattgttgacagagatgacagtagtatttttgatgggttggtggaagaagatgacaaggacaaagcgaaaagagtatctagaaacaaatctgaaaagaaacgtagagatcaatttaatgttctcattaaagaactgggatccatgcttcctggtaatgctagaaagatggacaaatctactgttctgcagaaaagcattgattttttacgaaaacataaagaaatcactgcacagtcagatgctagtgaaattcgacaggactggaaacctacattccttagtaatgaagagtttacacaattaatgttagaggctcttgatggtttttttttagcaatcatgacagatggaagcataatatatgtgtctgagagtgtaacttcattacttgaacatttaccatctgatcttgtggatcaaagtatatttaattttatcccagaaggggaacattcagaggtttataaaatactctctactcatctgctggaaagtgattcattaaccccagaatatttaaaatcaaaaaatcagttagaattctgttgtcacatgctgcgaggaacaatagacccaaaggagccatctacctatgaatatgtaaaatttataggaaatttcaaatctttaaacagtgtatcctcttcagcacacaatggttttgaaggaactatacaacgcacacataggccatcttatgaagatagagtttgttttgtagctactgtcaggttagctacacctcagttcatcaaggaaatgtgcactgttgaagaacccaatgaagagtttacatctagacatagtttagaatggaagtttctgtttctagatcacagggcaccacccataatagggtatttgccatttgaagttctgggaacatcaggctatgattactatcatgtggatgacctagaaaatttggcaaaatgtcatgagcacttaatgcaatatgggaaaggcaaatcatgttattataggttcctgactaaggggcaacagtggatttggcttcagactcattattatatcacttaccatcagtggaattcaaggccagagtttattgtttgtactcacactgtagtaagttatgcagaagttagggctgaaagacgacgagaacttggcattgaagagtctcttcctgagacagctgctgacaaaagccaagattctgggtcagataatcgtataaacacagtcagtctcaaggaagcattggaaaggtttgatcacagcccaaccccttctgcctcttctcggagttcaagaaaatcatctcacacggccgtctcagacccttcctcaacaccaaccaagatcccgacggatacgagcactccacccaggcagcatttaccagctcatgagaagatggtgcaaagaaggtcatcatttagtagtcagtccataaattcccagtctgttggttcatcattaacacagccagtgatgtctcaagctacaaatttaccaattccacaaggcatgtcccagtttcagttttcagctcaattaggagccatgcaacatctgaaagaccaattggaacaacggacacgcatgatagaagcaaatattcatcggcaacaagaagaactaagaaaaattcaagaacaacttcagatggtccatggtcaggggctgcagatgtttttgcaacaatcaaatcctgggttgaattttggttccgttcaactttcttctggaaattcatctaacatccagcaacttgcacctataaatatgcaaggccaagttgttcctactaaccagattcaaagtggaatgaatactggacacattggcacaactcagcacatgatacaacaacagactttacagagtacatcaactcagagtcaacaaaatgtactgagtgggcacagtcagcaaacatctctacccagtcagacacagagcactcttacagccccactgtataacactatggtgatttctcagcctgcagccggaagcatggtccagattccatctagtatgccacaaaacagcacccagagtgctgcagtaactacattcactcaggacaggcagataagattttctcaaggtcaacaacttgtgaccaaattagtgactgctcctgtagcttgtggggcagtcatggtacctagtactatgcttatgggccaggtggtgactgcatatcctacttttgctacacaacagcaacagtcacagacattgtcagtaacgcagcagcagcagcagcagagctcccaggagcagcagctcacttcagttcagcaaccatctcaggctcagctgacccagccaccgcaacaatttttacagacttctaggttgctccatgggaatccctcaactcaactcattctctctgctgcatttcctctacaacagagcaccttccctcagtcacatcaccagcaacatcagtctcagcaacagcagcaactcagccggcacaggactgacagcttgcccgacccttccaaggttcaaccacagtagcacacgtgcttcctctcttgacatcaagggaggaaggggatggcccattaagagttactcagatgacctgaggaaaggagggaaagttccagcagtttcatgagatgcagtattgagtgttctagttcctggaattagttggcagagaaaatgctgcctagtgctacagatgtacattaaataccagccagcaggaggtgatcataggggcacagccagttctgacagtgttttaggtgcctggatattttttgatggaaaaagaatatattgccaaatattaagaagctcagctatgaaatgacctccagggaatcagaaaggcactaatgatgttagtaacttttagtggttctgtgcctcttatcaagtgttacagaggacataccactgccatgtcaggggtttgcttacagtgatgccatgaagacagtccagtagacttggtagcgaccccctcccccaacccctctcccttttcagataatgatggaacagtaattactttcagaatgttgtgtgggttcaaattctctatgtacagatgatgtaaaaatatgtatatgtctagataaaaggagagaaagcaaaacattttgtatgctgcatgaaagcgttatctcttccttacaggtgtgagcacctttcctgaaattctgacaccatgtgcaaactgatccatcctgtttttccttttgtttacaacacagtagtgttctgttcacttttccggggcacaagtttttttgttcatactttggctgtgatgtcacagtttgttcagtgaggtatgatgtgctgctgggaatggatttttttttttcaggttaaattattgatacaacaggattttcaagttattcagaaatatccctcatttcattatttttcaattatgtttgaaaataggatttgcactgctttattttaggtggctgggagttttgattgcatattttgttatagttcatagttggaaatatttgcgtaaatggttttcaacaagcctgaaagtaatttcaagaatgtttcagttatagaggtaaaatttgcacacaaaacatcttaggcactttttaacattctcaatcatgggaattttaacttttgggatttgttgaaatcttttttattatccttcacaatttcaatgcttcttttagtcagaaatgattcagggttatttgaggggaaaaaaccccatagtgccttgattttaattcaggtgataactcaccatcttgaagtcattgtccggtttccgtagcagttttgaaaccttagtacctttttaacagcatgtgggtgtcagtgtcattattagtctcctaataagttcctctgaagactgctatcagtctcttggactggagttacaaataatttagaaataaaagatgataacctaacactatcatagttattaatgtgatcctaaaattgtttcctaaatcagcatttttctttagtcatttaagaatttaccagaaatatttgctcaatatgatcttgatattcctacaaagaaaaaagaaggggtagggatttggctatgccttcactacaacattagaatattgtaactcacatgccttctaaacgtgaactaagatttcctttggcaatatcatattctaaaagtaataaattccaatacaagttacatacatttaaaaaacattttacagattttatggtactaatgaaatttacagtgatagaacaaaagaggattagtagaaaatacattattagaatataaaaaatgttattactgaggaaagggaggagaggacaagtgtaataaatcaaaattgacctcaaaagaaaatgtgtaacagagttgaggttgttaaaacagaaaaggttctgaataatgaagattaacctaatgcagaattgctaggtaaagaggtcaggggaatgctaagccagttcttaagacttctctgtcctctgctttgctgttatccttaaggcatatactttgtctttctgcagaaaattctacctggctacaattactttgaacattaatgttgaaaaagaaaacaaccaaagaaaattggtacttacccttctacaaaagaagtgtgactagatatcaatcagtaattaacatatcaaggagctcttctagctaaatgaccatccagtagagatttcccacattcccatgaatatcaagaatagttgtcagaatatgtatgtacctgagcatatgtacacagacaagggggatgttgtggaatatggcaatagcattgttcttctcccctttcaaattgcctttcttgaccttatgccattccatatatatctgagttgtgcctcatttatttattggcaatacctagtgatacggatttagctaacaaaagatatgaagaactattatattgaggcctgtcctctacataccacacttaaaagatggtgaactgtgagtactacttaggttgacagcaacaaagcataagacaagccccaggtaaacgtctaaactgtttactcacattgtcctactccagccccttcaattatttcccatctccacaaatagtcgggggaaaaaattaaaattttcctttatgattcttactgttcttcgcagctcatcttttcctgcttagaattaaccattgctaatttaaaggagcagctagctgcttttctgtcagtctgaagcgtagtagtggaagaggtagtaagcaccagctgcctctttgctgctttgttttcctcctgattctcttaaatttgggttgcaaagctatcccgccccccaccctgccccatgaaacttgagcattcaaatgaagattcagcagtgtctgttcttcatttctatagccaaagctgttagttaaaatcccaaatctatagcatttaaagataccaaatagaaacaccttccagctttaaaaaa

SEQ ID NO: 289749 - DNA, 5456 bp, Homo sapiens
tacatgctgtgtcatgtctaaattaacattgtattaaactacttgtgtaattaaatggattgtttaaaaaatgcatatttttcatttcatcagagtatctagaaacaaatctgaaaagaaacgtagagatcaatttaatgttctcattaaagaactgggatccatgcttcctggtaatgctagaaagatggacaaatctactgttctgcagaaaagcattgattttttacgaaaacataaagaaatcactgcacagtcagatgctagtgaaattcgacaggactggaaacctacattccttagtaatgaagagtttacacaattaatgttagaggctcttgatggtttttttttagcaatcatgacagatggaagcataatatatgtgtctgagagtgtaacttcattacttgaacatttaccatctgatcttgtggatcaaagtatatttaattttatcccagaaggggaacattcagaggtttataaaatactctctactcatctgctggaaagtgattcattaaccccagaatatttaaaatcaaaaaatcagttagaattctgttgtcacatgctgcgaggaacaatagacccaaaggagccatctacctatgaatatgtaaaatttataggaaatttcaaatctttaaacagtgtatcctcttcagcacacaatggttttgaaggaactatacaacgcacacataggccatcttatgaagatagagtttgttttgtagctactgtcaggttagctacacctcagttcatcaaggaaatgtgcactgttgaagaacccaatgaagagtttacatctagacatagtttagaatggaagtttctgtttctagatcacagggcaccacccataatagggtatttgccatttgaagttctgggaacatcaggctatgattactatcatgtggatgacctagaaaatttggcaaaatgtcatgagcacttaatgcaatatgggaaaggcaaatcatgttattataggttcctgactaaggggcaacagtggatttggcttcagactcattattatatcacttaccatcagtggaattcaaggccagagtttattgtttgtactcacactgtagtaagttatgcagaagttagggctgaaagacgacgagaacttggcattgaagagtctcttcctgagacagctgctgacaaaagccaagattctgggtcagataatcgtataaacacagtcagtctcaaggaagcattggaaaggtttgatcacagcccaaccccttctgcctcttctcggagttcaagaaaatcatctcacacggccgtctcagacccttcctcaacaccaaccaagatcccgacggatacgagcactccacccaggcagcatttaccagctcatgagaagatggtgcaaagaaggtcatcatttagtagtcagtccataaattcccagtctgttggttcatcattaacacagccagtgatgtctcaagctacaaatttaccaattccacaaggcatgtcccagtttcagttttcagctcaattaggagccatgcaacatctgaaagaccaattggaacaacggacacgcatgatagaagcaaatattcatcggcaacaagaagaactaagaaaaattcaagaacaacttcagatggtccatggtcaggggctgcagatgtttttgcaacaatcaaatcctgggttgaattttggttccgttcaactttcttctggaaattcatctaacatccagcaacttgcacctataaatatgcaaggccaagttgttcctactaaccagattcaaagtggaatgaatactggacacattggcacaactcagcacatgatacaacaacagactttacagagtacatcaactcagagtcaacaaaatgtactgagtgggcacagtcagcaaacatctctacccagtcagacacagagcactcttacagccccactgtataacactatggtgatttctcagcctgcagccggaagcatggtccagattccatctagtatgccacaaaacagcacccagagtgctgcagtaactacattcactcaggacaggcagataagattttctcaaggtcaacaacttgtgaccaaattagtgactgctcctgtagcttgtggggcagtcatggtacctagtactatgcttatgggccaggtggtgactgcatatcctacttttgctacacaacagcaacagtcacagacattgtcagtaacgcagcagcagcagcagcagagctcccaggagcagcagctcacttcagttcagcaaccatctcaggctcagctgacccagccaccgcaacaatttttacagacttctaggttgctccatgggaatccctcaactcaactcattctctctgctgcatttcctctacaacagagcaccttccctcagtcacatcaccagcaacatcagtctcagcaacagcagcaactcagccggcacaggactgacagcttgcccgacccttccaaggttcaaccacagtagcacacgtgcttcctctcttgacatcaagggaggaaggggatggcccattaagagttactcagatgacctgaggaaaggagggaaagttccagcagtttcatgagatgcagtattgagtgttctagttcctggaattagttggcagagaaaatgctgcctagtgctacagatgtacattaaataccagccagcaggaggtgatcataggggcacagccagttctgacagtgttttaggtgcctggatattttttgatggaaaaagaatatattgccaaatattaagaagctcagctatgaaatgacctccagggaatcagaaaggcactaatgatgttagtaacttttagtggttctgtgcctcttatcaagtgttacagaggacataccactgccatgtcaggggtttgcttacagtgatgccatgaagacagtccagtagacttggtagcgaccccctcccccaacccctctcccttttcagataatgatggaacagtaattactttcagaatgttgtgtgggttcaaattctctatgtacagatgatgtaaaaatatgtatatgtctagataaaaggagagaaagcaaaacattttgtatgctgcatgaaagcgttatctcttccttacaggtgtgagcacctttcctgaaattctgacaccatgtgcaaactgatccatcctgtttttccttttgtttacaacacagtagtgttctgttcacttttccggggcacaagtttttttgttcatactttggctgtgatgtcacagtttgttcagtgaggtatgatgtgctgctgggaatggatttttttttttcaggttaaattattgatacaacaggattttcaagttattcagaaatatccctcatttcattatttttcaattatgtttgaaaataggatttgcactgctttattttaggtggctgggagttttgattgcatattttgttatagttcatagttggaaatatttgcgtaaatggttttcaacaagcctgaaagtaatttcaagaatgtttcagttatagaggtaaaatttgcacacaaaacatcttaggcactttttaacattctcaatcatgggaattttaacttttgggatttgttgaaatcttttttattatccttcacaatttcaatgcttcttttagtcagaaatgattcagggttatttgaggggaaaaaaccccatagtgccttgattttaattcaggtgataactcaccatcttgaagtcattgtccggtttccgtagcagttttgaaaccttagtacctttttaacagcatgtgggtgtcagtgtcattattagtctcctaataagttcctctgaagactgctatcagtctcttggactggagttacaaataatttagaaataaaagatgataacctaacactatcatagttattaatgtgatcctaaaattgtttcctaaatcagcatttttctttagtcatttaagaatttaccagaaatatttgctcaatatgatcttgatattcctacaaagaaaaaagaaggggtagggatttggctatgccttcactacaacattagaatattgtaactcacatgccttctaaacgtgaactaagatttcctttggcaatatcatattctaaaagtaataaattccaatacaagttacatacatttaaaaaacattttacagattttatggtactaatgaaatttacagtgatagaacaaaagaggattagtagaaaatacattattagaatataaaaaatgttattactgaggaaagggaggagaggacaagtgtaataaatcaaaattgacctcaaaagaaaatgtgtaacagagttgaggttgttaaaacagaaaaggttctgaataatgaagattaacctaatgcagaattgctaggtaaagaggtcaggggaatgctaagccagttcttaagacttctctgtcctctgctttgctgttatccttaaggcatatactttgtctttctgcagaaaattctacctggctacaattactttgaacattaatgttgaaaaagaaaacaaccaaagaaaattggtacttacccttctacaaaagaagtgtgactagatatcaatcagtaattaacatatcaaggagctcttctagctaaatgaccatccagtagagatttcccacattcccatgaatatcaagaatagttgtcagaatatgtatgtacctgagcatatgtacacagacaagggggatgttgtggaatatggcaatagcattgttcttctcccctttcaaattgcctttcttgaccttatgccattccatatatatctgagttgtgcctcatttatttattggcaatacctagtgatacggatttagctaacaaaagatatgaagaactattatattgaggcctgtcctctacataccacacttaaaagatggtgaactgtgagtactacttaggttgacagcaacaaagcataagacaagccccaggtaaacgtctaaactgtttactcacattgtcctactccagccccttcaattatttcccatctccacaaatagtcgggggaaaaaattaaaattttcctttatgattcttactgttcttcgcagctcatcttttcctgcttagaattaaccattgctaatttaaaggagcagctagctgcttttctgtcagtctgaagcgtagtagtggaagaggtagtaagcaccagctgcctctttgctgctttgttttcctcctgattctcttaaatttgggttgcaaagctatcccgccccccaccctgccccatgaaacttgagcattcaaatgaagattcagcagtgtctgttcttcatttctatagccaaagctgttagttaaaatcccaaatctatagcatttaaagataccaaatagaaacaccttccagctttaaaaaa

SEQ ID NO: 289750 - DNA, 4381 bp, Homo sapiens
tagaggtagagagctggaagcgtaccagctggggtactggtaaagcttgcagggaagctgcccactaggatgtcattgagacttgctggaaagccacctgccggggagctgacaaggctaactgggaagcttcccgttggcaccctgacataagagcaagaaggaaaagcaccagaaccaggagttgagcactttcttggcagtgtccctccagcaccacctactgatgtggataactttgtgcctgctggcaaaggagaaatattttgaaggtccaggtccaatattacaaagcagagcaaagatgggtggattagaaactaagggacataactagtgaagggttatcatccttcactcatgttatactgcttacttttcatgttgtgcaattataaggagtaagtaattctaaaatatattacactttttccgtacatggtacttcagtttcagttttcagctcaattaggagccatgcaacatctgaaagaccaattggaacaacggacacgcatgatagaagcaaatattcatcggcaacaagaagaactaagaaaaattcaagaacaacttcagatggtccatggtcaggggctgcagatgtttttgcaacaatcaaatcctgggttgaattttggttccgttcaactttcttctggaaattcatctaacatccagcaacttgcacctataaatatgcaaggccaagttgttcctactaaccagattcaaagtggaatgaatactggacacattggcacaactcagcacatgatacaacaacagactttacagagtacatcaactcagagtcaacaaaatgtactgagtgggcacagtcagcaaacatctctacccagtcagacacagagcactcttacagccccactgtataacactatggtgatttctcagcctgcagccggaagcatggtccagattccatctagtatgccacaaaacagcacccagagtgctgcagtaactacattcactcaggacaggcagataagattttctcaaggtcaacaacttgtgaccaaattagtgactgctcctgtagcttgtggggcagtcatggtacctagtactatgcttatgggccaggtggtgactgcatatcctacttttgctacacaacagcaacagtcacagacattgtcagtaacgcagcagcagcagcagcagagctcccaggagcagcagctcacttcagttcagcaaccatctcaggctcagctgacccagccaccgcaacaatttttacagacttctaggttgctccatgggaatccctcaactcaactcattctctctgctgcatttcctctacaacagagcaccttccctcagtcacatcaccagcaacatcagtctcagcaacagcagcaactcagccggcacaggactgacagcttgcccgacccttccaaggttcaaccacagtagcacacgtgcttcctctcttgacatcaagggaggaaggggatggcccattaagagttactcagatgacctgaggaaaggagggaaagttccagcagtttcatgagatgcagtattgagtgttctagttcctggaattagttggcagagaaaatgctgcctagtgctacagatgtacattaaataccagccagcaggaggtgatcataggggcacagccagttctgacagtgttttaggtgcctggatattttttgatggaaaaagaatatattgccaaatattaagaagctcagctatgaaatgacctccagggaatcagaaaggcactaatgatgttagtaacttttagtggttctgtgcctcttatcaagtgttacagaggacataccactgccatgtcaggggtttgcttacagtgatgccatgaagacagtccagtagacttggtagcgaccccctcccccaacccctctcccttttcagataatgatggaacagtaattactttcagaatgttgtgtgggttcaaattctctatgtacagatgatgtaaaaatatgtatatgtctagataaaaggagagaaagcaaaacattttgtatgctgcatgaaagcgttatctcttccttacaggtgtgagcacctttcctgaaattctgacaccatgtgcaaactgatccatcctgtttttccttttgtttacaacacagtagtgttctgttcacttttccggggcacaagtttttttgttcatactttggctgtgatgtcacagtttgttcagtgaggtatgatgtgctgctgggaatggatttttttttttcaggttaaattattgatacaacaggattttcaagttattcagaaatatccctcatttcattatttttcaattatgtttgaaaataggatttgcactgctttattttaggtggctgggagttttgattgcatattttgttatagttcatagttggaaatatttgcgtaaatggttttcaacaagcctgaaagtaatttcaagaatgtttcagttatagaggtaaaatttgcacacaaaacatcttaggcactttttaacattctcaatcatgggaattttaacttttgggatttgttgaaatcttttttattatccttcacaatttcaatgcttcttttagtcagaaatgattcagggttatttgaggggaaaaaaccccatagtgccttgattttaattcaggtgataactcaccatcttgaagtcattgtccggtttccgtagcagttttgaaaccttagtacctttttaacagcatgtgggtgtcagtgtcattattagtctcctaataagttcctctgaagactgctatcagtctcttggactggagttacaaataatttagaaataaaagatgataacctaacactatcatagttattaatgtgatcctaaaattgtttcctaaatcagcatttttctttagtcatttaagaatttaccagaaatatttgctcaatatgatcttgatattcctacaaagaaaaaagaaggggtagggatttggctatgccttcactacaacattagaatattgtaactcacatgccttctaaacgtgaactaagatttcctttggcaatatcatattctaaaagtaataaattccaatacaagttacatacatttaaaaaacattttacagattttatggtactaatgaaatttacagtgatagaacaaaagaggattagtagaaaatacattattagaatataaaaaatgttattactgaggaaagggaggagaggacaagtgtaataaatcaaaattgacctcaaaagaaaatgtgtaacagagttgaggttgttaaaacagaaaaggttctgaataatgaagattaacctaatgcagaattgctaggtaaagaggtcaggggaatgctaagccagttcttaagacttctctgtcctctgctttgctgttatccttaaggcatatactttgtctttctgcagaaaattctacctggctacaattactttgaacattaatgttgaaaaagaaaacaaccaaagaaaattggtacttacccttctacaaaagaagtgtgactagatatcaatcagtaattaacatatcaaggagctcttctagctaaatgaccatccagtagagatttcccacattcccatgaatatcaagaatagttgtcagaatatgtatgtacctgagcatatgtacacagacaagggggatgttgtggaatatggcaatagcattgttcttctcccctttcaaattgcctttcttgaccttatgccattccatatatatctgagttgtgcctcatttatttattggcaatacctagtgatacggatttagctaacaaaagatatgaagaactattatattgaggcctgtcctctacataccacacttaaaagatggtgaactgtgagtactacttaggttgacagcaacaaagcataagacaagccccaggtaaacgtctaaactgtttactcacattgtcctactccagccccttcaattatttcccatctccacaaatagtcgggggaaaaaattaaaattttcctttatgattcttactgttcttcgcagctcatcttttcctgcttagaattaaccattgctaatttaaaggagcagctagctgcttttctgtcagtctgaagcgtagtagtggaagaggtagtaagcaccagctgcctctttgctgctttgttttcctcctgattctcttaaatttgggttgcaaagctatcccgccccccaccctgccccatgaaacttgagcattcaaatgaagattcagcagtgtctgttcttcatttctatagccaaagctgttagttaaaatcccaaatctatagcatttaaagataccaaatagaaacaccttccagctttaaaaaa

SEQ ID NO: 289751 - DNA, 4615 bp, Homo sapiens
ctttttttagataagcatacacttcctttatttatttttcttaatttaagtattgtgtggttatggatcgtttacagcagtgtatgaaactttaagatacctagaaaaatgcaagttaaattaagacattataggtatattttaggtttgtgtagcacatagcaaatagtctagatgaacagatgagacacgtaacaacactgaatagttacagctgtgcactattttaaacgaatgaccagacactaaaatttgattattttttccatttgtagttatgcagaagttagggctgaaagacgacgagaacttggcattgaagagtctcttcctgagacagctgctgacaaaagccaagattctgggtcagataatcgtataaacacagtcagtctcaaggaagcattggaaaggtttgatcacagcccaaccccttctgcctcttctcggagttcaagaaaatcatctcacacggccgtctcagacccttcctcaacaccaaccaagatcccgacggatacgagcactccacccaggcagcatttaccagctcatgagaagatggtgcaaagaaggtcatcatttagtagtcagtccataaattcccagtctgttggttcatcattaacacagccagtgatgtctcaagctacaaatttaccaattccacaaggcatgtcccagtttcagttttcagctcaattaggagccatgcaacatctgaaagaccaattggaacaacggacacgcatgatagaagcaaatattcatcggcaacaagaagaactaagaaaaattcaagaacaacttcagatggtccatggtcaggggctgcagatgtttttgcaacaatcaaatcctgggttgaattttggttccgttcaactttcttctggaaattcatctaacatccagcaacttgcacctataaatatgcaaggccaagttgttcctactaaccagattcaaagtggaatgaatactggacacattggcacaactcagcacatgatacaacaacagactttacagagtacatcaactcagagtcaacaaaatgtactgagtgggcacagtcagcaaacatctctacccagtcagacacagagcactcttacagccccactgtataacactatggtgatttctcagcctgcagccggaagcatggtccagattccatctagtatgccacaaaacagcacccagagtgctgcagtaactacattcactcaggacaggcagataagattttctcaaggtcaacaacttgtgaccaaattagtgactgctcctgtagcttgtggggcagtcatggtacctagtactatgcttatgggccaggtggtgactgcatatcctacttttgctacacaacagcaacagtcacagacattgtcagtaacgcagcagcagcagcagcagagctcccaggagcagcagctcacttcagttcagcaaccatctcaggctcagctgacccagccaccgcaacaatttttacagacttctaggttgctccatgggaatccctcaactcaactcattctctctgctgcatttcctctacaacagagcaccttccctcagtcacatcaccagcaacatcagtctcagcaacagcagcaactcagccggcacaggactgacagcttgcccgacccttccaaggttcaaccacagtagcacacgtgcttcctctcttgacatcaagggaggaaggggatggcccattaagagttactcagatgacctgaggaaaggagggaaagttccagcagtttcatgagatgcagtattgagtgttctagttcctggaattagttggcagagaaaatgctgcctagtgctacagatgtacattaaataccagccagcaggaggtgatcataggggcacagccagttctgacagtgttttaggtgcctggatattttttgatggaaaaagaatatattgccaaatattaagaagctcagctatgaaatgacctccagggaatcagaaaggcactaatgatgttagtaacttttagtggttctgtgcctcttatcaagtgttacagaggacataccactgccatgtcaggggtttgcttacagtgatgccatgaagacagtccagtagacttggtagcgaccccctcccccaacccctctcccttttcagataatgatggaacagtaattactttcagaatgttgtgtgggttcaaattctctatgtacagatgatgtaaaaatatgtatatgtctagataaaaggagagaaagcaaaacattttgtatgctgcatgaaagcgttatctcttccttacaggtgtgagcacctttcctgaaattctgacaccatgtgcaaactgatccatcctgtttttccttttgtttacaacacagtagtgttctgttcacttttccggggcacaagtttttttgttcatactttggctgtgatgtcacagtttgttcagtgaggtatgatgtgctgctgggaatggatttttttttttcaggttaaattattgatacaacaggattttcaagttattcagaaatatccctcatttcattatttttcaattatgtttgaaaataggatttgcactgctttattttaggtggctgggagttttgattgcatattttgttatagttcatagttggaaatatttgcgtaaatggttttcaacaagcctgaaagtaatttcaagaatgtttcagttatagaggtaaaatttgcacacaaaacatcttaggcactttttaacattctcaatcatgggaattttaacttttgggatttgttgaaatcttttttattatccttcacaatttcaatgcttcttttagtcagaaatgattcagggttatttgaggggaaaaaaccccatagtgccttgattttaattcaggtgataactcaccatcttgaagtcattgtccggtttccgtagcagttttgaaaccttagtacctttttaacagcatgtgggtgtcagtgtcattattagtctcctaataagttcctctgaagactgctatcagtctcttggactggagttacaaataatttagaaataaaagatgataacctaacactatcatagttattaatgtgatcctaaaattgtttcctaaatcagcatttttctttagtcatttaagaatttaccagaaatatttgctcaatatgatcttgatattcctacaaagaaaaaagaaggggtagggatttggctatgccttcactacaacattagaatattgtaactcacatgccttctaaacgtgaactaagatttcctttggcaatatcatattctaaaagtaataaattccaatacaagttacatacatttaaaaaacattttacagattttatggtactaatgaaatttacagtgatagaacaaaagaggattagtagaaaatacattattagaatataaaaaatgttattactgaggaaagggaggagaggacaagtgtaataaatcaaaattgacctcaaaagaaaatgtgtaacagagttgaggttgttaaaacagaaaaggttctgaataatgaagattaacctaatgcagaattgctaggtaaagaggtcaggggaatgctaagccagttcttaagacttctctgtcctctgctttgctgttatccttaaggcatatactttgtctttctgcagaaaattctacctggctacaattactttgaacattaatgttgaaaaagaaaacaaccaaagaaaattggtacttacccttctacaaaagaagtgtgactagatatcaatcagtaattaacatatcaaggagctcttctagctaaatgaccatccagtagagatttcccacattcccatgaatatcaagaatagttgtcagaatatgtatgtacctgagcatatgtacacagacaagggggatgttgtggaatatggcaatagcattgttcttctcccctttcaaattgcctttcttgaccttatgccattccatatatatctgagttgtgcctcatttatttattggcaatacctagtgatacggatttagctaacaaaagatatgaagaactattatattgaggcctgtcctctacataccacacttaaaagatggtgaactgtgagtactacttaggttgacagcaacaaagcataagacaagccccaggtaaacgtctaaactgtttactcacattgtcctactccagccccttcaattatttcccatctccacaaatagtcgggggaaaaaattaaaattttcctttatgattcttactgttcttcgcagctcatcttttcctgcttagaattaaccattgctaatttaaaggagcagctagctgcttttctgtcagtctgaagcgtagtagtggaagaggtagtaagcaccagctgcctctttgctgctttgttttcctcctgattctcttaaatttgggttgcaaagctatcccgccccccaccctgccccatgaaacttgagcattcaaatgaagattcagcagtgtctgttcttcatttctatagccaaagctgttagttaaaatcccaaatctatagcatttaaagataccaaatagaaacaccttccagctttaaaaaa

SEQ ID NO: 289752 - DNA, 2435 bp, Homo sapiens
atttaaggagagctgggaacggatcccttaggttcaggaagcttctgtgcaagctgcgaggaaaaaaacttctgaggtaataaataggattatcccgtatcgaaggcctttttggacaggtggtgtgtggtggccttggtatgtgctttctcgtgttacatcgcgccatcattggtatatggttagtgtgttggttagtaggcctagtatgaggagcgttatggagtggaagtgaaaccacatgcctatcatatagtaaaacccagcccatgacccctaacagggccctctcagccctcctaatgacctccggcgccgccgcaagccacacgaatttttacttgttcctgcaaagctgctggagctcagaagctgattctatcacattgtaagatgcctttggataattctacagtcctcttaaatgaatctttagaacttggcaagtctcactagataccttcaatcatcattttgagctcaaagaattctgagacttatggttggtcatatagaagagtaccttgaacctatagtttcctgaagaatcagtttaaaagatccaaggagtacaaaaggagaagtacaaatgtctactacaagacgaaaacgtagtatgttatgttgtttaccgtaagctgtagtaaaatgagctcgattgttgacagagatgacagtagtatttttgatgggttggtggaagaagatgacaaggacaaagcgaaaagagtatctagaaacaaatctgaaaagaaacgtagagatcaatttaatgttctcattaaagaactgggatccatgcttcctggtaatgctagaaagatggacaaatctactgttctgcagaaaagcattgattttttacgaaaacataaagaaatcactgcacagtcagatgctagtgaaattcgacaggactggaaacctacattccttagtaatgaagagtttacacaattaatgttagaggctcttgatggtttttttttagcaatcatgacagatggaagcataatatatgtgtctgagagtgtaacttcattacttgaacatttaccatctgatcttgtggatcaaagtatatttaattttatcccagaaggggaacattcagaggtttataaaatactctctactcatctgctggaaagtgattcattaaccccagaatatttaaaatcaaaaaatcagttagaattctgttgtcacatgctgcgaggaacaatagacccaaaggagccatctacctatgaatatgtaaaatttataggaaatttcaaatctttaaacagtgtatcctcttcagcacacaatggttttgaaggaactatacaacgcacacataggccatcttatgaagatagagtttgttttgtagctactgtcaggttagctacacctcagttcatcaaggaaatgtgcactgttgaagaacccaatgaagagtttacatctagacatagtttagaatggaagtttctgtttctagatcacagggcaccacccataatagggtatttgccatttgaagttctgggaacatcaggctatgattactatcatgtggatgacctagaaaatttggcaaaatgtcatgagcacttaatgcaatatgggaaaggcaaatcatgttattataggttcctgactaaggggcaacagtggatttggcttcagactcattattatatcacttaccatcagtggaattcaaggccagagtttattgtttgtactcacactgtagtaagttatgcagaagttagggctgaaagacgacgagaacttggcattgaagagtctcttcctgagacagctgctgacaaagtatgtttcttataattaaaaaaaattatttttaatttctccccaataaaagatgaaactcaataattaataggaaaactatttttcaaaaatactttatttcctcacttataacagggatgtgattatactttactacttatttttaatttaatattttagagtctcacctgcctctaaaaagaaaattggatgagagatgtgtctgatctcaaaactaccatttattcccagtgatgtactagtctctggctaggttatttatatgaattatgaaatataatttacacatcagatatttttatcgggtaggtaatatccccactttgaaaatactgaaattggggtttcaagaggggaaaaaaaaatcttccctaaagacactggctgggaaattatagtcagaattggaactctggtttcttttttgttatatcaggtcagaagtatagtatattagttatctatagctgtgtaacaacttactccaaaatttagtgatataaaacaacacacttgttatctcctagtttggtgagtcaagagtccaggcacagtttagctggaccctctacttcagattctttcatgaggctgtaatcaaggtg

SEQ ID NO: 289753 - DNA, 2381 bp, Homo sapiens
atttaaggagagctgggaacggatcccttaggttcaggaagcttctgtgcaagctgcgaggaaaaaaacttctgaggtaataaataggattatcccgtatcgaaggcctttttggacaggtggtgtgtggtggccttggtatgtgctttctcgtgttacatcgcgccatcattggtatatggttagtgtgttggttagtaggcctagtatgaggagcgttatggagtggaagtgaaaccacatgcctatcatatagtaaaacccagcccatgacccctaacagggccctctcagccctcctaatgacctccggcgccgccgcaagccacacgaatttttacttgttcctgcaaagctgctggagctcagaagctgattctatcacattgtaagatgcctttggataattctacagtcctcttaaatgaatctttagaacttggcaagtctcactagataccttcaatcatcattttgagctcaaagaattctgagacttatggttggtcatatagaagagtaccttgaacctatagtttcctgaagaatcagtttaaaagatccaaggagtacaaaaggagaagtacaaatgtctactacaagacgaaaacgtagtatgttatgttgtttaccgtaagctgtagtaaaatgagctcgattgttgacagagatgacagtagtatttttgatgggttggtggaagaagatgacaaggacaaagcgaaaagagtatctagaaacaaatctgaaaagaaacgtagagatcaatttaatgttctcattaaagaactgggatccatgcttcctggtaatgctagaaagatggacaaatctactgttctgcagaaaagcattgattttttacgaaaacataaagaaatcactgcacagtcagatgctagtgaaattcgacaggactggaaacctacattccttagtaatgaagagtttacacaattaatgttagaggctcttgatggtttttttttagcaatcatgacagatggaagcataatatatgtgtctgagagtgtaacttcattacttgaacatttaccatctgatcttgtggatcaaagtatatttaattttatcccagaaggggaacattcagaggtttataaaatactctctactcatctgctggaaagtgattcattaaccccagaatatttaaaatcaaaaaatcagttagaattctgttgtcacatgctgcgaggaacaatagacccaaaggagccatctacctatgaatatgtaaaatttataggaaatttcaaatctttaaacagtgtatcctcttcagcacacaatggttttgaaggaactatacaacgcacacataggccatcttatgaagatagagtttgttttgtagctactgtcaggttagctacacctcagttcatcaaggaaatgtgcactgttgaagaacccaatgaagagtttacatctagacatagtttagaatggaagtttctgtttctagatcacagggcaccacccataatagggtatttgccatttgaagttctgggaacatcaggctatgattactatcatgtggatgacctagaaaatttggcaaaatgtcatgagcacttaatgcaatatgggaaaggcaaatcatgttattataggttcctgactaaggggcaacagtggatttggcttcagactcattattatatcacttaccatcagtggaattcaaggccagagtttattgtttgtactcacactgtagtaagttatgcagaagttagggctgaaagacgacgagaacttggcattgaagagtctcttcctgagacagctgctgacaaaagccaagattctgggtcagataatcgtataaacacagtcagtctcaaggaagcattggaaaggtttgatcacagcccaaccccttctgcctcttctcggagttcaagaaaatcatctcacacggccgtctcagacccttcctcaacaccaaccaagatcccgacggatacgagcactccacccaggcagcatttaccagctcatgagaagatggtgcaaagaaggtcatcatttagtagtcagtccataaattcccagtctgttggttcatcattaacacagccagtgatgtctcaagctacaaatttaccaattccacaaggcatgtcccaggcattgcagatgccgacagtacaaatatatgaactaaaaaaccattacatctagagggaatgacagatgcctacaataccatgctatattgcctgtgctgaaagtatgtaagttgatatgtaagcagattgtgtgaatccttaatgcaacctgaggaagtgaaggaaaactttctaggagaattgtttcttggcctaagtccagaaggaggcctgaatgtg

SEQ ID NO: 289754 - DNA, 1030 bp, Homo sapiens
cctggctacaattttctgcagaaagacaaagtatatgccttaaggataacagcaaagcagaggacagagaagtcttaaggcatatactttgtctttctgcagaaaattctacctggctacaattactttgaacattaatgttgaaaaagaaaacaaccaaagaaaattggtacttacccttctacaaaagaagtgtgactagatatcaatcagtaattaacatatcaaggagctcttctagctaaatgaccatccagtagagatttcccacattcccatgaatatcaagaatagttgtcagaatatgtatgtacctgagcatatgtacacagacaagggggatgttgtggaatatggcaatagcattgttcttctcccctttcaaattgcctttcttgaccttatgccattccatatatatctgagttgtgcctcatttatttattggcaatacctagtgatacggatttagctaacaaaagatatgaagaactattatattgaggcctgtcctctacataccacacttaaaagatggtgaactgtgagtactacttaggttgacagcaacaaagcataagacaagccccaggtaaacgtctaaactgtttactcacattgtcctactccagccccttcaattatttcccatctccacaaatagtcgggggaaaaaattaaaattttcctttatgattcttactgttcttcgcagctcatcttttcctgcttagaattaaccattgctaatttaaaggagcagctagctgcttttctgtcagtctgaagcgtagtagtggaagaggtagtaagcaccagctgcctctttgctgctttgttttcctcctgattctcttaaatttgggttgcaaagctatcccgccccccaccctgccccatgaaacttgagcattcaaatgaagattcagcagtgtctgttcttcatttctatagccaaagctgttagttaaaatcccaaatctatagcatttaaagataccaaatagaaacaccttccagctttaaaaaa

SEQ ID NO: 289755 - DNA, 661 bp, Homo sapiens
tagaggtagagagctggaagcgtaccagctggggtactggtaaagcttgcagggaagctgcccactaggatgtcattgagacttgctggaaagccacctgccggggagctgacaaggctaactgggaagcttcccgttggcaccctgacataagagcaagaaggaaaagcaccagaaccaggagttgagcactttcttggcagtgtccctccagcaccacctactgatgtggataactttgtgcctgctggcaaaggagaaatattttgaaggtccaggtccaatattacaaagcagagcaaagatgggtggattagaaactaagggacataactagtgaagggttatcatccttcactcatgttatactgcttacttttcatgttgtgcaattataaggagtaagtaattctaaaatatattacactttttccgtacatggtacttcagtttcagttttcagctcaattaggagccatgcaacatctgaaagaccaattggaacaacggacacgcatgatagaagcaaatattcatcggcaacaagaagaactaagaaaaattcaagaacaacttcagatggtccatggtcaggggctgcagatgtttttgcaacaatcaaatcctggtcgacgcggccgcgaatttagtagtagtaggc

SEQ ID NO: 289756 - DNA, 325 bp, Homo sapiens
aaagctttttaactctatcttcaatagtttgtatttgggatactaaattacatttcagggcacacaactttgatttcagaaattaacaataaccagaccatatcatatgttaaacgtggttgagaaaatattaaaagcttcccgttggcaccctgacataagagcaagaaggaaaagcaccagaaccaggagttgagcactttcttggcagtgtccctccagcaccacctactgatgtggataactttgtgcctgctggcaaaggagaaatattttgaaggtccaggtccaatattacaaagcagagcaaagatgggtggattag

SEQ ID NO: 289757 - DNA, 357 bp, Homo sapiens
ggcataactgagttgatttacatgtcactttagtattgctgttgcttagtgagtctgctcttactttctctatccgctttcttttagagatgacagtagtatttttgatgggttggtggaagaagatgacaaggacaaagcgaaaaggtagtttgattagagatataaaatagtaaatgaatgaataatagataaatataatggtaaataaatagtgaataaatgatttccaaaagctatgtgctttaggagtttagatatattagcaaggtggaagaacttagaatattggtatgtagtttataaattaaatatcttctgaccttttggaaaagtattatgctttgcttaaacaga

SEQ ID NO: 289758 - DNA, 2047 bp, Homo sapiens
agcctggtgttgaattggccgaggcgcggccccgcccccgccggttcgcgtctctctgctgcggcgcggggaccgctgtgctctcgacccctcctcctgtagagagtggtgctgccctctcgggatgtacctgcaggtggagacccgcaccagctcccgcctccatctgaagagggctccaggcatccggtcctggtccctgctggttggaatcttgtcgattggcctggctgctgcctactacagcggagatagcctgggctggaagctcttctacgtcacaggctgcctgtttgtggctgtgcagaacttggaggactgggaggaagccatcttcgacaagagcacagggaaggttgttttgaagacgttcagcctctacaagaagctgctgactcttttcagagctggccacgaccaggtggtggtcctgctccatgatgtccgtgatgtgagcgtggaggaggagaaggtccggtacttcgggaaaggctacatggtggtgctccggcttgcgacgggcttctcccaccccctcacgcagagtgcagtcatgggccaccgcagtgatgtggaagccatcgccaagctcatcaccagcttcctggagctgcactgccttgagagccccacagagctgtctcagagcagcgacagtgaggccggtgaccctgcaagccagagctgacagccccactgtgcctgagcccgtgcaccgcccacaggacccatggcacattcccggtgtgcctgagcccgtgcaccgcccacaggacccgtggcacattcccggtgtgcctgagcccgtgcaccgcccacaggacccgtggcacattcccggtgtgcctgagcccgtgcaccgcccacaggaccgtggacattcccggtgtgcctgagcccgtgcaccgcccacaggacccgtggccttggcttcagttggtgcctccagccgagttggcctattgcctgctcatgctgctgcttgcacactgcatgaaacagcaggccagaccaggacatccagactttctccatcgtgaggcctgggcctgcctttctgcagccggaggtctcgccagccctggactcctgctttgggccacagcaagacctcgggcgagtggagaggcggggccaggccgggcccttgtgggtgctgatgctgcatgttgtccccgacacagcgtcctctccctggtggacatccccagcggtcaggtgcttccccaagggcagtgaggggtgaacatccagggcctacctggctgtgcacgctgcagccacactgtggaagctgcccctccccgaggacccgcctcccttgctgatgccaggatctcggcgcatagaccactctgccccagcggtcgtcacagaaaggtctctctgttcctcacactcagcttcagcataagctgtgaggccagaaaaaaggtcagctcttctagtatcgtgcagtgcttaaaaaccgggagctccagccgggcgcagtggttcatgccagtaatcccagcactttcggaggccgaggtgggaggattgcttgaggccaggagttcaagaccagcctgggcaacacagcaagatcctgtctttgtaaaaaaactaaccaaacaggaaaaactgggagattttctgcagaaattgagttccagcctctctcgaacctgggaagacctggcaggagggggctgggctctcggctacagacttctccccaccccgtaggagctgaacgccaaccatcctgacccgccagtgctcttggtctcctgagtgtacccaggtcctcccaggtgcggtgtgcaccgagcgcgcctggcctgatgccctggcctgtgagctggggactcctgggccctgtgagcccctaggcggcaggcccaggaatggctgggtaggacagggaacacctttgccccacgtctggctgtgacctcggtgaaagccgacaggagagagatgggaccctcctcctcagtagtggctgccagtccctcgttgcaggacagggtcatcataaccataaataacccttcacgtgtca

SEQ ID NO: 289759 - DNA, 2057 bp, Homo sapiens
gtcggctcggctccgctccaatcccggaagtgcgcgcggccccgcccccgccggttcgcgtctctctgctgcggcgcggggaccgctgtgctctcgacccctcctcctgtagagagtggtgctgccctctcgggatgtacctgcaggtggagacccgcaccagctcccgcctccatctgaagagggctccaggcatccggtcctggtccctgctggttggaatcttgtcgattggcctggctgctgcctactacagcggagatagcctgggctggaagctcttctacgtcacaggctgcctgtttgtggctgtgcagaacttggaggactgggaggaagccatcttcgacaagagcacagggaaggttgttttgaagacgttcagcctctacaagaagctgctgactcttttcagagctggccacgaccaggtggtggtcctgctccatgatgtccgtgatgtgagcgtggaggaggagaaggtccggtacttcgggaaaggctacatggtggtgctccggcttgcgacgggcttctcccaccccctcacgcagagtgcagtcatgggccaccgcagtgatgtggaagccatcgccaagctcatcaccagcttcctggagctgcactgccttgagagccccacagagctgtctcagagcagcgacagtgaggccggtgaccctgcaagccagagctgacagccccactgtgcctgagcccgtgcaccgcccacaggacccatggcacattcccggtgtgcctgagcccgtgcaccgcccacaggacccgtggcacattcccggtgtgcctgagcccgtgcaccgcccacaggacccgtggcacattcccggtgtgcctgagcccgtgcaccgcccacaggaccgtggacattcccggtgtgcctgagcccgtgcaccgcccacaggacccgtggccttggcttcagttggtgcctccagccgagttggcctattgcctgctcatgctgctgcttgcacactgcatgaaacagcaggccagaccaggacatccagactttctccatcgtgaggcctgggcctgcctttctgcagccggaggtctcgccagccctggactcctgctttgggccacagcaagacctcgggcgagtggagaggcggggccaggccgggcccttgtgggtgctgatgctgcatgttgtccccgacacagcgtcctctccctggtggacatccccagcggtcaggtgcttccccaagggcagtgaggggtgaacatccagggcctacctggctgtgcacgctgcagccacactgtggaagctgcccctccccgaggacccgcctcccttgctgatgccaggatctcggcgcatagaccactctgccccagcggtcgtcacagaaaggtctctctgttcctcacactcagcttcagcataagctgtgaggccagaaaaaaggtcagctcttctagtatcgtgcagtgcttaaaaaccgggagctccagccgggcgcagtggttcatgccagtaatcccagcactttcggaggccgaggtgggaggattgcttgaggccaggagttcaagaccagcctgggcaacacagcaagatcctgtctttgtaaaaaaactaaccaaacaggaaaaactgggagattttctgcagaaattgagttccagcctctctcgaacctgggaagacctggcaggagggggctgggctctcggctacagacttctccccaccccgtaggagctgaacgccaaccatcctgacccgccagtgctcttggtctcctgagtgtacccaggtcctcccaggtgcggtgtgcaccgagcgcgcctggcctgatgccctggcctgtgagctggggactcctgggccctgtgagcccctaggcggcaggcccaggaatggctgggtaggacagggaacacctttgccccacgtctggctgtgacctcggtgaaagccgacaggagagagatgggaccctcctcctcagtagtggctgccagtccctcgttgcaggacagggtcatcataaccataaataacccttcacgtgtca

SEQ ID NO: 289760 - DNA, 2045 bp, Homo sapiens
tccttgtggtcagcccccgcgatttatggctatcagtcgcacgggcctctgctctgctgcggcgcggggaccgctgtgctctcgacccctcctcctgtagagagtggtgctgccctctcgggatgtacctgcaggtggagacccgcaccagctcccgcctccatctgaagagggctccaggcatccggtcctggtccctgctggttggaatcttgtcgattggcctggctgctgcctactacagcggagatagcctgggctggaagctcttctacgtcacaggctgcctgtttgtggctgtgcagaacttggaggactgggaggaagccatcttcgacaagagcacagggaaggttgttttgaagacgttcagcctctacaagaagctgctgactcttttcagagctggccacgaccaggtggtggtcctgctccatgatgtccgtgatgtgagcgtggaggaggagaaggtccggtacttcgggaaaggctacatggtggtgctccggcttgcgacgggcttctcccaccccctcacgcagagtgcagtcatgggccaccgcagtgatgtggaagccatcgccaagctcatcaccagcttcctggagctgcactgccttgagagccccacagagctgtctcagagcagcgacagtgaggccggtgaccctgcaagccagagctgacagccccactgtgcctgagcccgtgcaccgcccacaggacccatggcacattcccggtgtgcctgagcccgtgcaccgcccacaggacccgtggcacattcccggtgtgcctgagcccgtgcaccgcccacaggacccgtggcacattcccggtgtgcctgagcccgtgcaccgcccacaggaccgtggacattcccggtgtgcctgagcccgtgcaccgcccacaggacccgtggccttggcttcagttggtgcctccagccgagttggcctattgcctgctcatgctgctgcttgcacactgcatgaaacagcaggccagaccaggacatccagactttctccatcgtgaggcctgggcctgcctttctgcagccggaggtctcgccagccctggactcctgctttgggccacagcaagacctcgggcgagtggagaggcggggccaggccgggcccttgtgggtgctgatgctgcatgttgtccccgacacagcgtcctctccctggtggacatccccagcggtcaggtgcttccccaagggcagtgaggggtgaacatccagggcctacctggctgtgcacgctgcagccacactgtggaagctgcccctccccgaggacccgcctcccttgctgatgccaggatctcggcgcatagaccactctgccccagcggtcgtcacagaaaggtctctctgttcctcacactcagcttcagcataagctgtgaggccagaaaaaaggtcagctcttctagtatcgtgcagtgcttaaaaaccgggagctccagccgggcgcagtggttcatgccagtaatcccagcactttcggaggccgaggtgggaggattgcttgaggccaggagttcaagaccagcctgggcaacacagcaagatcctgtctttgtaaaaaaactaaccaaacaggaaaaactgggagattttctgcagaaattgagttccagcctctctcgaacctgggaagacctggcaggagggggctgggctctcggctacagacttctccccaccccgtaggagctgaacgccaaccatcctgacccgccagtgctcttggtctcctgagtgtacccaggtcctcccaggtgcggtgtgcaccgagcgcgcctggcctgatgccctggcctgtgagctggggactcctgggccctgtgagcccctaggcggcaggcccaggaatggctgggtaggacagggaacacctttgccccacgtctggctgtgacctcggtgaaagccgacaggagagagatgggaccctcctcctcagtagtggctgccagtccctcgttgcaggacagggtcatcataaccataaataacccttcacgtgtca

SEQ ID NO: 289761 - DNA, 2059 bp, Homo sapiens
gtcggctcggctccgctccaatcccggaagtgcgcgcggccccgcccccgccggttcgcgtctctctgctgcggcgcggggaccgctgtgctctcgacccctcctcctgtagagagtggtgctgccctctcgggatgtacctgcaggtggagacccgcaccagctcccgcctccatctgaagagggctccaggcatccggtcctggtccctgctggttggaatcttgtcgattggcctggctgctgcctactacagcggagatagcctgggctggaagctcttctacgtcacaggctgcctgtttgtggctgtgcagaacttggaggactgggaggaagccatcttcgacaagagcacagggaaggttgttttgaagacgttcagcctctacaagaagctgctgactcttttcagagctggccacgaccaggtggtggtcctgctccatgatgtccgtgatgtgagcgtggaggaggagaaggtccggtacttcgggaaaggctacatggtggtgctccggcttgcgacgggcttctcccaccccctcacgcagagtgcagtcatgggccaccgcagtgatgtggaagccatcgccaagctcatcaccagcttcctggagctgcactgccttgagagccccacagagctgtctcagagcagcgacagtgaggccggtgaccctgcaagccagagctgacagccccactgtgcctgagcccgtgcaccgcccacaggacccatggcacattcccggtgtgcctgagcccgtgcaccgcccacaggacccgtggcacattcccggtgtgcctgagcccgtgcaccgcccacaggacccgtggcacattcccggtgtgcctgagcccgtgcaccgcccacaggacccgtggcacattcccggtgtgcctgagcccgtgcaccgcccacaggacccgtggccttggcttcagttggtgcctccagccgagttggcctattgcctgctcatgctgctgcttgcacactgcatgaaacagcaggccagaccaggacatccagactttctccatcgtgaggcctgggcctgcctttctgcagccggaggtctcgccagccctggactcctgctttgggccacagcaagacctcgggcgagtggagaggcggggccaggccgggcccttgtgggtgctgatgctgcatgttgtccccgacacagcgtcctctccctggtggacatccccagcggtcaggtgcttccccaagggcagtgaggggtgaacatccagggcctacctggctgtgcacgctgcagccacactgtggaagctgcccctccccgaggacccgcctcccttgctgatgccaggatctcggcgcatagaccactctgccccagcggtcgtcacagaaaggtctctctgttcctcacactcagcttcagcataagctgtgaggccagaaaaaaggtcagctcttctagtatcgtgcagtgcttaaaaaccgggagctccagccgggcgcagtggttcatgccagtaatcccagcactttcggaggccgaggtgggaggattgcttgaggccaggagttcaagaccagcctgggcaacacagcaagatcctgtctttgtaaaaaaactaaccaaacaggaaaaactgggagattttctgcagaaattgagttccagcctctctcgaacctgggaagacctggcaggagggggctgggctctcggctacagacttctccccaccccgtaggagctgaacgccaaccatcctgacccgccagtgctcttggtctcctgagtgtacccaggtcctcccaggtgcggtgtgcaccgagcgcgcctggcctgatgccctggcctgtgagctggggactcctgggccctgtgagcccctaggcggcaggcccaggaatggctgggtaggacagggaacacctttgccccacgtctggctgtgacctcggtgaaagccgacaggagagagatgggaccctcctcctcagtagtggctgccagtccctcgttgcaggacagggtcatcataaccataaataacccttcacgtgtca

SEQ ID NO: 289762 - DNA, 2009 bp, Homo sapiens
tgcaggctgtacgcgccggaattatgggatgaccgctgtgctctcgacccctcctcctgtagagagtggtgctgccctctcgggatgtacctgcaggtggagacccgcaccagctcccgcctccatctgaagagggctccaggcatccggtcctggtccctgctggttggaatcttgtcgattggcctggctgctgcctactacagcggagatagcctgggctggaagctcttctacgtcacaggctgcctgtttgtggctgtgcagaacttggaggactgggaggaagccatcttcgacaagagcacagggaaggttgttttgaagacgttcagcctctacaagaagctgctgactcttttcagagctggccacgaccaggtggtggtcctgctccatgatgtccgtgatgtgagcgtggaggaggagaaggtccggtacttcgggaaaggctacatggtggtgctccggcttgcgacgggcttctcccaccccctcacgcagagtgcagtcatgggccaccgcagtgatgtggaagccatcgccaagctcatcaccagcttcctggagctgcactgccttgagagccccacagagctgtctcagagcagcgacagtgaggccggtgaccctgcaagccagagctgacagccccactgtgcctgagcccgtgcaccgcccacaggacccatggcacattcccggtgtgcctgagcccgtgcaccgcccacaggacccgtggcacattcccggtgtgcctgagcccgtgcaccgcccacaggacccgtggcacattcccggtgtgcctgagcccgtgcaccgcccacaggacccgtggcacattcccggtgtgcctgagcccgtgcaccgcccacaggacccgtggccttggcttcagttggtgcctccagccgagttggcctattgcctgctcatgctgctgcttgcacactgcatgaaacagcaggccagaccaggacatccagactttctccatcgtgaggcctgggcctgcctttctgcagccggaggtctcgccagccctggactcctgctttgggccacagcaagacctcgggcgagtggagaggcggggccaggccgggcccttgtgggtgctgatgctgcatgttgtccccgacacagcgtcctctccctggtggacatccccagcggtcaggtgcttccccaagggcagtgaggggtgaacatccagggcctacctggctgtgcacgctgcagccacactgtggaagctgcccctccccgaggacccgcctcccttgctgatgccaggatctcggcgcatagaccactctgccccagcggtcgtcacagaaaggtctctctgttcctcacactcagcttcagcataagctgtgaggccagaaaaaaggtcagctcttctagtatcgtgcagtgcttaaaaaccgggagctccagccgggcgcagtggttcatgccagtaatcccagcactttcggaggccgaggtgggaggattgcttgaggccaggagttcaagaccagcctgggcaacacagcaagatcctgtctttgtaaaaaaactaaccaaacaggaaaaactgggagattttctgcagaaattgagttccagcctctctcgaacctgggaagacctggcaggagggggctgggctctcggctacagacttctccccaccccgtaggagctgaacgccaaccatcctgacccgccagtgctcttggtctcctgagtgtacccaggtcctcccaggtgcggtgtgcaccgagcgcgcctggcctgatgccctggcctgtgagctggggactcctgggccctgtgagcccctaggcggcaggcccaggaatggctgggtaggacagggaacacctttgccccacgtctggctgtgacctcggtgaaagccgacaggagagagatgggaccctcctcctcagtagtggctgccagtccctcgttgcaggacagggtcatcataaccataaataacccttcacgtgtca

SEQ ID NO: 289763 - DNA, 2266 bp, Homo sapiens
agcctggtgttgaattggccgaggcgcggccccgcccccgccggttcgcgtctctctgctgcggcgcggggaccgctgtgctctcggtaggcggctgggctgggtgggctccgcacttccttcccgctccgtgccgcgcgtcccggcacccttaggcccactccgggaggggtctgcgtcctgggcccgcctgccggctgttccgtgtcccgccgtgcccgtcgcgggcggcctcgcgcctgttccgctgcaggttggccccggcggcgggagcgcccccgatccggacaaagaaacgagcggacccctcctcctgtagagagtggtgctgccctctcgggatgtacctgcaggtggagacccgcaccagctcccgcctccatctgaagagggctccaggcatccggtcctggtccctgctggttggaatcttgtcgattggcctggctgctgcctactacagcggagatagcctgggctggaagctcttctacgtcacaggctgcctgtttgtggctgtgcagaacttggaggactgggaggaagccatcttcgacaagagcacagggaaggttgttttgaagacgttcagcctctacaagaagctgctgactcttttcagagctggccacgaccaggtggtggtcctgctccatgatgtccgtgatgtgagcgtggaggaggagaaggtccggtacttcgggaaaggctacatggtggtgctccggcttgcgacgggcttctcccaccccctcacgcagagtgcagtcatgggccaccgcagtgatgtggaagccatcgccaagctcatcaccagcttcctggagctgcactgccttgagagccccacagagctgtctcagagcagcgacagtgaggccggtgaccctgcaagccagagctgacagccccactgtgcctgagcccgtgcaccgcccacaggacccatggcacattcccggtgtgcctgagcccgtgcaccgcccacaggacccgtggcacattcccggtgtgcctgagcccgtgcaccgcccacaggacccgtggcacattcccggtgtgcctgagcccgtgcaccgcccacaggacccgtggcacattcccggtgtgcctgagcccgtgcaccgcccacaggacccgtggccttggcttcagttggtgcctccagccgagttggcctattgcctgctcatgctgctgcttgcacactgcatgaaacagcaggccagaccaggacatccagactttctccatcgtgaggcctgggcctgcctttctgcagccggaggtctcgccagccctggactcctgctttgggccacagcaagacctcgggcgagtggagaggcggggccaggccgggcccttgtgggtgctgatgctgcatgttgtccccgacacagcgtcctctccctggtggacatccccagcggtcaggtgcttccccaagggcagtgaggggtgaacatccagggcctacctggctgtgcacgctgcagccacactgtggaagctgcccctccccgaggacccgcctcccttgctgatgccaggatctcggcgcatagaccactctgccccagcggtcgtcacagaaaggtctctctgttcctcacactcagcttcagcataagctgtgaggccagaaaaaaggtcagctcttctagtatcgtgcagtgcttaaaaaccgggagctccagccgggcgcagtggttcatgccagtaatcccagcactttcggaggccgaggtgggaggattgcttgaggccaggagttcaagaccagcctgggcaacacagcaagatcctgtctttgtaaaaaaactaaccaaacaggaaaaactgggagattttctgcagaaattgagttccagcctctctcgaacctgggaagacctggcaggagggggctgggctctcggctacagacttctccccaccccgtaggagctgaacgccaaccatcctgacccgccagtgctcttggtctcctgagtgtacccaggtcctcccaggtgcggtgtgcaccgagcgcgcctggcctgatgccctggcctgtgagctggggactcctgggccctgtgagcccctaggcggcaggcccaggaatggctgggtaggacagggaacacctttgccccacgtctggctgtgacctcggtgaaagccgacaggagagagatgggaccctcctcctcagtagtggctgccagtccctcgttgcaggacagggtcatcataaccataaataacccttcacgtgtca

SEQ ID NO: 289764 - DNA, 2011 bp, Homo sapiens
gtcggctcggctccgctccaatcccggaagtgcgcgcggccccgcccccgccggttcgcgtctctctgctgcggcgcggggaccgctgtgctctcgacccctcctcctgtagagagtggtgctgccctctcgggatgtacctgcaggtggagacccgcaccagctcccgcctccatctgaagagggctccaggcatccggtcctggtccctgctggttggaatcttgtcgattggcctggctgctgcctactacagcggagatagcctgggctggaagctcttctacgtcacaggctgcctgtttgtggctgtgcagaacttggaggactgggaggaagccatcttcgacaagagcacagggaaggttgttttgaagacgttcagcctctacaagaagctgctgactcttttcagagctggccacgaccaggtggtggtcctgctccatgatgtccgtgatgtgagcgtggaggaggagaaggtccggtacttcgggaaaggctacatggtggtgctccggcttgcgacgggcttctcccaccccctcacgcagagtgcagtcatgggccaccgcagtgatgtggaagccatcgccaagctcatcaccagcttcctggagctgcactgccttgagagccccacagagctgtctcagagcagcgacagtgaggccggtgaccctgcaagccagagctgacagccccactgtgcctgagcccgtgcaccgcccacaggacccatggcacattcccggtgtgcctgagcccgtgcaccgcccacaggacccgtggcacattcccggtgtgcctgagcccgtgcaccgcccacaggacccgtggcacattcccggtgtgcctgagcccgtgcaccgcccacaggacccgtggccttggcttcagttggtgcctccagccgagttggcctattgcctgctcatgctgctgcttgcacactgcatgaaacagcaggccagaccaggacatccagactttctccatcgtgaggcctgggcctgcctttctgcagccggaggtctcgccagccctggactcctgctttgggccacagcaagacctcgggcgagtggagaggcggggccaggccgggcccttgtgggtgctgatgctgcatgttgtccccgacacagcgtcctctccctggtggacatccccagcggtcaggtgcttccccaagggcagtgaggggtgaacatccagggcctacctggctgtgcacgctgcagccacactgtggaagctgcccctccccgaggacccgcctcccttgctgatgccaggatctcggcgcatagaccactctgccccagcggtcgtcacagaaaggtctctctgttcctcacactcagcttcagcataagctgtgaggccagaaaaaaggtcagctcttctagtatcgtgcagtgcttaaaaaccgggagctccagccgggcgcagtggttcatgccagtaatcccagcactttcggaggccgaggtgggaggattgcttgaggccaggagttcaagaccagcctgggcaacacagcaagatcctgtctttgtaaaaaaactaaccaaacaggaaaaactgggagattttctgcagaaattgagttccagcctctctcgaacctgggaagacctggcaggagggggctgggctctcggctacagacttctccccaccccgtaggagctgaacgccaaccatcctgacccgccagtgctcttggtctcctgagtgtacccaggtcctcccaggtgcggtgtgcaccgagcgcgcctggcctgatgccctggcctgtgagctggggactcctgggccctgtgagcccctaggcggcaggcccaggaatggctgggtaggacagggaacacctttgccccacgtctggctgtgacctcggtgaaagccgacaggagagagatgggaccctcctcctcagtagtggctgccagtccctcgttgcaggacagggtcatcataaccataaataacccttcacgtgtca

SEQ ID NO: 289765 - DNA, 2010 bp, Homo sapiens
agcctggtgttgaattggccgaggcgcggccccgcccccgccggttcgcgtctctctgctgcggcgcggggaccgctgtgctctcgacccctcctcctgtagagagtggtgctgccctctcgggatgtacctgcaggtggagacccgcaccagctcccgcctccatctgaagagggctccaggcatccggtcctggtccctgctggttggagatagcctgggctggaagctcttctacgtcacaggctgcctgtttgtggctgtgcagaacttggaggactgggaggaagccatcttcgacaagagcacagggaaggttgttttgaagacgttcagcctctacaagaagctgctgactcttttcagagctggccacgaccaggtggtggtcctgctccatgatgtccgtgatgtgagcgtggaggaggagaaggtccggtacttcgggaaaggctacatggtggtgctccggcttgcgacgggcttctcccaccccctcacgcagagtgcagtcatgggccaccgcagtgatgtggaagccatcgccaagctcatcaccagcttcctggagctgcactgccttgagagccccacagagctgtctcagagcagcgacagtgaggccggtgaccctgcaagccagagctgacagccccactgtgcctgagcccgtgcaccgcccacaggacccatggcacattcccggtgtgcctgagcccgtgcaccgcccacaggacccgtggcacattcccggtgtgcctgagcccgtgcaccgcccacaggacccgtggcacattcccggtgtgcctgagcccgtgcaccgcccacaggacccgtggcacattcccggtgtgcctgagcccgtgcaccgcccacaggacccgtggccttggcttcagttggtgcctccagccgagttggcctattgcctgctcatgctgctgcttgcacactgcatgaaacagcaggccagaccaggacatccagactttctccatcgtgaggcctgggcctgcctttctgcagccggaggtctcgccagccctggactcctgctttgggccacagcaagacctcgggcgagtggagaggcggggccaggccgggcccttgtgggtgctgatgctgcatgttgtccccgacacagcgtcctctccctggtggacatccccagcggtcaggtgcttccccaagggcagtgaggggtgaacatccagggcctacctggctgtgcacgctgcagccacactgtggaagctgcccctccccgaggacccgcctcccttgctgatgccaggatctcggcgcatagaccactctgccccagcggtcgtcacagaaaggtctctctgttcctcacactcagcttcagcataagctgtgaggccagaaaaaaggtcagctcttctagtatcgtgcagtgcttaaaaaccgggagctccagccgggcgcagtggttcatgccagtaatcccagcactttcggaggccgaggtgggaggattgcttgaggccaggagttcaagaccagcctgggcaacacagcaagatcctgtctttgtaaaaaaactaaccaaacaggaaaaactgggagattttctgcagaaattgagttccagcctctctcgaacctgggaagacctggcaggagggggctgggctctcggctacagacttctccccaccccgtaggagctgaacgccaaccatcctgacccgccagtgctcttggtctcctgagtgtacccaggtcctcccaggtgcggtgtgcaccgagcgcgcctggcctgatgccctggcctgtgagctggggactcctgggccctgtgagcccctaggcggcaggcccaggaatggctgggtaggacagggaacacctttgccccacgtctggctgtgacctcggtgaaagccgacaggagagagatgggaccctcctcctcagtagtggctgccagtccctcgttgcaggacagggtcatcataaccataaataacccttcacgtgtca

SEQ ID NO: 289766 - DNA, 3244 bp, Homo sapiens
agcctggtgttgaattggccgaggcgcggccccgcccccgccggttcgcgtctctctgctgcggcgcggggaccgctgtgctctcggtaggcggctgggctgggtgggctccgcacttccttcccgctccgtgccgcgcgtcccggcacccttaggcccactccgggaggggtctgcgtcctgggcccgcctgccggctgttccgtgtcccgccgtgcccgtcgcgggcggcctcgcgcctgttccgctgcaggttggccccggcggcgggagcgcccccgatccggacaaagaaacgagcgctcggtgcgactagcggcgcgggcgctttgccagcgcgcgtgtgcttgtgtccgcgagtgtgcgtgtgtgtgtgcatttggatgtggaatgccgggtgtttcgggagcaatgaggcaactgaggcccgggagggagcccagtcatataccagcatctaggattggtttgtgtgatttgaacccactattttttatttttttgagacacggtctcactctgtcacccaggctggagtccagtggcacgatttctgctcactgcagcctccacctcccggcctcaggtgatcctcccagctcagcctcctgaataactaggaccacaggcgtacaccaccacaccgggctgttttatgtattttctgtggagacggggtttcgccacgttgccctggctggtcttgaactccgtgactcaaacaatccgcacgcctcgtcctcccaaagtgctgagattacaggcctgagccaccgcgcccagcctgaaccccctacttaatgtcagaaatttgatttgacttcacagggaaagccctgagaaactaccagaacggggtccctggggccagtgttgggagcgtacggtgatagtggcagggctgctgcgccggtgcggaactcccgtgtggaagattagcccctttggtgactcgtcggttctggccgctttgggaccctctactgtgcagtctgaactttcagcaggtggaggagggcagagagagagctgagatcgttggtccatgccagtgcgagagccagtacggccggaagccatgatgggactttcagttcctttcttggtggaggccagcacaggggagagggggtgcccacagatgctagaagcttaaaggctgctgggggctagcggcctcaggacataaggtttccagacaggacggggcaggtggtgatgcagctgtagctcgtgagtctgagcgggaaacagcccccgcgcagtcggtgtcgctgtgaacggaaaagggccttccttacacactcggaaacggggtctctgggggatccagtgacgtgcccaaccacagagaccagacccctcctcctgtagagagtggtgctgccctctcgggatgtacctgcaggtggagacccgcaccagctcccgcctccatctgaagagggctccaggcatccggtcctggtccctgctggttggaatcttgtcgattggcctggctgctgcctactacagcggaagccatcttcgacaagagcacagggaaggttgttttgaagacgttcagcctctacaagaagctgctgactcttttcagagctggccacgaccaggtggtggtcctgctccatgatgtccgtgatgtgagcgtggaggaggagaaggtccggtacttcgggaaaggctacatggtggtgctccggcttgcgacgggcttctcccaccccctcacgcagagtgcagtcatgggccaccgcagtgatgtggaagccatcgccaagctcatcaccagcttcctggagctgcactgccttgagagccccacagagctgtctcagagcagcgacagtgaggccggtgaccctgcaagccagagctgacagccccactgtgcctgagcccgtgcaccgcccacaggacccatggcacattcccggtgtgcctgagcccgtgcaccgcccacaggacccgtggcacattcccggtgtgcctgagcccgtgcaccgcccacaggacccgtggcacattcccggtgtgcctgagcccgtgcaccgcccacaggacccgtggcacattcccggtgtgcctgagcccgtgcaccgcccacaggacccgtggccttggcttcagttggtgcctccagccgagttggcctattgcctgctcatgctgctgcttgcacactgcatgaaacagcaggccagaccaggacatccagactttctccatcgtgaggcctgggcctgcctttctgcagccggaggtctcgccagccctggactcctgctttgggccacagcaagacctcgggcgagtggagaggcggggccaggccgggcccttgtgggtgctgatgctgcatgttgtccccgacacagcgtcctctccctggtggacatccccagcggtcaggtgcttccccaagggcagtgaggggtgaacatccagggcctacctggctgtgcacgctgcagccacactgtggaagctgcccctccccgaggacccgcctcccttgctgatgccaggatctcggcgcatagaccactctgccccagcggtcgtcacagaaaggtctctctgttcctcacactcagcttcagcataagctgtgaggccagaaaaaaggtcagctcttctagtatcgtgcagtgcttaaaaaccgggagctccagccgggcgcagtggttcatgccagtaatcccagcactttcggaggccgaggtgggaggattgcttgaggccaggagttcaagaccagcctgggcaacacagcaagatcctgtctttgtaaaaaaactaaccaaacaggaaaaactgggagattttctgcagaaattgagttccagcctctctcgaacctgggaagacctggcaggagggggctgggctctcggctacagacttctccccaccccgtaggagctgaacgccaaccatcctgacccgccagtgctcttggtctcctgagtgtacccaggtcctcccaggtgcggtgtgcaccgagcgcgcctggcctgatgccctggcctgtgagctggggactcctgggccctgtgagcccctaggcggcaggcccaggaatggctgggtaggacagggaacacctttgccccacgtctggctgtgacctcggtgaaagccgacaggagagagatgggaccctcctcctcagtagtggctgccagtccctcgttgcaggacagggtcatcataaccataaataacccttcacgtgtca

SEQ ID NO: 289767 - DNA, 3199 bp, Homo sapiens
agcctggtgttgaattggccgaggcgcggccccgcccccgccggttcgcgtctctctgctgcggcgcggggaccgctgtgctctcggtaggcggctgggctgggtgggctccgcacttccttcccgctccgtgccgcgcgtcccggcacccttaggcccactccgggaggggtctgcgtcctgggcccgcctgccggctgttccgtgtcccgccgtgcccgtcgcgggcggcctcgcgcctgttccgctgcaggttggccccggcggcgggagcgcccccgatccggacaaagaaacgagcgctcggtgcgactagcggcgcgggcgctttgccagcgcgcgtgtgcttgtgtccgcgagtgtgcgtgtgtgtgtgcatttggatgtggaatgccgggtgtttcgggagcaatgaggcaactgaggcccgggagggagcccagtcatataccagcatctaggattggtttgtgtgatttgaacccactattttttatttttttgagacacggtctcactctgtcacccaggctggagtccagtggcacgatttctgctcactgcagcctccacctcccggcctcaggtgatcctcccagctcagcctcctgaataactaggaccacaggcgtacaccaccacaccgggctgttttatgtattttctgtggagacggggtttcgccacgttgccctggctggtcttgaactccgtgactcaaacaatccgcacgcctcgtcctcccaaagtgctgagattacaggcctgagccaccgcgcccagcctgaaccccctacttaatgtcagaaatttgatttgacttcacagggaaagccctgagaaactaccagaacggggtccctggggccagtgttgggagcgtacggtgatagtggcagggctgctgcgccggtgcggaactcccgtgtggaagattagcccctttggtgactcgtcggttctggccgctttgggaccctctactgtgcagtctgaactttcagcaggtggaggagggcagagagagagctgagatcgttggtccatgccagtgcgagagccagtacggccggaagccatgatgggactttcagttcctttcttggtggaggccagcacaggggagagggggtgcccacagatgctagaagcttaaaggctgctgggggctagcggcctcaggacataaggtttccagacaggacggggcaggtggtgatgcagctgtagctcgtgagtctgagcgggaaacagcccccgcgcagtcggtgtcgctgtgaacggaaaagggccttccttacacactcggaaacggggtctctgggggatccagtgacgtgcccaaccacagagaccagacccctcctcctgtagagagtggtgctgccctctcgggatgtacctgcaggtggagacccgcaccagctcccgcctccatctgaagagggctccaggcatccggtcctggtccctgctggttggaagccatcttcgacaagagcacagggaaggttgttttgaagacgttcagcctctacaagaagctgctgactcttttcagagctggccacgaccaggtggtggtcctgctccatgatgtccgtgatgtgagcgtggaggaggagaaggtccggtacttcgggaaaggctacatggtggtgctccggcttgcgacgggcttctcccaccccctcacgcagagtgcagtcatgggccaccgcagtgatgtggaagccatcgccaagctcatcaccagcttcctggagctgcactgccttgagagccccacagagctgtctcagagcagcgacagtgaggccggtgaccctgcaagccagagctgacagccccactgtgcctgagcccgtgcaccgcccacaggacccatggcacattcccggtgtgcctgagcccgtgcaccgcccacaggacccgtggcacattcccggtgtgcctgagcccgtgcaccgcccacaggacccgtggcacattcccggtgtgcctgagcccgtgcaccgcccacaggaccgtggcacattccggtgtgctgagccgtgaccgccacaggacccgtggccttggcttcagttggtgcctccagccgagttggcctattgcctgctcatgctgctgcttgcacactgcatgaaacagcaggccagaccaggacatccagactttctccatcgtgaggcctgggcctgcctttctgcagccggaggtctcgccagccctggactcctgctttgggccacagcaagacctcgggcgagtggagaggcggggccaggccgggcccttgtgggtgctgatgctgcatgttgtccccgacacagcgtcctctccctggtggacatccccagcggtcaggtgcttccccaagggcagtgaggggtgaacatccagggcctacctggctgtgcacgctgcagccacactgtggaagctgcccctccccgaggacccgcctcccttgctgatgccaggatctcggcgcatagaccactctgccccagcggtcgtcacagaaaggtctctctgttcctcacactcagcttcagcataagctgtgaggccagaaaaaaggtcagctcttctagtatcgtgcagtgcttaaaaaccgggagctccagccgggcgcagtggttcatgccagtaatcccagcactttcggaggccgaggtgggaggattgcttgaggccaggagttcaagaccagcctgggcaacacagcaagatcctgtctttgtaaaaaaactaaccaaacaggaaaaactgggagattttctgcagaaattgagttccagcctctctcgaacctgggaagacctggcaggagggggctgggctctcggctacagacttctccccaccccgtaggagctgaacgccaaccatcctgacccgccagtgctcttggtctcctgagtgtacccaggtcctcccaggtgcggtgtgcaccgagcgcgcctggcctgatgccctggcctgtgagctggggactcctgggccctgtgagcccctaggcggcaggcccaggaatggctgggtaggacagggaacacctttgccccacgtctggctgtgacctcggtgaaagccgacaggagagagatgggaccctcctcctcagtagtggctgccagtccctcgttgcaggacagggtcatcataaccataaataacccttcacgtgtca

SEQ ID NO: 289768 - DNA, 2269 bp, Homo sapiens
gtcggctcggctccgctccaatcccggaagtgcgcgcggccccgcccccgccggttcgcgtctctctgctgcggcgcggggaccgctgtgctctcgacccctcctcctgtagagagtggtgctgccctctcgggatgtacctgcaggtggagacccgcaccagctcccgcctccatctgaagagggctccaggcatccggtcctggtccctgctggttggaatcttgtcgattggcctggctgctgcctactacagcggagatagcctgggctggaagctcttctacgtcacaggctgcctgtttgtggctgtgcagaacttggaggactgggaggaagccatcttcgacaagagcacagggaaggttgttttgaagacgttcagcctctacaagaagctgctgactcttttcagagctggccacgaccaggtggtggtcctgctccatgatgtccgtgatgtgagcgtggaggaggagaaggtccggtacttcgggaaaggctacatggtggtgctccggcttgcgacgggcttctcccaccccctcacgcagagtgcagtcatgggccaccgcagtgatgtggaagccatcgccaagctcatcaccagcttcctggagctgcactgccttgagagccccacagagctgtctcagagcagcgacagtgaggccggtgaccctgcaagccagagctgacagccccactgtgcctgagcccgtgcaccgcccacaggacccatggcacattcccggtgtgcctgagcccgtgcaccgcccacaggacccgtggcacattcccggtgtgcctgagcccgtgcaccgcccacaggacccgtggcacattcccggtgtgcctgagcccgtgcaccgcccacaggacccgtggcacattcccggtgtgcctgagcccgtgcaccgcccacaggacccgtggccttggcttcagttggtgcctccagccgagttggcctattgcctgctcatgctgctgcttgcacactgcatgaaacagcaggccagaccaggacatccagactttctccatcgtgaggcctgggcctgcctttctgcagccggaggtctcgccagccctggactcctgctttgggccacagcaagacctcgggcgagtggagaggcggggccaggccgggcccttgtgggtgctgatgctgcatgttgtccccgacacagcgtcctctccctggtggacatccccagcggtcaggtgcttccccaagggcagtgaggggtgaacatccagggcctacctggctgtgcacgctgcagccacactgtggaagctgcccctccccgaggacccgcctcccttgctgatgccaggatctcggcgcatagaccactctgccccagcggtcgtcacagaaaggtctctctgttcctcacactcagcttcagcataagctgtgaggccagaaaaaaggtcagctcttctagtatcgtgcagtgcttaaaaaccgggagctccagccgggcgcagtggttcatgccagtaatcccagcactttcggaggccgaggtgggaggattgcttgaggccaggagttcaagaccagcctgggcaacacagcaagatcctgtctttgtaaaaaaactaaccaaacaggaaaaactgggagattttctgcagaaattgagttccagcctctctcgaacctgggaagacctggcaggagggggctgggctctcggctacagacttctccccaccccgtaggagctgaacgccaaccatcctgacccgccagtgctcttggtctcctgagtgtacccaggtcctcccaggtgcggtgtgcaccgagcgcgcctggcctgatgccctggcctgtgagctggggactcctgggccctgtgagcccctaggcggcaggcccaggaatggctgggtaggacagggaacacctttgccccacgtctggctgtgacctcggtgaaagccgacaggagagagatgggaccctcctcctcagtagtggctgccagtccctcgttgcaggacagggtcatcataaccataaataacccttcacgtgtcacctgcagcttccactctttatttccaaagaatcagtgtcacacatgcagatcacaaagcgggtctccctgtgctgcttccttctgtgttttctagtctctcccccaggggctgcccagggccctcaggaactgagtgtgggcaagacactgctgggccagagggcacgacgcccacgtgggcccgtattgcccaggccatttggcagtgc

SEQ ID NO: 289769 - DNA, 2965 bp, Homo sapiens
agcctggtgttgaattggccgaggcgcggccccgcccccgccggttcgcgtctctctgctgcggcgcggggaccgctgtgctctcggtaggcggctgggctgggtgggctccgcacttccttcccgctccgtgccgcgcgtcccggcacccttaggcccactccgggaggggtctgcgtcctgggcccgcctgccggctgttccgtgtcccgccgtgcccgtcgcgggcggcctcgcgcctgttccgctgcaggttggccccggcggcgggagcgcccccgatccggacaaagaaacgagcgctcggtgcgactagcggcgcgggcgctttgccagcgcgcgtgtgcttgtgtccgcgagtgtgcgtgtgtgtgtgcatttggatgtggaatgccgggtgtttcgggagcaatgaggcaactgaggcccgggagggagcccagtcatataccagcatctaggattggtttgtgtgatttgaacccactattttttatttttttgagacacggtctcactctgtcacccaggctggagtccagtggcacgatttctgctcactgcagcctccacctcccggcctcaggtgatcctcccagctcagcctcctgaataactaggaccacaggcgtacaccaccacaccgggctgttttatgtattttctgtggagacggggtttcgccacgttgccctggctggtcttgaactccgtgactcaaacaatccgcacgcctcgtcctcccaaagtgctgagattacaggcctgagccaccgcgcccagcctgaaccccctacttaatgtcagaaatttgatttgacttcacagggaaagccctgagaaactaccagaacggggtccctggggccagtgttgggagcgtacggtgatagtggcagggctgctgcgccggtgcggaactcccgtgtggaagattagcccctttggtgactcgtcggttctggccgctttgggaccctctactgtgcagtctgaactttcagcaggtggaggagggcagagagagagctgagatcgttggtccatgccagtgcgagagccagtacggccggaagccatgatgggactttcagttcctttcttggtggaggccagcacaggggagagggggtgcccacagatgctagaagcttaaaggctgctgggggctagcggcctcaggacataaggtttccagacaggacggggcaggtggtgatgcagctgtagctcgtgagtctgagcgggaaacagcccccgcgcagtcggtgtcgctgtgaacggaaaagggccttccttacacactcggaaacggggtctctgggggatccagtgacgtgcccaaccacagagaccagacccctcctcctgtagagagtggtgctgccctctcgggatgtacctgcaggtggagacccgcaccagctcccgcctccatctgaagagggctccaggcatccggtcctggtccctgctggttggaatcttgtcgattggcctggctgctgcctactacagcggagatagcctgggctggaagctcttctacgtcacaggctgcctgtttgtggctgtgcagaacttggaggactgggaggaagccatcttcgacaagagcacagggaaggttgttttgaagacgttcagcctctacaagaagctgctgactcttttcagagctggccacgaccaggtggtggtcctgctccatgatgtccgtgatgtgagcgtggaggaggagaaggtccggtacttcgggaaaggctacatggtggtgctccggcttgcgacgggcttctcccaccccctcacgcagagtgcagtcatgggccaccgccgtggccttggcttcagttggtgcctccagccgagttggcctattgcctgctcatgctgctgcttgcacactgcatgaaacagcaggccagaccaggacatccagactttctccatcgtgaggcctgggcctgcctttctgcagccggaggtctcgccagccctggactcctgctttgggccacagcaagacctcgggcgagtggagaggcggggccaggccgggcccttgtgggtgctgatgctgcatgttgtccccgacacagcgtcctctccctggtggacatccccagcggtcaggtgcttccccaagggcagtgaggggtgaacatccagggcctacctggctgtgcacgctgcagccacactgtggaagctgcccctccccgaggacccgcctcccttgctgatgccaggatctcggcgcatagaccactctgccccagcggtcgtcacagaaaggtctctctgttcctcacactcagcttcagcataagctgtgaggccagaaaaaaggtcagctcttctagtatcgtgcagtgcttaaaaaccgggagctccagccgggcgcagtggttcatgccagtaatcccagcactttcggaggccgaggtgggaggattgcttgaggccaggagttcaagaccagcctgggcaacacagcaagatcctgtctttgtaaaaaaactaaccaaacaggaaaaactgggagattttctgcagaaattgagttccagcctctctcgaacctgggaagacctggcaggagggggctgggctctcggctacagacttctccccaccccgtaggagctgaacgccaaccatcctgacccgccagtgctcttggtctcctgagtgtacccaggtcctcccaggtgcggtgtgcaccgagcgcgcctggcctgatgccctggcctgtgagctggggactcctgggccctgtgagcccctaggcggcaggcccaggaatggctgggtaggacagggaacacctttgccccacgtctggctgtgacctcggtgaaagccgacaggagagagatgggaccctcctcctcagtagtggctgccagtccctcgttgcaggacagggtcatcataaccataaataacccttcacgtgtca

SEQ ID NO: 289770 - DNA, 2590 bp, Homo sapiens
agcctggtgttgaattggccgaggcgcggccccgcccccgccggttcgcgtctctctgctgcggcgcggggaccgctgtgctctcggtaggcggctgggctgggtgggctccgcacttccttcccgctccgtgccgcgcgtcccggcacccttaggcccactccgggaggggtctgcgtcctgggcccgcctgccggctgttccgtgtcccgccgtgcccgtcgcgggcggcctcgcgcctgttccgctgcaggttggccccggcggcgggagcgcccccgatccggacaaagaaacgagcgctcggtgcgactagcggcgcgggcgctttgccagcgcgcgtgtgcttgtgtccgcgagtgtgcgtgtgtgtgtgcatttggatgtggaatgccgggtgtttcgggagcaatgaggcaactgaggcccgggagggagcccagtcatataccagcatctaggattggtttgtgtgatttgaacccactattttttatttttttgagacacggtctcactctgtcacccaggctggagtccagtggcacgatttctgctcactgcagcctccacctcccggcctcaggtgatcctcccagctcagcctcctgaataactaggaccacaggcgtacaccaccacaccgggctgttttatgtattttctgtggagacggggtttcgccacgttgccctggctggtcttgaactccgtgactcaaacaatccgcacgcctcgtcctcccaaagtgctgagattacaggcctgagccaccgcgcccagcctgaaccccctacttaatgtcagaaatttgatttgacttcacagggaaagccctgagaaactaccagaacggggtccctggggccagtgttgggagcgtacggtgatagtggcagggctgctgcgccggtgcggaactcccgtgtggaagattagcccctttggtgactcgtcggttctggccgctttgggaccctctactgtgcagtctgaactttcagcaggtggaggagggcagagagagagctgagatcgttggtccatgccagtgcgagagccagtacggccggaagccatgatgggactttcagttcctttcttggtggaggccagcacaggggagagggggtgcccacagatgctagaagcttaaaggctgctgggggctagcggcctcaggacataaggtttccagacaggacggggcaggtggtgatgcagctgtagctcgtgagtctgagcgggaaacagcccccgcgcagtcggtgtcgctgtgaacggaaaagggccttccttacacactcggaaacggggtctctgggggatccagtgacgtgcccaaccacagagaccagacccctcctcctgtagagagtggtgctgccctctcgggatgtacctgcaggtggagacccgcaccagctcccgcctccatctgaagagggctccaggcatccggtcctggtccctgctggttggaatcttgtcgattggcctggctgctgcctactacagcggagatagcctgggctggaagctcttctacgtcacaggctgcctgtttgtggctgtgcagaacttggaggactgggaggaagccatcttcgacaagagcacagggaaggttgttttgaagacgttcagcctctacaagaagctgctgactcttttcagagctggccacgaccaggtggtggtcctgctccatgttgtccccgacacagcgtcctctccctggtggacatccccagcggtcaggtgcttccccaagggcagtgaggggtgaacatccagggcctacctggctgtgcacgctgcagccacactgtggaagctgcccctccccgaggacccgcctcccttgctgatgccaggatctcggcgcatagaccactctgccccagcggtcgtcacagaaaggtctctctgttcctcacactcagcttcagcataagctgtgaggccagaaaaaaggtcagctcttctagtatcgtgcagtgcttaaaaaccgggagctccagccgggcgcagtggttcatgccagtaatcccagcactttcggaggccgaggtgggaggattgcttgaggccaggagttcaagaccagcctgggcaacacagcaagatcctgtctttgtaaaaaaactaaccaaacaggaaaaactgggagattttctgcagaaattgagttccagcctctctcgaacctgggaagacctggcaggagggggctgggctctcggctacagacttctccccaccccgtaggagctgaacgccaaccatcctgacccgccagtgctcttggtctcctgagtgtacccaggtcctcccaggtgcggtgtgcaccgagcgcgcctggcctgatgccctggcctgtgagctggggactcctgggccctgtgagcccctaggcggcaggcccaggaatggctgggtaggacagggaacacctttgccccacgtctggctgtgacctcggtgaaagccgacaggagagagatgggaccctcctcctcagtagtggctgccagtccctcgttgcaggacagggtcatcataaccataaataacccttcacgtgtca

SEQ ID NO: 289771 - DNA, 2077 bp, Homo sapiens
agcctggtgttgaattggccgaggcgcggccccgcccccgccggttcgcgtctctctgctgcggcgcggggaccgctgtgctctcggtaggcggctgggctgggtgggctccgcacttccttcccgctccgtgccgcgcgtcccggcacccttaggcccactccgggaggggtctgcgtcctgggcccgcctgccggctgttccgtgtcccgccgtgcccgtcgcgggcggcctcgcgcctgttccgctgcaggttggccccggcggcgggagcgcccccgatccggacaaagaaacgagcgctcggtgcgactagcggcgcgggcgctttgccagcgcgcgtgtgcttgtgtccgcgagtgtgcgtgtgtgtgtgcatttggatgtggaatgccgggtgtttcgggagcaatgaggcaactgaggcccgggagggagcccagtcatataccagcatctaggattggtttgtgtgatttgaacccactattttttatttttttgagacacggtctcactctgtcacccaggctggagtccagtggcacgatttctgctcactgcagcctccacctcccggcctcaggtgatcctcccagctcagcctcctgaataactaggaccacaggcgtacaccaccacaccgggctgttttatgtattttctgtggagacggggtttcgccacgttgccctggctggtcttgaactccgtgactcaaacaatccgcacgcctcgtcctcccaaagtgctgagattacaggcctgagccaccgcgcccagcctgaaccccctacttaatgtcagaaatttgatttgacttcacagggaaagccctgagaaactaccagaacggggtccctggggccagtgttgggagcgtacggtgatagtggcagggctgctgcgccggtgcggaactcccgtgtggaagattagcccctttggtgactcgtcggttctggccgctttgggaccctctactgtgcagtctgaactttcagcaggtggaggagggcagagagagagctgagatcgttggtccatgccagtgcgagagccagtacggccggaagccatgatgggactttcagttcctttcttggtggaggccagcacaggggagagggggtgcccacagatgctagaagcttaaaggctgctgggggctagcggcctcaggacataaggtttccagacaggacggggcaggtggtgatgcagctgtagctcgtgagtctgagcgggaaacagcccccgcgcagtcggtgtcgctgtgaacggaaaagggccttccttacacactcggaaacggggtctctgggggatccagtgacgtgcccaaccacagagaccagacccctcctcctgtagagagtggtgctgccctctcgggatgtacctgcaggtggagacccgcaccagctcccgcctccatctgaagagggctccaggcatccggtcctggtccctgctggttggagatagcctgggctggaagctcttctacgtcacaggctgcctgtttgtggctgtgcagaacttggaggactgggaggaaaccatcctgacccgccagtgctcttggtctcctgagtgtacccaggtcctcccaggtgcggtgtgcaccgagcgcgcctggcctgatgccctggcctgtgagctggggactcctgggccctgtgagcccctaggcggcaggcccaggaatggctgggtaggacagggaacacctttgccccacgtctggctgtgacctcggtgaaagccgacaggagagagatgggaccctcctcctcagtagtggctgccagtccctcgttgcaggacagggtcatcataaccataaataacccttcacgtgtcacctgcagcttccactctttatttccaaagaatcagtgtcacacatgcagatcacaaagcgggtctccctgtgctgcttccttctgtgttttctagtctctcccccaggggctgcccagggccctcaggaactgagtgtgggcaagacactgctgggccagagggcacgacgcccacgtgggcccgtattgcccaggccatttggcagtgc

SEQ ID NO: 289772 - DNA, 1961 bp, Homo sapiens
agcctggtgttgaattggccgaggcgcggccccgcccccgccggttcgcgtctctctgctgcggcgcggggaccgctgtgctctcggtaggcggctgggctgggtgggctccgcacttccttcccgctccgtgccgcgcgtcccggcacccttaggcccactccgggaggggtctgcgtcctgggcccgcctgccggctgttccgtgtcccgccgtgcccgtcgcgggcggcctcgcgcctgttccgctgcaggttggccccggcggcgggagcgcccccgatccggacaaagaaacgagcgctcggtgcgactagcggcgcgggcgctttgccagcgcgcgtgtgcttgtgtccgcgagtgtgcgtgtgtgtgtgcatttggatgtggaatgccgggtgtttcgggagcaatgaggcaactgaggcccgggagggagcccagtcatataccagcatctaggattggtttgtgtgatttgaacccactattttttatttttttgagacacggtctcactctgtcacccaggctggagtccagtggcacgatttctgctcactgcagcctccacctcccggcctcaggtgatcctcccagctcagcctcctgaataactaggaccacaggcgtacaccaccacaccgggctgttttatgtattttctgtggagacggggtttcgccacgttgccctggctggtcttgaactccgtgactcaaacaatccgcacgcctcgtcctcccaaagtgctgagattacaggcctgagccaccgcgcccagcctgaaccccctacttaatgtcagaaatttgatttgacttcacagggaaagccctgagaaactaccagaacggggtccctggggccagtgttgggagcgtacggtgatagtggcagggctgctgcgccggtgcggaactcccgtgtggaagattagcccctttggtgactcgtcggttctggccgctttgggaccctctactgtgcagtctgaactttcagcaggtggaggagggcagagagagagctgagatcgttggtccatgccagtgcgagagccagtacggccggaagccatgatgggactttcagttcctttcttggtggaggccagcacaggggagagggggtgcccacagatgctagaagcttaaaggctgctgggggctagcggcctcaggacataaggtttccagacaggacggggcaggtggtgatgcagctgtagctcgtgagtctgagcgggaaacagcccccgcgcagtcggtgtcgctgtgaacggaaaagggccttccttacacactcggaaacggggtctctgggggatccagtgacgtgcccaaccacagagaccagacccctcctcctgtagagagtggtgctgccctctcgggatgtacctgcaggtggagacccgcaccagctcccgcctccatctgaagagggctccaggcatccggtcctggtccctgctggttggaatcttgtcgattggcctggctgctgcctactacagcggagatagcctgggctggaagctcttctacgtcacaggctgcctgtttgtggctgtgcagaacttggaggactgggaggataaggccggctcgggtgcgggacagagtccagggctgttcagctcctgggttttttgcaatgggaatgaaaggaggaggaagggccctgggtggcctagcgcctccccgtcctgaagcgttggtccctgcttggaggtctccgttcatcaggacatggcccctgcactcatctgggaccgttcttggccaaggaattccccgaaggcatttttctcttagaagctctccatgactatcttcaccaaagtgctttcttcccagagttgccacaatgggatgcgagtcagctttccccgtggccggccctcccacctcggagcccctcatgagtcctttcagcctggcccagtgctgccctctg

SEQ ID NO: 289773 - DNA, 428 bp, Homo sapiens
gcgcgtgtgggtcctgagtggccagggcagggtcagcagcacaggaagctgcccagggggtccttgcaagcgtgggctctggcagcgtctgggggaggctgtctaggcggggcctcccgtgggcatgtcctggagctcacaggctggcgccctatgcccatctccagatagcctgggctggaagctcttctacgtcacaggctgcctgtttgtggctgtgcagaacttggaggactgggaggataaggccggctcgggtgcgggacagagtccagggctgttcagctcctgggttttttgcaatgggaatgaaaggaggaggaagggccctgggtggcctagcgcctccccgtcctgaagcgttggtccctgcttggaggtctccgttcatcaggacatggcccctgcactcatctgggaccgttctt

SEQ ID NO: 289774 - DNA, 2046 bp, Homo sapiens
aatgttagctagtagaaggctggtttaaattggccgagggccggttcgcgttctctgctgcggcgcggggaccgctgtgctctcgacccctcctcctgtagagagtggtgctgccctctcgggatgtacctgcaggtggagacccgcaccagctcccgcctccatctgaagagggctccaggcatccggtcctggtccctgctggttggaatcttgtcgattggcctggctgctgcctactacagcggagatagcctgggctggaagctcttctacgtcacaggctgcctgtttgtggctgtgcagaacttggaggactgggaggaagccatcttcgacaagagcacagggaaggttgttttgaagacgttcagcctctacaagaagctgctgactcttttcagagctggccacgaccaggtggtggtcctgctccatgatgtccgtgatgtgagcgtggaggaggagaaggtccggtacttcgggaaaggctacatggtggtgctccggcttgcgacgggcttctcccaccccctcacgcagagtgcagtcatgggccaccgcagtgatgtggaagccatcgccaagctcatcaccagcttcctggagctgcactgccttgagagccccacagagctgtctcagagcagcgacagtgaggccggtgaccctgcaagccagagctgacagccccactgtgcctgagcccgtgcaccgcccacaggacccatggcacattcccggtgtgcctgagcccgtgcaccgcccacaggacccgtggcacattcccggtgtgcctgagcccgtgcaccgcccacaggacccgtggcacattcccggtgtgcctgagcccgtgcaccgcccacaggaccgtggacattcccggtgtgcctgagcccgtgcaccgcccacaggacccgtggccttggcttcagttggtgcctccagccgagttggcctattgcctgctcatgctgctgcttgcacactgcatgaaacagcaggccagaccaggacatccagactttctccatcgtgaggcctgggcctgcctttctgcagccggaggtctcgccagccctggactcctgctttgggccacagcaagacctcgggcgagtggagaggcggggccaggccgggcccttgtgggtgctgatgctgcatgttgtccccgacacagcgtcctctccctggtggacatccccagcggtcaggtgcttccccaagggcagtgaggggtgaacatccagggcctacctggctgtgcacgctgcagccacactgtggaagctgcccctccccgaggacccgcctcccttgctgatgccaggatctcggcgcatagaccactctgccccagcggtcgtcacagaaaggtctctctgttcctcacactcagcttcagcataagctgtgaggccagaaaaaaggtcagctcttctagtatcgtgcagtgcttaaaaaccgggagctccagccgggcgcagtggttcatgccagtaatcccagcactttcggaggccgaggtgggaggattgcttgaggccaggagttcaagaccagcctgggcaacacagcaagatcctgtctttgtaaaaaaactaaccaaacaggaaaaactgggagattttctgcagaaattgagttccagcctctctcgaacctgggaagacctggcaggagggggctgggctctcggctacagacttctccccaccccgtaggagctgaacgccaaccatcctgacccgccagtgctcttggtctcctgagtgtacccaggtcctcccaggtgcggtgtgcaccgagcgcgcctggcctgatgccctggcctgtgagctggggactcctgggccctgtgagcccctaggcggcaggcccaggaatggctgggtaggacagggaacacctttgccccacgtctggctgtgacctcggtgaaagccgacaggagagagatgggaccctcctcctcagtagtggctgccagtccctcgttgcaggacagggtcatcataaccataaataacccttcacgtgtca

SEQ ID NO: 289775 - DNA, 3321 bp, Homo sapiens
agcctggtgttgaattggccgaggcgcggccccgcccccgccggttcgcgtctctctgctgcggcgcggggaccgctgtgctctcggtaggcggctgggctgggtgggctccgcacttccttcccgctccgtgccgcgcgtcccggcacccttaggcccactccgggaggggtctgcgtcctgggcccgcctgccggctgttccgtgtcccgccgtgcccgtcgcgggcggcctcgcgcctgttccgctgcaggttggccccggcggcgggagcgcccccgatccggacaaagaaacgagcgctcggtgcgactagcggcgcgggcgctttgccagcgcgcgtgtgcttgtgtccgcgagtgtgcgtgtgtgtgtgcatttggatgtggaatgccgggtgtttcgggagcaatgaggcaactgaggcccgggagggagcccagtcatataccagcatctaggattggtttgtgtgatttgaacccactattttttatttttttgagacacggtctcactctgtcacccaggctggagtccagtggcacgatttctgctcactgcagcctccacctcccggcctcaggtgatcctcccagctcagcctcctgaataactaggaccacaggcgtacaccaccacaccgggctgttttatgtattttctgtggagacggggtttcgccacgttgccctggctggtcttgaactccgtgactcaaacaatccgcacgcctcgtcctcccaaagtgctgagattacaggcctgagccaccgcgcccagcctgaaccccctacttaatgtcagaaatttgatttgacttcacagggaaagccctgagaaactaccagaacggggtccctggggccagtgttgggagcgtacggtgatagtggcagggctgctgcgccggtgcggaactcccgtgtggaagattagcccctttggtgactcgtcggttctggccgctttgggaccctctactgtgcagtctgaactttcagcaggtggaggagggcagagagagagctgagatcgttggtccatgccagtgcgagagccagtacggccggaagccatgatgggactttcagttcctttcttggtggaggccagcacaggggagagggggtgcccacagatgctagaagcttaaaggctgctgggggctagcggcctcaggacataaggtttccagacaggacggggcaggtggtgatgcagctgtagctcgtgagtctgagcgggaaacagcccccgcgcagtcggtgtcgctgtgaacggaaaagggccttccttacacactcggaaacggggtctctgggggatccagtgacgtgcccaaccacagagaccagacccctcctcctgtagagagtggtgctgccctctcgggatgtacctgcaggtggagacccgcaccagctcccgcctccatctgaagagggctccaggcatccggtcctggtccctgctggttggaatcttgtcgattggcctggctgctgcctactacagcggagatagcctgggctggaagctcttctacgtcacaggctgcctgtttgtggctgtgcagaacttggaggactgggaggaagccatcttcgacaagagcacagggaaggttgttttgaagacgttcagcctctacaagaagctgctgactcttttcagagctggccacgaccaggtggtggtcctgctccatgatgtccgtgatgtgagcgtggaggaggagaaggtccggtacttcgggaaaggctacatggtggtgctccggcttgcgacgggcttctcccaccccctcacgcagagtgcagtcatgggccaccgcagtgatgtggaagccatcgccaagctcatcaccagcttcctggagctgcactgccttgagagccccacagagctgtctcagagcagcgacagtgaggccggtgaccctgcaagccagagctgacagccccactgtgcctgagcccgtgcaccgcccacaggacccatggcacattcccggtgtgcctgagcccgtgcaccgcccacaggacccgtggcacattcccggtgtgcctgagcccgtgcaccgcccacaggacccgtggcacattcccggtgtgcctgagcccgtgcaccgcccacaggacccgtggcacattcccggtgtgcctgagcccgtgcaccgcccacaggacccgtggccttggcttcagttggtgcctccagccgagttggcctattgcctgctcatgctgctgcttgcacactgcatgaaacagcaggccagaccaggacatccagactttctccatcgtgaggcctgggcctgcctttctgcagccggaggtctcgccagccctggactcctgctttgggccacagcaagacctcgggcgagtggagaggcggggccaggccgggcccttgtgggtgctgatgctgcatgttgtccccgacacagcgtcctctccctggtggacatccccagcggtcaggtgcttccccaagggcagtgaggggtgaacatccagggcctacctggctgtgcacgctgcagccacactgtggaagctgcccctccccgaggacccgcctcccttgctgatgccaggatctcggcgcatagaccactctgccccagcggtcgtcacagaaaggtctctctgttcctcacactcagcttcagcataagctgtgaggccagaaaaaaggtcagctcttctagtatcgtgcagtgcttaaaaaccgggagctccagccgggcgcagtggttcatgccagtaatcccagcactttcggaggccgaggtgggaggattgcttgaggccaggagttcaagaccagcctgggcaacacagcaagatcctgtctttgtaaaaaaactaaccaaacaggaaaaactgggagattttctgcagaaattgagttccagcctctctcgaacctgggaagacctggcaggagggggctgggctctcggctacagacttctccccaccccgtaggagctgaacgccaaccatcctgacccgccagtgctcttggtctcctgagtgtacccaggtcctcccaggtgcggtgtgcaccgagcgcgcctggcctgatgccctggcctgtgagctggggactcctgggccctgtgagcccctaggcggcaggcccaggaatggctgggtaggacagggaacacctttgccccacgtctggctgtgacctcggtgaaagccgacaggagagagatgggaccctcctcctcagtagtggctgccagtccctcgttgcaggacagggtcatcataaccataaataacccttcacgtgtca

SEQ ID NO: 289776 - DNA, 2319 bp, Homo sapiens
agcctggtgttgaattggccgaggcgcggccccgcccccgccggttcgcgtctctctgctgcggcgcggggaccgctgtgctctcggtaggcggctgggctgggtgggctccgcacttccttcccgctccgtgccgcgcgtcccggcacccttaggcccactccgggaggggtctgcgtcctgggcccgcctgccggctgttccgtgtcccgccgtgcccgtcgcgggcggcctcgcgcctgttccgctgcaggttggccccggcggcgggagcgcccccgatccggacaaagaaacgagcgctcggaaacggggtctctgggggatccagtgacgtgcccaaccacagagaccagacccctcctcctgtagagagtggtgctgccctctcgggatgtacctgcaggtggagacccgcaccagctcccgcctccatctgaagagggctccaggcatccggtcctggtccctgctggttggaatcttgtcgattggcctggctgctgcctactacagcggagatagcctgggctggaagctcttctacgtcacaggctgcctgtttgtggctgtgcagaacttggaggactgggaggaagccatcttcgacaagagcacagggaaggttgttttgaagacgttcagcctctacaagaagctgctgactcttttcagagctggccacgaccaggtggtggtcctgctccatgatgtccgtgatgtgagcgtggaggaggagaaggtccggtacttcgggaaaggctacatggtggtgctccggcttgcgacgggcttctcccaccccctcacgcagagtgcagtcatgggccaccgcagtgatgtggaagccatcgccaagctcatcaccagcttcctggagctgcactgccttgagagccccacagagctgtctcagagcagcgacagtgaggccggtgaccctgcaagccagagctgacagccccactgtgcctgagcccgtgcaccgcccacaggacccatggcacattcccggtgtgcctgagcccgtgcaccgcccacaggacccgtggcacattcccggtgtgcctgagcccgtgcaccgcccacaggacccgtggcacattcccggtgtgcctgagcccgtgcaccgcccacaggacccgtggcacattcccggtgtgcctgagcccgtgcaccgcccacaggacccgtggccttggcttcagttggtgcctccagccgagttggcctattgcctgctcatgctgctgcttgcacactgcatgaaacagcaggccagaccaggacatccagactttctccatcgtgaggcctgggcctgcctttctgcagccggaggtctcgccagccctggactcctgctttgggccacagcaagacctcgggcgagtggagaggcggggccaggccgggcccttgtgggtgctgatgctgcatgttgtccccgacacagcgtcctctccctggtggacatccccagcggtcaggtgcttccccaagggcagtgaggggtgaacatccagggcctacctggctgtgcacgctgcagccacactgtggaagctgcccctccccgaggacccgcctcccttgctgatgccaggatctcggcgcatagaccactctgccccagcggtcgtcacagaaaggtctctctgttcctcacactcagcttcagcataagctgtgaggccagaaaaaaggtcagctcttctagtatcgtgcagtgcttaaaaaccgggagctccagccgggcgcagtggttcatgccagtaatcccagcactttcggaggccgaggtgggaggattgcttgaggccaggagttcaagaccagcctgggcaacacagcaagatcctgtctttgtaaaaaaactaaccaaacaggaaaaactgggagattttctgcagaaattgagttccagcctctctcgaacctgggaagacctggcaggagggggctgggctctcggctacagacttctccccaccccgtaggagctgaacgccaaccatcctgacccgccagtgctcttggtctcctgagtgtacccaggtcctcccaggtgcggtgtgcaccgagcgcgcctggcctgatgccctggcctgtgagctggggactcctgggccctgtgagcccctaggcggcaggcccaggaatggctgggtaggacagggaacacctttgccccacgtctggctgtgacctcggtgaaagccgacaggagagagatgggaccctcctcctcagtagtggctgccagtccctcgttgcaggacagggtcatcataaccataaataacccttcacgtgtca

SEQ ID NO: 289777 - DNA, 2049 bp, Homo sapiens
acgcgtgggtgcggcgcggggaccgctgtgctctcggaaacggggtctctgggggatccagtgacgtgcccaaccacagagaccagacccctcctcctgtagagagtggtgctgccctctcgggatgtacctgcaggtggagacccgcaccagctcccgcctccatctgaagagggctccaggcatccggtcctggtccctgctggttggaatcttgtcgattggcctggctgctgcctactacagcggagatagcctgggctggaagctcttctacgtcacaggctgcctgtttgtggctgtgcagaacttggaggactgggaggaagccatcttcgacaagagcacagggaaggttgttttgaagacgttcagcctctacaagaagctgctgactcttttcagagctggccacgaccaggtggtggtcctgctccatgatgtccgtgatgtgagcgtggaggaggagaaggtccggtacttcgggaaaggctacatggtggtgctccggcttgcgacgggcttctcccaccccctcacgcagagtgcagtcatgggccaccgcagtgatgtggaagccatcgccaagctcatcaccagcttcctggagctgcactgccttgagagccccacagagctgtctcagagcagcgacagtgaggccggtgaccctgcaagccagagctgacagccccactgtgcctgagcccgtgcaccgcccacaggacccatggcacattcccggtgtgcctgagcccgtgcaccgcccacaggacccgtggcacattcccggtgtgcctgagcccgtgcaccgcccacaggacccgtggcacattcccggtgtgcctgagcccgtgcaccgcccacaggacccgtggcacattcccggtgtgcctgagcccgtgcaccgcccacaggacccgtggccttggcttcagttggtgcctccagccgagttggcctattgcctgctcatgctgctgcttgcacactgcatgaaacagcaggccagaccaggacatccagactttctccatcgtgaggcctgggcctgcctttctgcagccggaggtctcgccagccctggactcctgctttgggccacagcaagacctcgggcgagtggagaggcggggccaggccgggcccttgtgggtgctgatgctgcatgttgtccccgacacagcgtcctctccctggtggacatccccagcggtcaggtgcttccccaagggcagtgaggggtgaacatccagggcctacctggctgtgcacgctgcagccacactgtggaagctgcccctccccgaggacccgcctcccttgctgatgccaggatctcggcgcatagaccactctgccccagcggtcgtcacagaaaggtctctctgttcctcacactcagcttcagcataagctgtgaggccagaaaaaaggtcagctcttctagtatcgtgcagtgcttaaaaaccgggagctccagccgggcgcagtggttcatgccagtaatcccagcactttcggaggccgaggtgggaggattgcttgaggccaggagttcaagaccagcctgggcaacacagcaagatcctgtctttgtaaaaaaactaaccaaacaggaaaaactgggagattttctgcagaaattgagttccagcctctctcgaacctgggaagacctggcaggagggggctgggctctcggctacagacttctccccaccccgtaggagctgaacgccaaccatcctgacccgccagtgctcttggtctcctgagtgtacccaggtcctcccaggtgcggtgtgcaccgagcgcgcctggcctgatgccctggcctgtgagctggggactcctgggccctgtgagcccctaggcggcaggcccaggaatggctgggtaggacagggaacacctttgccccacgtctggctgtgacctcggtgaaagccgacaggagagagatgggaccctcctcctcagtagtggctgccagtccctcgttgcaggacagggtcatcataaccataaataacccttcacgtgtca

SEQ ID NO: 289778 - DNA, 3205 bp, Homo sapiens
agcctggtgttgaattggccgaggcgcggccccgcccccgccggttcgcgtctctctgctgcggcgcggggaccgctgtgctctcggtaggcggctgggctgggtgggctccgcacttccttcccgctccgtgccgcgcgtcccggcacccttaggcccactccgggaggggtctgcgtcctgggcccgcctgccggctgttccgtgtcccgccgtgcccgtcgcgggcggcctcgcgcctgttccgctgcaggttggccccggcggcgggagcgcccccgatccggacaaagaaacgagcgctcggtgcgactagcggcgcgggcgctttgccagcgcgcgtgtgcttgtgtccgcgagtgtgcgtgtgtgtgtgcatttggatgtggaatgccgggtgtttcgggagcaatgaggcaactgaggcccgggagggagcccagtcatataccagcatctaggattggtttgtgtgatttgaacccactattttttatttttttgagacacggtctcactctgtcacccaggctggagtccagtggcacgatttctgctcactgcagcctccacctcccggcctcaggtgatcctcccagctcagcctcctgaataactaggaccacaggcgtacaccaccacaccgggctgttttatgtattttctgtggagacggggtttcgccacgttgccctggctggtcttgaactccgtgactcaaacaatccgcacgcctcgtcctcccaaagtgctgagattacaggcctgagccaccgcgcccagcctgaaccccctacttaatgtcagaaatttgatttgacttcacagggaaagccctgagaaactaccagaacggggtccctggggccagtgttgggagcgtacggtgatagtggcagggctgctgcgccggtgcggaactcccgtgtggaagattagcccctttggtgactcgtcggttctggccgctttgggaccctctactgtgcagtctgaactttcagcaggtggaggagggcagagagagagctgagatcgttggtccatgccagtgcgagagccagtacggccggaagccatgatgggactttcagttcctttcttggtggaggccagcacaggggagagggggtgcccacagatgctagaagcttaaaggctgctgggggctagcggcctcaggacataaggtttccagacaggacggggcaggtggtgatgcagctgtagctcgtgagtctgagcgggaaacagcccccgcgcagtcggtgtcgctgtgaacggaaaagggccttccttacacactcggaaacggggtctctgggggatccagtgacgtgcccaaccacagagaccagacccctcctcctgtagagagtggtgctgccctctcgggatgtacctgcaggtggagacccgcaccagctcccgcctccatctgaagagggctccaggcatccggtcctggtccctgctggttggaagccatcttcgacaagagcacagggaaggttgttttgaagacgttcagcctctacaagaagctgctgactcttttcagagctggccacgaccaggtggtggtcctgctccatgatgtccgtgatgtgagcgtggaggaggagaaggtccggtacttcgggaaaggctacatggtggtgctccggcttgcgacgggcttctcccaccccctcacgcagagtgcagtcatgggccaccgcagtgatgtggaagccatcgccaagctcatcaccagcttcctggagctgcactgccttgagagccccacagagctgtctcagagcagcgacagtgaggccggtgaccctgcaagccagagctgacagccccactgtgcctgagcccgtgcaccgcccacaggacccatggcacattcccggtgtgcctgagcccgtgcaccgcccacaggacccgtggcacattcccggtgtgcctgagcccgtgcaccgcccacaggacccgtggcacattcccggtgtgcctgagcccgtgcaccgcccacaggacccgtggcacattcccggtgtgcctgagcccgtgcaccgcccacaggacccgtggccttggcttcagttggtgcctccagccgagttggcctattgcctgctcatgctgctgcttgcacactgcatgaaacagcaggccagaccaggacatccagactttctccatcgtgaggcctgggcctgcctttctgcagccggaggtctcgccagccctggactcctgctttgggccacagcaagacctcgggcgagtggagaggcggggccaggccgggcccttgtgggtgctgatgctgcatgttgtccccgacacagcgtcctctccctggtggacatccccagcggtcaggtgcttccccaagggcagtgaggggtgaacatccagggcctacctggctgtgcacgctgcagccacactgtggaagctgcccctccccgaggacccgcctcccttgctgatgccaggatctcggcgcatagaccactctgccccagcggtcgtcacagaaaggtctctctgttcctcacactcagcttcagcataagctgtgaggccagaaaaaaggtcagctcttctagtatcgtgcagtgcttaaaaaccgggagctccagccgggcgcagtggttcatgccagtaatcccagcactttcggaggccgaggtgggaggattgcttgaggccaggagttcaagaccagcctgggcaacacagcaagatcctgtctttgtaaaaaaactaaccaaacaggaaaaactgggagattttctgcagaaattgagttccagcctctctcgaacctgggaagacctggcaggagggggctgggctctcggctacagacttctccccaccccgtaggagctgaacgccaaccatcctgacccgccagtgctcttggtctcctgagtgtacccaggtcctcccaggtgcggtgtgcaccgagcgcgcctggcctgatgccctggcctgtgagctggggactcctgggccctgtgagcccctaggcggcaggcccaggaatggctgggtaggacagggaacacctttgccccacgtctggctgtgacctcggtgaaagccgacaggagagagatgggaccctcctcctcagtagtggctgccagtccctcgttgcaggacagggtcatcataaccataaataacccttcacgtgtca

SEQ ID NO: 289779 - DNA, 1884 bp, Homo sapiens
agcctggtgttgaattggccgaggcgcggccccgcccccgccggttcgcgtctctctgctgcggcgcggggaccgctgtgctctcgatagcctgggctggaagctcttctacgtcacaggctgcctgtttgtggctgtgcagaacttggaggactgggaggaagccatcttcgacaagagcacagggaaggttgttttgaagacgttcagcctctacaagaagctgctgactcttttcagagctggccacgaccaggtggtggtcctgctccatgatgtccgtgatgtgagcgtggaggaggagaaggtccggtacttcgggaaaggctacatggtggtgctccggcttgcgacgggcttctcccaccccctcacgcagagtgcagtcatgggccaccgcagtgatgtggaagccatcgccaagctcatcaccagcttcctggagctgcactgccttgagagccccacagagctgtctcagagcagcgacagtgaggccggtgaccctgcaagccagagctgacagccccactgtgcctgagcccgtgcaccgcccacaggacccatggcacattcccggtgtgcctgagcccgtgcaccgcccacaggacccgtggcacattcccggtgtgcctgagcccgtgcaccgcccacaggacccgtggcacattcccggtgtgcctgagcccgtgcaccgcccacaggacccgtggcacattcccggtgtgcctgagcccgtgcaccgcccacaggacccgtggccttggcttcagttggtgcctccagccgagttggcctattgcctgctcatgctgctgcttgcacactgcatgaaacagcaggccagaccaggacatccagactttctccatcgtgaggcctgggcctgcctttctgcagccggaggtctcgccagccctggactcctgctttgggccacagcaagacctcgggcgagtggagaggcggggccaggccgggcccttgtgggtgctgatgctgcatgttgtccccgacacagcgtcctctccctggtggacatccccagcggtcaggtgcttccccaagggcagtgaggggtgaacatccagggcctacctggctgtgcacgctgcagccacactgtggaagctgcccctccccgaggacccgcctcccttgctgatgccaggatctcggcgcatagaccactctgccccagcggtcgtcacagaaaggtctctctgttcctcacactcagcttcagcataagctgtgaggccagaaaaaaggtcagctcttctagtatcgtgcagtgcttaaaaaccgggagctccagccgggcgcagtggttcatgccagtaatcccagcactttcggaggccgaggtgggaggattgcttgaggccaggagttcaagaccagcctgggcaacacagcaagatcctgtctttgtaaaaaaactaaccaaacaggaaaaactgggagattttctgcagaaattgagttccagcctctctcgaacctgggaagacctggcaggagggggctgggctctcggctacagacttctccccaccccgtaggagctgaacgccaaccatcctgacccgccagtgctcttggtctcctgagtgtacccaggtcctcccaggtgcggtgtgcaccgagcgcgcctggcctgatgccctggcctgtgagctggggactcctgggccctgtgagcccctaggcggcaggcccaggaatggctgggtaggacagggaacacctttgccccacgtctggctgtgacctcggtgaaagccgacaggagagagatgggaccctcctcctcagtagtggctgccagtccctcgttgcaggacagggtcatcataaccataaataacccttcacgtgtca

SEQ ID NO: 289780 - DNA, 3238 bp, Homo sapiens
agcctggtgttgaattggccgaggcgcggccccgcccccgccggttcgcgtctctctgctgcggcgcggggaccgctgtgctctcggtaggcggctgggctgggtgggctccgcacttccttcccgctccgtgccgcgcgtcccggcacccttaggcccactccgggaggggtctgcgtcctgggcccgcctgccggctgttccgtgtcccgccgtgcccgtcgcgggcggcctcgcgcctgttccgctgcaggttggccccggcggcgggagcgcccccgatccggacaaagaaacgagcgctcggtgcgactagcggcgcgggcgctttgccagcgcgcgtgtgcttgtgtccgcgagtgtgcgtgtgtgtgtgcatttggatgtggaatgccgggtgtttcgggagcaatgaggcaactgaggcccgggagggagcccagtcatataccagcatctaggattggtttgtgtgatttgaacccactattttttatttttttgagacacggtctcactctgtcacccaggctggagtccagtggcacgatttctgctcactgcagcctccacctcccggcctcaggtgatcctcccagctcagcctcctgaataactaggaccacaggcgtacaccaccacaccgggctgttttatgtattttctgtggagacggggtttcgccacgttgccctggctggtcttgaactccgtgactcaaacaatccgcacgcctcgtcctcccaaagtgctgagattacaggcctgagccaccgcgcccagcctgaaccccctacttaatgtcagaaatttgatttgacttcacagggaaagccctgagaaactaccagaacggggtccctggggccagtgttgggagcgtacggtgatagtggcagggctgctgcgccggtgcggaactcccgtgtggaagattagcccctttggtgactcgtcggttctggccgctttgggaccctctactgtgcagtctgaactttcagcaggtggaggagggcagagagagagctgagatcgttggtccatgccagtgcgagagccagtacggccggaagccatgatgggactttcagttcctttcttggtggaggccagcacaggggagagggggtgcccacagatgctagaagcttaaaggctgctgggggctagcggcctcaggacataaggtttccagacaggacggggcaggtggtgatgcagctgtagctcgtgagtctgagcgggaaacagcccccgcgcagtcggtgtcgctgtgaacggaaaagggccttccttacacactcggaaacggggtctctgggggatccagtgacgtgcccaaccacagagaccagacccctcctcctgtagagagtggtgctgccctctcgggatgtacctgcaggtggagacccgcaccagctcccgcctccatctgaagagggctccaggcatccggtcctggtccctgctggttggaatcttgtcgattggcctggctgctgcctactacagcggaagccatcttcgacaagagcacagggaaggttgttttgaagacgttcagcctctacaagaagctgctgactcttttcagagctggccacgaccaggtggtggtcctgctccatgatgtccgtgatgtgagcgtggaggaggagaaggtccggtacttcgggaaaggctacatggtggtgctccggcttgcgacgggcttctcccaccccctcacgcagagtgcagtcatgggccaccgcagtgatgtggaagccatcgccaagctcatcaccagcttcctggagctgcactgccttgagagccccacagagctgtctcagagcagcgacagtgaggccggtgaccctgcaagccagagctgacagccccactgtgcctgagcccgtgcaccgcccacaggacccatggcacattcccggtgtgcctgagcccgtgcaccgcccacaggacccgtggcacattcccggtgtgcctgagcccgtgcaccgcccacaggacccgtggcacattcccggtgtgcctgagcccgtgcaccgcccacaggaccgtggcacattccggtgtgctgagccgtgaccgccacaggacccgtggccttggcttcagttggtgcctccagccgagttggcctattgcctgctcatgctgctgcttgcacactgcatgaaacagcaggccagaccaggacatccagactttctccatcgtgaggcctgggcctgcctttctgcagccggaggtctcgccagccctggactcctgctttgggccacagcaagacctcgggcgagtggagaggcggggccaggccgggcccttgtgggtgctgatgctgcatgttgtccccgacacagcgtcctctccctggtggacatccccagcggtcaggtgcttccccaagggcagtgaggggtgaacatccagggcctacctggctgtgcacgctgcagccacactgtggaagctgcccctccccgaggacccgcctcccttgctgatgccaggatctcggcgcatagaccactctgccccagcggtcgtcacagaaaggtctctctgttcctcacactcagcttcagcataagctgtgaggccagaaaaaaggtcagctcttctagtatcgtgcagtgcttaaaaaccgggagctccagccgggcgcagtggttcatgccagtaatcccagcactttcggaggccgaggtgggaggattgcttgaggccaggagttcaagaccagcctgggcaacacagcaagatcctgtctttgtaaaaaaactaaccaaacaggaaaaactgggagattttctgcagaaattgagttccagcctctctcgaacctgggaagacctggcaggagggggctgggctctcggctacagacttctccccaccccgtaggagctgaacgccaaccatcctgacccgccagtgctcttggtctcctgagtgtacccaggtcctcccaggtgcggtgtgcaccgagcgcgcctggcctgatgccctggcctgtgagctggggactcctgggccctgtgagcccctaggcggcaggcccaggaatggctgggtaggacagggaacacctttgccccacgtctggctgtgacctcggtgaaagccgacaggagagagatgggaccctcctcctcagtagtggctgccagtccctcgttgcaggacagggtcatcataaccataaataacccttcacgtgtca

SEQ ID NO: 289781 - DNA, 2715 bp, Homo sapiens
agcctggtgttgaattggccgaggcgcggccccgcccccgccggttcgcgtctctctgctgcggcgcggggaccgctgtgctctcggtaggcggctgggctgggtgggctccgcacttccttcccgctccgtgccgcgcgtcccggcacccttaggcccactccgggaggggtctgcgtcctgggcccgcctgccggctgttccgtgtcccgccgtgcccgtcgcgggcggcctcgcgcctgttccgctgcaggttggccccggcggcgggagcgcccccgatccggacaaagaaacgagcgctcggtgcgactagcggcgcgggcgctttgccagcgcgcgtgtgcttgtgtccgcgagtgtgcgtgtgtgtgtgcatttggatgtggaatgccgggtgtttcgggagcaatgaggcaactgaggcccgggagggagcccagtcatataccagcatctaggattggtttgtgtgatttgaacccactattttttatttttttgagacacggtctcactctgtcacccaggctggagtccagtggcacgatttctgctcactgcagcctccacctcccggcctcaggtgatcctcccagctcagcctcctgaataactaggaccacaggcgtacaccaccacaccgggctgttttatgtattttctgtggagacggggtttcgccacgttgccctggctggtcttgaactccgtgactcaaacaatccgcacgcctcgtcctcccaaagtgctgagattacaggcctgagccaccgcgcccagcctgaaccccctacttaatgtcagaaatttgatttgacttcacagggaaagccctgagaaactaccagaacggggtccctggggccagtgttgggagcgtacggtgatagtggcagggctgctgcgccggtgcggaactcccgtgtggaagattagcccctttggtgactcgtcggttctggccgctttgggaccctctactgtgcagtctgaactttcagcaggtggaggagggcagagagagagctgagatcgttggtccatgccagtgcgagagccagtacggccggaagccatgatgggactttcagttcctttcttggtggaggccagcacaggggagagggggtgcccacagatgctagaagcttaaaggctgctgggggctagcggcctcaggacataaggtttccagacaggacggggcaggtggtgatgcagctgtagctcgtgagtctgagcgggaaacagcccccgcgcagtcggtgtcgctgtgaacggaaaagggccttccttacacactcggaaacggggtctctgggggatccagtgacgtgcccaaccacagagaccagacccctcctcctgtagagagtggtgctgccctctcgggatgtacctgcaggtggagacccgcaccagctcccgcctccatctgaagagggctccaggcatccggtcctggtccctgctggttggaatcttgtcgattggcctggctgctgcctactacagcggagatagcctgggctggaagctcttctacgtcacaggctgcctgtttgtggctgtgcagaacttggaggactgggaggaagccatcttcgacaagagcacagggaaggttgttttgaagacgttcagcctctacaagaagctgctgactcttttcagagctggccacgaccaggtggtggtcctgctccatgatgtccgtgatgtgagcgtggaggaggagaaggtccggtacttcgggaaaggctacatggtggtgctccggcttgcgacgggcttctcccaccccctcacgcagagtgcagtcatgggccaccgcttgtccccgacacagcgtcctctccctggtggacatccccagcggtcaggtgcttccccaagggcagtgaggggtgaacatccagggcctacctggctgtgcacgctgcagccacactgtggaagctgcccctccccgaggacccgcctcccttgctgatgccaggatctcggcgcatagaccactctgccccagcggtcgtcacagaaaggtctctctgttcctcacactcagcttcagcataagctgtgaggccagaaaaaaggtcagctcttctagtatcgtgcagtgcttaaaaaccgggagctccagccgggcgcagtggttcatgccagtaatcccagcactttcggaggccgaggtgggaggattgcttgaggccaggagttcaagaccagcctgggcaacacagcaagatcctgtctttgtaaaaaaactaaccaaacaggaaaaactgggagattttctgcagaaattgagttccagcctctctcgaacctgggaagacctggcaggagggggctgggctctcggctacagacttctccccaccccgtaggagctgaacgccaaccatcctgacccgccagtgctcttggtctcctgagtgtacccaggtcctcccaggtgcggtgtgcaccgagcgcgcctggcctgatgccctggcctgtgagctggggactcctgggccctgtgagcccctaggcggcaggcccaggaatggctgggtaggacagggaacacctttgccccacgtctggctgtgacctcggtgaaagccgacaggagagagatgggaccctcctcctcagtagtggctgccagtccctcgttgcaggacagggtcatcataaccataaataacccttcacgtgtca

SEQ ID NO: 289782 - DNA, 1838 bp, Homo sapiens
agcctggtgttgaattggccgaggcgcggccccgcccccgccggttcgcgtctctctgctgcggcgcggggaccgctgtgctctcagccatcttcgacaagagcacagggaaggttgttttgaagacgttcagcctctacaagaagctgctgactcttttcagagctggccacgaccaggtggtggtcctgctccatgatgtccgtgatgtgagcgtggaggaggagaaggtccggtacttcgggaaaggctacatggtggtgctccggcttgcgacgggcttctcccaccccctcacgcagagtgcagtcatgggccaccgcagtgatgtggaagccatcgccaagctcatcaccagcttcctggagctgcactgccttgagagccccacagagctgtctcagagcagcgacagtgaggccggtgaccctgcaagccagagctgacagccccactgtgcctgagcccgtgcaccgcccacaggacccatggcacattcccggtgtgcctgagcccgtgcaccgcccacaggacccgtggcacattcccggtgtgcctgagcccgtgcaccgcccacaggacccgtggcacattcccggtgtgcctgagcccgtgcaccgcccacaggacccgtggcacattcccggtgtgcctgagcccgtgcaccgcccacaggacccgtggccttggcttcagttggtgcctccagccgagttggcctattgcctgctcatgctgctgcttgcacactgcatgaaacagcaggccagaccaggacatccagactttctccatcgtgaggcctgggcctgcctttctgcagccggaggtctcgccagccctggactcctgctttgggccacagcaagacctcgggcgagtggagaggcggggccaggccgggcccttgtgggtgctgatgctgcatgttgtccccgacacagcgtcctctccctggtggacatccccagcggtcaggtgcttccccaagggcagtgaggggtgaacatccagggcctacctggctgtgcacgctgcagccacactgtggaagctgcccctccccgaggacccgcctcccttgctgatgccaggatctcggcgcatagaccactctgccccagcggtcgtcacagaaaggtctctctgttcctcacactcagcttcagcataagctgtgaggccagaaaaaaggtcagctcttctagtatcgtgcagtgcttaaaaaccgggagctccagccgggcgcagtggttcatgccagtaatcccagcactttcggaggccgaggtgggaggattgcttgaggccaggagttcaagaccagcctgggcaacacagcaagatcctgtctttgtaaaaaaactaaccaaacaggtgcggtgtgcaccgagcgcgcctggcctgatgccctggcctgtgagctggggactcctgggccctgtgagcccctaggcggcaggcccaggaatggctgggtaggacagggaacacctttgccccacgtctggctgtgacctcggtgaaagccgacaggagagagatgggaccctcctcctcagtagtggctgccagtccctcgttgcaggacagggtcatcataaccataaataacccttcacgtgtcacctgcagcttccactctttatttccaaagaatcagtgtcacacatgcagatcacaaagcgggtctccctgtgctgcttccttctgtgttttctagtctctcccccaggggctgcccagggccctcaggaactgagtgtgggcaagacactgctgggccagagggcacgacgcccacgtgggcccgtattgcccaggccatttggcagtgc

SEQ ID NO: 289783 - DNA, 529 bp, Homo sapiens
caggacataaggtttccagacaggacggggcaggtggtgatgcagctgtagctcgtgagtctgagcgggaaacagcccccgcgcagtcggtgtcgctgtgaacggaaaagggccttccttacacactcggaaacggggtctctgggggatccagtgacgtgcccaaccacagagaccaccaggtgagactggctgatggtgtctggggctgcaggtgacttagttgggggacctgctcttggcctccagactgggcctgatgcgtgggcgctgcctgtgtgcagcgcaagggctcagctgcctctgtctgttcccagacccctcctcctgtagagagtggtgctgccctctcgggatgtacctgcaggtggagacccgcaccagctcccgcctccatctgaagagggctccaggcatccggtcctggtccctgctggttggaggtaaggctctccacgtccctccccagaaccccagaaccggaagcctgactttcaaaaaggatgaaaatgaaacaaaatattttctc

SEQ ID NO: 289784 - DNA, 483 bp, Homo sapiens
ccagactcagcctcctcagacaaaaaatcccactctgttcccaggccggagagcctcctgggctggaattgctcaagcctcagctcacagatgagtcactgtattcatttgctccacagaagaaagaatcttcaggcctctgctcttgtgagagtaatttctcttaacaccgacagtgcagcctactccatgtgctactttctctcgcaactttgagcaagaatgttagatcttttgctgggggccttcggaagccgtgagggagcatatcctgacacccacatagaagacctggtacctatgtttccacatcacaaagcaggccaacaagcacacaaggccgcagaccaaattaagaatcatctggatgagtaagaacagtttgaaagtgccagtgacgctggtacagtccgtcacatcccggtaaacaaaggtcctgctgagcggctccgaggagggcagtttgcactggcaagagtcgag

SEQ ID NO: 289785 - DNA, 523 bp, Homo sapiens
cggggaagcaccgcccacagctgcccgggactccagtgatcgccgcggctcgctcgcgccccggaaactgccccttctcgggggtcatgatgggcagcaagatggcgtctgctagtagggtcgttcaggtagtcaaaccacacactccattaataaggtttcctgacagaagagacaatcctaaacccaatgtatcagaagctttgagatcagcagggctaccatctcactcttctgtaatttcacaacattctaaaggaagtaaatcaccagatttgctgatgtatcagggtccaccagacactgcagaaataataaaaacattacctcagaaatacagaaggaaacttgtgtctcaagaagaaatggaatttatccaacgtggaggtcctgaataaccatggtggctgctgtttgtcatcagacaatagaattgtctttacaataaaggacttccaaaatgacagatgagaaactgtatattaaacacctttaataaatattatgaaaaaaatgaaatata

SEQ ID NO: 289786 - DNA, 1334 bp, Homo sapiens
cggggaagcaccgcccacagctgcccgggactccagtgatcgccgcggctcgctcgcgccccggaaactgccccttctcgggggtcatgatgggcagcaagatggcgtctgctagtagggtcgttcaggtagtcaaaccacacactccattaataaggtttcctgacagaagagacaatcctaaacccaatgtatcagaagctttgagatcagcagggctaccatctcactcttctgtaatttcacaacattctaaaggaagtaaatcaccagatttgctgatgtatcagggtccaccagacactgcagaaataataaaaacattacctcagaaatacagaaggaaacttgtgtctcaagaagaaatggaatttatccaacgtggaggtcctgaataaccatggtggctgctgtttgtcatcagacaatagaattgtctttacaataaaggacttccaaaatgacagatgagaaactgtatattaaacacctttaataaatattatgaaaaaaatgaaatatagaaaatttagatggacacttgtatttcctaatttatgtatcttggtcagcttctccacaagcttacctaattgtttatatactttatacttattaaagtatacatttttaaatgttagcctattaatttactcttgattatcaaacattaccagtgttgaactattaaaagcacacaatgtgtagtaaactatcataggattcccataatttcactttactttctgtttaggcatggaaaaatttatcagtcagaattgctgttttagggacatgattttcctgaaattgggtgaggatcagtgaaataattactctattacttgttcttaattctctgttctctaatgttttttcattcacaagtttactggagtataactggcttagtaagtatatcctactctgaatgataaaaatatagtcaagctaaaataggtgactatactattaagatagagatcatacaaaagattccaaagaaagtcaaaaagtgtaaaatggaaaataagagatcaaaatgaatatagcataggaataaagatttcactagaaattgcaatttattatgttttggaggttgtaaggaagtcttgttttttggtttattttactgttttgtgatcttgtatgcaaatcctgataaccattaaccttctcaaacttaatgtctgagagcctcataaaatcaacatatttacttattaagcagtttatgaaactttaatggggcccctcctgtgccaagggtacgtatattgtgaagtaaagcctcacaaagctaaataaattctcttccatacctttaatga

SEQ ID NO: 289787 - DNA, 600 bp, Homo sapiens
  misc_feature (536)..(536): n is a, c, g, or t
  misc_feature (538)..(538): n is a, c, g, or t
cggggaagcaccgcccacagctgcccgggactccagtgatcgccgcggctcgctcgcgccccggaaactgccccttctcgggggtcatgatgggcagcaagatggcgtctgctagtagggtcgttcaggtagtcaaaccacacactccattaataaggtttcctgacagaagagacaatcctaaacccaatgtatcagaagctttgagatcagcagggctaccatctcactcttctgtaatttcacaacattctaaaggaagtaaatcaccagatttgctgatgtatcagggtccaccagacactgcagaaataataaaaacattacctcagaaatacagaaggaaacttgtgtctcaagaagaaatggaatttatccaacgtggaggtcctgaataaccatggtggctgctgtttgtcatcagacaatagaattgtctttacaataaaggacttccaaaatgacagatgagaaactgtatattaaacacctttaataaatattatgaaaaaaatgaaatataaaaaaaaaaaaananaaaagaaaaaaaaaaagaaaaacaaaaaaagaaaaaaaaaaaaaaaaaagggggggggggcc

SEQ ID NO: 289788 - DNA, 565 bp, Homo sapiens
cggggaagcaccgcccacagctgcccgggactccagtgatcgccgcggctcgctcgcgccccggaaactgccccttctcgggggtcatgatgggcagcaagatggcgtctgctagtagggtcgttcaggtagtcaaaccacacactccattaataaggtttcctgacagaagagacaatcctaaacccaatgtatcagaagctttgagatcagcagggctaccatctcactcttctgtaatttcacaacattctaaaggaagtaaatcaccagatttgctgatgtatcagggtccaccagacactgcagaaataataaaaacattacctcagaaatacagaaggaaacttgtgtctcaagaagaaatggaatttatccaacgtggaggtcctgaataaccatggtggctgctgtttgtcatcagacaatagaattgtctttacaataaaggacttccaaaatgacagatgagaaactgtatattaaacacctttaataaatattatgaaaaaaatgaaatataaacaaaaaaagaaaaaaaaaaaaaaaaaagggggggggggcc

SEQ ID NO: 289789 - DNA, 673 bp, Homo sapiens
cgggcccattaggtataggtgaacatggtcagtagtctgtttccttaggatcatccatggtcaatgacctagtgctttggatttcctcacctaattgaaaaagacgcccaggcggcgaatccgatgctgttcgtgaagcaatatccaggatggagttcgtgagggtcattgactaggatctagtcaagcaggatgtccaagcgagctcgagtatcaagacttacgccccgtgtgtgaggatgggactttgagcctgttggaccgggcagtgaggtgggtccggcgccgagggttcgagccttgcggcaaccgtgcagcatcttggcaggtaggtcctgtacctactgccgggatcccccgctcctccgccaggaccttgttagtcttaggcgtgtgcgggtgaggcgaccctggcggtagcctggccaatcgccgtctaggattggctgtggtgcccccgatcagccaatcggaaggaaggcggtagcggggcgtggaaggaagcgaaccctggatctgacccactgtcccttcaaggtctcgggaatggtcgggcaactggccccgcgtactgcgtcctcgccggagcgggttctccccaacctctccaagcgtctggctacaggccagatgagggaaatagaaaagtaaacttaagtttaattagtatgtg

SEQ ID NO: 289790 - DNA, 899 bp, Homo sapiens
cggggaagcaccgcccacagctgcccgggactccagtgatcgccgcggctcgctcgcgccccggaaactgccccttctcgggggtcatgatgggcagcaagatggcgtctgctagtagggtcgttcaggtagtcaaaccacacactccattaataaggtttcctgacagaagagacaatcctaaacccaatgtatcagaagctttgagatcagcagggctaccatctcactcttctgtaatttcacaacattctaaaggaagtaaatcaccagatttgctgatgtatcagggtccaccagacactgcagaaataataaaaacattacctcagaaatacagaaggaaacttgtgtctcaagaagaaatggaatttatccaacgtggaggtcctgaataaccatggtggctgctgtttgtcatcagacaatagaattgtctttacaataaaggacttccaaaatgacagatgagaaactgtatattaaacacctttaataaatattatgaaaaaaatgaaatatagaaaatttagatggacacttgtatttcctaatttatgtatcttggtcagcttctccacaagcttacctaattgtttatatactttatacttattaaagtatacatttttaaatgttagcctattaatttactcttgattatcaaacattaccagtgttgaactattaaaagcacacaatgtgtagtaaactatcataggattcccataatttcactttactttctgtttaggcatggaaaaatttatcagtcagaattgctgttttagggacatgattttcctgaaattgggtgaggatcagtgaaataattactctattacttgttcttaattctctgttctctaatgttagagatacggtccgagctcgatacc

SEQ ID NO: 289791 - DNA, 1902 bp, Homo sapiens
aagatggagtctcactctgtagcccaggctggagtgcagtggcacgatctcagctcactgcaacctctgcctccggagtcccggttggttcaagcagttctcctgcctcagcctcccaagtagctaggattacaggcacgcatcaccatgcccagctaatttttgtatttttagtagagatggggtttcaccatgttggccaggctggtcttgaactcctgacctcgtgatccgtccgcctcggcctcccaaagtgttgggattataggcgtgagccatcacgctgggccttgtttttctttttgtttttgttttaatttttggtagagacggggtttcaccatgttgcccaggctggtctcaaactcctgcactcacgcaatctgcctgtctgggcctcccccaatctataagtcatgcaacataaactctacatcatctcctccattgggttgctttgaagtgaagtacaccttcgatagtacaatgaagtcttgtgatatataaagtacaaagttgtgtttaccgggtagaccaagttaataattcatagaccagctttcctggttggggaagagtataatttaaagttgctgtaaaatagtaattttaacaaacgtatctacttatgaggtttagtagatcatttcttttagttaatgagattgtttttcatgcatattacttttcatttaggtagtcaaaccacacactccattaataaggtttcctgacagaagagacaatcctaaacccaatgtatcagaagctttgagatcagcagggctaccatctcactcttctgtaatttcacaacattctaaaggaagtaaatcaccagatttgctgatgtatcagggtccaccagacactgcagaaataataaaaacattacctcagaaatacagaaggaaacttgtgtctcaagaagaaatggaatttatccaacgtggaggtcctgaataaccatggtggctgctgtttgtcatcagacaatagaattgtctttacaataaaggacttccaaaatgacagatgagaaactgtatattaaacacctttaataaatattatgaaaaaaatgaaatatagaaaatttagatggacacttgtatttcctaatttatgtatcttggtcagcttctccacaagcttacctaattgtttatatactttatacttattaaagtatacatttttaaatgttagcctattaatttactcttgattatcaaacattaccagtgttgaactattaaaagcacacaatgtgtagtaaactatcataggattcccataatttcactttactttctgtttaggcatggaaaaatttatcagtcagaattgctgttttagggacatgattttcctgaaattgggtgaggatcagtgaaataattactctattacttgttcttaattctctgttctctaatgttttttcattcacaagtttactggagtataactggcttagtaagtatatcctactctgaatgataaaaatatagtcaagctaaaataggtgactatactattaagatagagatcatacaaaagattccaaagaaagtcaaaaagtgtaaaatggaaaataagagatcaaaatgaatatagcataggaataaagatttcactagaaattgcaatttattatgttttggaggttgtaaggaagtcttgttttttggtttattttactgttttgtgatcttgtatgcaaatcctgataaccattaaccttctcaaacttaatgtctgagagcctcataaaatcaacatatttacttattaagcagtttatgaaactttaatggggcccctcctgtgccaagggtacgtatattgtgaagtaaagcctcacaaagctaaataaattctcttccatacctttaatga

SEQ ID NO: 289792 - DNA, 1574 bp, Homo sapiens
cggggaagcaccgcccacagctgcccgggactccagtgatcgccgcggctcgctcgcgccccggaaactgccccttctcgggggtcatgatgggcagcaagatggcgtctgctagtagggtcgttcaggtaaagcaatttgtcgcgtttccgcatcttgggcggtagggacggtgctgactatggcgacggcgtcggggagtaaaggcggtggcagaggcagagcggtgaccgcgcctctgcggagggccagtgacggcgcccgcgggtgtgtgtgaggatgggactttgagcctgttggaccgggcagtgaggtgggtccggcgccgagggttcgagccttgcggcaaccgtgcagcatcttggcaggtagtcaaaccacacactccattaataaggtttcctgacagaagagacaatcctaaacccaatgtatcagaagctttgagatcagcagggctaccatctcactcttctgtaatttcacaacattctaaaggaagtaaatcaccagatttgctgatgtatcagggtccaccagacactgcagaaataataaaaacattacctcagaaatacagaaggaaacttgtgtctcaagaagaaatggaatttatccaacgtggaggtcctgaataaccatggtggctgctgtttgtcatcagacaatagaattgtctttacaataaaggacttccaaaatgacagatgagaaactgtatattaaacacctttaataaatattatgaaaaaaatgaaatatagaaaatttagatggacacttgtatttcctaatttatgtatcttggtcagcttctccacaagcttacctaattgtttatatactttatacttattaaagtatacatttttaaatgttagcctattaatttactcttgattatcaaacattaccagtgttgaactattaaaagcacacaatgtgtagtaaactatcataggattcccataatttcactttactttctgtttaggcatggaaaaatttatcagtcagaattgctgttttagggacatgattttcctgaaattgggtgaggatcagtgaaataattactctattacttgttcttaattctctgttctctaatgttttttcattcacaagtttactggagtataactggcttagtaagtatatcctactctgaatgataaaaatatagtcaagctaaaataggtgactatactattaagatagagatcatacaaaagattccaaagaaagtcaaaaagtgtaaaatggaaaataagagatcaaaatgaatatagcataggaataaagatttcactagaaattgcaatttattatgttttggaggttgtaaggaagtcttgttttttggtttattttactgttttgtgatcttgtatgcaaatcctgataaccattaaccttctcaaacttaatgtctgagagcctcataaaatcaacatatttacttattaagcagtttatgaaactttaatggggcccctcctgtgccaagggtacgtatattgtgaagtaaagcctcacaaagctaaataaattctcttccatacctttaatga

SEQ ID NO: 289793 - DNA, 763 bp, Homo sapiens
cggggaagcaccgcccacagctgcccgggactccagtgatcgccgcggctcgctcgcgccccggaaactgccccttctcgggggtcatgatgggcagcaagatggcgtctgctagtagggtcgttcaggtaaagcaatttgtcgcgtttccgcatcttgggcggtagggacggtgctgactatggcgacggcgtcggggagtaaaggcggtggcagaggcagagcggtgaccgcgcctctgcggagggccagtgacggcgcccgcgggtgtgtgtgaggatgggactttgagcctgttggaccgggcagtgaggtgggtccggcgccgagggttcgagccttgcggcaaccgtgcagcatcttggcaggtagtcaaaccacacactccattaataaggtttcctgacagaagagacaatcctaaacccaatgtatcagaagctttgagatcagcagggctaccatctcactcttctgtaatttcacaacattctaaaggaagtaaatcaccagatttgctgatgtatcagggtccaccagacactgcagaaataataaaaacattacctcagaaatacagaaggaaacttgtgtctcaagaagaaatggaatttatccaacgtggaggtcctgaataaccatggtggctgctgtttgtcatcagacaatagaattgtctttacaataaaggacttccaaaatgacagatgagaaactgtatattaaacacctttaataaatattatgaaaaaaatgaaatata

SEQ ID NO: 289794 - DNA, 589 bp, Homo sapiens
  misc_feature (1)..(1): n is a, c, g, or t
  misc_feature (10)..(10): n is a, c, g, or t
  misc_feature (42)..(42): n is a, c, g, or t
  misc_feature (525)..(525): n is a, c, g, or t
  misc_feature (527)..(527): n is a, c, g, or t
ngttcgggtnagacaacccactcttggccttaataggtttcnctgaaaaaaagacatcctaaacccatgtatcagaagctttgagatcagcagggctaccatctcactcttctgtaatttcacaacattctaaaggaagtaaatcaccagatttgctgatgtatcagggtccaccagacactgcagaaataataaaaacattacctcagaaatacagaaggaaacttgtgtctcaagaagaaatggaatttatccaacgtggaggtcctgaataaccatggtggctgctgtttgtcatcagacaatagaattgtctttacaataaaggacttccaaaatgacagatgagaaactgtatattaaacacctttaataaatattatgaaaaaaatgaaatatagaaaatttagatggacacttgtatttcctaatttatgtatcttggtcagcttctccacaagcttacctaattgtttatatactttatacttattaaagtatacatttttaaaaaaaaaaaaaaananaaaagaaaaaaaaaaagaaaaacaaaaaaagaaaaaaaaaaaaaaaaaagggggggggggcc

SEQ ID NO: 289795 - DNA, 785 bp, Homo sapiens
cggggaagcaccgcccacagctgcccgggactccagtgatcgccgcggctcgctcgcgccccggaaactgccccttctcgggggtcatgatgggcagcaagatggcgtctgctagtagggtcgttcaggtagtcaaaccacacactccattaataaggtttcctgacagaagagacaatcctaaacccaatgtatcagaagctttgagatcagcagggctaccatctcactcttctgtaatttcacaacattctaaaggaagtaaatcaccagatttgctgatgtatcagggtccaccagacactgcagaaataataaaaacattacctcagaaatacagaaggaaacttgtgtctcaagaagaaatggaatttatccaacggtgtgtgtgcagggggggtcctgaataaccatggtggctggcctgtgggttttgggggggttttccacaaatttttctcccaaaaaggggggggaaaaacacccaagaacaacgagaccgtgttctcttttcacgacgacgggggggggcacaacaccacccaccaatcacaaccctccttttttttctcgccgcgggggggggcggggggcaggagccacacttcttcctccccgccaccacgacgaattgttttatataagccaatcaactacctgacgccatgccgccaacgtaaacaacacaacaacgccccccccctcacatacacctaacgacaacgcaccaaaccagcacccgccgccgttgcgccttcatactacacaacgacaaccagcccccg

SEQ ID NO: 289796 - DNA, 712 bp, Homo sapiens
  misc_feature (648)..(648): n is a, c, g, or t
  misc_feature (650)..(650): n is a, c, g, or t
cggggaagcaccgcccacagctgcccgggactccagtgatcgccgcggctcgctcgcgccccggaaactgccccttctcgggggtcatgatgggcagcaagatggcgtctgctagtagggtcgttcaggtagtcaaaccacacactccattaataaggtttcctgacagaagagacaatcctaaacccaatgtatcagaagctttgagatcagcagggctaccatctcactcttctgtaatttcacaacattctaaaggaagtaaatcaccagatttgctgatgtatcagggtccaccagacactgcagaaataataaaaacattacctcagaaatacagaaggaaacttgtgtctcaagaagaaatggaatttatccaacgtggaggtcctgaataaccatggtggctgctgtttgtcatcagacaatagaattgtctttacaataaaggacttccaaaatgacagatgagaaactgtatattaaacacctttaataaatattatgaaaaaaatgaaatatagaaaatttagatggacacttgtatttcctaatttatgtatcttggtcagcttctccacaagcttacctaattgtttatatactttatacttattaaagtatacatttttaaaaaaaaaaaaaaananaaaagaaaaaaaaaaagaaaaacaaaaaaagaaaaaaaaaaaaaaaaaagggggggggggcc

SEQ ID NO: 289797 - DNA, 789 bp, Homo sapiens
  misc_feature (34)..(34): n is a, c, g, or t
taggcgttgtgtgcttggtactataactcgtagngctgtgtacgtccgcattccggaaaactgcaagccgctctgttcctgggcctcggaagtgatgcctatggcgtcccctcaaaccctggtcctctatctgctggtcctggcagtcactgaagcctggggccaggaggcagtcatcccaggctgccacttgcaccccttcaatgtgacagtgcgaagtgaccgccaaggcacctgccagggctcccacgtggcacaggcctgtgtgggccactgtgagtccagcgccttcccttctcggtactctgtgctggtggccagtggttaccgacacaacatcacctccgtctctcagtgctgcaccatcagtggcctgaagaaggtcaaagtacagctgcagtgtgtggggagccggagggaggagctcgagatcttcacggccagggcctgccagtgtgacatgtgtcgcctctctcggtactagcccatcctctcccctccttcctcccctgggtcacagggcttgacattctggtgggggaaacctgtgttcaagattcaaaaactggaaggagctccagccctgatggttacttgctatggaatttttttaaataaggggagggttgttccagctttgatcctttgtaagattttgtgactgtcacctgagaagaggggagtttctgcttcttccctgcctctgcctggcccttctaaaccaatctttcatcattttacttccctctttgcccttacccctaaataaagcaagcagttcttgaattt

SEQ ID NO: 289798 - DNA, 2077 bp, Homo sapiens
aggtaagaggaaactccattggataaatggcgaggaaacgtatactccctcttaaggaacacggtgtcttccttcgtctccgggttcccgagaccccagagtcactgacctccgtccctcagctttcggggttcggcagcagaaggggcgggcccgggcctgggattggctggcgtcgtccgacccccttcgctgctctccattcgcaatcgcccgcgggcgcctgcgcgatgggtcggccgtggggagcggggcgggaagcgcttcagggcagcggatcccatgtcggccctgaggcgctcgggctacggccccagtgacggtccgtcctacggccgctactacgggcctgggggtggagatgtgccggtacacccacctccacccttatatcctcttcgccctgaacctccccagcctcccatttcctggcgggtgcgcgggggcggcccggcggagaccacctggctgggagaaggcggaggaggcgatggctactatccctcgggaggcgcctggccagagcctggtcgagccggaggaagccaccagagtttgaattcttatacaaatggagcgtatggtccaacataccccccaggccctggggcaaatactgcctcatactcaggggcttattatgcacctggttatactcagaccagttactccacagaagttccaagtacttaccgttcatctggcaacagcccaactccagtctctcgttggatctatccccagcaggactgtcagactgaagcaccccctcttagggggcaggttccaggatatccgccttcacagaaccctggaatgaccctgccccattatccttatggagatggtaatcgtagtgttccacaatcaggaccgactgtacgaccacaagaagatgcgtgggcttctcctggtgcttatggaatgggtggccgttatccctggccttcatcagcgccctcagcaccacccggcaatctctacatgactgaaagtacttcaccatggcctagcagtggctctccccagtcacccccttcacccccagtccagcagcccaaggattcttcatacccctatagccaatcagatcaaagcatgaaccggcacaactttccttgcagtgtccatcagtacgaatcctcggggacagtgaacaatgatgattcagatcttttggattcccaagtccagtatagtgctgagcctcagctgtatggtaatgccaccagtgaccatcccaacaatcaagatcaaagtagcagtcttcctgaagaatgtgtaccttcagatgaaagtactcctccgagtattaaaaaaatcatacatgtgctggagaaggtccagtatcttgaacaagaagtagaagaatttgtaggaaaaaagacagacaaagcatactggcttctggaagaaatgctaaccaaggaacttttggaactggattcagttgaaactgggggccaggactctgtacggcaggccagaaaagaggctgtttgtaagattcaggccatactggaaaaattagaaaaaaaaggattatgaaaggatttagaacaaagtggaagcctgttactaacttgaccaaagaacacttgatttggttaattaccctctttttgaaatgcctgttgatgacaagaagcaatacattccagctttcctttgattttatacttgaaaaactggcaaaggaatggaagaatattttagtcatgagttgttttcagttttcagacgaatgaatgtaataggaaactatggagttaccaatattgccaagtagactcactccttaaaaaatttatggatatctacaagctgcttcttaccagcaggagggaaacacacttcacacaacaggcttatcagaaacctaccagatgaaactggatataatctgagacaaacaggatgtgtttttttaaacatctggatatcttgtcacatttttgtacattgtgactgctttcaacatatacttcatgtgtaattatagcttagactttagccttcttggacttctgttttgttttgttatttgcagtttacaaatatagtattattctctaat

SEQ ID NO: 289799 - DNA, 2185 bp, Homo sapiens
aggtaagaggaaactccattggataaatggcgaggaaacgtatactccctcttaaggaacacggtgtcttccttcgtctccgggttcccgagaccccagagtcactgacctccgtccctcagctttcggggttcggcagcagaaggggcgggcccgggcctgggattggctggcgtcgtccgacccccttcgctgctctccattcgcaatcgcccgcgggcgcctgcgcgatgggtcggccgtggggagcggggcgggaagcgcttcagggcagcggatcccatgtcggccctgaggcgctcgggctacggccccagtgacggtccgtcctacggccgctactacgggcctgggggtggagatgtgccggtacacccacctccacccttatatcctcttcgccctgaacctccccagcctcccatttcctggcgggtgcgcgggggcggcccggcggagaccacctggctgggagaaggcggaggaggcgatggctactatccctcgggaggcgcctggccagagcctggtcgagccggaggaagccaccaggagcagccaccatatcctagctacaattctaactattggaattctactgcgagatctagggctccttacccaagtacatatcctgtaagaccagaattgcaaggccagagtttgaattcttatacaaatggagcgtatggtccaacataccccccaggccctggggcaaatactgcctcatactcaggggcttattatgcacctggttatactcagaccagttactccacagaagttccaagtacttaccgttcatctggcaacagcccaactccagtctctcgttggatctatccccagcaggactgtcagactgaagcaccccctcttagggggcaggttccaggatatccgccttcacagaaccctggaatgaccctgccccattatccttatggagatggtaatcgtagtgttccacaatcaggaccgactgtacgaccacaagaagatgcgtgggcttctcctggtgcttatggaatgggtggccgttatccctggccttcatcagcgccctcagcaccacccggcaatctctacatgactgaaagtacttcaccatggcctagcagtggctctccccagtcacccccttcacccccagtccagcagcccaaggattcttcatacccctatagccaatcagatcaaagcatgaaccggcacaactttccttgcagtgtccatcagtacgaatcctcggggacagtgaacaatgatgattcagatcttttggattcccaagtccagtatagtgctgagcctcagctgtatggtaatgccaccagtgaccatcccaacaatcaagatcaaagtagcagtcttcctgaagaatgtgtaccttcagatgaaagtactcctccgagtattaaaaaaatcatacatgtgctggagaaggtccagtatcttgaacaagaagtagaagaatttgtaggaaaaaagacagacaaagcatactggcttctggaagaaatgctaaccaaggaacttttggaactggattcagttgaaactgggggccaggactctgtacggcaggccagaaaagaggctgtttgtaagattcaggccatactggaaaaattagaaaaaaaaggattatgaaaggatttagaacaaagtggaagcctgttactaacttgaccaaagaacacttgatttggttaattaccctctttttgaaatgcctgttgatgacaagaagcaatacattccagctttcctttgattttatacttgaaaaactggcaaaggaatggaagaatattttagtcatgagttgttttcagttttcagacgaatgaatgtaataggaaactatggagttaccaatattgccaagtagactcactccttaaaaaatttatggatatctacaagctgcttcttaccagcaggagggaaacacacttcacacaacaggcttatcagaaacctaccagatgaaactggatataatctgagacaaacaggatgtgtttttttaaacatctggatatcttgtcacatttttgtacattgtgactgctttcaacatatacttcatgtgtaattatagcttagactttagccttcttggacttctgttttgttttgttatttgcagtttacaaatatagtattattctctaat

SEQ ID NO: 289800 - DNA, 3528 bp, Homo sapiens
cagttctgagaaactgtcccgcgtggacagggggtagatcccatcagttctcaaaggaggccaggatgtctcgcctcctgaactccacaggctggtagaagcggggcttgagggacagcaggttgggagcttgaggactaagtgggccagtcctgtcctaccacagtggggggaacagtccacagaaaacttgctcatgaccacactgggagccgactgttcttcccatcccaagtctctgacactgggggctttgggtgaaaccttaaggagatggtcagatgggtggtccagggtatacttttaacaactgagaagccattttttctgccccctgggcacatgtgcccagctctgcaaagacagtggccaagttgaagacaagtcttccatgtggggtggagatgggaggggtgggtgccaggctgcagcctgtgtcctcctgataggcccagccccctcggtggcctccgtgttcctgggggaaggaaggaaggagctggaggatacagtggtgcctatctcgggagcccagggaggcagggacacaggagtggcaggcttggggcgcccgcgtggaacagtgccaggtctacgtttacccactaccagatagactttttcatttcaagcataacttgagtctgcactggggagacactcgtggtgggggtggctgtgatgagggcacttgcgagtcccgacaacagacactggctcctgcacccacatcaccaccatgtcccaggggcagcctggaggggagtttgtggtcagagccccagccaggaaaggagagagttccagaatgttccaagagtctagccgcaggccccagacaccatgagctggagggtcgggatggggcagcctccctggtgcaatcggcacctgggcccccgggccctgtcagtgctgtcgtgaggtctgtctgccctgggtcagagcagcaggcagagccggcgcttcttctgccgttgcgccttcttcagagcgctgagagccaccttggcggcctcccggaagacgtcctccacattctcccgaaacttggcggaacattccaggtagagagcagctcggatctgttcgcaggcgctcaggccctgggtggggggaggagccagcattaggtgaggggcccctggaggtctcctagcaccacctggtgggtttgggactggctctgaggactctgcagggatggaggccttggtttgggcctgtctgtctcctccatcctggctgcccctcacagtgtgtgggtggaatggagggccagggcagtgcagcccgcaggttggaagaagccctgtccaggcccccaccctggcctctctccagctccgggcagggaggggctgaatcctgagacccggggttggttcccccaggtgtgtctcccaggcctgtgagaagagttggaggcctcaagacagaaaggacttccagccacctctctcccttctctgaaagtaccatttaggcaaattaatttgcccttttatttatttatttttgggatggagttttgctcttgttacccgggctggagtgcagtggcgcgatcttggttcatcgcgacctctgccacccgggttcgggcgattctcctgcctcggcctcccgagtggctgggattgcaggcatgcgccaccatgcccggctagtgttgtgtttttggtggagatggggtttctctcatgttggtcaggctggtctcggactcccggcctcaggtgattcgcccgcctcggcctcccaaagtgctgggattacaggcgtgggccactatgcccggccggatttgcccttattaatggttatttcttgtgaaagtttctttttgcctttgcattccttttattctgtttattcccccatgcctcacccaaagagttgcacggtcaattggcccgtgaaggggacgcctactttcaaacaaggcagacaggacacgacaggacggcggctcatagcacagactttggattgcagtggatgggaccagatcctggctccacttctcgctagctgtgtggccctgggcaagctgcttaacctctctgggcctcagtttctccccctgtaaactgggggatgtgaacagcgcctgcctccgagtcctaaggattgggagtagtcgtgtaaagtgctcaggtccacaggccatcaatactaatagttaaaaattattcttagaatcttgcttccctcagctccctgaaaggccactaaggcaccccagttgcagaggccaaaggtccgggaggcttcacagccacggctgtgccccagggtcttggccccggcccacctgcatgtaggtgatgggctccagctgggcggcccggagcttccgcagctgctccttgtccttcctcaggtctgtcttgcagccgatgagcaccatggggatcccgcggcagaaatgcgtgacctcagggaaccactgtggagggaggaggcgggatcaggggtgcggccgggcccagatgtggggccaccacccaggaggccggcctcaccttgatgaggacgttgtcgtagctggtgggattcatgacgtcatagcagatgagcacgaggtgggtgttctggtaggacaggggccgcagccggtcatagtcttcttgccctgaaagcacagagcagcgggggtcaggggacgtcccctccctgtctggactctgacgggtgaaggggaaggggccaggcaagtgaccctgccttagggcctcaatttcctcatctatacaatgggcagcaagccaggagtgctggcacaggcctgtggtcgcagctactcgggaggctgaggccggaggatcgcttgagcccaggaggtcaaggctacagtgagccgtgatcatgccactgcactccagcctgggtgacagagcgagaccctgtctcttaacaacaaaacccatgagcggcagccccccagtcctggatggtggtaaagaatcctcaagatcaaacccacgcagtgctgagagcttggcctgattctagggctggggctggagaaactgctagagatgatgccgatagccagtgtgatccccctgccctgatggtcaagggcagagtgcagactggaaccctcccctccccaaagattcagacctgtggggctgagtgggctcatagtgtccccaagtcctgagaggctggtgtctggcttcagcctccagcttctcaggttctgatgcagtcagctgagttccctgcctattcttgcaagcactaggaggagggtggtgggttgctgggaacagcaccgagcgccctccccacccagattcacagagcacactccccggggggatactttaatccggaggccgtgacgcctggctccgccccgagacgagctgaatccaaatacggatctaggcttgagcttggttgggtttgcttttttcttcttcttctttataaacaattctttgtaactttttgtattgacagtttcaaacttacagtaaaattgcaacacgaagtaaaaaaagctctctgact

SEQ ID NO: 289801 - DNA, 2391 bp, Homo sapiens
cagttctgagaaactgtcccgcgtggacagggggtagatcccatcagttctcaaaggaggccaggatgtctcgcctcctgaactccacaggctggtagaagcggggcttgagggacagcaggttgggagcttgaggactaagtgggccagtcctgtcctaccacagtggggggaacagtccacagaaaacttgctcatgaccacactgggagccgactgttcttcccatcccaagtctctgacactgggggctttgggtgaaaccttaaggagatggtcagatgggtggtccagggtatacttttaacaactgagaagccattttttctgccccctgggcacatgtgcccagctctgcaaagacagtggccaagttgaagacaagtcttccatgtggggtggagatgggaggggtgggtgccaggctgcagcctgtgtcctcctgataggcccagccccctcggtggcctccgtgttcctgggggaaggaaggaaggagctggaggatacagtggtgcctatctcgggagcccagggaggcagggacacaggagtggcaggcttggggcgcccgcgtggaacagtgccaggtctacgtttacccactaccagatagactttttcatttcaagcataacttgagtctgcactggggagacactcgtggtgggggtggctgtgatgagggcacttgcgagtcccgacaacagacactggctcctgcacccacatcaccaccatgtcccaggggcagcctggaggggagtttgtggtcagagccccagccaggaaaggagagagttccagaatgttccaagagtctagccgcaggccccagacaccatgagctggagggtcgggatggggcagcctccctggtgcaatcggcacctgggcccccgggccctgtcagtgctgtcgtgaggtctgtctgccctgggtcagagcagcaggcagagccggcgcttcttctgccgttgcgccttcttcagagcgctgagagccaccttggcggcctcccggaagacgtcctccacattctcccgaaacttggcggaacattccaggtagagagcagctcggatctgttcgcaggcgctcaggccctgggtggggggaggagccagcattaggtgaggggcccctggaggtctcctagcaccacctggtgggtttgggactggctctgaggactctgcagggatggaggccttggtttgggcctgtctgtctcctccatcctggctgcccctcacagtgtgtgggtggaatggagggccagggcagtgcagcccgcaggttggaagaagccctgtccaggcccccaccctggcctctctccagctccgggcagggaggggctgaatcctgagacccggggttggttcccccaggtgtgtctcccaggcctgtgagaagagttggaggcctcaagacagaaaggacttccagccacctctctcccttctctgaaagtaccatttaggcaaattaatttgcccttttatttatttatttttgggatggagttttgctcttgttacccgggctggagtgcagtggcgcgatcttggttcatcgcgacctctgccacccgggttcgggcgattctcctgcctcggcctcccgagtggctgggattgcaggcatgcgccaccatgcccggctagtgttgtgtttttggtggagatggggtttctctcatgttggtcaggctggtctcggactcccggcctcaggtgattcgcccgcctcggcctcccaaagtgctgggattacaggcgtgggccactatgcccggccggatttgcccttattaatggttatttcttgtgaaagtttctttttgcctttgcattccttttattctgtttattcccccatgcctcacccaaagagttgcacggtcaattggcccgtgaaggggacgcctactttcaaacaaggcagacaggacacgacaggacggcggctcatagcacagactttggattgcagtggatgggaccagatcctggctccacttctcgctagctgtgtggccctgggcaagctgcttaacctctctgggcctcagtttctccccctgtaaactgggggatgtgaacagcgcctgcctccgagtcctaaggattgggagtagtcgtgtaaagtgctcaggtccacaggccatcaatactaatagttaaaaattattcttagaatcttgcttccctcacctgaccaacatggagaaaccctgtctctactaaaaatacaaaattatccgggcgtggtggcacatgcctgtaatcccagctactcggaggctgaggcaggagaatcgcttgaaccctggaggcggaggttgcggtgagcccagatcacaccattgcctgggcaacaagagcg

SEQ ID NO: 289802 - DNA, 916 bp, Homo sapiens
ccccctaactgtggccctacaaatccctaggccagacctcacagcagtgcccacaggcatgccttgtttagccctcctcaaggaattttaaaatttttaattactttttttttttttgagacagggtctgttgcctaggcgggagtgcagtggcatcataggtcactgtagcctccgcctccagggctcaagggatcctcccacctcagcctctggagtagctgggaccacaatcacacaccaccatgccctgctccttttttttttttttttttgagatgggaacagagcgagaccctgtctcttaacaacaaaacccatgagcggcagccccccagtcctggatggtggtaaagaatcctcaagatcaaacccacgcagtgctgagagcttggcctgattctagggctggggctggagaaactgctagagatgatgccgatagccagtgtgatccccctgccctgatggtcaagggcagagtgcagactggaaccctcccctccccaaagattcagacctgtggggctgagtgggctcatagtgtccccaagtcctgagaggctggtgtctggcttcagcctccagcttctcaggttctgatgcagtcagctgagttccctgcctattcttgcaagcactaggaggagggtggtgggttgctgggaacagcaccgagcgccctccccacccagattcacagagcacactccccggggggatactttaatccggaggccgtgacgcctggctccgccccgagacgagctgaatccaaatacggatctaggcttgagcttggttgggtttgcttttttcttcttcttctttataaacaattctttgtaactttttgtattgacagtttcaaacttacagtaaaattgcaacacgaagtaaaaaaagctctctgact

SEQ ID NO: 289803 - DNA, 1252 bp, Homo sapiens
tgatggcgagaaacgctgcaggacccggctctggctcctcctcaaccttccctcgctgacgctaagatagcagcgtctccgaagagacagcagcacgagcccatttactgaattcaaccctaccccgcagaaccgcctcccgttatcgtttagacagtggctgactcaccctctctcactcccgcgtcctttctccgcgtctgctcgccttcacaggacccgctggcttggagccgcagaagccgctactgcagcgtgggcgacaatgctaggcgcccaggagaactaccgctcccaggttgcctttcgcgccccgagggctgctgggactctcggactcccgggccgagaccgagggaaagaatccgctttgcatgtcgggagtagtagtttgtgtaatatcgcgatccttctctggtgttccttgttttagctgacgacactcgagagcgccaattttcctagattcgattttgtggtttggaactgtggttttggaatccagagtagtcgcctcgttctagtatccaattgctccagcaccaactggtgaaaagaccatcattcttctactcagttgcatttgaagctttgtcaaaaaccagacacaattggagacacaggttcttctatcaaggccttgactggaatggcatattttcagatatgaccacattgctttgaggaaatgaggctgatgttgcagagctgataaaacccccacagaaaggccagcctacctctggtgttggccagattgagaaataaagggaaagagtacgaaagagagaaattttaaagctgggtgtccgggggagacatcatatgtcagcaggttccgtgatgcccctcaagccacaaaaccagcaagtttttattagtgattttcaaaggggagggagtgtatgggtcacagagatcacatgcttcacaaggcaataaaatatcacaaggcaaatgggggcagagcgagatcacaggaccagggcaaaattaaaattgctaatgaagttttgagcacgcattgtcattgataacatcttaccaggagacagggtttgagagcagaaaaccggtctgactaaaatttactaggcaggaatttcctcatcctaataggcctgggagtgctacgggagaccggggcttatttcatcccttatctgcaaccgtctaagacagacactcccagagtggccattttagagacctacccctgggaatgcattctctttctcagggctgttccttg

SEQ ID NO: 289804 - DNA, 782 bp, Homo sapiens
tgatggcgagaaacgctgcaggacccggctctggctcctcctcaaccttccctcgctgacgctaagatagcagcgtctccgaagagacagcagcacgagcccatttactgaattcaaccctaccccgcagaaccgcctcccgttatcgtttagacagtggctgactcaccctctctcactcccgcgtcctttctccgcgtctgctcgccttcacaggacccgctggcttggagccgcagaagccgctactgcagcgtgggcgacaatgctaggcgcccaggagaactaccgctcccaggttgcctttcgcgccccgagggctgctgggactctcggactcccgggccgagaccgagggaaagaatccgctttgcatgtcgggagtagtagtttgtgtaatatcgcgatccttctctggtgttccttgttttagctgacgacactcgagagcgccaattttcctagattcgattttgtggtttggaactgtggttttggaatccagagtagtcgcctcgttctattgagatggggtttcgccacgttggccaggctggtctcaaaatcctgacctcaggtatccaattgctccagcaccaactggtgaaaagaccatcattcttctactcagttgcatttgaagctttgtcaaaaaccagttgagtatattggtgtggatgtgtttctattctgtggatctctcttccgttccattgatctatgtgtctgttcctttgccagtactacactgggttgactaccatagcaatgaaataaacctt

SEQ ID NO: 289805 - DNA, 877 bp, Homo sapiens
gcgcatgcgtagaacgcgagcgctcggcaaggctcggctcggaagagtccaagcgtgaggggagagggctgtggattcagatactgtttttctcccgaaataggaaattggcttatttttttctcctcggcagcatcttaatttaaaatatgacacttgacctacggccctgcacggagcggttaagagggtcaccacagtttcttaaacaattaggtctacatcctaactggcaattcgttgatgtatatggaatggatcctgaactccttagcatggtaccaagaccagtctgtgcagtcttacttctctttcctattacagaaaagtatgaagtattcagaacagaagaggaagaaaaaataaaatctcagggacaagatgttacatcatcagtatatttcatgaagcaaacaatcagcaatgcctgtggaacaattggactgattcatgctattgcaaacaataaagacaagatgcactttgaatctggatcaaccttgaaaaaattcctggaggaatctgtgtcaatgagccctgaagaacgagccagatacctggagaactatgatgccatccgagttactcatgagaccagtgcccatgaaggtcagactgaggcaccaagtatagatgagaaagtagatcttcattttattgcattagttcatgtagatgggcatctctatgaattagatgggcggaagccatttccaattaaccatggtgaaactagtgatgaaactttattagaggtaacagtaacacttgttggcccatcttcatcaatattttgtcatctttaaaacatctctaaaggtcacttgcataacattttctttgtatttggatacttctttatccttgttctctctag

SEQ ID NO: 289806 - DNA, 344 bp, Homo sapiens
tagattgagaggaatatccgacagattagggggaaaaaggggctagctgcagagactctcttattttccccgctcatgggcggaagccatttccaattaaccatggtgaaactagtgatgaaactttattagaggatgccatagaagtttgcaagaagtttatggagcgcgaccctgatgaactaagatttaatgcgattgctctttctgcagcatagcttgtcaataatggaaacaccaaaaactgtattatttgcaactaaattttctctgccatacactaactcaaaaattttgatattttcattaacttgatgattaaactttatgtgagttaaactttg

SEQ ID NO: 289807 - DNA, 298 bp, Homo sapiens
agcattcaattgtttgtctgttttccacaatgggcggaagccatttccaattaaccatggtgaaactagtgatgaaactttattagaggatgccatagaagtttgcaagaagtttatggagcgcgaccctgatgaactaagatttaatgcgattgctctttctgcagcatagcttgtcaataatggaaacaccaaaaactgtattatttgcaactaaattttctctgccatacactaactcaaaaattttgatattttcattaacttgatgattaaactttatgtgagttaaactttg

SEQ ID NO: 289808 - DNA, 1355 bp, Homo sapiens
gcgcatgcgtagaacgcgagcgctcggcaaggctcggctcggaagagtccaagcgtgaggggagagggctgtggattcagatactgtttttctcccgaaataggaaattggcttatttttttctcctcggcagcatcttaatttaaaatatgacacttgacctacggccctgcacggagcggttaagagggtcaccaggcccgtcaaactctttttggtgtttaggcgctcctcctccgggcggtgtgttgggagggcccaggtcaaggcgcgcgtgggcggaagcggcggcggtggcgaaggcggcggctgtcagagctggagggccgggcaccgcggccatggagggtcaacgctggctgccgctggaggccaatcccgaggtcaccaaccagtttcttaaacaattaggtctacatcctaactggcaattcgttgatgtatatggaatggatcctgaactccttagcatggtaccaagaccagtctgtgcagtcttacttctctttcctattacagaaaagtatgaagtattcagaacagaagaggaagaaaaaataaaatctcagggacaagatgttacatcatcagtatatttcatgaagcaaacaatcagcaatgcctgtggaacaattggactgattcatgctattgcaaacaataaagacaagatgcactttgaatctggatcaaccttgaaaaaattcctggaggaatctgtgtcaatgagccctgaagaacgagccagatacctggagaactatgatgccatccgagttactcatgagaccagtgcccatgaaggtcagactgaggcaccaagtatagatgagaaagtagatcttcattttattgcattagttcatgtagatgggcatctctatgaattagatgggcggaagccatttccaattaaccatggtgaaactagtgatgaaactttattagaggatgccatagaagtttgcaagaagtttatggagcgcgaccctgatgaactaagatttaatgcgattgctctttctgcagcatagcttgtcaataatggaaacaccaaaaactgtattatttgcaactaaattttctctgccatacactaactcaaaaattttgatattttcattaacttgatgattaaactttatgtgagttaaactttgccttaacctgtgttttatgttatttttgctccaggttaaaggtgcaatgctttcctcctcttttcttgtgaaggatttatcttgtttgaaaactagcaatagctttcttattctttttagattttacaggaaattttgtattgggatactaggcacaatttccatctgcataacatgaatatatattatctatgt

SEQ ID NO: 289809 - DNA, 2039 bp, Homo sapiens
tggtctcgaactcctggcctcaagcagtccctccacctcggcctcccaaagtgctgggattacaaacatgagccaccgtgcctggccctgatttacaaattaataaaatatcttatgattgactattccttactattccctccctaaaataaataaatatatacctgccagtaccctgtgtatcttttattgggaatttggaaccaggctgaagatgaaaggagaaagcaaaggtttaaaggtagacattagaccatactgtagctatttcatcagtgtaataaaggccacataaactaggctatatatataatataggttatatttaattcagatgatagtgattttaccacttcatataactgttctgaaatggtttttaaaatttattgcttttggaatcaatttttcttttgaaatcttttgaccttttaataacattattaaatagattgtaagttctttgaaattaggcgtataatctacaaattatttggttagaacaatgccttatgtagaatttgtgcctgataaattaattggtttgattatgttgttatgcattccaatatactttgagaattttaaattgtttttttctttaaaaaaaaactggagacttcataaaacatctttattatacataattttttagggagtgtatatatatatacacaattttttaaacaagaatttgatcatactgtaatactgttttataacttgcttttttcacttatcagaaacgtattacataccagtaagtatatatttgatattatttaatggctgcatagctttccattatgtagtattgtatttcaccaataaattattgttagaaatttaatagtttttcttctttttcactattttaataaatactgcaaggtacatcattgtagctaaatctttgtaaatatccttaattatatataattatgtacaattatatgtaaatatataaactcctagaagagaagttgctggataaaatagtttgcatgtttttaaggcttggatatttatttattgccaaattgctatttataaagattgtactttcacctgtaatttactattgtgcccatttctctggatgtttgcaaatagtgggtactataagagtggtttttttttagttcaggaaactaaattctgtagcttctgataaatgcatgagttgtgctccacatttctcaattgctgactgaaactgcatgattaaacataaatacagccagagctgcagaggagcatggaacctggagaaacagatgagataagcttctttagtctctatctgtgaaatgcttactttattctagtctcaattgaataaagtgttaagtgttagttctaacaactgaataagttaaatggcccctacttagagcctggaaattacaaataatcagatattcaatttcctaagttttcagagatttacgggttacacagtacagcaattcatttgattacccagatatcattcttaaatatctagtactaagcttttcttaaatttcccttcaatttgttgtttctttagaagactttaggtgttaaaatttagctttgttgtcttcatttaaaaagttgagtataggcattttttccaatgaatacctttattcttattacaggccatccgagttactcatgagaccagtgcccatgaaggtcagactgaggcaccaagtatagatgagaaagtagatcttcattttattgcattagttcatgtagatgggcatctctatgaattagatgggcggaagccatttccaattaaccatggtgaaactagtgatgaaactttattagaggatgccatagaagtttgcaagaagtttatggagcgcgaccctgatgaactaagatttaatgcgattgctctttctgcagcatagcttgtcaataatggaaacaccaaaaactgtattatttgcaactaaattttctctgccatacactaactcaaaaattttgatattttcattaacttgatgattaaactttatgtgagttaaactttg

SEQ ID NO: 289810 - DNA, 1101 bp, Homo sapiens
gcgcatgcgtagaacgcgagcgctcggcaaggctcggctcggaagagtccaagcgtgaggggagagggctgtggattcagatactgtttttctcccgaaataggaaattggcttatttttttctcctcggcagcatcttaatttaaaatatgacacttgacctacggccctgcacggagcggttaagagggtcaccaggcccgtcaaactctttttggtgtttaggcgctcctcctccgggcggtgtgttgggagggcccaggtcaaggcgcgcgtgggcggaagcggcggcggtggcgaaggcggcggctgtcagagctggagggccgggcaccgcggccatggagggtcaacgctggctgccgctggaggccaatcccgaggtcaccaaccagtttcttaaacaattaggtctacatcctaactggcaattcgttgatgtatatggaatggatcctgaactccttagcatggtaccaagaccagtctgtgcagtcttacttctctttcctattacagaaaagtatgaagtattcagaacagaagaggaagaaaaaataaaatctcagggacaagatgttacatcatcagtatatttcatgaagcaaacaatcagcaatgcctgtggaacaattggactgattcatgctattgcaaacaataaagacaagatgcactttgaatctggatcaaccttgaaaaaattcctggaggaatctgtgtcaatgagccctgaagaacgagccagatacctggagaactatgatgccatccgagttactcatgagaccagtgcccatgaaggtcagactgaggcaccaagtatagatgagaaagtagatcttcattttattgcattagttcatgtagatgggcatctctatgaattaggatgccatagaagtttgcaagaagtttatggagcgcgaccctgatgaactaagatttaatgcgattgctctttctgcagcatagcttgtcaataatggaaacaccaaaaactgtattatttgcaactaaattttctctgccatacactaactcaaaaattttgatattttcattaacttgatgattaaactttatgtgagttaaactttg

SEQ ID NO: 289811 - DNA, 930 bp, Homo sapiens
gcgcatgcgtagaacgcgagcgctcggcaaggctcggctcggaagagtccaagcgtgaggggagagggctgtggattcagatactgtttttctcccgaaataggaaattggcttatttttttctcctcggcagcatcttaatttaaaatatgacacttgacctacggccctgcacggagcggttaagagggtcaccaggcccgtcaaactctttttggtgtttaggcgctcctcctccgggcggtgtgttgggagggcccaggtcaaggcgcgcgtgggcggaagcggcggcggtggcgaaggcggcggctgtcagagctggagggccgggcaccgcggccatggagggtcaacgctggctgccgctggaggccaatcccgaggtcaccaaccagtttcttaaacaattaggtctacatcctaactggcaattcgttgatgtatatggaatggatcctgaactccttagcatggtaccaagaccagtctgtgcagtcttacttctctttcctattacagaaaagtatgaagtattcagaacagaagaggaagaaaaaataaaatctcagggacaagatgttacatcatcagtatatttcatgaagcaaacaatcagcaatgcctgtggaacaattggactgattcatgctattgcaaacaataaagacaagatgcactttgaatctggatcaaccttgaaaaaattcctggaggaatctgtgtcaatgagccctgaagaacgagccagatacctggagaactatgatgccatccgagttactcatgagaccagtgcccatgaaggtcagactgagtcctcctcgccatcctcatcacagcctcattctagccactgcagaacgaaggcctcatcattgtgtcaccatgcatccctgccctgggtcaaacgtaaccatgtaggccctgcaa

SEQ ID NO: 289812 - DNA, 397 bp, Homo sapiens
tgtgaatattatcaatgtacacatatagaactatggcatataacctgatacttggttatatatttccactttacctgcttttaaccaatattcatacatgatcctttgctagatagattatggttattaaaaatagtagaccatatgaattacaagcatgaccatacgttgcttttaagaataaatgatcacccagtaacgtggtctaagtaaaatattctcttttttaattatgtagtcctcctcgccatcctcatcacagcctcattctagccactgcagaacgaaggcctcatcattgtgtcaccatgcatccctgccctgggtcaaacgtaaccatgtaggccctgcaaaggctaccagtccatctctccgtcttcgtcgctggcgacccttc

SEQ ID NO: 289813 - DNA, 1160 bp, Homo sapiens
gcgcatgcgtagaacgcgagcgctcggcaaggctcggctcggaagagtccaagcgtgaggggagagggctgtggattcagatactgtttttctcccgaaataggaaattggcttatttttttctcctcggcagcatcttaatttaaaatatgacacttgacctacggccctgcacggagcggttaagagggtcaccaggcccgtcaaactctttttggtgtttaggcgctcctcctccgggcggtgtgttgggagggcccaggtcaaggcgcgcgtgggcggaagcggcggcggtggcgaaggcggcggctgtcagagctggagggccgggcaccgcggccatggagggtcaacgctggctgccgctggaggccaatcccgaggtcaccaaccagtttcttaaacaattaggtctacatcctaactggcaattcgttgatgtatatggaatggatcctgaactccttagcatggtaccaagaccagtctgtgcagtcttacttctctttcctattacagaaaagtatgaagtattcagaacagaagaggaagaaaaaataaaatctcagggacaagatgttacatcatcagtatatttcatgaagcaaacaatcagcaatgcctgtggaacaattggactgattcatgctattgcaaacaataaagacaagatgcactttgaatctggatcaaccttgaaaaaattcctggaggaatctgtgtcaatgagccctgaagaacgagccagatacctggagaactatgatgccatccgagttactcatgagaccagtgcccatgaaggtcagactgaggcaccaagtatagatgagaaagtagatcttcattttattgcattagttcatgtagatgggcatctctatgaattagatgggcggaagccatttccaattaaccatggtgaaactagtgatgaaactttattagaggatgccatagaagtttgcaagaagtttatggagcgcgaccctgatgaactaagatttaatgcgattgctctttctgcagcatagcttgtcaataatggaaacaccaaaaactgtattatttgcaactaaattttctctgccatacactaactcaaaaattttgatattttcattaacttgatgattaaactttatgtgagttaaactttg

SEQ ID NO: 289814 - DNA, 965 bp, Homo sapiens
gcgcatgcgtagaacgcgagcgctcggcaaggctcggctcggaagagtccaagcgtgaggggagagggctgtggattcagatactgtttttctcccgaaataggaaattggcttatttttttctcctcggcagcatcttaatttaaaatatgacacttgacctacggccctgcacggagcggttaagagggtcaccacagtttcttaaacaattaggtctacatcctaactggcaattcgttgatgtatatggaatggatcctgaactccttagcatggtaccaagaccagtctgtgcagtcttacttctctttcctattacagaaaagtatgaagtattcagaacagaagaggaagaaaaaataaaatctcagggacaagatgttacatcatcagtatatttcatgaagcaaacaatcagcaatgcctgtggaacaattggactgattcatgctattgcaaacaataaagacaagatgcactttgaatctggatcaaccttgaaaaaattcctggaggaatctgtgtcaatgagccctgaagaacgagccagatacctggagaactatgatgccatccgagttactcatgagaccagtgcccatgaaggtcagactgaggcaccaagtatagatgagaaagtagatcttcattttattgcattagttcatgtagatgggcatctctatgaattagatgggcggaagccatttccaattaaccatggtgaaactagtgatgaaactttattagaggatgccatagaagtttgcaagaagtttatggagcgcgaccctgatgaactaagatttaatgcgattgctctttctgcagcatagcttgtcaataatggaaacaccaaaaactgtattatttgcaactaaattttctctgccatacactaactcaaaaattttgatattttcattaacttgatgattaaactttatgtgagttaaactttg

SEQ ID NO: 289815 - DNA, 1441 bp, Homo sapiens
  misc_feature (1369)..(1369): n is a, c, g, or t
gcgcatgcgtagaacgcgagcgctcggcaaggctcggctcggaagagtccaagcgtgaggggagagggctgtggattcagatactgtttttctcccgaaataggaaattggcttatttttttctcctcggcagcatcttaatttaaaatatgacacttgacctacggccctgcacggagcggttaagagggtcaccaggcccgtcaaactctttttggtgtttaggcgctcctcctccgggcggtgtgttgggagggcccaggtcaaggcgcgcgtgggcggaagcggcggcggtggcgaaggcggcggctgtcagagctggagggccgggcaccgcggccatggagggtcaacgctggctgccgctggaggccaatcccgaggtcaccaaccagtttcttaaacaattaggtctacatcctaactggcaattcgttgatgtatatggaatggatcctgaactccttagcatggtaccaagaccagtctgtgcagtcttacttctctttcctattacagaaaagtatgaagtattcagaacagaagaggaagaaaaaataaaatctcagggacaagatgttacatcatcagtatatttcatgaagcaaacaatcagcaatgcctgtggaacaattggactgattcatgctattgcaaacaataaagacaagatgcactttgaatctggatcaaccttgaaaaaattcctggaggaatctgtgtcaatgagccctgaagaacgagccagatacctggagaactatgatgccatccgagttactcatgagaccagtgcccatgaaggtcagactgaggcaccaagtatagatgagaaagtagatcttcattttattgcattagttcatgtagatgggcatctctatgaattagatgggcggaagccatttccaattaaccatggtgaaactagtgatgaaactttattagaggatgccatagaagtttgcaagaagtttatggagcgcgaccctgatgaactaagatttaatgcgattgctctttctgcagcatagcttgtcaataatggaaacaccaaaaactgtattatttgcaactaaattttctctgccatacactaactcaaaaattttgatattttcattaacttgatgattaaactttatgtgagttaaactttgggcaaaaaaaaaagaaaaacaaaaacaacaatgtgggcggcgcccggccagaaattttcaccatcctgggcgcggggaccagataaggaactgccaaagtcgccaggacaccggcgaagtgtcggtcccccaaaagaacgcggggccggggtcgaacaaccagagcgtcggctccggtcccgggcccgctatcccccgcgccggctggnacacacaccacacacgagcaacacacgtccaccatgacaacaccacgagcgaaaccattgaacaaacgcacg

SEQ ID NO: 289816 - DNA, 1072 bp, Homo sapiens
gcgcatgcgtagaacgcgagcgctcggcaaggctcggctcggaagagtccaagcgtgaggggagagggctgtggattcagatactgtttttctcccgaaataggaaattggcttatttttttctcctcggcagcatcttaatttaaaatatgacacttgacctacggccctgcacggagcggttaagagggtcaccaggcccgtcaaactctttttggtgtttaggcgctcctcctccgggcggtgtgttgggagggcccaggtcaaggcgcgcgtgggcggaagcggcggcggtggcgaaggcggcggctgtcagagctggagggccgggcaccgcggccatggagggtcaacgctggctgccgctggaggccaatcccgaggtcaccaaccagtttcttaaacaattaggtctacatcctaactggcaattcgttgatgtatatggaatggatcctgaactccttagcatggtaccaagaccagtctgtgcagtcttacttctctttcctattacagaaaagtatgaagtattcagaacagaagaggaagaaaaaataaaatctcagggacaagatgttacatcatcagtatatttcatgaagcaaacaatcagcaatgcctgtggaacaattggactgattcatgctattgcaaacaataaagacaagatgcactttgaatctggatcaaccttgaaaaaattcctggaggaatctgtgtcaatgagccctgaagaacgagccagatacctggagaactatgatgccatccgagttactcatgagaccagtgcccatgaaggtcagactgaggcaccaagtatagatgagaaagtagatcttcattttattgcattagttcatgtagatgggcatctctatgaattagatgggcggaagccatttccaattaaccatggtgaaactagtgatgaaactttattagaggtaacagtaacacttgttggcccatcttcatcaatattttgtcatctttaaaacatctctaaaggtcacttgcataacattttctttgtatttggatacttctttatccttgttctctctag

SEQ ID NO: 289817 - DNA, 1590 bp, Homo sapiens
agccagagctgggcggtggcgggcgctgctgaaggagtctcgctgagctcgaggaggtggcgcgatggagggactggaagagaatggaggtgttgtccaagttggagaattgttaccttgcaagatttgtggaagaacattctttccagtagcattaaaaaaacatggacccatttgccagaagactgcaactaaaaaacggaagacttttgattcaagcagacagagagctgaaggaactgatattccaacagtaaaacctctcaaaccgaggccagaaccaccaaagaaaccatctaattggagaaggaaacatgaagaattcattgctaccataagagcagctaaaggccttgatcaggccctcaaagagggtggcaaacttcctcctcctcctccaccttcttatgatcctgattatattcaatgtccatattgtcagaggagattcaatgaaaatgcagctgatagacatataaatttctgtaaagaacaggcagcacgtattagtaataaagggaaattttctacagataccaaaggaaaaccaacttctcggacacaggtgtataagccacccgcacttaaaaagtcaaattctcctggaactgcatcatcaggatcttcacgattaccgcagccaagtggcgctggcaaaactgttgtaggtgttccttcaggtaaagtgtcttcaagtagcagctctttgggaaacaaacttcagaccttgtctccctctcataaagggatagcagcccctcatgcaggagctaatgtcaaaccccgaaattccacaccacctagtttggcaagaaatcctgccccaggtgtgcttacaaacaaaagaaaaacatatactgagagctacatagccaggccagatggggactgtgcatcttcccttaatggtggaaatattaaaggcattgaaggacattcacctggaaacttaccaaaattctgccatgagtgtgggactaaataccctgtagaatgggccaaattttgctgtgaatgtggcattcgaagaatgattctatgaatagaatctcaaaaaaaaaaaaaaagccaagttcagagtttatgattattgctgcttggacagctagagcacatcctctagttagtttgtgctaaaaatactcgaaataccatttccagttaattttgaagtgtaatcttttggctatataatgtgtgtatgtttatatgtgtacatatactgtatataataaatatctgataccccagactgtgtcattcaaggaaatattcacttatctgtcagaaaataatttcaaatggaacaattaatttaggtgttacttttctgttgttgttaaagcacgttaagtacatttccacaaactctcatactctagtgcttagcccttcaagctttaggataagtataactttgagcaaaaaatttggataaacatttgtattattggtgcctatcttcagatagtatcatagtaggatagatgctgggaattttgtaattaaagagaacagttttagttaccattaggtatgttaaggtcactcctgtagagcatgtcaacaaattatttcataaatccgaaa

SEQ ID NO: 289818 - DNA, 1249 bp, Homo sapiens
agccagagctgggcggtggcgggcgctgctgaaggagtctcgctgagctcgaggaggtggcgcgatggagggactggaagagaatggaggtgttgtccaagttggagaattgttaccttgcaagatttgtggaagaacattctttccagtagcattaaaaaaacatggacccatttgccagaagactgcaactaaaaaacggaagacttttgattcaagcagacagagagctgaaggaactgatattccaacagtaaaacctctcaaaccgaggccagaaccaccaaagaaaccatctaattggagaaggaaacatgaagaattcattgctaccataagagcagctaaaggccttgatcaggccctcaaagagggtggcaaacttcctcctcctcctccaccttcttatgatcctgattatattcaatgtccatattgtcagaggagattcaatgaaaatgcagctgatagacatataaatttctgtaaagaacaggcagcacgtattagtaataaagggaaattttctacagataccaaaggaaaaccaacttctcggacacaggtgtataagccacccgcacttaaaaagtcaaattctcctggaactgcatcatcaggatcttcacgattaccgcagccaagtggcgctggcaaaactgttgtaggtgttccttcaggtaaagtgtcttcaagtagcagctctttgggaaacaaacttcagaccttgtctccctctcataaagggatagcagcccctcatgcaggagctaatgtcaaaccccgaaattccacaccacctagtttggcaagaaatcctgccccaggtgtgcttacaaacaaaagaaaaacatatactgagagctacatagccaggccagatggggactgtgcatcttcccttaatggtggaaatattaaaggcattgaaggacattcacctggaaacttaccaaaattctgccatgagtgtgggactaaataccctgtagaatgggccaaattttgctgtgaatgtggcattcgaagaatgattctatgaatagaatctcaaaaaaaaaaaaaaagccaagttcagagtttatgattattgctgcttggacagctagagcacatcctctagttagtttgtgctaaaaatactcgaaataccatttccagttaattttgaagtgtaatcttttggctatataatgtgtgtatgtttatatgtgtacatatactgtatataataaatatctgatacccc

SEQ ID NO: 289819 - DNA, 1657 bp, Homo sapiens
gtggcaacaacagtagtaatagtattagcatcagctatctaaatgtttatatgaattgtactttttttctcataacctttctataagtgatcattttataaatgatgagactcagacttgctgtcacaaagctgtcagtagcattagcatttgaatctaaattcatttgaattcccaagcctctgcttttagtgttatatcatcatcatttagttttctaacccttctttgattcttaaagtttcaaaatggagactcatggatgatccaaccagaagtccctctgatttcggatagcccaggctgtgcagttggtaaaattaaatctttaaagggaatattatattaactcatttattttagttgctgctttttagaactttcataagttgaatattattctttaatgtgactagcaaaaaaattctttttttaactacatcgtatatgcctagaataatgaaacttgtttgtttatttaaccattatccgtaagcatttatcagaatatatgttttgagggaaatataaatttaaactgtttttaaaaatgtatctttcagaatgattaccttataaatttcatgtaaagcatatatacatattttagttgattttatttactatcagaatagtattagtaaatgcaaaattatttggtttatctttaatattaactactatttgctttcagatttaaaataattattgggactttaatcttttgaacttctctgaagcttctaagtattctttctagtcatgtgaataggtaatttgagaaatacatgctcactgttcaatacttttccattatttttcctcttttttatagagctaatgtcaaaccccgaaattccacaccacctagtttggcaagaaatcctgccccaggtgtgcttacaaacaaaagaaaaacatatactgagagctacatagccaggccagatggggactgtgcatcttcccttaatggtggaaatattaaaggcattgaaggacattcacctggaaacttaccaaaattctgccatgagtgtgggactaaataccctgtagaatgggccaaattttgctgtgaatgtggcattcgaagaatgattctatgaatagaatctcaaaaaaaaaaaaaaagccaagttcagagtttatgattattgctgcttggacagctagagcacatcctctagttagtttgtgctaaaaatactcgaaataccatttccagttaattttgaagtgtaatcttttggctatataatgtgtgtatgtttatatgtgtacatatactgtatataataaatatctgataccccagactgtgtcattcaaggaaatattcacttatctgtcagaaaataatttcaaatggaacaattaatttaggtgttacttttctgttgttgttaaagcacgttaagtacatttccacaaactctcatactctagtgcttagcccttcaagctttaggataagtataactttgagcaaaaaatttggataaacatttgtattattggtgcctatcttcagatagtatcatagtaggatagatgctgggaattttgtaattaaagagaacagttttagttaccattaggtatgttaaggtcactcctgtagagcatgtcaacaaattatttcataaatccgaaa

SEQ ID NO: 289820 - DNA, 1013 bp, Homo sapiens
agccagagctgggcggtggcgggcgctgctgaaggagtctcgctgagctcgaggaggtggcgcgatggagggactggaaggtgaggcgatgaagggatgagggcaggacggctagagcgggcccgaaacagctggggaccctggacaccagtagcaggaaggcgagggctggttcggtgcggcggacctcgcgcgctcgccgcgccttccggaggctgggggcataggaaccggacagtccccgatgcggtggagctaacgctaccaggctgccccgcctcagacggtcttcaactgggctttcccgcccggagccagatcctgcccctggcaagacgcctgcacgtctcttcctaccattttctgatcttgcttgactcctgagtgcccttttagtgatcccagtctctggccagattttgttttccttgtactggactctctccattattgtccacggccttaacaccaacaggccactttgtgctgcagccccggggtgtgtctccagcctcgagctcctgacattccttggccgatttccctaggtaaccggctttttacatttcgacagcatcttctgtcggagggatgtcagagcatctcctaaggaagtgtcactggccagctttagagccggtacaatagattacccggaggatttgatgacttattcacggccgctgtgtgaggaagagcctgtattggttccttatctttgggtttatctttgtactgtaaccatgactccagattttgctttgttcccagttctttcactttttctctattctgtttacccattttatcctgtgtaatgaaagcattcacctaaaaacaaaggaaggacaaaaaccacaataactagcattggcaacaacagtttcaagattttttaatttgttatgatgaagaacaaaccttcagaattgaaagatcctattgtcttgatttagctcctttcccccgtctcctagtttacacggattcagttggaattaagaatgagcaga

SEQ ID NO: 289821 - DNA, 1545 bp, Homo sapiens
gcctaggtaaggatcctggtcgtgactaggggctctgtgagttctcatccagtgaaaaaacgcttccgtgtgcgcagaccggcagtcgttctgaacatagagtccacgatggcgttcatgaggtgccattatctggatctatcagacatggagtcctaagcggagctccgatatcatagattacagccttcgccgtacttctgaacatgtaaaacctctcaaaccgaggccagaaccaccaaagaaaccatctaattggagaaggaaacatgaagaattcattgctaccataagagcagctaaaggccttgatcaggccctcaaagagggtggcaaacttcctcctcctcctccaccttcttatgatcctgattatattcaatgtccatattgtcagaggagattcaatgaaaatgcagctgatagacatataaatttctgtaaagaacaggcagcacgtattagtaataaagggaaattttctacagataccaaaggaaaaccaacttctcggacacaggtgtataagccacccgcacttaaaaagtcaaattctcctggaactgcatcatcaggatcttcacgattaccgcagccaagtggcgctggcaaaactgttgtaggtgttccttcaggtaaagtgtcttcaagtagcagctctttgggaaacaaacttcagaccttgtctccctctcataaagggatagcagcccctcatgcaggagctaatgtcaaaccccgaaattccacaccacctagtttggcaagaaatcctgccccaggtgtgcttacaaacaaaagaaaaacatatactgagagctacatagccaggccagatggggactgtgcatcttcccttaatggtggaaatattaaaggcattgaaggacattcacctggaaacttaccaaaattctgccatgagtgtgggactaaataccctgtagaatgggccaaattttgctgtgaatgtggcattcgaagaatgattctatgaatagaatctcaaaaaaaaaaaaaaagccaagttcagagtttatgattattgctgcttggacagctagagcacatcctctagttagtttgtgctaaaaatactcgaaataccatttccagttaattttgaagtgtaatcttttggctatataatgtgtgtatgtttatatgtgtacatatactgtatataataaatatctgataccccagactgtgtcattcaaggaaatattcacttatctgtcagaaaataatttcaaatggaacaattaatttaggtgttacttttctgttgttgttaaagcacgttaagtacatttccacaaactctcatactctagtgcttagcccttcaagctttaggataagtataactttgagcaaaaaatttggataaacatttgtattattggtgcctatcttcagatagtatcatagtaggatagatgctgggaattttgtaattaaagagaacagttttagttaccattaggtatgttaaggtcactcctgtagagcatgtcaacaaattatttcataaatccgaaa

SEQ ID NO: 289822 - DNA, 681 bp, Homo sapiens
gcggccgcctactactactactgctcgaattcaagcttctaacgatgtacggggacatgagtgtgggactaaataccctgtagaatgggccaaattttgctgtgaatgtggcattcgaagaatgattctatgaatagaatctcaaaaaaaaaaaaaaagccaagttcagagtttatgattattgctgcttggacagctagagcacatcctctagttagtttgtgctaaaaatactcgaaataccatttccagttaattttgaagtgtaatcttttggctatataatgtgtgtatgtttatatgtgtacatatactgtatataataaatatctgataccccagactgtgtcattcaaggaaatattcacttatctgtcagaaaataatttcaaatggaacaattaatttaggtgttacttttctgttgttgttaaagcacgttaagtacatttccacaaactctcatactctagtgcttagcccttcaagctttaggataagtataactttgagcaaaaaatttggataaacatttgtattattggtgcctatcttcagatagtatcatagtaggatagatgctgggaattttgtaattaaagagaacagttttagttaccattaggtatgttaaggtcactcctgtagagcatgtcaacaaattatttcataaatccgaaa

SEQ ID NO: 289823 - DNA, 337 bp, Homo sapiens
attcgcggccgcgtcgaccaggtgtataagccacccgcacttaaaaagtcaaattctcctggaactgcatcatcaggatcttcacgattaccgcagccaagtggcgctggcaaaactgttgtaggtgttccttcaggtaaagtgtcttcaagtagcagctctttgggaaacaaacttcagaccttgtctccctctcataaagggatagcagcccctcatgcaggagctaatgtcaaaccccgaaattccacaccacctagtttggcaagaaatcctgccccaggtgtgcttacaaacaaaagaaaaagtcgacgcggccgcgaatttagtagtagta

SEQ ID NO: 289824 - DNA, 288 bp, Homo sapiens
atgttgtattctcaacatgggatgtgcatctaagttatgaagcataacaattaaataacatccataaacccatgacctcatgcagtatgaaacatttctagtcctgtggaagctacaggactgctggaatttcttctctgatccagtccccttgcttcgcaacagaggttcctgcttctccacgccaatgacatggtgagagaatacagggggagctgaagacaaacaacataaacttatgtttgcaaagcaccttttactctgtgaaataaagtgagtgcaagcagt

SEQ ID NO: 289825 - DNA, 870 bp, Homo sapiens
cagaaacagaattccactcttaaccccctcagtttgcagaatgtctaagtgtagtgactctagactcaatgtgagatgaaaagggaaaaaagaaactgcgtataaatagtactagagatttgggttataggattggtaattcagcgtgaagttcacggatgcctcttcaagaaacagaagcttcactcaatctggctttcaaaatggtgagaaaagaagtggactcacataattgaagaggcttgagttctggaagcttagaagtccatgactggggtcccagcatgcttggattcaggtggccttcagacacttcttccacaaggaaattgggcagcttcctgaaatgaacaacccgtaaagccatgggaattatggatcagctcccagaccttccgcttcatgactgcaagcctttgtgaaagtttctgacctctttatgcttcaggaatcttagcaatgaaacaaggataatggcacttgctgtgacgatcatgcttccaacagttcaaaaagccaagggaagatcagaagcttatcttccagccaactggggtgggttggtgggggttggtggaatttgacagaagcttgtaatcagccacattggaggatgaggggaaggcctgtcatctgttttgaaacgtgttacgacaagatgttacatttctggaaacctgggtgcagaaaaagatgcacttttctgagagtttgtgcggattgagtgaatctgcttcatttcagcccgaagttgctggagggtccttcgtcaggagacagtatatatagacttgccagaagtgcaataattattcagtctctttctcagtattaagccaatgtacaaaataattacacatctgcttctat

SEQ ID NO: 289826 - DNA, 695 bp, Homo sapiens
gccaggaaaaaaatcaaggaatggataatataagagcctttcaagaatgtagatttacactagagatttattaaatttgagggcctataacaaaattaatttatttaaacaaatatttgttaaaaattcttttataaagtacctgccactgtgttaggtgttctggggaatctgagagaaatagaaagacactagaataatatggttggtctaaagcactcaagatttagaatcaatggaggcttgtgttcaagttgagattttaccaccacttatcagctgtatcctctggttttacttaattgtaggtctactgatcactgccttccctgctctgccatcatacaaattatctcataggattgttttgaggattaaacaaaacaccaaccacgggtcacagattatgacattttcaagaaggacacgtttgcttcccctgccaccattgtaagtttcccaatgcctccccagccctgcagaactgtgagccagttaaacctctttcctctataaattacctagtctcgggcagttctttatagcagcatgagaatggactaatacagtaaactggtaccacagagagtggggtgctactgtaaagatacatgaaaatgtggaagttactttggaactgggtaacaggtagaggttggaacagtttggagggctcagaagacaggaaaatgtgg

SEQ ID NO: 289827 - DNA, 784 bp, Homo sapiens
tgatggggtgtgataggtggcagcattataagaaaatgtttacaaattaaaaacagtcccctctagaaagcaaacaggtagggcaggggtgattcttttcacttataagcccttctctactatttacttttcaaaaacatgaacataaattattctgatagaaagtaaaaataaaattgcatttttaatgtgtgaacatatgaaatacttgtactaataagaaattattactgaggtcaatctaagatagttctagagcagcaaatcagatggctgaactctagcctcatccaaaagcagccacccctagacaatgagagccatggccctcctaatgggccacctggccacccagagagtgacagataaatgccaatggttgaagaggcacaaagtacctatgtatgggtggagcacaaagtatccatgtggggaggagaagcacttgcttcttatttataagggtgcactaaagatttttaagttcaagccagttttaaaaagaagtttcccttctttcgttgtgccctctctacagtcattctgcaaaatctacaagtggatagcgcaccaccactacctgggcccactgtgtccctgcaagaaagacaacgtgaaagaaggttcttgtatgcaaaggtgctttgctccttctgacagtttttcaaagtcaaacagaaagtacttctggtgaatcacaatttagtgtcatctgcatgtttttctttcataactgaggatggattatcattaaattgtatagaagttgtttcaagcaacagga

SEQ ID NO: 289828 - DNA, 733 bp, Homo sapiens
aaagcagcacatgtccaacaggaaaatgaataaacaaatacagcatattcatacaatagaatcctatacagagcaactaaaataacagctagaggcaacaacacggatggatcttacaagcctgatgtggaacaagagaagcctgtccagagactaagtgaatggatttatgtggtatgcaaaaacaggcaaaaccaaatcatagtgttttgggaggtatgcttacatagtaaagctctgaaggaaaacaaagaaaaggcgactaaagagaatgacaacttacacaatgcagaatcctggattggatcctagatccaatcaacgtgtagggatgctgatcccactccaagtctagaacatcattcacatcttggacagcaaatttcacatactgatgaaggcgccgaatttcctataagaaaaaaattaaaaggcaaataacttgtttttctgatagtttgggggaagatgtatcaaaacagtcaaaagaattctaaaatacttctatattaagaaccataatgaacaaggaaaacagaataggttttaatacgatttttaaaactatataattaaaatgaggccgggtgtagtggctcaggcctataatcccaacaccctgggaggccaaggcaggaggactgcttgaagccaggagttaaagatcagcctgggcaacacagcaagactctgtctctaataatgtatacaaataaaaaagttacataaaaaa

SEQ ID NO: 289829 - DNA, 679 bp, Homo sapiens
aaagcagcacatgtccaacaggaaaatgaataaacaaatacagcatattcatacaatagaatcctatacagagcaactaaaataacagctagaggcaacaacacggatggatcttacaagcctgatgtggaacaagagaagcctgtccagagactaagtgaatggatttatgtggtatgcaaaaacaggcaaaaccaaatcatagtgttttgggaggtatgcttacatagtaaagctctgaaggaaaacaaagaaaaggcgactaaagagaatgacaacttacacaatgcagaatcctggattggatcctagatccaatcaacgtgtagggatgctgatcccactccaagtctagaacatcattcacatcttggacagcaaatttcacatactgatgaaggcgccgaatttcctataagaaaaaaattaaaagtcattctgcaaaatctacaagtggatagcgcaccaccactacctgggcccactgtgtccctgcaagaaagacaacgtgaaagaaggttcttgtatgcaaaggtgctttgctccttctgacagtttttcaaagtcaaacagaaagtacttctggtgaatcacaatttagtgtcatctgcatgtttttctttcataactgaggatggattatcattaaattgtatagaagttgtttcaagcaacagga

SEQ ID NO: 289830 - DNA, 504 bp, Homo sapiens
atctcagagaaagaagcaccaagtcctctggggcgataagtgatggctacatattgaagaagtgtaaacttccagaaacaaaacagacaacactttgtgatgataaatgtcacagttgccacacaggccagcagaaacccaatcacatccaaagagtggtactggaaccaggtgaggtcacgggctgcaactcgaaggtgtttggctcctttgtggcgcatgacaaattcaatccagaagactgctcgatccaggggcttcactggttgatcacgttgaattcttgataatttcataacattctctttatatctgaaggataaaaataaagataccaacactgaaagcacctatgatgttgagacaagttcccccaggaagctttactgagttgcttgtcataaggcagacatcgtctgctctaataggtgtaagtcaaacattctgaatgaagactatagactcatttctactgaaacttcgaagccaacaaaataaaaccaa

SEQ ID NO: 289831 - DNA, 416 bp, Homo sapiens
ttcctccttgagaagattccaagactcaacgaattaaattagtcttaatatagcaaaatttaaatggaaaatagaaaacacacatttaggttatactcaactttagtaaataatattacatttggggaagtacaaaattctttttggatatgtactattaagcaaaatatgaaaataactggttaaatgacaacctagtgattctttctacaccattagattatctaccttctatgctggaaatagaatataaccttaaccctagctaatttattttaaaataaatatagctctctgaagtaatttcatacatagtatcttataagagaacatgaaaaacatttattatcccataaaatccatggggtaataatgtcaatttaagactcaggtggtgtgggtccgagctgattgtg

SEQ ID NO: 289832 - DNA, 2514 bp, Homo sapiens
  misc_feature (914)..(914): n is a, c, g, or t
  misc_feature (1587)..(1587): n is a, c, g, or t
ttcctccttgagaagattccaagactcaacgaattaaattagtcttaatatagcaaaatttaaatggaaaatagaaaacacacatttaggttatactcaactttagtaaataatattacatttggggaagtacaaaattctttttggatatgtactattaagcaaaatatgaaaataactggttaaatgacaacctagtgattctttctacaccattagattatctaccttctatgctggaaatagaatataaccttaaccctagctaatttattttaaaataaatatagctctctgaagtaatttcatacatagtatcttataagagaacatgaaaaacatttattatcccataaaatccatggggtaataatgtcaattaatgatagtttcaggaaactccctttaaaaacagatctaagaattttacctaatatattttgagccaagaattaacaaatatgaaatttgccattagagaatgacagacttttctgtgcaaaaaaaaagtgcagaagatgttgtccctcctgaaactatggaattcctttatcttctaaaacttatctaaaaatcttttagtagcaggtaactaaactgtcctatatgcacctatcatgtactatcagttgactgtaaattcctgattttgatattaagtagtaaatgaaaatggtccattcgtgcaaattttggtaagacaacatttaaacatacagaagtccaaaataaccttcaaggtgtttaacattttacaacttaaaggaaaacaagtccattatataaattttagtaagactcataactacatgtaaaaactgtacaggaggattatggattgtatagaaactgatacacaacagtggtatcagtttttctcaagaacgttaatattttcacaccactattaacancacaaacaaaagttcagaaattatcacattttatttttgaaaagttgctgcttaaaaaaaaatctaactataaccacatttaaactgaaaaacaaattacaactgctgcttctgtttagcagcagcacataacaacacattcttcttccccactgtgctcatggggtatgctataacctcagtaaaattcctcctagggtacacattaaaaagaagagaactggtggaaattcattccacaatctgaacaaagtaaaagtaaatttggtgtatgttaatgagtacaccatatcaacttagaaaaattgtgttaatgagaaaaggggagattcaactccttgagtagctctatatacttaaaatataaagccaccattgtatctaaaattgagtctgaaatatggataacaaaattgaccacagctattttccatcacatattgcagcttttaaaaagtacacaattgttaagtttgcattagaaatataagcagattacctactagttgaaaccatatagtattgttactaagctgatttttttaaaaaagtacaaagaaacatacattttcattcatttggaaaatgtaaaaatttaagtactaatatataatctcttcactttctctgatctacaaatggatagaatgcctagttatcgtcatgcagatanattcttcagaattccgtgtgtgataaagtggttgccccaaatgtgtcacttacttctgctgtatcccagtctaaagagctcacaaagacagaggcaagtaagtccatatcaagacagtcagagaaggctcacagtagtggtaaacttcaaaaaacagtgtcttatccagatgtctcacttgaggaacaggagaaaatggatttaaaaacaagtagagaattatgtagccgtttagatgcatcaatctcaaaaaattctacaagtaaaaggaaatctgagtctgccacttgcaacttagtcagagacataaacaaagtgggaattggccttgttgctgccgcttcatctccgcttcttgtgaaagatgtcatttgtgaggatgataagggaaaaatcatggaagaagtaatgagaacttatttaaaacaacaggaaaaactaaacttgattttgcaaaagaagcaacaacttcagatggaagtaaaaatgttgagtagttcaaaatctatgaaggaactcactgaagaacagcagaatttacagaaagagcttgaatctttgcagaatgaacatgctcaaagaatggaagaattttatgttgaacagaaagacttagagaaaaaattggagcagataatgaagcaaaaatgtacctgtgactcaaatttagaaaaagacaaagaggctgaatatgcaggacagttggcagaactgaggcagagattggaccatgctgaggccgataggcaagaactccaagatgaactcagacaggaacgggaagcaagacagaagttagagatgatgataaaagagctaaagctgcaaattctgaaatcatcaaagactgctaaagaatagaaactgttaaagagattcatctgtgtattactgacaaggttttttttgtttgttgcttgctttggt

SEQ ID NO: 289833 - DNA, 3410 bp, Homo sapiens
  misc_feature (1810)..(1810): n is a, c, g, or t
  misc_feature (2483)..(2483): n is a, c, g, or t
ccgctcaactaaaaaactgaatgggatgggagatgatggcagccccccagcgaaaaaaatgataacggacattcatgcaaatggaaaaacgataaacaaggtgccaacagttaagaaggaacacttggatgactatggagaagcaccagtggaaactgatggagagcatgttaagcgaacctgtacttctgttcctgaaactttgcatttaaatcccagtttgaaacacacattggcacaattccatttaagtagtcagagctcgctgggtggaccagcagcattttctgctcggcattcccaagaaagcatgtcgcctactgtatttctgcctcttccatcacctcaggttcttcctggcccattgctcatcccttcagatagctccacagaactcactcagactgtgttggaaggggaatctatttcttgttttcaagttggaggagaaaagagactctgtttgccccaagtcttaaattctgttctccgagaatttacactccagcaaataaatacagtgtgtgatgaactgtacatatattgttcaaggtgtacttcagaccagcttcatatcttaaaggtactgggcatacttccattcaatgccccatcctgtgggctgattacattaactgatgcacaaagattatgtaatgctttattgcggccacgaacttttcctcaaaatggtagcgtacttcctgctaaaagctcattggcccagttaaaggaaactggcagtgcctttgaagtggagcatgaatgcctaggcaaatgtcagggtttatttgcaccccagttttatgttcagcctgatgctccgtgtattcaatgtctggagtgttgtggaatgtttgcaccccagacgtttgtgatgcattctcacagatcacctgacaaaagaacttgccactggggctttgaatcagctaaatggcattgctatcttcatgtgaaccaaaaatacttaggaacacctgaagaaaagaaactgaagataattttagaagaaatgaaggagaagtttagcatgagaagtggaaagagaaatcaatccaagacagatgcaccatcaggaatggaattacagtcatggtatcctgttataaagcaggaaggtgaccatgtttctcagacacattcatttttacaccctagctaatttattttaaaataaatatagctctctgaagtaatttcatacatagtatcttataagagaacatgaaaaacatttattatcccataaaatccatggggtaataatgtcaattaatgatagtttcaggaaactccctttaaaaacagatctaagaattttacctaatatattttgagccaagaattaacaaatatgaaatttgccattagagaatgacagacttttctgtgcaaaaaaaaagtgcagaagatgttgtccctcctgaaactatggaattcctttatcttctaaaacttatctaaaaatcttttagtagcaggtaactaaactgtcctatatgcacctatcatgtactatcagttgactgtaaattcctgattttgatattaagtagtaaatgaaaatggtccattcgtgcaaattttggtaagacaacatttaaacatacagaagtccaaaataaccttcaaggtgtttaacattttacaacttaaaggaaaacaagtccattatataaattttagtaagactcataactacatgtaaaaactgtacaggaggattatggattgtatagaaactgatacacaacagtggtatcagtttttctcaagaacgttaatattttcacaccactattaacancacaaacaaaagttcagaaattatcacattttatttttgaaaagttgctgcttaaaaaaaaatctaactataaccacatttaaactgaaaaacaaattacaactgctgcttctgtttagcagcagcacataacaacacattcttcttccccactgtgctcatggggtatgctataacctcagtaaaattcctcctagggtacacattaaaaagaagagaactggtggaaattcattccacaatctgaacaaagtaaaagtaaatttggtgtatgttaatgagtacaccatatcaacttagaaaaattgtgttaatgagaaaaggggagattcaactccttgagtagctctatatacttaaaatataaagccaccattgtatctaaaattgagtctgaaatatggataacaaaattgaccacagctattttccatcacatattgcagcttttaaaaagtacacaattgttaagtttgcattagaaatataagcagattacctactagttgaaaccatatagtattgttactaagctgatttttttaaaaaagtacaaagaaacatacattttcattcatttggaaaatgtaaaaatttaagtactaatatataatctcttcactttctctgatctacaaatggatagaatgcctagttatcgtcatgcagatanattcttcagaattccgtgtgtgataaagtggttgccccaaatgtgtcacttacttctgctgtatcccagtctaaagagctcacaaagacagaggcaagtaagtccatatcaagacagtcagagaaggctcacagtagtggtaaacttcaaaaaacagtgtcttatccagatgtctcacttgaggaacaggagaaaatggatttaaaaacaagtagagaattatgtagccgtttagatgcatcaatctcaaaaaattctacaagtaaaaggaaatctgagtctgccacttgcaacttagtcagagacataaacaaagtgggaattggccttgttgctgccgcttcatctccgcttcttgtgaaagatgtcatttgtgaggatgataagggaaaaatcatggaagaagtaatgagaacttatttaaaacaacaggaaaaactaaacttgattttgcaaaagaagcaacaacttcagatggaagtaaaaatgttgagtagttcaaaatctatgaaggaactcactgaagaacagcagaatttacagaaagagcttgaatctttgcagaatgaacatgctcaaagaatggaagaattttatgttgaacagaaagacttagagaaaaaattggagcagataatgaagcaaaaatgtacctgtgactcaaatttagaaaaagacaaagaggctgaatatgcaggacagttggcagaactgaggcagagattggaccatgctgaggccgataggcaagaactccaagatgaactcagacaggaacgggaagcaagacagaagttagagatgatgataaaagagctaaagctgcaaattctgaaatcatcaaagactgctaaagaatagaaactgttaaagagattcatctgtgtattactgacaaggttttttttgtttgttgcttgctttggt

SEQ ID NO: 289834 - DNA, 980 bp, Homo sapiens
ttttgtgctcgttgtgtggctgtgagaggactttgcagtttctctgtcttggggactctggcttcgggtcatagtgtggacaaagcaggcttgttacctgtctgccctgttattttttcggtcttatgtttgctggcttgttgctgaatctggccgggggagacggatgaagggggtgtccgggctaactttgcaccgcagggccccgccaggatctccccttccctgtgaaggaccctatacctggtgtatggccccgccccggctccggctgtactaagcgctgctgttggcctcaccctttggatggaacttgcagcggccgggacagagttgcggtttggggcaaatcaagttgggttgggggctctggaagaaggtgaggagtctatggagcataaaagcaaggagcagcggctgaggctctgggtgcagggtgtggttcacgaggtcaccaaggagccctgggactgaagcccctttccctagaaccccggctctacgtctcgaagttctggagggtgccgcccctccgcaccacgtcactgcaggctctagctgctcttccaggctttctgctccctctgctggccgttctcacacatgacacccgctcggagtcgaagcagaagagctggggaactgaaggaggagcccagttgaaggaggagcccctcactaaagcccacttaaaagcccaggagaaagtataagccaggcgcggtggctcacgcctataatctcatcacttcgggaggccaagtcgggtggatcaagaggtcaagagattgagaccatcctggccaacatgttgaaacctcgtttctactaagaatacaaaaattagtgggcgcctgtaatcccagctgctcgggaggctgaggcagaagaatcacttgaacccaggagacggaggttgcagtgagccaagatcgtgtcactgcactccagcctggtgacagagcgagactcgatctcaa

SEQ ID NO: 289835 - DNA, 2797 bp, Homo sapiens
ctcaggcgggcgcggagccgcgcggagtgacaaagccgccgctgccgccgccgggggtgggagccgcgctcgcccgcccgcccctcgactcgcgagggcgtaaaagtttgtctcagctcgagcattcctagcgccaacacgccctcaggtaaaggtggaagtaaatggccacgctgtattgacagagcaggtagatgaaactcaagagaaaaggtgtggataaatgaaactagcccatgatgaacctgttttctccgtgaccacaatattaaccaggatgaatggcggtggcagtgggcctgcatcacaggttgcagcagatgttctcaatatttctattaaaatttccttatttccatatgcaagaggagccccagagctgcatccttatggtagctaccatgccgtgatgtaagctgccattcactggggagctttggcaatagaattggctagatcaggaagcctatgtcaactatggaacaacaacttgcagctcatctctattgatgatggaatctcgctatgtcaccaggctggagtgcagtggcgcaacctcggctcagcgcaacatccgcctcccgggttcaagtgattctcctacctcagcctcctgagtagctgggattacaggaatctaatgaccattgaactgtggccatgacttcaattacaagtattttcttcactaatgtcagactgtgggcctttgtatatacacttttaacaaactttttggaagtgcaatacatatcgcaacaacttctcaatgctgaatcatagtattggaagacattttaagcaacaattaaactcaacttatttactaccaataatgtacataagtcagctgaagtgaggataacatgaatagcacaaatacattatgattgctgcctggccaacagtaattataagaaactgtcagttttgagatgtgtcttgatttcagagatgttaaaaaagtttgtaagttaccattgataaaatatgagtttgcttccacaaatattctttcttctgtccttctggaactcaagagtaaacatatattagattttctcaccatttcatgcatgctggttcctaggctactctctgagtcattttttttttcttatctgccctccagttcactagttctgtcattttctgggtctgatctgctgcaaatgcaatacattgagttttaaatttcagtcattgtgttttcatttctagaaatttcatttgactctttctcaaattacttttccattttttttgtagtttcctatccctggagatattttcaatcatgccatttaattttttaaatacgcaagtgtagttttataatttgtgtctgataattctaatatctgaagtcttagtaggtctgtttcagttgtcctgtaattatgcatgtttttgcccatgttgctttgtttccttgtatgcttggttatctttcttactgcccttgcaaaattatttggagagtcctggaggcttaaatgaagataacttttaggaataatttgcatttgcttttgccgaggatcttgggatcatttcaaccaaaatcttagcttgaaattccgcaatcaatcaaggtgatgagaacctggtcagtaaatcctaatgagggccaggctgtggccaaagatttttagacagatgtttccctcctttgccatttctcttttctttcctcctctgctcctcttagtgtccagacaaccttcatggaagtccttggggtgggtgggaaatgaggacggcaggtttcattctaggtatagccctttgaggtctaacttaatgcagagagagttttctggtctatgtgccaccttacatgggatcttgagccttgatttctaaaccccttgcctttgatgtttcagaattgaagcttaaatttgccaacaggcaaatgtcctcaaggcaaattggcttaggtgttcgatattcttcttaccagaaaggtaaacttgggttttttacttcacccaggatttggcatgacagttccccattatcttgtcagcttagtgctttaagtgattgcatttaaaaaaattctgcattttcagtttttagcaggaggaatggcctcaactagtggttttcaactggggatgatttttttcccctaggggacatttgataatgtttggagatgttttagttgttagaactggggttgggggaactactgtcatctggtggggagagaccggcaatgctgttgatcttactataatgcacaggccacccccaacaacaaacaaattacatagccccaaatatcaataatgccaaggtccaaataacctaaccttccattactgaaaatagaagttcaagaagatagtttataatttaaaaatttttaggtcttaataagttgtcatactttcacaggttttatttcatactaagtaatttatttcaaattttacattccaattacagaaaattttctaagccagtttttgttccttcatgagtattactatcaaggtcacatttttcatctagtatgttttaccctggtacttgttggcagggtcaggactaaggtgagatgcgcaaggcatttgcctcacacaaaatgcacaatgaataaaatgtcaaaactttaaataaagacagaatcactaaaagtactttgccatattggaacctgaggcaaaaagaaaaataagtaataatatttaaaattttgatctcttgttcattgtagatttttacattaattttgattgtttaaaacattgcattaaaatattatttaatgtgattgctgagt

SEQ ID NO: 289836 - DNA, 1149 bp, Homo sapiens
  misc_feature (769)..(769): n is a, c, g, or t
  misc_feature (860)..(860): n is a, c, g, or t
  misc_feature (952)..(952): n is a, c, g, or t
  misc_feature (1135)..(1135): n is a, c, g, or t
ctcaggcgggcgcggagccgcgcggagtgacaaagccgccgctgccgccgccgggggtgggagccgcgctcgcccgcccgcccctcgactcgcgagggcgtaaaagtttgtctcagctcgagcattcctagcgccaacacgccctcaggtaaaggtggaagtaaatggccacgctgtattgacagagcaggtagatgaaactcaagagaaaaggtgtggataaatgaaactagcccatgatgaacctgttttctccgtgaccacaatattaaccaggatgaatggcggtggcagtgggcctgcatcacaggttgcagcagatgttctcaatatttctattaaaatttccttatttccatatgcaagaggagccccagagctgcatccttatggtagctaccatgccgtgatgtaagctgccattcactggggagctttggcaatagaattggctagatcaggaagcctatgtcaactatggaacaacaacttgcagctcatctctattgatgatggaatctcgctatgtcaccaggctggagtgcagtggcgcaacctcggctcagcgcaacatccgcctcccgggttcaagtgattctcctacctcagcctcctgagtagctgggattacaggtgaaacagtcgcaaatggaattccaagaaacattctatatacactgcctctaggactgggacagatagccactgagtacctgcttcaaatcaccctgcacgttttctctttggaaagataagcactggagaaccntctcgttaccttcagcagaaatggaaacaaatcaagacattaagaatgccgcagtggacagcagttatgcaaggttcagcagaggaagttntcaagatggtgtgcctcactagccagaaatcagaaaagatcgaagctagccttttcatctcagctgctccttaaatcagtgcaacccctccnaattaatgtgaattgaaacttgcattgcttttcaacttaattgaatacttactatatgtgaaccactgcacaaaataggggaagaagatgtgggagacaaagatgtggagcctgtcttcaataaatttacagttagtttcagggtacattgtttttcttctgctgttaattaggtgtatcccncaagagcaataaat

SEQ ID NO: 289837 - DNA, 787 bp, Homo sapiens
ggcggggggagacgccgggggaggaaggcagccgggagaaggaaagctgggacgggccgggaccacaggagccccagccccacacagcaaccacccgggcgagaaagaaagaaagagccagggaggcgggcgaagcgcggggagagaagcagagaagaaatattcaccttcccgcctcatgcccactttgaggcacttcttgaggcggcagtattggcactggttgcggtggtgctggtcgatgggacagttcctgttggcacggcatgtgtaagttaagttcctgcggacgctcctcttgaagaaacttttgcagccctcgcagcaggtagatgaaactcaagagaaaaggtgtggataaatgaaactagcccatgatgaacctgttttctccgtgaccacaatattaaccaggatgaatggcggtggcagtgggcctgcatcacaggttgcagcagatgttctcaatatttctattaaaatttccttatttccatatgcaagaggagccccagagctgcatccttatggtagctaccatgccgtgatgtaagctgccattcactggggagctttggcaatagaattggctagatcaggaagcctatgtcaactatggaacaacaacttgcagctcatctctattgatgttatttcttccactgacatcttgaacccctcagtcatccatgaggcttggaatcaacttcttccaaaactcctgctcatgtgatattttgatctccttttatgaaacatggatgtttaatagctcttacatgggaaa

SEQ ID NO: 289838 - DNA, 641 bp, Homo sapiens
  misc_feature (261)..(261): n is a, c, g, or t
  misc_feature (352)..(352): n is a, c, g, or t
  misc_feature (444)..(444): n is a, c, g, or t
  misc_feature (627)..(627): n is a, c, g, or t
actggtaataatcatcttacagatgtaagctgccattcactggggagctttggcaatagaattggctagatcaggaagcctatgtcaactatggaacaacaacttgcagctcatctctattgatggtgaaacagtcgcaaatggaattccaagaaacattctatatacactgcctctaggactgggacagatagccactgagtacctgcttcaaatcaccctgcacgttttctctttggaaagataagcactggagaaccntctcgttaccttcagcagaaatggaaacaaatcaagacattaagaatgccgcagtggacagcagttatgcaaggttcagcagaggaagttntcaagatggtgtgcctcactagccagaaatcagaaaagatcgaagctagccttttcatctcagctgctccttaaatcagtgcaacccctccnaattaatgtgaattgaaacttgcattgcttttcaacttaattgaatacttactatatgtgaaccactgcacaaaataggggaagaagatgtgggagacaaagatgtggagcctgtcttcaataaatttacagttagtttcagggtacattgtttttcttctgctgttaattaggtgtatcccncaagagcaataaat

SEQ ID NO: 289839 - DNA, 3052 bp, Homo sapiens
agccttgcgcgcggggttggctgccgggaggtcgacgctagtgcggtcccccgcgcggcggaggggcccgggccgcggtatctgcgcactgagacgtcggcggaaggatagaggccgtgctctcgcccccgcagaaggccaccactccttgagaaggccggagggacaaagcaccgggcatgcgccgggggcattcaagaaggaagccaggcccgaccgggggtggcgcacgcttcccgaaccccaggcccacggcccggttccgcgcgggcagttggcgccccctcgggtcggcacagcagacctcttagtaatggtccccagggagtacagggactgagaaacggaaatactaccatcctccagccaatctgttgggaggactgcttgcagaggactcgtgctccagatgttgcactagaggcgctgcaagtgtgagcagcaggtagatgaaactcaagagaaaaggtgtggataaatgaaactagcccatgatgaacctgttttctccgtgaccacaatattaaccaggatgaatggcggtggcagtgggcctgcatcacaggttgcagcagatgttctcaatatttctattaaaatttccttatttccatatgcaagaggagccccagagctgcatccttatggtagctaccatgccgtgatgtaagctgccattcactggggagctttggcaatagaattggctagatcaggaagcctatgtcaactatggaacaacaacttgcagctcatctctattgatgatggaatctcgctatgtcaccaggctggagtgcagtggcgcaacctcggctcagcgcaacatccgcctcccgggttcaagtgattctcctacctcagcctcctgagtagctgggattacaggaatctaatgaccattgaactgtggccatgacttcaattacaagtattttcttcactaatgtcagactgtgggcctttgtatatacacttttaacaaactttttggaagtgcaatacatatcgcaacaacttctcaatgctgaatcatagtattggaagacattttaagcaacaattaaactcaacttatttactaccaataatgtacataagtcagctgaagtgaggataacatgaatagcacaaatacattatgattgctgcctggccaacagtaattataagaaactgtcagttttgagatgtgtcttgatttcagagatgttaaaaaagtttgtaagttaccattgataaaatatgagtttgcttccacaaatattctttcttctgtccttctggaactcaagagtaaacatatattagattttctcaccatttcatgcatgctggttcctaggctactctctgagtcattttttttttcttatctgccctccagttcactagttctgtcattttctgggtctgatctgctgcaaatgcaatacattgagttttaaatttcagtcattgtgttttcatttctagaaatttcatttgactctttctcaaattacttttccattttttttgtagtttcctatccctggagatattttcaatcatgccatttaattttttaaatacgcaagtgtagttttataatttgtgtctgataattctaatatctgaagtcttagtaggtctgtttcagttgtcctgtaattatgcatgtttttgcccatgttgctttgtttccttgtatgcttggttatctttcttactgcccttgcaaaattatttggagagtcctggaggcttaaatgaagataacttttaggaataatttgcatttgcttttgccgaggatcttgggatcatttcaaccaaaatcttagcttgaaattccgcaatcaatcaaggtgatgagaacctggtcagtaaatcctaatgagggccaggctgtggccaaagatttttagacagatgtttccctcctttgccatttctcttttctttcctcctctgctcctcttagtgtccagacaaccttcatggaagtccttggggtgggtgggaaatgaggacggcaggtttcattctaggtatagccctttgaggtctaacttaatgcagagagagttttctggtctatgtgccaccttacatgggatcttgagccttgatttctaaaccccttgcctttgatgtttcagaattgaagcttaaatttgccaacaggcaaatgtcctcaaggcaaattggcttaggtgttcgatattcttcttaccagaaaggtaaacttgggttttttacttcacccaggatttggcatgacagttccccattatcttgtcagcttagtgctttaagtgattgcatttaaaaaaattctgcattttcagtttttagcaggaggaatggcctcaactagtggttttcaactggggatgatttttttcccctaggggacatttgataatgtttggagatgttttagttgttagaactggggttgggggaactactgtcatctggtggggagagaccggcaatgctgttgatcttactataatgcacaggccacccccaacaacaaacaaattacatagccccaaatatcaataatgccaaggtccaaataacctaaccttccattactgaaaatagaagttcaagaagatagtttataatttaaaaatttttaggtcttaataagttgtcatactttcacaggttttatttcatactaagtaatttatttcaaattttacattccaattacagaaaattttctaagccagtttttgttccttcatgagtattactatcaaggtcacatttttcatctagtatgttttaccctggtacttgttggcagggtcaggactaaggtgagatgcgcaaggcatttgcctcacacaaaatgcacaatgaataaaatgtcaaaactttaaataaagacagaatcactaaaagtactttgccatattggaacctgaggcaaaaagaaaaataagtaataatatttaaaattttgatctcttgttcattgtagatttttacattaattttgattgtttaaaacattgcattaaaatattatttaatgtgattgctgagt

SEQ ID NO: 289840 - DNA, 2885 bp, Homo sapiens
cgcccgcgacccacacccccaccccaccgcacatacccacgccacgaacacgagaccaccgcacgcgccctaaagcgcagcaggcggagagagggagatagggcgagggaaggagaacgcggagagagacgaagggagtgggagaccagcgacagcgagcgccagggcaccgcaggcacactggatgcccagtccgccggcccagccgccctcggaccctggaccgtgcgtcgtgggcaccagaaacgagactcggccaaatcctgcctcaccagcaggtagatgaaactcaagagaaaaggtgtggataaatgaaactagcccatgatgaacctgttttctccgtgaccacaatattaaccaggatgaatggcggtggcagtgggcctgcatcacaggttgcagcagatgttctcaatatttctattaaaatttccttatttccatatgcaagaggagccccagagctgcatccttatggtagctaccatgccgtgatgtaagctgccattcactggggagctttggcaatagaattggctagatcaggaagcctatgtcaactatggaacaacaacttgcagctcatctctattgatgatggaatctcgctatgtcaccaggctggagtgcagtggcgcaacctcggctcagcgcaacatccgcctcccgggttcaagtgattctcctacctcagcctcctgagtagctgggattacaggaatctaatgaccattgaactgtggccatgacttcaattacaagtattttcttcactaatgtcagactgtgggcctttgtatatacacttttaacaaactttttggaagtgcaatacatatcgcaacaacttctcaatgctgaatcatagtattggaagacattttaagcaacaattaaactcaacttatttactaccaataatgtacataagtcagctgaagtgaggataacatgaatagcacaaatacattatgattgctgcctggccaacagtaattataagaaactgtcagttttgagatgtgtcttgatttcagagatgttaaaaaagtttgtaagttaccattgataaaatatgagtttgcttccacaaatattctttcttctgtccttctggaactcaagagtaaacatatattagattttctcaccatttcatgcatgctggttcctaggctactctctgagtcattttttttttcttatctgccctccagttcactagttctgtcattttctgggtctgatctgctgcaaatgcaatacattgagttttaaatttcagtcattgtgttttcatttctagaaatttcatttgactctttctcaaattacttttccattttttttgtagtttcctatccctggagatattttcaatcatgccatttaattttttaaatacgcaagtgtagttttataatttgtgtctgataattctaatatctgaagtcttagtaggtctgtttcagttgtcctgtaattatgcatgtttttgcccatgttgctttgtttccttgtatgcttggttatctttcttactgcccttgcaaaattatttggagagtcctggaggcttaaatgaagataacttttaggaataatttgcatttgcttttgccgaggatcttgggatcatttcaaccaaaatcttagcttgaaattccgcaatcaatcaaggtgatgagaacctggtcagtaaatcctaatgagggccaggctgtggccaaagatttttagacagatgtttccctcctttgccatttctcttttctttcctcctctgctcctcttagtgtccagacaaccttcatggaagtccttggggtgggtgggaaatgaggacggcaggtttcattctaggtatagccctttgaggtctaacttaatgcagagagagttttctggtctatgtgccaccttacatgggatcttgagccttgatttctaaaccccttgcctttgatgtttcagaattgaagcttaaatttgccaacaggcaaatgtcctcaaggcaaattggcttaggtgttcgatattcttcttaccagaaaggtaaacttgggttttttacttcacccaggatttggcatgacagttccccattatcttgtcagcttagtgctttaagtgattgcatttaaaaaaattctgcattttcagtttttagcaggaggaatggcctcaactagtggttttcaactggggatgatttttttcccctaggggacatttgataatgtttggagatgttttagttgttagaactggggttgggggaactactgtcatctggtggggagagaccggcaatgctgttgatcttactataatgcacaggccacccccaacaacaaacaaattacatagccccaaatatcaataatgccaaggtccaaataacctaaccttccattactgaaaatagaagttcaagaagatagtttataatttaaaaatttttaggtcttaataagttgtcatactttcacaggttttatttcatactaagtaatttatttcaaattttacattccaattacagaaaattttctaagccagtttttgttccttcatgagtattactatcaaggtcacatttttcatctagtatgttttaccctggtacttgttggcagggtcaggactaaggtgagatgcgcaaggcatttgcctcacacaaaatgcacaatgaataaaatgtcaaaactttaaataaagacagaatcactaaaagtactttgccatattggaacctgaggcaaaaagaaaaataagtaataatatttaaaattttgatctcttgttcattgtagatttttacattaattttgattgtttaaaacattgcattaaaatattatttaatgtgattgctgagt

SEQ ID NO: 289841 - DNA, 1664 bp, Homo sapiens
  misc_feature (1284)..(1284): n is a, c, g, or t
  misc_feature (1375)..(1375): n is a, c, g, or t
  misc_feature (1467)..(1467): n is a, c, g, or t
  misc_feature (1650)..(1650): n is a, c, g, or t
ctcaggcgggcgcggagccgcgcggagtgacaaagccgccgctgccgccgccgggggtgggagccgcgctcgcccgcccgcccctcgactcgcgagggcgtaaaagtttgtctcagctcgagcattcctagcgccaacacgccctcaggtaaaggtggaagtaaatggccacgctgtattgacagaggtagggttggttttttaatactcgttctcactttaagtctcaccagggaggggtttgggaagcactgcgtgtttgggggacgttttgcgcttcctggtctctccagcctacaagtcgggagtcggcgaccgcttagtgacgagcgatgattttaaagagcagaataaaaggttttcccgtgcctgccccacagcccctccagctcgaataatggagaactgtcaatgcactccgcgagcggtggcccattgtacgcagctgatggcgaggaggcgactgggggtagcaggggctccttgccctcgtccctatgcccaaataaacgcgcaaacgcgctcccgtcttctggtcagttaaaaggtgaaacgaacacgattaaaatagaccaaaagaaaagaaagaaaagaaaacctttctatgtacagattctaaatcgtactccccatacagtcagaggcagggagtcgagggcagaggcagcaggcggagagagggagatagggcgagggaaggagaacgcggagagagacgaagggagtgggagaccagcgacagcgagcgccagggcaccgcaggcacactggatgcccagtccgccggcccagccgccctcggaccctggaccgtgcgtcgtgggcaccagaaacgagactcggccaaatcctgcctcaccagcaggtagatgaaactcaagagaaaaggtgtggataaatgaaactagcccatgatgaacctgttttctccgtgaccacaatattaaccaggatgaatggcggtggcagtgggcctgcatcacaggttgcagcagatgttctcaatatttctattaaaatttccttatttccatatgcaagaggagccccagagctgcatccttatggtagctaccatgccgtgatgtaagctgccattcactggggagctttggcaatagaattggctagatcaggaagcctatgtcaactatggaacaacaacttgcagctcatctctattgatgatacactgcctctaggactgggacagatagccactgagtacctgcttcaaatcaccctgcacgttttctctttggaaagataagcactggagaaccntctcgttaccttcagcagaaatggaaacaaatcaagacattaagaatgccgcagtggacagcagttatgcaaggttcagcagaggaagttntcaagatggtgtgcctcactagccagaaatcagaaaagatcgaagctagccttttcatctcagctgctccttaaatcagtgcaacccctccnaattaatgtgaattgaaacttgcattgcttttcaacttaattgaatacttactatatgtgaaccactgcacaaaataggggaagaagatgtgggagacaaagatgtggagcctgtcttcaataaatttacagttagtttcagggtacattgtttttcttctgctgttaattaggtgtatcccncaagagcaataaat

SEQ ID NO: 289842 - DNA, 3472 bp, Homo sapiens
ctcaggcgggcgcggagccgcgcggagtgacaaagccgccgctgccgccgccgggggtgggagccgcgctcgcccgcccgcccctcgactcgcgagggcgtaaaagtttgtctcagctcgagcattcctagcgccaacacgccctcaggtaaaggtggaagtaaatggccacgctgtattgacagaggtagggttggttttttaatactcgttctcactttaagtctcaccagggaggggtttgggaagcactgcgtgtttgggggacgttttgcgcttcctggtctctccagcctacaagtcgggagtcggcgaccgcttagtgacgagcgatgattttaaagagcagaataaaaggttttcccgtgcctgccccacagcccctccagctcgaataatggagaactgtcaatgcactccgcgagcggtggcccattgtacgcagctgatggcgaggaggcgactgggggtagcaggggctccttgccctcgtccctatgcccaaataaacgcgcaaacgcgctcccgtcttctggtcagttaaaaggtgaaacgaacacgattaaaatagaccaaaagaaaagaaagaaaagaaaacctttctatgtacagattctaaatcgtactccccatacagtcagaggcagggagtcgagggcagaggcagcaggcggagagagggagatagggcgagggaaggagaacgcggagagagacgaagggagtgggagaccagcgacagcgagcgccagggcaccgcaggcacactggatgcccagtccgccggcccagccgccctcggaccctggaccgtgcgtcgtgggcaccagaaacgagactcggccaaatcctgcctcaccagcaggtagatgaaactcaagagaaaaggtgtggataaatgaaactagcccatgatgaacctgttttctccgtgaccacaatattaaccaggatgaatggcggtggcagtgggcctgcatcacaggttgcagcagatgttctcaatatttctattaaaatttccttatttccatatgcaagaggagccccagagctgcatccttatggtagctaccatgccgtgatgtaagctgccattcactggggagctttggcaatagaattggctagatcaggaagcctatgtcaactatggaacaacaacttgcagctcatctctattgatgatggaatctcgctatgtcaccaggctggagtgcagtggcgcaacctcggctcagcgcaacatccgcctcccgggttcaagtgattctcctacctcagcctcctgagtagctgggattacaggaatctaatgaccattgaactgtggccatgacttcaattacaagtattttcttcactaatgtcagactgtgggcctttgtatatacacttttaacaaactttttggaagtgcaatacatatcgcaacaacttctcaatgctgaatcatagtattggaagacattttaagcaacaattaaactcaacttatttactaccaataatgtacataagtcagctgaagtgaggataacatgaatagcacaaatacattatgattgctgcctggccaacagtaattataagaaactgtcagttttgagatgtgtcttgatttcagagatgttaaaaaagtttgtaagttaccattgataaaatatgagtttgcttccacaaatattctttcttctgtccttctggaactcaagagtaaacatatattagattttctcaccatttcatgcatgctggttcctaggctactctctgagtcattttttttttcttatctgccctccagttcactagttctgtcattttctgggtctgatctgctgcaaatgcaatacattgagttttaaatttcagtcattgtgttttcatttctagaaatttcatttgactctttctcaaattacttttccattttttttgtagtttcctatccctggagatattttcaatcatgccatttaattttttaaatacgcaagtgtagttttataatttgtgtctgataattctaatatctgaagtcttagtaggtctgtttcagttgtcctgtaattatgcatgtttttgcccatgttgctttgtttccttgtatgcttggttatctttcttactgcccttgcaaaattatttggagagtcctggaggcttaaatgaagataacttttaggaataatttgcatttgcttttgccgaggatcttgggatcatttcaaccaaaatcttagcttgaaattccgcaatcaatcaaggtgatgagaacctggtcagtaaatcctaatgagggccaggctgtggccaaagatttttagacagatgtttccctcctttgccatttctcttttctttcctcctctgctcctcttagtgtccagacaaccttcatggaagtccttggggtgggtgggaaatgaggacggcaggtttcattctaggtatagccctttgaggtctaacttaatgcagagagagttttctggtctatgtgccaccttacatgggatcttgagccttgatttctaaaccccttgcctttgatgtttcagaattgaagcttaaatttgccaacaggcaaatgtcctcaaggcaaattggcttaggtgttcgatattcttcttaccagaaaggtaaacttgggttttttacttcacccaggatttggcatgacagttccccattatcttgtcagcttagtgctttaagtgattgcatttaaaaaaattctgcattttcagtttttagcaggaggaatggcctcaactagtggttttcaactggggatgatttttttcccctaggggacatttgataatgtttggagatgttttagttgttagaactggggttgggggaactactgtcatctggtggggagagaccggcaatgctgttgatcttactataatgcacaggccacccccaacaacaaacaaattacatagccccaaatatcaataatgccaaggtccaaataacctaaccttccattactgaaaatagaagttcaagaagatagtttataatttaaaaatttttaggtcttaataagttgtcatactttcacaggttttatttcatactaagtaatttatttcaaattttacattccaattacagaaaattttctaagccagtttttgttccttcatgagtattactatcaaggtcacatttttcatctagtatgttttaccctggtacttgttggcagggtcaggactaaggtgagatgcgcaaggcatttgcctcacacaaaatgcacaatgaataaaatgtcaaaactttaaataaagacagaatcactaaaagtactttgccatattggaacctgaggcaaaaagaaaaataagtaataatatttaaaattttgatctcttgttcattgtagatttttacattaattttgattgtttaaaacattgcattaaaatattatttaatgtgattgctgagt

SEQ ID NO: 289843 - DNA, 2746 bp, Homo sapiens
ctcaggcgggcgcggagccgcgcggagtgacaaagccgccgctgccgccgccgggggtgggagccgcgctcgcccgcccgcccctcgactcgcgagggcgtaaaagtttgtctcagctcgagcattcctagcgccaacacgccctcaggtaaaggtggaagtaaatggccacgctgtattgacagaggtagggttggttttttaatactcgttctcactttaagtctcaccagggaggggtttgggaagcactgcgtgtttgggggacgttttgcgcttcctggtctctccagcctacaagtcgggagtcggcgaccgcttagtgacgagcgatgattttaaagagcagaataaaaggttttcccgtgcctgccccacagcccctccagctcgaataatggagaactgtcaatgcactccgcgagcggtggcccattgtacgcagctgatggcgaggaggcgactgggggtagcaggggctccttgccctcgtccctatgcccaaataaacgcgcaaacgcgctcccgtcttctggtcagttaaaaggtgaaacgaacacgattaaaatagaccaaaagaaaagaaagaaaagaaaacctttctatgtacagattctaaatcgtactccccatacagtcagaggcagggagtcgagggcagaggcagcaggcggagagagggagatagggcgagggaaggagaacgcggagagagacgaagggagtgggagaccagcgacagcgagcgccagggcaccgcaggcacactggatgcccagtccgccggcccagccgccctcggaccctggaccgtgcgtcgtgggcaccagaaacgagactcggccaaatcctgcctcaccagcaggtagatgaaactcaagagaaaaggtgtggataaatgaaactagcccatgatgaacctgttttctccgtgaccacaatattaaccaggatgaatggcggtggcagtgggcctgcatcacaggttgcagcagatgttctcaatatttctattaaaatttccttatttccatatgcaagaggagccccagagctgcatccttatggtagctaccatgccgtgatgtaagctgccattcactggggagctttggcaatagaattggctagatcaggaagcctatgtcaactatggaacaacaacttgcagctcatctctattgatgatggaatctcgctatgtcaccaggctggagtgcagtggcgcaacctcggctcagcgcaacatccgcctcccgggttcaagtgattctcctacctcagcctcctgagtagctgggattacaggaatctaatgaccattgaactgtggccatgacttcaattacaagtattttcttcactaatgtcagactgtgggcctttgtatatacacttttaacaaactttttggaagtgcaatacatatcgcaacaacttctcaatgctgaatcatagtattggaagacattttaagcaacaattaaactcaacttatttactaccaataatgtacataagtcagctgaagtgaggataacatgaatagcacaaatacattatgattgctgcctggccaacagtaattataagaaactgtcagttttgagatgtgtcttgatttcagagatgttaaaaaagtttgtaagttaccattgataaaatatgagtttgcttccacaaatattctttcttctgtccttctggaactcaagagtaaacatatattagattttctcaccatttcatgcatgctggttcctaggctactctctgagtcattttttttttcttatctgccctccagttcactagttctgtcattttctgggtctgatctgctgcaaatgcaatacattgagttttaaatttcagtcattgtgttttcatttctagaaatttcatttgactctttctcaaattacttttccattttttttgtagtttcctatccctggagatattttcaatcatgccatttaattttttaaatacgcaagtgtagttttataatttgtgtctgataattctaatatctgaagtcttagtaggtctgtttcagttgtcctgtaattatgcatgtttttgcccatgttgctttgtttccttgtatgcttggttatctttcttactgcccttgcaaaattatttggagagtcctggaggcttaaatgaagataacttttaggaataatttgcatttgcttttgccgaggatcttgggatcatttcaaccaaaatcttagcttgaaattccgcaatcaatcaaggtgatgagaacctggtcagtaaatcctaatgagggccaggctgtggccaaagatttttagacagatgtttccctcctttgccatttctcttttctttcctcctctgctcctcttagtgtccagacaaccttcatggaagtccttggggtgggtgggaaatgaggacggcaggtttcattctaggtatagccctttgaggtctaacttaatgcagagagagttttctggtctatgtgccaccttacatgggatcttgagccttgatttctaaaccccttgcctttgatgtttcagaattgaagcttaaatttgccaacaggcaaatgtcctcaaggcaaattggcttaggtgttcgatattcttcttaccagaaaggtaaacttgggttttttacttcacccaggatttggcatgacagttccccattatttggtccgttaggggtaaggatgcgtttaacaattgcgttgtttcgg

SEQ ID NO: 289844 - DNA, 1570 bp, Homo sapiens
ctcaggcgggcgcggagccgcgcggagtgacaaagccgccgctgccgccgccgggggtgggagccgcgctcgcccgcccgcccctcgactcgcgagggcgtaaaagtttgtctcagctcgagcattcctagcgccaacacgccctcaggtaaaggtggaagtaaatggccacgctgtattgacagaggtagggttggttttttaatactcgttctcactttaagtctcaccagggaggggtttgggaagcactgcgtgtttgggggacgttttgcgcttcctggtctctccagcctacaagtcgggagtcggcgaccgcttagtgacgagcgatgattttaaagagcagaataaaaggttttcccgtgcctgccccacagcccctccagctcgaataatggagaactgtcaatgcactccgcgagcggtggcccattgtacgcagctgatggcgaggaggcgactgggggtagcaggggctccttgccctcgtccctatgcccaaataaacgcgcaaacgcgctcccgtcttctggtcagttaaaaggtgaaacgaacacgattaaaatagaccaaaagaaaagaaagaaaagaaaacctttctatgtacagattctaaatcgtactccccatacagtcagaggcagggagtcgagggcagaggcagcaggcggagagagggagatagggcgagggaaggagaacgcggagagagacgaagggagtgggagaccagcgacagcgagcgccagggcaccgcaggcacactggatgcccagtccgccggcccagccgccctcggaccctggaccgtgcgtcgtgggcaccagaaacgagactcggccaaatcctgcctcaccagcaggtagatgaaactcaagagaaaaggtgtggataaatgaaactagcccatgatgaacctgttttctccgtgaccacaatattaaccaggatgaatggcggtggcagtgggcctgcatcacaggttgcagcagatgttctcaatatttctattaaaatttccttatttccatatgcaagaggagccccagagctgcatccttatggtagctaccatgccgtgatgtaagctgccattcactggggagctttggcaatagaattggctagatcaggaagcctatgtcaactatggaacaacaacttgcagctcatctctattgatgagtaaaagaatatggaattttagctccagatcaatttcaagaacaaatcaggaatcccgagaggacccacagaccctctgaaggaagcagactgctcctgtagaacccgggagacaccccaaatactgggagtgccccaactgcagaattgggaaagggagagcctcctgtactgaacacacagctccactggagaaactgaagattcagggtctcagtctgccaccctagctggagtgcagtggtgtgatcatcgctcactgaagcctggaactcctgggctcaaagtttcctcctgcatcagcctaagtagctgggactacaggtgtgcatcaccaccgtgccctggcctgaaaatatttattgaaaacaccttgtgtaca

SEQ ID NO: 289845 - DNA, 1988 bp, Homo sapiens
gcaatggggataccattctggaagacttgcccatccaatctggtgacatgctgatcattgaagaagaccaaaccaggcccagaagttcacctgcatttactaaacgtggtgcttctagttacgtcagggaaactttgcctgtgcttaccagaaccgtggtcccagcagacaactcttgcctctttactagtgtgtactatgtcgtcgaaggaggagtcttgaatccagcttgtgcccctgagatgagacgcctcatagcacaaattgtagcaagcgatccagacttctatagtgaggcaatactgggaaaaacaaatcaagagtactgtgactggatcaaaagggatgacacttggggaggagcaatagagatatcgattttgtccaagttttaccaatgtgaaatatgtgtagtggatacacagacagtaagaattgatcgttttggggaagatgcaggatataccaaaagggttctgcttatttatgatggcatccactatgatccacttcagcgtaacttccctgatccagatacacctcctctgaccattttctcctctaatgatgatattgttcttgtacaagcactggaattagcagatgaagctagaagaaggagacagtttactgatgtcaaccgcttcaccctgagatgcatggtatgtcagaaaggattaactggacaagcagaagcaagggaacatgccaaggagacaggccataccaactttggagaagtgtgacctatgcatgaatgagggttgaagcctactacctcacacatccagaaggctctgggttttccaataagctatggtaaccctaaagaacaaaggatacaatgcttgaaccatccttttaacttaaaaccactaagacactgaaattccttgttaagattaaaattagtgtgcaagtttacagatgtgtgtctacagtggtaaactgtacatacatgcctctttctgctggagtgacagaataggtgatccttgccacctactgacactgacctgaaggttgagattgagtattataaactagcacccagcagctttaacttgtagaagaaagcatcacattttgggtaatgtggaaggcctcctgtgagtccactgggcatacgattgagattgagtattataaactagcacccagcagctttaacttgtagaagaaagcatcacattttgggtaatgtggaaggcctcctgtgagtccactggacatttaccacagtgtctccagtaactgagtctttttaaaaactctgaatgagttaagtttctaaattatgaattgattcatcaaatgaagatactcagaattgtccaaactgattttatattgcaatttggtagacattataaatgtgtgcttaaccactgataagtacatcacaagcaatttttacagggatgagtctcatccttgagaatgttatcacaaaacaggaactgattgtgccctgtttaagatctctagcatataaaacgtagaatgtatgagggaataggtgcctgagcagcttcctgaagctttaaaagaccgttggcctcgtgttttaatgcaattcatgtattggtctttgtcacattggataacattttaaagttaagcagggtacttttttaattgaaattccttgaaattcgagtcctcagttttttcttcatttgcgtaaagtttatcgggggggatttaattttctcagctttttgttaagagcacttcctccaaaaaatttttttcaagtaataatgctctgctttgggttggtttttgtaagattttttgcacacctaaagagtgtttgcttttgtgctagccttatccctccactaaagttattttaaataatttcacatttctgcaaattagcactttgcttatctgcaatcttttactttgatttttgaagttttaaagcaattggagtaatactgttgaatgaactagtttcacttccaaaatagaaaaaattg

SEQ ID NO: 289846 - DNA, 643 bp, Homo sapiens
gcaatggggataccattctggaagacttgcccatccaatctggtgacatgctgatcattgaagaagaccaaaccaggcccagaagttcacctgcatttactaaacgtggtgcttctagttacgtcagggaaactttgcctgtgcttaccagaaccgtggtcccagcagacaactcttgcctctttactagtgtgtactatgtcgtcgaaggaggagtcttgaatccagcttgtgcccctgagatgagacgcctcatagcacaaattgtagcaagcgatccagacttctatagtgaggcaatactgggaaaaacaaatcaagagtactgtgactggatcaaaagggatgacacttggggaggagcaatagagatatcgattttgtccaagttttaccaatgtgaaatatgtgtagtggatacacagacagtaagaattgatcgttttggggaagatgcaggatataccaaaagggttctgcttatttatgatggcatccactatgatccacttcagcgtaacttccctgatccagatacacctcctctgaccattttctcctctctgcgtttcaaacgcagagaggatgaacgctggacggatggtagcagtctagggattaacttcctgtatgctgcaactca

SEQ ID NO: 289847 - DNA, 2014 bp, Homo sapiens
ggccgggatgaaaagccacaggggggatggggagggccaagggccagggccgccaccaagtcgttcacagcagctgcttggtgtcctctctgcaggcctgctcaaggtggtgttcgtggtcttcgcctccttgtgtgcctggtattcggggtacctgctcgcagagctcattccagatgcacccctgtccagtgctgcctatagcatccgcagcatcggggagaggcctgtcctcaaagctccagtccccaaaaggcaaaaatgtgaccactggactccctgcccatctgacacctatgcctacaggttactcagcggaggtggcagaagcaagtacgccaaaatctgctttgaggataacctacttatgggagaacagctgggaaatgttgccagaggaataaacattgccattgtcaactatgtaactgggaatgtgacagcaacacgatgttttgatatgtatgaaggcgataactctggaccgatgacaaagtttattcagagtgctgctccaaaatccctgctcttcatggtgacctatgacgacggaagcacaagactgaataacgatgccaagaatgccatagaagcacttggaagtaaagaaatcaggaacatgaaattcaggtctagctgggtatttattgcagcaaaaggcttggaactcccttccgaaattcagagagaaaagatcaaccactctgatgctaagaacaacagatattctggctggcctgcagagatccagatagaaggctgcatacccaaagaacgaagctgacactgcagggtcctgagtaaatgtgttctgtataaacaaatgcagctggaatcgctcaagaatcttatttttctaaatccaacagcccatatttgatgagtattttgggtttgttgtaaaccaatgaacatttgctagttgtatcaaatcttggtacgcagtatttttataccagtattttatgtagtgaagatgtcaattagcaggaaactaaaatgaatggaaattcttaaagggaatgatgtgattcaagctggaaagagggttgggagaaacagcttgtccaggtggagctatgttatgatcagatcgaagtgtgacccctgtgtggtccagacagccctgcagagagaaaacctttattccattatcaccaagcacctcctagtttccgacagtcatctccttctgctgggagaattagcagcagttcagggggcttatgttatgtccttgttcaactcaacttgagctcttgaactcctcctgtgggcctgtgaatgtattcattcattccacaactctgggtgcctcccacgtctggcaccgggggtacagtacacattccctgccttcatgccaggctgctgagcggggtggggagggaggcgctgctctcaggagggcaactgaacacctcactctctagaagatgcagcagtagatccaagagtccaggatgttccacacgtgctggaacggtgggtcagatgacacatgtgattcggggctaagaaaataagagtcactggggccagcagtcactgccaactgtccattctcacctctttcccgggcctggccccagaagagctaggagactttggtgctgggttaatattccttctctgagcctctatatctcatctgtaagataaaagagttgggatagatgaatggttgccaagcatttttgttggcaggactccttttaaaacatggtgctacatggcaccccgaattccagcattctcacagtaacacactgccccaattctcagtggcttacgacagcattgatttcttgtttgtgttaatgtggccacaggccagccacggctgagccctaggtgtgaaaagccaggctgaaggggtgtcccctgtcaggcatgaaagccagagagggaacagaaatccagcctccaagccccaccaagctcctggcctgatgtgtcagccccagctgctcacatcccatggctccaaacatgggaggcaccaggtcagcga

SEQ ID NO: 289848 - DNA, 523 bp, Homo sapiens
ggttttggggactctcctcaaggggcccgccctgtctctgcaggctgggtcattacatcagtggtgtttgctggagatagacagggaagaaatatttccttccccaggccctggtgccacaagtgcgccctagttctgtgaactttcttttaaaataccatttcttttattttcagatgtaactgggaatgtgacagcaacacgatgttttgatatgtatgaaggcggtaagaaaattttttctgttaaaattcaaatgaattttaaacagaaaattaagattaaaaagcacaaagaaaaatgtcaaccatttttattttgtctactagaaaaacgccagcagctctcctgagtaatctagagtggtcttatgtagatcctcttaaactctaattgaattcatagaacatttgaaggcatcatctagaaatgtcttttcttctgttagttttcctcagtctttctctttttagctctcatgatataataagaaagagaaaaagcctttttttttaaaaaaaaa

SEQ ID NO: 289849 - DNA, 1991 bp, Homo sapiens
cccgacacgaccgctgcccgccccttgccttcctgacccaggggctccgctggctgcggtcgcctgggagctgccgccagggccaggaggggagcggcacctggaagatgcgcccattggctggtggcctgctcaaggtggtgttcgtggtcttcgcctccttgtgtgcctggtattcggggtacctgctcgcagagctcattccagatgcacccctgtccagtgctgcctatagcatccgcagcatcggggagaggcctgtcctcaaagctccagtccccaaaaggcaaaaatgtgaccactggactccctgcccatctgacacctatgcctacaggttactcagcggaggtggcagaagcaagtacgccagaggaataaacattgccattgtcaactatgtaactgggaatgtgacagcaacacgatgttttgatatgtatgaaggcgataactctggaccgatgacaaagtttattcagagtgctgctccaaaatccctgctcttcatggtgacctatgacgacggaagcacaagactgaataacgatgccaagaatgccatagaagcacttggaagtaaagaaatcaggaacatgaaattcaggtctagctgggtatttattgcagcaaaaggcttggaactcccttccgaaattcagagagaaaagatcaaccactctgatgctaagaacaacagatattctggctggcctgcagagatccagatagaaggctgcatacccaaagaacgaagctgacactgcagggtcctgagtaaatgtgttctgtataaacaaatgcagctggaatcgctcaagaatcttatttttctaaatccaacagcccatatttgatgagtattttgggtttgttgtaaaccaatgaacatttgctagttgtatcaaatcttggtacgcagtatttttataccagtattttatgtagtgaagatgtcaattagcaggaaactaaaatgaatggaaattcttaaagggaatgatgtgattcaagctggaaagagggttgggagaaacagcttgtccaggtggagctatgttatgatcagatcgaagtgtgacccctgtgtggtccagacagccctgcagagagaaaacctttattccattatcaccaagcacctcctagtttccgacagtcatctccttctgctgggagaattagcagcagttcagggggcttatgttatgtccttgttcaactcaacttgagctcttgaactcctcctgtgggcctgtgaatgtattcattcattccacaactctgggtgcctcccacgtctggcaccgggggtacagtacacattccctgccttcatgccaggctgctgagcggggtggggagggaggcgctgctctcaggagggcaactgaacacctcactctctagaagatgcagcagtagatccaagagtccaggatgttccacacgtgctggaacggtgggtcagatgacacatgtgattcggggctaagaaaataagagtcactggggccagcagtcactgccaactgtccattctcacctctttcccgggcctggccccagaagagctaggagactttggtgctgggttaatattccttctctgagcctctatatctcatctgtaagataaaagagttgggatagatgaatggttgccaagcatttttgttggcaggactccttttaaaacatggtgctacatggcaccccgaattccagcattctcacagtaacacactgccccaattctcagtggcttacgacagcattgatttcttgtttgtgttaatgtggccacaggccagccacggctgagccctaggtgtgaaaagccaggctgaaggggtgtcccctgtcaggcatgaaagccagagagggaacagaaatccagcctccaagccccaccaagctcctggcctgatgtgtcagccccagctgctcacatcccatggctccaaacatgggaggcaccaggtcagcga

SEQ ID NO: 289850 - DNA, 1326 bp, Homo sapiens
ggccgggatgaaaagccacaggggggatggggagggccaagggccagggccgccaccaagtcgttcacagcagctgcttggtgtcctctctgcaggcctgctcaaggtggtgttcgtggtcttcgcctccttgtgtgcctggtattcggggtacctgctcgcagagctcattccagatgcacccctgtccagtgctgcctatagcatccgcagcatcggggagaggcctgtcctcaaagctccagtccccaaaaggcaaaaatgtgaccactggactccctgcccatctgacacctatgcctacaggttactcagcggaggtggcagaagcaagtacgccaaaatctgctttgaggataacctacttatgggagaacagctgggaaatgttgccagaggaataaacattgccattgtcaactatgtaactgggaatgtgacagcaacacgatgttttgatatgtatgaaggcgataactctggaccgatgacaaagtttattcagagtgctgctccaaaatccctgctcttcatggtgacctatgacgacggaagcacaagactgaataacgatgccaagaatgccatagaagcacttggaagtaaagaaatcaggaacatgaaattcaggtctagctgggtatttattgcagcaaaaggcttggaactcccttccgaaattcagagagaaaagatcaaccactctgatgctaagaacaacagatattctggctggcctgcagagatccagatagaaggctgcatacccaaagaacgaagctgacactgcagggtcctgagtaaatgtgttctgtataaacaaatgcagctggaatcgctcaagaatcttatttttctaaatccaacagcccatatttgatgagtattttgggtttgttgtaaaccaatgaacatttgctagttgtcaaaaaaaaaaatacaaaaaaacaaaattttggggcggccaggccccgaaaaattttcaaacccttcgtttgggcgcgggccccccggtagggaaccggccaggtcccaagggacaccgggccaggacgagggcgcgggatttcccaaaaaaaagccgggggaacgaggcttcgaaccacccagaagggtcgaagcccatcgggccaaacacggggtcagggaaccgaataaatgcgcgcgcagagaaaaaacaccacaacacacacaacatcacagagacgaacgaagactgatgacgcaaatgcaatctatcacaggcatcacacgacacgacagacacagcagacaaaggaactaacgaggacacagcgacgcagcactacacagcacgcagcaata

SEQ ID NO: 289851 - DNA, 505 bp, Homo sapiens
agtccaggtcccctgagggactgagtctgtagacactgagaatagatgtgtgtggatgaacatgggggtggcggtctcgggagctgcaccaaggcgaatgcagactttcaaggaaaaggtgggggacagcagatgagactgacatttggtcaggcgaagacttcgcggagcggggagagtcgcacgcctcttggtacttgactaatgcttagctccatttcagacttatgggagaacagctgggaaatgttgccagaggaataaacattgccattgtcaactgtaagttactaaacattttctttaaacttctctaaaagctctctggtcagattttcaaaggtaccttgggttttcgagacttttgcgcgtgatttagtctaggtttgtattttaatgcattttaagattatatactcaattatttttacaagtctcacttcacagattatttgtggttctaacaacaaataaacaactgaaaaccaaatatagactttatttt

SEQ ID NO: 289852 - DNA, 2045 bp, Homo sapiens
cccgacacgaccgctgcccgccccttgccttcctgacccaggggctccgctggctgcggtcgcctgggagctgccgccagggccaggaggggagcggcacctggaagatgcgcccattggctggtggcctgctcaaggtggtgttcgtggtcttcgcctccttgtgtgcctggtattcggggtacctgctcgcagagctcattccagatgcacccctgtccagtgctgcctatagcatccgcagcatcggggagaggcctgtcctcaaagctccagtccccaaaaggcaaaaatgtgaccactggactccctgcccatctgacacctatgcctacaggttactcagcggaggtggcagaagcaagtacgccaaaatctgctttgaggataacctacttatgggagaacagctgggaaatgttgccagaggaataaacattgccattgtcaactatgtaactgggaatgtgacagcaacacgatgttttgatatgtatgaaggcgataactctggaccgatgacaaagtttattcagagtgctgctccaaaatccctgctcttcatggtgacctatgacgacggaagcacaagactgaataacgatgccaagaatgccatagaagcacttggaagtaaagaaatcaggaacatgaaattcaggtctagctgggtatttattgcagcaaaaggcttggaactcccttccgaaattcagagagaaaagatcaaccactctgatgctaagaacaacagatattctggctggcctgcagagatccagatagaaggctgcatacccaaagaacgaagctgacactgcagggtcctgagtaaatgtgttctgtataaacaaatgcagctggaatcgctcaagaatcttatttttctaaatccaacagcccatatttgatgagtattttgggtttgttgtaaaccaatgaacatttgctagttgtatcaaatcttggtacgcagtatttttataccagtattttatgtagtgaagatgtcaattagcaggaaactaaaatgaatggaaattcttaaagggaatgatgtgattcaagctggaaagagggttgggagaaacagcttgtccaggtggagctatgttatgatcagatcgaagtgtgacccctgtgtggtccagacagccctgcagagagaaaacctttattccattatcaccaagcacctcctagtttccgacagtcatctccttctgctgggagaattagcagcagttcagggggcttatgttatgtccttgttcaactcaacttgagctcttgaactcctcctgtgggcctgtgaatgtattcattcattccacaactctgggtgcctcccacgtctggcaccgggggtacagtacacattccctgccttcatgccaggctgctgagcggggtggggagggaggcgctgctctcaggagggcaactgaacacctcactctctagaagatgcagcagtagatccaagagtccaggatgttccacacgtgctggaacggtgggtcagatgacacatgtgattcggggctaagaaaataagagtcactggggccagcagtcactgccaactgtccattctcacctctttcccgggcctggccccagaagagctaggagactttggtgctgggttaatattccttctctgagcctctatatctcatctgtaagataaaagagttgggatagatgaatggttgccaagcatttttgttggcaggactccttttaaaacatggtgctacatggcaccccgaattccagcattctcacagtaacacactgccccaattctcagtggcttacgacagcattgatttcttgtttgtgttaatgtggccacaggccagccacggctgagccctaggtgtgaaaagccaggctgaaggggtgtcccctgtcaggcatgaaagccagagagggaacagaaatccagcctccaagccccaccaagctcctggcctgatgtgtcagccccagctgctcacatcccatggctccaaacatgggaggcaccaggtcagcga

SEQ ID NO: 289853 - DNA, 1901 bp, Homo sapiens
cccgacacgaccgctgcccgccccttgccttcctgacccaggggctccgctggctgcggtcgcctgggagctgccgccagggccaggaggggagcggcacctggaagatgcgcccattggctggtgctccagtccccaaaaggcaaaaatgtgaccactggactccctgcccatctgacacctatgcctacaggttactcagcggaggtggcagaagcaagtacgccaaaatctgctttgaggataacctacttatgggagaacagctgggaaatgttgccagaggaataaacattgccattgtcaactatgtaactgggaatgtgacagcaacacgatgttttgatatgtatgaaggcgataactctggaccgatgacaaagtttattcagagtgctgctccaaaatccctgctcttcatggtgacctatgacgacggaagcacaagactgaataacgatgccaagaatgccatagaagcacttggaagtaaagaaatcaggaacatgaaattcaggtctagctgggtatttattgcagcaaaaggcttggaactcccttccgaaattcagagagaaaagatcaaccactctgatgctaagaacaacagatattctggctggcctgcagagatccagatagaaggctgcatacccaaagaacgaagctgacactgcagggtcctgagtaaatgtgttctgtataaacaaatgcagctggaatcgctcaagaatcttatttttctaaatccaacagcccatatttgatgagtattttgggtttgttgtaaaccaatgaacatttgctagttgtatcaaatcttggtacgcagtatttttataccagtattttatgtagtgaagatgtcaattagcaggaaactaaaatgaatggaaattcttaaagggaatgatgtgattcaagctggaaagagggttgggagaaacagcttgtccaggtggagctatgttatgatcagatcgaagtgtgacccctgtgtggtccagacagccctgcagagagaaaacctttattccattatcaccaagcacctcctagtttccgacagtcatctccttctgctgggagaattagcagcagttcagggggcttatgttatgtccttgttcaactcaacttgagctcttgaactcctcctgtgggcctgtgaatgtattcattcattccacaactctgggtgcctcccacgtctggcaccgggggtacagtacacattccctgccttcatgccaggctgctgagcggggtggggagggaggcgctgctctcaggagggcaactgaacacctcactctctagaagatgcagcagtagatccaagagtccaggatgttccacacgtgctggaacggtgggtcagatgacacatgtgattcggggctaagaaaataagagtcactggggccagcagtcactgccaactgtccattctcacctctttcccgggcctggccccagaagagctaggagactttggtgctgggttaatattccttctctgagcctctatatctcatctgtaagataaaagagttgggatagatgaatggttgccaagcatttttgttggcaggactccttttaaaacatggtgctacatggcaccccgaattccagcattctcacagtaacacactgccccaattctcagtggcttacgacagcattgatttcttgtttgtgttaatgtggccacaggccagccacggctgagccctaggtgtgaaaagccaggctgaaggggtgtcccctgtcaggcatgaaagccagagagggaacagaaatccagcctccaagccccaccaagctcctggcctgatgtgtcagccccagctgctcacatcccatggctccaaacatgggaggcaccaggtcagcga

SEQ ID NO: 289854 - DNA, 1678 bp, Homo sapiens
aatgagactttcaaaaacaagtttttataaagatagtgaagacgaagaatagaaaacgcctgcacccacccaataagaaggacacagttgtactctgcagttaacctaagcagaacagtaaataatgagccgcagcgataactctggaccgatgacaaagtttattcagagtgctgctccaaaatccctgctcttcatggtgacctatgacgacggaagcacaagactgaataacgatgccaagaatgccatagaagcacttggaagtaaagaaatcaggaacatgaaattcaggtctagctgggtatttattgcagcaaaaggcttggaactcccttccgaaattcagagagaaaagatcaaccactctgatgctaagaacaacagatattctggctggcctgcagagatccagatagaaggctgcatacccaaagaacgaagctgacactgcagggtcctgagtaaatgtgttctgtataaacaaatgcagctggaatcgctcaagaatcttatttttctaaatccaacagcccatatttgatgagtattttgggtttgttgtaaaccaatgaacatttgctagttgtatcaaatcttggtacgcagtatttttataccagtattttatgtagtgaagatgtcaattagcaggaaactaaaatgaatggaaattcttaaagggaatgatgtgattcaagctggaaagagggttgggagaaacagcttgtccaggtggagctatgttatgatcagatcgaagtgtgacccctgtgtggtccagacagccctgcagagagaaaacctttattccattatcaccaagcacctcctagtttccgacagtcatctccttctgctgggagaattagcagcagttcagggggcttatgttatgtccttgttcaactcaacttgagctcttgaactcctcctgtgggcctgtgaatgtattcattcattccacaactctgggtgcctcccacgtctggcaccgggggtacagtacacattccctgccttcatgccaggctgctgagcggggtggggagggaggcgctgctctcaggagggcaactgaacacctcactctctagaagatgcagcagtagatccaagagtccaggatgttccacacgtgctggaacggtgggtcagatgacacatgtgattcggggctaagaaaataagagtcactggggccagcagtcactgccaactgtccattctcacctctttcccgggcctggccccagaagagctaggagactttggtgctgggttaatattccttctctgagcctctatatctcatctgtaagataaaagagttgggatagatgaatggttgccaagcatttttgttggcaggactccttttaaaacatggtgctacatggcaccccgaattccagcattctcacagtaacacactgccccaattctcagtggcttacgacagcattgatttcttgtttgtgttaatgtggccacaggccagccacggctgagccctaggtgtgaaaagccaggctgaaggggtgtcccctgtcaggcatgaaagccagagagggaacagaaatccagcctccaagccccaccaagctcctggcctgatgtgtcagccccagctgctcacatcccatggctccaaacatgggaggcaccaggtcagcga

SEQ ID NO: 289855 - DNA, 2371 bp, Homo sapiens
atatagagcaggcgccgcgggtcgcagcacagtgcggagaccgcagccccggagcccgggccagggtccacctgtccccgcagcgccggctcgcgccctcctgccgcagccaccgagccgccgtctagcgccccgacctcgccaccatgagagccctgctggcgcgcctgcttctctgcgtcctggtcgtgagcgactccaaaggcagcaatgaacttcatcaagttccatcgaactgtgactgtctaaatggaggaacatgtgtgtccaacaagtacttctccaacattcactggtgcaactgcccaaagaaattcggagggcagcactgtgaaatagataagtcaaaaacctgctatgaggggaatggtcacttttaccgaggaaaggccagcactgacaccatgggccggccctgcctgccctggaactctgccactgtccttcagcaaacgtaccatgcccacagatctgatgctcttcagctgggcctggggaaacataattactgcaggaacccagacaaccggaggcgaccctggtgctatgtgcaggtgggcctaaagccgcttgtccaagagtgcatggtgcatgactgcgcagatggaaaaaagccctcctctcctccagaagaattaaaatttcagtgtggccaaaagactctgaggccccgctttaagattattgggggagaattcaccaccatcgagaaccagccctggtttgcggccatctacaggaggcaccgggggggctctgtcacctacgtgtgtggaggcagcctcatcagcccttgctgggtgatcagcgccacacactgcttcattgattacccaaagaaggaggactacatcgtctacctgggtcgctcaaggcttaactccaacacgcaaggggagatgaagtttgaggtggaaaacctcatcctacacaaggactacagcgctgacacgcttgctcaccacaacgacattgccttgctgaagatccgttccaaggagggcaggtgtgcgcagccatcccggactatacagaccatctgcctgccctcgatgtataacgatccccagtttggcacaagctgtgagatcactggctttggaaaagagaattctaccgactatctctatccggagcagctgaaaatgactgttgtgaagctgatttcccaccgggagtgtcagcagccccactactacggctctgaagtcaccaccaaaatgctgtgtgctgctgacccacagtggaaaacagattcctgccagggagactcagggggacccctcgtctgttccctccaaggccgcatgactttgactggaattgtgagctggggccgtggatgtgccctgaaggacaagccaggcgtctacacgagagtctcacacttcttaccctggatccgcagtcacaccaaggaagagaatggcctggccctctgagggtccccagggaggaaacgggcaccacccgctttcttgctggttgtcatttttgcagtagagtcatctccatcagctgtaagaagagactgggaagataggctctgcacagatggatttgcctgtgccacccaccagggtgaacgacaatagctttaccctcaggcataggcctgggtgctggctgcccagacccctctggccaggatggaggggtggtcctgactcaacatgttactgaccagcaacttgtctttttctggactgaagcctgcaggagttaaaaagggcagggcatctcctgtgcatgggtgaagggagagccagctcccccgacggtgggcatttgtgaggcccatggttgagaaatgaataatttcccaattaggaagtgtaacagctgaggtctcttgagggagcttagccaatgtgggagcagcggtttggggagcagagacactaacgacttcagggcagggctctgatattccatgaatgtatcaggaaatatatatgtgtgtgtatgtttgcacacttgtgtgtgggctgtgagtgtaagtgtgagtaagagctggtgtctgattgttaagtctaaatatttccttaaactgtgtggactgtgatgccacacagagtggtctttctggagaggttataggtcactcctggggcctcttgggtcccccacgtgacagtgcctgggaatgtattattctgcagcatgacctgtgaccagcactgtctcagtttcactttcacatagatgtccctttcttggccagttatcccttccttttagcctagttcatccaatcctcactgggtggggtgaggaccactccttacactgaatatttatatttcactatttttatttatatttttgtaattttaaataaaagtgatcaataaaatgtgatttttctgat

SEQ ID NO: 289856 - DNA, 2394 bp, Homo sapiens
atatagagcaggcgccgcgggtcgcagcacagtgcggagaccgcagccccggagcccgggccagggtccacctgtccccgcagcgccggctcgcgccctcctgccgcagccaccgagccgccgtctagcgccccgacctcgccaccatgagagccctgctggcgcgcctgcttctctgcgtcctggtcgtgagcgactccaaaggcagcaatgaacttcatcaagttccatcgaactgtgactgtctaaatggaggaacatgtgtgtccaacaagtacttctccaacattcactggtgcaactgcccaaagaaattcggagggcagcactgtgaaatagataagtcaaaaacctgctatgaggggaatggtcacttttaccgaggaaaggccagcactgacaccatgggccggccctgcctgccctggaactctgccactgtccttcagcaaacgtaccatgcccacagatctgatgctcttcagctgggcctggggaaacataattactgcaggaacccagacaaccggaggcgaccctggtgctatgtgcaggtgggcctaaagccgcttgtccaagagtgcatggtgcatgactgcgcagatggaaaaaagccctcctctcctccagaagaattaaaatttcagtgtggccaaaagactctgaggccccgctttaagattattgggggagaattcaccaccatcgagaaccagccctggtttgcggccatctacaggaggcaccgggggggctctgtcacctacgtgtgtggaggcagcctcatcagcccttgctgggtgatcagcgccacacactgcttcattgattacccaaagaaggaggactacatcgtctacctgggtcgctcaaggcttaactccaacacgcaaggggagatgaagtttgaggtggaaaacctcatcctacacaaggactacagcgctgacacgcttgctcaccacaacgacattgccttgctgaagatccgttccaaggagggcaggtgtgcgcagccatcccggactatacagaccatctgcctgccctcgatgtataacgatccccagtttggcacaagctgtgagatcactggctttggaaaagagaattctaccgactatctctatccggagcagctgaaaatgactgttgtgaagctgatttcccaccgggagtgtcagcagccccactactacggctctgaagtcaccaccaaaatgctgtgtgctgctgacccacagtggaaaacagattcctgccagggagactcagggggacccctcgtctgttccctccaaggccgcatgactttgactggaattgtgagctggggccgtggatgtgccctgaaggacaagccaggcgtctacacgagagtctcacacttcttaccctggatccgcagtcacaccaaggaagagaatggcctggccctctgagggtccccagggaggaaacgggcaccacccgctttcttgctggttgtcatttttgcagtagagtcatctccatcagctgtaagaagagactgggaagataggctctgcacagatggatttgcctgtgccacccaccagggtgaacgacaatagctttaccctcaggcataggcctgggtgctggctgcccagacccctctggccaggatggaggggtggtcctgactcaacatgttactgaccagcaacttgtctttttctggactgaagcctgcaggagttaaaaagggcagggcatctcctgtgcatgggtgaagggagagccagctcccccgacggtgggcatttgtgaggcccatggttgagaaatgaataatttcccaattaggaagtgtaacagctgaggtctcttgagggagcttagccaatgtgggagcagcggtttggggagcagagacactaacgacttcagggcagggctctgatattccatgaatgtatcaggaaatatatatgtgtgtgtatgtttgcacacttgtgtgtgggctgtgagtgtaagtgtgagtaagagctggtgtctgattgttaagtctaaatatttccttaaactgtgtggactgtgatgccacacagagtggtctttctggagaggttataggtcactcctggggcctcttgggtcccccacgtgacagtgcctgggaatgtattattctgcagcatgacctgtgaccagcactgtctcagtttcactttcacatagatgtccctttcttggccagttatcccttccttttagcctagttcatccaatcctcactgggtggggtgaggaccactccttacactgaatatttatatttcactatttttatttatatttttgtaattttaaataaaagtgatcaataaaatgtgatttttctgataaaaaaaaaacaacaacaaaaaa

SEQ ID NO: 289857 - DNA, 955 bp, Homo sapiens
ggtcatagctgactctagaggataaacggtccccagggaggaaacgggcaccacccgctttcttgctggttgtcatttttgcagtagagtcatctccatcagctgtaagaagagactgggaagataggctctgcacagatggatttgcctgtgccacccaccagggtgaacgacaatagctttaccctcaggcataggcctgggtgctggctgcccagacccctctggccaggatggaggggtggtcctgactcaacatgttactgaccagcaacttgtctttttctggactgaagcctgcaggagttaaaaagggcagggcatctcctgtgcatgggtgaagggagagccagctcccccgacggtgggcatttgtgaggcccatggttgagaaatgaataatttcccaattaggaagtgtaacagctgaggtctcttgagggagcttagccaatgtgggagcagcggtttggggagcagagacactaacgacttcagggcagggctctgatattccatgaatgtatcaggaaatatatatgtgtgtgtatgtttgcacacttgtgtgtgggctgtgagtgtaagtgtgagtaagagctggtgtctgattgttaagtctaaatatttccttaaactgtgtggactgtgatgccacacagagtggtctttctggagaggttataggtcactcctggggcctcttgggtcccccacgtgacagtgcctgggaatgtattattctgcagcatgacctgtgaccagcactgtctcagtttcactttcacatagatgtccctttcttggccagttatcccttccttttagcctagttcatccaatcctcactgggtggggtgaggaccactccttacactgaatatttatatttcactatttttatttatatttttgtaattttaaataaaagtgatcaataaaatgtgatttttctgat

SEQ ID NO: 289858 - DNA, 911 bp, Homo sapiens
aataacagggcataatggtgcatacctgtggtcccagctactagggaggctgaggtaggaggactgcttgagccaaggggtttaaggctgcaagatggatttgcctgtgccacccaccagggtgaacgacaatagctttaccctcaggcataggcctgggtgctggctgcccagacccctctggccaggatggaggggtggtcctgactcaacatgttactgaccagcaacttgtctttttctggactgaagcctgcaggagttaaaaagggcagggcatctcctgtgcatgggtgaagggagagccagctcccccgacggtgggcatttgtgaggcccatggttgagaaatgaataatttcccaattaggaagtgtaacagctgaggtctcttgagggagcttagccaatgtgggagcagcggtttggggagcagagacactaacgacttcagggcagggctctgatattccatgaatgtatcaggaaatatatatgtgtgtgtatgtttgcacacttgtgtgtgggctgtgagtgtaagtgtgagtaagagctggtgtctgattgttaagtctaaatatttccttaaactgtgtggactgtgatgccacacagagtggtctttctggagaggttataggtcactcctggggcctcttgggtcccccacgtgacagtgcctgggaatgtattattctgcagcatgacctgtgaccagcactgtctcagtttcactttcacatagatgtccctttcttggccagttatcccttccttttagcctagttcatccaatcctcactgggtggggtgaggaccactccttacactgaatatttatatttcactatttttatttatatttttgtaattttaaataaaagtgatcaataaaatgtgatttttctgat

SEQ ID NO: 289859 - DNA, 759 bp, Homo sapiens
tgagagagaggtttattgtctattttgttcattgctgaagctctaacccctatatcaatgtctggcacgtagcagggacactggtccctgccgagtgggtcctgcaggagttaaaaagggcagggcatctcctgtgcatgggtgaagggagagccagctcccccgacggtgggcatttgtgaggcccatggttgagaaatgaataatttcccaattaggaagtgtaacagctgaggtctcttgagggagcttagccaatgtgggagcagcggtttggggagcagagacactaacgacttcagggcagggctctgatattccatgaatgtatcaggaaatatatatgtgtgtgtatgtttgcacacttgtgtgtgggctgtgagtgtaagtgtgagtaagagctggtgtctgattgttaagtctaaatatttccttaaactgtgtggactgtgatgccacacagagtggtctttctggagaggttataggtcactcctggggcctcttgggtcccccacgtgacagtgcctgggaatgtattattctgcagcatgacctgtgaccagcactgtctcagtttcactttcacatagatgtccctttcttggccagttatcccttccttttagcctagttcatccaatcctcactgggtggggtgaggaccactccttacactgaatatttatatttcactatttttatttatatttttgtaattttaaataaaagtgatcaataaaatgtgatttttctgat

SEQ ID NO: 289860 - DNA, 573 bp, Homo sapiens
gccactgtccttcagcaaacgtaccatgcccacagatctgatgctcttcagctgggcctggggaaacataattactgcaggtgaggtgggggcaacaaggaccaaaagccctccctacagcttcccagaaaccttgttaccatccccttctcccagagggctggccatagcacaagagaagtgcggcctctggttgagtcttccctgaggggaggaggcagggaaggccctctgggttggaatgacatcccctatctttctgtgttgccaggaacccagacaaccggaggcgaccctggtgctatgtgcaggtgggcctaaagccgcttgtccaagagtgcatggtgcatgactgcgcagatggtgagcatcactgacctgctgatgacagtggggtggaaggggacaaacttacatgtccccttattccatcacaggaggactgaggaggtggggggtgcccgagagggatgctttctcctacctgcctccctaagacatccctctgtttgtcctccaggaaaaaagccctcctctcctccagaagaattaaaatttcagtgtggccaaaag

SEQ ID NO: 289861 - DNA, 460 bp, Homo sapiens
gaccggccctctgggcagaggcttgatgcaaacgcctccctgttttctccacctagccgactatctctatccggagcagctgaaaatgactgttgtgaagctgatttcccaccgggagtgtcagcagccccactactacggctctgaagtcaccaccaaaatgctgtgtgctgctgacccacagtggaaaacagattcctgccaggtgagtgttccaagcatctctctccacctcttccatatctccccagagctcctgggcttgttccagccagcttaagggtgtctctctctagccaaagccctaagtagccagaatcaggagctcaggtctttgagggtttaaaccagtccttatgtgtttgccagacattaccaaaaaaatcccagctctgcgctagtcacttcagactgggggcacgagatcctagaaagaggaaacagtaaaagacaatgtaac

SEQ ID NO: 289862 - DNA, 2392 bp, Homo sapiens
atatagagcaggcgccgcgggtcgcagcacagtgcggagaccgcagccccggagcccgggccagggtccacctgtccccgcagcgccggctcgcgccctcctgccgcagccaccgagccgccgtctagcgccccgacctcgccaccatgagagccctgctggcgcgcctgcttctctgcgtcctggtcgtgagcgactccaaaggcagcaatgaacttcatcaagttccatcgaactgtgactgtctaaatggaggaacatgtgtgtccaacaagtacttctccaacattcactggtgcaactgcccaaagaaattcggagggcagcactgtgaaatagataagtcaaaaacctgctatgaggggaatggtcacttttaccgaggaaaggccagcactgacaccatgggccggccctgcctgccctggaactctgccactgtccttcagcaaacgtaccatgcccacagatctgatgctcttcagctgggcctggggaaacataattactgcaggaacccagacaaccggaggcgaccctggtgctatgtgcaggtgggcctaaagccgcttgtccaagagtgcatggtgcatgactgcgcagatggaaaaaagccctcctctcctccagaagaattaaaatttcagtgtggccaaaagactctgaggccccgctttaagattattgggggagaattcaccaccatcgagaaccagccctggtttgcggccatctacaggaggcaccgggggggctctgtcacctacgtgtgtggaggcagcctcatcagcccttgctgggtgatcagcgccacacactgcttcattgattacccaaagaaggaggactacatcgtctacctgggtcgctcaaggcttaactccaacacgcaaggggagatgaagtttgaggtggaaaacctcatcctacacaaggactacagcgctgacacgcttgctcaccacaacgacattgccttgctgaagatccgttccaaggagggcaggtgtgcgcagccatcccggactatacagaccatctgcctgccctcgatgtataacgatccccagtttggcacaagctgtgagatcactggctttggaaaagagaattctaccgactatctctatccggagcagctgaaaatgactgttgtgaagctgatttcccaccgggagtgtcagcagccccactactacggctctgaagtcaccaccaaaatgctgtgtgctgctgacccacagtggaaaacagattcctgccagggagactcagggggacccctcgtctgttccctccaaggccgcatgactttgactggaattgtgagctggggccgtggatgtgccctgaaggacaagccaggcgtctacacgagagtctcacacttcttaccctggatccgcagtcacaccaaggaagagaatggcctggccctctgagggtccccagggaggaaacgggcaccacccgctttcttgctggttgtcatttttgcagtagagtcatctccatcagctgtaagaagagactgggaagataggctctgcacagatggatttgcctgtgccacccaccagggtgaacgacaatagctttaccctcaggcataggcctgggtgctggctgcccagacccctctggccaggatggaggggtggtcctgactcaacatgttactgaccagcaacttgtctttttctggactgaagcctgcaggagttaaaaagggcagggcatctcctgtgcatgggtgaagggagagccagctcccccgacggtgggcatttgtgaggcccatggttgagaaatgaataatttcccaattaggaagtgtaacagctgaggtctcttgagggagcttagccaatgtgggagcagcggtttggggagcagagacactaacgacttcagggcagggctctgatattccatgaatgtatcaggaaatatatatgtgtgtgtatgtttgcacacttgtgtgtgggctgtgagtgtaagtgtgagtaagagctggtgtctgattgttaagtctaaatatttccttaaactgtgtggactgtgatgccacacagagtggtctttctggagaggttataggtcactcctggggcctcttgggtcccccacgtgacagtgcctgggaatgtattattctgcagcatgacctgtgaccagcactgtctcagtttcactttcacatagatgtccctttcttggccagttatcccttccttttagcctagttcatccaatcctcactgggtggggtgaggaccactccttacactgaatatttatatttcactatttttatttatatttttgtaattttaaataaaagtgatcaataaaatgtgatttttctgatgaaaaagaaggaagaaaaaag

SEQ ID NO: 289863 - DNA, 2343 bp, Homo sapiens
atatagagcaggcgccgcgggtcgcagcacagtgcggagaccgcagccccggagcccgggccagggtccacctgtccccgcagcgccggctcgcgccctcctgccgcagccaccgagccgccgtctagcgccccgacctcgccaccatgagagccctgctggcgcgcctgcttctctgcgtcctggtcgtgagcgactccaaacgaactgtgactgtctaaatggaggaacatgtgtgtccaacaagtacttctccaacattcactggtgcaactgcccaaagaaattcggagggcagcactgtgaaatagataagtcaaaaacctgctatgaggggaatggtcacttttaccgaggaaaggccagcactgacaccatgggccggccctgcctgccctggaactctgccactgtccttcagcaaacgtaccatgcccacagatctgatgctcttcagctgggcctggggaaacataattactgcaggaacccagacaaccggaggcgaccctggtgctatgtgcaggtgggcctaaagccgcttgtccaagagtgcatggtgcatgactgcgcagatggaaaaaagccctcctctcctccagaagaattaaaatttcagtgtggccaaaagactctgaggccccgctttaagattattgggggagaattcaccaccatcgagaaccagccctggtttgcggccatctacaggaggcaccgggggggctctgtcacctacgtgtgtggaggcagcctcatcagcccttgctgggtgatcagcgccacacactgcttcattgattacccaaagaaggaggactacatcgtctacctgggtcgctcaaggcttaactccaacacgcaaggggagatgaagtttgaggtggaaaacctcatcctacacaaggactacagcgctgacacgcttgctcaccacaacgacattgccttgctgaagatccgttccaaggagggcaggtgtgcgcagccatcccggactatacagaccatctgcctgccctcgatgtataacgatccccagtttggcacaagctgtgagatcactggctttggaaaagagaattctaccgactatctctatccggagcagctgaaaatgactgttgtgaagctgatttcccaccgggagtgtcagcagccccactactacggctctgaagtcaccaccaaaatgctgtgtgctgctgacccacagtggaaaacagattcctgccagggagactcagggggacccctcgtctgttccctccaaggccgcatgactttgactggaattgtgagctggggccgtggatgtgccctgaaggacaagccaggcgtctacacgagagtctcacacttcttaccctggatccgcagtcacaccaaggaagagaatggcctggccctctgagggtccccagggaggaaacgggcaccacccgctttcttgctggttgtcatttttgcagtagagtcatctccatcagctgtaagaagagactgggaagataggctctgcacagatggatttgcctgtgccacccaccagggtgaacgacaatagctttaccctcaggcataggcctgggtgctggctgcccagacccctctggccaggatggaggggtggtcctgactcaacatgttactgaccagcaacttgtctttttctggactgaagcctgcaggagttaaaaagggcagggcatctcctgtgcatgggtgaagggagagccagctcccccgacggtgggcatttgtgaggcccatggttgagaaatgaataatttcccaattaggaagtgtaacagctgaggtctcttgagggagcttagccaatgtgggagcagcggtttggggagcagagacactaacgacttcagggcagggctctgatattccatgaatgtatcaggaaatatatatgtgtgtgtatgtttgcacacttgtgtgtgggctgtgagtgtaagtgtgagtaagagctggtgtctgattgttaagtctaaatatttccttaaactgtgtggactgtgatgccacacagagtggtctttctggagaggttataggtcactcctggggcctcttgggtcccccacgtgacagtgcctgggaatgtattattctgcagcatgacctgtgaccagcactgtctcagtttcactttcacatagatgtccctttcttggccagttatcccttccttttagcctagttcatccaatcctcactgggtggggtgaggaccactccttacactgaatatttatatttcactatttttatttatatttttgtaattttaaataaaagtgatcaataaaatgtgatttttctgat

SEQ ID NO: 289864 - DNA, 1855 bp, Homo sapiens
gatatgctcgtacccgtcagacgctgaactatgtgcaggtgggcctaaagccgcttgtccaagagtgcatggtgcatgactgcgcagatggaaaaaagccctcctctcctccagaagaattaaaatttcagtgtggccaaaagactctgaggccccgctttaagattattgggggagaattcaccaccatcgagaaccagccctggtttgcggccatctacaggaggcaccgggggggctctgtcacctacgtgtgtggaggcagcctcatcagcccttgctgggtgatcagcgccacacactgcttcattgattacccaaagaaggaggactacatcgtctacctgggtcgctcaaggcttaactccaacacgcaaggggagatgaagtttgaggtggaaaacctcatcctacacaaggactacagcgctgacacgcttgctcaccacaacgacattgccttgctgaagatccgttccaaggagggcaggtgtgcgcagccatcccggactatacagaccatctgcctgccctcgatgtataacgatccccagtttggcacaagctgtgagatcactggctttggaaaagagaattctaccgactatctctatccggagcagctgaaaatgactgttgtgaagctgatttcccaccgggagtgtcagcagccccactactacggctctgaagtcaccaccaaaatgctgtgtgctgctgacccacagtggaaaacagattcctgccagggagactcagggggacccctcgtctgttccctccaaggccgcatgactttgactggaattgtgagctggggccgtggatgtgccctgaaggacaagccaggcgtctacacgagagtctcacacttcttaccctggatccgcagtcacaccaaggaagagaatggcctggccctctgagggtccccagggaggaaacgggcaccacccgctttcttgctggttgtcatttttgcagtagagtcatctccatcagctgtaagaagagactgggaagataggctctgcacagatggatttgcctgtgccacccaccagggtgaacgacaatagctttaccctcaggcataggcctgggtgctggctgcccagacccctctggccaggatggaggggtggtcctgactcaacatgttactgaccagcaacttgtctttttctggactgaagcctgcaggagttaaaaagggcagggcatctcctgtgcatgggtgaagggagagccagctcccccgacggtgggcatttgtgaggcccatggttgagaaatgaataatttcccaattaggaagtgtaacagctgaggtctcttgagggagcttagccaatgtgggagcagcggtttggggagcagagacactaacgacttcagggcagggctctgatattccatgaatgtatcaggaaatatatatgtgtgtgtatgtttgcacacttgtgtgtgggctgtgagtgtaagtgtgagtaagagctggtgtctgattgttaagtctaaatatttccttaaactgtgtggactgtgatgccacacagagtggtctttctggagaggttataggtcactcctggggcctcttgggtcccccacgtgacagtgcctgggaatgtattattctgcagcatgacctgtgaccagcactgtctcagtttcactttcacatagatgtccctttcttggccagttatcccttccttttagcctagttcatccaatcctcactgggtggggtgaggaccactccttacactgaatatttatatttcactatttttatttatatttttgtaattttaaataaaagtgatcaataaaatgtgatttttctgat

SEQ ID NO: 289865 - DNA, 1294 bp, Homo sapiens
tgcgatgtcctcggtttcccatttgttgctgctgctgctcattccacactgttgagaccttgtggtctcgatgctgctggcctccctccgtccctctgtccacttgtgggtcctggggtcgtcttagcagagccaccgccaaggtttgcactcagggaggggctgatggagggctgggcgccatggggtcagggaggccccagggacccatgggcagagctggggagccaggaggatgggtctgcctgctctgggggtgcaggctctgcagacaccccaattgctgctctgttgctgtgcctagtctagtgtcccccaaagcatcggggggccacgcaagtgtgggtgtgtgagtgtgcgtatgtggggaccccccagggcatggtggggtctgaggcgtgtgttcccatttagggctgaatgaagccatgacttggaaaggtggtggggggtggatggcggctgtgactcagggcccagggatcacatgggggtcactgctgccatcagcagtcaggcagggagaacagaaatgcaaaaatacagatgtgtctatttttctaaactggggggtggaggggtgcctcctgacagcttccaaagagctgactgtggagggcccacagtgtatcccacccctgcccgagagtctctctcctttgggacccccgggttcccagagctccgaggaaactgatccttcatgtttcaatagctgttgttgtttttctctttgggccgggccgggccggggaagggccgagcaggctccaggaggcctccagagtcagctggaccttgctgtgtcgcccgcaggcagccctgcagacaccggtgaggtgggatgatttcaggaggtcccagcccgggactgcccgcccctctgccctgggaaccagtccaaggggctgtcagttgaatttgcctttttgttgttgttgttgtttttgttgtttatttgttctccttttaaggaattatgaagctaagaaaagttttgtgttttgggggttggtggacaaagttctagctgattaaatatggtctaacttattgatactatttttttttcttttaatgttgtactgtggagaaaaactattttgagccatggggttggtgtttacaagaactttccacttttgccaaaatgttacaattgaaaggcatctatctgcgtcttcagtttcctgatattttcttaaaagatctagtgtcctttttgtacactaaacaggtgaatgctgacttttttcattctccaataaatttcactgaactgaaaaaaaaagcc

SEQ ID NO: 289866 - DNA, 497 bp, Homo sapiens
gtgagtgggggcagcggggtgtcccagaggcccttccgtgaccgagtgctgcacctcctggcactacggccctaccgcaaggctgagctgcctgggaaccagtccaaggggctgtcagttgaatttgcctttttgttgttgttgttgtttttgttgtttatttgttctccttttaaggaattatgaagctaagaaaagttttgtgttttgggggttggtggacaaagttctagctgattaaatatggtctaacttattgatactatttttttttcttttaatgttgtactgtggagaaaaactattttgagccatggggttggtgtttacaagaactttccacttttgccaaaatgttacaattgaaaggcatctatctgcgtcttcagtttcctgatattttcttaaaagatctagtgtcctttttgtacactaaacaggtgaatgctgacttttttcattctccaataaatttcactgaactgaaaaaaaaagcc

SEQ ID NO: 289867 - DNA, 1245 bp, Homo sapiens
  misc_feature (1230)..(1230): n is a, c, g, or t
tgcgatgtcctcggtttcccatttgttgctgctgctgctcattccacactgttgagaccttgtggtctcgatgctgctggcctccctccgtccctctgtccacttgtgggtcctggggtcgtcttagcagagccaccgccaaggtttgcactcagggaggggctgatggagggctgggcgccatggggtcagggaggccccagggacccatgggcagagctggggagccaggaggatgggtctgcctgctctgggggtgcaggctctgcagacaccccaattgctgctctgttgctgtgcctagtctagtgtcccccaaagcatcggggggccacgcaagtgtgggtgtgtgagtgtgcgtatgtggggaccccccagggcatggtggggtctgaggcgtgtgttcccatttagggctgaatgaagccatgacttggaaaggtggtggggggtggatggcggctgtgactcagggcccagggatcacatgggggtcactgctgccatcagcagtcaggcagggagaacagaaatgcaaaaatacagatgtgtctatttttctaaactggggggtggaggggtgcctcctgacagcttccaaagagctgactgtggagggcccacagtgtatcccacccctgcccgagagtctctctcctttgggacccccgggttcccagagctccgaggaaactgatccttcatgtttcaatagctgttgttgtttttctctttgggccgggccgggccggggaagggccgagcaggctccaggaggcctccagagtcagctggaccttgctgtgtcgcccgcaggcagccctgcagacaccggtgaggtgggatgatttcaggaggtcccagcccgggactgcccgcccctctgccctgggaaccagtccaaggggctgtcagttgaatttgcctttttgttgttgttgttgtttttgttgtttatttgttctccttttaaggaattatgaagctaagaaaagttttgtgttttgggggttggtggacaaagttctagctgattaaatatggtctaacttattgatactatttttttttcttttaatgttgtactgtggagaaaaactattttgagccatggggttggtgtttacaagaactttccacttttgccaaaatgttacaattgaaaggcatctatctgcgtcttcagtttcctgatattttcttaaaagatctccaagttacctccaagangtgtccaacttataa

SEQ ID NO: 289868 - DNA, 1234 bp, Homo sapiens
  misc_feature (1218)..(1218): n is a, c, g, or t
tgcgatgtcctcggtttcccatttgttgctgctgctgctcattccacactgttgagaccttgtggtctcgatgctgctggcctccctccgtccctctgtccacttgtgggtcctggggtcgtcttagcagagccaccgccaaggtttgcactcagggaggggctgatggagggctgggcgccatggggtcagggaggccccagggacccatgggcagagctggggagccaggaggatgggtctgcctgctctgggggtgcaggctctgcagacaccccaattgctgctctgttgctgtgcctagtctagtgtcccccaaagcatcggggggccacgcaagtgtgggtgtgtgagtgtgcgtatgtggggaccccccagggcatggtggggtctgaggcgtgtgttcccatttagggctgaatgaagccatgacttggaaaggtggtggggggtggatggcggctgtgactcagggcccagggatcacatgggggtcactgctgccatcagcagtcaggcagggagaacagaaatgcaaaaatacagatgtgtctatttttctaaactggggggtggaggggtgcctcctgacagcttccaaagagctgactgtggagggcccacagtgtatcccacccctgcccgagagtctctctcctttgggacccccgggttcccagagctccgaggaaactgatccttcatgtttcaatagctgttgttgtttttctctttgggccgggccgggccggggaagggccgagcaggctccaggaggcctccagagtcagctggaccttgctgtgtcgcccgcaggcagccctgcagacaccggtgaggtgggatgatttcaggaggtcccagcccgggactgcccgcccctctgccctgggaaccagtccaaggggctgtcagttgaatttgcctttttgttgttgttgttgtttttgttgtttatttgttctccttttaaggaattatgaagctaagaaaagttttgtgttttgggggttggtggacaaagttctagctgattaaatatggtctaacttattgatactatttttttttcttttaatgttgtactgtggagaaaaactattttgagccatggggttggtgtttacaagaactttccactcaacgaccaaatgtaaacaaaataaacggcatactctgcctcatacagtatcccgatatattctaacaagatcacgnttacctccaggcacta

SEQ ID NO: 289869 - DNA, 1052 bp, Homo sapiens
tgcgatgtcctcggtttcccatttgttgctgctgctgctcattccacactgttgagaccttgtggtctcgatgctgctggcctccctccgtccctctgtccacttgtgggtcctggggtcgtcttagcagagccaccgccaaggtttgcactcagggaggggctgatggagggctgggcgccatggggtcagggaggccccagggacccatgggcagagctggggagccaggaggatgggtctgcctgctctgggggtgcaggctctgcagacaccccaattgctgctctgttgctgtgcctagtctagtgtcccccaaagcatcggggggccacgcaagtgtgggtgtgtgagtgtgcgtatgtggggaccccccagggcatggtggggtctgaggcgtgtgttcccatttagggctgaatgaagccatgacttggaaaggtggtggggggtggatggcggctgtgactcagggcccagggatcacatgggggtcactgctgccatcagcagtcaggcagggagaacagaaatgcaaaaatacagatgtgtctatttttctaaactggggggtggaggggtgcctcctgacagcttccaaagagctgactgtggagggcccacagtgtatcccacccctgcccgagagtctctctcctttgggacccccgggttcccagagctccgaggaaactgatccttcatgtttcaatagctgttgttgtttttctctttgggccgggccgggccggggaagggccgagcaggctccaggaggcctccagagtcagctggaccttgctgtgtcgcccgcaggcagccctgcagacaccggtgaggtgggatgatttcaggaggtcccagcccgggactgcccgcccctctgccctgggaaccagtccaaggggctgtcagttgaatttgcctttttgttgttgttgttgtttttgttgtttatttgttctccttttaaggaattatgaagctaagaaaagttttgtgttttgggggttggtggacaaagttctagctgattaaatatggtctaactt

SEQ ID NO: 289870 - DNA, 1020 bp, Homo sapiens
gaagcggctgcagcctcctgatttcatcgaccccctagccaacaagaaaccccggatatcgcaaagtgtgggtgtgtgagtgtgcgtatgtggggaccccccagggcatggtggggtctgaggcgtgtgttcccatttagggctgaatgaagccatgacttggaaaggtggtggggggtggatggcggctgtgactcagggcccagggatcacatgggggtcactgctgccatcagcagtcaggcagggagaacagaaatgcaaaaatacagatgtgtctatttttctaaactggggggtggaggggtgcctcctgacagcttccaaagagctgactgtggagggcccacagtgtatcccacccctgcccgagagtctctctcctttgggacccccgggttcccagagctccgaggaaactgatccttcatgtttcaatagctgttgttgtttttctctttgggccgggccgggccggggaagggccgagcaggctccaggaggcctccagagtcagctggaccttgctgtgtcgcccgcaggcagccctgcagacaccggtgaggtgggatgatttcaggaggtcccagcccgggactgcccgcccctctgccctgggaaccagtccaaggggctgtcagttgaatttgcctttttgttgttgttgttgtttttgttgtttatttgttctccttttaaggaattatgaagctaagaaaagttttgtgttttgggggttggtggacaaagttctagctgattaaatatggtctaacttattgatactatttttttttcttttaatgttgtactgtggagaaaaactattttgagccatggggttggtgtttacaagaactttccacttttgccaaaatgttacaattgaaaggcatctatctgcgtcttcagtttcctgatattttcttaaaagatctagtgtcctttttgtacactaaacaggtgaatgctgacttttttcattctccaataaatttcactgaactgaaaaaaaaagcc

SEQ ID NO: 289871 - DNA, 507 bp, Homo sapiens
aagaagagatcaggaaaaaaaacccaccagtcaaggaaagtcaagtagcaagaaggaaatgtctaaaagagatggcaaggagaaaaaagacagaggagtgacgaggtttcaggaaaatgcgtggtggaaatttcagaggaggagcccctgggaatcgtggcggatataataggaggggcaacatgccacagagaggtggtggcggtggaggaagtggtggaatcggctatccataccctcgtgcccctgtttttcctggccgtggtagttactcaaacagagggaactacaacagaggtggaatgcccaacagagggaactacaaccagaacttcagaggacgaggaaacaatcgtggctacaaaaatcaatctcagggctacaaccagtggcagcagggtcaattctggggtcagaagccatggagtcagcattatcaccaaggatattattgaatacccaaataaaacgaactgatacatatttctccaaaaccttcacaagaag

SEQ ID NO: 289872 - DNA, 1816 bp, Homo sapiens
cattcatttcaaaaataagctttgaatttagatggtaaggcatatatgttttatttcacatgacttcagggtagaagtcaaatgaagaaacatttctatggaaacttaccctttaagaaaccagtatatgcaaagaatgattgataccccctgagggtgtgccatataataggtgactgataacatacaggatttaattcttagaataattaagaacagatatcacccattacattgacctacatttttctaaagtgaacaatagaaacctctctcagaattagtatttgcctattaatgtaatcagtgtagccttctcaacataaaaatgtccttattctagaacatggaagcgtacggcaaatgcaacggttgaaagcactgaaaaatatttgtaaaacatctgtagtgctcacattatgaactttaaatgtaatactttgaaaaccatcttcataatttttttgttctaacagcttcctttttaagaaaacattttaaaacattttaaaatggaacttaatgtgcaaaataagttgtgtaaaataccagtatttgggtggtggaggatattggtatattatattgacctgggttgatgactactggactattttaagatacctacttccaaaacttattttattctagaggaccactaaaaatcagaattacagcaatcattttaatttttctactttccttgttaaggtcttctgcttacccaaagaatagtgtatatcttaacatgacttttaaaggggtatcttgatccccatcacagatttttatctatgaatagaaggattgaaaccctatttgatccctagctctttgctgaaaagtgcataaacaggaatcctgaatttattatatagacctcctcgcattatataatcgaagcaaagggaaaccagcgatggagtagaggtacgtagactaaagagatgcttgcaaatgatggtacctagggatagtcacattttcttgttgccaaactcagacaatataatcacaagtccagagaagagctagttaattttaaattccccgaggtccttttactgagatggaaaagcacaaacagtcaaggaaaaccaaagagggaggggtgagggaaggggaaagtgcataaagcacttaaagattttttaaaagtaggtatgatagataagccacaagaagtttttaagactactaataaccataattctattttaatcagctatttagctggtacctactgctatatcacctagtgtgacatttcggaattaatggaacaatgaaggaagctgtacactggaggttccaggtggtcatggaaggtttccagtttatgcaaacttctgtgaaaatgagctttgttattggtgaagacattggaaattttaccagccaaaacagagtttctctcttattcagggtaagatgtaattgcagtgtgctagcgctggaagggacctgttttatatgttatgtatgttacacgtcagccctccatgtcctccagttctgcatccttggattcaaccaactgtgggttgaaaatactggaggtaaaaagacaaaaaataacaatgaagaacaacaacaaaaatacacagtataataattacatttacatagcatttattttgtattagacattataagtaatctagagatgatttaaagtatatgggagaatgtatgtagattatatggaaatatgagggtattttatttaaagggacttgggcctgtggataccaaggaataactaaggtaaaactgagcataagtggcctgtccatattttgttaaatatcagatt

SEQ ID NO: 289873 - DNA, 1385 bp, Homo sapiens
cattcatttcaaaaataagctttgaatttagatggtaaggcatatatgttttatttcacatgacttcagggtagaagtcaaatgaagaaacatttctatggaaacttaccctttaagaaaccagtatatgcaaagaatgattgataccccctgagggtgtgccatataataggtgactgataacatacaggatttaattcttagaataattaagaacagatatcacccattacattgacctacatttttctaaagtgaacaatagaaacctctctcagaattagtatttgcctattaatgtaatcagtgtagccttctcaacataaaaatgtccttattctagaacatggaagcgtacggcaaatgcaacggttgaaagcactgaaaaatatttgtaaaacatctgtagtgctcacattatgaactttaaatgtaatactttgaaaaccatcttcataatttttttgttctaacagcttcctttttaagaaaacattttaaaacattttaaaatggaacttaatgtgcaaaataagttgtgtaaaataccagtatttgggtggtggaggatattggtatattatattgacctgggttgatgactactggactattttaagatacctacttccaaaacttattttattctagaggaccactaaaaatcagaattacagcaatcattttaatttttctactttccttgttaaggtcttctgcttacccaaagaatagtgtatatcttaacatgacttttaaaggggtatcttgatccccatcacagatttttatctatgaatagaaggattgaaaccctatttgatccctagctctttgctgaaaagtgcataaacaggaatcctgaatttattatatagacctcctcgcattatataatcgaagcaaagggaaaccagcgatggagtagaggtacgtagactaaagagatgcttgcaaatgatggtacctagggatagtcacattttcttgttgccaaactcagacaatataatcacaagtccagagaagagctagttaattttaaattccccgaggtccttttactgagatggaaaagcacaaacagtcaaggaaaaccaaagagggaggggtgagggaaggggaaagtgcataaagcacttaaagattttttaaaagtaggtatgatagataagccacaagaagtttttaagactactaataaccataattctattttaatcagctatttagctggtacctactgctatatcacctagtgtgacatttcggaattaatggaacaatgaaggaagctgtacactggaggttccaggtggtcatggaaggtaggttactcttaaagtttgaaattgtaaagtgtgaaagtctggatagaggggaag

SEQ ID NO: 289874 - DNA, 303 bp, Homo sapiens
  misc_feature (295)..(295): n is a, c, g, or t
tcagcgccctgatgatgagttttctgacttcgtcatatacgaagatgacaagagaggtggtggcggtggaggaagtggtggaatcggctatccataccctcgtgcccctgtttttcctggccgtggtagttactcaaacagagggaactacaacagaggtggaatgcccaacagagggaactacaaccagaacttcagaggacgaggaaacaatcgtggctacaaaaatcaatctcagggctacaaccagtggcagcagggtggaaccgagctggtttagcgtacgcaatcaatnttccccca

SEQ ID NO: 289875 - DNA, 3633 bp, Homo sapiens
attggaagcgcactgcgcggcctccaccgcgctctcggcccgggttcggcgtgggggcggggaggtaagtacggtaatgggcggggccgagcgcgggcgcgctccggctttcctcctgcgcagtgctcccgtcagcgcagggggcggggcgcctatattacgtgcgcggcgccgctcctgcgagaggacgttgcgtgctcgctcgcgccaggcgagtctccgcgtctccctcgcgaactcggtgaaaggaattggcgccgttcgacaccaggcggatccgctctgcagcacgaacccatctccagccgcagccgcagccgccgcccgggccgaggagcagccgcagcagccgccaccagtggccgagtgagcggagccgagtttgaggcagcgcctagcggtgaatcggggccctcaccatgagttcctcgcctgttaatgtaaaaaagctgaaggtgtcggagctgaaagaggagctcaagaagcgacgcctttctgacaagggtctcaaggccgagctcatggagcgactccaggctgcgctggacgacgaggaggccgggggccgccccgccatggagcccgggaacggcagcctagacctgggcggggattccgctgggcgctcgggagcaggcctcgagcaggaggccgcggccggcggcgatgaagaggaggaagaagaggaagaggaggaggaaggaatctccgctctggacggcgaccagatggagctaggagaggagaacggggccgcgggggcggccgactcgggcccgatggaggaggaggaggccgcctcggaagacgagaacggcgacgatcagggtttccaggaaggggaagatgagctcggggacgaagaggaaggcgcgggcgacgagaacgggcacggggagcagcagcctcaaccgccggcgacgcagcagcaacagccccaacagcagcgcggggccgccaaggaggccgcggggaagagcagcggccccacctcgctgttcgcggtgacggtggcgccgcccggggcgaggcagggccagcagcaggcgggaggggacggcaaaacagaacagaaaggcggagataaaaagaggggtgttaaaagaccacgagaagatcatggccgtggatattttgagtacattgaagagaacaagtatagcagagccaaatctcctcagccacctgttgaagaagaagatgaacacttcgatgacacagtggtttgtcttgatacttataattgtgatctacattttaaaatatcaagagatcgtctcagtgcttcttcccttacaatggagagttttgcttttctttgggctggaggaagagcatcctatggtgtgtcaaaaggcaaagtgtgttttgagatgaaggttacagagaagatcccagtaaggcatttatatacaaaagatattgacatacatgaagttcgtattggctggtcactaactacaagtggaatgttacttggtgaagaagaattttcttatgggtattctctaaaaggaataaaaacatgcaactgtgagactgaagattatggagaaaagtttgatgaaaatgatgtgattacatgttttgctaactttgaaagtgatgaagtagaactctcgtatgctaagaatggacaagatcttggcgttgccttcaaaatcagtaaggaagttcttgctggacggccactgttcccgcatgttctctgccacaactgtgcagttgaatttaattttggtcagaaggaaaagccatattttccaatacctgaagagtatactttcatccagaacgtccccttagaggatcgagttagaggaccaaaggggcctgaagagaagaaagattgtgaagttgtgatgatgattggcttgccaggagctggaaaaactacctgggttactaaacatgcagcagaaaatccagggaaatataacattcttggcacaaatactattatggataagatgatggtggcaggttttaagaagcaaatggcagatactggaaaactgaacacactgttgcagagagccccccagtgtcttgggaaatttattgagattgctgcccgaaagaagcgaaattttattctggatcagacaaatgtgtctgctgctgcccagaggagaaaaatgtgcctgtttgcaggcttccagcgaaaagctgttgtagtttgcccaaaagatgaagactataagcaaagaacacagaagaaagcagaagtagaggggaaagacctaccagaacatgcggtcctcaaaatgaaaggaaactttaccctcccagaggtagctgagtgctttgatgaaataacctatgttgaacttcagaaggaagaagcccaaaaactcttggagcaatataaggaagaaagcaaaaaggctcttccaccagaaaagaaacagaacactggctcaaagaaaagcaataaaaataagagtggcaagaaccagtttaacagaggtggtggccatagaggacgtggaggattcaatatgcgtggtggaaatttcagaggaggagcccctgggaatcgtggcggatataataggaggggcaacatgccacagagaggtggtggcggtggaggaagtggtggaatcggctatccataccctcgtgcccctgtttttcctggccgtggtagttactcaaacagagggaactacaacagaggtggaatgcccaacagagggaactacaaccagaacttcagaggacgaggaaacaatcgtggctacaaaaatcaatctcagggctacaaccagtggcagcagggtcaattctggggtcagaagccatggagtcagcattatcaccaaggatattattgaatacccaaataaaacgaactgatacatatttctccaaaaccttcacaagaagtcgactgttttctttagtaggctaactttttaaacattccacaagaggaagtgcctgcgggttccttttttagaagctttgtgggttgattttttttcttttcttttttgtacatttttaattgcagtttaaaagtgaatcgtaagagaacctcagcattgtgcacgataagagaatgtgtcagtatttcagggttctacattttatctgtaaaatgtgacttttttttttttttatcacaacagaagtaaaatgttgctttgtacctggtgtcttttattaagaatttactccccccatttctcacagagaataacagtcgggagtcattgtcacaatataatagaaatgttagcaaccagattcatgtaaggactaagtggtcctcatgaattgcattaagactctgtactgctcatattacactccatcctctctgtagtttgctgggtagtggagggggtaagctaaatcatagtttctgacaataactgggaaggttttttcttaaaataacaatggaattggtataattgggattgaaaactaaaacttggaactaagatagagaagatggagtgtatgtagaagggctgttaaaaatgtaaaacttggttgcattatttgtggaggctcaaacttgtgaaggttaataccataatttttccatttgttctgcattttgattctgaaaagaaagctggctttgcccatttcttattaaaaaaacttgttgtaaat

SEQ ID NO: 289876 - DNA, 684 bp, Homo sapiens
cctttttgtcccagttgtcattattttcgaattcctaaaaaagctgaaggtgtcggagctgaaagaggagctcaagaagcgacgcctttctgacaagggtctcaaggccgagctcatggagcgactccaggctgcgctggacgacgaggaggccgggggccgccccgccatggagcccgggaacggcagcctagacctgggcggggattccgctgggcgctcgggagcaggcctcgagcaggaggccgcggccggcggcgatgaagaggaggaagaagaggaagaggaggaggaaggaatctccgctctggacggcgaccagatggagctaggagaggagaacggggccgcgggggcggccgactcgggcccgatggaggaggaggaggccgcctcggaagacgagaacggcgacgatcagggtttccaggaaggggaagatgagctcggggacgaagaggaaggcgcgggcgacgagaacgggcacggggagcagcagcctcaaccgccggcgacgcagcagcaacagccccaacagcagcgcggggccgccaaggaggccgcggggaagagcagcggccccacctcgctgttcgcggtgacggtggcgtgaagcctgtgaaagtttcagctccccgagttggtggaaaacgctaaactggcagattagatttttaaataaag

SEQ ID NO: 289877 - DNA, 3441 bp, Homo sapiens
tacattccccaactatcggctaggtacgaggctgggtgttacgaactcggtgaaaggaattggcgccgttcgacaccaggcggatccgctctgcagcacgaacccatctccagccgcagccgcagccgccgcccgggccgaggagcagccgcagcagccgccaccagtggccgagtgagcggagccgagtttgaggcagcgcctagcggtgaatcggggccctcaccatgagttcctcgcctgttaatgtaaaaaagctgaaggtgtcggagctgaaagaggagctcaagaagcgacgcctttctgacaagggtctcaaggccgagctcatggagcgactccaggctgcgctggacgacgaggaggccgggggccgccccgccatggagcccgggaacggcagcctagacctgggcggggattccgctgggcgctcgggagcaggcctcgagcaggaggccgcggccggcggcgatgaagaggaggaagaagaggaagaggaggaggaaggaatctccgctctggacggcgaccagatggagctaggagaggagaacggggccgcgggggcggccgactcgggcccgatggaggaggaggaggccgcctcggaagacgagaacggcgacgatcagggtttccaggaaggggaagatgagctcggggacgaagaggaaggcgcgggcgacgagaacgggcacggggagcagcagcctcaaccgccggcgacgcagcagcaacagccccaacagcagcgcggggccgccaaggaggccgcggggaagagcagcggccccacctcgctgttcgcggtgacggtggcgccgcccggggcgaggcagggccagcagcaggcgggaggggacggcaaaacagaacagaaaggcggagataaaaagaggggtgttaaaagaccacgagaagatcatggccgtggatattttgagtacattgaagagaacaagtatagcagagccaaatctcctcagccacctgttgaagaagaagatgaacacttcgatgacacagtggtttgtcttgatacttataattgtgatctacattttaaaatatcaagagatcgtctcagtgcttcttcccttacaatggagagttttgcttttctttgggctggaggaagagcatcctatggtgtgtcaaaaggcaaagtgtgttttgagatgaaggttacagagaagatcccagtaaggcatttatatacaaaagatattgacatacatgaagttcgtattggctggtcactaactacaagtggaatgttacttggtgaagaagaattttcttatgggtattctctaaaaggaataaaaacatgcaactgtgagactgaagattatggagaaaagtttgatgaaaatgatgtgattacatgttttgctaactttgaaagtgatgaagtagaactctcgtatgctaagaatggacaagatcttggcgttgccttcaaaatcagtaaggaagttcttgctggacggccactgttcccgcatgttctctgccacaactgtgcagttgaatttaattttggtcagaaggaaaagccatattttccaatacctgaagagtatactttcatccagaacgtccccttagaggatcgagttagaggaccaaaggggcctgaagagaagaaagattgtgaagttgtgatgatgattggcttgccaggagctggaaaaactacctgggttactaaacatgcagcagaaaatccagggaaatataacattcttggcacaaatactattatggataagatgatggtggcaggttttaagaagcaaatggcagatactggaaaactgaacacactgttgcagagagccccccagtgtcttgggaaatttattgagattgctgcccgaaagaagcgaaattttattctggatcagacaaatgtgtctgctgctgcccagaggagaaaaatgtgcctgtttgcaggcttccagcgaaaagctgttgtagtttgcccaaaagatgaagactataagcaaagaacacagaagaaagcagaagtagaggggaaagacctaccagaacatgcggtcctcaaaatgaaaggaaactttaccctcccagaggtagctgagtgctttgatgaaataacctatgttgaacttcagaaggaagaagcccaaaaactcttggagcaatataaggaagaaagcaaaaaggctcttccaccagaaaagaaacagaacactggctcaaagaaaagcaataaaaataagagtggcaagaaccagtttaacagaggtggtggccatagaggacgtggaggattcaatatgcgtggtggaaatttcagaggaggagcccctgggaatcgtggcggatataataggaggggcaacatgccacagagaggtggtggcggtggaggaagtggtggaatcggctatccataccctcgtgcccctgtttttcctggccgtggtagttactcaaacagagggaactacaacagaggtggaatgcccaacagagggaactacaaccagaacttcagaggacgaggaaacaatcgtggctacaaaaatcaatctcagggctacaaccagtggcagcagggtcaattctggggtcagaagccatggagtcagcattatcaccaaggatattattgaatacccaaataaaacgaactgatacatatttctccaaaaccttcacaagaagtcgactgttttctttagtaggctaactttttaaacattccacaagaggaagtgcctgcgggttccttttttagaagctttgtgggttgattttttttcttttcttttttgtacatttttaattgcagtttaaaagtgaatcgtaagagaacctcagcattgtgcacgataagagaatgtgtcagtatttcagggttctacattttatctgtaaaatgtgacttttttttttttttatcacaacagaagtaaaatgttgctttgtacctggtgtcttttattaagaatttactccccccatttctcacagagaataacagtcgggagtcattgtcacaatataatagaaatgttagcaaccagattcatgtaaggactaagtggtcctcatgaattgcattaagactctgtactgctcatattacactccatcctctctgtagtttgctgggtagtggagggggtaagctaaatcatagtttctgacaataactgggaaggttttttcttaaaataacaatggaattggtataattgggattgaaaactaaaacttggaactaagatagagaagatggagtgtatgtagaagggctgttaaaaatgtaaaacttggttgcattatttgtggaggctcaaacttgtgaaggttaataccataatttttccatttgttctgcattttgattctgaaaagaaagctggctttgcccatttcttattaaaaaaacttgttgtaaat

SEQ ID NO: 289878 - DNA, 4330 bp, Homo sapiens
  misc_feature (56)..(57): n is a, c, g, or t
tacacgcatcagccaacaaagagaccaccccaaaacacttaggctagtacgaggcnngggtgagaactcggtgaaaggaattggcgccgttcgacaccaggcggatccgctctgcagcacgaacccatctccagccgcagccgcagccgccgcccgggccgaggagcagccgcagcagccgccaccagtggccgagtgagcggagccgagtttgaggcagcgcctagcggtgaatcggggccctcaccatgagttcctcgcctgttaatgtaaaaaagctgaaggtgtcggagctgaaagaggagctcaagaagcgacgcctttctgacaagggtctcaaggccgagctcatggagcgactccaggctgcgctggacgacgaggaggccgggggccgccccgccatggagcccgggaacggcagcctagacctgggcggggattccgctgggcgctcgggagcaggcctcgagcaggaggccgcggccggcggcgatgaagaggaggaagaagaggaagaggaggaggaaggaatctccgctctggacggcgaccagatggagctaggagaggagaacggggccgcgggggcggccgactcgggcccgatggaggaggaggaggccgcctcggaagacgagaacggcgacgatcagggtttccaggaaggggaagatgagctcggggacgaagaggaaggcgcgggcgacgagaacgggcacggggagcagcagcctcaaccgccggcgacgcagcagcaacagccccaacagcagcgcggggccgccaaggaggccgcggggaagagcagcggccccacctcgctgttcgcggtgacggtggcgccgcccggggcgaggcagggccagcagcaggcgggaggtaagaagaaggcggaaggcggcggaggcggcggtcgccccggggctccggcggcgggggacggcaaaacagaacagaaaggcggagataaaaagaggggtgttaaaagaccacgagaagatcatggccgtggatattttgagtacattgaagagaacaagtatagcagagccaaatctcctcagccacctgttgaagaagaagatgaacacttcgatgacacagtggtttgtcttgatacttataattgtgatctacattttaaaatatcaagagatcgtctcagtgcttcttcccttacaatggagagttttgcttttctttgggctggaggaagagcatcctatggtgtgtcaaaaggcaaagtgtgttttgagatgaaggttacagagaagatcccagtaaggcatttatatacaaaagatattgacatacatgaagttcgtattggctggtcactaactacaagtggaatgttacttggtgaagaagaattttcttatgggtattctctaaaaggaataaaaacatgcaactgtgagactgaagattatggagaaaagtttgatgaaaatgatgtgattacatgttttgctaactttgaaagtgatgaagtagaactctcgtatgctaagaatggacaagatcttggcgttgccttcaaaatcagtaaggaagttcttgctggacggccactgttcccgcatgttctctgccacaactgtgcagttgaatttaattttggtcagaaggaaaagccatattttccaatacctgaagagtatactttcatccagaacgtccccttagaggatcgagttagaggaccaaaggggcctgaagagaagaaagattgtgaagttgtgatgatgattggcttgccaggagctggaaaaactacctgggttactaaacatgcagcagaaaatccagggaaatataacattcttggcacaaatactattatggataagatgatggtggcaggttttaagaagcaaatggcagatactggaaaactgaacacactgttgcagagagccccccagtgtcttgggaaatttattgagattgctgcccgaaagaagcgaaattttattctggatcagacaaatgtgtctgctgctgcccagaggagaaaaatgtgcctgtttgcaggcttccagcgaaaagctgttgtagtttgcccaaaagatgaagactataagcaaagaacacagaagaaagcagaagtagaggggaaagacctaccagaacatgcggtcctcaaaatgaaaggaaactttaccctcccagaggtagctgagtgctttgatgaaataacctatgttgaacttcagaaggaagaagcccaaaaactcttggagcaatataaggaagaaagcaaaaaggctcttccaccagaaaagaaacagaacactggctcaaagaaaagcaataaaaataagagtggcaagaaccagtttaacagaggtggtggccatagaggacgtggaggattcaatatgcgtggtggaaatttcagaggaggagcccctgggaatcgtggcggatataataggaggggcaacatgccacagagaggtggtggcggtggaggaagtggtggaatcggctatccataccctcgtgcccctgtttttcctggccgtggtagttactcaaacagagggaactacaacagaggtggaatgcccaacagagggaactacaaccagaacttcagaggacgaggaaacaatcgtggctacaaaaatcaatctcagggctacaaccagtggcagcagggtcaattctggggtcagaagccatggagtcagcattatcaccaaggatattattgaatacccaaataaaacgaactgatacatatttctccaaaaccttcacaagaagtcgactgttttctttagtaggctaactttttaaacattccacaagaggaagtgcctgcgggttccttttttagaagctttgtgggttgattttttttcttttcttttttgtacatttttaattgcagtttaaaagtgaatcgtaagagaacctcagcattgtgcacgataagagaatgtgtcagtatttcagggttctacattttatctgtaaaatgtgacttttttttttttttatcacaacagaagtaaaatgttgctttgtacctggtgtcttttattaagaatttactccccccatttctcacagagaataacagtcgggagtcattgtcacaatataatagaaatgttagcaaccagattcatgtaaggactaagtggtcctcatgaattgcattaagactctgtactgctcatattacactccatcctctctgtagtttgctgggtagtggagggggtaagctaaatcatagtttctgacaataactgggaaggttttttcttaaaataacaatggaattggtataattgggattgaaaactaaaacttggaactaagatagagaagatggagtgtatgtagaagggctgttaaaaatgtaaaacttggttgcattatttgtggaggctcaaacttgtgaaggttaataccataatttttccatttgttctgcattttgattctgaaaagaaagctggctttgcccatttcttattaaaaaaacttgttgtaaatccagttgtctaatgggatctatatgaagttagccatgtctgtatgcccttctcccacaaaatactgtataactagtgtgcttgtagtagttaactccaccatctttgtaagctaatgaaattgtgagtcacccatttatatcttaatttttaatcatgtcagttcttgaatgggtatctccttagcctgctgatttctttttctttctaaagaaagtgggtggagaaattaatttagacgtttgtttgcaataaaaagaattcattttactcttgttttgggattctcgccatcaaggttcaaaatccctttatataactcccaagaggagaaatttattaagtgtgtgctttctggacagcttattctttactctgcatagaacatttaggttttaaaaacttaaatgtatactgacaattgatacataattatgaagtaaagttgaattcttcccttcccctcccccccagacaacttttaacatatttaatgaggggaaaaggtactggctgggagaagttaacactgagtttatcatctttacagaatgctaatgctgtcctcaactgattattttatatacatatatatgatacatgaaactctgggatcagatgcttttagaagccatcatgcaagccagtcattgatgtcactgctacacaacactgctaacttgactgtagctatgtaataacattagatcccctaattgtaattatattgggtttgcacagaacactttaatcttcccctcaccaatgtgaagtgaggaatcaggagtcaaactgtagaactaaaatttgac

SEQ ID NO: 289879 - DNA, 4174 bp, Homo sapiens
  misc_feature (56)..(57): n is a, c, g, or t
tacacgcatcagccaacaaagagaccaccccaaaacacttaggctagtacgaggcnngggtgagaactcggtgaaaggaattggcgccgttcgacaccaggcggatccgctctgcagcacgaacccatctccagccgcagccgcagccgccgcccgggccgaggagcagccgcagcagccgccaccagtggccgagtgagcggagccgagtttgaggcagcgcctagcggtgaatcggggccctcaccatgagttcctcgcctgttaatgtaaaaaagctgaaggtgtcggagctgaaagaggagctcaagaagcgacgcctttctgacaagggtctcaaggccgagctcatggagcgactccaggctgcgctggacgacgaggaggccgggggccgccccgccatggagcccgggaacggcagcctagacctgggcggggattccgctgggcgctcgggagcaggcctcgagcaggaggccgcggccggcggcgatgaagaggaggaagaagaggaagaggaggaggaaggaatctccgctctggacggcgaccagatggagctaggagaggagaacggggccgcgggggcggccgactcgggcccgatggaggaggaggaggccgcctcggaagacgagaacggcgacgatcagggtttccaggaaggggaagatgagctcggggacgaagaggaaggcgcgggcgacgagaacgggcacggggagcagcagcctcaaccgccggcgacgcagcagcaacagccccaacagcagcgcggggccgccaaggaggccgcggggaagagcagcggccccacctcgctgttcgcggtgacggtggcgccgcccggggcgaggcagggccagcagcaggcgggaggggacggcaaaacagaacagaaaggcggagataaaaagaggggtgttaaaagaccacgagaagatcatggccgtggatattttgagtacattgaagagaacaagtatagcagagccaaatctcctcagccacctgttgaagaagaagatgaacacttcgatgacacagtggtttgtcttgatacttataattgtgatctacattttaaaatatcaagagatcgtctcagtgcttcttcccttacaatggagagttttgcttttctttgggctggaggaagagcatcctatggtgtgtcaaaaggcaaagtgtgttttgagatgaaggttacagagaagatcccagtaaggcatttatatacaaaagatattgacatacatgaagttcgtattggctggtcactaactacaagtggaatgttacttggtgaagaagaattttcttatgggtattctctaaaaggaataaaaacatgcaactgtgagactgaagattatggagaaaagtttgatgaaaatgatgtgattacatgttttgctaactttgaaagtgatgaagtagaactctcgtatgctaagaatggacaagatcttggcgttgccttcaaaatcagtaaggaagttcttgctggacggccactgttcccgcatgttctctgccacaactgtgcagttgaatttaattttggtcagaaggaaaagccatattttccaatacctgaagagtatactttcatccagaacgtccccttagaggatcgagttagaggaccaaaggggcctgaagagaagaaagattgtgaagttgtgatgatgattggcttgccaggagctggaaaaactacctgggttactaaacatgcagcagaaaatccagggaaatataacattcttggcacaaatactattatggataagatgatggtggcaggttttaagaagcaaatggcagatactggaaaactgaacacactgttgcagagagccccccagtgtcttgggaaatttattgagattgctgcccgaaagaagcgaaattttattctggatcagacaaatgtgtctgctgctgcccagaggagaaaaatgtgcctgtttgcaggcttccagcgaaaagctgttgtagtttgcccaaaagatgaagactataagcaaagaacacagaagaaagcagaagtagaggggaaagacctaccagaacatgcggtcctcaaaatgaaaggaaactttaccctcccagaggtagctgagtgctttgatgaaataacctatgttgaacttcagaaggaagaagcccaaaaactcttggagcaatataaggaagaaagcaaaaaggctcttccaccagaaaagaaacagaacactggctcaaagaaaagcaataaaaataagagtggcaagaaccagtttaacagaggtggtggccatagaggacgtggaggattcaatatgcgtggtggaaatttcagaggaggagcccctgggaatcgtggcggatataataggaggggcaacatgccacagagaggtggtggcggtggaggaagtggtggaatcggctatccataccctcgtgcccctgtttttcctggccgtggtagttactcaaacagagggaactacaacagaggtggaatgcccaacagagggaactacaaccagaacttcagaggacgaggaaacaatcgtggctacaaaaatcaatctcagggctacaaccagtggcagcagggtcaattctggggtcagaagccatggagtcagcattatcaccaaggatattattgaatacccaaataaaacgaactgatacatatttctccaaaaccttcacaagaagtcgactgttttctttagtaggctaactttttaaacattccacaagaggaagtgcctgcgggttccttttttagaagctttgtgggttgattttttttcttttcttttttgtacatttttaattgcagtttaaaagtgaatcgtaagagaacctcagcattgtgcacgataagagaatgtgtcagtatttcagggttctacattttatctgtaaaatgtgacttttttttttttttatcacaacagaagtaaaatgttgctttgtacctggtgtcttttattaagaatttactccccccatttctcacagagaataacagtcgggagtcattgtcacaatataatagaaatgttagcaaccagattcatgtaaggactaagtggtcctcatgaattgcattaagactctgtactgctcatattacactccatcctctctgtagtttgctgggtagtggagggggtaagctaaatcatagtttctgacaataactgggaaggttttttcttaaaataacaatggaattggtataattgggattgaaaactaaaacttggaactaagatagagaagatggagtgtatgtagaagggctgttaaaaatgtaaaacttggttgcattatttgtggaggctcaaacttgtgaaggttaataccataatttttccatttgttctgcattttgattctgaaaagaaagctggctttgcccatttcttattaaaaaaacttgttgtaaatccagttgtctaatgggatctatatgaagttagccatgtctgtatgcccttctcccacaaaatactgtataactagtgtgcttgtagtagttaactccaccatctttgtaagctaatgaaattgtgagtcacccatttatatcttaatttttaatcatgtcagttcttgaatgggtatctccttagcctgctgatttctttttctttctaaagaaagtgggtggagaaattaatttagacgtttgtttgcaataaaaaaaaaaaaaacacccgcggaacaaaacaacaaaaaacaagcaaaatcacaacaacacaaaaaaacaaaacaaacaaaacaacaaaacaccccacggcgaacaaccaaacaccaatcaaaacacaaacaaacacactcatttgcgcccgcgcgcccccccgccataaagaaaggagatgtttatcatacaaaaacaaccaccggtcgtgggcgggggcgcgcccaccccaatacagagatgtagacaaaccagagcaggggcggaagcaaagcttgacctcgatcaaaggaagaacaccaacccgtccaggaccagtagtgacgtgggaggatactccccagcaaaaaaaaaaaacgacgcgcgcgcgggggaaacagccacagtgggtctggtagcaccaaccaacccagaggaggtgcgtctcggagagacactcgtaggacgcaccataccgag

SEQ ID NO: 289880 - DNA, 4359 bp, Homo sapiens
  misc_feature (56)..(57): n is a, c, g, or t
tacacgcatcagccaacaaagagaccaccccaaaacacttaggctagtacgaggcnngggtgagaactcggtgaaaggaattggcgccgttcgacaccaggcggatccgctctgcagcacgaacccatctccagccgcagccgcagccgccgcccgggccgaggagcagccgcagcagccgccaccagtggccgagtgagcggagccgagtttgaggcagcgcctagcggtgaatcggggccctcaccatgagttcctcgcctgttaatgtaaaaaagctgaaggtgtcggagctgaaagaggagctcaagaagcgacgcctttctgacaagggtctcaaggccgagctcatggagcgactccaggctgcgctggacgacgaggaggccgggggccgccccgccatggagcccgggaacggcagcctagacctgggcggggattccgctgggcgctcgggagcaggcctcgagcaggaggccgcggccggcggcgatgaagaggaggaagaagaggaagaggaggaggaaggaatctccgctctggacggcgaccagatggagctaggagaggagaacggggccgcgggggcggccgactcgggcccgatggaggaggaggaggccgcctcggaagacgagaacggcgacgatcagggtttccaggaaggggaagatgagctcggggacgaagaggaaggcgcgggcgacgagaacgggcacggggagcagcagcctcaaccgccggcgacgcagcagcaacagccccaacagcagcgcggggccgccaaggaggccgcggggaagagcagcggccccacctcgctgttcgcggtgacggtggcgccgcccggggcgaggcagggccagcagcaggcgggaggtaagaagaaggcggaaggcggcggaggcggcggtcgccccggggctccggcggcgggaaggtggggaggggggaaaaaaccccaggggacggcaaaacagaacagaaaggcggagataaaaagaggggtgttaaaagaccacgagaagatcatggccgtggatattttgagtacattgaagagaacaagtatagcagagccaaatctcctcagccacctgttgaagaagaagatgaacacttcgatgacacagtggtttgtcttgatacttataattgtgatctacattttaaaatatcaagagatcgtctcagtgcttcttcccttacaatggagagttttgcttttctttgggctggaggaagagcatcctatggtgtgtcaaaaggcaaagtgtgttttgagatgaaggttacagagaagatcccagtaaggcatttatatacaaaagatattgacatacatgaagttcgtattggctggtcactaactacaagtggaatgttacttggtgaagaagaattttcttatgggtattctctaaaaggaataaaaacatgcaactgtgagactgaagattatggagaaaagtttgatgaaaatgatgtgattacatgttttgctaactttgaaagtgatgaagtagaactctcgtatgctaagaatggacaagatcttggcgttgccttcaaaatcagtaaggaagttcttgctggacggccactgttcccgcatgttctctgccacaactgtgcagttgaatttaattttggtcagaaggaaaagccatattttccaatacctgaagagtatactttcatccagaacgtccccttagaggatcgagttagaggaccaaaggggcctgaagagaagaaagattgtgaagttgtgatgatgattggcttgccaggagctggaaaaactacctgggttactaaacatgcagcagaaaatccagggaaatataacattcttggcacaaatactattatggataagatgatggtggcaggttttaagaagcaaatggcagatactggaaaactgaacacactgttgcagagagccccccagtgtcttgggaaatttattgagattgctgcccgaaagaagcgaaattttattctggatcagacaaatgtgtctgctgctgcccagaggagaaaaatgtgcctgtttgcaggcttccagcgaaaagctgttgtagtttgcccaaaagatgaagactataagcaaagaacacagaagaaagcagaagtagaggggaaagacctaccagaacatgcggtcctcaaaatgaaaggaaactttaccctcccagaggtagctgagtgctttgatgaaataacctatgttgaacttcagaaggaagaagcccaaaaactcttggagcaatataaggaagaaagcaaaaaggctcttccaccagaaaagaaacagaacactggctcaaagaaaagcaataaaaataagagtggcaagaaccagtttaacagaggtggtggccatagaggacgtggaggattcaatatgcgtggtggaaatttcagaggaggagcccctgggaatcgtggcggatataataggaggggcaacatgccacagagaggtggtggcggtggaggaagtggtggaatcggctatccataccctcgtgcccctgtttttcctggccgtggtagttactcaaacagagggaactacaacagaggtggaatgcccaacagagggaactacaaccagaacttcagaggacgaggaaacaatcgtggctacaaaaatcaatctcagggctacaaccagtggcagcagggtcaattctggggtcagaagccatggagtcagcattatcaccaaggatattattgaatacccaaataaaacgaactgatacatatttctccaaaaccttcacaagaagtcgactgttttctttagtaggctaactttttaaacattccacaagaggaagtgcctgcgggttccttttttagaagctttgtgggttgattttttttcttttcttttttgtacatttttaattgcagtttaaaagtgaatcgtaagagaacctcagcattgtgcacgataagagaatgtgtcagtatttcagggttctacattttatctgtaaaatgtgacttttttttttttttatcacaacagaagtaaaatgttgctttgtacctggtgtcttttattaagaatttactccccccatttctcacagagaataacagtcgggagtcattgtcacaatataatagaaatgttagcaaccagattcatgtaaggactaagtggtcctcatgaattgcattaagactctgtactgctcatattacactccatcctctctgtagtttgctgggtagtggagggggtaagctaaatcatagtttctgacaataactgggaaggttttttcttaaaataacaatggaattggtataattgggattgaaaactaaaacttggaactaagatagagaagatggagtgtatgtagaagggctgttaaaaatgtaaaacttggttgcattatttgtggaggctcaaacttgtgaaggttaataccataatttttccatttgttctgcattttgattctgaaaagaaagctggctttgcccatttcttattaaaaaaacttgttgtaaatccagttgtctaatgggatctatatgaagttagccatgtctgtatgcccttctcccacaaaatactgtataactagtgtgcttgtagtagttaactccaccatctttgtaagctaatgaaattgtgagtcacccatttatatcttaatttttaatcatgtcagttcttgaatgggtatctccttagcctgctgatttctttttctttctaaagaaagtgggtggagaaattaatttagacgtttgtttgcaataaaaagaattcattttactcttgttttgggattctcgccatcaaggttcaaaatccctttatataactcccaagaggagaaatttattaagtgtgtgctttctggacagcttattctttactctgcatagaacatttaggttttaaaaacttaaatgtatactgacaattgatacataattatgaagtaaagttgaattcttcccttcccctcccccccagacaacttttaacatatttaatgaggggaaaaggtactggctgggagaagttaacactgagtttatcatctttacagaatgctaatgctgtcctcaactgattattttatatacatatatatgatacatgaaactctgggatcagatgcttttagaagccatcatgcaagccagtcattgatgtcactgctacacaacactgctaacttgactgtagctatgtaataacattagatcccctaattgtaattatattgggtttgcacagaacactttaatcttcccctcaccaatgtgaagtgaggaatcaggagtcaaactgtagaactaaaatttgac

SEQ ID NO: 289881 - DNA, 3728 bp, Homo sapiens
  misc_feature (56)..(57): n is a, c, g, or t
tacacgcatcagccaacaaagagaccaccccaaaacacttaggctagtacgaggcnngggtgagaactcggtgaaaggaattggcgccgttcgacaccaggcggatccgctctgcagcacgaacccatctccagccgcagccgcagccgccgcccgggccgaggagcagccgcagcagccgccaccagtggccgagtgagcggagccgagtttgaggcagcgcctagcggtgaatcggggccctcaccatgagttcctcgcctgttaatgtaaaaaagctgaaggtgtcggagctgaaagaggagctcaagaagcgacgcctttctgacaagggtctcaaggccgagctcatggagcgactccaggctgcgctggacgacgaggaggccgggggccgccccgccatggagcccgggaacggcagcctagacctgggcggggattccgctgggcgctcgggagcaggcctcgagcaggaggccgcggccggcggcgatgaagaggaggaagaagaggaagaggaggaggaaggaatctccgctctggacggcgaccagatggagctaggagaggagaacggggccgcgggggcggccgactcgggcccgatggaggaggaggaggccgcctcggaagacgagaacggcgacgatcagggtttccaggaaggggaagatgagctcggggacgaagaggaaggcgcgggcgacgagaacgggcacggggagcagcagcctcaaccgccggcgacgcagcagcaacagccccaacagcagcgcggggccgccaaggaggccgcggggaagagcagcggccccacctcgctgttcgcggtgacggtggcgccgcccggggcgaggcagggccagcagcaggcgggaggggacggcaaaacagaacagaaaggcggagataaaaagaggggtgttaaaagaccacgagaagatcatggccgtggatattttgagtacattgaagagaacaagtatagcagagccaaatctcctcagccacctgttgaagaagaagatgaacacttcgatgacacagtggtttgtcttgatacttataattgtgatctacattttaaaatatcaagagatcgtctcagtgcttcttcccttacaatggagagttttgcttttctttgggctggaggaagagcatcctatggtgtgtcaaaaggcaaagtgtgttttgagatgaaggttacagagaagatcccagtaaggcatttatatacaaaagatattgacatacatgaagttcgtattggctggtcactaactacaagtggaatgttacttggtgaagaagaattttcttatgggtattctctaaaaggaataaaaacatgcaactgtgagactgaagattatggagaaaagtttgatgaaaatgatgtgattacatgttttgctaactttgaaagtgatgaagtagaactctcgtatgctaagaatggacaagatcttggcgttgccttcaaaatcagtaaggaagttcttgctggacggccactgttcccgcatgttctctgccacaactgtgcagttgaatttaattttggtcagaaggaaaagccatattttccaatacctgaagagtatactttcatccagaacgtccccttagaggatcgagttagaggaccaaaggggcctgaagagaagaaagattgtgaagttgtgatgatgattggcttgccaggagctggaaaaactacctgggttactaaacatgcagcagaaaatccagggaaatataacattcttggcacaaatactattatggataagatgatggtggcaggttttaagaagcaaatggcagatactggaaaactgaacacactgttgcagagagccccccagtgtcttgggaaatttattgagattgctgcccgaaagaagcgaaattttattctggatcagacaaatgtgtctgctgctgcccagaggagaaaaatgtgcctgtttgcaggcttccagcgaaaagctgttgtagtttgcccaaaagatgaagactataagcaaagaacacagaagaaagcagaagtagaggggaaagacctaccagaacatgcggtcctcaaaatgaaaggaaactttaccctcccagaggtagctgagtgctttgatgaaataacctatgttgaacttcagaaggaagaagcccaaaaactcttggagcaatataaggaagaaagcaaaaaggctcttccaccagaaaagaaacagaacactggctcaaagaaaagcaataaaaataagagtggcaagaaccagtttaacagaggtggtggccatagaggacgtggaggattcaatatgcgtggtggaaatttcagaggaggagcccctgggaatcgtggcggatataataggaggggcaacatgccacagagaggtggtggcggtggaggaagtggtggaatcggctatccataccctcgtgcccctgtttttcctggccgtggtagttactcaaacagagggaactacaacagaggtggaatgcccaacagagggaactacaaccagaacttcagaggacgaggaaacaatcgtggctacaaaaatcaatctcagggctacaaccagtggcagcagggtcaattctggggtcagaagccatggagtcagcattatcaccaaggatattattgaatacccaaataaaacgaactgatacatatttctccaaaaccttcacaagaagtcgactgttttctttagtaggctaactttttaaacattccacaagaggaagtgcctgcgggttccttttttagaagctttgtgggttgattttttttcttttcttttttgtacatttttaattgcagtttaaaagtgaatcgtaagagaacctcagcattgtgcacgataagagaatgtgtcagtatttcagggttctacattttatctgtaaaatgtgacttttttttttttttatcacaacagaagtaaaatgttgctttgtacctggtgtcttttattaagaatttactccccccatttctcacagagaataacagtcgggagtcattgtcacaatataatagaaatgttagcaaccagattcatgtaaggactaagtggtcctcatgaattgcattaagactctgtactgctcatattacactccatcctctctgtagtttgctgggtagtggagggggtaagctaaatcatagtttctgacaataactgggaaggttttttcttaaaataacaatggaattggtataattgggattgaaaactaaaacttggaactaagatagagaagatggagtgtatgtagaagggctgttaaaaatgtaaaacttggttgcattatttgtggaggctcaaacttgtgaaggttaataccataatttttccatttgttctgcattttgattctgaaaagaaagctggctttgcccatttcttattaaaaaaacttgttgtaaatccagttgtctaatgggatctatatgaagttagccatgtctgtatgcccttctcccacaaaatactgtataactagtgtgcttgtagtagttaactccaccatctttgtaagctaatgaaattgtgagtcacccatttatatcttaatttttaatcatgtcagttcttgaatgggtatctccttagcctgctgatttctttttattgcaaacaaacgtctaaattaatttctccacccactttctttagaaagaaaaaggtcgacgc

SEQ ID NO: 289882 - DNA, 4223 bp, Homo sapiens
  misc_feature (56)..(57): n is a, c, g, or t
tacacgcatcagccaacaaagagaccaccccaaaacacttaggctagtacgaggcnngggtgagaactcggtgaaaggaattggcgccgttcgacaccaggcggatccgctctgcagcacgaacccatctccagccgcagccgcagccgccgcccgggccgaggagcagccgcagcagccgccaccagtggccgagtgagcggagccgagtttgaggcagcgcctagcggtgaatcggggccctcaccatgagttcctcgcctgttaatgtaaaaaagctgaaggtgtcggagctgaaagaggagctcaagaagcgacgcctttctgacaagggtctcaaggccgagctcatggagcgactccaggctgcgctggacgacgaggaggccgggggccgccccgccatggagcccgggaacggcagcctagacctgggcggggattccgctgggcgctcgggagcaggcctcgagcaggaggccgcggccggcggcgatgaagaggaggaagaagaggaagaggaggaggaaggaatctccgctctggacggcgaccagatggagctaggagaggagaacggggccgcgggggcggccgactcgggcccgatggaggaggaggaggccgcctcggaagacgagaacggcgacgatcagggtttccaggaaggggaagatgagctcggggacgaagaggaaggcgcgggcgacgagaacgggcacggggagcagcagcctcaaccgccggcgacgcagcagcaacagccccacctcgctgttcgcggtgacggtggcgccgcccggggcgaggcagggccagcagcaggcgggaggggacggcaaaacagaacagaaaggcggagataaaaagaggggtgttaaaagaccacgagaagatcatggccgtggatattttgagtacattgaagagaacaagtatagcagagccaaatctcctcagccacctgttgaagaagaagatgaacacttcgatgacacagtggtttgtcttgatacttataattgtgatctacattttaaaatatcaagagatcgtctcagtgcttcttcccttacaatggagagttttgcttttctttgggctggaggaagagcatcctatggtgtgtcaaaaggcaaagtgtgttttgagatgaaggttacagagaagatcccagtaaggcatttatatacaaaagatattgacatacatgaagttcgtattggctggtcactaactacaagtggaatgttacttggtgaagaagaattttcttatgggtattctctaaaaggaataaaaacatgcaactgtgagactgaagattatggagaaaagtttgatgaaaatgatgtgattacatgttttgctaactttgaaagtgatgaagtagaactctcgtatgctaagaatggacaagatcttggcgttgccttcaaaatcagtaaggaagttcttgctggacggccactgttcccgcatgttctctgccacaactgtgcagttgaatttaattttggtcagaaggaaaagccatattttccaatacctgaagagtatactttcatccagaacgtccccttagaggatcgagttagaggaccaaaggggcctgaagagaagaaagattgtgaagttgtgatgatgattggcttgccaggagctggaaaaactacctgggttactaaacatgcagcagaaaatccagggaaatataacattcttggcacaaatactattatggataagatgatggtggcaggttttaagaagcaaatggcagatactggaaaactgaacacactgttgcagagagccccccagtgtcttgggaaatttattgagattgctgcccgaaagaagcgaaattttattctggatcagacaaatgtgtctgctgctgcccagaggagaaaaatgtgcctgtttgcaggcttccagcgaaaagctgttgtagtttgcccaaaagatgaagactataagcaaagaacacagaagaaagcagaagtagaggggaaagacctaccagaacatgcggtcctcaaaatgaaaggaaactttaccctcccagaggtagctgagtgctttgatgaaataacctatgttgaacttcagaaggaagaagcccaaaaactcttggagcaatataaggaagaaagcaaaaaggctcttccaccagaaaagaaacagaacactggctcaaagaaaagcaataaaaataagagtggcaagaaccagtttaacagaggtggtggccatagaggacgtggaggattcaatatgcgtggtggaaatttcagaggaggagcccctgggaatcgtggcggatataataggaggggcaacatgccacagagaggtggtggcggtggaggaagtggtggaatcggctatccataccctcgtgcccctgtttttcctggccgtggtagttactcaaacagagggaactacaacagaggtggaatgcccaacagagggaactacaaccagaacttcagaggacgaggaaacaatcgtggctacaaaaatcaatctcagggctacaaccagtggcagcagggtcaattctggggtcagaagccatggagtcagcattatcaccaaggatattattgaatacccaaataaaacgaactgatacatatttctccaaaaccttcacaagaagtcgactgttttctttagtaggctaactttttaaacattccacaagaggaagtgcctgcgggttccttttttagaagctttgtgggttgattttttttcttttcttttttgtacatttttaattgcagtttaaaagtgaatcgtaagagaacctcagcattgtgcacgataagagaatgtgtcagtatttcagggttctacattttatctgtaaaatgtgacttttttttttttttatcacaacagaagtaaaatgttgctttgtacctggtgtcttttattaagaatttactccccccatttctcacagagaataacagtcgggagtcattgtcacaatataatagaaatgttagcaaccagattcatgtaaggactaagtggtcctcatgaattgcattaagactctgtactgctcatattacactccatcctctctgtagtttgctgggtagtggagggggtaagctaaatcatagtttctgacaataactgggaaggttttttcttaaaataacaatggaattggtataattgggattgaaaactaaaacttggaactaagatagagaagatggagtgtatgtagaagggctgttaaaaatgtaaaacttggttgcattatttgtggaggctcaaacttgtgaaggttaataccataatttttccatttgttctgcattttgattctgaaaagaaagctggctttgcccatttcttattaaaaaaacttgttgtaaatccagttgtctaatgggatctatatgaagttagccatgtctgtatgcccttctcccacaaaatactgtataactagtgtgcttgtagtagttaactccaccatctttgtaagctaatgaaattgtgagtcacccatttatatcttaatttttaatcatgtcagttcttgaatgggtatctccttagcctgctgatttctttttctttctaaagaaagtgggtggagaaattaatttagacgtttgtttgcaataaaaagaattcattttactcttgttttgggattctcgccatcaaggttcaaaatccctttatataactcccaagaggagaaatttattaagtgtgtgctttctggacagcttattctttactctgcatagaacatttaggttttaaaaacttaaatgtatactgacaattgatacataattatgaagtaaagttgaattcttcccttcccctcccccccagacaacttttaacatatttaatgaggggaaaaggtactggctgggagaagttaacactgagtttatcatctttacagaatgctaatgctgtcctcaactgattattttatatacatatatatgatacatgaaactctgggatcagatgcttttagaagccatcatgcaagccagtcattgatgtcactgctacacaacactgctaacttgactgtagctatgtaataacattagatcccctaattgtaattatattgggtttgcacagaacactttaatcttcccctcaccaatgtgaagtgaggaatcaggagtcaaactgtagaactaaaatttgac

SEQ ID NO: 289883 - DNA, 4480 bp, Homo sapiens
  misc_feature (56)..(57): n is a, c, g, or t
tacacgcatcagccaacaaagagaccaccccaaaacacttaggctagtacgaggcnngggtgagaactcggtgaaaggaattggcgccgttcgacaccaggcggatccgctctgcagcacgaacccatctccagccgcagccgcagccgccgcccgggccgaggagcagccgcagcagccgccaccagtggccgagtgagcggagccgagtttgaggcagcgcctagcggtgaatcggggccctcaccatgagttcctcgcctgttaatgtaaaaaagctgaaggtgtcggagctgaaagaggagctcaagaagcgacgcctttctgacaagggtctcaaggccgagctcatggagcgactccaggctgcgctggacgacgaggaggccgggggccgccccgccatggagcccgggaacggcagcctagacctgggcggggattccgctgggcgctcgggagcaggcctcgagcaggaggccgcggccggcggcgatgaagaggaggaagaagaggaagaggaggaggaaggaatctccgctctggacggcgaccagatggagctaggagaggagaacggggccgcgggggcggccgactcgggcccgatggaggaggaggaggccgcctcggaagacgagaacggcgacgatcagggtttccaggaaggggaagatgagctcggggacgaagaggaaggcgcgggcgacgagaacgggcacggggagcagcagcctcaaccgccggcgacgcagcagcaacagccccagcgccgccgcgccgggctcggcccctccccctctctgcgctctcttcgggatacacgtgggcttcgggcctgggccgcgcagtttttctttggctttctcgaatcatcgaggagactggcaaaattagtaatgtctttagactgcgtcactagcgccaatcgaattcgtagttgattgttctttgaattcacatttgagtcctcggttaaaacctcagttaaaaagcaggataaagtcgagctgctttggttctcggaacggaaaagcgtttttttgttgtttagaggcttggcctttatggggctcgtgtgtgttttaggggacggcaaaacagaacagaaaggcggagataaaaagaggggtgttaaaagaccacgagaagatcatggccgtggatattttgagtacattgaagagaacaagtatagcagagccaaatctcctcagccacctgttgaagaagaagatgaacacttcgatgacacagtggtttgtcttgatacttataattgtgatctacattttaaaatatcaagagatcgtctcagtgcttcttcccttacaatggagagttttgcttttctttgggctggaggaagagcatcctatggtgtgtcaaaaggcaaagtgtgttttgagatgaaggttacagagaagatcccagtaaggcatttatatacaaaagatattgacatacatgaagttcgtattggctggtcactaactacaagtggaatgttacttggtgaagaagaattttcttatgggtattctctaaaaggaataaaaacatgcaactgtgagactgaagattatggagaaaagtttgatgaaaatgatgtgattacatgttttgctaactttgaaagtgatgaagtagaactctcgtatgctaagaatggacaagatcttggcgttgccttcaaaatcagtaaggaagttcttgctggacggccactgttcccgcatgttctctgccacaactgtgcagttgaatttaattttggtcagaaggaaaagccatattttccaatacctgaagagtatactttcatccagaacgtccccttagaggatcgagttagaggaccaaaggggcctgaagagaagaaagattgtgaagttgtgatgatgattggcttgccaggagctggaaaaactacctgggttactaaacatgcagcagaaaatccagggaaatataacattcttggcacaaatactattatggataagatgatggtggcaggttttaagaagcaaatggcagatactggaaaactgaacacactgttgcagagagccccccagtgtcttgggaaatttattgagattgctgcccgaaagaagcgaaattttattctggatcagacaaatgtgtctgctgctgcccagaggagaaaaatgtgcctgtttgcaggcttccagcgaaaagctgttgtagtttgcccaaaagatgaagactataagcaaagaacacagaagaaagcagaagtagaggggaaagacctaccagaacatgcggtcctcaaaatgaaaggaaactttaccctcccagaggtagctgagtgctttgatgaaataacctatgttgaacttcagaaggaagaagcccaaaaactcttggagcaatataaggaagaaagcaaaaaggctcttccaccagaaaagaaacagaacactggctcaaagaaaagcaataaaaataagagtggcaagaaccagtttaacagaggtggtggccatagaggacgtggaggattcaatatgcgtggtggaaatttcagaggaggagcccctgggaatcgtggcggatataataggaggggcaacatgccacagagaggtggtggcggtggaggaagtggtggaatcggctatccataccctcgtgcccctgtttttcctggccgtggtagttactcaaacagagggaactacaacagaggtggaatgcccaacagagggaactacaaccagaacttcagaggacgaggaaacaatcgtggctacaaaaatcaatctcagggctacaaccagtggcagcagggtcaattctggggtcagaagccatggagtcagcattatcaccaaggatattattgaatacccaaataaaacgaactgatacatatttctccaaaaccttcacaagaagtcgactgttttctttagtaggctaactttttaaacattccacaagaggaagtgcctgcgggttccttttttagaagctttgtgggttgattttttttcttttcttttttgtacatttttaattgcagtttaaaagtgaatcgtaagagaacctcagcattgtgcacgataagagaatgtgtcagtatttcagggttctacattttatctgtaaaatgtgacttttttttttttttatcacaacagaagtaaaatgttgctttgtacctggtgtcttttattaagaatttactccccccatttctcacagagaataacagtcgggagtcattgtcacaatataatagaaatgttagcaaccagattcatgtaaggactaagtggtcctcatgaattgcattaagactctgtactgctcatattacactccatcctctctgtagtttgctgggtagtggagggggtaagctaaatcatagtttctgacaataactgggaaggttttttcttaaaataacaatggaattggtataattgggattgaaaactaaaacttggaactaagatagagaagatggagtgtatgtagaagggctgttaaaaatgtaaaacttggttgcattatttgtggaggctcaaacttgtgaaggttaataccataatttttccatttgttctgcattttgattctgaaaagaaagctggctttgcccatttcttattaaaaaaacttgttgtaaatccagttgtctaatgggatctatatgaagttagccatgtctgtatgcccttctcccacaaaatactgtataactagtgtgcttgtagtagttaactccaccatctttgtaagctaatgaaattgtgagtcacccatttatatcttaatttttaatcatgtcagttcttgaatgggtatctccttagcctgctgatttctttttctttctaaagaaagtgggtggagaaattaatttagacgtttgtttgcaataaaaagaattcattttactcttgttttgggattctcgccatcaaggttcaaaatccctttatataactcccaagaggagaaatttattaagtgtgtgctttctggacagcttattctttactctgcatagaacatttaggttttaaaaacttaaatgtatactgacaattgatacataattatgaagtaaagttgaattcttcccttcccctcccccccagacaacttttaacatatttaatgaggggaaaaggtactggctgggagaagttaacactgagtttatcatctttacagaatgctaatgctgtcctcaactgattattttatatacatatatatgatacatgaaactctgggatcagatgcttttagaagccatcatgcaagccagtcattgatgtcactgctacacaacactgctaacttgactgtagctatgtaataacattagatcccctaattgtaattatattgggtttgcacagaacactttaatcttcccctcaccaatgtgaagtgaggaatcaggagtcaaactgtagaactaaaatttgac

SEQ ID NO: 289884 - DNA, 3514 bp, Homo sapiens
  misc_feature (56)..(57): n is a, c, g, or t
tacacgcatcagccaacaaagagaccaccccaaaacacttaggctagtacgaggcnngggtgagaactcggtgaaaggaattggcgccgttcgacaccaggcggatccgctctgcagcacgaacccatctccagccgcagccgcagccgccgcccgggccgaggagcagccgcagcagccgccaccagtggccgagtgagcggagccgagtttgaggcagcgcctagcggtgaatcggggccctcaccatgagttcctcgcctgttaatgtaaaaaagctgaaggtgtcggagctgaaagaggagctcaagaagcgacgcctttctgacaagggtctcaaggccgagctcatggagcgactccaggctgcgctggacgacgaggaggccgggggccgccccgccatggagcccgggaacggcagcctagacctgggcggggattccgctgggcgctcgggagcaggcctcgagcaggaggccgcggccggcggcgatgaagaggaggaagaagaggaagaggaggaggaaggaatctccgctctggacggcgaccagatggagctaggagaggagaacggggccgcgggggcggccgactcgggcccgatggaggaggaggaggccgcctcggaagacgagaacggcgacgatcagggtttccaggaaggggaagatgagctcggggacgaagaggaaggcgcgggcgacgagaacgggcacggggagcagcagcctcaaccgccggcgacgcagcagcaacagccccaacagcagcgcggggccgccaaggaggccgcggggaagagcagcggccccacctcgctgttcgcggtgacggtggcgccgcccggggcgaggcagggccagcagcaggcgggaggggacggcaaaacagaacagaaaggcggagataaaaagaggggtgttaaaagaccacgagaagatcatggccgtggatattttgagtacattgaagagaacaagtatagcagagccaaatctcctcagccacctgttgaagaagaagatgaacacttcgatgacacagtggtttgtcttgatacttataattgtgatctacattttaaaatatcaagagatcgtctcagtgcttcttcccttacaatggagagttttgcttttctttgggctggaggaagagcatcctatggtgtgtcaaaaggcaaagtgtgttttgagatgaaggttacagagaagatcccagtaaggcatttatatacaaaagatattgacatacatgaagttcgtattggctggtcactaactacaagtggaatgttacttggtgaagaagaattttcttatgggtattctctaaaaggaataaaaacatgcaactgtgagactgaagattatggagaaaagtttgatgaaaatgatgtgattacatgttttgctaactttgaaagtgatgaagtagaactctcgtatgctaagaatggacaagatcttggcgttgccttcaaaatcagtaaggaagttcttgctggacggccactgttcccgcatgttctctgccacaactgtgcagttgaatttaattttggtcagaaggaaaagccatattttccaatacctgaagagtatactttcatccagaacgtccccttagaggatcgagttagaggaccaaaggggcctgaagagaagaaagattgtgaagttgtgatgatgattggcttgccaggagctggaaaaactacctgggttactaaacatgcagcagaaaatccagggaaatataacattcttggcacaaatactattatggataagatgatggtggcaggttttaagaagcaaatggcagatactggaaaactgaacacactgttgcagagagccccccagtgtcttgggaaatttattgagattgctgcccgaaagaagcgaaattttattctggatcagacaaatgtgtctgctgctgcccagaggagaaaaatgtgcctgtttgcaggcttccagcgaaaagctgttgtagtttgcccaaaagatgaagactataagcaaagaacacagaagaaagcagaagtagaggggaaagacctaccagaacatgcggtcctcaaaatgaaaggaaactttaccctcccagaggtagctgagtgctttgatgaaataacctatgttgaacttcagaaggaagaagcccaaaaactcttggagcaatataaggaagaaagcaaaaaggctcttccaccagaaaagaaacagaacactggctcaaagaaaagcaataaaaataagagtggcaagaaccagtttaacagaggtggtggccatagaggacgtggaggattcaatatgcgtggtggaaatttcagaggaggagcccctgggaatcgtggcggatataataggaggggcaacatgccacagagaggtggtggcggtggaggaagtggtggaatcggctatccataccctcgtgcccctgtttttcctggccgtggtagttactcaaacagagggaactacaacagaggtggaatgcccaacagagggaactacaaccagaacttcagaggacgaggaaacaatcgtggctacaaaaatcaatctcagggctacaaccagtggcagcagggtcaattctggggtcagaagccatggagtcagcattatcaccaaggatattattgaatacccaaataaaacgaactgatacatatttctccaaaaccttcacaagaagtcgactgttttctttagtaggctaactttttaaacattccacaagaggaagtgcctgcgggttccttttttagaagctttgtgggttgattttttttcttttcttttttgtacatttttaattgcagtttaaaagtgaatcgtaagagaacctcagcattgtgcacgataagagaatgtgtcagtatttcagggttctacattttatctgtaaaatgtgacttttttttttttttatcacaacagaagtaaaatgttgctttgtacctggtgtcttttattaagaatttactccccccatttctcacagagaataacagtcgggagtcattgtcacaatataatagaaatgttagcaaccagattcatgtaaggactaagtggtcctcatgaattgcattaagactctgtactgctcatattacactccatcctctctgtagtttgctgggtagtggagggggtaagctaaatcatagtttctgacaataactgggaaggttttttcttaaaataacaatggaattggtataattgggattgaaaactaaaacttggaactaagatagagaagatggagtgtatgtagaagggctgttaaaaatgtaaaacttggttgcattatttgtggaggctcaaacttgtgaaggttaataccataatttttccatttgttctgcattttgattctgaaaagaaagctggctttgcccatttcttattaaaaaaacttgttgtaaatgaaacaacaacacaaaacaaaaaaggggggggcggcataaaaaattatcacg

SEQ ID NO: 289885 - DNA, 6549 bp, Homo sapiens
  misc_feature (56)..(57): n is a, c, g, or t
tacacgcatcagccaacaaagagaccaccccaaaacacttaggctagtacgaggcnngggtgagaactcggtgaaaggaattggcgccgttcgacaccaggcggatccgctctgcagcacgaacccatctccagccgcagccgcagccgccgcccgggccgaggagcagccgcagcagccgccaccagtggccgagtgagcggagccgagtttgaggcagcgcctagcggtgaatcggggccctcaccatgagttcctcgcctgttaatgtaaaaaagctgaaggtgtcggagctgaaagaggagctcaagaagcgacgcctttctgacaagggtctcaaggccgagctcatggagcgactccaggctgcgctggacgacgaggaggccgggggccgccccgccatggagcccgggaacggcagcctagacctgggcggggattccgctgggcgctcgggagcaggcctcgagcaggaggccgcggccggcggcgatgaagaggaggaagaagaggaagaggaggaggaaggaatctccgctctggacggcgaccagatggagctaggagaggagaacggggccgcgggggcggccgactcgggcccgatggaggaggaggaggccgcctcggaagacgagaacggcgacgatcagggtttccaggaaggggaagatgagctcggggacgaagaggaaggcgcgggcgacgagaacgggcacggggagcagcagcctcaaccgccggcgacgcagcagcaacagccccagcgccgccgcgccgggctcggcccctccccctctctgcgctctcttcgggatacacgtgggcttcgggcctgggccgcgcagtttttctttggctttctcgaatcatcgaggagactggcaaaattagtaatgtctttagactgcgtcactagcgccaatcgaattcgtagttgattgttctttgaattcacatttgagtcctcggttaaaacctcagttaaaaagcaggataaagtcgagctgctttggttctcggaacggaaaagcgtttttttgttgtttagaggcttggcctttatggggctcgtgtgtgttttaggggacggcaaaacagaacagaaaggcggagataaaaagaggggtgttaaaagaccacgagaagatcatggccgtggatattttgagtacattgaagagaacaagtatagcaggtataggatgctcacctagttttactcatcccttattcgttcgttgatcggaaagctgtatcaggagacaattctgtctttcagagccaaatctcctcagccacctgttgaagaagaagatgaacacttcgatgacacagtggtttgtcttgatacttgtaagtgaagctgtttctccccaattatgaaatgcggtgatggtggtttttttttttttttttttagaagtcttaatgcttaagtgcagcaaaacttgggttagtttttttaaaagcaggaagataatggtttacattcagaacctagtagtttaatatttagcacgtcatcagttgtattaagtggattattttacaggctctaggagtttcgtatttttatgacttgaaagttctcattcttaggaaatgtaaaattaatgccagtttttgactagctaacggaaacttgtaacactacctataatttagccttacaggcttctacaataaagtaattcatttttttgtggaattatattaagtgagctatttgggctagttaaatatttactaatgacttctcccattagcacacaagtatattccctattttaaaagattgtaatattactttttcaataactgctcttttgttctcaattccagttcagtagctgctgctttaaacataagttgatttcttccaaagacctgaggcagcagcagtgggctatcactgggccactagctttcttcagcagcgaatggtatcaatggcagtgcagcactgtaaatactgctactttacccagttgggttgcaattgagtgagaaagtattgcaaacctctaagtgggctttgactgtcagacttgtttttttttttttttttttgttacaaaaaaacgtagttggtttagtgatgagaatgtacaactctgggtgtgataaatagaccaaaggataaaaataactgtttcaaaagtatcagctatggtgtcagcctgctgtgttagatggaaggcattggagcttagcttctcatgttttcttgtacaaattggctttattcagatttgtaagagtgtcaatgtaaaactctttcttactggaatatcctttacagaaggttgagatagtcatctgagcctttttaaaagaaaaaactgcaggtgaaaaaggagttagttgatgtgaaagttttagtgaaattctgggttgtataaataagttgctaggaattggcaaggtagtgaagtggtgactcacacaggtaatgtaattgttagattttttagcaaatcaggaatatgtcaatataagtacaatgttgaattcaaacaatctgttgaattaaattctgttgattagaataactctaatttaagaaaaattccaaactgtagatttatttttctctgatcagtaaaaagaaaatgagttccagcttgactttagctgttcaagtgagaagtctgaggaagtgcatgttaatgagccagtgacccataggtagctgggttaaagacactttggatttggataatccgggaagcaattaatccctaattgttgaacaggcagtcctgggtaaagaggacctaaaatgctgcactattaacagcattagacggccaggtttgtacttcatagttttaggctgtcttcttcacaagttttagaaaaagaatttaggagctagagccctggtgcaggatcaacagcagctcatactcctattttaaaataatttggtcgtggcctcccttcagttttaatgtggcactggtaaatctacctggttctggcatgcttcactttgatttcctgctatcctctactgcttgcctctaaatcaaggtaaagagcagagcaggtatgtattaatgtcacattgtcttgattattttaaatacttaaaatatacatgttaaaccttggtattagtttcacaggcagtttacttttcagtacataatttaacaggagtgacttggtgggagtggggctttaaactgaaaattggaacaacagcatgatgtggagaaaagttgtgcagcattaagaagtacatgcaaaaattaagtaaccaagttttgtctacatagcagatatgtttacattggatgtcaaaagtaacacagtatttgatataattacagataattgtgatctacattttaaaatatcaagagatcgtctcagtgcttcttcccttacaatggagagttttgcttttctttgggctggaggaagagcatcctatggtgtgtcaaaaggcaaagtgtgttttgagatgaaggttacagagaagatcccagtaaggcatttatatacaaaagatattgacatacatgaagttcgtattggctggtcactaactacaagtggaatgttacttggtgaagaagaattttcttatgggtattctctaaaaggaataaaaacatgcaactgtgagactgaagattatggagaaaagtttgatgaaaatgatgtgattacatgttttgctaactttgaaagtgatgaagtagaactctcgtatgctaagaatggacaagatcttggcgttgccttcaaaatcagtaaggaagttcttgctggacggccactgttcccgcatgttctctgccacaactgtgcagttgaatttaattttggtcagaaggaaaagccatattttccaatacctgaagagtatactttcatccagaacgtccccttagaggatcgagttagaggaccaaaggggcctgaagagaagaaagattgtgaagttgtgatgatgattggcttgccaggagctggaaaaactacctgggttactaaacatgcagcagaaaatccagggaaatataacattcttggcacaaatactattatggataagatgatggtggcaggttttaagaagcaaatggcagatactggaaaactgaacacactgttgcagagagccccccagtgtcttgggaaatttattgagattgctgcccgaaagaagcgaaattttattctggatcagacaaatgtgtctgctgctgcccagaggagaaaaatgtgcctgtttgcaggcttccagcgaaaagctgttgtagtttgcccaaaagatgaagactataagcaaagaacacagaagaaagcagaagtagaggggaaagacctaccagaacatgcggtcctcaaaatgaaaggaaactttaccctcccagaggtagctgagtgctttgatgaaataacctatgttgaacttcagaaggaagaagcccaaaaactcttggagcaatataaggaagaaagcaaaaaggctcttccaccagaaaagaaacagaacactggctcaaagaaaagcaataaaaataagagtggcaagaaccagtttaacagaggtggtggccatagaggacgtggaggattcaatatgcgtggtggaaatttcagaggaggagcccctgggaatcgtggcggatataataggaggggcaacatgccacagagaggtggtggcggtggaggaagtggtggaatcggctatccataccctcgtgcccctgtttttcctggccgtggtagttactcaaacagagggaactacaacagaggtggaatgcccaacagagggaactacaaccagaacttcagaggacgaggaaacaatcgtggctacaaaaatcaatctcagggctacaaccagtggcagcagggtcaattctggggtcagaagccatggagtcagcattatcaccaaggatattattgaatacccaaataaaacgaactgatacatatttctccaaaaccttcacaagaagtcgactgttttctttagtaggctaactttttaaacattccacaagaggaagtgcctgcgggttccttttttagaagctttgtgggttgattttttttcttttcttttttgtacatttttaattgcagtttaaaagtgaatcgtaagagaacctcagcattgtgcacgataagagaatgtgtcagtatttcagggttctacattttatctgtaaaatgtgacttttttttttttttatcacaacagaagtaaaatgttgctttgtacctggtgtcttttattaagaatttactccccccatttctcacagagaataacagtcgggagtcattgtcacaatataatagaaatgttagcaaccagattcatgtaaggactaagtggtcctcatgaattgcattaagactctgtactgctcatattacactccatcctctctgtagtttgctgggtagtggagggggtaagctaaatcatagtttctgacaataactgggaaggttttttcttaaaataacaatggaattggtataattgggattgaaaactaaaacttggaactaagatagagaagatggagtgtatgtagaagggctgttaaaaatgtaaaacttggttgcattatttgtggaggctcaaacttgtgaaggttaataccataatttttccatttgttctgcattttgattctgaaaagaaagctggctttgcccatttcttattaaaaaaacttgttgtaaatccagttgtctaatgggatctatatgaagttagccatgtctgtatgcccttctcccacaaaatactgtataactagtgtgcttgtagtagttaactccaccatctttgtaagctaatgaaattgtgagtcacccatttatatcttaatttttaatcatgtcagttcttgaatgggtatctccttagcctgctgatttctttttctttctaaagaaagtgggtggagaaattaatttagacgtttgtttgcaataaaaagaattcattttactcttgttttgggattctcgccatcaaggttcaaaatccctttatataactcccaagaggagaaatttattaagtgtgtgctttctggacagcttattctttactctgcatagaacatttaggttttaaaaacttaaatgtatactgacaattgatacataattatgaagtaaagttgaattcttcccttcccctcccccccagacaacttttaacatatttaatgaggggaaaaggtactggctgggagaagttaacactgagtttatcatctttacagaatgctaatgctgtcctcaactgattattttatatacatatatatgatacatgaaactctgggatcagatgcttttagaagccatcatgcaagccagtcattgatgtcactgctacacaacactgctaacttgactgtagctatgtaataacattagatcccctaattgtaattatattgggtttgcacagaacactttaatcttcccctcaccaatgtgaagtgaggaatcaggagtcaaactgtagaactaaaatttgac

SEQ ID NO: 289886 - DNA, 5829 bp, Homo sapiens
agcggagtacaatgcggccgcggggagcgcgggcccgcgggggaggggagcgccgccgcgccgggctcggcccctccccctctctgcgctctcttcgggatacacgtgggcttcgggcctgggccgcgcagtttttctttggctttctcgaatcatcgaggagactggcaaaattagtaatgtctttagactgcgtcactagcgccaatcgaattcgtagttgattgttctttgaattcacatttgagtcctcggttaaaacctcagttaaaaagcaggataaagtcgagctgctttggttctcggaacggaaaagcgtttttttgttgtttagaggcttggcctttatggggctcgtgtgtgttttaggggacggcaaaacagaacagaaaggcggagataaaaagaggggtgttaaaagaccacgagaagatcatggccgtggatattttgagtacattgaagagaacaagtatagcaggtataggatgctcacctagttttactcatcccttattcgttcgttgatcggaaagctgtatcaggagacaattctgtctttcagagccaaatctcctcagccacctgttgaagaagaagatgaacacttcgatgacacagtggtttgtcttgatacttgtaagtgaagctgtttctccccaattatgaaatgcggtgatggtggtttttttttttttttttttagaagtcttaatgcttaagtgcagcaaaacttgggttagtttttttaaaagcaggaagataatggtttacattcagaacctagtagtttaatatttagcacgtcatcagttgtattaagtggattattttacaggctctaggagtttcgtatttttatgacttgaaagttctcattcttaggaaatgtaaaattaatgccagtttttgactagctaacggaaacttgtaacactacctataatttagccttacaggcttctacaataaagtaattcatttttttgtggaattatattaagtgagctatttgggctagttaaatatttactaatgacttctcccattagcacacaagtatattccctattttaaaagattgtaatattactttttcaataactgctcttttgttctcaattccagttcagtagctgctgctttaaacataagttgatttcttccaaagacctgaggcagcagcagtgggctatcactgggccactagctttcttcagcagcgaatggtatcaatggcagtgcagcactgtaaatactgctactttacccagttgggttgcaattgagtgagaaagtattgcaaacctctaagtgggctttgactgtcagacttgtttttttttttttttttttgttacaaaaaaacgtagttggtttagtgatgagaatgtacaactctgggtgtgataaatagaccaaaggataaaaataactgtttcaaaagtatcagctatggtgtcagcctgctgtgttagatggaaggcattggagcttagcttctcatgttttcttgtacaaattggctttattcagatttgtaagagtgtcaatgtaaaactctttcttactggaatatcctttacagaaggttgagatagtcatctgagcctttttaaaagaaaaaactgcaggtgaaaaaggagttagttgatgtgaaagttttagtgaaattctgggttgtataaataagttgctaggaattggcaaggtagtgaagtggtgactcacacaggtaatgtaattgttagattttttagcaaatcaggaatatgtcaatataagtacaatgttgaattcaaacaatctgttgaattaaattctgttgattagaataactctaatttaagaaaaattccaaactgtagatttatttttctctgatcagtaaaaagaaaatgagttccagcttgactttagctgttcaagtgagaagtctgaggaagtgcatgttaatgagccagtgacccataggtagctgggttaaagacactttggatttggataatccgggaagcaattaatccctaattgttgaacaggcagtcctgggtaaagaggacctaaaatgctgcactattaacagcattagacggccaggtttgtacttcatagttttaggctgtcttcttcacaagttttagaaaaagaatttaggagctagagccctggtgcaggatcaacagcagctcatactcctattttaaaataatttggtcgtggcctcccttcagttttaatgtggcactggtaaatctacctggttctggcatgcttcactttgatttcctgctatcctctactgcttgcctctaaatcaaggtaaagagcagagcaggtatgtattaatgtcacattgtcttgattattttaaatacttaaaatatacatgttaaaccttggtattagtttcacaggcagtttacttttcagtacataatttaacaggagtgacttggtgggagtggggctttaaactgaaaattggaacaacagcatgatgtggagaaaagttgtgcagcattaagaagtacatgcaaaaattaagtaaccaagttttgtctacatagcagatatgtttacattggatgtcaaaagtaacacagtatttgatataattacagataattgtgatctacattttaaaatatcaagagatcgtctcagtgcttcttcccttacaatggagagttttgcttttctttgggctggaggaagagcatcctatggtgtgtcaaaaggcaaagtgtgttttgagatgaaggttacagagaagatcccagtaaggcatttatatacaaaagatattgacatacatgaagttcgtattggctggtcactaactacaagtggaatgttacttggtgaagaagaattttcttatgggtattctctaaaaggaataaaaacatgcaactgtgagactgaagattatggagaaaagtttgatgaaaatgatgtgattacatgttttgctaactttgaaagtgatgaagtagaactctcgtatgctaagaatggacaagatcttggcgttgccttcaaaatcagtaaggaagttcttgctggacggccactgttcccgcatgttctctgccacaactgtgcagttgaatttaattttggtcagaaggaaaagccatattttccaatacctgaagagtatactttcatccagaacgtccccttagaggatcgagttagaggaccaaaggggcctgaagagaagaaagattgtgaagttgtgatgatgattggcttgccaggagctggaaaaactacctgggttactaaacatgcagcagaaaatccagggaaatataacattcttggcacaaatactattatggataagatgatggtggcaggttttaagaagcaaatggcagatactggaaaactgaacacactgttgcagagagccccccagtgtcttgggaaatttattgagattgctgcccgaaagaagcgaaattttattctggatcagacaaatgtgtctgctgctgcccagaggagaaaaatgtgcctgtttgcaggcttccagcgaaaagctgttgtagtttgcccaaaagatgaagactataagcaaagaacacagaagaaagcagaagtagaggggaaagacctaccagaacatgcggtcctcaaaatgaaaggaaactttaccctcccagaggtagctgagtgctttgatgaaataacctatgttgaacttcagaaggaagaagcccaaaaactcttggagcaatataaggaagaaagcaaaaaggctcttccaccagaaaagaaacagaacactggctcaaagaaaagcaataaaaataagagtggcaagaaccagtttaacagaggtggtggccatagaggacgtggaggattcaatatgcgtggtggaaatttcagaggaggagcccctgggaatcgtggcggatataataggaggggcaacatgccacagagaggtggtggcggtggaggaagtggtggaatcggctatccataccctcgtgcccctgtttttcctggccgtggtagttactcaaacagagggaactacaacagaggtggaatgcccaacagagggaactacaaccagaacttcagaggacgaggaaacaatcgtggctacaaaaatcaatctcagggctacaaccagtggcagcagggtcaattctggggtcagaagccatggagtcagcattatcaccaaggatattattgaatacccaaataaaacgaactgatacatatttctccaaaaccttcacaagaagtcgactgttttctttagtaggctaactttttaaacattccacaagaggaagtgcctgcgggttccttttttagaagctttgtgggttgattttttttcttttcttttttgtacatttttaattgcagtttaaaagtgaatcgtaagagaacctcagcattgtgcacgataagagaatgtgtcagtatttcagggttctacattttatctgtaaaatgtgacttttttttttttttatcacaacagaagtaaaatgttgctttgtacctggtgtcttttattaagaatttactccccccatttctcacagagaataacagtcgggagtcattgtcacaatataatagaaatgttagcaaccagattcatgtaaggactaagtggtcctcatgaattgcattaagactctgtactgctcatattacactccatcctctctgtagtttgctgggtagtggagggggtaagctaaatcatagtttctgacaataactgggaaggttttttcttaaaataacaatggaattggtataattgggattgaaaactaaaacttggaactaagatagagaagatggagtgtatgtagaagggctgttaaaaatgtaaaacttggttgcattatttgtggaggctcaaacttgtgaaggttaataccataatttttccatttgttctgcattttgattctgaaaagaaagctggctttgcccatttcttattaaaaaaacttgttgtaaatccagttgtctaatgggatctatatgaagttagccatgtctgtatgcccttctcccacaaaatactgtataactagtgtgcttgtagtagttaactccaccatctttgtaagctaatgaaattgtgagtcacccatttatatcttaatttttaatcatgtcagttcttgaatgggtatctccttagcctgctgatttctttttctttctaaagaaagtgggtggagaaattaatttagacgtttgtttgcaataaaaagaattcattttactcttgttttgggattctcgccatcaaggttcaaaatccctttatataactcccaagaggagaaatttattaagtgtgtgctttctggacagcttattctttactctgcatagaacatttaggttttaaaaacttaaatgtatactgacaattgatacataattatgaagtaaagttgaattcttcccttcccctcccccccagacaacttttaacatatttaatgaggggaaaaggtactggctgggagaagttaacactgagtttatcatctttacagaatgctaatgctgtcctcaactgattattttatatacatatatatgatacatgaaactctgggatcagatgcttttagaagccatcatgcaagccagtcattgatgtcactgctacacaacactgctaacttgactgtagctatgtaataacattagatcccctaattgtaattatattgggtttgcacagaacactttaatcttcccctcaccaatgtgaagtgaggaatcaggagtcaaactgtagaactaaaatttgac

SEQ ID NO: 289887 - DNA, 3451 bp, Homo sapiens
  misc_feature (56)..(57): n is a, c, g, or t
tacacgcatcagccaacaaagagaccaccccaaaacacttaggctagtacgaggcnngggtgagaactcggtgaaaggaattggcgccgttcgacaccaggcggatccgctctgcagcacgaacccatctccagccgcagccgcagccgccgcccgggccgaggagcagccgcagcagccgccaccagtggccgagtgagcggagccgagtttgaggcagcgcctagcggtgaatcggggccctcaccatgagttcctcgcctgttaatgtaaaaaagctgaaggtgtcggagctgaaagaggagctcaagaagcgacgcctttctgacaagggtctcaaggccgagctcatggagcgactccaggctgcgctggacgacgaggaggccgggggccgccccgccatggagcccgggaacggcagcctagacctgggcggggattccgctgggcgctcgggagcaggcctcgagcaggaggccgcggccggcggcgatgaagaggaggaagaagaggaagaggaggaggaaggaatctccgctctggacggcgaccagatggagctaggagaggagaacggggccgcgggggcggccgactcgggcccgatggaggaggaggaggccgcctcggaagacgagaacggcgacgatcagggtttccaggaaggggaagatgagctcggggacgaagaggaaggcgcgggcgacgagaacgggcacggggagcagcagcctcaaccgccggcgacgcagcagcaacagccccaacagcagcgcggggccgccaaggaggccgcggggaagagcagcggccccacctcgctgttcgcggtgacggtggcgccgcccggggcgaggcagggccagcagcaggcgggaggggacggcaaaacagaacagaaaggcggagataaaaagaggggtgttaaaagaccacgagaagatcatggccgtggatattttgagtacattgaagagaacaagtatagcagagccaaatctcctcagccacctgttgaagaagaagatgaacacttcgatgacacagtggtttgtcttgatacttataattgtgatctacattttaaaatatcaagagatcgtctcagtgcttcttcccttacaatggagagttttgcttttctttgggctggaggaagagcatcctatggtgtgtcaaaaggcaaagtgtgttttgagatgaaggttacagagaagatcccagtaaggcatttatatacaaaagatattgacatacatgaagttcgtattggctggtcactaactacaagtggaatgttacttggtgaagaagaattttcttatgggtattctctaaaaggaataaaaacatgcaactgtgagactgaagattatggagaaaagtttgatgaaaatgatgtgattacatgttttgctaactttgaaagtgatgaagtagaactctcgtatgctaagaatggacaagatcttggcgttgccttcaaaatcagtaaggaagttcttgctggacggccactgttcccgcatgttctctgccacaactgtgcagttgaatttaattttggtcagaaggaaaagccatattttccaatacctgaagagtatactttcatccagaacgtccccttagaggatcgagttagaggaccaaaggggcctgaagagaagaaagattgtgaagttgtgatgatgattggcttgccaggagctggaaaaactacctgggttactaaacatgcagcagaaaatccagggaaatataacattcttggcacaaatactattatggataagatgatggtggcaggttttaagaagcaaatggcagatactggaaaactgaacacactgttgcagagagccccccagtgtcttgggaaatttattgagattgctgcccgaaagaagcgaaattttattctggatcagacaaatgtgtctgctgctgcccagaggagaaaaatgtgcctgtttgcaggcttccagcgaaaagctgttgtagtttgcccaaaagatgaagactataagcaaagaacacagaagaaagcagaagtagaggggaaagacctaccagaacatgcggtcctcaaaatgaaaggaaactttaccctcccagaggtagctgagtgctttgatgaaataacctatgttgaacttcagaaggaagaagcccaaaaactcttggagcaatataaggaagaaagcaaaaaggctcttccaccagaaaagaaacagaacactggctcaaagaaaagcaataaaaataagagtggcaagaaccagtttaacagaggtggtggccatagaggacgtggaggattcaatatgcgtggtggaaatttcagaggaggagcccctgggaatcgtggcggatataataggaggggcaacatgccacagagaggtggtggcggtggaggaagtggtggaatcggctatccataccctcgtgcccctgtttttcctggccgtggtagttactcaaacagagggaactacaacagaggtggaatgcccaacagagggaactacaaccagaacttcagaggacgaggaaacaatcgtggctacaaaaatcaatctcagggctacaaccagtggcagcagggtcaattctggggtcagaagccatggagtcagcattatcaccaaggatattattgaatacccaaataaaacgaactgatacatatttctccaaaaccttcacaagaagtcgactgttttctttagtaggctaactttttaaacattccacaagaggaagtgcctgcgggttccttttttagaagctttgtgggttgattttttttcttttcttttttgtacatttttaattgcagtttaaaagtgaatcgtaagagaacctcagcattgtgcacgataagagaatgtgtcagtatttcagggttctacattttatctgtaaaatgtgacttttttttttttttatcacaacagaagtaaaatgttgctttgtacctggtgtcttttattaagaatttactccccccatttctcacagagaataacagtcgggagtcattgtcacaatataatagaaatgttagcaaccagattcatgtaaggactaagtggtcctcatgaattgcattaagactctgtactgctcatattacactccatcctctctgtagtttgctgggtagtggagggggtaagctaaatcatagtttctgacaataactgggaaggttttttcttaaaataacaatggaattggtataattgggattgaaaactaaaacttggaactaagatagagaagatggagtgtatgtagaagggctgttaaaaatgtaaaacttggttgcattatttgtggaggctcaaacttgtgaaggttaataccataatttttccatttgttctgcattttgattctgaaaagaaaggcggccgctgggatcctctagatcacctca

SEQ ID NO: 289888 - DNA, 3228 bp, Homo sapiens
tcctcaaaatgaaaggaaactttaccctcccaggggtagctgagtgctttgatgaaataacctatgttgaacttcagaaggaagaagcccaaaaactcttggagcaatataaggaagagcatcctatggtgtgtcaaaaggcaaagtgtgttttgagatgaaggttacagagaagatcccagtaaggcatttatatacaaaagatattgacatacatgaagttcgtattggctggtcactaactacaagtggaatgttacttggtgaagaagaattttcttatgggtattctctaaaaggaataaaaacatgcaactgtgagactgaagattatggagaaaagtttgatgaaaatgatgtgattacatgttttgctaactttgaaagtgatgaagtagaactctcgtatgctaagaatggacaagatcttggcgttgccttcaaaatcagtaaggaagttcttgctggacggccactgttcccgcatgttctctgccacaactgtgcagttgaatttaattttggtcagaaggaaaagccatattttccaatacctgaagagtatactttcatccagaacgtccccttagaggatcgagttagaggaccaaaggggcctgaagagaagaaagattgtgaagttgtgatgatgattggcttgccaggagctggaaaaactacctgggttactaaacatgcagcagaaaatccagggaaatataacattcttggcacaaatactattatggataagatgatggtggcaggttttaagaagcaaatggcagatactggaaaactgaacacactgttgcagagagccccccagtgtcttgggaaatttattgagattgctgcccgaaagaagcgaaattttattctggatcagacaaatgtgtctgctgctgcccagaggagaaaaatgtgcctgtttgcaggcttccagcgaaaagctgttgtagtttgcccaaaagatgaagactataagcaaagaacacagaagaaagcagaagtagaggggaaagacctaccagaacatgcggtcctcaaaatgaaaggaaactttaccctcccagaggtagctgagtgctttgatgaaataacctatgttgaacttcagaaggaagaagcccaaaaactcttggagcaatataaggaagaaagcaaaaaggctcttccaccagaaaagaaacagaacactggctcaaagaaaagcaataaaaataagagtggcaagaaccagtttaacagaggtggtggccatagaggacgtggaggattcaatatgcgtggtggaaatttcagaggaggagcccctgggaatcgtggcggatataataggaggggcaacatgccacagagaggtggtggcggtggaggaagtggtggaatcggctatccataccctcgtgcccctgtttttcctggccgtggtagttactcaaacagagggaactacaacagaggtggaatgcccaacagagggaactacaaccagaacttcagaggacgaggaaacaatcgtggctacaaaaatcaatctcagggctacaaccagtggcagcagggtcaattctggggtcagaagccatggagtcagcattatcaccaaggatattattgaatacccaaataaaacgaactgatacatatttctccaaaaccttcacaagaagtcgactgttttctttagtaggctaactttttaaacattccacaagaggaagtgcctgcgggttccttttttagaagctttgtgggttgattttttttcttttcttttttgtacatttttaattgcagtttaaaagtgaatcgtaagagaacctcagcattgtgcacgataagagaatgtgtcagtatttcagggttctacattttatctgtaaaatgtgacttttttttttttttatcacaacagaagtaaaatgttgctttgtacctggtgtcttttattaagaatttactccccccatttctcacagagaataacagtcgggagtcattgtcacaatataatagaaatgttagcaaccagattcatgtaaggactaagtggtcctcatgaattgcattaagactctgtactgctcatattacactccatcctctctgtagtttgctgggtagtggagggggtaagctaaatcatagtttctgacaataactgggaaggttttttcttaaaataacaatggaattggtataattgggattgaaaactaaaacttggaactaagatagagaagatggagtgtatgtagaagggctgttaaaaatgtaaaacttggttgcattatttgtggaggctcaaacttgtgaaggttaataccataatttttccatttgttctgcattttgattctgaaaagaaagctggctttgcccatttcttattaaaaaaacttgttgtaaatccagttgtctaatgggatctatatgaagttagccatgtctgtatgcccttctcccacaaaatactgtataactagtgtgcttgtagtagttaactccaccatctttgtaagctaatgaaattgtgagtcacccatttatatcttaatttttaatcatgtcagttcttgaatgggtatctccttagcctgctgatttctttttctttctaaagaaagtgggtggagaaattaatttagacgtttgtttgcaataaaaagaattcattttactcttgttttgggattctcgccatcaaggttcaaaatccctttatataactcccaagaggagaaatttattaagtgtgtgctttctggacagcttattctttactctgcatagaacatttaggttttaaaaacttaaatgtatactgacaattgatacataattatgaagtaaagttgaattcttcccttcccctcccccccagacaacttttaacatatttaatgaggggaaaaggtactggctgggagaagttaacactgagtttatcatctttacagaatgctaatgctgtcctcaactgattattttatatacatatatatgatacatgaaactctgggatcagatgcttttagaagccatcatgcaagccagtcattgatgtcactgctacacaacactgctaacttgactgtagctatgtaataacattagatcccctaattgtaattatattgggtttgcacagaacactttaatcttcccctcaccaatgtgaagtgaggaatcaggagtcaaactgtagaactaaaatttgac

SEQ ID NO: 289889 - DNA, 2986 bp, Homo sapiens
  misc_feature (56)..(57): n is a, c, g, or t
tacacgcatcagccaacaaagagaccaccccaaaacacttaggctagtacgaggcnngggtgagaactcggtgaaaggaattggcgccgttcgacaccaggcggatccgctctgcagcacgaacccatctccagccgcagccgcagccgccgcccgggccgaggagcagccgcagcagccgccaccagtggccgagtgagcggagccgagtttgaggcagcgcctagcggtgaatcggggccctcaccatgagttcctcgcctgttaatgtaaaaaagctgaaggtgtcggagctgaaagaggagctcaagaagcgacgcctttctgacaagggtctcaaggccgagctcatggagcgactccaggctgcgctggacgacgaggaggccgggggccgccccgccatggagcccgggaacggcagcctagacctgggcggggattccgctgggcgctcgggagcaggcctcgagcaggaggccgcggccggcggcgatgaagaggaggaagaagaggaagaggaggaggaaggaatctccgctctggacggcgaccagatggagctaggagaggagaacggggccgcgggggcggccgactcgggcccgatggaggaggaggaggccgcctcggaagacgagaacggcgacgatcagggtttccaggaaggggaagatgagctcggggacgaagaggaaggcgcgggcgacgagaacgggcacggggagcagcagcctcaaccgccggcgacgcagcagcaacagccccaacagcagcgcggggccgccaaggaggccgcggggaagagcagcggccccacctcgctgttcgcggtgacggtggcgccgcccggggcgaggcagggccagcagcaggcgggaggggacggcaaaacagaacagaaaggcggagataaaaagaggggtgttaaaagaccacgagaagatcatggccgtggatattttgagtacattgaagagaacaagtatagcagagccaaatctcctcagccacctgttgaagaagaagatgaacacttcgatgacacagtggtttgtcttgatacttataattgtgatctacattttaaaatatcaagagatcgtctcagtgcttcttcccttacaatggagagttttgcttttctttgggctggaggaagagcatcctatggtgtgtcaaaaggcaaagtgtgttttgagatgaaggttacagagaagatcccagtaaggcatttatatacaaaagatattgacatacatgaagttcgtattggctggtcactaactacaagtggaatgttacttggtgaagaagaattttcttatgggtattctctaaaaggaataaaaacatgcaactgtgagactgaagattatggagaaaagtttgatgaaaatgatgtgattacatgttttgctaactttgaaagtgatgaagtagaactctcgtatgctaagaatggacaagatcttggcgttgccttcaaaatcagtaaggaagttcttgctggacggccactgttcccgcatgttctctgccacaactgtgcagttgaatttaattttggtcagaaggaaaagccatattttccaatacctgaagagtatactttcatccagaacgtccccttagaggatcgagttagaggaccaaaggggcctgaagagaagaaagattgtgaagttgtgatgatgattggcttgccaggagctggaaaaactacctgggttactaaacatgcagcagaaaatccagggaaatataacattcttggcacaaatactattatggataagatgatggtggcaggttttaagaagcaaatggcagatactggaaaactgaacacactgttgcagagagccccccagtgtcttgggaaatttattgagattgctgcccgaaagaagcgaaattttattctggatcagacaaatgtgtctgctgctgcccagaggagaaaaatgtgcctgtttgcaggcttccagcgaaaagctgttgtagtttgcccaaaagatgaagactataagcaaagaacacagaagaaagcagaagtagaggggaaagacctaccagaacatgcggtcctcaaaatgaaaggaaactttaccctcccagaggtagctgagtgctttgatgaaataacctatgttgaacttcagaaggaagaagcccaaaaactcttggagcaatataaggaagaaagcaaaaaggctcttccaccagaaaagaaacagaacactggctcaaagaaaagcaataaaaataagagtggcaagaaccagtttaacagaggtggtggccatagaggacgtggaggattcaatatgcgtggtggaaatttcagaggaggagcccctgggaatcgtggcggatataataggaggggcaacatgccacagagaggtggtggcggtggaggaagtggtggaatcggctatccataccctcgtgcccctgtttttcctggccgtggtagttactcaaacagagggaactacaacagaggtggaatgcccaacagagggaactacaaccagaacttcagaggacgaggaaacaatcgtggctacaaaaatcaatctcagggctacaaccagtggcagcagggtcaattctggggtcagaagccatggagtcagcattatcaccaaggatattattgaatacccaaataaaacgaactgatacatatttctccaaaaccttcacaagaagtcgactgttttctttagtaggctaactttttaaacattccacaagaggaagtgcctgcgggttccttttttagaagctttgtgggttgattttttttcttttcttttttgtacatttttaattgcagtttaaaagtgaatcgtaagagaacctcagcattgtgcacgataagagaatgtgtcagtatttcagggttctacattttatctgtaaaatgtgacttttttttttttttatcacaacagaagtaaaatgttgctttgta

SEQ ID NO: 289890 - DNA, 2617 bp, Homo sapiens
ttccggttttggggcctttgctttgtgaagttgtgatgatgattggcttgccaggagctggaaaaactacctgggttactaaacatgcagcagaaaatccagggaaatataacattcttggcacaaatactattatggataagatgatggtggcaggttttaagaagcaaatggcagatactggaaaactgaacacactgttgcagagagccccccagtgtcttgggaaatttattgagattgctgcccgaaagaagcgaaattttattctggatcagacaaatgtgtctgctgctgcccagaggagaaaaatgtgcctgtttgcaggcttccagcgaaaagctgttgtagtttgcccaaaagatgaagactataagcaaagaacacagaagaaagcagaagtagaggggaaagacctaccagaacatgcggtcctcaaaatgaaaggaaactttaccctcccagaggtagctgagtgctttgatgaaataacctatgttgaacttcagaaggaagaagcccaaaaactcttggagcaatataaggaagaaagcaaaaaggctcttccaccagaaaagaaacagaacactggctcaaagaaaagcaataaaaataagagtggcaagaaccagtttaacagaggtggtggccatagaggacgtggaggattcaatatgcgtggtggaaatttcagaggaggagcccctgggaatcgtggcggatataataggaggggcaacatgccacagagaggtggtggcggtggaggaagtggtggaatcggctatccataccctcgtgcccctgtttttcctggccgtggtagttactcaaacagagggaactacaacagaggtggaatgcccaacagagggaactacaaccagaacttcagaggacgaggaaacaatcgtggctacaaaaatcaatctcagggctacaaccagtggcagcagggtcaattctggggtcagaagccatggagtcagcattatcaccaaggatattattgaatacccaaataaaacgaactgatacatatttctccaaaaccttcacaagaagtcgactgttttctttagtaggctaactttttaaacattccacaagaggaagtgcctgcgggttccttttttagaagctttgtgggttgattttttttcttttcttttttgtacatttttaattgcagtttaaaagtgaatcgtaagagaacctcagcattgtgcacgataagagaatgtgtcagtatttcagggttctacattttatctgtaaaatgtgacttttttttttttttatcacaacagaagtaaaatgttgctttgtacctggtgtcttttattaagaatttactccccccatttctcacagagaataacagtcgggagtcattgtcacaatataatagaaatgttagcaaccagattcatgtaaggactaagtggtcctcatgaattgcattaagactctgtactgctcatattacactccatcctctctgtagtttgctgggtagtggagggggtaagctaaatcatagtttctgacaataactgggaaggttttttcttaaaataacaatggaattggtataattgggattgaaaactaaaacttggaactaagatagagaagatggagtgtatgtagaagggctgttaaaaatgtaaaacttggttgcattatttgtggaggctcaaacttgtgaaggttaataccataatttttccatttgttctgcattttgattctgaaaagaaagctggctttgcccatttcttattaaaaaaacttgttgtaaatccagttgtctaatgggatctatatgaagttagccatgtctgtatgcccttctcccacaaaatactgtataactagtgtgcttgtagtagttaactccaccatctttgtaagctaatgaaattgtgagtcacccatttatatcttaatttttaatcatgtcagttcttgaatgggtatctccttagcctgctgatttctttttctttctaaagaaagtgggtggagaaattaatttagacgtttgtttgcaataaaaagaattcattttactcttgttttgggattctcgccatcaaggttcaaaatccctttatataactcccaagaggagaaatttattaagtgtgtgctttctggacagcttattctttactctgcatagaacatttaggttttaaaaacttaaatgtatactgacaattgatacataattatgaagtaaagttgaattcttcccttcccctcccccccagacaacttttaacatatttaatgaggggaaaaggtactggctgggagaagttaacactgagtttatcatctttacagaatgctaatgctgtcctcaactgattattttatatacatatatatgatacatgaaactctgggatcagatgcttttagaagccatcatgcaagccagtcattgatgtcactgctacacaacactgctaacttgactgtagctatgtaataacattagatcccctaattgtaattatattgggtttgcacagaacactttaatcttcccctcaccaatgtgaagtgaggaatcaggagtcaaactgtagaactaaaatttgac

SEQ ID NO: 289891 - DNA, 3194 bp, Homo sapiens
  misc_feature (56)..(57): n is a, c, g, or t
tacacgcatcagccaacaaagagaccaccccaaaacacttaggctagtacgaggcnngggtgagaactcggtgaaaggaattggcgccgttcgacaccaggcggatccgctctgcagcacgaacccatctccagccgcagccgcagccgccgcccgggccgaggagcagccgcagcagccgccaccagtggccgagtgagcggagccgagtttgaggcagcgcctagcggtgaatcggggccctcaccatgagttcctcgcctgttaatgtaaaaaagctgaaggtgtcggagctgaaagaggagctcaagaagcgacgcctttctgacaagggtctcaaggccgagctcatggagcgactccaggctgcgctggacgacgaggaggccgggggccgccccgccatggagcccgggaacggcagcctagacctgggcggggattccgctgggcgctcgggagcaggcctcgagcaggaggccgcggccggcggcgatgaagaggaggaagaagaggaagaggaggaggaaggaatctccgctctggacggcgaccagatggagctaggagaggagaacggggccgcgggggcggccgactcgggcccgatggaggaggaggaggccgcctcggaagacgagaacggcgacgatcagggtttccaggaaggggaagatgagctcggggacgaagaggaaggcgcgggcgacgagaacgggcacggggagcagcagcctcaaccgccggcgacgcagcagcaacagccccaacagcagcgcggggccgccaaggaggccgcggggaagagcagcggccccacctcgctgttcgcggtgacggtggcgccgcccggggcgaggcagggccagcagcaggcgggaggggacggcaaaacagaacagaaaggcggagataaaaagaggggtgttaaaagaccacgagaagatcatggccgtggatattttgagtacattgaagagaacaagtatagcagagccaaatctcctcagccacctgttgaagaagaagatgaacacttcgatgacacagtggtttgtcttgatacttataattgtgatctacattttaaaatatcaagagatcgtctcagtgcttcttcccttacaatggagagttttgcttttctttgggctggaggaagagcatcctatggtgtgtcaaaaggcaaagtgtgttttgagatgaaggttacagagaagatcccagtaaggcatttatatacaaaagatattgacatacatgaagttcgtattggctggtcactaactacaagtggaatgttacttggtgaagaagaattttcttatgggtattctctaaaaggaataaaaacatgcaactgtgagactgaagattatggagaaaagtttgatgaaaatgatgtgattacatgttttgctaactttgaaagtgatgaagtagaactctcgtatgctaagaatggacaagatcttggcgttgccttcaaaatcagtaaggaagttcttgctggacggccactgttcccgcatgttctctgccacaactgtgcagttgaatttaattttggtcagaaggaaaagccatattttccaatacctgaagagtatactttcatccagaacgtccccttagaggatcgagttagaggaccaaaggggcctgaagagaagaaagattgtgaagttgtgatgatgattggcttgccaggagctggaaaaactacctgggttactaaacatgcagcagaaaatccagggaaatataacattcttggcacaaatactattatggataagatgatggtggcaggttttaagaagcaaatggcagatactggaaaactgaacacactgttgcagagagccccccagtgtcttgggaaatttattgagattgctgcccgaaagaagcgaaattttattctggatcagacaaatgtgtctgctgctgcccagaggagaaaaatgtgcctgtttgcaggcttccagcgaaaagctgttgtagtttgcccaaaagatgaagactataagcaaagaacacagaagaaagcagaagtagaggggaaagacctaccagaacatgcggtcctcaaaatgaaaggaaactttaccctcccagaggtagctgagtgctttgatgaaataacctatgttgaacttcagaaggaagaagcccaaaaactcttggagcaatataaggaagaaagcaaaaaggctcttccaccagaaaagaaacagaacactggctcaaagaaaagcaataaaaataagagtggcaagaaccagtttaacagaggtggtggccatagaggacgtggaggattcaatatgcgtggtggaaatttcagaggaggagcccctgggaatcgtggcggatataataggaggggcaacatgccacagagaggtggtggcggtggaggaagtggtggaatcggctatccataccctcgtgcccctgtttttcctggccgtggtagttactcaaacagagggaactacaacagaggtggaatgcccaacagagggaactacaaccagaacttcagaggacgaggaaacaatcgtggctacaaaaatcaatctcagggctacaaccagtggcagcagggtcaattctggggtcagaagccatggagtcagcattatcaccaaggatattattgaatacccaaataaaacgaactgatacatatttctccaaaaccttcacaagaagtcgactgttttctttagtaggctaactttttaaacattccacaagaggaagtgcctgcgggttccttttttagaagctttgtgggttgattttttttcttttcttttttgtacatttttaattgcagtttaaaagtgaatcgtaagagaacctcagcattgtgcacgataagagaatgtgtcagtatttcagggttctacattttatctgtaaaatgtgacttttttttttttttatcacaacagaagtaaaatgttgctttgtaaaaaaaaaaaaaaaaaaaaaaaggggggggggtaaaaagttcctaggggcgaggtttcggtaccagtttgtgtaaggggccatgggggcggatatagaggcaggcgcgttaaggtggtggaatgctctggacttgggcctctgggggggctttggccctacgggtagctagaataattcgtttgtacacgtttggtgagtgccgtata

SEQ ID NO: 289892 - DNA, 2996 bp, Homo sapiens
  misc_feature (56)..(57): n is a, c, g, or t
tacacgcatcagccaacaaagagaccaccccaaaacacttaggctagtacgaggcnngggtgagaactcggtgaaaggaattggcgccgttcgacaccaggcggatccgctctgcagcacgaacccatctccagccgcagccgcagccgccgcccgggccgaggagcagccgcagcagccgccaccagtggccgagtgagcggagccgagtttgaggcagcgcctagcggtgaatcggggccctcaccatgagttcctcgcctgttaatgtaaaaaagctgaaggtgtcggagctgaaagaggagctcaagaagcgacgcctttctgacaagggtctcaaggccgagctcatggagcgactccaggctgcgctggacgacgaggaggccgggggccgccccgccatggagcccgggaacggcagcctagacctgggcggggattccgctgggcgctcgggagcaggcctcgagcaggaggccgcggccggcggcgatgaagaggaggaagaagaggaagaggaggaggaaggaatctccgctctggacggcgaccagatggagctaggagaggagaacggggccgcgggggcggccgactcgggcccgatggaggaggaggaggccgcctcggaagacgagaacggcgacgatcagggtttccaggaaggggaagatgagctcggggacgaagaggaaggcgcgggcgacgagaacgggcacggggagcagcagcctcaaccgccggcgacgcagcagcaacagccccaacagcagcgcggggccgccaaggaggccgcggggaagagcagcggccccacctcgctgttcgcggtgacggtggcgccgcccggggcgaggcagggccagcagcaggcgggaggggacggcaaaacagaacagaaaggcggagataaaaagaggggtgttaaaagaccacgagaagatcatggccgtggatattttgagtacattgaagagaacaagtatagcagagccaaatctcctcagccacctgttgaagaagaagatgaacacttcgatgacacagtggtttgtcttgatacttataattgtgatctacattttaaaatatcaagagatcgtctcagtgcttcttcccttacaatggagagttttgcttttctttgggctggaggaagagcatcctatggtgtgtcaaaaggcaaagtgtgttttgagatgaaggttacagagaagatcccagtaaggcatttatatacaaaagatattgacatacatgaagttcgtattggctggtcactaactacaagtggaatgttacttggtgaagaagaattttcttatgggtattctctaaaaggaataaaaacatgcaactgtgagactgaagattatggagaaaagtttgatgaaaatgatgtgattacatgttttgctaactttgaaagtgatgaagtagaactctcgtatgctaagaatggacaagatcttggcgttgccttcaaaatcagtaaggaagttcttgctggacggccactgttcccgcatgttctctgccacaactgtgcagttgaatttaattttggtcagaaggaaaagccatattttccaatacctgaagagtatactttcatccagaacgtccccttagaggatcgagttagaggaccaaaggggcctgaagagaagaaagattgtgaagttgtgatgatgattggcttgccaggagctggaaaaactacctgggttactaaacatgcagcagaaaatccagggaaatataacattcttggcacaaatactattatggataagatgatggtggcaggttttaagaagcaaatggcagatactggaaaactgaacacactgttgcagagagccccccagtgtcttgggaaatttattgagattgctgcccgaaagaagcgaaattttattctggatcagacaaatgtgtctgctgctgcccagaggagaaaaatgtgcctgtttgcaggcttccagcgaaaagctgttgtagtttgcccaaaagatgaagactataagcaaagaacacagaagaaagcagaagtagaggggaaagacctaccagaacatgcggtcctcaaaatgaaaggaaactttaccctcccagaggtagctgagtgctttgatgaaataacctatgttgaacttcagaaggaagaagcccaaaaactcttggagcaatataaggaagaaagcaaaaaggctcttccaccagaaaagaaacagaacactggctcaaagaaaagcaataaaaataagagtggcaagaaccagtttaacagaggtggtggccatagaggacgtggaggattcaatatgcgtggtggaaatttcagaggaggagcccctgggaatcgtggcggatataataggaggggcaacatgccacagagaggtggtggcggtggaggaagtggtggaatcggctatccataccctcgtgcccctgtttttcctggccgtggtagttactcaaacagagggaactacaacagaggtggaatgcccaacagagggaactacaaccagaacttcagaggacgaggaaacaatcgtggctacaaaaatcaatctcagggctacaaccagtggcagcagggtcaattctggggtcagaagccatggagtcagcattatcaccaaggatattattgaatacccaaataaaacgaactgatacatatttctccaaaaccttcacaagaagtcgactgttttctttagtaggctaactttttaaacattccacaagaggaagtgcctgcgggttccttttttagaagctttgtgggttgattttttttcttttcttttttgtacatttttaattgcagtttaaaagtgaatcgtaagagaacctcagcattgtgcacgataagagaatgtgtcagtatttcagggttctacattttatctgtaaaatgtgacttttttttttttttacaaagcaacattttacttctgttgtgataaaagtcgacg

SEQ ID NO: 289893 - DNA, 2373 bp, Homo sapiens
caactacggactagtacgaggccggtgttaatcgacaaatgtgtctgctgctgcccagaggagaaaaatgtgcctgtttgcaggcttccagcgaaaagctgttgtagtttgcccaaaagatgaagactataagcaaagaacacagaagaaagcagaagtagaggggaaagacctaccagaacatgcggtcctcaaaatgaaaggaaactttaccctcccagaggtagctgagtgctttgatgaaataacctatgttgaacttcagaaggaagaagcccaaaaactcttggagcaatataaggaagaaagcaaaaaggctcttccaccagaaaagaaacagaacactggctcaaagaaaagcaataaaaataagagtggcaagaaccagtttaacagaggtggtggccatagaggacgtggaggattcaatatgcgtggtggaaatttcagaggaggagcccctgggaatcgtggcggatataataggaggggcaacatgccacagagaggtggtggcggtggaggaagtggtggaatcggctatccataccctcgtgcccctgtttttcctggccgtggtagttactcaaacagagggaactacaacagaggtggaatgcccaacagagggaactacaaccagaacttcagaggacgaggaaacaatcgtggctacaaaaatcaatctcagggctacaaccagtggcagcagggtcaattctggggtcagaagccatggagtcagcattatcaccaaggatattattgaatacccaaataaaacgaactgatacatatttctccaaaaccttcacaagaagtcgactgttttctttagtaggctaactttttaaacattccacaagaggaagtgcctgcgggttccttttttagaagctttgtgggttgattttttttcttttcttttttgtacatttttaattgcagtttaaaagtgaatcgtaagagaacctcagcattgtgcacgataagagaatgtgtcagtatttcagggttctacattttatctgtaaaatgtgacttttttttttttttatcacaacagaagtaaaatgttgctttgtacctggtgtcttttattaagaatttactccccccatttctcacagagaataacagtcgggagtcattgtcacaatataatagaaatgttagcaaccagattcatgtaaggactaagtggtcctcatgaattgcattaagactctgtactgctcatattacactccatcctctctgtagtttgctgggtagtggagggggtaagctaaatcatagtttctgacaataactgggaaggttttttcttaaaataacaatggaattggtataattgggattgaaaactaaaacttggaactaagatagagaagatggagtgtatgtagaagggctgttaaaaatgtaaaacttggttgcattatttgtggaggctcaaacttgtgaaggttaataccataatttttccatttgttctgcattttgattctgaaaagaaagctggctttgcccatttcttattaaaaaaacttgttgtaaatccagttgtctaatgggatctatatgaagttagccatgtctgtatgcccttctcccacaaaatactgtataactagtgtgcttgtagtagttaactccaccatctttgtaagctaatgaaattgtgagtcacccatttatatcttaatttttaatcatgtcagttcttgaatgggtatctccttagcctgctgatttctttttctttctaaagaaagtgggtggagaaattaatttagacgtttgtttgcaataaaaagaattcattttactcttgttttgggattctcgccatcaaggttcaaaatccctttatataactcccaagaggagaaatttattaagtgtgtgctttctggacagcttattctttactctgcatagaacatttaggttttaaaaacttaaatgtatactgacaattgatacataattatgaagtaaagttgaattcttcccttcccctcccccccagacaacttttaacatatttaatgaggggaaaaggtactggctgggagaagttaacactgagtttatcatctttacagaatgctaatgctgtcctcaactgattattttatatacatatatatgatacatgaaactctgggatcagatgcttttagaagccatcatgcaagccagtcattgatgtcactgctacacaacactgctaacttgactgtagctatgtaataacattagatcccctaattgtaattatattgggtttgcacagaacactttaatcttcccctcaccaatgtgaagtgaggaatcaggagtcaaactgtagaactaaaatttgac

SEQ ID NO: 289894 - DNA, 2891 bp, Homo sapiens
  misc_feature (56)..(57): n is a, c, g, or t
tacacgcatcagccaacaaagagaccaccccaaaacacttaggctagtacgaggcnngggtgagaactcggtgaaaggaattggcgccgttcgacaccaggcggatccgctctgcagcacgaacccatctccagccgcagccgcagccgccgcccgggccgaggagcagccgcagcagccgccaccagtggccgagtgagcggagccgagtttgaggcagcgcctagcggtgaatcggggccctcaccatgagttcctcgcctgttaatgtaaaaaagctgaaggtgtcggagctgaaagaggagctcaagaagcgacgcctttctgacaagggtctcaaggccgagctcatggagcgactccaggctgcgctggacgacgaggaggccgggggccgccccgccatggagcccgggaacggcagcctagacctgggcggggattccgctgggcgctcgggagcaggcctcgagcaggaggccgcggccggcggcgatgaagaggaggaagaagaggaagaggaggaggaaggaatctccgctctggacggcgaccagatggagctaggagaggagaacggggccgcgggggcggccgactcgggcccgatggaggaggaggaggccgcctcggaagacgagaacggcgacgatcagggtttccaggaaggggaagatgagctcggggacgaagaggaaggcgcgggcgacgagaacgggcacggggagcagcagcctcaaccgccggcgacgcagcagcaacagccccaacagcagcgcggggccgccaaggaggccgcggggaagagcagcggccccacctcgctgttcgcggtgacggtggcgccgcccggggcgaggcagggccagcagcaggcgggaggggacggcaaaacagaacagaaaggcggagataaaaagaggggtgttaaaagaccacgagaagatcatggccgtggatattttgagtacattgaagagaacaagtatagcagagccaaatctcctcagccacctgttgaagaagaagatgaacacttcgatgacacagtggtttgtcttgatacttataattgtgatctacattttaaaatatcaagagatcgtctcagtgcttcttcccttacaatggagagttttgcttttctttgggctggaggaagagcatcctatggtgtgtcaaaaggcaaagtgtgttttgagatgaaggttacagagaagatcccagtaaggcatttatatacaaaagatattgacatacatgaagttcgtattggctggtcactaactacaagtggaatgttacttggtgaagaagaattttcttatgggtattctctaaaaggaataaaaacatgcaactgtgagactgaagattatggagaaaagtttgatgaaaatgatgtgattacatgttttgctaactttgaaagtgatgaagtagaactctcgtatgctaagaatggacaagatcttggcgttgccttcaaaatcagtaaggaagttcttgctggacggccactgttcccgcatgttctctgccacaactgtgcagttgaatttaattttggtcagaaggaaaagccatattttccaatacctgaagagtatactttcatccagaacgtccccttagaggatcgagttagaggaccaaaggggcctgaagagaagaaagattgtgaagttgtgatgatgattggcttgccaggagctggaaaaactacctgggttactaaacatgcagcagaaaatccagggaaatataacattcttggcacaaatactattatggataagatgatggtggcaggttttaagaagcaaatggcagatactggaaaactgaacacactgttgcagagagccccccagtgtcttgggaaatttattgagattgctgcccgaaagaagcgaaattttattctggatcagacaaatgtgtctgctgctgcccagaggagaaaaatgtgcctgtttgcaggcttccagcgaaaagctgttgtagtttgcccaaaagatgaagactataagcaaagaacacagaagaaagcagaagtagaggggaaagacctaccagaacatgcggtcctcaaaatgaaaggaaactttaccctcccagaggtagctgagtgctttgatgaaataacctatgttgaacttcagaaggaagaagcccaaaaactcttggagcaatataaggaagaaagcaaaaaggctcttccaccagaaaagaaacagaacactggctcaaagaaaagcaataaaaataagagtggcaagaaccagtttaacagaggtggtggccatagaggacgtggaggattcaatatgcgtggtggaaatttcagaggaggagcccctgggaatcgtggcggatataataggaggggcaacatgccacagagaggtggtggcggtggaggaagtggtggaatcggctatccataccctcgtgcccctgtttttcctggccgtggtagttactcaaacagagggaactacaacagaggtggaatgcccaacagagggaactacaaccagaacttcagaggacgaggaaacaatcgtggctacaaaaatcaatctcagggctacaaccagtggcagcagggtcaattctggggtcagaagccatggagtcagcattatcaccaaggatattattgaatacccaaataaaacgaactgatacatatttctccaaaaccttcacaagaagtcgactgttttctttagtaggctaactttttaaacattccacaagaggaagtgcctgcgggttccttttttagaagctttgtgggttgattttttttcttttcttttttgtacatttttaattgcagtttaaaagtgaatcgtaagtgtctccggtaccggcctgattat

SEQ ID NO: 289895 - DNA, 2098 bp, Homo sapiens
atcgagctcggtccggagacacttacgtggaaagcaaaaaggctcttccaccagaaaagaaacagaacactggctcaaagaaaagcaataaaaataagagtggcaagaaccagtttaacagaggtggtggccatagaggacgtggaggattcaatatgcgtggtggaaatttcagaggaggagcccctgggaatcgtggcggatataataggaggggcaacatgccacagagaggtggtggcggtggaggaagtggtggaatcggctatccataccctcgtgcccctgtttttcctggccgtggtagttactcaaacagagggaactacaacagaggtggaatgcccaacagagggaactacaaccagaacttcagaggacgaggaaacaatcgtggctacaaaaatcaatctcagggctacaaccagtggcagcagggtcaattctggggtcagaagccatggagtcagcattatcaccaaggatattattgaatacccaaataaaacgaactgatacatatttctccaaaaccttcacaagaagtcgactgttttctttagtaggctaactttttaaacattccacaagaggaagtgcctgcgggttccttttttagaagctttgtgggttgattttttttcttttcttttttgtacatttttaattgcagtttaaaagtgaatcgtaagagaacctcagcattgtgcacgataagagaatgtgtcagtatttcagggttctacattttatctgtaaaatgtgacttttttttttttttatcacaacagaagtaaaatgttgctttgtacctggtgtcttttattaagaatttactccccccatttctcacagagaataacagtcgggagtcattgtcacaatataatagaaatgttagcaaccagattcatgtaaggactaagtggtcctcatgaattgcattaagactctgtactgctcatattacactccatcctctctgtagtttgctgggtagtggagggggtaagctaaatcatagtttctgacaataactgggaaggttttttcttaaaataacaatggaattggtataattgggattgaaaactaaaacttggaactaagatagagaagatggagtgtatgtagaagggctgttaaaaatgtaaaacttggttgcattatttgtggaggctcaaacttgtgaaggttaataccataatttttccatttgttctgcattttgattctgaaaagaaagctggctttgcccatttcttattaaaaaaacttgttgtaaatccagttgtctaatgggatctatatgaagttagccatgtctgtatgcccttctcccacaaaatactgtataactagtgtgcttgtagtagttaactccaccatctttgtaagctaatgaaattgtgagtcacccatttatatcttaatttttaatcatgtcagttcttgaatgggtatctccttagcctgctgatttctttttctttctaaagaaagtgggtggagaaattaatttagacgtttgtttgcaataaaaagaattcattttactcttgttttgggattctcgccatcaaggttcaaaatccctttatataactcccaagaggagaaatttattaagtgtgtgctttctggacagcttattctttactctgcatagaacatttaggttttaaaaacttaaatgtatactgacaattgatacataattatgaagtaaagttgaattcttcccttcccctcccccccagacaacttttaacatatttaatgaggggaaaaggtactggctgggagaagttaacactgagtttatcatctttacagaatgctaatgctgtcctcaactgattattttatatacatatatatgatacatgaaactctgggatcagatgcttttagaagccatcatgcaagccagtcattgatgtcactgctacacaacactgctaacttgactgtagctatgtaataacattagatcccctaattgtaattatattgggtttgcacagaacactttaatcttcccctcaccaatgtgaagtgaggaatcaggagtcaaactgtagaactaaaatttgac

SEQ ID NO: 289896 - DNA, 2721 bp, Homo sapiens
  misc_feature (56)..(57): n is a, c, g, or t
tacacgcatcagccaacaaagagaccaccccaaaacacttaggctagtacgaggcnngggtgagaactcggtgaaaggaattggcgccgttcgacaccaggcggatccgctctgcagcacgaacccatctccagccgcagccgcagccgccgcccgggccgaggagcagccgcagcagccgccaccagtggccgagtgagcggagccgagtttgaggcagcgcctagcggtgaatcggggccctcaccatgagttcctcgcctgttaatgtaaaaaagctgaaggtgtcggagctgaaagaggagctcaagaagcgacgcctttctgacaagggtctcaaggccgagctcatggagcgactccaggctgcgctggacgacgaggaggccgggggccgccccgccatggagcccgggaacggcagcctagacctgggcggggattccgctgggcgctcgggagcaggcctcgagcaggaggccgcggccggcggcgatgaagaggaggaagaagaggaagaggaggaggaaggaatctccgctctggacggcgaccagatggagctaggagaggagaacggggccgcgggggcggccgactcgggcccgatggaggaggaggaggccgcctcggaagacgagaacggcgacgatcagggtttccaggaaggggaagatgagctcggggacgaagaggaaggcgcgggcgacgagaacgggcacggggagcagcagcctcaaccgccggcgacgcagcagcaacagccccaacagcagcgcggggccgccaaggaggccgcggggaagagcagcggccccacctcgctgttcgcggtgacggtggcgccgcccggggcgaggcagggccagcagcaggcgggaggggacggcaaaacagaacagaaaggcggagataaaaagaggggtgttaaaagaccacgagaagatcatggccgtggatattttgagtacattgaagagaacaagtatagcagagccaaatctcctcagccacctgttgaagaagaagatgaacacttcgatgacacagtggtttgtcttgatacttataattgtgatctacattttaaaatatcaagagatcgtctcagtgcttcttcccttacaatggagagttttgcttttctttgggctggaggaagagcatcctatggtgtgtcaaaaggcaaagtgtgttttgagatgaaggttacagagaagatcccagtaaggcatttatatacaaaagatattgacatacatgaagttcgtattggctggtcactaactacaagtggaatgttacttggtgaagaagaattttcttatgggtattctctaaaaggaataaaaacatgcaactgtgagactgaagattatggagaaaagtttgatgaaaatgatgtgattacatgttttgctaactttgaaagtgatgaagtagaactctcgtatgctaagaatggacaagatcttggcgttgccttcaaaatcagtaaggaagttcttgctggacggccactgttcccgcatgttctctgccacaactgtgcagttgaatttaattttggtcagaaggaaaagccatattttccaatacctgaagagtatactttcatccagaacgtccccttagaggatcgagttagaggaccaaaggggcctgaagagaagaaagattgtgaagttgtgatgatgattggcttgccaggagctggaaaaactacctgggttactaaacatgcagcagaaaatccagggaaatataacattcttggcacaaatactattatggataagatgatggtggcaggttttaagaagcaaatggcagatactggaaaactgaacacactgttgcagagagccccccagtgtcttgggaaatttattgagattgctgcccgaaagaagcgaaattttattctggatcagacaaatgtgtctgctgctgcccagaggagaaaaatgtgcctgtttgcaggcttccagcgaaaagctgttgtagtttgcccaaaagatgaagactataagcaaagaacacagaagaaagcagaagtagaggggaaagacctaccagaacatgcggtcctcaaaatgaaaggaaactttaccctcccagaggtagctgagtgctttgatgaaataacctatgttgaacttcagaaggaagaagcccaaaaactcttggagcaatataaggaagaaagcaaaaaggctcttccaccagaaaagaaacagaacactggctcaaagaaaagcaataaaaataagagtggcaagaaccagtttaacagaggtggtggccatagaggacgtggaggattcaatatgcgtggtggaaatttcagaggaggagcccctgggaatcgtggcggatataataggaggggcaacatgccacagagaggtggtggcggtggaggaagtggtggaatcggctatccataccctcgtgcccctgtttttcctggccgtggtagttactcaaacagagggaactacaacagaggtggaatgcccaacagagggaactacaaccagaacttcagaggacgaggaaacaatcgtggctacaaaaatcaatctcagggctacaaccagtggcagcagggtcaattctggggtcagaagccatggagtcagcattatcaccaaggatattattgaatacccaaataaaacgaactgatacatatttctccaaaaccttcacaagaag

SEQ ID NO: 289897 - DNA, 3461 bp, Homo sapiens
  misc_feature (56)..(57): n is a, c, g, or t
tacacgcatcagccaacaaagagaccaccccaaaacacttaggctagtacgaggcnngggtgagaactcggtgaaaggaattggcgccgttcgacaccaggcggatccgctctgcagcacgaacccatctccagccgcagccgcagccgccgcccgggccgaggagcagccgcagcagccgccaccagtggccgagtgagcggagccgagtttgaggcagcgcctagcggtgaatcggggccctcaccatgagttcctcgcctgttaatgtaaaaaagctgaaggtgtcggagctgaaagaggagctcaagaagcgacgcctttctgacaagggtctcaaggccgagctcatggagcgactccaggctgcgctggacgacgaggaggccgggggccgccccgccatggagcccgggaacggcagcctagacctgggcggggattccgctgggcgctcgggagcaggcctcgagcaggaggccgcggccggcggcgatgaagaggaggaagaagaggaagaggaggaggaaggaatctccgctctggacggcgaccagatggagctaggagaggagaacggggccgcgggggcggccgactcgggcccgatggaggaggaggaggccgcctcggaagacgagaacggcgacgatcagggtttccaggaaggggaagatgagctcggggacgaagaggaaggcgcgggcgacgagaacgggcacggggagcagcagcctcaaccgccggcgacgcagcagcaacagccccaacagcagcgcggggccgccaaggaggccgcggggaagagcagcggccccacctcgctgttcgcggtgacggtggcgccgcccggggcgaggcagggccagcagcaggcgggaggggacggcaaaacagaacagaaaggcggagataaaaagaggggtgttaaaagaccacgagaagatcatggccgtggatattttgagtacattgaagagaacaagtatagcagagccaaatctcctcagccacctgttgaagaagaagatgaacacttcgatgacacagtggtttgtcttgatacttataattgtgatctacattttaaaatatcaagagatcgtctcagtgcttcttcccttacaatggagagttttgcttttctttgggctggaggaagagcatcctatggtgtgtcaaaaggcaaagtgtgttttgagatgaaggttacagagaagatcccagtaaggcatttatatacaaaagatattgacatacatgaagttcgtattggctggtcactaactacaagtggaatgttacttggtgaagaagaattttcttatgggtattctctaaaaggaataaaaacatgcaactgtgagactgaagattatggagaaaagtttgatgaaaatgatgtgattacatgttttgctaactttgaaagtgatgaagtagaactctcgtatgctaagaatggacaagatcttggcgttgccttcaaaatcagtaaggaagttcttgctggacggccactgttcccgcatgttctctgccacaactgtgcagttgaatttaattttggtcagaaggaaaagccatattttccaatacctgaagagtatactttcatccagaacgtccccttagaggatcgagttagaggaccaaaggggcctgaagagaagaaagattgtgaagttgtgatgatgattggcttgccaggagctggaaaaactacctgggttactaaacatgcagcagaaaatccagggaaatataacattcttggcacaaatactattatggataagatgatggtggcaggttttaagaagcaaatggcagatactggaaaactgaacacactgttgcagagagccccccagtgtcttgggaaatttattgagattgctgcccgaaagaagcgaaattttattctggatcagacaaatgtgtctgctgctgcccagaggagaaaaatgtgcctgtttgcaggcttccagcgaaaagctgttgtagtttgcccaaaagatgaagactataagcaaagaacacagaagaaagcagaagtagaggggaaagacctaccagaacatgcggtcctcaaaatgaaaggaaactttaccctcccagaggtagctgagtgctttgatgaaataacctatgttgaacttcagaaggaagaagcccaaaaactcttggagcaatataaggaagaaagcaaaaaggctcttccaccagaaaagaaacagaacactggctcaaagaaaagcaataaaaataagagtggcaagaaccagtttaacagaggtggtggccatagaggacgtggaggattcaatatgcgtggtggaaatttcagaggaggagcccctgggaatcgtggcggatataataggaggggcaacatgccacagagaggtggtggcggtggaggaagtggtggaatcggctatccataccctcgtgcccctgtttttcctggccgtggtagttactcaaacagagggaactacaacagaggtggaatgcccaacagagggaactacaaccagaacttcagaggacgaggaaacaatcgtggctacaaaaatcaatctcagggctacaaccagtggcagcagggtcaattctggggtcagaagccatggagtcagcattatcaccaaggatattattgaatacccaaataaaacgaactgatacatatttctccaaaaccttcacaagaagtcgactgttttctttagtaggctaactttttaaacattccacaagaggaagtgcctgcgggttccttttttagaagcttttctgtccatgtgaatgtgctgtgtggaagagttaaagggcccaactaaatgttccagtgattccaatagctatttagctggtacctactgctatatcacctagtgtgacatttcggaattaatggaacaatgaaggaagctgtacactggaggttccaggtggtcatggaaggtttccagtttatgcaaacttctgtgaaaatgagctttgttattggtgaagacattggaaattttaccagccaaaacagagtttctctcttattcagggtaagatgtaattgcagtgtgctagcgctggaagggacctgttttatatgttatgtatgttacacgtcagccctccatgtcctccagttctgcatccttggattcaaccaactgtgggttgaaaatactggaggtaaaaagacaaaaaataacaatgaagaacaacaacaaaaatacacagtataataattacatttacatagcatttattttgtattagacattataagtaatctagagatgatttaaagtatatgggagaatgtatgtagattatatggaaatatgagggtattttatttaaagggacttgggcctgtggataccaaggaataactaaggtaaaactgagcataagtggcctgtccatattttgttaaatatcagatt

SEQ ID NO: 289898 - DNA, 3455 bp, Homo sapiens
  misc_feature (56)..(57): n is a, c, g, or t
tacacgcatcagccaacaaagagaccaccccaaaacacttaggctagtacgaggcnngggtgagaactcggtgaaaggaattggcgccgttcgacaccaggcggatccgctctgcagcacgaacccatctccagccgcagccgcagccgccgcccgggccgaggagcagccgcagcagccgccaccagtggccgagtgagcggagccgagtttgaggcagcgcctagcggtgaatcggggccctcaccatgagttcctcgcctgttaatgtaaaaaagctgaaggtgtcggagctgaaagaggagctcaagaagcgacgcctttctgacaagggtctcaaggccgagctcatggagcgactccaggctgcgctggacgacgaggaggccgggggccgccccgccatggagcccgggaacggcagcctagacctgggcggggattccgctgggcgctcgggagcaggcctcgagcaggaggccgcggccggcggcgatgaagaggaggaagaagaggaagaggaggaggaaggaatctccgctctggacggcgaccagatggagctaggagaggagaacggggccgcgggggcggccgactcgggcccgatggaggaggaggaggccgcctcggaagacgagaacggcgacgatcagggtttccaggaaggggaagatgagctcggggacgaagaggaaggcgcgggcgacgagaacgggcacggggagcagcagcctcaaccgccggcgacgcagcagcaacagccccaacagcagcgcggggccgccaaggaggccgcggggaagagcagcggccccacctcgctgttcgcggtgacggtggcgccgcccggggcgaggcagggccagcagcaggcgggaggggacggcaaaacagaacagaaaggcggagataaaaagaggggtgttaaaagaccacgagaagatcatggccgtggatattttgagtacattgaagagaacaagtatagcagagccaaatctcctcagccacctgttgaagaagaagatgaacacttcgatgacacagtggtttgtcttgatacttataattgtgatctacattttaaaatatcaagagatcgtctcagtgcttcttcccttacaatggagagttttgcttttctttgggctggaggaagagcatcctatggtgtgtcaaaaggcaaagtgtgttttgagatgaaggttacagagaagatcccagtaaggcatttatatacaaaagatattgacatacatgaagttcgtattggctggtcactaactacaagtggaatgttacttggtgaagaagaattttcttatgggtattctctaaaaggaataaaaacatgcaactgtgagactgaagattatggagaaaagtttgatgaaaatgatgtgattacatgttttgctaactttgaaagtgatgaagtagaactctcgtatgctaagaatggacaagatcttggcgttgccttcaaaatcagtaaggaagttcttgctggacggccactgttcccgcatgttctctgccacaactgtgcagttgaatttaattttggtcagaaggaaaagccatattttccaatacctgaagagtatactttcatccagaacgtccccttagaggatcgagttagaggaccaaaggggcctgaagagaagaaagattgtgaagttgtgatgatgattggcttgccaggagctggaaaaactacctgggttactaaacatgcagcagaaaatccagggaaatataacattcttggcacaaatactattatggataagatgatggtggcaggttttaagaagcaaatggcagatactggaaaactgaacacactgttgcagagagccccccagtgtcttgggaaatttattgagattgctgcccgaaagaagcgaaattttattctggatcagacaaatgtgtctgctgctgcccagaggagaaaaatgtgcctgtttgcaggcttccagcgaaaagctgttgtagtttgcccaaaagatgaagactataagcaaagaacacagaagaaagcagaagtagaggggaaagacctaccagaacatgcggtcctcaaaatgaaaggaaactttaccctcccagaggtagctgagtgctttgatgaaataacctatgttgaacttcagaaggaagaagcccaaaaactcttggagcaatataaggaagaaagcaaaaaggctcttccaccagaaaagaaacagaacactggctcaaagaaaagcaataaaaataagagtggcaagaaccagtttaacagaggtggtggccatagaggacgtggaggattcaatatgcgtggtggaaatttcagaggaggagcccctgggaatcgtggcggatataataggaggggcaacatgccacagagaggtggtggcggtggaggaagtggtggaatcggctatccataccctcgtgcccctgtttttcctggccgtggtagttactcaaacagagggaactacaacagaggtggaatgcccaacagagggaactacaaccagaacttcagaggacgaggaaacaatcgtggctacaaaaatcaatctcagggctacaaccagtggcagcagggtgtaagtaatttcttatgtgctttatgtacattaattgtattttgagttcctaagatttatcagtcttgaaaaagatcttgtacagggattgaagtgtttataagtgttaatagggtaaagtgtgaatcgtcttgcagtagtagccataatctaccttttgaaggcaaaataggttgaagattgctataagttaaatttttttaataaagtaatattatttaatatatacagttcttttactgctagctttaattgtgtaaactaacaaagtcatgatgtttcgttttgtaatgtgtattgataattatgggatattaaaactaaatctggtttggtagaaatcagaggtatgacaggtataaatttgtttccagcaaattactctgaattagattcattgtcatttcctaaaaacagtttgagtggcttattgatgttttttctttaaaaacaaaattttctcttacagcaattctggggtcagaagccatggagtcagcattatcaccaaggatattattgaatacccaaataaaacgaactgatacatatttctccaaaaccttcacaagaagtcgactgttttctttagtaggctaactttttaaacattccacaagaggaagtgcctgcgggttccttttttagaagctttgtgggttgattttttttcttttcttttttgtacatttttaattgcagtttaaaagtgaatcgtaagagaacctcagcattgtgcacgataagagaatgtgtcagtatttcagggttctacattttatctgtaaaatgtgacttttttttttttttatcacaacagaagtaaaatgttgctttgta

SEQ ID NO: 289899 - DNA, 2659 bp, Homo sapiens
  misc_feature (56)..(57): n is a, c, g, or t
tacacgcatcagccaacaaagagaccaccccaaaacacttaggctagtacgaggcnngggtgagaactcggtgaaaggaattggcgccgttcgacaccaggcggatccgctctgcagcacgaacccatctccagccgcagccgcagccgccgcccgggccgaggagcagccgcagcagccgccaccagtggccgagtgagcggagccgagtttgaggcagcgcctagcggtgaatcggggccctcaccatgagttcctcgcctgttaatgtaaaaaagctgaaggtgtcggagctgaaagaggagctcaagaagcgacgcctttctgacaagggtctcaaggccgagctcatggagcgactccaggctgcgctggacgacgaggaggccgggggccgccccgccatggagcccgggaacggcagcctagacctgggcggggattccgctgggcgctcgggagcaggcctcgagcaggaggccgcggccggcggcgatgaagaggaggaagaagaggaagaggaggaggaaggaatctccgctctggacggcgaccagatggagctaggagaggagaacggggccgcgggggcggccgactcgggcccgatggaggaggaggaggccgcctcggaagacgagaacggcgacgatcagggtttccaggaaggggaagatgagctcggggacgaagaggaaggcgcgggcgacgagaacgggcacggggagcagcagcctcaaccgccggcgacgcagcagcaacagccccaacagcagcgcggggccgccaaggaggccgcggggaagagcagcggccccacctcgctgttcgcggtgacggtggcgccgcccggggcgaggcagggccagcagcaggcgggaggggacggcaaaacagaacagaaaggcggagataaaaagaggggtgttaaaagaccacgagaagatcatggccgtggatattttgagtacattgaagagaacaagtatagcagagccaaatctcctcagccacctgttgaagaagaagatgaacacttcgatgacacagtggtttgtcttgatacttataattgtgatctacattttaaaatatcaagagatcgtctcagtgcttcttcccttacaatggagagttttgcttttctttgggctggaggaagagcatcctatggtgtgtcaaaaggcaaagtgtgttttgagatgaaggttacagagaagatcccagtaaggcatttatatacaaaagatattgacatacatgaagttcgtattggctggtcactaactacaagtggaatgttacttggtgaagaagaattttcttatgggtattctctaaaaggaataaaaacatgcaactgtgagactgaagattatggagaaaagtttgatgaaaatgatgtgattacatgttttgctaactttgaaagtgatgaagtagaactctcgtatgctaagaatggacaagatcttggcgttgccttcaaaatcagtaaggaagttcttgctggacggccactgttcccgcatgttctctgccacaactgtgcagttgaatttaattttggtcagaaggaaaagccatattttccaatacctgaagagtatactttcatccagaacgtccccttagaggatcgagttagaggaccaaaggggcctgaagagaagaaagattgtgaagttgtgatgatgattggcttgccaggagctggaaaaactacctgggttactaaacatgcagcagaaaatccagggaaatataacattcttggcacaaatactattatggataagatgatggtggcaggttttaagaagcaaatggcagatactggaaaactgaacacactgttgcagagagccccccagtgtcttgggaaatttattgagattgctgcccgaaagaagcgaaattttattctggatcagacaaatgtgtctgctgctgcccagaggagaaaaatgtgcctgtttgcaggcttccagcgaaaagctgttgtagtttgcccaaaagatgaagactataagcaaagaacacagaagaaagcagaagtagaggggaaagacctaccagaacatgcggtcctcaaaatgaaaggaaactttaccctcccagaggtagctgagtgctttgatgaaataacctatgttgaacttcagaaggaagaagcccaaaaactcttggagcaatataaggaagaaagcaaaaaggctcttccaccagaaaagaaacagaacactggctcaaagaaaagcaataaaaataagagtggcaagaaccagtttaacagaggtggtggccatagaggacgtggaggattcaatatgcgtggtggaaatttcagaggaggagcccctgggaatcgtggcggatataataggaggggcaacatgccacagagaggtggtggcggtggaggaagtggtggaatcggctatccataccctcgtgcccctgtttttcctggccgtggtagttactcaaacagagggaactacaacagaggtggaatgcccaacagagggaactacaaccagaacttcagaggacgaggaaacaatcgtggctacaaaaatcaatctcagggctacaaccagtggcagcagggtcagttctgaggttttgagttctgatacgttttgaggtgatcctt

SEQ ID NO: 289900 - DNA, 2645 bp, Homo sapiens
  misc_feature (56)..(57): n is a, c, g, or t
tacacgcatcagccaacaaagagaccaccccaaaacacttaggctagtacgaggcnngggtgagaactcggtgaaaggaattggcgccgttcgacaccaggcggatccgctctgcagcacgaacccatctccagccgcagccgcagccgccgcccgggccgaggagcagccgcagcagccgccaccagtggccgagtgagcggagccgagtttgaggcagcgcctagcggtgaatcggggccctcaccatgagttcctcgcctgttaatgtaaaaaagctgaaggtgtcggagctgaaagaggagctcaagaagcgacgcctttctgacaagggtctcaaggccgagctcatggagcgactccaggctgcgctggacgacgaggaggccgggggccgccccgccatggagcccgggaacggcagcctagacctgggcggggattccgctgggcgctcgggagcaggcctcgagcaggaggccgcggccggcggcgatgaagaggaggaagaagaggaagaggaggaggaaggaatctccgctctggacggcgaccagatggagctaggagaggagaacggggccgcgggggcggccgactcgggcccgatggaggaggaggaggccgcctcggaagacgagaacggcgacgatcagggtttccaggaaggggaagatgagctcggggacgaagaggaaggcgcgggcgacgagaacgggcacggggagcagcagcctcaaccgccggcgacgcagcagcaacagccccaacagcagcgcggggccgccaaggaggccgcggggaagagcagcggccccacctcgctgttcgcggtgacggtggcgccgcccggggcgaggcagggccagcagcaggcgggaggggacggcaaaacagaacagaaaggcggagataaaaagaggggtgttaaaagaccacgagaagatcatggccgtggatattttgagtacattgaagagaacaagtatagcagagccaaatctcctcagccacctgttgaagaagaagatgaacacttcgatgacacagtggtttgtcttgatacttataattgtgatctacattttaaaatatcaagagatcgtctcagtgcttcttcccttacaatggagagttttgcttttctttgggctggaggaagagcatcctatggtgtgtcaaaaggcaaagtgtgttttgagatgaaggttacagagaagatcccagtaaggcatttatatacaaaagatattgacatacatgaagttcgtattggctggtcactaactacaagtggaatgttacttggtgaagaagaattttcttatgggtattctctaaaaggaataaaaacatgcaactgtgagactgaagattatggagaaaagtttgatgaaaatgatgtgattacatgttttgctaactttgaaagtgatgaagtagaactctcgtatgctaagaatggacaagatcttggcgttgccttcaaaatcagtaaggaagttcttgctggacggccactgttcccgcatgttctctgccacaactgtgcagttgaatttaattttggtcagaaggaaaagccatattttccaatacctgaagagtatactttcatccagaacgtccccttagaggatcgagttagaggaccaaaggggcctgaagagaagaaagattgtgaagttgtgatgatgattggcttgccaggagctggaaaaactacctgggttactaaacatgcagcagaaaatccagggaaatataacattcttggcacaaatactattatggataagatgatggtggcaggttttaagaagcaaatggcagatactggaaaactgaacacactgttgcagagagccccccagtgtcttgggaaatttattgagattgctgcccgaaagaagcgaaattttattctggatcagacaaatgtgtctgctgctgcccagaggagaaaaatgtgcctgtttgcaggcttccagcgaaaagctgttgtagtttgcccaaaagatgaagactataagcaaagaacacagaagaaagcagaagtagaggggaaagacctaccagaacatgcggtcctcaaaatgaaaggaaactttaccctcccagaggtagctgagtgctttgatgaaataacctatgttgaacttcagaaggaagaagcccaaaaactcttggagcaatataaggaagaaagcaaaaaggctcttccaccagaaaagaaacagaacactggctcaaagaaaagcaataaaaataagagtggcaagaaccagtttaacagaggtggtggccatagaggacgtggaggattcaatatgcgtggtggaaatttcagaggaggagcccctgggaatcgtggcggatataataggaggggcaacatgccacagagaggtggtggcggtggaggaagtggtggaatcggctatccataccctcgtgcccctgtttttcctggccgtggtagttactcaaacagagggaactacaacagaggtggaatgcccaacagagggaactacaaccagaacttcagaggacgaggaaacaatcgtggctacaaaaatcaatctcagggctacaaccagtggcagcagggtcaattccccagggggccggtaccgagctcc

SEQ ID NO: 289901 - DNA, 2059 bp, Homo sapiens
aagaagagatcaggaaaaaaaacccaccagtcaaggaaagtcaagtagcaagaaggaaatgtctaaaagagatggcaaggagaaaaaagacagaggagtgacgaggtttcaggaaaatgcgtggtggaaatttcagaggaggagcccctgggaatcgtggcggatataataggaggggcaacatgccacagagaggtggtggcggtggaggaagtggtggaatcggctatccataccctcgtgcccctgtttttcctggccgtggtagttactcaaacagagggaactacaacagaggtggaatgcccaacagagggaactacaaccagaacttcagaggacgaggaaacaatcgtggctacaaaaatcaatctcagggctacaaccagtggcagcagggtcaattctggggtcagaagccatggagtcagcattatcaccaaggatattattgaatacccaaataaaacgaactgatacatatttctccaaaaccttcacaagaagtcgactgttttctttagtaggctaactttttaaacattccacaagaggaagtgcctgcgggttccttttttagaagctttgtgggttgattttttttcttttcttttttgtacatttttaattgcagtttaaaagtgaatcgtaagagaacctcagcattgtgcacgataagagaatgtgtcagtatttcagggttctacattttatctgtaaaatgtgacttttttttttttttatcacaacagaagtaaaatgttgctttgtacctggtgtcttttattaagaatttactccccccatttctcacagagaataacagtcgggagtcattgtcacaatataatagaaatgttagcaaccagattcatgtaaggactaagtggtcctcatgaattgcattaagactctgtactgctcatattacactccatcctctctgtagtttgctgggtagtggagggggtaagctaaatcatagtttctgacaataactgggaaggttttttcttaaaataacaatggaattggtataattgggattgaaaactaaaacttggaactaagatagagaagatggagtgtatgtagaagggctgttaaaaatgtaaaacttggttgcattatttgtggaggctcaaacttgtgaaggttaataccataatttttccatttgttctgcattttgattctgaaaagaaagctggctttgcccatttcttattaaaaaaacttgttgtaaatccagttgtctaatgggatctatatgaagttagccatgtctgtatgcccttctcccacaaaatactgtataactagtgtgcttgtagtagttaactccaccatctttgtaagctaatgaaattgtgagtcacccatttatatcttaatttttaatcatgtcagttcttgaatgggtatctccttagcctgctgatttctttttctttctaaagaaagtgggtggagaaattaatttagacgtttgtttgcaataaaaagaattcattttactcttgttttgggattctcgccatcaaggttcaaaatccctttatataactcccaagaggagaaatttattaagtgtgtgctttctggacagcttattctttactctgcatagaacatttaggttttaaaaacttaaatgtatactgacaattgatacataattatgaagtaaagttgaattcttcccttcccctcccccccagacaacttttaacatatttaatgaggggaaaaggtactggctgggagaagttaacactgagtttatcatctttacagaatgctaatgctgtcctcaactgattattttatatacatatatatgatacatgaaactctgggatcagatgcttttagaagccatcatgcaagccagtcattgatgtcactgctacacaacactgctaacttgactgtagctatgtaataacattagatcccctaattgtaattatattgggtttgcacagaacactttaatcttcccctcaccaatgtgaagtgaggaatcaggagtcaaactgtagaactaaaatttgac

SEQ ID NO: 289902 - DNA, 2523 bp, Homo sapiens
  misc_feature (56)..(57): n is a, c, g, or t
tacacgcatcagccaacaaagagaccaccccaaaacacttaggctagtacgaggcnngggtgagaactcggtgaaaggaattggcgccgttcgacaccaggcggatccgctctgcagcacgaacccatctccagccgcagccgcagccgccgcccgggccgaggagcagccgcagcagccgccaccagtggccgagtgagcggagccgagtttgaggcagcgcctagcggtgaatcggggccctcaccatgagttcctcgcctgttaatgtaaaaaagctgaaggtgtcggagctgaaagaggagctcaagaagcgacgcctttctgacaagggtctcaaggccgagctcatggagcgactccaggctgcgctggacgacgaggaggccgggggccgccccgccatggagcccgggaacggcagcctagacctgggcggggattccgctgggcgctcgggagcaggcctcgagcaggaggccgcggccggcggcgatgaagaggaggaagaagaggaagaggaggaggaaggaatctccgctctggacggcgaccagatggagctaggagaggagaacggggccgcgggggcggccgactcgggcccgatggaggaggaggaggccgcctcggaagacgagaacggcgacgatcagggtttccaggaaggggaagatgagctcggggacgaagaggaaggcgcgggcgacgagaacgggcacggggagcagcagcctcaaccgccggcgacgcagcagcaacagccccaacagcagcgcggggccgccaaggaggccgcggggaagagcagcggccccacctcgctgttcgcggtgacggtggcgccgcccggggcgaggcagggccagcagcaggcgggaggggacggcaaaacagaacagaaaggcggagataaaaagaggggtgttaaaagaccacgagaagatcatggccgtggatattttgagtacattgaagagaacaagtatagcagagccaaatctcctcagccacctgttgaagaagaagatgaacacttcgatgacacagtggtttgtcttgatacttataattgtgatctacattttaaaatatcaagagatcgtctcagtgcttcttcccttacaatggagagttttgcttttctttgggctggaggaagagcatcctatggtgtgtcaaaaggcaaagtgtgttttgagatgaaggttacagagaagatcccagtaaggcatttatatacaaaagatattgacatacatgaagttcgtattggctggtcactaactacaagtggaatgttacttggtgaagaagaattttcttatgggtattctctaaaaggaataaaaacatgcaactgtgagactgaagattatggagaaaagtttgatgaaaatgatgtgattacatgttttgctaactttgaaagtgatgaagtagaactctcgtatgctaagaatggacaagatcttggcgttgccttcaaaatcagtaaggaagttcttgctggacggccactgttcccgcatgttctctgccacaactgtgcagttgaatttaattttggtcagaaggaaaagccatattttccaatacctgaagagtatactttcatccagaacgtccccttagaggatcgagttagaggaccaaaggggcctgaagagaagaaagattgtgaagttgtgatgatgattggcttgccaggagctggaaaaactacctgggttactaaacatgcagcagaaaatccagggaaatataacattcttggcacaaatactattatggataagatgatggtggcaggttttaagaagcaaatggcagatactggaaaactgaacacactgttgcagagagccccccagtgtcttgggaaatttattgagattgctgcccgaaagaagcgaaattttattctggatcagacaaatgtgtctgctgctgcccagaggagaaaaatgtgcctgtttgcaggcttccagcgaaaagctgttgtagtttgcccaaaagatgaagactataagcaaagaacacagaagaaagcagaagtagaggggaaagacctaccagaacatgcggtcctcaaaatgaaaggaaactttaccctcccagaggtagctgagtgctttgatgaaataacctatgttgaacttcagaaggaagaagcccaaaaactcttggagcaatataaggaagaaagcaaaaaggctcttccaccagaaaagaaacagaacactggctcaaagaaaagcaataaaaataagagtggcaagaaccagtttaacagaggtggtggccatagaggacgtggaggattcaatatgcgtggtggaaatttcagaggaggagcccctgggaatcgtggcggatataataggaggggcaacatgccacagagaggtggtggcggtggaggaagtggtggaatcggctatccataccctcgtgcccctgtttttcctggccgtggtagttactcaaacaggcttggtggggaattactagtgaattcgc

SEQ ID NO: 289903 - DNA, 2368 bp, Homo sapiens
  misc_feature (56)..(57): n is a, c, g, or t
tacacgcatcagccaacaaagagaccaccccaaaacacttaggctagtacgaggcnngggtgagaactcggtgaaaggaattggcgccgttcgacaccaggcggatccgctctgcagcacgaacccatctccagccgcagccgcagccgccgcccgggccgaggagcagccgcagcagccgccaccagtggccgagtgagcggagccgagtttgaggcagcgcctagcggtgaatcggggccctcaccatgagttcctcgcctgttaatgtaaaaaagctgaaggtgtcggagctgaaagaggagctcaagaagcgacgcctttctgacaagggtctcaaggccgagctcatggagcgactccaggctgcgctggacgacgaggaggccgggggccgccccgccatggagcccgggaacggcagcctagacctgggcggggattccgctgggcgctcgggagcaggcctcgagcaggaggccgcggccggcggcgatgaagaggaggaagaagaggaagaggaggaggaaggaatctccgctctggacggcgaccagatggagctaggagaggagaacggggccgcgggggcggccgactcgggcccgatggaggaggaggaggccgcctcggaagacgagaacggcgacgatcagggtttccaggaaggggaagatgagctcggggacgaagaggaaggcgcgggcgacgagaacgggcacggggagcagcagcctcaaccgccggcgacgcagcagcaacagccccaacagcagcgcggggccgccaaggaggccgcggggaagagcagcggccccacctcgctgttcgcggtgacggtggcgccgcccggggcgaggcagggccagcagcaggcgggaggggacggcaaaacagaacagaaaggcggagataaaaagaggggtgttaaaagaccacgagaagatcatggccgtggatattttgagtacattgaagagaacaagtatagcagagccaaatctcctcagccacctgttgaagaagaagatgaacacttcgatgacacagtggtttgtcttgatacttataattgtgatctacattttaaaatatcaagagatcgtctcagtgcttcttcccttacaatggagagttttgcttttctttgggctggaggaagagcatcctatggtgtgtcaaaaggcaaagtgtgttttgagatgaaggttacagagaagatcccagtaaggcatttatatacaaaagatattgacatacatgaagttcgtattggctggtcactaactacaagtggaatgttacttggtgaagaagaattttcttatgggtattctctaaaaggaataaaaacatgcaactgtgagactgaagattatggagaaaagtttgatgaaaatgatgtgattacatgttttgctaactttgaaagtgatgaagtagaactctcgtatgctaagaatggacaagatcttggcgttgccttcaaaatcagtaaggaagttcttgctggacggccactgttcccgcatgttctctgccacaactgtgcagttgaatttaattttggtcagaaggaaaagccatattttccaatacctgaagagtatactttcatccagaacgtccccttagaggatcgagttagaggaccaaaggggcctgaagagaagaaagattgtgaagttgtgatgatgattggcttgccaggagctggaaaaactacctgggttactaaacatgcagcagaaaatccagggaaatataacattcttggcacaaatactattatggataagatgatggtggcaggttttaagaagcaaatggcagatactggaaaactgaacacactgttgcagagagccccccagtgtcttgggaaatttattgagattgctgcccgaaagaagcgaaattttattctggatcagacaaatgtgtctgctgctgcccagaggagaaaaatgtgcctgtttgcaggcttccagcgaaaagctgttgtagtttgcccaaaagatgaagactataagcaaagaacacagaagaaagcagaagtagaggggaaagacctaccagaacatgcggtcctcaaaatgaaaggaaactttaccctcccagaggtagctgagtgctttgatgaaataacctatgttgaacttcagaaggaagaagcccaaaaactcttggagcaatataaggaagaaagcaaaaaggctcttccaccagaaaagaaacagaacactggctcaaagaaaagcaatacaccacatgttctcactcataagggggagttgaacattgagaacacattgacacagggagtgggaacaccacacaccagggcctgtcggtgggtgggtgttga

SEQ ID NO: 289904 - DNA, 2231 bp, Homo sapiens
ttgtatatcgaggtgatctaaggatcccagggaacttcagaggacgaggaaacaatcgtggctacaaaaatcaatctcagggctacaaccagtggcagcagggtgtaagtaatttcttatgtgctttatgtacattaattgtattttgagttcctaagatttatcagtcttgaaaaagatcttgtacagggattgaagtgtttataagtgttaatagggtaaagtgtgaatcgtcttgcagtagtagccataatctaccttttgaaggcaaaataggttgaagattgctataagttaaatttttttaataaagtaatattatttaatatatacagttcttttactgctagctttaattgtgtaaactaacaaagtcatgatgtttcgttttgtaatgtgtattgataattatgggatattaaaactaaatctggtttggtagaaatcagaggtatgacaggtataaatttgtttccagcaaattactctgaattagattcattgtcatttcctaaaaacagtttgagtggcttattgatgttttttctttaaaaacaaaattttctcttacagcaattctggggtcagaagccatggagtcagcattatcaccaaggatattattgaatacccaaataaaacgaactgatacatatttctccaaaaccttcacaagaagtcgactgttttctttagtaggctaactttttaaacattccacaagaggaagtgcctgcgggttccttttttagaagctttgtgggttgattttttttcttttcttttttgtacatttttaattgcagtttaaaagtgaatcgtaagagaacctcagcattgtgcacgataagagaatgtgtcagtatttcagggttctacattttatctgtaaaatgtgacttttttttttttttatcacaacagaagtaaaatgttgctttgtacctggtgtcttttattaagaatttactccccccatttctcacagagaataacagtcgggagtcattgtcacaatataatagaaatgttagcaaccagattcatgtaaggactaagtggtcctcatgaattgcattaagactctgtactgctcatattacactccatcctctctgtagtttgctgggtagtggagggggtaagctaaatcatagtttctgacaataactgggaaggttttttcttaaaataacaatggaattggtataattgggattgaaaactaaaacttggaactaagatagagaagatggagtgtatgtagaagggctgttaaaaatgtaaaacttggttgcattatttgtggaggctcaaacttgtgaaggttaataccataatttttccatttgttctgcattttgattctgaaaagaaagctggctttgcccatttcttattaaaaaaacttgttgtaaatccagttgtctaatgggatctatatgaagttagccatgtctgtatgcccttctcccacaaaatactgtataactagtgtgcttgtagtagttaactccaccatctttgtaagctaatgaaattgtgagtcacccatttatatcttaatttttaatcatgtcagttcttgaatgggtatctccttagcctgctgatttctttttctttctaaagaaagtgggtggagaaattaatttagacgtttgtttgcaataaaaagaattcattttactcttgttttgggattctcgccatcaaggttcaaaatccctttatataactcccaagaggagaaatttattaagtgtgtgctttctggacagcttattctttactctgcatagaacatttaggttttaaaaacttaaatgtatactgacaattgatacataattatgaagtaaagttgaattcttcccttcccctcccccccagacaacttttaacatatttaatgaggggaaaaggtactggctgggagaagttaacactgagtttatcatctttacagaatgctaatgctgtcctcaactgattattttatatacatatatatgatacatgaaactctgggatcagatgcttttagaagccatcatgcaagccagtcattgatgtcactgctacacaacactgctaacttgactgtagctatgtaataacattagatcccctaattgtaattatattgggtttgcacagaacactttaatcttcccctcaccaatgtgaagtgaggaatcaggagtcaaactgtagaactaaaatttgac

SEQ ID NO: 289905 - DNA, 2277 bp, Homo sapiens
  misc_feature (56)..(57): n is a, c, g, or t
tacacgcatcagccaacaaagagaccaccccaaaacacttaggctagtacgaggcnngggtgagaactcggtgaaaggaattggcgccgttcgacaccaggcggatccgctctgcagcacgaacccatctccagccgcagccgcagccgccgcccgggccgaggagcagccgcagcagccgccaccagtggccgagtgagcggagccgagtttgaggcagcgcctagcggtgaatcggggccctcaccatgagttcctcgcctgttaatgtaaaaaagctgaaggtgtcggagctgaaagaggagctcaagaagcgacgcctttctgacaagggtctcaaggccgagctcatggagcgactccaggctgcgctggacgacgaggaggccgggggccgccccgccatggagcccgggaacggcagcctagacctgggcggggattccgctgggcgctcgggagcaggcctcgagcaggaggccgcggccggcggcgatgaagaggaggaagaagaggaagaggaggaggaaggaatctccgctctggacggcgaccagatggagctaggagaggagaacggggccgcgggggcggccgactcgggcccgatggaggaggaggaggccgcctcggaagacgagaacggcgacgatcagggtttccaggaaggggaagatgagctcggggacgaagaggaaggcgcgggcgacgagaacgggcacggggagcagcagcctcaaccgccggcgacgcagcagcaacagccccaacagcagcgcggggccgccaaggaggccgcggggaagagcagcggccccacctcgctgttcgcggtgacggtggcgccgcccggggcgaggcagggccagcagcaggcgggaggggacggcaaaacagaacagaaaggcggagataaaaagaggggtgttaaaagaccacgagaagatcatggccgtggatattttgagtacattgaagagaacaagtatagcagagccaaatctcctcagccacctgttgaagaagaagatgaacacttcgatgacacagtggtttgtcttgatacttataattgtgatctacattttaaaatatcaagagatcgtctcagtgcttcttcccttacaatggagagttttgcttttctttgggctggaggaagagcatcctatggtgtgtcaaaaggcaaagtgtgttttgagatgaaggttacagagaagatcccagtaaggcatttatatacaaaagatattgacatacatgaagttcgtattggctggtcactaactacaagtggaatgttacttggtgaagaagaattttcttatgggtattctctaaaaggaataaaaacatgcaactgtgagactgaagattatggagaaaagtttgatgaaaatgatgtgattacatgttttgctaactttgaaagtgatgaagtagaactctcgtatgctaagaatggacaagatcttggcgttgccttcaaaatcagtaaggaagttcttgctggacggccactgttcccgcatgttctctgccacaactgtgcagttgaatttaattttggtcagaaggaaaagccatattttccaatacctgaagagtatactttcatccagaacgtccccttagaggatcgagttagaggaccaaaggggcctgaagagaagaaagattgtgaagttgtgatgatgattggcttgccaggagctggaaaaactacctgggttactaaacatgcagcagaaaatccagggaaatataacattcttggcacaaatactattatggataagatgatggtggcaggttttaagaagcaaatggcagatactggaaaactgaacacactgttgcagagagccccccagtgtcttgggaaatttattgagattgctgcccgaaagaagcgaaattttattctggatcagacaaatgtgtctgctgctgcccagaggagaaaaatgtgcctgtttgcaggcttccagcgaaaagctgttgtagtttgcccaaaagatgaagactataagcaaagaacacagaagaaagcagaagtagaggggaaagacctaccagaacatgcggtcctcaaaatgaaaggcatggaattttaattctgttactgtgtgaaatcttctttttaaaagaatgtttttcctacatattctgcttgtgtaactatgttaaatctattaggacttaggcctcctgaaagttaacattttttccagcaatactgcttcaggaattaaaattgcagttgttacatatgca

SEQ ID NO: 289906 - DNA, 2150 bp, Homo sapiens
  misc_feature (56)..(57): n is a, c, g, or t
tacacgcatcagccaacaaagagaccaccccaaaacacttaggctagtacgaggcnngggtgagaactcggtgaaaggaattggcgccgttcgacaccaggcggatccgctctgcagcacgaacccatctccagccgcagccgcagccgccgcccgggccgaggagcagccgcagcagccgccaccagtggccgagtgagcggagccgagtttgaggcagcgcctagcggtgaatcggggccctcaccatgagttcctcgcctgttaatgtaaaaaagctgaaggtgtcggagctgaaagaggagctcaagaagcgacgcctttctgacaagggtctcaaggccgagctcatggagcgactccaggctgcgctggacgacgaggaggccgggggccgccccgccatggagcccgggaacggcagcctagacctgggcggggattccgctgggcgctcgggagcaggcctcgagcaggaggccgcggccggcggcgatgaagaggaggaagaagaggaagaggaggaggaaggaatctccgctctggacggcgaccagatggagctaggagaggagaacggggccgcgggggcggccgactcgggcccgatggaggaggaggaggccgcctcggaagacgagaacggcgacgatcagggtttccaggaaggggaagatgagctcggggacgaagaggaaggcgcgggcgacgagaacgggcacggggagcagcagcctcaaccgccggcgacgcagcagcaacagccccaacagcagcgcggggccgccaaggaggccgcggggaagagcagcggccccacctcgctgttcgcggtgacggtggcgccgcccggggcgaggcagggccagcagcaggcgggaggggacggcaaaacagaacagaaaggcggagataaaaagaggggtgttaaaagaccacgagaagatcatggccgtggatattttgagtacattgaagagaacaagtatagcagagccaaatctcctcagccacctgttgaagaagaagatgaacacttcgatgacacagtggtttgtcttgatacttataattgtgatctacattttaaaatatcaagagatcgtctcagtgcttcttcccttacaatggagagttttgcttttctttgggctggaggaagagcatcctatggtgtgtcaaaaggcaaagtgtgttttgagatgaaggttacagagaagatcccagtaaggcatttatatacaaaagatattgacatacatgaagttcgtattggctggtcactaactacaagtggaatgttacttggtgaagaagaattttcttatgggtattctctaaaaggaataaaaacatgcaactgtgagactgaagattatggagaaaagtttgatgaaaatgatgtgattacatgttttgctaactttgaaagtgatgaagtagaactctcgtatgctaagaatggacaagatcttggcgttgccttcaaaatcagtaaggaagttcttgctggacggccactgttcccgcatgttctctgccacaactgtgcagttgaatttaattttggtcagaaggaaaagccatattttccaatacctgaagagtatactttcatccagaacgtccccttagaggatcgagttagaggaccaaaggggcctgaagagaagaaagattgtgaagttgtgatgatgattggcttgccaggagctggaaaaactacctgggttactaaacatgcagcagaaaatccagggaaatataacattcttggcacaaatactattatggataagatgatggtggcaggttttaagaagcaaatggcagatactggaaaactgaacacactgttgcagagagccccccagtgtcttgggaaatttattgagattgctgcccgaaagaagcgaaattttattctggatcagacaaatgtgtctgctgctgcccagaggagaaaaatgtgcctgtttgcaggcttccagcgaaaagctgttgtagtttgcccaaaagatgaagactataagcaaagaacacagaagaaagcagaagtagaggggaaagacctaccagaacatgcggtcctcaaaatgaaaggaactgtaccctcccagaggtagctgttgtaactggggccggctcag

SEQ ID NO: 289907 - DNA, 1575 bp, Homo sapiens
gtactactactaattgcggccgctcgactgttttctttagtaggctaactttttaaacattccacaagaggaagtgcctgcgggttccttttttagaagctttgtgggttgattttttttcttttcttttttgtacatttttaattgcagtttaaaagtgaatcgtaagagaacctcagcattgtgcacgataagagaatgtgtcagtatttcagggttctacattttatctgtaaaatgtgacttttttttttttttatcacaacagaagtaaaatgttgctttgtacctggtgtcttttattaagaatttactccccccatttctcacagagaataacagtcgggagtcattgtcacaatataatagaaatgttagcaaccagattcatgtaaggactaagtggtcctcatgaattgcattaagactctgtactgctcatattacactccatcctctctgtagtttgctgggtagtggagggggtaagctaaatcatagtttctgacaataactgggaaggttttttcttaaaataacaatggaattggtataattgggattgaaaactaaaacttggaactaagatagagaagatggagtgtatgtagaagggctgttaaaaatgtaaaacttggttgcattatttgtggaggctcaaacttgtgaaggttaataccataatttttccatttgttctgcattttgattctgaaaagaaagctggctttgcccatttcttattaaaaaaacttgttgtaaatccagttgtctaatgggatctatatgaagttagccatgtctgtatgcccttctcccacaaaatactgtataactagtgtgcttgtagtagttaactccaccatctttgtaagctaatgaaattgtgagtcacccatttatatcttaatttttaatcatgtcagttcttgaatgggtatctccttagcctgctgatttctttttctttctaaagaaagtgggtggagaaattaatttagacgtttgtttgcaataaaaagaattcattttactcttgttttgggattctcgccatcaaggttcaaaatccctttatataactcccaagaggagaaatttattaagtgtgtgctttctggacagcttattctttactctgcatagaacatttaggttttaaaaacttaaatgtatactgacaattgatacataattatgaagtaaagttgaattcttcccttcccctcccccccagacaacttttaacatatttaatgaggggaaaaggtactggctgggagaagttaacactgagtttatcatctttacagaatgctaatgctgtcctcaactgattattttatatacatatatatgatacatgaaactctgggatcagatgcttttagaagccatcatgcaagccagtcattgatgtcactgctacacaacactgctaacttgactgtagctatgtaataacattagatcccctaattgtaattatattgggtttgcacagaacactttaatcttcccctcaccaatgtgaagtgaggaatcaggagtcaaactgtagaactaaaatttgac

SEQ ID NO: 289908 - DNA, 2253 bp, Homo sapiens
  misc_feature (56)..(57): n is a, c, g, or t
tacacgcatcagccaacaaagagaccaccccaaaacacttaggctagtacgaggcnngggtgagaactcggtgaaaggaattggcgccgttcgacaccaggcggatccgctctgcagcacgaacccatctccagccgcagccgcagccgccgcccgggccgaggagcagccgcagcagccgccaccagtggccgagtgagcggagccgagtttgaggcagcgcctagcggtgaatcggggccctcaccatgagttcctcgcctgttaatgtaaaaaagctgaaggtgtcggagctgaaagaggagctcaagaagcgacgcctttctgacaagggtctcaaggccgagctcatggagcgactccaggctgcgctggacgacgaggaggccgggggccgccccgccatggagcccgggaacggcagcctagacctgggcggggattccgctgggcgctcgggagcaggcctcgagcaggaggccgcggccggcggcgatgaagaggaggaagaagaggaagaggaggaggaaggaatctccgctctggacggcgaccagatggagctaggagaggagaacggggccgcgggggcggccgactcgggcccgatggaggaggaggaggccgcctcggaagacgagaacggcgacgatcagggtttccaggaaggggaagatgagctcggggacgaagaggaaggcgcgggcgacgagaacgggcacggggagcagcagcctcaaccgccggcgacgcagcagcaacagccccaacagcagcgcggggccgccaaggaggccgcggggaagagcagcggccccacctcgctgttcgcggtgacggtggcgccgcccggggcgaggcagggccagcagcaggcgggaggggacggcaaaacagaacagaaaggcggagataaaaagaggggtgttaaaagaccacgagaagatcatggccgtggatattttgagtacattgaagagaacaagtatagcagagccaaatctcctcagccacctgttgaagaagaagatgaacacttcgatgacacagtggtttgtcttgatacttataattgtgatctacattttaaaatatcaagagatcgtctcagtgcttcttcccttacaatggagagttttgcttttctttgggctggaggaagagcatcctatggtgtgtcaaaaggcaaagtgtgttttgagatgaaggttacagagaagatcccagtaaggcatttatatacaaaagatattgacatacatgaagttcgtattggctggtcactaactacaagtggaatgttacttggtgaagaagaattttcttatgggtattctctaaaaggaataaaaacatgcaactgtgagactgaagattatggagaaaagtttgatgaaaatgatgtgattacatgttttgctaactttgaaagtgatgaagtagaactctcgtatgctaagaatggacaagatcttggcgttgccttcaaaatcagtaaggaagttcttgctggacggccactgttcccgcatgttctctgccacaactgtgcagttgaatttaattttggtcagaaggaaaagccatattttccaatacctgaagagtatactttcatccagaacgtccccttagaggatcgagttagaggaccaaaggggcctgaagagaagaaagattgtgaagttgtgatgatgattggcttgccaggagctggaaaaactacctgggttactaaacatgcagcagaaaatccagggaaatataacattcttggcacaaatactattatggataagatgatggtggcaggttttaagaagcaaatggcagatactggaaaactgaacacactgttgcagaactgcaaattgttacaattactttgaagagcaattttggaataactaaaaaaaaaatgttaatatgagtaatctaccaagcagaaatttggcttctagatgtttaccagagagtaaatgcacaaggatgtatattcaagactattcattgcaacatttttcataatagcaaaataactggaaaaagaccccataaatgttataagattatatactttttaaaaaggagagaaatcctatgtatatctttttatggttgcatacatgcttagagaaagtatataatgatacacagcaatatccatatagcaatgggatacggcaaagggctccagggccagatgcctgtgttggaatcctgcacaccagctgtgtgccttggatagctgct

SEQ ID NO: 289909 - DNA, 1856 bp, Homo sapiens
  misc_feature (56)..(57): n is a, c, g, or t
tacacgcatcagccaacaaagagaccaccccaaaacacttaggctagtacgaggcnngggtgagaactcggtgaaaggaattggcgccgttcgacaccaggcggatccgctctgcagcacgaacccatctccagccgcagccgcagccgccgcccgggccgaggagcagccgcagcagccgccaccagtggccgagtgagcggagccgagtttgaggcagcgcctagcggtgaatcggggccctcaccatgagttcctcgcctgttaatgtaaaaaagctgaaggtgtcggagctgaaagaggagctcaagaagcgacgcctttctgacaagggtctcaaggccgagctcatggagcgactccaggctgcgctggacgacgaggaggccgggggccgccccgccatggagcccgggaacggcagcctagacctgggcggggattccgctgggcgctcgggagcaggcctcgagcaggaggccgcggccggcggcgatgaagaggaggaagaagaggaagaggaggaggaaggaatctccgctctggacggcgaccagatggagctaggagaggagaacggggccgcgggggcggccgactcgggcccgatggaggaggaggaggccgcctcggaagacgagaacggcgacgatcagggtttccaggaaggggaagatgagctcggggacgaagaggaaggcgcgggcgacgagaacgggcacggggagcagcagcctcaaccgccggcgacgcagcagcaacagccccaacagcagcgcggggccgccaaggaggccgcggggaagagcagcggccccacctcgctgttcgcggtgacggtggcgccgcccggggcgaggcagggccagcagcaggcgggaggggacggcaaaacagaacagaaaggcggagataaaaagaggggtgttaaaagaccacgagaagatcatggccgtggatattttgagtacattgaagagaacaagtatagcagagccaaatctcctcagccacctgttgaagaagaagatgaacacttcgatgacacagtggtttgtcttgatacttataattgtgatctacattttaaaatatcaagagatcgtctcagtgcttcttcccttacaatggagagttttgcttttctttgggctggaggaagagcatcctatggtgtgtcaaaaggcaaagtgtgttttgagatgaaggttacagagaagatcccagtaaggcatttatatacaaaagatattgacatacatgaagttcgtattggctggtcactaactacaagtggaatgttacttggtgaagaagaattttcttatgggtattctctaaaaggaataaaaacatgcaactgtgagactgaagattatggagaaaagtttgatgaaaatgatgtgattacatgttttgctaactttgaaagtgatgaagtagaactctcgtatgctaagaatggacaagatcttggcgttgccttcaaaatcagtaaggaagttcttgctggacggccactgttcccgcatgttctctgccacaactgtgcagttgaatttaattttggtcagaaggaaaagccatattttccaatacctgaagagtatactttcatccagaacgtccccttagaggatcgagttagaggaccaaaggggcctgaagagaagaaagattgtgaagttgtgatgatgattggcttgccaggagctggaaaaactacctgggttactaaacatgcagcagaaaatccagggaaatataacattcttggcacaaatactattatggataagatgatggtggcaggttttaagaagtagaagaaaaactggtgggaacaaagacagcag

SEQ ID NO: 289910 - DNA, 2113 bp, Homo sapiens
  misc_feature (56)..(57): n is a, c, g, or t
  misc_feature (1955)..(1955): n is a, c, g, or t
  misc_feature (2067)..(2067): n is a, c, g, or t
  misc_feature (2076)..(2076): n is a, c, g, or t
  misc_feature (2109)..(2109): n is a, c, g, or t
tacacgcatcagccaacaaagagaccaccccaaaacacttaggctagtacgaggcnngggtgagaactcggtgaaaggaattggcgccgttcgacaccaggcggatccgctctgcagcacgaacccatctccagccgcagccgcagccgccgcccgggccgaggagcagccgcagcagccgccaccagtggccgagtgagcggagccgagtttgaggcagcgcctagcggtgaatcggggccctcaccatgagttcctcgcctgttaatgtaaaaaagctgaaggtgtcggagctgaaagaggagctcaagaagcgacgcctttctgacaagggtctcaaggccgagctcatggagcgactccaggctgcgctggacgacgaggaggccgggggccgccccgccatggagcccgggaacggcagcctagacctgggcggggattccgctgggcgctcgggagcaggcctcgagcaggaggccgcggccggcggcgatgaagaggaggaagaagaggaagaggaggaggaaggaatctccgctctggacggcgaccagatggagctaggagaggagaacggggccgcgggggcggccgactcgggcccgatggaggaggaggaggccgcctcggaagacgagaacggcgacgatcagggtttccaggaaggggaagatgagctcggggacgaagaggaaggcgcgggcgacgagaacgggcacggggagcagcagcctcaaccgccggcgacgcagcagcaacagccccaacagcagcgcggggccgccaaggaggccgcggggaagagcagcggccccacctcgctgttcgcggtgacggtggcgccgcccggggcgaggcagggccagcagcaggcgggaggggacggcaaaacagaacagaaaggcggagataaaaagaggggtgttaaaagaccacgagaagatcatggccgtggatattttgagtacattgaagagaacaagtatagcagagccaaatctcctcagccacctgttgaagaagaagatgaacacttcgatgacacagtggtttgtcttgatacttataattgtgatctacattttaaaatatcaagagatcgtctcagtgcttcttcccttacaatggagagttttgcttttctttgggctggaggaagagcatcctatggtgtgtcaaaaggcaaagtgtgttttgagatgaaggttacagagaagatcccagtaaggcatttatatacaaaagatattgacatacatgaagttcgtattggctggtcactaactacaagtggaatgttacttggtgaagaagaattttcttatgggtattctctaaaaggaataaaaacatgcaactgtgagactgaagattatggagaaaagtttgatgaaaatgatgtgattacatgttttgctaactttgaaagtgatgaagtagaactctcgtatgctaagaatggacaagatcttggcgttgccttcaaaatcagtaaggaagttcttgctggacggccactgttcccgcatgttctctgccacaactgtgcagttgaatttaattttggtcagaaggaaaagccatattttccaatacctgaagagtatactttcatccagaacgtccccttagaggatcgagttagaggaccaaaggggcctgaagagaagaaagattgtgaagttgtgatgatgattggcttgccaggagctggaaaaactacctgggttactaaacatgcagcagaggggggatagagagaaagaggtaaaaccccaaacccaaacaaggggccaggcgctgtggctcacacctgtaatctcagcactttggaagtctgagacgggagaatcacttgagctcaggagtttgagaccagcctgggcaacaaagtgagaccccataccccaaatacaaaaagttagccaggcatagtttcatgggccttgtantcccggccacttaggtggctgaggtgggaggatcacttgagccctgggctgtctaggctgcagtcagctgtgatggcaccactgtactgcaacctgggtgacagagcaagancctgtttcnaaaacaacaacaacaataacaacaagcattgantgat

SEQ ID NO: 289911 - DNA, 2741 bp, Homo sapiens
  misc_feature (56)..(57): n is a, c, g, or t
tacacgcatcagccaacaaagagaccaccccaaaacacttaggctagtacgaggcnngggtgagaactcggtgaaaggaattggcgccgttcgacaccaggcggatccgctctgcagcacgaacccatctccagccgcagccgcagccgccgcccgggccgaggagcagccgcagcagccgccaccagtggccgagtgagcggagccgagtttgaggcagcgcctagcggtgaatcggggccctcaccatgagttcctcgcctgttaatgtaaaaaagctgaaggtgtcggagctgaaagaggagctcaagaagcgacgcctttctgacaagggtctcaaggccgagctcatggagcgactccaggctgcgctggacgacgaggaggccgggggccgccccgccatggagcccgggaacggcagcctagacctgggcggggattccgctgggcgctcgggagcaggcctcgagcaggaggccgcggccggcggcgatgaagaggaggaagaagaggaagaggaggaggaaggaatctccgctctggacggcgaccagatggagctaggagaggagaacggggccgcgggggcggccgactcgggcccgatggaggaggaggaggccgcctcggaagacgagaacggcgacgatcagggtttccaggaaggggaagatgagctcggggacgaagaggaaggcgcgggcgacgagaacgggcacggggagcagcagcctcaaccgccggcgacgcagcagcaacagccccaacagcagcgcggggccgccaaggaggccgcggggaagagcagcggccccacctcgctgttcgcggtgacggtggcgccgcccggggcgaggcagggccagcagcaggcgggaggggacggcaaaacagaacagaaaggcggagataaaaagaggggtgttaaaagaccacgagaagatcatggccgtggatattttgagtacattgaagagaacaagtatagcagagccaaatctcctcagccacctgttgaagaagaagatgaacacttcgatgacacagtggtttgtcttgatacttgtaagtgaagctgtttctccccaattatgaaatgcggtgatggtggtttttttttttttttttttagaagtcttaatgcttaagtgcagcaaaacttgggttagtttttttaaaagcaggaagataatggtttacattcagaacctagtagtttaatatttagcacgtcatcagttgtattaagtggattattttacaggctctaggagtttcgtatttttatgacttgaaagttctcattcttaggaaatgtaaaattaatgccagtttttgactagctaacggaaacttgtaacactacctataatttagccttacaggcttctacaataaagtaattcatttttttgtggaattatattaagtgagctatttgggctagttaaatatttactaatgacttctcccattagcacacaagtatattccctattttaaaagattgtaatattactttttcaataactgctcttttgttctcaattccagttcagtagctgctgctttaaacataagttgatttcttccaaagacctgaggcagcagcagtgggctatcactgggccactagctttcttcagcagcgaatggtatcaatggcagtgcagcactgtaaatactgctactttacccagttgggttgcaattgagtgagaaagtattgcaaacctctaagtgggctttgactgtcagacttgtttttttttttttttttttgttacaaaaaaacgtagttggtttagtgatgagaatgtacaactctgggtgtgataaatagaccaaaggataaaaataactgtttcaaaagtatcagctatggtgtcagcctgctgtgttagatggaaggcattggagcttagcttctcatgttttcttgtacaaattggctttattcagatttgtaagagtgtcaatgtaaaactctttcttactggaatatcctttacagaaggttgagatagtcatctgagcctttttaaaagaaaaaactgcaggtgaaaaaggagttagttgatgtgaaagttttagtgaaattctgggttgtataaataagttgctaggaattggcaaggtagtgaagtggtgactcacacaggtaatgtaattgttagattttttagcaaatcaggaatatgtcaatataagtacaatgttgaattcaaacaatctgttgaattaaattctgttgattagaataactctaatttaagaaaaattccaaactgtagatttatttttctctgatcagtaaaaagaaaatgagttccagcttgactttagctgttcaagtgagaagtctgaggaagtgcatgttaatgagccagtgacccataggtagctgggttaaagacactttggatttggataatccgggaagcaattaatccctaattgttgaacaggcagtcctgggtaaagaggacctaaaatgctgcactattaacagcattagacggccaggtttgtacttcatagttttaggctgtcttcttcacaagttttagaaaaagaatttaggagctagagccctggtgcaggatcaacagcagctcatactcctattttaaaataatttggtcgtggcctcccttcatcgctcctgttaaattatgtactgaaaagtaaactgcctgtgaaactaataccaaggtataacatgtatattttaagta

SEQ ID NO: 289912 - DNA, 552 bp, Homo sapiens
aaaacttagatatttaaattggccttaacaatatttaaagaattattaggtggtgtctactgacagtgaaatgacatttcttttcttttcactaggttgtgatgatgattggcttgccaggagctggaaaaactacctgggttactaaacatgcagcagaaaatccagggaaatataacattcttggcacaaatactattatggataagatgatggtaagtaaaatgtttagggcctgatctcagtgtttaaaatagactgggagaggctgggcatggtggttcacgcctgtaatctcagcattttgagaggctgaggtggatggatcacctgaggtcaggagtttgagacccacctggccaacatggcgaagccccgttcctactaaaaatttaaaaattagctgggtgtggtagtgggttcctgtaatcccagctgctcgggaggttgaggcagggacaattacttgaacctgggaggcagaggttgcagtgagttgagatcgtgccattgtactccagtctgggcgacagagcaacactccgtctcaga

SEQ ID NO: 289913 - DNA, 512 bp, Homo sapiens
gagatcgagctcggtaccggagacacttacgtagaaagcaaaaaggctcttccaccagaaaagaaacagaacactggctcaaagaaaagcaataaaaataagagtggcaagaaccagtttaacagaggtggtggccatagaggacgtggaggattcaatatgcgtggtggaaatttcagaggaggagcccctgggaatcgtggcggatataataggaggggcaacatgccacagagaggtggtggcggtggaggaagtggtggaatcggctatccataccctcgtgcccctgtttttcctggccgtggtagttactcaaacagagggaactacaacagaggtggaatgcccaacagagggaactacaaccagaacttcagaggacgatctaagagaggaggtgaaggtcagacctgggtcgcacctatcacagaccacctggaacctgctctaataatctcctggccacaaaaacccaggccccctttgttaccccttctaccagtgctacg

SEQ ID NO: 289914 - DNA, 629 bp, Homo sapiens
gtgttacagactttggtaatttattaatacacttgtaaaatcttaatagcataagaataaaaattattagtgatcatgtaaatacatgaaacatttaaaaaataatccaaccaaatatgttacaactttgtttttatccaggtttccagtttatgcaaacttctgtgaaaatgagctttgttattggtgaagacattggaaattttaccagccaaaacagagtttctctcttattcagggtaagatgtaattgcagtgtgctagcgctggaagggacctgttttatatgttatgtatgttacacgtcagccctccatgtcctccagttctgcatccttggattcaaccaactgtgggttgaaaatactggaggtaaaaagacaaaaaataacaatgaagaacaacaacaaaaatacacagtataataattacatttacatagcatttattttgtattagacattataagtaatctagagatgatttaaagtatatgggagaatgtatgtagattatatggaaatatgagggtattttatttaaagggacttgggcctgtggataccaaggaataactaaggtaaaactgagcataagtggcctgtccatattttgttaaatatcagatt

SEQ ID NO: 289915 - DNA, 3690 bp, Homo sapiens
attggaagcgcactgcgcggcctccaccgcgctctcggcccgggttcggcgtgggggcggggaggtaagtacggtaatgggcggggccgagcgcgggcgcgctccggctttcctcctgcgcagtgctcccgtcagcgcagggggcggggcgcctatattacgtgcgcggcgccgctcctgcgagaggacgttgcgtgctcgctcgcgccaggcgagtctccgcgtctccctcgcgaactcggtgaaaggaattggcgccgttcgacaccaggcggatccgctctgcagcacgaacccatctccagccgcagccgcagccgccgcccgggccgaggagcagccgcagcagccgccaccagtggccgagtgagcggagccgagtttgaggcagcgcctagcggtgaatcggggccctcaccatgagttcctcgcctgttaatgtaaaaaagctgaaggtgtcggagctgaaagaggagctcaagaagcgacgcctttctgacaagggtctcaaggccgagctcatggagcgactccaggctgcgctggacgacgaggaggccgggggccgccccgccatggagcccgggaacggcagcctagacctgggcggggattccgctgggcgctcgggagcaggcctcgagcaggaggccgcggccggcggcgatgaagaggaggaagaagaggaagaggaggaggaaggaatctccgctctggacggcgaccagatggagctaggagaggagaacggggccgcgggggcggccgactcgggcccgatggaggaggaggaggccgcctcggaagacgagaacggcgacgatcagggtttccaggaaggggaagatgagctcggggacgaagaggaaggcgcgggcgacgagaacgggcacggggagcagcagcctcaaccgccggcgacgcagcagcaacagccccaacagcagcgcggggccgccaaggaggccgcggggaagagcagcggccccacctcgctgttcgcggtgacggtggcgccgcccggggcgaggcagggccagcagcaggcgggaggtaagaagaaggcggaaggcggcggaggcggcggtcgccccggggctccggcggcgggggacggcaaaacagaacagaaaggcggagataaaaagaggggtgttaaaagaccacgagaagatcatggccgtggatattttgagtacattgaagagaacaagtatagcagagccaaatctcctcagccacctgttgaagaagaagatgaacacttcgatgacacagtggtttgtcttgatacttataattgtgatctacattttaaaatatcaagagatcgtctcagtgcttcttcccttacaatggagagttttgcttttctttgggctggaggaagagcatcctatggtgtgtcaaaaggcaaagtgtgttttgagatgaaggttacagagaagatcccagtaaggcatttatatacaaaagatattgacatacatgaagttcgtattggctggtcactaactacaagtggaatgttacttggtgaagaagaattttcttatgggtattctctaaaaggaataaaaacatgcaactgtgagactgaagattatggagaaaagtttgatgaaaatgatgtgattacatgttttgctaactttgaaagtgatgaagtagaactctcgtatgctaagaatggacaagatcttggcgttgccttcaaaatcagtaaggaagttcttgctggacggccactgttcccgcatgttctctgccacaactgtgcagttgaatttaattttggtcagaaggaaaagccatattttccaatacctgaagagtatactttcatccagaacgtccccttagaggatcgagttagaggaccaaaggggcctgaagagaagaaagattgtgaagttgtgatgatgattggcttgccaggagctggaaaaactacctgggttactaaacatgcagcagaaaatccagggaaatataacattcttggcacaaatactattatggataagatgatggtggcaggttttaagaagcaaatggcagatactggaaaactgaacacactgttgcagagagccccccagtgtcttgggaaatttattgagattgctgcccgaaagaagcgaaattttattctggatcagacaaatgtgtctgctgctgcccagaggagaaaaatgtgcctgtttgcaggcttccagcgaaaagctgttgtagtttgcccaaaagatgaagactataagcaaagaacacagaagaaagcagaagtagaggggaaagacctaccagaacatgcggtcctcaaaatgaaaggaaactttaccctcccagaggtagctgagtgctttgatgaaataacctatgttgaacttcagaaggaagaagcccaaaaactcttggagcaatataaggaagaaagcaaaaaggctcttccaccagaaaagaaacagaacactggctcaaagaaaagcaataaaaataagagtggcaagaaccagtttaacagaggtggtggccatagaggacgtggaggattcaatatgcgtggtggaaatttcagaggaggagcccctgggaatcgtggcggatataataggaggggcaacatgccacagagaggtggtggcggtggaggaagtggtggaatcggctatccataccctcgtgcccctgtttttcctggccgtggtagttactcaaacagagggaactacaacagaggtggaatgcccaacagagggaactacaaccagaacttcagaggacgaggaaacaatcgtggctacaaaaatcaatctcagggctacaaccagtggcagcagggtcaattctggggtcagaagccatggagtcagcattatcaccaaggatattattgaatacccaaataaaacgaactgatacatatttctccaaaaccttcacaagaagtcgactgttttctttagtaggctaactttttaaacattccacaagaggaagtgcctgcgggttccttttttagaagctttgtgggttgattttttttcttttcttttttgtacatttttaattgcagtttaaaagtgaatcgtaagagaacctcagcattgtgcacgataagagaatgtgtcagtatttcagggttctacattttatctgtaaaatgtgacttttttttttttttatcacaacagaagtaaaatgttgctttgtacctggtgtcttttattaagaatttactccccccatttctcacagagaataacagtcgggagtcattgtcacaatataatagaaatgttagcaaccagattcatgtaaggactaagtggtcctcatgaattgcattaagactctgtactgctcatattacactccatcctctctgtagtttgctgggtagtggagggggtaagctaaatcatagtttctgacaataactgggaaggttttttcttaaaataacaatggaattggtataattgggattgaaaactaaaacttggaactaagatagagaagatggagtgtatgtagaagggctgttaaaaatgtaaaacttggttgcattatttgtggaggctcaaacttgtgaaggttaataccataatttttccatttgttctgcattttgattctgaaaagaaagctggctttgcccatttcttattaaaaaaacttgttgtaaat

SEQ ID NO: 289916 - DNA, 3462 bp, Homo sapiens
  misc_feature (56)..(57): n is a, c, g, or t
tacacgcatcagccaacaaagagaccaccccaaaacacttaggctagtacgaggcnngggtgagaactcggtgaaaggaattggcgccgttcgacaccaggcggatccgctctgcagcacgaacccatctccagccgcagccgcagccgccgcccgggccgaggagcagccgcagcagccgccaccagtggccgagtgagcggagccgagtttgaggcagcgcctagcggtgaatcggggccctcaccatgagttcctcgcctgttaatgtaaaaaagctgaaggtgtcggagctgaaagaggagctcaagaagcgacgcctttctgacaagggtctcaaggccgagctcatggagcgactccaggctgcgctggacgacgaggaggccgggggccgccccgccatggagcccgggaacggcagcctagacctgggcggggattccgctgggcgctcgggagcaggcctcgagcaggaggccgcggccggcggcgatgaagaggaggaagaagaggaagaggaggaggaaggaatctccgctctggacggcgaccagatggagctaggagaggagaacggggccgcgggggcggccgactcgggcccgatggaggaggaggaggccgcctcggaagacgagaacggcgacgatcagggtttccaggaaggggaagatgagctcggggacgaagaggaaggcgcgggcgacgagaacgggcacggggagcagcagcctcaaccgccggcgacgcagcagcaacagccccaacagcagcgcggggccgccaaggaggccgcggggaagagcagcggccccacctcgctgttcgcggtgacggtggcgccgcccggggcgaggcagggccagcagcaggcgggaggggacggcaaaacagaacagaaaggcggagataaaaagaggggtgttaaaagaccacgagaagatcatggccgtggatattttgagtacattgaagagaacaagtatagcagagccaaatctcctcagccacctgttgaagaagaagatgaacacttcgatgacacagtggtttgtcttgatacttataattgtgatctacattttaaaatatcaagagatcgtctcagtgcttcttcccttacaatggagagttttgcttttctttgggctggaggaagagcatcctatggtgtgtcaaaaggcaaagtgtgttttgagatgaaggttacagagaagatcccagtaaggcatttatatacaaaagatattgacatacatgaagttcgtattggctggtcactaactacaagtggaatgttacttggtgaagaagaattttcttatgggtattctctaaaaggaataaaaacatgcaactgtgagactgaagattatggagaaaagtttgatgaaaatgatgtgattacatgttttgctaactttgaaagtgatgaagtagaactctcgtatgctaagaatggacaagatcttggcgttgccttcaaaatcagtaaggaagttcttgctggacggccactgttcccgcatgttctctgccacaactgtgcagttgaatttaattttggtcagaaggaaaagccatattttccaatacctgaagagtatactttcatccagaacgtccccttagaggatcgagttagaggaccaaaggggcctgaagagaagaaagattgtgaagttgtgatgatgattggcttgccaggagctggaaaaactacctgggttactaaacatgcagcagaaaatccagggaaatataacattcttggcacaaatactattatggataagatgatggtggcaggttttaagaagcaaatggcagatactggaaaactgaacacactgttgcagagagccccccagtgtcttgggaaatttattgagattgctgcccgaaagaagcgaaattttattctggatcagacaaatgtgtctgctgctgcccagaggagaaaaatgtgcctgtttgcaggcttccagcgaaaagctgttgtagtttgcccaaaagatgaagactataagcaaagaacacagaagaaagcagaagtagaggggaaagacctaccagaacatgcggtcctcaaaatgaaaggaaactttaccctcccagaggtagctgagtgctttgatgaaataacctatgttgaacttcagaaggaagaagcccaaaaactcttggagcaatataaggaagaaagcaaaaaggctcttccaccagaaaagaaacagaacactggctcaaagaaaagcaataaaaataagagtggcaagaaccagtttaacagaggtggtggccatagaggacgtggaggattcaatatgcgtggtggaaatttcagaggaggagcccctgggaatcgtggcggatataataggaggggcaacatgccacagagaggtggtggcggtggaggaagtggtggaatcggctatccataccctcgtgcccctgtttttcctggccgtggtagttactcaaacagagggaactacaacagaggtggaatgcccaacagagggaactacaaccagaacttcagaggacgaggaaacaatcgtggctacaaaaatcaatctcagggctacaaccagtggcagcagggtcaattctggggtcagaagccatggagtcagcattatcaccaaggatattattgaatacccaaataaaacgaactgatacatatttctccaaaaccttcacaagaagtcgactgttttctttagtaggctaactttttaaacattccacaagaggaagtgcctgcgggttccttttttagaagctttgtgggttgattttttttcttttcttttttgtacatttttaattgcagtttaaaagtgaatcgtaagagaacctcagcattgtgcacgataagagaatgtgtcagtatttcagggttctacattttatctgtaaaatgtgacttttttttttttttatcacaacagaagtaaaatgttgctttgtacctggtgtcttttattaagaatttactccccccatttctcacagagaataacagtcgggagtcattgtcacaatataatagaaatgttagcaaccagattcatgtaaggactaagtggtcctcatgaattgcattaagactctgtactgctcatattacactccatcctctctgtagtttgctgggtagtggagggggtaagctaaatcatagtttctgacaataactgggaaggttttttcttaaaataacaatggaattggtataattgggattgaaaactaaaacttggaactaagatagagaagatggagtgtatgtagaagggctgttaaaaatgtaaaacttggttgcattatttgtggaggctcaaacttgtgaaggttaataccataatttttccatttgttctgcattttgattctgaaaagaaagctggctttgcccatttcttattaaaaaaacttgttgtaaat

SEQ ID NO: 289917 - DNA, 4273 bp, Homo sapiens
  misc_feature (56)..(57): n is a, c, g, or t
tacacgcatcagccaacaaagagaccaccccaaaacacttaggctagtacgaggcnngggtgagaactcggtgaaaggaattggcgccgttcgacaccaggcggatccgctctgcagcacgaacccatctccagccgcagccgcagccgccgcccgggccgaggagcagccgcagcagccgccaccagtggccgagtgagcggagccgagtttgaggcagcgcctagcggtgaatcggggccctcaccatgagttcctcgcctgttaatgtaaaaaagctgaaggtgtcggagctgaaagaggagctcaagaagcgacgcctttctgacaagggtctcaaggccgagctcatggagcgactccaggctgcgctggacgacgaggaggccgggggccgccccgccatggagcccgggaacggcagcctagacctgggcggggattccgctgggcgctcgggagcaggcctcgagcaggaggccgcggccggcggcgatgaagaggaggaagaagaggaagaggaggaggaaggaatctccgctctggacggcgaccagatggagctaggagaggagaacggggccgcgggggcggccgactcgggcccgatggaggaggaggaggccgcctcggaagacgagaacggcgacgatcagggtttccaggaaggggaagatgagctcggggacgaagaggaaggcgcgggcgacgagaacgggcacggggagcagcagcctcaaccgccggcgacgcagcagcaacagccccaacagcagcgcggggccgccaaggaggccgcggggaagagcagcggccccacctcgctgttcgcggtgacggtggcgccgcccggggcgaggcagggccagcagcaggcgggaggggacggcaaaacagaacagaaaggcggagataaaaagaggggtgttaaaagaccacgagaagatcatggccgtggatattttgagtacattgaagagaacaagtatagcagagccaaatctcctcagccacctgttgaagaagaagatgaacacttcgatgacacagtggtttgtcttgatacttataattgtgatctacattttaaaatatcaagagatcgtctcagtgcttcttcccttacaatggagagttttgcttttctttgggctggaggaagagcatcctatggtgtgtcaaaaggcaaagtgtgttttgagatgaaggttacagagaagatcccagtaaggcatttatatacaaaagatattgacatacatgaagttcgtattggctggtcactaactacaagtggaatgttacttggtgaagaagaattttcttatgggtattctctaaaaggaataaaaacatgcaactgtgagactgaagattatggagaaaagtttgatgaaaatgatgtgattacatgttttgctaactttgaaagtgatgaagtagaactctcgtatgctaagaatggacaagatcttggcgttgccttcaaaatcagtaaggaagttcttgctggacggccactgttcccgcatgttctctgccacaactgtgcagttgaatttaattttggtcagaaggaaaagccatattttccaatacctgaagagtatactttcatccagaacgtccccttagaggatcgagttagaggaccaaaggggcctgaagagaagaaagattgtgaagttgtgatgatgattggcttgccaggagctggaaaaactacctgggttactaaacatgcagcagaaaatccagggaaatataacattcttggcacaaatactattatggataagatgatggtggcaggttttaagaagcaaatggcagatactggaaaactgaacacactgttgcagagagccccccagtgtcttgggaaatttattgagattgctgcccgaaagaagcgaaattttattctggatcagacaaatgtgtctgctgctgcccagaggagaaaaatgtgcctgtttgcaggcttccagcgaaaagctgttgtagtttgcccaaaagatgaagactataagcaaagaacacagaagaaagcagaagtagaggggaaagacctaccagaacatgcggtcctcaaaatgaaaggaaactttaccctcccagaggtagctgagtgctttgatgaaataacctatgttgaacttcagaaggaagaagcccaaaaactcttggagcaatataaggaagaaagcaaaaaggctcttccaccagaaaagaaacagaacactggctcaaagaaaagcaataaaaataagagtggcaagaaccagtttaacagaggtggtggccatagaggacgtggaggattcaatatgcgtggtggaaatttcagaggaggagcccctgggaatcgtggcggatataataggaggggcaacatgccacagagaggtggtggcggtggaggaagtggtggaatcggctatccataccctcgtgcccctgtttttcctggccgtggtagttactcaaacagagggaactacaacagaggtggaatgcccaacagagggaactacaaccagaacttcagaggacgaggaaacaatcgtggctacaaaaatcaatctcagggctacaaccagtggcagcagggtcaattctggggtcagaagccatggagtcagcattatcaccaaggatattattgaatacccaaataaaacgaactgatacatatttctccaaaaccttcacaagaagtcgactgttttctttagtaggctaactttttaaacattccacaagaggaagtgcctgcgggttccttttttagaagctttgtgggttgattttttttcttttcttttttgtacatttttaattgcagtttaaaagtgaatcgtaagagaacctcagcattgtgcacgataagagaatgtgtcagtatttcagggttctacattttatctgtaaaatgtgacttttttttttttttatcacaacagaagtaaaatgttgctttgtacctggtgtcttttattaagaatttactccccccatttctcacagagaataacagtcgggagtcattgtcacaatataatagaaatgttagcaaccagattcatgtaaggactaagtggtcctcatgaattgcattaagactctgtactgctcatattacactccatcctctctgtagtttgctgggtagtggagggggtaagctaaatcatagtttctgacaataactgggaaggttttttcttaaaataacaatggaattggtataattgggattgaaaactaaaacttggaactaagatagagaagatggagtgtatgtagaagggctgttaaaaatgtaaaacttggttgcattatttgtggaggctcaaacttgtgaaggttaataccataatttttccatttgttctgcattttgattctgaaaagaaagctggctttgcccatttcttattaaaaaaacttgttgtaaatccagttgtctaatgggatctatatgaagttagccatgtctgtatgcccttctcccacaaaatactgtataactagtgtgcttgtagtagttaactccaccatctttgtaagctaatgaaattgtgagtcacccatttatatcttaatttttaatcatgtcagttcttgaatgggtatctccttagcctgctgatttctttttctttctaaagaaagtgggtggagaaattaatttagacgtttgtttgcaataaaaagaattcattttactcttgttttgggattctcgccatcaaggttcaaaatccctttatataactcccaagaggagaaatttattaagtgtgtgctttctggacagcttattctttactctgcatagaacatttaggttttaaaaacttaaatgtatactgacaattgatacataattatgaagtaaagttgaattcttcccttcccctcccccccagacaacttttaacatatttaatgaggggaaaaggtactggctgggagaagttaacactgagtttatcatctttacagaatgctaatgctgtcctcaactgattattttatatacatatatatgatacatgaaactctgggatcagatgcttttagaagccatcatgcaagccagtcattgatgtcactgctacacaacactgctaacttgactgtagctatgtaataacattagatcccctaattgtaattatattgggtttgcacagaacactttaatcttcccctcaccaatgtgaagtgaggaatcaggagtcaaactgtagaactaaaatttgac

SEQ ID NO: 289918 - DNA, 6258 bp, Homo sapiens
  misc_feature (56)..(57): n is a, c, g, or t
tacacgcatcagccaacaaagagaccaccccaaaacacttaggctagtacgaggcnngggtgagaactcggtgaaaggaattggcgccgttcgacaccaggcggatccgctctgcagcacgaacccatctccagccgcagccgcagccgccgcccgggccgaggagcagccgcagcagccgccaccagtggccgagtgagcggagccgagtttgaggcagcgcctagcggtgaatcggggccctcaccatgagttcctcgcctgttaatgtaaaaaagctgaaggtgtcggagctgaaagaggagctcaagaagcgacgcctttctgacaagggtctcaaggccgagctcatggagcgactccaggctgcgctggacgacgaggaggccgggggccgccccgccatggagcccgggaacggcagcctagacctgggcggggattccgctgggcgctcgggagcaggcctcgagcaggaggccgcggccggcggcgatgaagaggaggaagaagaggaagaggaggaggaaggaatctccgctctggacggcgaccagatggagctaggagaggagaacggggccgcgggggcggccgactcgggcccgatggaggaggaggaggccgcctcggaagacgagaacggcgacgatcagggtttccaggaaggggaagatgagctcggggacgaagaggaaggcgcgggcgacgagaacgggcacggggagcagcagcctcaaccgccggcgacgcagcagcaacagccccaacagcagcgcggggccgccaaggaggccgcggggaagagcagcggccccacctcgctgttcgcggtgacggtggcgccgcccggggcgaggcagggccagcagcaggcgggaggggacggcaaaacagaacagaaaggcggagataaaaagaggggtgttaaaagaccacgagaagatcatggccgtggatattttgagtacattgaagagaacaagtatagcagagccaaatctcctcagccacctgttgaagaagaagatgaacacttcgatgacacagtggtttgtcttgatacttgtaagtgaagctgtttctccccaattatgaaatgcggtgatggtggtttttttttttttttttttagaagtcttaatgcttaagtgcagcaaaacttgggttagtttttttaaaagcaggaagataatggtttacattcagaacctagtagtttaatatttagcacgtcatcagttgtattaagtggattattttacaggctctaggagtttcgtatttttatgacttgaaagttctcattcttaggaaatgtaaaattaatgccagtttttgactagctaacggaaacttgtaacactacctataatttagccttacaggcttctacaataaagtaattcatttttttgtggaattatattaagtgagctatttgggctagttaaatatttactaatgacttctcccattagcacacaagtatattccctattttaaaagattgtaatattactttttcaataactgctcttttgttctcaattccagttcagtagctgctgctttaaacataagttgatttcttccaaagacctgaggcagcagcagtgggctatcactgggccactagctttcttcagcagcgaatggtatcaatggcagtgcagcactgtaaatactgctactttacccagttgggttgcaattgagtgagaaagtattgcaaacctctaagtgggctttgactgtcagacttgtttttttttttttttttttgttacaaaaaaacgtagttggtttagtgatgagaatgtacaactctgggtgtgataaatagaccaaaggataaaaataactgtttcaaaagtatcagctatggtgtcagcctgctgtgttagatggaaggcattggagcttagcttctcatgttttcttgtacaaattggctttattcagatttgtaagagtgtcaatgtaaaactctttcttactggaatatcctttacagaaggttgagatagtcatctgagcctttttaaaagaaaaaactgcaggtgaaaaaggagttagttgatgtgaaagttttagtgaaattctgggttgtataaataagttgctaggaattggcaaggtagtgaagtggtgactcacacaggtaatgtaattgttagattttttagcaaatcaggaatatgtcaatataagtacaatgttgaattcaaacaatctgttgaattaaattctgttgattagaataactctaatttaagaaaaattccaaactgtagatttatttttctctgatcagtaaaaagaaaatgagttccagcttgactttagctgttcaagtgagaagtctgaggaagtgcatgttaatgagccagtgacccataggtagctgggttaaagacactttggatttggataatccgggaagcaattaatccctaattgttgaacaggcagtcctgggtaaagaggacctaaaatgctgcactattaacagcattagacggccaggtttgtacttcatagttttaggctgtcttcttcacaagttttagaaaaagaatttaggagctagagccctggtgcaggatcaacagcagctcatactcctattttaaaataatttggtcgtggcctcccttcagttttaatgtggcactggtaaatctacctggttctggcatgcttcactttgatttcctgctatcctctactgcttgcctctaaatcaaggtaaagagcagagcaggtatgtattaatgtcacattgtcttgattattttaaatacttaaaatatacatgttaaaccttggtattagtttcacaggcagtttacttttcagtacataatttaacaggagtgacttggtgggagtggggctttaaactgaaaattggaacaacagcatgatgtggagaaaagttgtgcagcattaagaagtacatgcaaaaattaagtaaccaagttttgtctacatagcagatatgtttacattggatgtcaaaagtaacacagtatttgatataattacagataattgtgatctacattttaaaatatcaagagatcgtctcagtgcttcttcccttacaatggagagttttgcttttctttgggctggaggaagagcatcctatggtgtgtcaaaaggcaaagtgtgttttgagatgaaggttacagagaagatcccagtaaggcatttatatacaaaagatattgacatacatgaagttcgtattggctggtcactaactacaagtggaatgttacttggtgaagaagaattttcttatgggtattctctaaaaggaataaaaacatgcaactgtgagactgaagattatggagaaaagtttgatgaaaatgatgtgattacatgttttgctaactttgaaagtgatgaagtagaactctcgtatgctaagaatggacaagatcttggcgttgccttcaaaatcagtaaggaagttcttgctggacggccactgttcccgcatgttctctgccacaactgtgcagttgaatttaattttggtcagaaggaaaagccatattttccaatacctgaagagtatactttcatccagaacgtccccttagaggatcgagttagaggaccaaaggggcctgaagagaagaaagattgtgaagttgtgatgatgattggcttgccaggagctggaaaaactacctgggttactaaacatgcagcagaaaatccagggaaatataacattcttggcacaaatactattatggataagatgatggtggcaggttttaagaagcaaatggcagatactggaaaactgaacacactgttgcagagagccccccagtgtcttgggaaatttattgagattgctgcccgaaagaagcgaaattttattctggatcagacaaatgtgtctgctgctgcccagaggagaaaaatgtgcctgtttgcaggcttccagcgaaaagctgttgtagtttgcccaaaagatgaagactataagcaaagaacacagaagaaagcagaagtagaggggaaagacctaccagaacatgcggtcctcaaaatgaaaggaaactttaccctcccagaggtagctgagtgctttgatgaaataacctatgttgaacttcagaaggaagaagcccaaaaactcttggagcaatataaggaagaaagcaaaaaggctcttccaccagaaaagaaacagaacactggctcaaagaaaagcaataaaaataagagtggcaagaaccagtttaacagaggtggtggccatagaggacgtggaggattcaatatgcgtggtggaaatttcagaggaggagcccctgggaatcgtggcggatataataggaggggcaacatgccacagagaggtggtggcggtggaggaagtggtggaatcggctatccataccctcgtgcccctgtttttcctggccgtggtagttactcaaacagagggaactacaacagaggtggaatgcccaacagagggaactacaaccagaacttcagaggacgaggaaacaatcgtggctacaaaaatcaatctcagggctacaaccagtggcagcagggtcaattctggggtcagaagccatggagtcagcattatcaccaaggatattattgaatacccaaataaaacgaactgatacatatttctccaaaaccttcacaagaagtcgactgttttctttagtaggctaactttttaaacattccacaagaggaagtgcctgcgggttccttttttagaagctttgtgggttgattttttttcttttcttttttgtacatttttaattgcagtttaaaagtgaatcgtaagagaacctcagcattgtgcacgataagagaatgtgtcagtatttcagggttctacattttatctgtaaaatgtgacttttttttttttttatcacaacagaagtaaaatgttgctttgtacctggtgtcttttattaagaatttactccccccatttctcacagagaataacagtcgggagtcattgtcacaatataatagaaatgttagcaaccagattcatgtaaggactaagtggtcctcatgaattgcattaagactctgtactgctcatattacactccatcctctctgtagtttgctgggtagtggagggggtaagctaaatcatagtttctgacaataactgggaaggttttttcttaaaataacaatggaattggtataattgggattgaaaactaaaacttggaactaagatagagaagatggagtgtatgtagaagggctgttaaaaatgtaaaacttggttgcattatttgtggaggctcaaacttgtgaaggttaataccataatttttccatttgttctgcattttgattctgaaaagaaagctggctttgcccatttcttattaaaaaaacttgttgtaaatccagttgtctaatgggatctatatgaagttagccatgtctgtatgcccttctcccacaaaatactgtataactagtgtgcttgtagtagttaactccaccatctttgtaagctaatgaaattgtgagtcacccatttatatcttaatttttaatcatgtcagttcttgaatgggtatctccttagcctgctgatttctttttctttctaaagaaagtgggtggagaaattaatttagacgtttgtttgcaataaaaagaattcattttactcttgttttgggattctcgccatcaaggttcaaaatccctttatataactcccaagaggagaaatttattaagtgtgtgctttctggacagcttattctttactctgcatagaacatttaggttttaaaaacttaaatgtatactgacaattgatacataattatgaagtaaagttgaattcttcccttcccctcccccccagacaacttttaacatatttaatgaggggaaaaggtactggctgggagaagttaacactgagtttatcatctttacagaatgctaatgctgtcctcaactgattattttatatacatatatatgatacatgaaactctgggatcagatgcttttagaagccatcatgcaagccagtcattgatgtcactgctacacaacactgctaacttgactgtagctatgtaataacattagatcccctaattgtaattatattgggtttgcacagaacactttaatcttcccctcaccaatgtgaagtgaggaatcaggagtcaaactgtagaactaaaatttgac

SEQ ID NO: 289919 - DNA, 4219 bp, Homo sapiens
  misc_feature (56)..(57): n is a, c, g, or t
tacacgcatcagccaacaaagagaccaccccaaaacacttaggctagtacgaggcnngggtgagaactcggtgaaaggaattggcgccgttcgacaccaggcggatccgctctgcagcacgaacccatctccagccgcagccgcagccgccgcccgggccgaggagcagccgcagcagccgccaccagtggccgagtgagcggagccgagtttgaggcagcgcctagcggtgaatcggggccctcaccatgagttcctcgcctgttaatgtaaaaaagctgaaggtgtcggagctgaaagaggagctcaagaagcgacgcctttctgacaagggtctcaaggccgagctcatggagcgactccaggctgcgctggacgacgaggaggccgggggccgccccgccatggagcccgggaacggcagcctagacctgggcggggattccgctgggcgctcgggagcaggcctcgagcaggaggccgcggccggcggcgatgaagaggaggaagaagaggaagaggaggaggaaggaatctccgctctggacggcgaccagatggagctaggagaggagaacggggccgcgggggcggccgactcgggcccgatggaggaggaggaggccgcctcggaagacgagaacggcgacgatcagggtttccaggaaggggaagatgagctcggggacgaagaggaaggcgcgggcgacgagaacgggcacggggagcagcagcctcaaccgccggcgacgcagcagcaacagccccaacagcagcgcggggccgccaaggaggccgcggggaagagcagcggccccacctcgctgttcgcggtgacggtggcgccgcccggggcgaggcagggccagcagcaggcgggaggggacggcaaaacagaacagaaaggcggagataaaaagaggggtgttaaaagaccacgagaagatcatggccgtggatattttgagtacattgaagagaacaagtatagcagagccaaatctcctcagccacctgttgaagaagaagatgaacacttcgatgacacagtggtttgtcttgatacttataattgtgatctacattttaaaatatcaagagatcgtctcagtgcttcttcccttacaatggagagttttgcttttctttgggctggaggaagagcatcctatggtgtgtcaaaaggcaaagtgtgttttgagatgaaggttacagagaagatcccagtaaggcatttatatacaaaagatattgacatacatgaagttcgtattggctggtcactaactacaagtggaatgttacttggtgaagaagaattttcttatgggtattctctaaaaggaataaaaacatgcaactgtgagactgaagattatggagaaaagtttgatgaaaatgatgtgattacatgttttgctaactttgaaagtgatgaagtagaactctcgtatgctaagaatggacaagatcttggcgttgccttcaaaatcagtaaggaagttcttgctggacggccactgttcccgcatgttctctgccacaactgtgcagttgaatttaattttggtcagaaggaaaagccatattttccaatacctgaagagtatactttcatccagaacgtccccttagaggatcgagttagaggaccaaaggggcctgaagagaagaaagattgtgaagttgtgatgatgattggcttgccaggagctggaaaaactacctgggttactaaacatgcagcagaaaatccagggaaatataacattcttggcacaaatactattatggataagatgatggtggcaggttttaagaagcaaatggcagatactggaaaactgaacacactgttgcagagagccccccagtgtcttgggaaatttattgagattgctgcccgaaagaagcgaaattttattctggatcagacaaatgtgtctgctgctgcccagaggagaaaaatgtgcctgtttgcaggcttccagcgaaaagctgttgtagtttgcccaaaagatgaagactataagcaaagaacacagaagaaagcagaagtagaggggaaagacctaccagaacatgcggtcctcaaaatgaaaggaaactttaccctcccagaggtagctgagtgctttgatgaaataacctatgttgaacttcagaaggaagaagcccaaaaactcttggagcaatataaggaagaaagcaaaaaggctcttccaccagaaaagaaacagaacactggctcaaagaaaagcaataaaaataagagtggcaagaaccagtttaacagaggtggtggccatagaggacgtggaggattcaatatgcgtggtggaaatttcagaggaggagcccctgggaatcgtggcggatataataggaggggcaacatgccacagagaggtggtggcggtggaggaagtggtggaatcggctatccataccctcgtgcccctgtttttcctggccgtggtagttactcaaacagagggaactacaacagaggtggaatgcccaacagagggaactacaaccagaacttcagaggacgaggaaacaatcgtggctacaaaaatcaatctcagggctacaaccagtggcagcagggtcaattctggggtcagaagccatggagtcagcattatcaccaaggatattattgaatacccaaataaaacgaactgatacatatttctccaaaaccttcacaagaagtcgactgttttctttagtaggctaactttttaaacattccacaagaggaagtgcctgcgggttccttttttagaagctttgtgggttgattttttttcttttcttttttgtacatttttaattgcagtttaaaagtgaatcgtaagagaacctcagcattgtgcacgataagagaatgtgtcagtatttcagggttctacattttatctgtaaaatgtgacttttttttttttttatcacaacagaagtaaaatgttgctttgtacctggtgtcttttattaagaatttactccccccatttctcacagagaataacagtcgggagtcattgtcacaatataatagaaatgttagcaaccagattcatgtaaggactaagtggtcctcatgaattgcattaagactctgtactgctcatattacactccatcctctctgtagtttgctgggtagtggagggggtaagctaaatcatagtttctgacaataactgggaaggttttttcttaaaataacaatggaattggtataattgggattgaaaactaaaacttggaactaagatagagaagatggagtgtatgtagaagggctgttaaaaatgtaaaacttggttgcattatttgtggaggctcaaacttgtgaaggttaataccataatttttccatttgttctgcattttgattctgaaaagaaagctggctttgcccatttcttattaaaaaaacttgttgtaaatccagttgtctaatgggatctatatgaagttagccatgtctgtatgcccttctcccacctaatgaaattgtgagtcacccatttatatcttaatttttaatcatgtcagttcttgaatgggtatctccttagcctgctgatttctttttctttctaaagaaagtgggtggagaaattaatttagacgtttgtttgcaataaaaagaattcattttactcttgttttgggattctcgccatcaaggttcaaaatccctttatataactcccaagaggagaaatttattaagtgtgtgctttctggacagcttattctttactctgcatagaacatttaggttttaaaaacttaaatgtatactgacaattgatacataattatgaagtaaagttgaattcttcccttcccctcccccccagacaacttttaacatatttaatgaggggaaaaggtactggctgggagaagttaacactgagtttatcatctttacagaatgctaatgctgtcctcaactgattattttatatacatatatatgatacatgaaactctgggatcagatgcttttagaagccatcatgcaagccagtcattgatgtcactgctacacaacactgctaacttgactgtagctatgtaataacattagatcccctaattgtaattatattgggtttgcacagaacactttaatcttcccctcaccaatgtgaagtgaggaatcaggagtcaaactgtagaactaaaatttgac

SEQ ID NO: 289920 - DNA, 3670 bp, Homo sapiens
  misc_feature (56)..(57): n is a, c, g, or t
tacacgcatcagccaacaaagagaccaccccaaaacacttaggctagtacgaggcnngggtgagaactcggtgaaaggaattggcgccgttcgacaccaggcggatccgctctgcagcacgaacccatctccagccgcagccgcagccgccgcccgggccgaggagcagccgcagcagccgccaccagtggccgagtgagcggagccgagtttgaggcagcgcctagcggtgaatcggggccctcaccatgagttcctcgcctgttaatgtaaaaaagctgaaggtgtcggagctgaaagaggagctcaagaagcgacgcctttctgacaagggtctcaaggccgagctcatggagcgactccaggctgcgctggacgacgaggaggccgggggccgccccgccatggagcccgggaacggcagcctagacctgggcggggattccgctgggcgctcgggagcaggcctcgagcaggaggccgcggccggcggcgatgaagaggaggaagaagaggaagaggaggaggaaggaatctccgctctggacggcgaccagatggagctaggagaggagaacggggccgcgggggcggccgactcgggcccgatggaggaggaggaggccgcctcggaagacgagaacggcgacgatcagggtttccaggaaggggaagatgagctcggggacgaagaggaaggcgcgggcgacgagaacgggcacggggagcagcagcctcaaccgccggcgacgcagcagcaacagccccaacagcagcgcggggccgccaaggaggccgcggggaagagcagcggccccacctcgctgttcgcggtgacggtggcgccgcccggggcgaggcagggccagcagcaggcgggaggggacggcaaaacagaacagaaaggcggagataaaaagaggggtgttaaaagaccacgagaagatcatggccgtggatattttgagtacattgaagagaacaagtatagcagagccaaatctcctcagccacctgttgaagaagaagatgaacacttcgatgacacagtggtttgtcttgatacttataattgtgatctacattttaaaatatcaagagatcgtctcagtgcttcttcccttacaatggagagttttgcttttctttgggctggaggaagagcatcctatggtgtgtcaaaaggcaaagtgtgttttgagatgaaggttacagagaagatcccagtaaggcatttatatacaaaagatattgacatacatgaagttcgtattggctggtcactaactacaagtggaatgttacttggtgaagaagaattttcttatgggtattctctaaaaggaataaaaacatgcaactgtgagactgaagattatggagaaaagtttgatgaaaatgatgtgattacatgttttgctaactttgaaagtgatgaagtagaactctcgtatgctaagaatggacaagatcttggcgttgccttcaaaatcagtaaggaagttcttgctggacggccactgttcccgcatgttctctgccacaactgtgcagttgaatttaattttggtcagaaggaaaagccatattttccaatacctgaagagtatactttcatccagaacgtccccttagaggatcgagttagaggaccaaaggggcctgaagagaagaaagattgtgaagttgtgatgatgattggcttgccaggagctggaaaaactacctgggttactaaacatgcagcagaaaatccagggaaatataacattcttggcacaaatactattatggataagatgatggtggcaggttttaagaagcaaatggcagatactggaaaactgaacacactgttgcagagagccccccagtgtcttgggaaatttattgagattgctgcccgaaagaagcgaaattttattctggatcagacaaatgtgtctgctgctgcccagaggagaaaaatgtgcctgtttgcaggcttccagcgaaaagctgttgtagtttgcccaaaagatgaagactataagcaaagaacacagaagaaagcagaagtagaggggaaagacctaccagaacatgcggtcctcaaaatgaaaggaaactttaccctcccagaggtagctgagtgctttgatgaaataacctatgttgaacttcagaaggaagaagcccaaaaactcttggagcaatataaggaagaaagcaaaaaggctcttccaccagaaaagaaacagaacactggctcaaagaaaagcaataaaaataagagtggcaagaaccagtttaacagaggtggtggccatagaggacgtggaggattcaatatgcgtggtggaaatttcagaggaggagcccctgggaatcgtggcggatataataggaggggcaacatgccacagagaggtggtggcggtggaggaagtggtggaatcggctatccataccctcgtgcccctgtttttcctggccgtggtagttactcaaacagagggaactacaacagaggtggaatgcccaacagagggaactacaaccagaacttcagaggacgaggaaacaatcgtggctacaaaaatcaatctcagggctacaaccagtggcagcagggtcaattctggggtcagaagccatggagtcagcattatcaccaaggatattattgaatacccaaataaaacgaactgatacatatttctccaaaaccttcacaagaagtcgactgttttctttagtaggctaactttttaaacattccacaagaggaagtgcctgcgggttccttttttagaagctttgtgggttgattttttttcttttcttttttgtacatttttaattgcagtttaaaagtgaatcgtaagagaacctcagcattgtgcacgataagagaatgtgtcagtatttcagggttctacattttatctgtaaaatgtgacttttttttttttttatcacaacagaagtaaaatgttgctttgtacctggtgtcttttattaagaatttactccccccatttctcacagagaataacagtcgggagtcattgtcacaatataatagaaatgttagcaaccagattcatgtaaggactaagtggtcctcatgaattgcattaagactctgtactgctcatattacactccatcctctctgtagtttgctgggtagtggagggggtaagctaaatcatagtttctgacaataactgggaaggttttttcttaaaataacaatggaattggtataattgggattgaaaactaaaacttggaactaagatagagaagatggagtgtatgtagaagggctgttaaaaatgtaaaacttggttgcattatttgtggaggctcaaacttgtgaaggttaataccataatttttccatttgttctgcattttgattctgaaaagaaagctggctttgcccatttcttattaaaaaaacttgttgtaaataaaaaaaaaaaaaaaaaaaaaaggggggggggtaaaaagttcctaggggcgaggtttcggtaccagtttgtgtaaggggccatgggggcggatatagaggcaggcgcgttaaggtggtggaatgctctggacttgggcctctgggggggctttggccctacgggtagctagaataattcgtttgtacacgtttggtgagtgccgtata

SEQ ID NO: 289921 - DNA, 3760 bp, Homo sapiens
agcggagtacaatgcggccgcggggagcgcgggcccgcgggggaggggagcgccgccgcgccgggctcggcccctccccctctctgcgctctcttcgggatacacgtgggcttcgggcctgggccgcgcagtttttctttggctttctcgaatcatcgaggagactggcaaaattagtaatgtctttagactgcgtcactagcgccaatcgaattcgtagttgattgttctttgaattcacatttgagtcctcggttaaaacctcagttaaaaagcaggataaagtcgagctgctttggttctcggaacggaaaagcgtttttttgttgtttagaggcttggcctttatggggctcgtgtgtgttttaggggacggcaaaacagaacagaaaggcggagataaaaagaggggtgttaaaagaccacgagaagatcatggccgtggatattttgagtacattgaagagaacaagtatagcagagccaaatctcctcagccacctgttgaagaagaagatgaacacttcgatgacacagtggtttgtcttgatacttataattgtgatctacattttaaaatatcaagagatcgtctcagtgcttcttcccttacaatggagagttttgcttttctttgggctggaggaagagcatcctatggtgtgtcaaaaggcaaagtgtgttttgagatgaaggttacagagaagatcccagtaaggcatttatatacaaaagatattgacatacatgaagttcgtattggctggtcactaactacaagtggaatgttacttggtgaagaagaattttcttatgggtattctctaaaaggaataaaaacatgcaactgtgagactgaagattatggagaaaagtttgatgaaaatgatgtgattacatgttttgctaactttgaaagtgatgaagtagaactctcgtatgctaagaatggacaagatcttggcgttgccttcaaaatcagtaaggaagttcttgctggacggccactgttcccgcatgttctctgccacaactgtgcagttgaatttaattttggtcagaaggaaaagccatattttccaatacctgaagagtatactttcatccagaacgtccccttagaggatcgagttagaggaccaaaggggcctgaagagaagaaagattgtgaagttgtgatgatgattggcttgccaggagctggaaaaactacctgggttactaaacatgcagcagaaaatccagggaaatataacattcttggcacaaatactattatggataagatgatggtggcaggttttaagaagcaaatggcagatactggaaaactgaacacactgttgcagagagccccccagtgtcttgggaaatttattgagattgctgcccgaaagaagcgaaattttattctggatcagacaaatgtgtctgctgctgcccagaggagaaaaatgtgcctgtttgcaggcttccagcgaaaagctgttgtagtttgcccaaaagatgaagactataagcaaagaacacagaagaaagcagaagtagaggggaaagacctaccagaacatgcggtcctcaaaatgaaaggaaactttaccctcccagaggtagctgagtgctttgatgaaataacctatgttgaacttcagaaggaagaagcccaaaaactcttggagcaatataaggaagaaagcaaaaaggctcttccaccagaaaagaaacagaacactggctcaaagaaaagcaataaaaataagagtggcaagaaccagtttaacagaggtggtggccatagaggacgtggaggattcaatatgcgtggtggaaatttcagaggaggagcccctgggaatcgtggcggatataataggaggggcaacatgccacagagaggtggtggcggtggaggaagtggtggaatcggctatccataccctcgtgcccctgtttttcctggccgtggtagttactcaaacagagggaactacaacagaggtggaatgcccaacagagggaactacaaccagaacttcagaggacgaggaaacaatcgtggctacaaaaatcaatctcagggctacaaccagtggcagcagggtcaattctggggtcagaagccatggagtcagcattatcaccaaggatattattgaatacccaaataaaacgaactgatacatatttctccaaaaccttcacaagaagtcgactgttttctttagtaggctaactttttaaacattccacaagaggaagtgcctgcgggttccttttttagaagctttgtgggttgattttttttcttttcttttttgtacatttttaattgcagtttaaaagtgaatcgtaagagaacctcagcattgtgcacgataagagaatgtgtcagtatttcagggttctacattttatctgtaaaatgtgacttttttttttttttatcacaacagaagtaaaatgttgctttgtacctggtgtcttttattaagaatttactccccccatttctcacagagaataacagtcgggagtcattgtcacaatataatagaaatgttagcaaccagattcatgtaaggactaagtggtcctcatgaattgcattaagactctgtactgctcatattacactccatcctctctgtagtttgctgggtagtggagggggtaagctaaatcatagtttctgacaataactgggaaggttttttcttaaaataacaatggaattggtataattgggattgaaaactaaaacttggaactaagatagagaagatggagtgtatgtagaagggctgttaaaaatgtaaaacttggttgcattatttgtggaggctcaaacttgtgaaggttaataccataatttttccatttgttctgcattttgattctgaaaagaaagctggctttgcccatttcttattaaaaaaacttgttgtaaatccagttgtctaatgggatctatatgaagttagccatgtctgtatgcccttctcccacaaaatactgtataactagtgtgcttgtagtagttaactccaccatctttgtaagctaatgaaattgtgagtcacccatttatatcttaatttttaatcatgtcagttcttgaatgggtatctccttagcctgctgatttctttttctttctaaagaaagtgggtggagaaattaatttagacgtttgtttgcaataaaaagaattcattttactcttgttttgggattctcgccatcaaggttcaaaatccctttatataactcccaagaggagaaatttattaagtgtgtgctttctggacagcttattctttactctgcatagaacatttaggttttaaaaacttaaatgtatactgacaattgatacataattatgaagtaaagttgaattcttcccttcccctcccccccagacaacttttaacatatttaatgaggggaaaaggtactggctgggagaagttaacactgagtttatcatctttacagaatgctaatgctgtcctcaactgattattttatatacatatatatgatacatgaaactctgggatcagatgcttttagaagccatcatgcaagccagtcattgatgtcactgctacacaacactgctaacttgactgtagctatgtaataacattagatcccctaattgtaattatattgggtttgcacagaacactttaatcttcccctcaccaatgtgaagtgaggaatcaggagtcaaactgtagaactaaaatttgac

SEQ ID NO: 289922 - DNA, 3279 bp, Homo sapiens
agttcgacggaactctccatgtagggaagaagaagatgaacacttcgatgacacagtggtttgtcttgatacttataattgtgatctacattttaaaatatcaagagatcgtctcagtgcttcttcccttacaatggagagttttgcttttctttgggctggaggaagagcatcctatggtgtgtcaaaaggcaaagtgtgttttgagatgaaggttacagagaagatcccagtaaggcatttatatacaaaagatattgacatacatgaagttcgtattggctggtcactaactacaagtggaatgttacttggtgaagaagaattttcttatgggtattctctaaaaggaataaaaacatgcaactgtgagactgaagattatggagaaaagtttgatgaaaatgatgtgattacatgttttgctaactttgaaagtgatgaagtagaactctcgtatgctaagaatggacaagatcttggcgttgccttcaaaatcagtaaggaagttcttgctggacggccactgttcccgcatgttctctgccacaactgtgcagttgaatttaattttggtcagaaggaaaagccatattttccaatacctgaagagtatactttcatccagaacgtccccttagaggatcgagttagaggaccaaaggggcctgaagagaagaaagattgtgaagttgtgatgatgattggcttgccaggagctggaaaaactacctgggttactaaacatgcagcagaaaatccagggaaatataacattcttggcacaaatactattatggataagatgatggtggcaggttttaagaagcaaatggcagatactggaaaactgaacacactgttgcagagagccccccagtgtcttgggaaatttattgagattgctgcccgaaagaagcgaaattttattctggatcagacaaatgtgtctgctgctgcccagaggagaaaaatgtgcctgtttgcaggcttccagcgaaaagctgttgtagtttgcccaaaagatgaagactataagcaaagaacacagaagaaagcagaagtagaggggaaagacctaccagaacatgcggtcctcaaaatgaaaggaaactttaccctcccagaggtagctgagtgctttgatgaaataacctatgttgaacttcagaaggaagaagcccaaaaactcttggagcaatataaggaagaaagcaaaaaggctcttccaccagaaaagaaacagaacactggctcaaagaaaagcaataaaaataagagtggcaagaaccagtttaacagaggtggtggccatagaggacgtggaggattcaatatgcgtggtggaaatttcagaggaggagcccctgggaatcgtggcggatataataggaggggcaacatgccacagagaggtggtggcggtggaggaagtggtggaatcggctatccataccctcgtgcccctgtttttcctggccgtggtagttactcaaacagagggaactacaacagaggtggaatgcccaacagagggaactacaaccagaacttcagaggacgaggaaacaatcgtggctacaaaaatcaatctcagggctacaaccagtggcagcagggtcaattctggggtcagaagccatggagtcagcattatcaccaaggatattattgaatacccaaataaaacgaactgatacatatttctccaaaaccttcacaagaagtcgactgttttctttagtaggctaactttttaaacattccacaagaggaagtgcctgcgggttccttttttagaagctttgtgggttgattttttttcttttcttttttgtacatttttaattgcagtttaaaagtgaatcgtaagagaacctcagcattgtgcacgataagagaatgtgtcagtatttcagggttctacattttatctgtaaaatgtgacttttttttttttttatcacaacagaagtaaaatgttgctttgtacctggtgtcttttattaagaatttactccccccatttctcacagagaataacagtcgggagtcattgtcacaatataatagaaatgttagcaaccagattcatgtaaggactaagtggtcctcatgaattgcattaagactctgtactgctcatattacactccatcctctctgtagtttgctgggtagtggagggggtaagctaaatcatagtttctgacaataactgggaaggttttttcttaaaataacaatggaattggtataattgggattgaaaactaaaacttggaactaagatagagaagatggagtgtatgtagaagggctgttaaaaatgtaaaacttggttgcattatttgtggaggctcaaacttgtgaaggttaataccataatttttccatttgttctgcattttgattctgaaaagaaagctggctttgcccatttcttattaaaaaaacttgttgtaaatccagttgtctaatgggatctatatgaagttagccatgtctgtatgcccttctcccacaaaatactgtataactagtgtgcttgtagtagttaactccaccatctttgtaagctaatgaaattgtgagtcacccatttatatcttaatttttaatcatgtcagttcttgaatgggtatctccttagcctgctgatttctttttctttctaaagaaagtgggtggagaaattaatttagacgtttgtttgcaataaaaagaattcattttactcttgttttgggattctcgccatcaaggttcaaaatccctttatataactcccaagaggagaaatttattaagtgtgtgctttctggacagcttattctttactctgcatagaacatttaggttttaaaaacttaaatgtatactgacaattgatacataattatgaagtaaagttgaattcttcccttcccctcccccccagacaacttttaacatatttaatgaggggaaaaggtactggctgggagaagttaacactgagtttatcatctttacagaatgctaatgctgtcctcaactgattattttatatacatatatatgatacatgaaactctgggatcagatgcttttagaagccatcatgcaagccagtcattgatgtcactgctacacaacactgctaacttgactgtagctatgtaataacattagatcccctaattgtaattatattgggtttgcacagaacactttaatcttcccctcaccaatgtgaagtgaggaatcaggagtcaaactgtagaactaaaatttgac

SEQ ID NO: 289923 - DNA, 4218 bp, Homo sapiens
  misc_feature (56)..(57): n is a, c, g, or t
tacacgcatcagccaacaaagagaccaccccaaaacacttaggctagtacgaggcnngggtgagaactcggtgaaaggaattggcgccgttcgacaccaggcggatccgctctgcagcacgaacccatctccagccgcagccgcagccgccgcccgggccgaggagcagccgcagcagccgccaccagtggccgagtgagcggagccgagtttgaggcagcgcctagcggtgaatcggggccctcaccatgagttcctcgcctgttaatgtaaaaaagctgaaggtgtcggagctgaaagaggagctcaagaagcgacgcctttctgacaagggtctcaaggccgagctcatggagcgactccaggctgcgctggacgacgaggaggccgggggccgccccgccatggagcccgggaacggcagcctagacctgggcggggattccgctgggcgctcgggagcaggcctcgagcaggaggccgcggccggcggcgatgaagaggaggaagaagaggaagaggaggaggaaggaatctccgctctggacggcgaccagatggagctaggagaggagaacggggccgcgggggcggccgactcgggcccgatggaggaggaggaggccgcctcggaagacgagaacggcgacgatcagggtttccaggaaggggaagatgagctcggggacgaagaggaaggcgcgggcgacgagaacgggcacggggagcagcagcctcaaccgccggcgacgcagcagcaacagccccaacagcagcgcggggccgccaaggaggccgcggggaagagcagcggccccacctcgctgttcgcggtgacggtggcgccgcccggggcgaggcagggccagcagcaggcgggaggggacggcaaaacagaacagaaaggcggagataaaaagaggggtgttaaaagaccacgagaagatcatggccgtggatattttgagtacattgaagagaacaagtatagcagagccaaatctcctcagccacctgttgaagaagaagatgaacacttcgatgacacagtggtttgtcttgatacttataattgtgatctacattttaaaatatcaagagatcgtctcagtgcttcttcccttacaatggagagttttgcttttctttgggctggaggaagagcatcctatggtgtgtcaaaaggcaaagtgtgttttgagatgaaggttacagagaagatcccagtaaggcatttatatacaaaagatattgacatacatgaagttcgtattggctggtcactaactacaagtggaatgttacttggtgaagaagaattttcttatgggtattctctaaaaggaataaaaacatgcaactgtgagactgaagattatggagaaaagtttgatgaaaatgatgtgattacatgttttgctaactttgaaagtgatgaagtagaactctcgtatgctaagaatggacaagatcttggcgttgccttcaaaatcagtaaggaagttcttgctggacggccactgttcccgcatgttctctgccacaactgtgcagttgaatttaattttggtcagaaggaaaagccatattttccaatacctgaagagtatactttcatccagaacgtccccttagaggatcgagttagaggaccaaaggggcctgaagagaagaaagattgtgaagttgtgatgatgattggcttgccaggagctggaaaaactacctgggttactaaacatgcagcagaaaatccagggaaatataacattcttggcacaaatactattatggataagatgatggtggcaggttttaagaagcaaatggcagatactggaaaactgaacacactgttgcagagagccccccagtgtcttgggaaatttattgagattgctgcccgaaagaagcgaaattttattctggatcagacaaatgtgtctgctgctgcccagaggagaaaaatgtgcctgtttgcaggcttccagcgaaaagctgttgtagtttgcccaaaagatgaagactataagcaaagaacacagaagaaagcagaagtagaggggaaagacctaccagaacatgcggtcctcaaaatgaaaggaaactttaccctcccagaggtagctgagtgctttgatgaaataacctatgttgaacttcagaaggaagaagcccaaaaactcttggagcaatataaggaagaaagcaaaaaggctcttccaccagaaaagaaacagaacactggctcaaagaaaagcaataaaaataagagtggcaagaaccagtttaacagaggtggtggccatagaggacgtggaggattcaatatgcgtggtggaaatttcagaggaggagcccctgggaatcgtggcggatataataggaggggcaacatgccacagagaggtggtggcggtggaggaagtggtggaatcggctatccataccctcgtgcccctgtttttcctggccgtggtagttactcaaacagagggaactacaacagaggtggaatgcccaacagagggaactacaaccagaacttcagaggacgaggaaacaatcgtggctacaaaaatcaatctcagggctacaaccagtggcagcagggtcaattctggggtcagaagccatggagtcagcattatcaccaaggatattattgaatacccaaataaaacgaactgatacatatttctccaaaaccttcacaagaagtcgactgttttctttagtaggctaactttttaaacattccacaagaggaagtgcctgcgggttccttttttagaagctttgtgggttgattttttttcttttcttttttgtacatttttaattgcagtttaaaagtgaatcgtaagagaacctcagcattgtgcacgataagagaatgtgtcagtatttcagggttctacattttatctgtaaaatgtgacttttttttttttttatcacaacagaagtaaaatgttgctttgtacctggtgtcttttattaagaatttactccccccatttctcacagagaataacagtcgggagtcattgtcacaatataatagaaatgttagcaaccagattcatgtaaggactaagtggtcctcatgaattgcattaagactctgtactgctcatattacactccatcctctctgtagtttgctgggtagtggagggggtaagctaaatcatagtttctgacaataactgggaaggttttttcttaaaataacaatggagtgtatgtagaagggctgttaaaaatgtaaaacttggttgcattatttgtggaggctcaaacttgtgaaggttaataccataatttttccatttgttctgcattttgattctgaaaagaaagctggctttgcccatttcttattaaaaaaacttgttgtaaatccagttgtctaatgggatctatatgaagttagccatgtctgtatgcccttctcccacaaaatactgtataactagtgtgcttgtagtagttaactccaccatctttgtaagctaatgaaattgtgagtcacccatttatatcttaatttttaatcatgtcagttcttgaatgggtatctccttagcctgctgatttctttttctttctaaagaaagtgggtggagaaattaatttagacgtttgtttgcaataaaaagaattcattttactcttgttttgggattctcgccatcaaggttcaaaatccctttatataactcccaagaggagaaatttattaagtgtgtgctttctggacagcttattctttactctgcatagaacatttaggttttaaaaacttaaatgtatactgacaattgatacataattatgaagtaaagttgaattcttcccttcccctcccccccagacaacttttaacatatttaatgaggggaaaaggtactggctgggagaagttaacactgagtttatcatctttacagaatgctaatgctgtcctcaactgattattttatatacatatatatgatacatgaaactctgggatcagatgcttttagaagccatcatgcaagccagtcattgatgtcactgctacacaacactgctaacttgactgtagctatgtaataacattagatcccctaattgtaattatattgggtttgcacagaacactttaatcttcccctcaccaatgtgaagtgaggaatcaggagtcaaactgtagaactaaaatttgac

SEQ ID NO: 289924 - DNA, 2999 bp, Homo sapiens
aagatggagaaggcagtagacgaagtgggttttggtgaagaagaattttcttatgggtattctctaaaaggaataaaaacatgcaactgtgagactgaagattatggagaaaagtttgatgaaaatgatgtgattacatgttttgctaactttgaaagtgatgaagtagaactctcgtatgctaagaatggacaagatcttggcgttgccttcaaaatcagtaaggaagttcttgctggacggccactgttcccgcatgttctctgccacaactgtgcagttgaatttaattttggtcagaaggaaaagccatattttccaatacctgaagagtatactttcatccagaacgtccccttagaggatcgagttagaggaccaaaggggcctgaagagaagaaagattgtgaagttgtgatgatgattggcttgccaggagctggaaaaactacctgggttactaaacatgcagcagaaaatccagggaaatataacattcttggcacaaatactattatggataagatgatggtggcaggttttaagaagcaaatggcagatactggaaaactgaacacactgttgcagagagccccccagtgtcttgggaaatttattgagattgctgcccgaaagaagcgaaattttattctggatcagacaaatgtgtctgctgctgcccagaggagaaaaatgtgcctgtttgcaggcttccagcgaaaagctgttgtagtttgcccaaaagatgaagactataagcaaagaacacagaagaaagcagaagtagaggggaaagacctaccagaacatgcggtcctcaaaatgaaaggaaactttaccctcccagaggtagctgagtgctttgatgaaataacctatgttgaacttcagaaggaagaagcccaaaaactcttggagcaatataaggaagaaagcaaaaaggctcttccaccagaaaagaaacagaacactggctcaaagaaaagcaataaaaataagagtggcaagaaccagtttaacagaggtggtggccatagaggacgtggaggattcaatatgcgtggtggaaatttcagaggaggagcccctgggaatcgtggcggatataataggaggggcaacatgccacagagaggtggtggcggtggaggaagtggtggaatcggctatccataccctcgtgcccctgtttttcctggccgtggtagttactcaaacagagggaactacaacagaggtggaatgcccaacagagggaactacaaccagaacttcagaggacgaggaaacaatcgtggctacaaaaatcaatctcagggctacaaccagtggcagcagggtcaattctggggtcagaagccatggagtcagcattatcaccaaggatattattgaatacccaaataaaacgaactgatacatatttctccaaaaccttcacaagaagtcgactgttttctttagtaggctaactttttaaacattccacaagaggaagtgcctgcgggttccttttttagaagctttgtgggttgattttttttcttttcttttttgtacatttttaattgcagtttaaaagtgaatcgtaagagaacctcagcattgtgcacgataagagaatgtgtcagtatttcagggttctacattttatctgtaaaatgtgacttttttttttttttatcacaacagaagtaaaatgttgctttgtacctggtgtcttttattaagaatttactccccccatttctcacagagaataacagtcgggagtcattgtcacaatataatagaaatgttagcaaccagattcatgtaaggactaagtggtcctcatgaattgcattaagactctgtactgctcatattacactccatcctctctgtagtttgctgggtagtggagggggtaagctaaatcatagtttctgacaataactgggaaggttttttcttaaaataacaatggaattggtataattgggattgaaaactaaaacttggaactaagatagagaagatggagtgtatgtagaagggctgttaaaaatgtaaaacttggttgcattatttgtggaggctcaaacttgtgaaggttaataccataatttttccatttgttctgcattttgattctgaaaagaaagctggctttgcccatttcttattaaaaaaacttgttgtaaatccagttgtctaatgggatctatatgaagttagccatgtctgtatgcccttctcccacaaaatactgtataactagtgtgcttgtagtagttaactccaccatctttgtaagctaatgaaattgtgagtcacccatttatatcttaatttttaatcatgtcagttcttgaatgggtatctccttagcctgctgatttctttttctttctaaagaaagtgggtggagaaattaatttagacgtttgtttgcaataaaaagaattcattttactcttgttttgggattctcgccatcaaggttcaaaatccctttatataactcccaagaggagaaatttattaagtgtgtgctttctggacagcttattctttactctgcatagaacatttaggttttaaaaacttaaatgtatactgacaattgatacataattatgaagtaaagttgaattcttcccttcccctcccccccagacaacttttaacatatttaatgaggggaaaaggtactggctgggagaagttaacactgagtttatcatctttacagaatgctaatgctgtcctcaactgattattttatatacatatatatgatacatgaaactctgggatcagatgcttttagaagccatcatgcaagccagtcattgatgtcactgctacacaacactgctaacttgactgtagctatgtaataacattagatcccctaattgtaattatattgggtttgcacagaacactttaatcttcccctcaccaatgtgaagtgaggaatcaggagtcaaactgtagaactaaaatttgac

SEQ ID NO: 289925 - DNA, 3207 bp, Homo sapiens
  misc_feature (56)..(57): n is a, c, g, or t
tacacgcatcagccaacaaagagaccaccccaaaacacttaggctagtacgaggcnngggtgagaactcggtgaaaggaattggcgccgttcgacaccaggcggatccgctctgcagcacgaacccatctccagccgcagccgcagccgccgcccgggccgaggagcagccgcagcagccgccaccagtggccgagtgagcggagccgagtttgaggcagcgcctagcggtgaatcggggccctcaccatgagttcctcgcctgttaatgtaaaaaagctgaaggtgtcggagctgaaagaggagctcaagaagcgacgcctttctgacaagggtctcaaggccgagctcatggagcgactccaggctgcgctggacgacgaggaggccgggggccgccccgccatggagcccgggaacggcagcctagacctgggcggggattccgctgggcgctcgggagcaggcctcgagcaggaggccgcggccggcggcgatgaagaggaggaagaagaggaagaggaggaggaaggaatctccgctctggacggcgaccagatggagctaggagaggagaacggggccgcgggggcggccgactcgggcccgatggaggaggaggaggccgcctcggaagacgagaacggcgacgatcagggtttccaggaaggggaagatgagctcggggacgaagaggaaggcgcgggcgacgagaacgggcacggggagcagcagcctcaaccgccggcgacgcagcagcaacagccccaacagcagcgcggggccgccaaggaggccgcggggaagagcagcggccccacctcgctgttcgcggtgacggtggcgccgcccggggcgaggcagggccagcagcaggcgggaggggacggcaaaacagaacagaaaggcggagataaaaagaggggtgttaaaagaccacgagaagatcatggccgtggatattttgagtacattgaagagaacaagtatagcagagccaaatctcctcagccacctgttgaagaagaagatgaacacttcgatgacacagtggtttgtcttgatacttataattgtgatctacattttaaaatatcaagagatcgtctcagtgcttcttcccttacaatggagagttttgcttttctttgggctggaggaagagcatcctatggtgtgtcaaaaggcaaagtgtgttttgagatgaaggttacagagaagatcccagtaaggcatttatatacaaaagatattgacatacatgaagttcgtattggctggtcactaactacaagtggaatgttacttggtgaagaagaattttcttatgggtattctctaaaaggaataaaaacatgcaactgtgagactgaagattatggagaaaagtttgatgaaaatgatgtgattacatgttttgctaactttgaaagtgatgaagtagaactctcgtatgctaagaatggacaagatcttggcgttgccttcaaaatcagtaaggaagttcttgctggacggccactgttcccgcatgttctctgccacaactgtgcagttgaatttaattttggtcagaaggaaaagccatattttccaatacctgaagagtatactttcatccagaacgtccccttagaggatcgagttagaggaccaaaggggcctgaagagaagaaagattgtgaagttgtgatgatgattggcttgccaggagctggaaaaactacctgggttactaaacatgcagcagaaaatccagggaaatataacattcttggcacaaatactattatggataagatgatggtggcaggttttaagaagcaaatggcagatactggaaaactgaacacactgttgcagagagccccccagtgtcttgggaaatttattgagattgctgcccgaaagaagcgaaattttattctggatcagacaaatgtgtctgctgctgcccagaggagaaaaatgtgcctgtttgcaggcttccagcgaaaagctgttgtagtttgcccaaaagatgaagactataagcaaagaacacagaagaaagcagaagtagaggggaaagacctaccagaacatgcggtcctcaaaatgaaaggaaactttaccctcccagaggtagctgagtgctttgatgaaataacctatgttgaacttcagaaggaagaagcccaaaaactcttggagcaatataaggaagaaagcaaaaaggctcttccaccagaaaagaaacagaacactggctcaaagaaaagcaataaaaataagagtggcaagaaccagtttaacagaggtggtggccatagaggacgtggaggattcaatatgcgtggtggaaatttcagaggaggagcccctgggaatcgtggcggatataataggaggggcaacatgccacagagaggtggtggcggtggaggaagtggtggaatcggctatccataccctcgtgcccctgtttttcctggccgtggtagttactcaaacagagggaactacaacagaggtggaatgcccaacagagggaactacaaccagaacttcagaggacgaggaaacaatcgtggctacaaaaatcaatctcagggctacaaccagtggcagcagggtcaattctggggtcagaagccatggagtcagcattatcaccaaggatattattgaatacccaaataaaacgaactgatacatatttctccaaaaccttcacaagaagtcgactgttttctttagtaggctaactttttaaacattccacaagaggaagtgcctgcgggttccttttttagaagctttgtgggttgattttttttcttttcttttttgtacatttttaattgcagtttaaaagtgaatcgtaagagaacctcagcattgtgcacgataagagaatgtgtcagtatttcagggttctacattttatctgtaaaatgtgacttttttttttttttatcacaacagaagtaaaatgttgctttgtacctggtgtcttttattaagaatttactccccccatttctcacagagaataacagtcgggagtcattgtcacaatataatagaaatgttagcaaccagattcatgtaaggactaagtggtcctcatgaattgcattaagactctgtactgctcatattacactccatcctctctgtagtttgctgggtagtgttggggatacatcacgggtcctctaggtca

SEQ ID NO: 289926 - DNA, 4214 bp, Homo sapiens
  misc_feature (56)..(57): n is a, c, g, or t
tacacgcatcagccaacaaagagaccaccccaaaacacttaggctagtacgaggcnngggtgagaactcggtgaaaggaattggcgccgttcgacaccaggcggatccgctctgcagcacgaacccatctccagccgcagccgcagccgccgcccgggccgaggagcagccgcagcagccgccaccagtggccgagtgagcggagccgagtttgaggcagcgcctagcggtgaatcggggccctcaccatgagttcctcgcctgttaatgtaaaaaagctgaaggtgtcggagctgaaagaggagctcaagaagcgacgcctttctgacaagggtctcaaggccgagctcatggagcgactccaggctgcgctggacgacgaggaggccgggggccgccccgccatggagcccgggaacggcagcctagacctgggcggggattccgctgggcgctcgggagcaggcctcgagcaggaggccgcggccggcggcgatgaagaggaggaagaagaggaagaggaggaggaaggaatctccgctctggacggcgaccagatggagctaggagaggagaacggggccgcgggggcggccgactcgggcccgatggaggaggaggaggccgcctcggaagacgagaacggcgacgatcagggtttccaggaaggggaagatgagctcggggacgaagaggaaggcgcgggcgacgagaacgggcacggggagcagcagcctcaaccgccggcgacgcagcagcaacagccccaacagcagcgcggggccgccaaggaggccgcggggaagagcagcggccccacctcgctgttcgcggtgacggtggcgccgcccggggcgaggcagggccagcagcaggcgggaggggacggcaaaacagaacagaaaggcggagataaaaagaggggtgttaaaagaccacgagaagatcatggccgtggatattttgagtacattgaagagaacaagtatagcagagccaaatctcctcagccacctgttgaagaagaagatgaacacttcgatgacacagtggtttgtcttgatacttataattgtgatctacattttaaaatatcaagagatcgtctcagtgcttcttcccttacaatggagagttttgcttttctttgggctggaggaagagcatcctatggtgtgtcaaaaggcaaagtgtgttttgagatgaaggttacagagaagatcccagtaaggcatttatatacaaaagatattgacatacatgaagttcgtattggctggtcactaactacaagtggaatgttacttggtgaagaagaattttcttatgggtattctctaaaaggaataaaaacatgcaactgtgagactgaagattatggagaaaagtttgatgaaaatgatgtgattacatgttttgctaactttgaaagtgatgaagtagaactctcgtatgctaagaatggacaagatcttggcgttgccttcaaaatcagtaaggaagttcttgctggacggccactgttcccgcatgttctctgccacaactgtgcagttgaatttaattttggtcagaaggaaaagccatattttccaatacctgaagagtatactttcatccagaacgtccccttagaggatcgagttagaggaccaaaggggcctgaagagaagaaagattgtgaagttgtgatgatgattggcttgccaggagctggaaaaactacctgggttactaaacatgcagcagaaaatccagggaaatataacattcttggcacaaatactattatggataagatgatggtggcaggttttaagaagcaaatggcagatactggaaaactgaacacactgttgcagagagccccccagtgtcttgggaaatttattgagattgctgcccgaaagaagcgaaattttattctggatcagacaaatgtgtctgctgctgcccagaggagaaaaatgtgcctgtttgcaggcttccagcgaaaagctgttgtagtttgcccaaaagatgaagactataagcaaagaacacagaagaaagcagaagtagaggggaaagacctaccagaacatgcggtcctcaaaatgaaaggaaactttaccctcccagaggtagctgagtgctttgatgaaataacctatgttgaacttcagaaggaagaagcccaaaaactcttggagcaatataaggaagaaaaataagagtggcaagaaccagtttaacagaggtggtggccatagaggacgtggaggattcaatatgcgtggtggaaatttcagaggaggagcccctgggaatcgtggcggatataataggaggggcaacatgccacagagaggtggtggcggtggaggaagtggtggaatcggctatccataccctcgtgcccctgtttttcctggccgtggtagttactcaaacagagggaactacaacagaggtggaatgcccaacagagggaactacaaccagaacttcagaggacgaggaaacaatcgtggctacaaaaatcaatctcagggctacaaccagtggcagcagggtcaattctggggtcagaagccatggagtcagcattatcaccaaggatattattgaatacccaaataaaacgaactgatacatatttctccaaaaccttcacaagaagtcgactgttttctttagtaggctaactttttaaacattccacaagaggaagtgcctgcgggttccttttttagaagctttgtgggttgattttttttcttttcttttttgtacatttttaattgcagtttaaaagtgaatcgtaagagaacctcagcattgtgcacgataagagaatgtgtcagtatttcagggttctacattttatctgtaaaatgtgacttttttttttttttatcacaacagaagtaaaatgttgctttgtacctggtgtcttttattaagaatttactccccccatttctcacagagaataacagtcgggagtcattgtcacaatataatagaaatgttagcaaccagattcatgtaaggactaagtggtcctcatgaattgcattaagactctgtactgctcatattacactccatcctctctgtagtttgctgggtagtggagggggtaagctaaatcatagtttctgacaataactgggaaggttttttcttaaaataacaatggaattggtataattgggattgaaaactaaaacttggaactaagatagagaagatggagtgtatgtagaagggctgttaaaaatgtaaaacttggttgcattatttgtggaggctcaaacttgtgaaggttaataccataatttttccatttgttctgcattttgattctgaaaagaaagctggctttgcccatttcttattaaaaaaacttgttgtaaatccagttgtctaatgggatctatatgaagttagccatgtctgtatgcccttctcccacaaaatactgtataactagtgtgcttgtagtagttaactccaccatctttgtaagctaatgaaattgtgagtcacccatttatatcttaatttttaatcatgtcagttcttgaatgggtatctccttagcctgctgatttctttttctttctaaagaaagtgggtggagaaattaatttagacgtttgtttgcaataaaaagaattcattttactcttgttttgggattctcgccatcaaggttcaaaatccctttatataactcccaagaggagaaatttattaagtgtgtgctttctggacagcttattctttactctgcatagaacatttaggttttaaaaacttaaatgtatactgacaattgatacataattatgaagtaaagttgaattcttcccttcccctcccccccagacaacttttaacatatttaatgaggggaaaaggtactggctgggagaagttaacactgagtttatcatctttacagaatgctaatgctgtcctcaactgattattttatatacatatatatgatacatgaaactctgggatcagatgcttttagaagccatcatgcaagccagtcattgatgtcactgctacacaacactgctaacttgactgtagctatgtaataacattagatcccctaattgtaattatattgggtttgcacagaacactttaatcttcccctcaccaatgtgaagtgaggaatcaggagtcaaactgtagaactaaaatttgac

SEQ ID NO: 289927 - DNA, 2640 bp, Homo sapiens
tcgaatcgacctcgcccaacttatccagcagaaaagagaccagactgtgatagttgtgatgatgattggcttgccaggagctggaaaaactacctgggttactaaacatgcagcagaaaatccagggaaatataacattcttggcacaaatactattatggataagatgatggtggcaggttttaagaagcaaatggcagatactggaaaactgaacacactgttgcagagagccccccagtgtcttgggaaatttattgagattgctgcccgaaagaagcgaaattttattctggatcagacaaatgtgtctgctgctgcccagaggagaaaaatgtgcctgtttgcaggcttccagcgaaaagctgttgtagtttgcccaaaagatgaagactataagcaaagaacacagaagaaagcagaagtagaggggaaagacctaccagaacatgcggtcctcaaaatgaaaggaaactttaccctcccagaggtagctgagtgctttgatgaaataacctatgttgaacttcagaaggaagaagcccaaaaactcttggagcaatataaggaagaaagcaaaaaggctcttccaccagaaaagaaacagaacactggctcaaagaaaagcaataaaaataagagtggcaagaaccagtttaacagaggtggtggccatagaggacgtggaggattcaatatgcgtggtggaaatttcagaggaggagcccctgggaatcgtggcggatataataggaggggcaacatgccacagagaggtggtggcggtggaggaagtggtggaatcggctatccataccctcgtgcccctgtttttcctggccgtggtagttactcaaacagagggaactacaacagaggtggaatgcccaacagagggaactacaaccagaacttcagaggacgaggaaacaatcgtggctacaaaaatcaatctcagggctacaaccagtggcagcagggtcaattctggggtcagaagccatggagtcagcattatcaccaaggatattattgaatacccaaataaaacgaactgatacatatttctccaaaaccttcacaagaagtcgactgttttctttagtaggctaactttttaaacattccacaagaggaagtgcctgcgggttccttttttagaagctttgtgggttgattttttttcttttcttttttgtacatttttaattgcagtttaaaagtgaatcgtaagagaacctcagcattgtgcacgataagagaatgtgtcagtatttcagggttctacattttatctgtaaaatgtgacttttttttttttttatcacaacagaagtaaaatgttgctttgtacctggtgtcttttattaagaatttactccccccatttctcacagagaataacagtcgggagtcattgtcacaatataatagaaatgttagcaaccagattcatgtaaggactaagtggtcctcatgaattgcattaagactctgtactgctcatattacactccatcctctctgtagtttgctgggtagtggagggggtaagctaaatcatagtttctgacaataactgggaaggttttttcttaaaataacaatggaattggtataattgggattgaaaactaaaacttggaactaagatagagaagatggagtgtatgtagaagggctgttaaaaatgtaaaacttggttgcattatttgtggaggctcaaacttgtgaaggttaataccataatttttccatttgttctgcattttgattctgaaaagaaagctggctttgcccatttcttattaaaaaaacttgttgtaaatccagttgtctaatgggatctatatgaagttagccatgtctgtatgcccttctcccacaaaatactgtataactagtgtgcttgtagtagttaactccaccatctttgtaagctaatgaaattgtgagtcacccatttatatcttaatttttaatcatgtcagttcttgaatgggtatctccttagcctgctgatttctttttctttctaaagaaagtgggtggagaaattaatttagacgtttgtttgcaataaaaagaattcattttactcttgttttgggattctcgccatcaaggttcaaaatccctttatataactcccaagaggagaaatttattaagtgtgtgctttctggacagcttattctttactctgcatagaacatttaggttttaaaaacttaaatgtatactgacaattgatacataattatgaagtaaagttgaattcttcccttcccctcccccccagacaacttttaacatatttaatgaggggaaaaggtactggctgggagaagttaacactgagtttatcatctttacagaatgctaatgctgtcctcaactgattattttatatacatatatatgatacatgaaactctgggatcagatgcttttagaagccatcatgcaagccagtcattgatgtcactgctacacaacactgctaacttgactgtagctatgtaataacattagatcccctaattgtaattatattgggtttgcacagaacactttaatcttcccctcaccaatgtgaagtgaggaatcaggagtcaaactgtagaactaaaatttgac

SEQ ID NO: 289928 - DNA, 3079 bp, Homo sapiens
  misc_feature (56)..(57): n is a, c, g, or t
tacacgcatcagccaacaaagagaccaccccaaaacacttaggctagtacgaggcnngggtgagaactcggtgaaaggaattggcgccgttcgacaccaggcggatccgctctgcagcacgaacccatctccagccgcagccgcagccgccgcccgggccgaggagcagccgcagcagccgccaccagtggccgagtgagcggagccgagtttgaggcagcgcctagcggtgaatcggggccctcaccatgagttcctcgcctgttaatgtaaaaaagctgaaggtgtcggagctgaaagaggagctcaagaagcgacgcctttctgacaagggtctcaaggccgagctcatggagcgactccaggctgcgctggacgacgaggaggccgggggccgccccgccatggagcccgggaacggcagcctagacctgggcggggattccgctgggcgctcgggagcaggcctcgagcaggaggccgcggccggcggcgatgaagaggaggaagaagaggaagaggaggaggaaggaatctccgctctggacggcgaccagatggagctaggagaggagaacggggccgcgggggcggccgactcgggcccgatggaggaggaggaggccgcctcggaagacgagaacggcgacgatcagggtttccaggaaggggaagatgagctcggggacgaagaggaaggcgcgggcgacgagaacgggcacggggagcagcagcctcaaccgccggcgacgcagcagcaacagccccaacagcagcgcggggccgccaaggaggccgcggggaagagcagcggccccacctcgctgttcgcggtgacggtggcgccgcccggggcgaggcagggccagcagcaggcgggaggggacggcaaaacagaacagaaaggcggagataaaaagaggggtgttaaaagaccacgagaagatcatggccgtggatattttgagtacattgaagagaacaagtatagcagagccaaatctcctcagccacctgttgaagaagaagatgaacacttcgatgacacagtggtttgtcttgatacttataattgtgatctacattttaaaatatcaagagatcgtctcagtgcttcttcccttacaatggagagttttgcttttctttgggctggaggaagagcatcctatggtgtgtcaaaaggcaaagtgtgttttgagatgaaggttacagagaagatcccagtaaggcatttatatacaaaagatattgacatacatgaagttcgtattggctggtcactaactacaagtggaatgttacttggtgaagaagaattttcttatgggtattctctaaaaggaataaaaacatgcaactgtgagactgaagattatggagaaaagtttgatgaaaatgatgtgattacatgttttgctaactttgaaagtgatgaagtagaactctcgtatgctaagaatggacaagatcttggcgttgccttcaaaatcagtaaggaagttcttgctggacggccactgttcccgcatgttctctgccacaactgtgcagttgaatttaattttggtcagaaggaaaagccatattttccaatacctgaagagtatactttcatccagaacgtccccttagaggatcgagttagaggaccaaaggggcctgaagagaagaaagattgtgaagttgtgatgatgattggcttgccaggagctggaaaaactacctgggttactaaacatgcagcagaaaatccagggaaatataacattcttggcacaaatactattatggataagatgatggtggcaggttttaagaagcaaatggcagatactggaaaactgaacacactgttgcagagagccccccagtgtcttgggaaatttattgagattgctgcccgaaagaagcgaaattttattctggatcagacaaatgtgtctgctgctgcccagaggagaaaaatgtgcctgtttgcaggcttccagcgaaaagctgttgtagtttgcccaaaagatgaagactataagcaaagaacacagaagaaagcagaagtagaggggaaagacctaccagaacatgcggtcctcaaaatgaaaggaaactttaccctcccagaggtagctgagtgctttgatgaaataacctatgttgaacttcagaaggaagaagcccaaaaactcttggagcaatataaggaagaaagcaaaaaggctcttccaccagaaaagaaacagaacactggctcaaagaaaagcaataaaaataagagtggcaagaaccagtttaacagaggtggtggccatagaggacgtggaggattcaatatgcgtggtggaaatttcagaggaggagcccctgggaatcgtggcggatataataggaggggcaacatgccacagagaggtggtggcggtggaggaagtggtggaatcggctatccataccctcgtgcccctgtttttcctggccgtggtagttactcaaacagagggaactacaacagaggtggaatgcccaacagagggaactacaaccagaacttcagaggacgaggaaacaatcgtggctacaaaaatcaatctcagggctacaaccagtggcagcagggtcaattctggggtcagaagccatggagtcagcattatcaccaaggatattattgaatacccaaataaaacgaactgatacatatttctccaaaaccttcacaagaagtcgactgttttctttagtaggctaactttttaaacattccacaagaggaagtgcctgcgggttccttttttagaagctttgtgggttgattttttttcttttcttttttgtacatttttaattgcagtttaaaagtgaatcgtaagagaacctcagcattgtgcacgataagagaatgtgtcagtatttcagggttctacattttatctgtaaaatgtgacttttttttttttttatcacaacagaagtaaaatgttgctttgtactcgggaggctgaggcagaatcgcttgagcccaggaggcggaggttgcagtgagccaagatggcaccactgcactccagcctgggcaacagag

SEQ ID NO: 289929 - DNA, 2102 bp, Homo sapiens
gagatcgagctcggtaccggagacacttacgtagaaagcaaaaaggctcttccaccagaaaagaaacagaacactggctcaaagaaaagcaataaaaataagagtggcaagaaccagtttaacagaggtggtggccatagaggacgtggaggattcaatatgcgtggtggaaatttcagaggaggagcccctgggaatcgtggcggatataataggaggggcaacatgccacagagaggtggtggcggtggaggaagtggtggaatcggctatccataccctcgtgcccctgtttttcctggccgtggtagttactcaaacagagggaactacaacagaggtggaatgcccaacagagggaactacaaccagaacttcagaggacgaggaaacaatcgtggctacaaaaatcaatctcagggctacaaccagtggcagcagggtcaattctggggtcagaagccatggagtcagcattatcaccaaggatattattgaatacccaaataaaacgaactgatacatatttctccaaaaccttcacaagaagtcgactgttttctttagtaggctaactttttaaacattccacaagaggaagtgcctgcgggttccttttttagaagctttgtgggttgattttttttcttttcttttttgtacatttttaattgcagtttaaaagtgaatcgtaagagaacctcagcattgtgcacgataagagaatgtgtcagtatttcagggttctacattttatctgtaaaatgtgacttttttttttttttatcacaacagaagtaaaatgttgctttgtacctggtgtcttttattaagaatttactccccccatttctcacagagaataacagtcgggagtcattgtcacaatataatagaaatgttagcaaccagattcatgtaaggactaagtggtcctcatgaattgcattaagactctgtactgctcatattacactccatcctctctgtagtttgctgggtagtggagggggtaagctaaatcatagtttctgacaataactgggaaggttttttcttaaaataacaatggaattggtataattgggattgaaaactaaaacttggaactaagatagagaagatggagtgtatgtagaagggctgttaaaaatgtaaaacttggttgcattatttgtggaggctcaaacttgtgaaggttaataccataatttttccatttgttctgcattttgattctgaaaagaaagctggctttgcccatttcttattaaaaaaacttgttgtaaatccagttgtctaatgggatctatatgaagttagccatgtctgtatgcccttctcccacaaaatactgtataactagtgtgcttgtagtagttaactccaccatctttgtaagctaatgaaattgtgagtcacccatttatatcttaatttttaatcatgtcagttcttgaatgggtatctccttagcctgctgatttctttttctttctaaagaaagtgggtggagaaattaatttagacgtttgtttgcaataaaaagaattcattttactcttgttttgggattctcgccatcaaggttcaaaatccctttatataactcccaagaggagaaatttattaagtgtgtgctttctggacagcttattctttactctgcatagaacatttaggttttaaaaacttaaatgtatactgacaattgatacataattatgaagtaaagttgaattcttcccttcccctcccccccagacaacttttaacatatttaatgaggggaaaaggtactggctgggagaagttaacactgagtttatcatctttacagaatgctaatgctgtcctcaactgattattttatatacatatatatgatacatgaaactctgggatcagatgcttttagaagccatcatgcaagccagtcattgatgtcactgctacacaacactgctaacttgactgtagctatgtaataacattagatcccctaattgtaattatattgggtttgcacagaacactttaatcttcccctcaccaatgtgaagtgaggaatcaggagtcaaactgtagaactaaaatttgac

SEQ ID NO: 289930 - DNA, 2646 bp, Homo sapiens
  misc_feature (56)..(57): n is a, c, g, or t
tacacgcatcagccaacaaagagaccaccccaaaacacttaggctagtacgaggcnngggtgagaactcggtgaaaggaattggcgccgttcgacaccaggcggatccgctctgcagcacgaacccatctccagccgcagccgcagccgccgcccgggccgaggagcagccgcagcagccgccaccagtggccgagtgagcggagccgagtttgaggcagcgcctagcggtgaatcggggccctcaccatgagttcctcgcctgttaatgtaaaaaagctgaaggtgtcggagctgaaagaggagctcaagaagcgacgcctttctgacaagggtctcaaggccgagctcatggagcgactccaggctgcgctggacgacgaggaggccgggggccgccccgccatggagcccgggaacggcagcctagacctgggcggggattccgctgggcgctcgggagcaggcctcgagcaggaggccgcggccggcggcgatgaagaggaggaagaagaggaagaggaggaggaaggaatctccgctctggacggcgaccagatggagctaggagaggagaacggggccgcgggggcggccgactcgggcccgatggaggaggaggaggccgcctcggaagacgagaacggcgacgatcagggtttccaggaaggggaagatgagctcggggacgaagaggaaggcgcgggcgacgagaacgggcacggggagcagcagcctcaaccgccggcgacgcagcagcaacagccccaacagcagcgcggggccgccaaggaggccgcggggaagagcagcggccccacctcgctgttcgcggtgacggtggcgccgcccggggcgaggcagggccagcagcaggcgggaggggacggcaaaacagaacagaaaggcggagataaaaagaggggtgttaaaagaccacgagaagatcatggccgtggatattttgagtacattgaagagaacaagtatagcagagccaaatctcctcagccacctgttgaagaagaagatgaacacttcgatgacacagtggtttgtcttgatacttataattgtgatctacattttaaaatatcaagagatcgtctcagtgcttcttcccttacaatggagagttttgcttttctttgggctggaggaagagcatcctatggtgtgtcaaaaggcaaagtgtgttttgagatgaaggttacagagaagatcccagtaaggcatttatatacaaaagatattgacatacatgaagttcgtattggctggtcactaactacaagtggaatgttacttggtgaagaagaattttcttatgggtattctctaaaaggaataaaaacatgcaactgtgagactgaagattatggagaaaagtttgatgaaaatgatgtgattacatgttttgctaactttgaaagtgatgaagtagaactctcgtatgctaagaatggacaagatcttggcgttgccttcaaaatcagtaaggaagttcttgctggacggccactgttcccgcatgttctctgccacaactgtgcagttgaatttaattttggtcagaaggaaaagccatattttccaatacctgaagagtatactttcatccagaacgtccccttagaggatcgagttagaggaccaaaggggcctgaagagaagaaagattgtgaagttgtgatgatgattggcttgccaggagctggaaaaactacctgggttactaaacatgcagcagaaaatccagggaaatataacattcttggcacaaatactattatggataagatgatggtggcaggttttaagaagcaaatggcagatactggaaaactgaacacactgttgcagagagccccccagtgtcttgggaaatttattgagattgctgcccgaaagaagcgaaattttattctggatcagacaaatgtgtctgctgctgcccagaggagaaaaatgtgcctgtttgcaggcttccagcgaaaagctgttgtagtttgcccaaaagatgaagactataagcaaagaacacagaagaaagcagaagtagaggggaaagacctaccagaacatgcggtcctcaaaatgaaaggaaactttaccctcccagaggtagctgagtgctttgatgaaataacctatgttgaacttcagaaggaagaagcccaaaaactcttggagcaatataaggaagaaagcaaaaaggctcttccaccagaaaagaaacagaacactggctcaaagaaaagcaataaaaataagagtggcaagaaccagtttaacagaggtggtggccatagaggacgtggaggattcaatatgcgtggtggaaatttcagaggaggagcccctgggaatcgtggcggatataataggaggggcaacatgccacagagaggtggtggcggtggaggaagtggtggaatcggctatccataccctcgtgcccctgtttttcctggccgtggtagttactcaaacagagggaactacaacagaggtggaatgcccaacagagggaactacaaccagaacttcagaggacgaggaaacaatcgtggctacaaaaatcaatctcagggctacaaccagtggcagcagggtcattctgtcgactggtcgcatatcattcgga

SEQ ID NO: 289931 - DNA, 2647 bp, Homo sapiens
  misc_feature (56)..(57): n is a, c, g, or t
tacacgcatcagccaacaaagagaccaccccaaaacacttaggctagtacgaggcnngggtgagaactcggtgaaaggaattggcgccgttcgacaccaggcggatccgctctgcagcacgaacccatctccagccgcagccgcagccgccgcccgggccgaggagcagccgcagcagccgccaccagtggccgagtgagcggagccgagtttgaggcagcgcctagcggtgaatcggggccctcaccatgagttcctcgcctgttaatgtaaaaaagctgaaggtgtcggagctgaaagaggagctcaagaagcgacgcctttctgacaagggtctcaaggccgagctcatggagcgactccaggctgcgctggacgacgaggaggccgggggccgccccgccatggagcccgggaacggcagcctagacctgggcggggattccgctgggcgctcgggagcaggcctcgagcaggaggccgcggccggcggcgatgaagaggaggaagaagaggaagaggaggaggaaggaatctccgctctggacggcgaccagatggagctaggagaggagaacggggccgcgggggcggccgactcgggcccgatggaggaggaggaggccgcctcggaagacgagaacggcgacgatcagggtttccaggaaggggaagatgagctcggggacgaagaggaaggcgcgggcgacgagaacgggcacggggagcagcagcctcaaccgccggcgacgcagcagcaacagccccaacagcagcgcggggccgccaaggaggccgcggggaagagcagcggccccacctcgctgttcgcggtgacggtggcgccgcccggggcgaggcagggccagcagcaggcgggaggggacggcaaaacagaacagaaaggcggagataaaaagaggggtgttaaaagaccacgagaagatcatggccgtggatattttgagtacattgaagagaacaagtatagcagagccaaatctcctcagccacctgttgaagaagaagatgaacacttcgatgacacagtggtttgtcttgatacttataattgtgatctacattttaaaatatcaagagatcgtctcagtgcttcttcccttacaatggagagttttgcttttctttgggctggaggaagagcatcctatggtgtgtcaaaaggcaaagtgtgttttgagatgaaggttacagagaagatcccagtaaggcatttatatacaaaagatattgacatacatgaagttcgtattggctggtcactaactacaagtggaatgttacttggtgaagaagaattttcttatgggtattctctaaaaggaataaaaacatgcaactgtgagactgaagattatggagaaaagtttgatgaaaatgatgtgattacatgttttgctaactttgaaagtgatgaagtagaactctcgtatgctaagaatggacaagatcttggcgttgccttcaaaatcagtaaggaagttcttgctggacggccactgttcccgcatgttctctgccacaactgtgcagttgaatttaattttggtcagaaggaaaagccatattttccaatacctgaagagtatactttcatccagaacgtccccttagaggatcgagttagaggaccaaaggggcctgaagagaagaaagattgtgaagttgtgatgatgattggcttgccaggagctggaaaaactacctgggttactaaacatgcagcagaaaatccagggaaatataacattcttggcacaaatactattatggataagatgatggtggcaggttttaagaagcaaatggcagatactggaaaactgaacacactgttgcagagagccccccagtgtcttgggaaatttattgagattgctgcccgaaagaagcgaaattttattctggatcagacaaatgtgtctgctgctgcccagaggagaaaaatgtgcctgtttgcaggcttccagcgaaaagctgttgtagtttgcccaaaagatgaagactataagcaaagaacacagaagaaagcagaagtagaggggaaagacctaccagaacatgcggtcctcaaaatgaaaggaaactttaccctcccagaggtagctgagtgctttgatgaaataacctatgttgaacttcagaaggaagaagcccaaaaactcttggagcaatataaggaagaaagcaaaaaggctcttccaccagaaaagaaacagaacactggctcaaagaaaagcaataaaaataagagtggcaagaaccagtttaacagaggtggtggccatagaggacgtggaggattcaatatgcgtggtggaaatttcagaggaggagcccctgggaatcgtggcggatataataggaggggcaacatgccacagagaggtggtggcggtggaggaagtggtggaatcggctatccataccctcgtgcccctgtttttcctggccgtggtagttactcaaacagagggaactacaacagaggtggaatgcccaacagagggaactacaaccagaacttcagaggacgaggaaacaatcgtggctacaaaaatcaatctcagggctacaaccagtggcagcagggtatggaggtggtctggcttagatgttgccggtg

SEQ ID NO: 289932 - DNA, 1857 bp, Homo sapiens
attcgagcctcggtacccactatcgctaagtaaccctcgtgcccctgtttttcctggccgtggtagttactcaaacagagggaactacaacagaggtggaatgcccaacagagggaactacaaccagaacttcagaggacgaggaaacaatcgtggctacaaaaatcaatctcagggctacaaccagtggcagcagggtcaattctggggtcagaagccatggagtcagcattatcaccaaggatattattgaatacccaaataaaacgaactgatacatatttctccaaaaccttcacaagaagtcgactgttttctttagtaggctaactttttaaacattccacaagaggaagtgcctgcgggttccttttttagaagctttgtgggttgattttttttcttttcttttttgtacatttttaattgcagtttaaaagtgaatcgtaagagaacctcagcattgtgcacgataagagaatgtgtcagtatttcagggttctacattttatctgtaaaatgtgacttttttttttttttatcacaacagaagtaaaatgttgctttgtacctggtgtcttttattaagaatttactccccccatttctcacagagaataacagtcgggagtcattgtcacaatataatagaaatgttagcaaccagattcatgtaaggactaagtggtcctcatgaattgcattaagactctgtactgctcatattacactccatcctctctgtagtttgctgggtagtggagggggtaagctaaatcatagtttctgacaataactgggaaggttttttcttaaaataacaatggaattggtataattgggattgaaaactaaaacttggaactaagatagagaagatggagtgtatgtagaagggctgttaaaaatgtaaaacttggttgcattatttgtggaggctcaaacttgtgaaggttaataccataatttttccatttgttctgcattttgattctgaaaagaaagctggctttgcccatttcttattaaaaaaacttgttgtaaatccagttgtctaatgggatctatatgaagttagccatgtctgtatgcccttctcccacaaaatactgtataactagtgtgcttgtagtagttaactccaccatctttgtaagctaatgaaattgtgagtcacccatttatatcttaatttttaatcatgtcagttcttgaatgggtatctccttagcctgctgatttctttttctttctaaagaaagtgggtggagaaattaatttagacgtttgtttgcaataaaaagaattcattttactcttgttttgggattctcgccatcaaggttcaaaatccctttatataactcccaagaggagaaatttattaagtgtgtgctttctggacagcttattctttactctgcatagaacatttaggttttaaaaacttaaatgtatactgacaattgatacataattatgaagtaaagttgaattcttcccttcccctcccccccagacaacttttaacatatttaatgaggggaaaaggtactggctgggagaagttaacactgagtttatcatctttacagaatgctaatgctgtcctcaactgattattttatatacatatatatgatacatgaaactctgggatcagatgcttttagaagccatcatgcaagccagtcattgatgtcactgctacacaacactgctaacttgactgtagctatgtaataacattagatcccctaattgtaattatattgggtttgcacagaacactttaatcttcccctcaccaatgtgaagtgaggaatcaggagtcaaactgtagaactaaaatttgac

SEQ ID NO: 289933 - DNA, 2700 bp, Homo sapiens
  misc_feature (56)..(57): n is a, c, g, or t
tacacgcatcagccaacaaagagaccaccccaaaacacttaggctagtacgaggcnngggtgagaactcggtgaaaggaattggcgccgttcgacaccaggcggatccgctctgcagcacgaacccatctccagccgcagccgcagccgccgcccgggccgaggagcagccgcagcagccgccaccagtggccgagtgagcggagccgagtttgaggcagcgcctagcggtgaatcggggccctcaccatgagttcctcgcctgttaatgtaaaaaagctgaaggtgtcggagctgaaagaggagctcaagaagcgacgcctttctgacaagggtctcaaggccgagctcatggagcgactccaggctgcgctggacgacgaggaggccgggggccgccccgccatggagcccgggaacggcagcctagacctgggcggggattccgctgggcgctcgggagcaggcctcgagcaggaggccgcggccggcggcgatgaagaggaggaagaagaggaagaggaggaggaaggaatctccgctctggacggcgaccagatggagctaggagaggagaacggggccgcgggggcggccgactcgggcccgatggaggaggaggaggccgcctcggaagacgagaacggcgacgatcagggtttccaggaaggggaagatgagctcggggacgaagaggaaggcgcgggcgacgagaacgggcacggggagcagcagcctcaaccgccggcgacgcagcagcaacagccccaacagcagcgcggggccgccaaggaggccgcggggaagagcagcggccccacctcgctgttcgcggtgacggtggcgccgcccggggcgaggcagggccagcagcaggcgggaggggacggcaaaacagaacagaaaggcggagataaaaagaggggtgttaaaagaccacgagaagatcatggccgtggatattttgagtacattgaagagaacaagtatagcagagccaaatctcctcagccacctgttgaagaagaagatgaacacttcgatgacacagtggtttgtcttgatacttataattgtgatctacattttaaaatatcaagagatcgtctcagtgcttcttcccttacaatggagagttttgcttttctttgggctggaggaagagcatcctatggtgtgtcaaaaggcaaagtgtgttttgagatgaaggttacagagaagatcccagtaaggcatttatatacaaaagatattgacatacatgaagttcgtattggctggtcactaactacaagtggaatgttacttggtgaagaagaattttcttatgggtattctctaaaaggaataaaaacatgcaactgtgagactgaagattatggagaaaagtttgatgaaaatgatgtgattacatgttttgctaactttgaaagtgatgaagtagaactctcgtatgctaagaatggacaagatcttggcgttgccttcaaaatcagtaaggaagttcttgctggacggccactgttcccgcatgttctctgccacaactgtgcagttgaatttaattttggtcagaaggaaaagccatattttccaatacctgaagagtatactttcatccagaacgtccccttagaggatcgagttagaggaccaaaggggcctgaagagaagaaagattgtgaagttgtgatgatgattggcttgccaggagctggaaaaactacctgggttactaaacatgcagcagaaaatccagggaaatataacattcttggcacaaatactattatggataagatgatggtggcaggttttaagaagcaaatggcagatactggaaaactgaacacactgttgcagagagccccccagtgtcttgggaaatttattgagattgctgcccgaaagaagcgaaattttattctggatcagacaaatgtgtctgctgctgcccagaggagaaaaatgtgcctgtttgcaggcttccagcgaaaagctgttgtagtttgcccaaaagatgaagactataagcaaagaacacagaagaaagcagaagtagaggggaaagacctaccagaacatgcggtcctcaaaatgaaaggaaactttaccctcccagaggtagctgagtgctttgatgaaataacctatgttgaacttcagaaggaagaagcccaaaaactcttggagcaatataaggaagaaagcaaaaaggctcttccaccagaaaagaaacagaacactggctcaaagaaaagcaataaaaataagagtggcaagaaccagtttaacagaggtggtggccatagaggacgtggaggattcaatatgcgtggtggaaatttcagaggaggagcccctgggaatcgtggcggatataataggaggggcaacatgccacagagaggtggtggagggggtaagctaaatcatagtttctgacaataactgggaaggttttttcttaaaataacaatggaattggtataattgggattgaaaactaaaacttggaactaagatagagaagatggagtgtatgtagaagggctgttaaaaatgtaaaacttggttgcattatttgtggaggctcaaacttgtgaaggttaataccataatttttccatttgttctgcattttgattctgaaaagaaagctggctttgcccatttcttattaaaaaaacttgttgtaaat

SEQ ID NO: 289934 - DNA, 2185 bp, Homo sapiens
  misc_feature (56)..(57): n is a, c, g, or t
tacacgcatcagccaacaaagagaccaccccaaaacacttaggctagtacgaggcnngggtgagaactcggtgaaaggaattggcgccgttcgacaccaggcggatccgctctgcagcacgaacccatctccagccgcagccgcagccgccgcccgggccgaggagcagccgcagcagccgccaccagtggccgagtgagcggagccgagtttgaggcagcgcctagcggtgaatcggggccctcaccatgagttcctcgcctgttaatgtaaaaaagctgaaggtgtcggagctgaaagaggagctcaagaagcgacgcctttctgacaagggtctcaaggccgagctcatggagcgactccaggctgcgctggacgacgaggaggccgggggccgccccgccatggagcccgggaacggcagcctagacctgggcggggattccgctgggcgctcgggagcaggcctcgagcaggaggccgcggccggcggcgatgaagaggaggaagaagaggaagaggaggaggaaggaatctccgctctggacggcgaccagatggagctaggagaggagaacggggccgcgggggcggccgactcgggcccgatggaggaggaggaggccgcctcggaagacgagaacggcgacgatcagggtttccaggaaggggaagatgagctcggggacgaagaggaaggcgcgggcgacgagaacgggcacggggagcagcagcctcaaccgccggcgacgcagcagcaacagccccaacagcagcgcggggccgccaaggaggccgcggggaagagcagcggccccacctcgctgttcgcggtgacggtggcgccgcccggggcgaggcagggccagcagcaggcgggaggggacggcaaaacagaacagaaaggcggagataaaaagaggggtgttaaaagaccacgagaagatcatggccgtggatattttgagtacattgaagagaacaagtatagcagagccaaatctcctcagccacctgttgaagaagaagatgaacacttcgatgacacagtggtttgtcttgatacttataattgtgatctacattttaaaatatcaagagatcgtctcagtgcttcttcccttacaatggagagttttgcttttctttgggctggaggaagagcatcctatggtgtgtcaaaaggcaaagtgtgttttgagatgaaggttacagagaagatcccagtaaggcatttatatacaaaagatattgacatacatgaagttcgtattggctggtcactaactacaagtggaatgttacttggtgaagaagaattttcttatgggtattctctaaaaggaataaaaacatgcaactgtgagactgaagattatggagaaaagtttgatgaaaatgatgtgattacatgttttgctaactttgaaagtgatgaagtagaactctcgtatgctaagaatggacaagatcttggcgttgccttcaaaatcagtaaggaagttcttgctggacggccactgttcccgcatgttctctgccacaactgtgcagttgaatttaattttggtcagaaggaaaagccatattttccaatacctgaagagtatactttcatccagaacgtccccttagaggatcgagttagaggaccaaaggggcctgaagagaagaaagattgtgaagttgtgatgatgattggcttgccaggagctggaaaaactacctgggttactaaacatgcagcagaaaatccagggaaatataacattcttggcacaaatactattatggataagatgatggtggcaggttttaagaagcaaatggcagatactggaaaactgaacacactgttgcagagagccccccagtgtcttgggaaatttattgagattgctgcccgaaagaagcgaaattttattctggatcagacaaatgtgtctgctgctgcccagaggagaaaaatgtgcctgtttgcaggcttccagcgaaaagctgttgtagtttgcccaaaagatgaagactataagcaaagaacacagaagaaagcagaagtagaggggaaagacctaccagaacatgcggtcctcaaaatgaaaggaaactttaccctcccagaggtacctcaggtgtcttttcgccagtcataaaccgtatgttagaacgtatcgtgacaaggtaa

SEQ ID NO: 289935 - DNA, 2144 bp, Homo sapiens
  misc_feature (56)..(57): n is a, c, g, or t
tacacgcatcagccaacaaagagaccaccccaaaacacttaggctagtacgaggcnngggtgagaactcggtgaaaggaattggcgccgttcgacaccaggcggatccgctctgcagcacgaacccatctccagccgcagccgcagccgccgcccgggccgaggagcagccgcagcagccgccaccagtggccgagtgagcggagccgagtttgaggcagcgcctagcggtgaatcggggccctcaccatgagttcctcgcctgttaatgtaaaaaagctgaaggtgtcggagctgaaagaggagctcaagaagcgacgcctttctgacaagggtctcaaggccgagctcatggagcgactccaggctgcgctggacgacgaggaggccgggggccgccccgccatggagcccgggaacggcagcctagacctgggcggggattccgctgggcgctcgggagcaggcctcgagcaggaggccgcggccggcggcgatgaagaggaggaagaagaggaagaggaggaggaaggaatctccgctctggacggcgaccagatggagctaggagaggagaacggggccgcgggggcggccgactcgggcccgatggaggaggaggaggccgcctcggaagacgagaacggcgacgatcagggtttccaggaaggggaagatgagctcggggacgaagaggaaggcgcgggcgacgagaacgggcacggggagcagcagcctcaaccgccggcgacgcagcagcaacagccccaacagcagcgcggggccgccaaggaggccgcggggaagagcagcggccccacctcgctgttcgcggtgacggtggcgccgcccggggcgaggcagggccagcagcaggcgggaggggacggcaaaacagaacagaaaggcggagataaaaagaggggtgttaaaagaccacgagaagatcatggccgtggatattttgagtacattgaagagaacaagtatagcagagccaaatctcctcagccacctgttgaagaagaagatgaacacttcgatgacacagtggtttgtcttgatacttataattgtgatctacattttaaaatatcaagagatcgtctcagtgcttcttcccttacaatggagagttttgcttttctttgggctggaggaagagcatcctatggtgtgtcaaaaggcaaagtgtgttttgagatgaaggttacagagaagatcccagtaaggcatttatatacaaaagatattgacatacatgaagttcgtattggctggtcactaactacaagtggaatgttacttggtgaagaagaattttcttatgggtattctctaaaaggaataaaaacatgcaactgtgagactgaagattatggagaaaagtttgatgaaaatgatgtgattacatgttttgctaactttgaaagtgatgaagtagaactctcgtatgctaagaatggacaagatcttggcgttgccttcaaaatcagtaaggaagttcttgctggacggccactgttcccgcatgttctctgccacaactgtgcagttgaatttaattttggtcagaaggaaaagccatattttccaatacctgaagagtatactttcatccagaacgtccccttagaggatcgagttagaggaccaaaggggcctgaagagaagaaagattgtgaagttgtgatgatgattggcttgccaggagctggaaaaactacctgggttactaaacatgcagcagaaaatccagggaaatataacattcttggcacaaatactattatggataagatgatggtggcaggttttaagaagcaaatggcagatactggaaaactgaacacactgttgcagagagccccccagtgtcttgggaaatttattgagattgctgcccgaaagaagcgaaattttattctggatcagacaaatgtgtctgctgctgcccagaggagaaaaatgtgcctgtttgcaggcttccagcgaaaagctgttgtagtttgcccaaaagatgaagactataagcaaagaacacagaagaaagcagaagtagaggggaaagacctaccagaacatgcggtcctcaaaatgaaaggaaactttaccctctactctagctttcttttgttagtgtgt

SEQ ID NO: 289936 - DNA, 2141 bp, Homo sapiens
  misc_feature (56)..(57): n is a, c, g, or t
tacacgcatcagccaacaaagagaccaccccaaaacacttaggctagtacgaggcnngggtgagaactcggtgaaaggaattggcgccgttcgacaccaggcggatccgctctgcagcacgaacccatctccagccgcagccgcagccgccgcccgggccgaggagcagccgcagcagccgccaccagtggccgagtgagcggagccgagtttgaggcagcgcctagcggtgaatcggggccctcaccatgagttcctcgcctgttaatgtaaaaaagctgaaggtgtcggagctgaaagaggagctcaagaagcgacgcctttctgacaagggtctcaaggccgagctcatggagcgactccaggctgcgctggacgacgaggaggccgggggccgccccgccatggagcccgggaacggcagcctagacctgggcggggattccgctgggcgctcgggagcaggcctcgagcaggaggccgcggccggcggcgatgaagaggaggaagaagaggaagaggaggaggaaggaatctccgctctggacggcgaccagatggagctaggagaggagaacggggccgcgggggcggccgactcgggcccgatggaggaggaggaggccgcctcggaagacgagaacggcgacgatcagggtttccaggaaggggaagatgagctcggggacgaagaggaaggcgcgggcgacgagaacgggcacggggagcagcagcctcaaccgccggcgacgcagcagcaacagccccaacagcagcgcggggccgccaaggaggccgcggggaagagcagcggccccacctcgctgttcgcggtgacggtggcgccgcccggggcgaggcagggccagcagcaggcgggaggggacggcaaaacagaacagaaaggcggagataaaaagaggggtgttaaaagaccacgagaagatcatggccgtggatattttgagtacattgaagagaacaagtatagcagagccaaatctcctcagccacctgttgaagaagaagatgaacacttcgatgacacagtggtttgtcttgatacttataattgtgatctacattttaaaatatcaagagatcgtctcagtgcttcttcccttacaatggagagttttgcttttctttgggctggaggaagagcatcctatggtgtgtcaaaaggcaaagtgtgttttgagatgaaggttacagagaagatcccagtaaggcatttatatacaaaagatattgacatacatgaagttcgtattggctggtcactaactacaagtggaatgttacttggtgaagaagaattttcttatgggtattctctaaaaggaataaaaacatgcaactgtgagactgaagattatggagaaaagtttgatgaaaatgatgtgattacatgttttgctaactttgaaagtgatgaagtagaactctcgtatgctaagaatggacaagatcttggcgttgccttcaaaatcagtaaggaagttcttgctggacggccactgttcccgcatgttctctgccacaactgtgcagttgaatttaattttggtcagaaggaaaagccatattttccaatacctgaagagtatactttcatccagaacgtccccttagaggatcgagttagaggaccaaaggggcctgaagagaagaaagattgtgaagttgtgatgatgattggcttgccaggagctggaaaaactacctgggttactaaacatgcagcagaaaatccagggaaatataacattcttggcacaaatactattatggataagatgatggtaagtaaaatgtttagggcctgatctcagtgtttaaaatagactgggagaggctgggcatggtggttcacgcctgtaatctcagcattttgagaggctgaggtggatggatcacctgaggtcaggagtttgagacccacctggccaacatggcgaagccccgttcctactaaaaatttaaaaattagctgggtgtggtagtgggttcctgtaatcccagctgctcgggaggttgaggcagggacaattacttgaacctgggaggcagaggttgcagtgagttgagatcgtgccattgtactccagtctgggcgacagagcaacactccgtctcag

SEQ ID NO: 289937 - DNA, 1840 bp, Homo sapiens
  misc_feature (56)..(57): n is a, c, g, or t
tacacgcatcagccaacaaagagaccaccccaaaacacttaggctagtacgaggcnngggtgagaactcggtgaaaggaattggcgccgttcgacaccaggcggatccgctctgcagcacgaacccatctccagccgcagccgcagccgccgcccgggccgaggagcagccgcagcagccgccaccagtggccgagtgagcggagccgagtttgaggcagcgcctagcggtgaatcggggccctcaccatgagttcctcgcctgttaatgtaaaaaagctgaaggtgtcggagctgaaagaggagctcaagaagcgacgcctttctgacaagggtctcaaggccgagctcatggagcgactccaggctgcgctggacgacgaggaggccgggggccgccccgccatggagcccgggaacggcagcctagacctgggcggggattccgctgggcgctcgggagcaggcctcgagcaggaggccgcggccggcggcgatgaagaggaggaagaagaggaagaggaggaggaaggaatctccgctctggacggcgaccagatggagctaggagaggagaacggggccgcgggggcggccgactcgggcccgatggaggaggaggaggccgcctcggaagacgagaacggcgacgatcagggtttccaggaaggggaagatgagctcggggacgaagaggaaggcgcgggcgacgagaacgggcacggggagcagcagcctcaaccgccggcgacgcagcagcaacagccccaacagcagcgcggggccgccaaggaggccgcggggaagagcagcggccccacctcgctgttcgcggtgacggtggcgccgcccggggcgaggcagggccagcagcaggcgggaggggacggcaaaacagaacagaaaggcggagataaaaagaggggtgttaaaagaccacgagaagatcatggccgtggatattttgagtacattgaagagaacaagtatagcagagccaaatctcctcagccacctgttgaagaagaagatgaacacttcgatgacacagtggtttgtcttgatacttataattgtgatctacattttaaaatatcaagagatcgtctcagtgcttcttcccttacaatggagagttttgcttttctttgggctggaggaagagcatcctatggtgtgtcaaaaggcaaagtgtgttttgagatgaaggttacagagaagatcccagtaaggcatttatatacaaaagatattgacatacatgaagttcgtattggctggtcactaactacaagtggaatgttacttggtgaagaagaattttcttatgggtattctctaaaaggaataaaaacatgcaactgtgagactgaagattatggagaaaagtttgatgaaaatgatgtgattacatgttttgctaactttgaaagtgatgaagtagaactctcgtatgctaagaatggacaagatcttggcgttgccttcaaaatcagtaaggaagttcttgctggacggccactgttcccgcatgttctctgccacaactgtgcagttgaatttaattttggtcagaaggaaaagccatattttccaatacctgaagagtatactttcatccagaacgtccccttagaggatcgagttagaggaccaaaggggcctgaagagaagaaagattgtgaagttgtgatgatgattggcttgccaggagctggaaaaactacctgggttactaaacatgcagcagtatctgccatttgcttcttaaaacctgccaccatcatcttatccataatagtatttgtgccaagaatgttatatttccctggatgtcgagc

SEQ ID NO: 289938 - DNA, 715 bp, Homo sapiens
gaatcgtggcggatataataggaggggcaacatgccacagagaggtggtggcggtggaggaagtggtggaatcggctatccataccctcgtgcccctgtttttcctggccgtggtagttactcaaacagagggaactacaacagaggtggaatgcccaacagagggaactacaaccaggtaatgattcaagatccctggaagcatgattgataactgtagcttagtctggaaaggtgtgagctttatgttggggtgtcttagtaatccgtaaggaacatgataggcattgacataaggaaaattgaactagtaatggtgaaatgagtctacttacttttgagttttttcaggtgtactaaacaagtcagatgcatttctcataatgaataaaaaattaaaacataagaaaccagcagagggtatccagaatttgtgtattgcttgctacctaagattaggggctagcaacctgtccatttctgctcctctctctcacccccacaaacctaacaagcaattgggctcagagctcttagagagtatttcctttttgtagaacttcagaggacgaggaaacaatcgtggctacaaaaatcaatctcagggctacaaccagtggcagcagggtgtaagtaatttcttatgtgctttatgtacattaattgtattttgagttcctaagatttatcagtcttgaaaaagatcttgtacagg

SEQ ID NO: 289939 - DNA, 298 bp, Homo sapiens
  misc_feature (255)..(255): n is a, c, g, or t
tactactactaaattcgcggccgcgtcgactcacagactgtagagttttgaaaagtcacttttatttttaattattttacatatgcaacatgaagaaatcgtgtaggtgggttttttttttaataacaaaatcactgtttaaagaaacagtggcatagactccttcacacatcactgtggcaccagcaactacttcttttttttgagattcatattttatttacaagtaaatgaagactgtccctgtaaactctnatttgggatatgaagaacaatataagtcgacgcggccgcgaat

SEQ ID NO: 289940 - DNA, 1129 bp, Homo sapiens
ccgaaagctgagggacggaggtcagtgactctggggtctcgggaacccggagacgaaggaagacaccgtgttccttaagagggagtatacgtttcctcgccatttatccaatggagtttcctcttacctacttaacaggaacagggaaagggtgtcccccaacggtacggctgccccgcctcttcctgggggcccacacgtgttacaggaagtgggtaagggtaatatggaggagcttccggcagcccccggcggctgaaagccggggcagaagtgctggtctcggtcgggattccgggcttggtcccaccgaggcggcgactgcggtaggagggaagaggttttggacgcgctggcctcccgccgctgtgcattgcagcattatttcagttcaaaatgaactatatgcctggcaccgccagcctcatcgaggacattgacaaaaagcacttggttctgcttcgagatggaaggacacttataggctttttaagaagcattgatcaatttgcaaacttagtgctacatcagactgtggagcgtattcatgtgggcaaaaaatacggtgatattcctcgagggatttttgtggtcagaggagaaaatgtggtcctactaggagaaatagacttggaaaaggagagtgacacacccctccagcaagtatccattgaagaaattctagaagaacaaagggtggaacagcagaccaagctggaagcagagaagttgaaagtgcaggccctgaaggaccgaggtctttccattcctcgagcagatactcttgatgagtactaatcttttgcccagaggctgttggctcttgaagagtaggggctgtcactgagtgaaagtgacatcctggccacctcacgcatttgatcacagactgtagagttttgaaaagtcacttttatttttaattattttacatatgcaacatgaagaaatcgtgtaggtgggttttttttttaataacaaaatcactgtttaaagaaacagtggcatagactccttcacacatcactgtggcaccagcaactacttctttatattgttcttcatatcccaaattagagtttacagggacagtcttcatttacttgtaaataaaatatgaatctcaaaa

SEQ ID NO: 289941 - DNA, 851 bp, Homo sapiens
ccgaaagctgagggacggaggtcagtgactctggggtctcgggaacccggagacgaaggaagacaccgtgttccttaagagggagtatacgtttcctcgccatttatccaatggagtttcctcttacctacttaacaggaacagggaaagggtgtcccccaacgaaaagcacttggttctgcttcgagatggaaggacacttataggctttttaagaagcattgatcaatttgcaaacttagtgctacatcagactgtggagcgtattcatgtgggcaaaaaatacggtgatattcctcgagggatttttgtggtcagaggagaaaatgtggtcctactaggagaaatagacttggaaaaggagagtgacacacccctccagcaagtatccattgaagaaattctagaagaacaaagggtggaacagcagaccaagctggaagcagagaagttgaaagtgcaggccctgaaggaccgaggtctttccattcctcgagcagatactcttgatgagtactaatcttttgcccagaggctgttggctcttgaagagtaggggctgtcactgagtgaaagtgacatcctggccacctcacgcatttgatcacagactgtagagttttgaaaagtcacttttatttttaattattttacatatgcaacatgaagaaatcgtgtaggtgggttttttttttaataacaaaatcactgtttaaagaaacagtggcatagactccttcacacatcactgtggcaccagcaactacttctttatattgttcttcatatcccaaattagagtttacagggacagtcttcatttacttgtaaataaaatatgaatctcaaaa

SEQ ID NO: 289942 - DNA, 1013 bp, Homo sapiens
ccgaaagctgagggacggaggtcagtgactctggggtctcgggaacccggagacgaaggaagacaccgtgttccttaagagggagtatacgtttcctcgccatttatccaatggagtttcctcttacctacttaacaggaacagggaaagggtgtcccccaacggtacggctgccccgcctcttcctgggggcccacacgtgttacaggaagtgggtaagggtaatatggaggagcttccggcagcccccggcggctgaaagccggggcagaagtgctggtctcggtcgggattccgggcttggtcccaccgaggcggcgactgcggtaggagggaagaggttttggacgcgctggcctcccgccgctgtgcattgcagcattatttcagttcaaaatgaactatatgcctggcaccgccagcctcatcgaggacattgacaaaaagcacttggttctgcttcgagatggaaggacacttataggctttttaagaagcattgatcaatttggacttggaaaaggagagtgacacacccctccagcaagtatccattgaagaaattctagaagaacaaagggtggaacagcagaccaagctggaagcagagaagttgaaagtgcaggccctgaaggaccgaggtctttccattcctcgagcagatactcttgatgagtactaatcttttgcccagaggctgttggctcttgaagagtaggggctgtcactgagtgaaagtgacatcctggccacctcacgcatttgatcacagactgtagagttttgaaaagtcacttttatttttaattattttacatatgcaacatgaagaaatcgtgtaggtgggttttttttttaataacaaaatcactgtttaaagaaacagtggcatagactccttcacacatcactgtggcaccagcaactacttctttatattgttcttcatatcccaaattagagtttacagggacagtcttcatttacttgtaaataaaatatgaatctcaaaa

SEQ ID NO: 289943 - DNA, 1122 bp, Homo sapiens
  misc_feature (1009)..(1009): n is a, c, g, or t
  misc_feature (1020)..(1020): n is a, c, g, or t
  misc_feature (1025)..(1026): n is a, c, g, or t
  misc_feature (1033)..(1033): n is a, c, g, or t
  misc_feature (1039)..(1039): n is a, c, g, or t
  misc_feature (1045)..(1045): n is a, c, g, or t
ccgaaagctgagggacggaggtcagtgactctggggtctcgggaacccggagacgaaggaagacaccgtgttccttaagagggagtatacgtttcctcgccatttatccaatggagtttcctcttacctacttaacaggaacagggaaagggtgtcccccaacggtacggctgccccgcctcttcctgggggcccacacgtgttacaggaagtgggtaagggtaatatggaggagcttccggcagcccccggcggctgaaagccggggcagaagtgctggtctcggtcgggattccgggcttggtcccaccgaggcggcgactgcggtaggagggaagaggttttggacgcgctggcctcccgccgctgtgcattgcagcattatttcagttcaaaatgaactatatgcctggcaccgccagcctcatcgaggacattgacaaaaagcacttggttctgcttcgagatggaaggacacttataggctttttaagaagcattgatcaatttgcaaacttagtgctacatcagactgtggagcgtattcatgtgggcaaaaaatacggtgatattcctcgagggatttttgtggtcagaggagaaaatgtggtcctactaggagaaatagacttggaaaaggagagtgacacacccctccagcaagtatccattgaagaaattctagaagaacaaagggtggaacagcagaccaagctggaagcagagaagttgaaagtgcaggccctgaaggaccgaggtctttccattcctcgagcagatactcttgatgagtactaatcttttgcccagaggctgttggctcttgaagagtaggggctgtcactgagtgaaagtgacatcctggccacctcacgcatttgatcacagactgtagagttttgaaaagtcacttttatttttaattattttacatatgcaacatgaagaaatcgtgtaggtgggttttttttttaataacaaaatcactgtttaaagaaacagtggaatntatctttgtanatatnntcattanttcttntctctnacctaagttactttattacatattaatctgttcatttgttcacttgctcattgatgtaataaattagtaatctcaaa

SEQ ID NO: 289944 - DNA, 799 bp, Homo sapiens
ccgaaagctgagggacggaggtcagtgactctggggtctcgggaacccggagacgaaggaagacaccgtgttccttaagagggagtatacgtttcctcgccatttatccaatggagtttcctcttacctacttaacaggaacagggaaagggtgtcccccaacggtacggctgccccgcctcttcctgggggcccacacgtgttacaggaagtgggtaagggtaatatggaggagcttccggcagcccccggcggctgaaagccggggcagaagtgctggtctcggtcgggattccgggcttggtcccaccgaggcggcgactgcggtaggagggaagaggttttggacgcgctggcctcccgccgctgtgcattgcagcattatttcagttcaaaatgaactatatgcctggcaccgccagcctcatcgaggacattgacaaaaagcacttggttctgcttcgagatggaaggacacttataggctttttaagaagcattgatcaatttgcaaacttagtgctacatcagactgtggagcgtattcatgtgggcaaaaaatacggtgatattcctcgagggatttttgtggtcagaggagaaaatgtggtcctactaggagaaatagacttggaaaaggagagtgacacacccctccagcaagtatccattgaagaaattctagaagaacaaagggtggaacagcagaccaagctggaagcagagaagttgaaagtgcaggccctgaaggaccgaggtctttccattcctcgagggggggccgggcccccaattcccc

SEQ ID NO: 289945 - DNA, 731 bp, Homo sapiens
tgagggacggaggtcagtgactctggggtctcgggaacccggagacgaaggaagacaccgtgttccttaagagggagtatacgtttcctcgccatttatccaatggagtttcctcttacctacttaacaggaacagggaaagggtgtcccccaacggtacggctgccccgcctcttcctgggggcccacacgtgttacaggaagtgggtaagggtaatatggaggagcttccggcagcccccggcggctgaaagccggggcagaagtgctggtctcggtcgggattccgggcttggtcccaccgaggcggcgactgcggtaggagggaagaggttttggacgcgctggcctcccgccgctgtgcattgcagcattatttcagttcaaaatgaactatatgcctggcaccgccagcctcatcgaggacattgacagtgagtagtttatctcctcccggtggagcccggggttagacccttcctcccgggcgggcgcctcttccgaagaagcttgtagaatgagtcccgggcggggccggtgtgttctgagctcaatccgggcgttccgcgtcgatgtcctccacagctgcggtacacaccgcttgcccacccagtagcctgctgctacttctgcccctcgcagcctccgccagccctctagctggtgagccccaagcgatggaactcattcttgcttccgtggatcgcggcagcagaggcccgaacacgaaa

SEQ ID NO: 289946 - DNA, 1163 bp, Homo sapiens
ccgaaagctgagggacggaggtcagtgactctggggtctcgggaacccggagacgaaggaagacaccgtgttccttaagagggagtatacgtttcctcgccatttatccaatggagtttcctcttacctacttaacaggaacagggaaagggtgtcccccaacggtacggctgccccgcctcttcctgggggcccacacgtgttacaggaagtgggtaagggtaatatggaggagcttccggcagcccccggcggctgaaagccggggcagaagtgctggtctcggtcgggattccgggcttggtcccaccgaggcggcgactgcggtaggagggaagaggttttggacgcgctggcctcccgccgctgtgcattgcagcattatttcagttcaaaatgaactatatgcctggcaccgccagcctcatcgaggacattgacaaaaagcacttggttctgcttcgagatggaaggacacttataggctttttaagaagcattgatcaatttgcaaacttagtgctacatcagactgtggagcgtattcatgtgggcaaaaaatacggtgatattcctcgagggatttttgtggtcagaggagaaaatgtggtcctactaggagaaatagacttggaaaaggagagtgacacacccctccagcaagtatccattgaagaaattctagaagaacaaagggtggaacagcagaccaagctggaagcagagaagttgaaagtgcaggccctgaaggaccgaggtctttccattcctcgagcagatactcttgatgagtactaatcttttgcccagaggctgttggctcttgaagagtaggggctgtcactgagtgaaagtgacatcctggccacctcacgcatttgatcacagactgtagagttttgaaaagtcacttttatttttaattattttacatatgcaacatgaagaaatcgtgtaggtgggttttttttttaataacaaaatcactgtttaaagaaacagtggcatagactccttcacacatcactgtggcaccagcaactacttctttatattgttcttcatatcccaaattagagtttacagggacagtcttcatttacttgtaaataaaatatgaatctcaaaagtgtcatgttatttccaagtttgagttacctagg

SEQ ID NO: 289947 - DNA, 1173 bp, Homo sapiens
  misc_feature (1135)..(1143): n is a, c, g, or t
  misc_feature (1156)..(1172): n is a, c, g, or t
ccgaaagctgagggacggaggtcagtgactctggggtctcgggaacccggagacgaaggaagacaccgtgttccttaagagggagtatacgtttcctcgccatttatccaatggagtttcctcttacctacttaacaggaacagggaaagggtgtcccccaacggtacggctgccccgcctcttcctgggggcccacacgtgttacaggaagtgggtaagggtaatatggaggagcttccggcagcccccggcggctgaaagccggggcagaagtgctggtctcggtcgggattccgggcttggtcccaccgaggcggcgactgcggtaggagggaagaggttttggacgcgctggcctcccgccgctgtgcattgcagcattatttcagttcaaaatgaactatatgcctggcaccgccagcctcatcgaggacattgacaaaaagcacttggttctgcttcgagatggaaggacacttataggctttttaagaagcattgatcaatttgcaaacttagtgctacatcagactgtggagcgtattcatgtgggcaaaaaatacggtgatattcctcgagggatttttgtggtcagaggagaaaatgtggtcctactaggagaaatagacttggaaaaggagagtgacacacccctccagcaagtatccattgaagaaattctagaagaacaaagggtggaacagcagaccaagctggaagcagagaagttgaaagtgcaggccctgaaggaccgaggtctttccattcctcgagcagatactcttgatgagtactaatcttttgcccagaggctgttggctcttgaagagtaggggctgtcactgagtgaaagtgacatcctggccacctcacgcatttgatcacagactgtagagttttgaaaagtcacttttatttttaattattttacatatgcaacatgaagaaatcgtgtaggtgggttttttttttaataacaaaatcactgtttaaagaaacagtggcatagactccttcacacatcactgtggcaccagcaactacttctttatattgttcttcatatcccaaattagagtttacagggacagtcttcatttacttgtaaataaaatatgaatctcaaaaaaaaannnnnnnnnccccccccccccnnnnnnnnnnnnnnnnng

SEQ ID NO: 289948 - DNA, 1010 bp, Homo sapiens
ccgaaagctgagggacggaggtcagtgactctggggtctcgggaacccggagacgaaggaagacaccgtgttccttaagagggagtatacgtttcctcgccatttatccaatggagtttcctcttacctacttaacaggaacagggaaagggtgtcccccaacggtacggctgccccgcctcttcctgggggcccacacgtgttacaggaagtgggtaagggtaatatggaggagcttccggcagcccccggcggctgaaagccggggcagaagtgctggtctcggtcgggattccgggcttggtcccaccgaggcggcgactgcggtaggagggaagaggttttggacgcgctggcctcccgccgctgtgcattgcagcattatttcagttcaaaatgaactatatgcctggcaccgccagcctcatcgaggacattgacaaaaagcacttggttctgcttcgagatggaaggacacttataggctttttaagaagcattgatcaatttgcaaacttagtgctacatcagactgtggagcgtattcatgtgggcaaaaaatacggtgatattcctcgagggatttttgtggtcagaggagaaaatgtggtcctactaggagaaatagacttggaaaaggagagtgacacacccctccagcaagtatccattgaagaaattctagaagaacaaagggtggaacagcagaccaagctggaagcagagaagttgaaagtgcaggccctgaaggaccgaggtctttccattcctcgagcagatactcttgatgagtactaatcttttgcccagaggctgttggctcttgaagagtaggggctgtcactgagtgaaagtgacatcctggccacctcacgcatttgatcacagactgtagagttttgaaaagtcacttttatttttaattattttacatatgcaacatgaagaaatcgtgtaggtgggttttgaaaagtcacttttatttttaattattttacatatgcaacatg

SEQ ID NO: 289949 - DNA, 438 bp, Homo sapiens
tctcaggaccagtcttaagtgcttctgtcttaccagaccttccttctgtcccctcacttaacagaccatctgctccggccaccattcccacatgcacatttgtcatgtgtctctactgctgcagctttgctcatcttgcaagaagtccccactcaaacttctgctacagaaagcccagccatcccccaatgggctctcaactgctatccctgtcgtatctcacacacaaactgcttctctgcttagagatcatagagtggccttactgcttctgagataggtgctttgactctgttgtcatttatcttctagattgtaaattcctgagggcggtttgtatgaatgaatgataaaatggaatattaagagggcaatattgtgccttggtttgttcctttttaatttctctttttccacttgttaagactggtcctggaa

SEQ ID NO: 289950 - DNA, 1574 bp, Homo sapiens
cgcaagagcggagctgcgcgagccgctgcggagggaagggctcctagccaattggggtctttgaggcgaatgcgaggctggggccggttgcctaccggccgcttctcgccgaggcagtccagacttttcccccggcggtgcccgctccaagacagcatctgtcaacgctcctcttctcccctcctcctcctgccgggccgggctccgccggctgcggccgagaggacgcgggacccggcgcggtgagcccatcagctgtcaggcgagcggcgaagcggctggagggcggcgagagacacacaaagaacgcggtgggcggcggcggcgaaaggggacggcaactcctccccgcgcccgccggtgccaccgccggccgtgcttgttccgaggccgcgcagacaatgcggccgggctcgtccccgcgtgccccagagtgcggagcgcccgcgctcccccgaccccaacttgaccgtctcccggctcgcccagccccctcccggggtaggggcgccccctccctccggtggccggcgaaggaagtcggtccgcggccgcagatcccggcaacttgcgaaccgggaaaagtttgcggcgcctccgcggggcggcgcgacgcggcccgcccctcgcgtccgcggtcatcgcgggtgactttctcgactcgtcgtcagccggggccgcagcgcggccggtggggactgcggggcgggccggagtccgtccgagggctcccgcacctcgggctgcgggtgagtcggctttaggcgccgtgggctcaagtggtttagggcacctgggcttgggaagaagtcgtggagagagcctttaatactttatggagctggcggggagaacaaataaaattgcggtagcttgaagggcactgacatgccactgacttgggaaccgtatccgtgggaactcttcgggtgccggcgcgaccaagggcctgtgcgcggctgggtgggagatggaaaggttagaaggtcgcggactagccctgcctgcgactggctcagcttgaccttggaccagtgactttaccacttagatttttctcgtgggtaatatgtggggccacagcaacgtggtctatgctgtcgtccagtttttagactacatctccgtttttgagattttcctagggcctcaacacggtgcgcgagttatcaagcggtaggccaggatatgtttacatgcgcctggattcacctttcagcctactcagaagtaacttttaagtctgatgttttaaaacactaacatttaaaggctttccttcactatccattgcttattttacgaaccttaggattgtcgtattttgctgcaccatttggaatcctaggggccagggtggggacagagagccaagtctgagggtgaagtggcaggtgcccccgggcgatccctgccggatccagttgagggggagaacaaagcatttattatgcataagagagagtgaacagggcaggtgtttgtgtttttgttttctgtattatactgaaaactttttttggttgggggggtgcgggcagtggaggaggggacaaagaagaaaaagaaatgtc

SEQ ID NO: 289951 - DNA, 2997 bp, Homo sapiens
cgcaagagcggagctgcgcgagccgctgcggagggaagggctcctagccaattggggtctttgaggcgaatgcgaggctggggccggttgcctaccggccgcttctcgccgaggcagtccagacttttcccccggcggtgcccgctccaagacagcatctgtcaacgctcctcttctcccctcctcctcctgccgggccgggctccgccggctgcggccgagaggacgcgggacccggcgcggtgagcccatcagctgtcaggcgagcggcgaagcggctggagggcggcgagagacacacaaagaacgcggtgggcggcggcggcgaaaggggacggcaactcctccccgcgcccgccggtgccaccgccggccgtgcttgttccgaggccgcgcagacaatgcggccgggctcgtccccgcgtgccccagagtgcggagcgcccgcgctcccccgaccccaacttgaccgtctcccggctcgcccagccccctcccggggtaggggcgccccctccctccggtggccggcgaaggaagtcggtccgcggccgcagatcccggcaacttgcgaaccgggaaaagtttgcggcgcctccgcggggcggcgcgacgcggcccgcccctcgcgtccgcggtcatcgcgggtgactttctcgactcgtcgtcagccggggccgcagcgcggccggtggggactgcggggcgggccggagtccgtccgagggctcccgcacctcgggctgcgggaacattaaaatctccccagatgctcactgctctgatcatttcccctacagcaccagacatgttggcatcatctcttagttgggccatgtggccagggaacccttcatgaaaccacctctgcagtcctggagagttgctgtagaagaaggaaaagagaggaagacaacacaacacaggaggggataagtacctctggacacaatggaagtagtagttgttgagcagagggaaagggataggagaaggatgtggactgcagtgctgcagtgccaggtaataactttgatcatgtacctccttggctcaggtgctgtctcttctactctcctccttacttgtactaccttatttagcacttaattatatactttcttgactcactttgagacacactgattatgtggtctgcctcaaagacagaatcctagttttggattttagcattactgatctatagccttgcaggggcttaaggatggcagctgtctctctcccttgggatctagcttttgcaaatattgaagggaagagatttctttgatcttataggaatagatccacagttcctctccagatttgcttttatagagaagtgtgtgtcaccaaaacaatggagatacggtcagagaggcccctacccccagaattttaatataattttactttctggggcatttattcttgacaaatactttctctcctatcagctcacttgttcctcacaaaaaccctataagatattaatattattaaacagacccctatgaagcacctcaagtctttctctcttcccacttccattcttgcacaccttttgctagactagtctctgcgttcatcacatcaggtttctaaaataaaagtcccctaataactttctatttgttctctcatcatattgaaccttttttgcctggcttataaggtggccttaaaaccccattttcctctaaacattgtctctgtagttcaggaatatggcaggctcaacactatgcttgagcccatattgcttccctcattagtgatgcctcctctcagaccacccagattctactcattcttcaatttccagcttctccttggagcctttccagatcattagcttcttaaaaatcccagctttctctgaattctgatggtagcccccgttatttggacaattatgtcctggtcttaaagtcctaatgggaaaaaaaagtacatgatggacttcatgtagagaagaaagcactggactgagttttaagacagctgctaaggagctgtgtgagccaaaccaggttactttacctctctggatctatatttgctgatctgttaagtggagacaattgggtcagataatcttggtggtctttgcttattctgaggttcttgtacaacttggcctagttcacgtgggatgggattgaagatcttactgagttcttggatggaaatgtcagtaatgggcacttagtgccttcaggacttgttctatactatcccagaaatttctgatgctaaacttggcaatttttaaatgtcatattccttttctccaaactctttaaccacaagaattcagggaaggttatggggggtgacttagttatctggataatacatattgtggacaatatagcattatccttgggaatgatttcatattgttgaataaataggatcaacttcttgataaaccttagtcccaagcatttcatcttcattggatagtgttacatagtaatatatttatgttttcttttaatcatttcataacttggaatactaacatagtcaaaactctagggtaggtgatacatgagtttctgtagtaatctggttggagacatgttgtaattctgtatatatatgtacatttatcccatgcatgttatgcctaaactaagacggatacccctgaattaagaggtgctgttatacattgaccaggcttaagaatatctctttaaagtgtgtcgacatttaattgacctttggaagttcattctgttaatcatactcaaagtgctaaagctatggttgactgctctggtgtttttatattcattcgtgctttagcatataaattcttcagcataattgctacttatttagcaagagtttcctttatttgaaaatgtgagttgtgcttgtatttttgtgtctttctttctttctttctttttttaaactttgcttcaggctgggtagtggtagaggtttgaattaaaatgttttcctgtcagtagttgtatgagg

SEQ ID NO: 289952 - DNA, 1726 bp, Homo sapiens
cgcaagagcggagctgcgcgagccgctgcggagggaagggctcctagccaattggggtctttgaggcgaatgcgaggctggggccggttgcctaccggccgcttctcgccgaggcagtccagacttttcccccggcggtgcccgctccaagacagcatctgtcaacgctcctcttctcccctcctcctcctgccgggccgggctccgccggctgcggccgagaggacgcgggacccggcgcggtgagcccatcagctgtcaggcgagcggcgaagcggctggagggcggcgagagacacacaaagaacgcggtgggcggcggcggcgaaaggggacggcaactcctccccgcgcccgccggtgccaccgccggccgtgcttgttccgaggccgcgcagacaatgcggccgggctcgtccccgcgtgccccagagtgcggagcgcccgcgctcccccgaccccaacttgaccgtctcccggctcgcccagccccctcccggggtaggggcgccccctccctccggtggccggcgaaggaagtcggtccgcggccgcagatcccggcaacttgcgaaccgggaaaagtttgcggcgcctccgcggggcggcgcgacgcggcccgcccctcgcgtccgcggtcatcgcgggtgactttctcgactcgtcgtcagccggggccgcagcgcggccggtggggactgcggggcgggccggagtccgtccgagggctcccgcacctcgggctgcggatttcaggtactccactgggcattttctcttcatggagcttatagcaacaaaagtgttttacaaaacaccagacatgttggcatcatctcttagttgggccatgtggccagggaacccttcatgaaaccacctctgcagtcctggagagttgctgtagaagaaggaaaagagaggaagacaacacaacacaggaggggataagtacctctggacacaatggaagtagtagttgttgagcagagggaaagggataggagaaggatgtggactgcagtgctgcagtgccaggaagttcgaggaccttcagaaatcaatccatgggctccacaagcactgtatcaagaggcattcgagaccagtctgggctagagggtgagaccctgtctttatgaaaaaagaaaaagagagagaaaaatgaatatttgatagaggcacaaatcatgcagttcccacatatttgggggttattcctagaaatttcgtgtgctgttgttgggtaaagataggcaatgaggatggagagggaggtaggccatatccagcaattttggactttatgaaacaagaggaagtaaactggagtgtttaaacataaaggtggccaatatgcattttggacagcaaaatcagaaagtagaatgtgaaataactggagaagaaagacaggaagtggggaaaacatcagtttgtcagcacaataatctgggttggaaatagtgagagcctattttaaaacctctccaacattaaggatgttcccttttctaagataggcctactttgattctgtataaaaaataataagacaaagttttcaagcactaagggacactttgaaattagccaaacgtttgttctgtaattccttttgttttttactcaaggcaacagttagatgttagcaaccttgcttttgtacccttttgtctacatagggtatatcaaaagcttaagcagcctaggagccactgaggag

SEQ ID NO: 289953 - DNA, 1287 bp, Homo sapiens
cgcaagagcggagctgcgcgagccgctgcggagggaagggctcctagccaattggggtctttgaggcgaatgcgaggctggggccggttgcctaccggccgcttctcgccgaggcagtccagacttttcccccggcggtgcccgctccaagacagcatctgtcaacgctcctcttctcccctcctcctcctgccgggccgggctccgccggctgcggccgagaggacgcgggacccggcgcggtgagcccatcagctgtcaggcgagcggcgaagcggctggagggcggcgagagacacacaaagaacgcggtgggcggcggcggcgaaaggggacggcaactcctccccgcgcccgccggtgccaccgccggccgtgcttgttccgaggccgcgcagacaatgcggccgggctcgtccccgcgtgccccagagtgcggagcgcccgcgctcccccgaccccaacttgaccgtctcccggctcgcccagccccctcccggggtaggggcgccccctccctccggtggccggcgaaggaagtcggtccgcggccgcagatcccggcaacttgcgaaccgggaaaagtttgcggcgcctccgcggggcggcgcgacgcggcccgcccctcgcgtccgcggtcatcgcgggtgactttctcgactcgtcgtcagccggggccgcagcgcggccggtggggactgcggggcgggccggagtccgtccgagggctcccgcacctcgggctgcggatttcaggtactccactgggcattttctcttcatggagcttatagcaacaaaagtgttttacaaaacaccagacatgttggcatcatctcttagttgggccatgtggccagggaacccttcatgaaaccacctctgcagtcctggagagttgctgtagaagaaggaaaagagaggaagacaacacaacacaggaggggataagtacctctggacacaatggaagtagtagttgttgagcagagggaaagggataggagaaggatgtggactgcagtgctgcagtgccaggaagttcgaggaccttcagaaatcaatccatgggctccacaagcactgtatcaagaggcattcgagaccagtctgggctagaggtggacatgagagaaagatcccatagccctcttggtcttggttggaacaggaggaaaatgaaaactggacatccatcttaggacttaaacacaggcgacgagcacaggctgtgtagagacgccgcacagtccaagccttcatgcgcgcacagtgagacatttagag

SEQ ID NO: 289954 - DNA, 1095 bp, Homo sapiens
  misc_feature (1048)..(1048): n is a, c, g, or t
  misc_feature (1059)..(1059): n is a, c, g, or t
  misc_feature (1071)..(1071): n is a, c, g, or t
cgcaagagcggagctgcgcgagccgctgcggagggaagggctcctagccaattggggtctttgaggcgaatgcgaggctggggccggttgcctaccggccgcttctcgccgaggcagtccagacttttcccccggcggtgcccgctccaagacagcatctgtcaacgctcctcttctcccctcctcctcctgccgggccgggctccgccggctgcggccgagaggacgcgggacccggcgcggtgagcccatcagctgtcaggcgagcggcgaagcggctggagggcggcgagagacacacaaagaacgcggtgggcggcggcggcgaaaggggacggcaactcctccccgcgcccgccggtgccaccgccggccgtgcttgttccgaggccgcgcagacaatgcggccgggctcgtccccgcgtgccccagagtgcggagcgcccgcgctcccccgaccccaacttgaccgtctcccggctcgcccagccccctcccggggtaggggcgccccctccctccggtggccggcgaaggaagtcggtccgcggccgcagatcccggcaacttgcgaaccgggaaaagtttgcggcgcctccgcggggcggcgcgacgcggcccgcccctcgcgtccgcggtcatcgcgggtgactttctcgactcgtcgtcagccggggccgcagcgcggccggtggggactgcggggcgggccggagtccgtccgagggctcccgcacctcgggctgcgggtgagtcggctttaggcgccgtgggctcaagtggtttagggcacctgggcttgggaagaagtcgtggagagagcctttaatactttatggagctggcggggagaacaaataaaattgcggtagcttgaagggcactgacatgccactgacttgggaaccgtatccgtgggaactcttcgggtgccggcgcgaccaagggcctgtgcgcggctgggtggggtctcacgaattcgtgagaccgcgatagcggtcctcctcccgcaccaggtagcgaacctcgtcatggattctgatgcagnagcgcccatcnatggcaaactcntcaaacagccacttcatggccaca

SEQ ID NO: 289955 - DNA, 3012 bp, Homo sapiens
cgcaagagcggagctgcgcgagccgctgcggagggaagggctcctagccaattggggtctttgaggcgaatgcgaggctggggccggttgcctaccggccgcttctcgccgaggcagtccagacttttcccccggcggtgcccgctccaagacagcatctgtcaacgctcctcttctcccctcctcctcctgccgggccgggctccgccggctgcggccgagaggacgcgggacccggcgcggtgagcccatcagctgtcaggcgagcggcgaagcggctggagggcggcgagagacacacaaagaacgcggtgggcggcggcggcgaaaggggacggcaactcctccccgcgcccgccggtgccaccgccggccgtgcttgttccgaggccgcgcagacaatgcggccgggctcgtccccgcgtgccccagagtgcggagcgcccgcgctcccccgaccccaacttgaccgtctcccggctcgcccagccccctcccggggtaggggcgccccctccctccggtggccggcgaaggaagtcggtccgcggccgcagatcccggcaacttgcgaaccgggaaaagtttgcggcgcctccgcggggcggcgcgacgcggcccgcccctcgcgtccgcggtcatcgcgggtgactttctcgactcgtcgtcagccggggccgcagcgcggccggtggggactgcggggcgggccggagtccgtccgagggctcccgcacctcgggctgcggatttcaggtactccactgggcattttctcttcatggagcttatagcaacaaaagtgttttacaaaacaccagacatgttggcatcatctcttagttgggccatgtggccagggaacccttcatgaaaccacctctgcagtcctggagagttgctgtagaagaaggaaaagagaggaagacaacacaacacaggaggggataagtacctctggacacaatggaagtagtagttgttgagcagagggaaagggataggagaaggatgtggactgcagtgctgcagtgccaggtaataactttgatcatgtacctccttggctcaggtgctgtctcttctactctcctccttacttgtactaccttatttagcacttaattatatactttcttgactcactttgagacacactgattatgtggtctgcctcaaagacagaatcctagttttggattttagcattactgatctatagccttgcaggggcttaaggatggcagctgtctctctcccttgggatctagcttttgcaaatattgaagggaagagatttctttgatcttataggaatagatccacagttcctctccagatttgcttttatagagaagtgtgtgtcaccaaaacaatggagatacggtcagagaggcccctacccccagaattttaatataattttactttctggggcatttattcttgacaaatactttctctcctatcagctcacttgttcctcacaaaaaccctataagatattaatattattaaacagacccctatgaagcacctcaagtctttctctcttcccacttccattcttgcacaccttttgctagactagtctctgcgttcatcacatcaggtttctaaaataaaagtcccctaataactttctatttgttctctcatcatattgaaccttttttgcctggcttataaggtggccttaaaaccccattttcctctaaacattgtctctgtagttcaggaatatggcaggctcaacactatgcttgagcccatattgcttccctcattagtgatgcctcctctcagaccacccagattctactcattcttcaatttccagcttctccttggagcctttccagatcattagcttcttaaaaatcccagctttctctgaattctgatggtagcccccgttatttggacaattatgtcctggtcttaaagtcctaatgggaaaaaaaagtacatgatggacttcatgtagagaagaaagcactggactgagttttaagacagctgctaaggagctgtgtgagccaaaccaggttactttacctctctggatctatatttgctgatctgttaagtggagacaattgggtcagataatcttggtggtctttgcttattctgaggttcttgtacaacttggcctagttcacgtgggatgggattgaagatcttactgagttcttggatggaaatgtcagtaatgggcacttagtgccttcaggacttgttctatactatcccagaaatttctgatgctaaacttggcaatttttaaatgtcatattccttttctccaaactctttaaccacaagaattcagggaaggttatggggggtgacttagttatctggataatacatattgtggacaatatagcattatccttgggaatgatttcatattgttgaataaataggatcaacttcttgataaaccttagtcccaagcatttcatcttcattggatagtgttacatagtaatatatttatgttttcttttaatcatttcataacttggaatactaacatagtcaaaactctagggtaggtgatacatgagtttctgtagtaatctggttggagacatgttgtaattctgtatatatatgtacatttatcccatgcatgttatgcctaaactaagacggatacccctgaattaagaggtgctgttatacattgaccaggcttaagaatatctctttaaagtgtgtcgacatttaattgacctttggaagttcattctgttaatcatactcaaagtgctaaagctatggttgactgctctggtgtttttatattcattcgtgctttagcatataaattcttcagcataattgctacttatttagcaagagtttcctttatttgaaaatgtgagttgtgcttgtatttttgtgtctttctttctttctttctttttttaaactttgcttcaggctgggtagtggtagaggtttgaattaaaatgttttcctgtcagtagttgtatgagg

SEQ ID NO: 289956 - DNA, 3063 bp, Homo sapiens
cgcaagagcggagctgcgcgagccgctgcggagggaagggctcctagccaattggggtctttgaggcgaatgcgaggctggggccggttgcctaccggccgcttctcgccgaggcagtccagacttttcccccggcggtgcccgctccaagacagcatctgtcaacgctcctcttctcccctcctcctcctgccgggccgggctccgccggctgcggccgagaggacgcgggacccggcgcggtgagcccatcagctgtcaggcgagcggcgaagcggctggagggcggcgagagacacacaaagaacgcggtgggcggcggcggcgaaaggggacggcaactcctccccgcgcccgccggtgccaccgccggccgtgcttgttccgaggccgcgcagacaatgcggccgggctcgtccccgcgtgccccagagtgcggagcgcccgcgctcccccgaccccaacttgaccgtctcccggctcgcccagccccctcccggggtaggggcgccccctccctccggtggccggcgaaggaagtcggtccgcggccgcagatcccggcaacttgcgaaccgggaaaagtttgcggcgcctccgcggggcggcgcgacgcggcccgcccctcgcgtccgcggtcatcgcgggtgactttctcgactcgtcgtcagccggggccgcagcgcggccggtggggactgcggggcgggccggagtccgtccgagggctcccgcacctcgggctgcggatttcaggtactccactgggcattttctcttcatggagcttatagcaacaaaagtgttttacaaaagaacattaaaatctccccagatgctcactgctctgatcatttcccctacagcaccagacatgttggcatcatctcttagttgggccatgtggccagggaacccttcatgaaaccacctctgcagtcctggagagttgctgtagaagaaggaaaagagaggaagacaacacaacacaggaggggataagtacctctggacacaatggaagtagtagttgttgagcagagggaaagggataggagaaggatgtggactgcagtgctgcagtgccaggtaataactttgatcatgtacctccttggctcaggtgctgtctcttctactctcctccttacttgtactaccttatttagcacttaattatatactttcttgactcactttgagacacactgattatgtggtctgcctcaaagacagaatcctagttttggattttagcattactgatctatagccttgcaggggcttaaggatggcagctgtctctctcccttgggatctagcttttgcaaatattgaagggaagagatttctttgatcttataggaatagatccacagttcctctccagatttgcttttatagagaagtgtgtgtcaccaaaacaatggagatacggtcagagaggcccctacccccagaattttaatataattttactttctggggcatttattcttgacaaatactttctctcctatcagctcacttgttcctcacaaaaaccctataagatattaatattattaaacagacccctatgaagcacctcaagtctttctctcttcccacttccattcttgcacaccttttgctagactagtctctgcgttcatcacatcaggtttctaaaataaaagtcccctaataactttctatttgttctctcatcatattgaaccttttttgcctggcttataaggtggccttaaaaccccattttcctctaaacattgtctctgtagttcaggaatatggcaggctcaacactatgcttgagcccatattgcttccctcattagtgatgcctcctctcagaccacccagattctactcattcttcaatttccagcttctccttggagcctttccagatcattagcttcttaaaaatcccagctttctctgaattctgatggtagcccccgttatttggacaattatgtcctggtcttaaagtcctaatgggaaaaaaaagtacatgatggacttcatgtagagaagaaagcactggactgagttttaagacagctgctaaggagctgtgtgagccaaaccaggttactttacctctctggatctatatttgctgatctgttaagtggagacaattgggtcagataatcttggtggtctttgcttattctgaggttcttgtacaacttggcctagttcacgtgggatgggattgaagatcttactgagttcttggatggaaatgtcagtaatgggcacttagtgccttcaggacttgttctatactatcccagaaatttctgatgctaaacttggcaatttttaaatgtcatattccttttctccaaactctttaaccacaagaattcagggaaggttatggggggtgacttagttatctggataatacatattgtggacaatatagcattatccttgggaatgatttcatattgttgaataaataggatcaacttcttgataaaccttagtcccaagcatttcatcttcattggatagtgttacatagtaatatatttatgttttcttttaatcatttcataacttggaatactaacatagtcaaaactctagggtaggtgatacatgagtttctgtagtaatctggttggagacatgttgtaattctgtatatatatgtacatttatcccatgcatgttatgcctaaactaagacggatacccctgaattaagaggtgctgttatacattgaccaggcttaagaatatctctttaaagtgtgtcgacatttaattgacctttggaagttcattctgttaatcatactcaaagtgctaaagctatggttgactgctctggtgtttttatattcattcgtgctttagcatataaattcttcagcataattgctacttatttagcaagagtttcctttatttgaaaatgtgagttgtgcttgtatttttgtgtctttctttctttctttctttttttaaactttgcttcaggctgggtagtggtagaggtttgaattaaaatgttttcctgtcagtagttgtatgagg

SEQ ID NO: 289957 - DNA, 2946 bp, Homo sapiens
cgcaagagcggagctgcgcgagccgctgcggagggaagggctcctagccaattggggtctttgaggcgaatgcgaggctggggccggttgcctaccggccgcttctcgccgaggcagtccagacttttcccccggcggtgcccgctccaagacagcatctgtcaacgctcctcttctcccctcctcctcctgccgggccgggctccgccggctgcggccgagaggacgcgggacccggcgcggtgagcccatcagctgtcaggcgagcggcgaagcggctggagggcggcgagagacacacaaagaacgcggtgggcggcggcggcgaaaggggacggcaactcctccccgcgcccgccggtgccaccgccggccgtgcttgttccgaggccgcgcagacaatgcggccgggctcgtccccgcgtgccccagagtgcggagcgcccgcgctcccccgaccccaacttgaccgtctcccggctcgcccagccccctcccggggtaggggcgccccctccctccggtggccggcgaaggaagtcggtccgcggccgcagatcccggcaacttgcgaaccgggaaaagtttgcggcgcctccgcggggcggcgcgacgcggcccgcccctcgcgtccgcggtcatcgcgggtgactttctcgactcgtcgtcagccggggccgcagcgcggccggtggggactgcggggcgggccggagtccgtccgagggctcccgcacctcgggctgcggcaccagacatgttggcatcatctcttagttgggccatgtggccagggaacccttcatgaaaccacctctgcagtcctggagagttgctgtagaagaaggaaaagagaggaagacaacacaacacaggaggggataagtacctctggacacaatggaagtagtagttgttgagcagagggaaagggataggagaaggatgtggactgcagtgctgcagtgccaggtaataactttgatcatgtacctccttggctcaggtgctgtctcttctactctcctccttacttgtactaccttatttagcacttaattatatactttcttgactcactttgagacacactgattatgtggtctgcctcaaagacagaatcctagttttggattttagcattactgatctatagccttgcaggggcttaaggatggcagctgtctctctcccttgggatctagcttttgcaaatattgaagggaagagatttctttgatcttataggaatagatccacagttcctctccagatttgcttttatagagaagtgtgtgtcaccaaaacaatggagatacggtcagagaggcccctacccccagaattttaatataattttactttctggggcatttattcttgacaaatactttctctcctatcagctcacttgttcctcacaaaaaccctataagatattaatattattaaacagacccctatgaagcacctcaagtctttctctcttcccacttccattcttgcacaccttttgctagactagtctctgcgttcatcacatcaggtttctaaaataaaagtcccctaataactttctatttgttctctcatcatattgaaccttttttgcctggcttataaggtggccttaaaaccccattttcctctaaacattgtctctgtagttcaggaatatggcaggctcaacactatgcttgagcccatattgcttccctcattagtgatgcctcctctcagaccacccagattctactcattcttcaatttccagcttctccttggagcctttccagatcattagcttcttaaaaatcccagctttctctgaattctgatggtagcccccgttatttggacaattatgtcctggtcttaaagtcctaatgggaaaaaaaagtacatgatggacttcatgtagagaagaaagcactggactgagttttaagacagctgctaaggagctgtgtgagccaaaccaggttactttacctctctggatctatatttgctgatctgttaagtggagacaattgggtcagataatcttggtggtctttgcttattctgaggttcttgtacaacttggcctagttcacgtgggatgggattgaagatcttactgagttcttggatggaaatgtcagtaatgggcacttagtgccttcaggacttgttctatactatcccagaaatttctgatgctaaacttggcaatttttaaatgtcatattccttttctccaaactctttaaccacaagaattcagggaaggttatggggggtgacttagttatctggataatacatattgtggacaatatagcattatccttgggaatgatttcatattgttgaataaataggatcaacttcttgataaaccttagtcccaagcatttcatcttcattggatagtgttacatagtaatatatttatgttttcttttaatcatttcataacttggaatactaacatagtcaaaactctagggtaggtgatacatgagtttctgtagtaatctggttggagacatgttgtaattctgtatatatatgtacatttatcccatgcatgttatgcctaaactaagacggatacccctgaattaagaggtgctgttatacattgaccaggcttaagaatatctctttaaagtgtgtcgacatttaattgacctttggaagttcattctgttaatcatactcaaagtgctaaagctatggttgactgctctggtgtttttatattcattcgtgctttagcatataaattcttcagcataattgctacttatttagcaagagtttcctttatttgaaaatgtgagttgtgcttgtatttttgtgtctttctttctttctttctttttttaaactttgcttcaggctgggtagtggtagaggtttgaattaaaatgttttcctgtcagtagttgtatgagg

SEQ ID NO: 289958 - DNA, 1660 bp, Homo sapiens
cgcaagagcggagctgcgcgagccgctgcggagggaagggctcctagccaattggggtctttgaggcgaatgcgaggctggggccggttgcctaccggccgcttctcgccgaggcagtccagacttttcccccggcggtgcccgctccaagacagcatctgtcaacgctcctcttctcccctcctcctcctgccgggccgggctccgccggctgcggccgagaggacgcgggacccggcgcggtgagcccatcagctgtcaggcgagcggcgaagcggctggagggcggcgagagacacacaaagaacgcggtgggcggcggcggcgaaaggggacggcaactcctccccgcgcccgccggtgccaccgccggccgtgcttgttccgaggccgcgcagacaatgcggccgggctcgtccccgcgtgccccagagtgcggagcgcccgcgctcccccgaccccaacttgaccgtctcccggctcgcccagccccctcccggggtaggggcgccccctccctccggtggccggcgaaggaagtcggtccgcggccgcagatcccggcaacttgcgaaccgggaaaagtttgcggcgcctccgcggggcggcgcgacgcggcccgcccctcgcgtccgcggtcatcgcgggtgactttctcgactcgtcgtcagccggggccgcagcgcggccggtggggactgcggggcgggccggagtccgtccgagggctcccgcacctcgggctgcggcaccagacatgttggcatcatctcttagttgggccatgtggccagggaacccttcatgaaaccacctctgcagtcctggagagttgctgtagaagaaggaaaagagaggaagacaacacaacacaggaggggataagtacctctggacacaatggaagtagtagttgttgagcagagggaaagggataggagaaggatgtggactgcagtgctgcagtgccaggaagttcgaggaccttcagaaatcaatccatgggctccacaagcactgtatcaagaggcattcgagaccagtctgggctagagggtgagaccctgtctttatgaaaaaagaaaaagagagagaaaaatgaatatttgatagaggcacaaatcatgcagttcccacatatttgggggttattcctagaaatttcgtgtgctgttgttgggtaaagataggcaatgaggatggagagggaggtaggccatatccagcaattttggactttatgaaacaagaggaagtaaactggagtgtttaaacataaaggtggccaatatgcattttggacagcaaaatcagaaagtagaatgtgaaataactggagaagaaagacaggaagtggggaaaacatcagtttgtcagcacaataatctgggttggaaatagtgagagcctattttaaaacctctccaacattaaggatgttcccttttctaagataggcctactttgattctgtataaaaaataataagacaaagttttcaagcactaagggacactttgaaattagccaaacgtttgttctgtaattccttttgttttttactcaaggcaacagttagatgttagcaaccttgcttttgtacccttttgtctacatagggtatatcaaaagcttaagcagcctaggagccactgaggag

SEQ ID NO: 289959 - DNA, 3067 bp, Homo sapiens
  misc_feature (1121)..(1121): n is a, c, g, or t
  misc_feature (1603)..(1603): n is a, c, g, or t
gcgatgctttcggttatgtgcatcaaagaaggaggatcttgcatgtacctatgcgcacaccaaagcacctgtctgtcaaggcccacgcagtcttaagcacatacacacagtcaactacacacactgacggcacactcacacattcacagacaatttaagattagtctcagatgagcacacactaacacactcatccagtggtgagcttgggagagtgaggaggaattccggcctttgagccatgcttgtttggtgtcaggagggacttgggattcaggggctcagccactgccctgtctgcccaccacctagtttcagcagacaaccccccattttggagatccctggaggcaggctggggatgagaggaatgatgcagccccctgtgtcctgcccaggtcagcatcggctgcccagagaagatggagcccatcaccaagatctcgcatatcccagccagccgctgggctctgtcctgcagcctctgcaaggaatgcacaggcacctgcatccagtgttccatgccttcctgcgtcacagcgttccatgtcacatgcgcctttgaccacggcctggaaatgcggactatattagcagacaacgatgaggtcaagttcaagtcattctgccaggagcacagtgacgggggcccacgtaatgagcccacatctgagcccacggaacccagccaggctggcgaggacctggaaaaggtgaccctgcgcaagcagcggctgcagcagctagaggaggacttctacgagctggtggagccggctgaggtggctgagcggctggacctggctgaggcactggtcgacttcatctaccagtactggaagctgaagaggaaagccaatgccaaccagccgctgctgacccccaagaccgacgaggtggacaacctggcccagcaggagcaggacgtcctctaccgccgcctgaagctcttcacccatctgcggcaggacctagagagggttagaaatctgtgctacatggtgacaaggcgcgagagaacgaaacacgccatctgcaaactccaggagcagatattccacctgcagatgaaacttattgaacaggatctgtgtcgaggtaggcgccttccccacctgccnccgccacctccctgtgccctctcttgcggggctgggtcccaaggagggtgtgtctttggatcctggtgggggtatgtgcgtggagccaagggccactggcccccactcctacccttcaccatccaattagtaggcccagacgggggcctgcaagggtcctgagttgtgcgtcactaggcagagagccagaggttggaatgtgggcatcaggcctgccctcagggagctttctggttgactaggccacagcagttcaggagctgattgcatgtgaacaggtacagagaagaagtcctagtggctctctgctggtgctgaggcaggaagggccagaagctggtgagcttccctgaaccctggtgtgcctgggagtcagttccgaagaaggcagctgtcccagagatgtgacaggacctggctgttgtttctctctgaccctaacaggatttatgccctgcatccgcggtgtttttcactgtttnattcttattattcttattctcttggcgtcacatgcgtttagtggatctggaaatcaaaggctgaaggaagcgctgacattgatcgtatctgttaattgtggatattgccagacacagggcccttcttggagcgtatacatgttaagaagggcaacacttagcccccaaaacagtaccccagtgttgcgtttacatgcagcagaaatagctggatggagagagattttgagccagggtctgccaatgccacttcagcctcagggctgagctgggcctggagaggaaagctgctgagccaccgttggagcaaatgactgaggacctctgctgcccctacttctgcccgagagctgagctgacctgattgtgctttggcatcaccacccactctggccccaacatctagccttgccaagttcaggtgctagtcatgaccatgtagagctcaccgtgtacccaaagactgtggcagcttcctggctgctggagctttccaggccccctatcttctgtttattcactcagccagcattaactgagcatggactggatagggttgctgcccttgtggaatgcaccatctggagagagagaggaatgtggtatcgcagacgctacagttgctgccagtttagggatagaagtatcagggatgtcttcccagaagcagtgatgctccaacaacatctcaggcacttggctgtggccacatatcggctgcagaaggagaagcccatgcaaggcacccacagttgaggaagcagagggtggcaagccacgagcagtgccctcaggcacaggattccagaagcatgggcaagagcctggagggtccacatccccacattggttctggggacatttgcaactccttgtcttgagtgtcaacaacaggcagctctttgttcagggcagggcagggtatttggagatgactggtttgccctgtccaaagctgctgctcacactgttgagaggcttgacgcctggggtgggacatgggctgtgtgcatatcggcgaggctgtctggcctggcggctggacaaagcctcctagtggagatgatatttggcctgtgaactgaatcaggtgaaggataggagaagaaaacagcatatttggagacttagtggccagagcatgtcttggcagagaaactggaaggaggctggaatggctgcaccaggcagaaggaagactcctaaagtggggatgacgggtaacctgggtcacatgtgcgagatcttcttgtagcctgggggaggagcttacactgtcctgagagcagtggggagcctcaggagcctgcctccagagtatctaggcattagttacatgccatgttacagatgagattgcccaggcacagtggctcatgcctaaaatcccagcactttgggagaccacagtgggaagatcacttgaagccaggagttccagaccagcctgtctctacaaaaaaa

SEQ ID NO: 289960 - DNA, 1128 bp, Homo sapiens
gcgatgctttcggttatgtgcatcaaagaaggaggatcttgcatgtacctatgcgcacaccaaagcacctgtctgtcaaggcccacgcagtcttaagcacatacacacagtcaactacacacactgacggcacactcacacattcacagacaatttaagattagtctcagatgagcacacactaacacactcatccagtggtgagcttgggagagtgaggaggaattccggcctttgagccatgcttgtttggtgtcaggagggacttgggattcaggggctcagccactgccctgtctgcccaccacctagtttcagcagacaaccccccattttggagatccctggaggcaggctggggatgagaggaatgatgcagccccctgtgtcctgcccaggtcagcatcggctgcccagagaagatggagcccatcaccaagatctcgcatatcccagccagccgctgggctctgtcctgcagcctctgcaaggaatgcacaggcacctgcatccagtgttccatgccttcctgcgtcacagcgttccatgtcacatgcgcctttgaccacggcctggaaatgcggactatattagcagacaacgatgaggtcaagttcaagtcattctgccaggagcacagtgacgggggcccacgtaatgagcccacatctgagcccacggaacccagccaggctggcgaggacctggaaaaggtgaccctgcgcaagcagcggctgcagcagctagaggaggacttctacgagctggtggagccggctgaggtggctgagcggctggacctggctgaggcactggtcgacttcatctaccagtactggaagctgaagaggaaagccaatgccaaccagccgctgctgacccccaagaccgacgaggtggacaacctggcccagcaggagcaggacgtcctctaccgccgcctgaagctcttcacccatctgcggcaggacctagagagggttagaaatctgtgctacatggtgacaaggcgcgagagaacgaaacacgccatctgcaaactccaggagcagatattccacctgcagatgaaacttattgaacaggatctgtgtcgacgcgcaatgttggtggggatcctgctagagt

SEQ ID NO: 289961 - DNA, 2991 bp, Homo sapiens
cgcggggggccggggccgggccgttgcctagcaacgccgagccccgcccggccggcgcgtgcctgcccccagcatggcttggcagggctggcccgcggcgtggcagtgggtcgccggctgctggctcctcctcgtccttgtcctcgtcctacttgtgagcccccgcggctgccgagcgcggcggggcctccgcggtctgctcatggcgcacagccagcggctgctcttccgaatcgggtacagcctgtacacccgcacctggctcgggtacctcttctaccgacagcagctgcgcagggctcggaatcgctaccctaaaggccactcgaaaacccagccccgcctcttcaatggagtgaaggtgcttcccatccctgtcctctcggacaactacagctacctcatcatcgacacccaggcccagctggctgtggctgtggacccttcagaccctcgggctgtgcaggcttccattgaaaaggaaggggtcaccttggtcgccattctgtgtactcacaagcactgggaccacagtggagggaaccgtgacctcagccggcggcaccgggactgtcgggtgtacgggagccctcaggacggcatcccctacctcacccatcccctgtgtcatcaagatgtggtcagcgtgggacggcttcagatccgggccctggctacacctggccacacacaaggccatctggtctacctactggatggggagccctacaagggtccctcctgcctcttctcaggggacctgctcttcctctctggctgtgggcggacctttgagggcaatgcagagaccatgctgagctcactggacactgtgctggggctaggggatgacacccttctgtggcctggtcatgagtatgcagaggagaacctgggctttgcaggtgtggtggagcccgagaacctggcccgggagaggaagatgcagtgggtgcagcggcagcggctggagcgcaagggcacgtgcccatctaccctgggagaggagcgctcctacaacccgttcctgagaacccactgcctggcgctacaggaggctctggggccggggccgggccccactggggatgatgactactcccgggcccagctcctggaagagctccgccggctgaaggatatgcacaagagcaagtgatgcccccagcgcccccagcccagcccactccccgcatggggaggccgccaccaccaacacctcatcatccttctcatcgctaacaccaccacctccatcggcacccaagcgggcatcatccccccacactgctcaggggaggggagggatcaggcgatgagactgtgaggccaaaagaagggggcctgttggaggctgggaaccccgcagcgcgaggctgcctcatcaacggcaagaggaaaggaggggtctcgggacatctccagaccctaccaactgggagggtcccctcctccttccctactcctgggacggcagcaaggacatgggggctgctgttagcttctccgtcaggaggcctcatctcactgtagccctggaacccagggtccatcttgcccttcccccatccatggttgggaaagaagctcagcccctcacagtggcctcaagtgtgatgccttacaaaagcaccactcagatgggcagctggactctggtgtcctgagactctgccctcttcccacagcctccctgccccacccatccctgcaaagccatttttcagacagagccattcctaagaacactgaagggctggaatgctggctggccactctctgcctcagtggcctccctacagcctggaagaaggagggtcctgattgccaaggaaacctcctcattgggctaaggagacactggagtctggagtgtggagccccacagtcttgcaggtcacatgctctccttgcacatctggcctggttgtacccactggcctctgcctctgccctgggccaaaagggcccctccttgccaggggagagacagccacggtcctctttggccgatgctgtattctcattttggcccttgttcttaggcccgtctgcccgccttcctccatctaacctttcctgttttatccgcagcccttttcttctttgagttagtaaagatttattctgtaacctgacactcatctggccctttgcagtttgccagccatattcccatgtgatttcccactggatccaggcccccatccggctggcaggagggggctctgacgtacaggttggaaatcagaagtctgtgagagcgcgggagtgcatggcagctctgggtcccagacctggcccgacccctctgcttcacctccagctctgctgctcctctactcttgggtcgagatccctttggagccacagcgaggaaccctgtggtcctcaggcaggtgtaccttgagtcagccaggagccctcttttcctgtgtcaaagcctgccctcgggctctgctcacctctggtgaccctccaagatgcccctgccctcagtttcccctcatgatctggcctctgcccccttctctagccacagcctctagtacactttagcaataccaccagactagttagagttccccactcaccaagcaagacatgcagtttcatgcctctgtgccttcgctcatgctgtttcttccgactggaatgccttcccctgctcctcctgccttgtctgcctggcaagttcatctctcacgatcccctcaaaggccccctcctccaggaaggcaacccctgtgcccctcccctccaggctacctctgcactttgtcaatgcttctcttgtggcacttatcacactgtattttacttgtttacatgtttgtctccccttctagactgtgaatccttaagggcatggactgtatcttatgcatctctgtatttctgcgcctagcacggtgcctagcacacagtaggcgctcaataaatgttgaatgaatgaatgatttaatcaagacttgatcacccaaaagcttg

SEQ ID NO: 289962 - DNA, 3002 bp, Homo sapiens
tgggatctgaacatggcggcggtggtagctgctacggcgctgaagggccggggggcgagaaatgcccgcgtcctccgggggattctcgcaggagccacagctaacaaggcttctcataacaggacccgggccctgcaaagccacagctccccagagggcaaggaggaacctgaacccctatccccggagctggaatacattcccagaaagaggggcaagaaccccatgaaagctgtgggactggcctggtacagcctgtacacccgcacctggctcgggtacctcttctaccgacagcagctgcgcagggctcggaatcgctaccctaaaggccactcgaaaacccagccccgcctcttcaatggagtgaaggtgcttcccatccctgtcctctcggacaactacagctacctcatcatcgacacccaggcccagctggctgtggctgtggacccttcagaccctcgggctgtgcaggcttccattgaaaaggaaggggtcaccttggtcgccattctgtgtactcacaagcactgggaccacagtggagggaaccgtgacctcagccggcggcaccgggactgtcgggtgtacgggagccctcaggacggcatcccctacctcacccatcccctgtgtcatcaagatgtggtcagcgtgggacggcttcagatccgggccctggctacacctggccacacacaaggccatctggtctacctactggatggggagccctacaagggtccctcctgcctcttctcaggggacctgctcttcctctctggctgtgggcggacctttgagggcaatgcagagaccatgctgagctcactggacactgtgctggggctaggggatgacacccttctgtggcctggtcatgagtatgcagaggagaacctgggctttgcaggtgtggtggagcccgagaacctggcccgggagaggaagatgcagtgggtgcagcggcagcggctggagcgcaagggcacgtgcccatctaccctgggagaggagcgctcctacaacccgttcctgagaacccactgcctggcgctacaggaggctctggggccggggccgggccccactggggatgatgactactcccgggcccagctcctggaagagctccgccggctgaaggatatgcacaagagcaagtgatgcccccagcgcccccagcccagcccactccccgcatggggaggccgccaccaccaacacctcatcatccttctcatcgctaacaccaccacctccatcggcacccaagcgggcatcatccccccacactgctcaggggaggggagggatcaggcgatgagactgtgaggccaaaagaagggggcctgttggaggctgggaaccccgcagcgcgaggctgcctcatcaacggcaagaggaaaggaggggtctcgggacatctccagaccctaccaactgggagggtcccctcctccttccctactcctgggacggcagcaaggacatgggggctgctgttagcttctccgtcaggaggcctcatctcactgtagccctggaacccagggtccatcttgcccttcccccatccatggttgggaaagaagctcagcccctcacagtggcctcaagtgtgatgccttacaaaagcaccactcagatgggcagctggactctggtgtcctgagactctgccctcttcccacagcctccctgccccacccatccctgcaaagccatttttcagacagagccattcctaagaacactgaagggctggaatgctggctggccactctctgcctcagtggcctccctacagcctggaagaaggagggtcctgattgccaaggaaacctcctcattgggctaaggagacactggagtctggagtgtggagccccacagtcttgcaggtcacatgctctccttgcacatctggcctggttgtacccactggcctctgcctctgccctgggccaaaagggcccctccttgccaggggagagacagccacggtcctctttggccgatgctgtattctcattttggcccttgttcttaggcccgtctgcccgccttcctccatctaacctttcctgttttatccgcagcccttttcttctttgagttagtaaagatttattctgtaacctgacactcatctggccctttgcagtttgccagccatattcccatgtgatttcccactggatccaggcccccatccggctggcaggagggggctctgacgtacaggttggaaatcagaagtctgtgagagcgcgggagtgcatggcagctctgggtcccagacctggcccgacccctctgcttcacctccagctctgctgctcctctactcttgggtcgagatccctttggagccacagcgaggaaccctgtggtcctcaggcaggtgtaccttgagtcagccaggagccctcttttcctgtgtcaaagcctgccctcgggctctgctcacctctggtgaccctccaagatgcccctgccctcagtttcccctcatgatctggcctctgcccccttctctagccacagcctctagtacactttagcaataccaccagactagttagagttccccactcaccaagcaagacatgcagtttcatgcctctgtgccttcgctcatgctgtttcttccgactggaatgccttcccctgctcctcctgccttgtctgcctggcaagttcatctctcacgatcccctcaaaggccccctcctccaggaaggcaacccctgtgcccctcccctccaggctacctctgcactttgtcaatgcttctcttgtggcacttatcacactgtattttacttgtttacatgtttgtctccccttctagactgtgaatccttaagggcatggactgtatcttatgcatctctgtatttctgcgcctagcacggtgcctagcacacagtaggcgctcaataaatgttgaatgaatgaatgatttaatcaagacttgatcacccaaaagcttg

SEQ ID NO: 289963 - DNA, 2735 bp, Homo sapiens
cgcggggggccggggccgggccgttgcctagcaacgccgagccccgcccggccggcgcgtgcctgcccccagcatggcttggcagggctggcccgcggcgtggcagtgggtcgccggctgctggctcctcctcgtccttgtcctcgtcctacttgtgagcccccgcggctgccgagcgcggcggggcctccgcggtctgctcatggcgcacagccagcggctgctcttccgaatcgggtacagcctgtacacccgcacctggctcgggtacctcttctaccgacagcagctgcgcagggctcggaatcgctaccctaaaggccactcgaaaacccagccccgcctcttcaatggagtgaaggtgcttcccatccctgtcctctcggacaactacagctacctcatcatcgacacccaggcccagctggctgtggctgtggacccttcagaccctcgggctgtgcaggcttccattgaaaaggaaggggtcaccttggtcgccattctgtgtactcacaagcactgggaccacagtggagggaaccgtgacctcagccggcggcaccgggactgtcgggtgtacgggagccctcaggacggcatcccctacctcacccatcccctgtgtcatcaagatgtggtcagcgtgggacggcttcagatccgggccctggctacacctggccacacacaaggccatctggtctacctactggatggggagccctacaagggtccctcctgcctcttctcaggggacctgctcttcctctctggctgtgggcggacctttgagggcaatgcagagaccatgctgagctcactggacactgtgctggggctaggggatgacacccttctgtggcctggtcatgagtatgcagaggagaacctgggctttgcaggtgtggtggagcccgagaacctggcccgggagaggaagatgcagtgggtgcagcggcagcggctggagcgcaagggcacgtgcccatctaccctgggagaggagcgctcctacaacccgttcctgagaacccactgcctggcgctacaggaggctctggggccggggccgggccccactggggatgatgactactcccgggcccagctcctggaagagctccgccggctgaaggatatgcacaagagcaagtgatgcccccagcgcccccagcccagcccactccccgcatggggaggccgccaccaccaacacctcatcatccttctcatcgctaacaccaccacctccatcggcacccaagcgggcatcatccccccacactgctcaggggaggggagggatcaggcgatgagactgtgaggccaaaagaagggggcctgttggaggctgggaaccccgcagcgcgaggctgcctcatcaacggcaagaggaaaggaggggtctcgggacatctccagaccctaccaactgggagggtcccctcctccttccctactcctgggacggcagcaaggacatgggggctgctgttagcttctccgtcaggaggcctcatctcactgtagccctggaacccagggtccatcttgcccttcccccatccatggttgggaaagaagctcagcccctcacagtggcctcaagtgtgatgccttacaaaagcaccactcagatgggcagctggactctggtgtcctgagactctgccctcttcccacagcctccctgccccacccatccctgcaaagccatttttcagacagagccattcctaagaacactgaagggctggaatgctggctggccactctctgcctcagtggcctccctacagcctggaagaaggagggtcctgattgccaaggaaacctcctcattgggctaaggagacactggagtctggagtgtggagccccacagtcttgcaggtcacatgctctccttgcacatctggcctggttgtacccactggcctctgcctctgccctgggccaaaagggcccctccttgccaggggagagacagccacggtcctctttggccgatgctgtattctcattttggcccttgttcttaggcccgtctgcccgccttcctccatctaacctttcctgttttatccgcagcccttttcttctttgagttagtaaagatttattctgtaacctgacactcatctggccctttgcagtttgccagccatattcccatgtgatttcccactggatccaggcccccatccggctggcaggagggggctctgacgtacaggttggaaatcagaagtctgtgagagcgcgggagtgcatggcagctctgggtcccagacctggcccgacccctctgcttcacctccagctctgctgctcctctactcttgggtcgagatccctttggagccacagcgaggaaccctgtggtcctcaggcaggtgtaccttgagtcagccaggagccctcttttcctgtgtcaaagcctgccctcgggctctgctcacctctggtgaccctccaagatgcccctgccctcagtttcccctcatgatctggcctctgcccccttctctagccacagcctctagtacaactgtattttacttgtttacatgtttgtctccccttctagactgtgaatccttaagggcatggactgtatcttatgcatctctgtatttctgcgcctagcacggtgcctagcacacagtaggcgctcaataaatgttgaatgaatgaatgatttaatcaagacttgatcacccaaaagcttg

SEQ ID NO: 289964 - DNA, 1514 bp, Homo sapiens
cgcggggggccggggccgggccgttgcctagcaacgccgagccccgcccggccggcgcgtgcctgcccccagcatggcttggcagggctggcccgcggcgtggcagtgggtcgccggctgctggctcctcctcgtccttgtcctcgtcctacttgtgagcccccgcggctgccgagcgcggcggggcctccgcggtctgctcatggcgcacagccagcggctgctcttccgaatcgggtacagcctgtacacccgcacctggctcgggtacctcttctaccgacagcagctgcgcagggctcggaatcgctaccctaaaggccactcgaaaacccagccccgcctcttcaatggagtgaaggtgcttcccatccctgtcctctcggacaactacagctacctcatcatcgacacccaggcccagctggctgtggctgtggacccttcagaccctcgggctgtgcaggcttccattgaaaaggaaggggtcaccttggtcgccattctgtgtactcacaagcactgggaccacagtggagggaaccgtgacctcagccggcggcaccgggactgtcgggtgtacgggagccctcaggacggcatcccctacctcacccatcccctgtgtcatcaagatgtggtcagcgtgggacggcttcagatccgggccctggctacacctggccacacacaaggccatctggtctacctactggatggggagccctacaagggtccctcctgcctcttctcaggggacctgctcttcctctctggctgtgggcggacctttgagggcaatgcagagaccatgctgagctcactggacactgtgctggggctaggggatgacacccttctgtggcctggtcatgagtatgcagaggagaacctgggctttgcaggtgtggtggagcccgagaacctggcccgggagaggaagatgcagtgggtgcagcggcagcggctggagcgcaagggcacgtgcccatctaccctgggagaggagcgctcctacaacccgttcctgagaacccactgcctggcgctacaggaggctctggggccggggccgggccccactggggatgatgactactcccgggcccagctcctggaagagctccgccggctgaaggatatgcacaagagcaagtgatgcccccagcgcccccagcccagcccactccccgcatggggaggccgccaccaccaacacctcatcatccttctcatcgctaacaccaccacctccatcggcacccaagcgggcatcatcccctccaggctacctctgcactttgtcaatgcttctcttgtggcacttatcacactgtattttacttgtttacatgtttgtctccccttctagactgtgaatccttaagggcatggactgtatcttatgcatctctgtatttctgcgcctagcacggtgcctagcacacagtaggcgctcaataaatgttgaatgaatgaatgatttaatcaagacttgatcacccaaaagcttg

SEQ ID NO: 289965 - DNA, 3633 bp, Homo sapiens
cctgggtgacagagcaagacccaaaaaaagaattatagatttgcatttttggcacaaataccacagaagtgatcttatgccctcctcagtgcatcataccaagaggcaaatgatgtctatatattgttactggtacagcctgtacacccgcacctggctcgggtacctcttctaccgacagcagctgcgcagggctcggaatcgctaccctaaaggccactcgaaaacccagccccgcctcttcaatggagtgaaggtgcttcccatccctgtcctctcggacaactacagctacctcatcatcgacacccaggcccagctggctgtggctgtggacccttcagaccctcgggctgtgcaggcttccattgaaaaggaaggggtcaccttggtcgccattctgtgtactcacaagcactggtaaggggctcccgtcttccctggcccacccttgtcccagctgggcttgccaggactgggcccattgaggacggccggggccagagatcaagaagtcagtacgggccggcacccgccttcctcgtgaagtcacctggacaccagcagggagggaggagaggggacagtctcccaccactccattgatcaagcttctgaagccccagagggcagggcagtcatttctctttcatttcatgggcatgtattagatacctactgcacactgggcatggacaaaagttatgactcttccatcaaggaaattctaagaccaataggggaggtagccctgtatcaaagtatataacagcggaggcaagagggttgggagttcaagcccaacctgggcaacatagtgagaccttgtcttcaaaaaagaagtatgtgatatttaggtaacagttggcacagggaacagggatgggaggcccaggcacggtgtgatcagatccacttggagaattgaaagatgatgacctgagctgagggttcaggaagctcggctggcattggccagcttgagttgttgggggcgatgttctgggcaagggaacagcttgaacaaaggcctagaggtgtggacaacttggcttagtccagaagccacagccccagcacttaaaggcctggagatgctgtggtaaagaagggggcttaggtacagttgcccctcgaagccccctgcctgtctctgctgtcctgcagggaccacagtggagggaaccgtgacctcagccggcggcaccgggactgtcgggtgtacgggagccctcaggacggcatcccctacctcacccatcccctgtgtcatcaagatgtggtcagcgtgggacggcttcagatccgggccctggctacacctggccacacacaaggccatctggtctacctactggatggggagccctacaagggtccctcctgcctcttctcaggggacctgctcttcctctctggctgtgggcggacctttgagggcaatgcagagaccatgctgagctcactggacactgtgctggggctaggggatgacacccttctgtggcctggtcatgagtatgcagaggagaacctgggctttgcaggtgtggtggagcccgagaacctggcccgggagaggaagatgcagtgggtgcagcggcagcggctggagcgcaagggcacgtgcccatctaccctgggagaggagcgctcctacaacccgttcctgagaacccactgcctggcgctacaggaggctctggggccggggccgggccccactggggatgatgactactcccgggcccagctcctggaagagctccgccggctgaaggatatgcacaagagcaagtgatgcccccagcgcccccagcccagcccactccccgcatggggaggccgccaccaccaacacctcatcatccttctcatcgctaacaccaccacctccatcggcacccaagcgggcatcatccccccacactgctcaggggaggggagggatcaggcgatgagactgtgaggccaaaagaagggggcctgttggaggctgggaaccccgcagcgcgaggctgcctcatcaacggcaagaggaaaggaggggtctcgggacatctccagaccctaccaactgggagggtcccctcctccttccctactcctgggacggcagcaaggacatgggggctgctgttagcttctccgtcaggaggcctcatctcactgtagccctggaacccagggtccatcttgcccttcccccatccatggttgggaaagaagctcagcccctcacagtggcctcaagtgtgatgccttacaaaagcaccactcagatgggcagctggactctggtgtcctgagactctgccctcttcccacagcctccctgccccacccatccctgcaaagccatttttcagacagagccattcctaagaacactgaagggctggaatgctggctggccactctctgcctcagtggcctccctacagcctggaagaaggagggtcctgattgccaaggaaacctcctcattgggctaaggagacactggagtctggagtgtggagccccacagtcttgcaggtcacatgctctccttgcacatctggcctggttgtacccactggcctctgcctctgccctgggccaaaagggcccctccttgccaggggagagacagccacggtcctctttggccgatgctgtattctcattttggcccttgttcttaggcccgtctgcccgccttcctccatctaacctttcctgttttatccgcagcccttttcttctttgagttagtaaagatttattctgtaacctgacactcatctggccctttgcagtttgccagccatattcccatgtgatttcccactggatccaggcccccatccggctggcaggagggggctctgacgtacaggttggaaatcagaagtctgtgagagcgcgggagtgcatggcagctctgggtcccagacctggcccgacccctctgcttcacctccagctctgctgctcctctactcttgggtcgagatccctttggagccacagcgaggaaccctgtggtcctcaggcaggtgtaccttgagtcagccaggagccctcttttcctgtgtcaaagcctgccctcgggctctgctcacctctggtgaccctccaagatgcccctgccctcagtttcccctcatgatctggcctctgcccccttctctagccacagcctctagtacactttagcaataccaccagactagttagagttccccactcaccaagcaagacatgcagtttcatgcctctgtgccttcgctcatgctgtttcttccgactggaatgccttcccctgctcctcctgccttgtctgcctggcaagttcatctctcacgatcccctcaaaggccccctcctccaggaaggcaacccctgtgcccctcccctccaggctacctctgcactttgtcaatgcttctcttgtggcacttatcacactgtattttacttgtttacatgtttgtctccccttctagactgtgaatccttaagggcatggactgtatcttatgcatctctgtatttctgcgcctagcacggtgcctagcacacagtaggcgctcaataaatgttgaatgaatgaatgatttaatcaagacttgatcacccaaaagcttg

SEQ ID NO: 289966 - DNA, 1596 bp, Homo sapiens
cgcggggggccggggccgggccgttgcctagcaacgccgagccccgcccggccggcgcgtgcctgcccccagcatggcttggcagggctggcccgcggcgtggcagtgggtcgccggctgctggctcctcctcgtccttgtcctcgtcctacttgtgagcccccgcggctgccgagcgcggcggggcctccgcggtctgctcatggcgcacagccagcggctgctcttccgaatcgggtacagcctgtacacccgcacctggctcgggtacctcttctaccgacagcagctgcgcagggctcggaatcgctaccctaaaggccactcgaaaacccagccccgcctcttcaatggagtgaaggtgcttcccatccctgtcctctcggacaactacagctacctcatcatcgacacccaggcccagctggctgtggctgtggacccttcagaccctcgggctgtgcaggcttccattgaaaaggaaggggtcaccttggtcgccattctgtgtactcacaagcactgggaccacagtggagggaaccgtgacctcagccggcggcaccgggactgtcgggtgtacgggagccctcaggacggcatcccctacctcacccatcccctgtgtcatcaagatgtggtcagcgtgggacggcttcagatccgggccctggctacacctggccacacacaaggccatctggtctacctactggatggggagccctacaagggtccctcctgcctcttctcaggggacctgctcttcctctctggctgtgggcggacctttgagggcaatgcagagaccatgctgagctcactggacactgtgctggggctaggggatgacacccttctgtggcctggtcatgagtatgcagaggagaacctgggctttgcaggtgtggtggagcccgagaacctggcccgggagaggaagatgcagtgggtgcagcggcagcggctggagcgcaagggcacgtgcccatctaccctgggagaggagcgctcctacaacccgttcctgagaacccactgcctggcgctacaggaggctctggggccggggccgggccccactggggatgatgactactcccgggcccagctcctggaagagctccgccggctgaaggatatgcacaagagcaagtgatgcccccagcgcccccagcccagcccactccccgcatggggaggccgccaccaccaacacctcatcatccttctcatcgctaacaccaccacctccatcggcacccaagcgggcatcatccccccacactgctcaggggaggggagggatcaggcgatgagactgtgaggcctcctccaggaaggcaacccctgtgcccctcccctccaggctacctctgcactttgtcaatgcttctcttgtggcacttatcacactgtattttacttgtttacatgtttgtctccccttctagactgtgaatccttaagggcatggactgtatcttatgcatctctgtatttctgcgcctagcacggtgcctagcacacagtaggcgctcaataaatgttgaatgaatgaatgatttaatcaagacttgatcacccaaaagcttg

SEQ ID NO: 289967 - DNA, 2007 bp, Homo sapiens
cggcagcacaggccaataggcaattagcgcgcgccaggctgccttccccgcgccggacccgggacgtctgaacggaagttcgacccatcggcgacccgacggcgagaccccgccccatccccgactgcctgaaccgcgccaggagacggaccgcaagtccagcgtacccacagacgactcaggcgggagacgagcggtgtcatggccgccgacagtgacgatggcgcagtttcagctcccgcagcttccgacggtggtgtcagcaaaagcacaacatctggggaggagctagtagtccaggttcccgtagtggatgtgcaaagcaacaacttcaaggagatgtggccatccctcctgctagccataaagacagctaatttcgtggctgtggacacggagctgagtgggcttggggacaggaagagtttgctgaaccagtgcattgaggaacgttacaaggccgtgtgtcatgctgccaggacccgttctatcctttccctgggcctcgcctgcttcaagcggcagccagacaagggtgaacattcctatctggctcaagtgttcaatctcactctgctgtgcatggaggagtatgtcatagaaccaaagtctgtgcagttcctgatacagcatggcttcaacttcaaccagcagtatgcccaaggcatcccctaccataagggcaatgacaagggtgatgagagccagagccagtcagtacggaccctattcctggagctaatccgagcccgccggcccctggtgctacacaatggccttatagacttggtgttcctgtaccagaacttctatgcacacctccctgagagtctgggaaccttcaccgctgacctgtgtgagatgttcccagcaggcatttatgacaccaaatatgctgctgagtttcatgcccgtttcgtggcctcctacttagaatatgccttccggaaatgtgaacgggaaaatgggaagcagcgggcagctggcagcccacaccttaccctggagttctgcaactatccttccagcatgagggaccatattgattaccgctgctgcctgcccccagcaacccaccgtcctcatcccaccagcatctgtgacaacttctcggcttatggctggtgccccctgggaccacagtgtcctcagtctcacgatattgaccttatcattgacactgatgaggctgcggcagaggacaagcggcgacggcgacgacgtagggaaaaacggaagagggctttattgaacctaccggggacacagacctctggggaagctaaggatggtcctcccaagaagcaggtctgtggggatagcatcaagcctgaagaaaccgagcaggaggtggctgccgatgaaactaggaacctgcctcactccaagcaaggcaacaaaaatgacttagagatggggattaaggcagcaaggcctgaaatagctgatagagctacctcagaagtgccagggagccaagccagtcctaacccagtgcctggggatggattgcaccgggctggttttgatgcctttatgacaggttatgtgatggcctatgtggaagtgagccagggaccgcagccctgcagctctggaccctggctccctgaatgccacaataaggtatatttgagtggcaaagctgtacccctcacagtggccaagagccagttctctcgttcctccaaagcccacaatcagaagatgaagctcacttggggcagtagctgatgcaacttccaccttgctctcaggtggaacagaggtattttgggtctctctagcctgaaatgtcatcctcaactgctactgagtttaggggagggggaatgtcttgacagacatcactgcattgccctggaccgcctcctttatcccagtgtttgaggtacaagtaagaaggctgaccagcacctgtaacactgactttatttttaagtctgaaaatgtcttgggaaagttttacaaaaaaaaaaatcaacagaagcaagttatgaaaatatt

SEQ ID NO: 289968 - DNA, 381 bp, Homo sapiens
caagccagtagaagactcaggcttcctctccccaaattcagggcattctccactccaaggcctgtgtgtagaacacgtgggttacaaaggcttgtgggaaaagctaccaatggaaactaccccccttaccaccatcaccgtggcctagcttggtgtctgttcccctgggctctttccttaagcatgaacatccatcaccctcctaacccccaggtggtgtcagcaaaagcacaacatctggggaggagctagtagtccaggttcccgtagtggatgtgcaaagcaacaacttcaaggagatgtggccatccctcctgctagccataaagacagctaatttcgtggctgtggacacggagctgagtgggcttggaaggaggg

SEQ ID NO: 289969 - DNA, 734 bp, Homo sapiens
cggcagcacaggccaataggcaattagcgcgcgccaggctgccttccccgcgccggacccgggacgtctgaacggaagttcgacccatcggcgacccgacggcgagaccccgccccatccccgactgcctgaaccgcgccaggagacggaccgcaagtccagcgtacccacagacgactcaggcgggagacgagcggtgtcatggccgccgacagtgacgatggcgcagtttcagctcccgcagcttccgacggtgagcggcttcccagaggtagccttcaaagcctctgcgctctgggagaggggaaggcctcgggctcatagttctagaggctcctcaagcttcagaggactgctccttccgcctgaactagccacgaggagactacaagttccgttgtacaccgcggctccggctgcaaaagcctggagcgttgggagcatggggctgatggaggcatggcgggagatgtagtctggagctcataacggttagtagtaatagttgtgattcagttcagtggagtggattgagcgttgtgatccaaaggaaggtaggacgtattgggagctctggtgtggggcactgccaggctctggggcttactgggagctgttgcttgtggcgctggggcaccatgagaacagtagtatggatccctgtgggatattaagggagctgagatcctcaagccctacaaaatgtttcctgcaggacatgggaaaaaagaatc

SEQ ID NO: 289970 - DNA, 2115 bp, Homo sapiens
cggcagcacaggccaataggcaattagcgcgcgccaggctgccttccccgcgccggacccgggacgtctgaacggaagttcgacccatcggcgacccgacggcgagaccccgccccatccccgactgcctgaaccgcgccaggagacggaccgcaagtccagcgtacccacagacgactcaggcgggagacgagcggtgtcatggccgccgacagtgacgatggcgcagtttcagctcccgcagcttccgacggtggtgtcagcaaaagcacaacatctggggaggagctagtagtccaggttcccgtagtggatgtgcaaagcaacaacttcaaggagatgtggccatccctcctgctagccataaagacagctaatttcgtggctgtggacacggagctgagtgggcttggggacaggaagagtttgctgaaccagtgcattgaggaacgttacaaggccgtgtgtcatgctgccaggacccgttctatcctttccctgggcctcgcctgcttcaagcggcagccagacaagggtgaacattcctatctggctcaagtgttcaatctcactctgctgtgcatggaggagtatgtcatagaaccaaagtctgtgcagttcctgatacagcatggcttcaacttcaaccagcagtatgcccaaggcatcccctaccataagggcaatgacaagggtgatgagagccagagccagtcagtacggaccctattcctggagctaatccgagcccgccggcccctggtgctacacaatggccttatagacttggtgttcctgtaccagaacttctatgcacacctccctgagagtctgggaaccttcaccgctgacctgtgtgagatgttcccagcaggcatttatgacaccaaatatgctgctgagtttcatgcccgtttcgtggcctcctacttagaatatgccttccggaaatggcagtgttttaggtgctgaggattcagcagtgaacaaaacagaccacaaaaccctgctcttatggagcttatatgctagtggaccattaccctcttgcgctgttgcagtgaacgggaaaatgggaagcagcgggcagctggcagcccacaccttaccctggagttctgcaactatccttccagcatgagggaccatattgattaccgctgctgcctgcccccagcaacccaccgtcctcatcccaccagcatctgtgacaacttctcggcttatggctggtgccccctgggaccacagtgtcctcagtctcacgatattgaccttatcattgacactgatgaggctgcggcagaggacaagcggcgacggcgacgacgtagggaaaaacggaagagggctttattgaacctaccggggacacagacctctggggaagctaaggatggtcctcccaagaagcaggtctgtggggatagcatcaagcctgaagaaaccgagcaggaggtggctgccgatgaaactaggaacctgcctcactccaagcaaggcaacaaaaatgacttagagatggggattaaggcagcaaggcctgaaatagctgatagagctacctcagaagtgccagggagccaagccagtcctaacccagtgcctggggatggattgcaccgggctggttttgatgcctttatgacaggttatgtgatggcctatgtggaagtgagccagggaccgcagccctgcagctctggaccctggctccctgaatgccacaataaggtatatttgagtggcaaagctgtacccctcacagtggccaagagccagttctctcgttcctccaaagcccacaatcagaagatgaagctcacttggggcagtagctgatgcaacttccaccttgctctcaggtggaacagaggtattttgggtctctctagcctgaaatgtcatcctcaactgctactgagtttaggggagggggaatgtcttgacagacatcactgcattgccctggaccgcctcctttatcccagtgtttgaggtacaagtaagaaggctgaccagcacctgtaacactgactttatttttaagtctgaaaatgtcttgggaaagttttacaaaaaaaaaaatcaacagaagcaagttatgaaaatatt

SEQ ID NO: 289971 - DNA, 472 bp, Homo sapiens
cggcagcacaggccaataggcaattagcgcgcgccaggctgccttccccgcgccggacccgggacgtctgaacggaagttcgacccatcggcgacccgacggcgagaccccgccccatccccgactgcctgaaccgcgccaggagacggaccgcaagtccagcgtacccacagacgactcaggcgggagacgagcggtgtcatggccgccgacagtgacgatggcgcagtttcagctcccgcagcttccgacggtggtgtcagcaaaagcacaacatctggggaggagctagtagtccaggttcccgtagtggatgtgcaaagcaacaacttcaaggagatgtggccattcaacgcctccgggccattcaagcccggaggcgttgaatggcccggtgaatggccgttttataagcattgggtaggtaaaggaaaattacagtcaaagggcggttggccattcaacgcctccg

SEQ ID NO: 289972 - DNA, 2174 bp, Homo sapiens
cggcagcacaggccaataggcaattagcgcgcgccaggctgccttccccgcgccggacccgggacgtctgaacggaagttcgacccatcggcgacccgacggcgagaccccgccccatccccgactgcctgaaccgcgccaggagacggaccgcaagtccagcgtacccacagacgactcaggcgggagacgagcggtgtcatggccgccgacagtgacgatggcgcagtttcagctcccgcagcttccgacggtggtgtcagcaaaagcacaacatctggggaggagctagtagtccaggttcccgtagtggatgtgcaaagcaacaacttcaaggagatgtggccatccctcctgctagccataaagacagctaatttcgtggctgtggacacggagctgagtgggcttggggacaggaagagtttgctgaaccagtgcattgaggaacgttacaaggccgtgtgtcatgctgccaggacccgttctatcctttccctgggcctcgcctgcttcaagcggcagccagacaagggtgaacattcctatctggctcaagtgttcaatctcactctgctgtgcatggaggagtatgtcatagaaccaaagtctgtgcagttcctgatacagcatggcttcaacttcaaccagcagtatgcccaaggcatcccctaccataagggcaatgacaagggtgatgagagccagagccagtcagtacggaccctattcctggagctaatccgagcccgccggcccctggtgctacacaatggccttatagacttggtgttcctgtaccagaacttctatgcacacctccctgagagtctgggaaccttcaccgctgacctgtgtgagatgttcccagcaggcatttatgacaccaaatatgctgctgagtttcatgcccgtttcgtggcctcctacttagaatatgccttccggaaatgtgaacgggaaaatgggaagcagcgggcagctggcagcccacaccttaccctggagttctgcaactatccttccagcatgagggaccatattgattaccgctgctgcctgcccccagcaacccaccgtcctcatcccaccagcatctgtgacaacttctcggcttatggctggtgccccctgggaccacagtgtcctcagtctcacgatattgaccttatcattgacactgatgaggctgcggcagaggacaagcggcgacggcgacgacgtagggaaaaacggaagagggctttattgaacctaccggggacacagacctctggggaagctaaggatggtcctcccaagaagcaggtctgtggggatagcatcaagcctgaagaaaccgagcaggaggtggctgccgatgaaactaggaacctgcctcactccaagcaaggcaacaaaaatgacttagagatggggattaaggcagcaaggcctgaaatagctgatagagctacctcagaagtgccagggagccaagccagtcctaacccagtgcctggggatggattgcaccgggctggttttgatgcctttatgacaggttatgtgatggcctatgtggaagtgagccagggaccgcagccctgcagctctggaccctggctccctgaatgccacaataaggtatatttgagtggcaaagctgtacccctcacagtggccaagagccagttctctcgttcctccaaagcccacaatcagaagatgaagctcacttggggcagtagctgatgcaacttccaccttgctctcaggtggaacagaggtattttgggtctctctagcctgaaatgtcatcctcaactgctactgagtttaggggagggggaatgtcttgacagacatcactgcattgccctggaccgcctcctttatcccagtgtttgaggtacaagtaagaaggctgaccagcacctgtaacactgactttatttttaagtctgaaaatgtcttgggaaagttttacaaaaaaaaaaatcaacagaagcaagttatgaaaatatttgaccagcttcatctttggttatttcttattgcagctctgtaaggacagactgttcccaaagctccagccatggcaggaagggaagcaaatcagtccctgtataaaccatttaaccaattgaatgtatcacatgttgataaatacatagaagcaggccctagggcct

SEQ ID NO: 289973 - DNA, 2353 bp, Homo sapiens
cggcagcacaggccaataggcaattagcgcgcgccaggctgccttccccgcgccggacccgggacgtctgaacggaagttcgacccatcggcgacccgacggcgagaccccgccccatccccgactgcctgaaccgcgccaggagacggaccgcaagtccagcgtacccacagacgactcaggcgggagacgagcggtgtcatggccgccgacagtgacgatggcgcagtttcagctcccgcagcttccgacggtgagcggcttcccagaggtagccttcaaagcctctgcgctctgggagaggggaaggcctcgggctcatagttctagaggctcctcaagcttcagaggactgctccttccgcctgaactagccacgaggagactacaagttccgttgtacaccgcggctccggctgcaaaagcctggagcgttgggagcatggggctgatggaggcatggcgggagatgtagtctggagctcataacggtggtgtcagcaaaagcacaacatctggggaggagctagtagtccaggttcccgtagtggatgtgcaaagcaacaacttcaaggagatgtggccatccctcctgctagccataaagacagctaatttcgtggctgtggacacggagctgagtgggcttggggacaggaagagtttgctgaaccagtgcattgaggaacgttacaaggccgtgtgtcatgctgccaggacccgttctatcctttccctgggcctcgcctgcttcaagcggcagccagacaagggtgaacattcctatctggctcaagtgttcaatctcactctgctgtgcatggaggagtatgtcatagaaccaaagtctgtgcagttcctgatacagcatggcttcaacttcaaccagcagtatgcccaaggcatcccctaccataagggcaatgacaagggtgatgagagccagagccagtcagtacggaccctattcctggagctaatccgagcccgccggcccctggtgctacacaatggccttatagacttggtgttcctgtaccagaacttctatgcacacctccctgagagtctgggaaccttcaccgctgacctgtgtgagatgttcccagcaggcatttatgacaccaaatatgctgctgagtttcatgcccgtttcgtggcctcctacttagaatatgccttccggaaatggcagtgttttaggtgctgaggattcagcagtgaacaaaacagaccacaaaaccctgctcttatggagcttatatgctagtggaccattaccctcttgcgctgttgcagtgaacgggaaaatgggaagcagcgggcagctggcagcccacaccttaccctggagttctgcaactatccttccagcatgagggaccatattgattaccgctgctgcctgcccccagcaacccaccgtcctcatcccaccagcatctgtgacaacttctcggcttatggctggtgccccctgggaccacagtgtcctcagtctcacgatattgaccttatcattgacactgatgaggctgcggcagaggacaagcggcgacggcgacgacgtagggaaaaacggaagagggctttattgaacctaccggggacacagacctctggggaagctaaggatggtcctcccaagaagcaggtctgtggggatagcatcaagcctgaagaaaccgagcaggaggtggctgccgatgaaactaggaacctgcctcactccaagcaaggcaacaaaaatgacttagagatggggattaaggcagcaaggcctgaaatagctgatagagctacctcagaagtgccagggagccaagccagtcctaacccagtgcctggggatggattgcaccgggctggttttgatgcctttatgacaggttatgtgatggcctatgtggaagtgagccagggaccgcagccctgcagctctggaccctggctccctgaatgccacaataaggtatatttgagtggcaaagctgtacccctcacagtggccaagagccagttctctcgttcctccaaagcccacaatcagaagatgaagctcacttggggcagtagctgatgcaacttccaccttgctctcaggtggaacagaggtattttgggtctctctagcctgaaatgtcatcctcaactgctactgagtttaggggagggggaatgtcttgacagacatcactgcattgccctggaccgcctcctttatcccagtgtttgaggtacaagtaagaaggctgaccagcacctgtaacactgactttatttttaagtctgaaaatgtcttgggaaagttttacaaaaaaaaaaatcaacagaagcaagttatgaaaatatt

SEQ ID NO: 289974 - DNA, 2133 bp, Homo sapiens
cggcagcacaggccaataggcaattagcgcgcgccaggctgccttccccgcgccggacccgggacgtctgaacggaagttcgacccatcggcgacccgacggcgagaccccgccccatccccgactgcctgaaccgcgccaggagacggaccgcaagtccagcgtacccacagacgactcaggcgggagacgagcggtgtcatggccgccgacagtgacgatggcgcagtttcagctcccgcagcttccgacggtgagcggcttcccagaggtggtgtcagcaaaagcacaacatctggggaggagctagtagtccaggttcccgtagtggatgtgcaaagcaacaacttcaaggagatgtggccatccctcctgctagccataaagacagctaatttcgtggctgtggacacggagctgagtgggcttggggacaggaagagtttgctgaaccagtgcattgaggaacgttacaaggccgtgtgtcatgctgccaggacccgttctatcctttccctgggcctcgcctgcttcaagcggcagccagacaagggtgaacattcctatctggctcaagtgttcaatctcactctgctgtgcatggaggagtatgtcatagaaccaaagtctgtgcagttcctgatacagcatggcttcaacttcaaccagcagtatgcccaaggcatcccctaccataagggcaatgacaagggtgatgagagccagagccagtcagtacggaccctattcctggagctaatccgagcccgccggcccctggtgctacacaatggccttatagacttggtgttcctgtaccagaacttctatgcacacctccctgagagtctgggaaccttcaccgctgacctgtgtgagatgttcccagcaggcatttatgacaccaaatatgctgctgagtttcatgcccgtttcgtggcctcctacttagaatatgccttccggaaatggcagtgttttaggtgctgaggattcagcagtgaacaaaacagaccacaaaaccctgctcttatggagcttatatgctagtggaccattaccctcttgcgctgttgcagtgaacgggaaaatgggaagcagcgggcagctggcagcccacaccttaccctggagttctgcaactatccttccagcatgagggaccatattgattaccgctgctgcctgcccccagcaacccaccgtcctcatcccaccagcatctgtgacaacttctcggcttatggctggtgccccctgggaccacagtgtcctcagtctcacgatattgaccttatcattgacactgatgaggctgcggcagaggacaagcggcgacggcgacgacgtagggaaaaacggaagagggctttattgaacctaccggggacacagacctctggggaagctaaggatggtcctcccaagaagcaggtctgtggggatagcatcaagcctgaagaaaccgagcaggaggtggctgccgatgaaactaggaacctgcctcactccaagcaaggcaacaaaaatgacttagagatggggattaaggcagcaaggcctgaaatagctgatagagctacctcagaagtgccagggagccaagccagtcctaacccagtgcctggggatggattgcaccgggctggttttgatgcctttatgacaggttatgtgatggcctatgtggaagtgagccagggaccgcagccctgcagctctggaccctggctccctgaatgccacaataaggtatatttgagtggcaaagctgtacccctcacagtggccaagagccagttctctcgttcctccaaagcccacaatcagaagatgaagctcacttggggcagtagctgatgcaacttccaccttgctctcaggtggaacagaggtattttgggtctctctagcctgaaatgtcatcctcaactgctactgagtttaggggagggggaatgtcttgacagacatcactgcattgccctggaccgcctcctttatcccagtgtttgaggtacaagtaagaaggctgaccagcacctgtaacactgactttatttttaagtctgaaaatgtcttgggaaagttttacaaaaaaaaaaatcaacagaagcaagttatgaaaatatt

SEQ ID NO: 289975 - DNA, 2044 bp, Homo sapiens
gcactgttggcctactggccctgagctctgtcatggcgacgtccagtgctccagccggtgtgaggacacgatatgctggggtttttgtccgcacgccaaacgggtttggaggaccctcttcgccttcggagagcagagtcaacacggagagttttgggactggaattaaataaagacagagatgttgaaagaatccacggcggtggaattaacacccttgacattgaacctgttgaagggagatacatgttatcaggtggttcagatggtgtgattgtactttatgaccttgagaactccagcagacaatcttattacacatgtaaagcagtgtgttccattggcagagatcatcctgatgttcacagatacagtgtggagactgtacagtggtatcctcatgacactggcatgttcacatcaagctcatttgataaaactctgaaagtatgggatacaaatacattacaaactgcagatgtatttaattttgaggaaacagtttatagtcatcatatgtctccagtctccaccaagcactgtttggtagcagttggtactagaggacccaaagtacaactttgtgacttgaagtctggatcctgttctcacattctacagggtcacagacaagaaatattagcagtttcctggtctccacgttatgactatatcttggcaacagcaagtgctgacagtagagtaaaattatgggatgtgagaagagcatcaggatgtttgattactcttgatcaacataatgggaaaaagtcacaagctgttgaatcagcaaacactgctcataatgggaaagttaatggcttatgttttacaagtgatggacttcacctcctcactgttggtacagataatcgaatgaggctctggaatagttccaatggagaaaacacacttgtgaactatggaaaagtttgtaataacagtaaaaaaggattgaaattcactgtctcctgtggctgcagttcagaatttgtttttgtaccatatggtagcaccattgctgtttatacagtttactcaggagaacagataactatgcttaagggacattataaaactgttgactgctgtgtatttcagtcaaatttccaggaactttatagtggtagcagagactgcaacattctggcttgggttccatccttatatgaaccagttcctgatgatgatgagactacaacaaaatcacaattaaatccggcctttgaagatgcctggagcagcagtgatgaagaaggatgaatatcatctttagtacctttttgtctctgctgaaactttttaaatgagactgtgtttttttcaactgtatggtctattcctgacagctaaattagccctaaatgcgggtaatatttttcctcatgttttaaaatgaggttaatatttgcataaaatcctaaaacagacttctgtatagtttatttagtcaaaatgtgttccttgatcccagatgttgtggcctgggaaagccctcattgctacagtacaagtaacacaagtcgttgtacctcagttgtgaccttcagcagattttatgaactataagatgcagtctcagaggatcagcaagtggaggccatcagtattgactttctcttacttgctgtactatcagcctgctcgtttccacctttaagaatgattttgccaagaatgattatatcaaaaatagtagttgaaatggtaacatcaaaattattttattctttcttcttcatgtattcacatttttcagtggtttcatttaattaaccatgctttatgttaaacattttggggctcaatgtctcctactatccaaaatgtgcatcacaggaggcttttaactttgtgaaaatcccatgtttgctttattttattttaatgtcagaaggcagtttgcgctaatgcttgaactctttttctgtgaaactcattaaggtatgaccaaatcctgcctcattaattcaagcagaaaatatcctggcagggaatctggcttaaacatgaaatgctgtaataaaatttctatgttattgtc

SEQ ID NO: 289976 - DNA, 911 bp, Homo sapiens
  misc_feature (896)..(896): n is a, c, g, or t
  misc_feature (911)..(911): n is a, c, g, or t
gcactgttggcctactggccctgagctctgtcatggcgacgtccagtgctccagccggtgtgaggacacgatatgctggggtttttgtccgcacgccaaacgggtttggaggaccctcttcgccttcggagagcagagtcaacacggagagttttgggactggaattaaataaagacagagatgttgaaagaatccacggcggtggaattaacacccttgacattgaacctgttgaagggagatacatgttatcaggtggttcagatggtgtgattgtactttatgaccttgagaactccagcagacaatcttattacacatgtaaagcagtgtgttccattggcagagatcatcctgatgttcacagatacagtgtggagactgtacagtggtatcctcatgacactggcatgttcacatcaagctcatttgataaaactctgaaagtatgggatacaaatacattacaaactgcagatgtatttaattttgaggaaacagtttatagtcatcatatgtctccagtctccaccaagcactgtttggtagcagttggtactagaggacccaaagtacaactttgtgacttgaagtctggatcctgttctcacattctacagggtatttttattttatttcaaacggcaactactttgagtaaacgattcaataaaaagaaacgttactaacagtgtattctttgtaagtgacatgactaatgtactttgtgctggttgttgagactcagcagggaaataaagatccttctgtgcattattcttataaaactgaaccattgaaaacacatttatatgaacaatgatcattggggaagctcaaacaatatgaaaaatagttctaactcaaaaccttgtgttatttctacattaaaaanactaatgcaactcan

SEQ ID NO: 289977 - DNA, 490 bp, Homo sapiens
tcgacccacgcgtccggacccacgcgtccgcaagcactgtttggtagcttggtactagaggacccaaagtacaactttgtgacttgaagtctggatcctgttctcacattctacagggtcacagacaagaaatattagcagtttcctggtctccacgttatgactatatcttggcaacagcaagtgctgacagtagagtaaaattatgggatgtgagaagagcatcaggatgtttgattactcttgatcaacataatgggaaaaagtcacaagctgttgaatcagcaaacactgctcataatgggaaagttaatggcttatgttttacaagtgatggacttcacctcctcactgttggtacagataatcgaatgaggctctggaatagttccaatggagaaaacacacttatccccgccggaagtataggaagagagcaagcggattcgaacctatctgctttcaagctgatcatgatgatgaaacttag

SEQ ID NO: 289978 - DNA, 1846 bp, Homo sapiens
gcactgttggcctactggccctgagctctgtcatggcgacgtccagtgctccagccggtgtgaggacacgatatgctggggtttttgtccgcacgccaaacgggtttggaggaccctcttcgccttcggagagcagagtcaacacggagagttttgggactggaattaaataaagacagagatgttgaaagaatccacggcggtggaattaacacccttgacattgaacctgttgaagggagatacatgttatcaggtggttcagatggtgtgattgtactttatgaccttgagaactccagcagacaatcttattacacatgtaaagcagtgtgttccattggcagagatcatcctgatgttcacagatacagtgtggagactgtacagtggtatcctcatgacactggcatgttcacatcaagctcatttgataaaactctgaaagtatgggatacaaatacattacaaactgcagatgtatttaattttgaggaaacagtttatagtcatcatatgtctccagtctccaccaagcactgtttggtagcagttggtactagaggacccaaagtacaactttgtgacttgaagtctggatcctgttctcacattctacagggtcacagacaagaaatattagcagtttcctggtctccacgttatgactatatcttggcaacagcaagtgctgacagtagagtaaaattatgggatgtgagaagagcatcaggatgtttgattactcttgatcaacataatgggaaaaagtcacaagctgttgaatcagcaaacactgctcataatgggaaagttaatggcttatgttttacaagtgatggacttcacctcctcactgttggtacagataatcgaatgaggctctggaatagttccaatggagaaaacacacttgaactttatagtggtagcagagactgcaacattctggcttgggttccatccttatatgaaccagttcctgatgatgatgagactacaacaaaatcacaattaaatccggcctttgaagatgcctggagcagcagtgatgaagaaggatgaatatcatctttagtacctttttgtctctgctgaaactttttaaatgagactgtgtttttttcaactgtatggtctattcctgacagctaaattagccctaaatgcgggtaatatttttcctcatgttttaaaatgaggttaatatttgcataaaatcctaaaacagacttctgtatagtttatttagtcaaaatgtgttccttgatcccagatgttgtggcctgggaaagccctcattgctacagtacaagtaacacaagtcgttgtacctcagttgtgaccttcagcagattttatgaactataagatgcagtctcagaggatcagcaagtggaggccatcagtattgactttctcttacttgctgtactatcagcctgctcgtttccacctttaagaatgattttgccaagaatgattatatcaaaaatagtagttgaaatggtaacatcaaaattattttattctttcttcttcatgtattcacatttttcagtggtttcatttaattaaccatgctttatgttaaacattttggggctcaatgtctcctactatccaaaatgtgcatcacaggaggcttttaactttgtgaaaatcccatgtttgctttattttattttaatgtcagaaggcagtttgcgctaatgcttgaactctttttctgtgaaactcattaaggtatgaccaaatcctgcctcattaattcaagcagaaaatatcctggcagggaatctggcttaaacatgaaatgctgtaataaaatttctatgttattgtc

SEQ ID NO: 289979 - DNA, 2086 bp, Homo sapiens
gcactgttggcctactggccctgagctctgtcatggcgacgtccagtgctccagccggtgtgaggacacgatatgctggggtttttgtccgcacgccaaacgggtttggaggaccctcttcgccttcggagagcagagtcaacacggagttcacagacaattcagtcctgaagtcattatgttgggcagagagttttgggactggaattaaataaagacagagatgttgaaagaatccacggcggtggaattaacacccttgacattgaacctgttgaagggagatacatgttatcaggtggttcagatggtgtgattgtactttatgaccttgagaactccagcagacaatcttattacacatgtaaagcagtgtgttccattggcagagatcatcctgatgttcacagatacagtgtggagactgtacagtggtatcctcatgacactggcatgttcacatcaagctcatttgataaaactctgaaagtatgggatacaaatacattacaaactgcagatgtatttaattttgaggaaacagtttatagtcatcatatgtctccagtctccaccaagcactgtttggtagcagttggtactagaggacccaaagtacaactttgtgacttgaagtctggatcctgttctcacattctacagggtcacagacaagaaatattagcagtttcctggtctccacgttatgactatatcttggcaacagcaagtgctgacagtagagtaaaattatgggatgtgagaagagcatcaggatgtttgattactcttgatcaacataatgggaaaaagtcacaagctgttgaatcagcaaacactgctcataatgggaaagttaatggcttatgttttacaagtgatggacttcacctcctcactgttggtacagataatcgaatgaggctctggaatagttccaatggagaaaacacacttgtgaactatggaaaagtttgtaataacagtaaaaaaggattgaaattcactgtctcctgtggctgcagttcagaatttgtttttgtaccatatggtagcaccattgctgtttatacagtttactcaggagaacagataactatgcttaagggacattataaaactgttgactgctgtgtatttcagtcaaatttccaggaactttatagtggtagcagagactgcaacattctggcttgggttccatccttatatgaaccagttcctgatgatgatgagactacaacaaaatcacaattaaatccggcctttgaagatgcctggagcagcagtgatgaagaaggatgaatatcatctttagtacctttttgtctctgctgaaactttttaaatgagactgtgtttttttcaactgtatggtctattcctgacagctaaattagccctaaatgcgggtaatatttttcctcatgttttaaaatgaggttaatatttgcataaaatcctaaaacagacttctgtatagtttatttagtcaaaatgtgttccttgatcccagatgttgtggcctgggaaagccctcattgctacagtacaagtaacacaagtcgttgtacctcagttgtgaccttcagcagattttatgaactataagatgcagtctcagaggatcagcaagtggaggccatcagtattgactttctcttacttgctgtactatcagcctgctcgtttccacctttaagaatgattttgccaagaatgattatatcaaaaatagtagttgaaatggtaacatcaaaattattttattctttcttcttcatgtattcacatttttcagtggtttcatttaattaaccatgctttatgttaaacattttggggctcaatgtctcctactatccaaaatgtgcatcacaggaggcttttaactttgtgaaaatcccatgtttgctttattttattttaatgtcagaaggcagtttgcgctaatgcttgaactctttttctgtgaaactcattaaggtatgaccaaatcctgcctcattaattcaagcagaaaatatcctggcagggaatctggcttaaacatgaaatgctgtaataaaatttctatgttattgtc

SEQ ID NO: 289980 - DNA, 2251 bp, Homo sapiens
gcactgttggcctactggccctgagctctgtcatggcgacgtccagtgctccagccggtgtgaggacacgatatgctggggtttttgtccgcacgccaaacgggtttggaggaccctcttcgccttcggagagcagagtcaacacggagagttttgggactggaattaaataaagacagagatgttgaaagaatccacggcggtggaattaacacccttgacattgaacctgttgaagggagataaagaaatgaagcttcttatccaagatgctcaaggaaataaaatgtgagtcaaggattttatatccagccaaactgatttcagatacaaaaaggacggataaattgtcaacaacacaagaattctcattagccattccttaggaatcaaccagagaatgaaatcattcaaccagaatgacaagagagacagcaacttaaggattgacgcatgttatcaggtggttcagatggtgtgattgtactttatgaccttgagaactccagcagacaatcttattacacatgtaaagcagtgtgttccattggcagagatcatcctgatgttcacagatacagtgtggagactgtacagtggtatcctcatgacactggcatgttcacatcaagctcatttgataaaactctgaaagtatgggatacaaatacattacaaactgcagatgtatttaattttgaggaaacagtttatagtcatcatatgtctccagtctccaccaagcactgtttggtagcagttggtactagaggacccaaagtacaactttgtgacttgaagtctggatcctgttctcacattctacagggtcacagacaagaaatattagcagtttcctggtctccacgttatgactatatcttggcaacagcaagtgctgacagtagagtaaaattatgggatgtgagaagagcatcaggatgtttgattactcttgatcaacataatgggaaaaagtcacaagctgttgaatcagcaaacactgctcataatgggaaagttaatggcttatgttttacaagtgatggacttcacctcctcactgttggtacagataatcgaatgaggctctggaatagttccaatggagaaaacacacttgtgaactatggaaaagtttgtaataacagtaaaaaaggattgaaattcactgtctcctgtggctgcagttcagaatttgtttttgtaccatatggtagcaccattgctgtttatacagtttactcaggagaacagataactatgcttaagggacattataaaactgttgactgctgtgtatttcagtcaaatttccaggaactttatagtggtagcagagactgcaacattctggcttgggttccatccttatatgaaccagttcctgatgatgatgagactacaacaaaatcacaattaaatccggcctttgaagatgcctggagcagcagtgatgaagaaggatgaatatcatctttagtacctttttgtctctgctgaaactttttaaatgagactgtgtttttttcaactgtatggtctattcctgacagctaaattagccctaaatgcgggtaatatttttcctcatgttttaaaatgaggttaatatttgcataaaatcctaaaacagacttctgtatagtttatttagtcaaaatgtgttccttgatcccagatgttgtggcctgggaaagccctcattgctacagtacaagtaacacaagtcgttgtacctcagttgtgaccttcagcagattttatgaactataagatgcagtctcagaggatcagcaagtggaggccatcagtattgactttctcttacttgctgtactatcagcctgctcgtttccacctttaagaatgattttgccaagaatgattatatcaaaaatagtagttgaaatggtaacatcaaaattattttattctttcttcttcatgtattcacatttttcagtggtttcatttaattaaccatgctttatgttaaacattttggggctcaatgtctcctactatccaaaatgtgcatcacaggaggcttttaactttgtgaaaatcccatgtttgctttattttattttaatgtcagaaggcagtttgcgctaatgcttgaactctttttctgtgaaactcattaaggtatgaccaaatcctgcctcattaattcaagcagaaaatatcctggcagggaatctggcttaaacatgaaatgctgtaataaaatttctatgttattgtc

SEQ ID NO: 289981 - DNA, 2354 bp, Homo sapiens
gcactgttggcctactggccctgagctctgtcatggcgacgtccagtgctccagccggtgtgaggacacgatatgctggggtttttgtccgcacgccaaacgggtttggaggaccctcttcgccttcggagagcagagtcaacacggagagttttgggactggaattaaataaagacagagatgttgaaagaatccacggcggtggaattaacacccttgacattgaacctgttgaagggagatacatgttatcaggtggttcagatggtgtgattgtactttatgaccttgagaactccagcagacaatcttattacacatgtaaagcagtgtgttccattggcagagatcatcctgatgttcacagatacagtgtggagactgtacagtggtatcctcatgacactggcatgttcacatcaagctcatttgataaaactctgaaagtatgggatacaaatacattacaaacggagtctcgctctgtcacccatgctggagtgcagtggccagtggcgcaatctcagctcactgcaacctccccgtcctgagttcaagcaattctcctgcctcagcctcccgagtatctgggactacaggcgtgtgtcaccatgcctggctaatttttgtatttttagtagagacagggtttcgccatgttggccaggctggtctggaactcctgacctccgttgatccacccacctcggcctctcaaagtgttgggattacaggcgtgagccaccatgcccggcctatatactgcgttgttacaataaaactgcagatgtatttaattttgaggaaacagtttatagtcatcatatgtctccagtctccaccaagcactgtttggtagcagttggtactagaggacccaaagtacaactttgtgacttgaagtctggatcctgttctcacattctacagggtcacagacaagaaatattagcagtttcctggtctccacgttatgactatatcttggcaacagcaagtgctgacagtagagtaaaattatgggatgtgagaagagcatcaggatgtttgattactcttgatcaacataatgggaaaaagtcacaagctgttgaatcagcaaacactgctcataatgggaaagttaatggcttatgttttacaagtgatggacttcacctcctcactgttggtacagataatcgaatgaggctctggaatagttccaatggagaaaacacacttgtgaactatggaaaagtttgtaataacagtaaaaaaggattgaaattcactgtctcctgtggctgcagttcagaatttgtttttgtaccatatggtagcaccattgctgtttatacagtttactcaggagaacagataactatgcttaagggacattataaaactgttgactgctgtgtatttcagtcaaatttccaggaactttatagtggtagcagagactgcaacattctggcttgggttccatccttatatgaaccagttcctgatgatgatgagactacaacaaaatcacaattaaatccggcctttgaagatgcctggagcagcagtgatgaagaaggatgaatatcatctttagtacctttttgtctctgctgaaactttttaaatgagactgtgtttttttcaactgtatggtctattcctgacagctaaattagccctaaatgcgggtaatatttttcctcatgttttaaaatgaggttaatatttgcataaaatcctaaaacagacttctgtatagtttatttagtcaaaatgtgttccttgatcccagatgttgtggcctgggaaagccctcattgctacagtacaagtaacacaagtcgttgtacctcagttgtgaccttcagcagattttatgaactataagatgcagtctcagaggatcagcaagtggaggccatcagtattgactttctcttacttgctgtactatcagcctgctcgtttccacctttaagaatgattttgccaagaatgattatatcaaaaatagtagttgaaatggtaacatcaaaattattttattctttcttcttcatgtattcacatttttcagtggtttcatttaattaaccatgctttatgttaaacattttggggctcaatgtctcctactatccaaaatgtgcatcacaggaggcttttaactttgtgaaaatcccatgtttgctttattttattttaatgtcagaaggcagtttgcgctaatgcttgaactctttttctgtgaaactcattaaggtatgaccaaatcctgcctcattaattcaagcagaaaatatcctggcagggaatctggcttaaacatgaaatgctgtaataaaatttctatgttattgtc

SEQ ID NO: 289982 - DNA, 1269 bp, Homo sapiens
gcactgttggcctactggccctgagctctgtcatggcgacgtccagtgctccagccggtgtgaggacacgatatgctggggtttttgtccgcacgccaaacgggtttggaggaccctcttcgccttcggagagcagagtcaacacggagagttttgggactggaattaaataaagacagagatgttgaaagaatccacggcggtggaattaacacccttgacattgaacctgttgaagggagatacatgttatcaggtggttcagatggtgtgattgtactttatgaccttgagaactccagcagacaatcttattacacatgtaaagcagtgtgttccattggcagagatcatcctgatgttcacagatacagtgtggagactgtacagtggtatcctcatgacactggcatgttcacatcaagctcatttgataaaactctgaaagtatgggatacaaatacattacaaacggagtctcgctctgtcacccatgctggagtgcagtggccagtggcgcaatctcagctcactgcaacctccccgtcctgagttcaagcaattctcctgcctcagcctcccgagtatctgggactacaggcgtgtgtcaccatgcctggctaatttttgtatttttagtagagacagggtttcgccatgttggccaggctggtctggaactcctgacctccgttgatccacccacctcggcctctcaaagtgttgggattacaggcgtgagccaccatgcccggcctatatactgcgttgttacaataaagtaagctagagaaaagaaaatgttattaagaaaaaaaaaaaagaaaaaagaaaaacaaagaacaacagaaaaaaacaaacaaaaaaagaaaaaaacgcgagaaaaagaaacaaaaggagaacaaaaaaaaaaaagagggggggggggaaaaaaataacatccacagggagcacagtagacccacacctattgttctgagaaggagacccacataaagggagtaattaaaataacacagggcggcgtattaaaaaaatggtggaggagaaaaatgatgagcagtatgtaggagaacacattgtgggtggggaatataggaacaccaaaaattagaggcgaggagataaaagtgagtatgtgaaaccagtatttggggagaattattgttttaatcatagtggtataagcaagggatgataagataatagaatgaagctggagagagtaagtagaaaaggagtgtctggagagagataatagagaaaata

SEQ ID NO: 289983 - DNA, 1096 bp, Homo sapiens
  misc_feature (1081)..(1081): n is a, c, g, or t
  misc_feature (1096)..(1096): n is a, c, g, or t
gcactgttggcctactggccctgagctctgtcatggcgacgtccagtgctccagccggtgtgaggacacgatatgctggggtttttgtccgcacgccaaacgggtttggaggaccctcttcgccttcggagagcagagtcaacacggagagttttgggactggaattaaataaagacagagatgttgaaagaatccacggcggtggaattaacacccttgacattgaacctgttgaagggagatacatgttatcaggtggttcagatggtgtgattgtactttatgaccttgagaactccagcagacaatcttattacacatgtaaagcagtgtgttccattggcagagatcatcctgatgttcacagatacagtgtggagactgtacagtggtatcctcatgacactggcatgttcacatcaagctcatttgataaaactctgaaagtatgggatacaaatacattacaaacggagtctcgctctgtcacccatgctggagttgcagtgagccaagatcgtgccactgcacaccagcctgggcaacagagcgactccatctcaaaaaaaaaaaaaaaaagaatcatgtttctatgataacaggagtgaagaaggaaaaaggataagtggaagcaaatgtgtttgtaggtttgttgactgcagatgtatttaattttgaggaaacagtttatagtcatcatatgtctccagtctccaccaagcactgtttggtagcagttggtactagaggacccaaagtacaactttgtgacttgaagtctggatcctgttctcacattctacagggtatttttattttatttcaaacggcaactactttgagtaaacgattcaataaaaagaaacgttactaacagtgtattctttgtaagtgacatgactaatgtactttgtgctggttgttgagactcagcagggaaataaagatccttctgtgcattattcttataaaactgaaccattgaaaacacatttatatgaacaatgatcattggggaagctcaaacaatatgaaaaatagttctaactcaaaaccttgtgttatttctacattaaaaanactaatgcaactcan

SEQ ID NO: 289984 - DNA, 823 bp, Homo sapiens
gcactgttggcctactggccctgagctctgtcatggcgacgtccagtgctccagccggtgtgaggacacgatatgctggggtttttgtccgcacgccaaacgggtttggaggaccctcttcgccttcggagagcagagtcaacacggagagttttgggactggaattaaataaagacagagatgttgaaagaatccacggcggtggaattaacacccttgacattgaacctgttgaagggagataccattccttaggaatcaaccagagaatgaaatcattcaaccagaatgacaagagagacagcaacttaaggattgacgcatgttatcaggtggttcagatggtgtgattgtactttatgaccttgagaactccagcagacaatcttattacacatgtaaagcagtgtgttccattggcagagatcatcctgatgttcacagatacagtgtggagactgtacagtggtatcctcatgacactggcatgttcacatcaagctcatttgataaaactctgaaagtatgggatacaaatacattacaaactgcagatgtatttaattttgaggaaacagtttatagtcatcatatgtctccagtctccaccaagcactgtttggtagcagttggtactagaggacccaaagtacaactttgtgacttgaagtctggatcctgttctcacattctacagggtcacagacaagaaatattagcagtttcctggtctccacgttatgactatatcttggcaacagcaagtgctggacagtaaagtaacattatggggatgttcccaagagcctccggatcggtcgc

SEQ ID NO: 289985 - DNA, 1474 bp, Homo sapiens
gcactgttggcctactggccctgagctctgtcatggcgacgtccagtgctccagccggtgtgaggacacgatatgctggggtttttgtccgcacgccaaacgggtttggaggaccctcttcgccttcggagagcagagtcaacacggagagttttgggactggaattaaataaagacagagatgttgaaagaatccacggcggtggaattaacacccttgacattgaacctgttgaagggagatacatgttatcaggtggttcagatggtgtgattgtactttatgaccttgagaactccagcagacaatcttattacacatgtaaagcagtgtgttccattggcagagatcatcctgatgttcacagatacagtgtggagactgtacagtggtatcctcatgacactggcatgttcacatcaagctcatttgataaaactctgaaagtatgggatacaaatacattacaaactgcagatgtatttaattttgaggaaacagtttatagtcatcatatgtctccagtctccaccaagcactgtttggtagcagttggtactagaggacccaaagtacaactttgtgacttgaagtctggatcctgttctcacattctacagggtcacagacaagaaatattagcagtttcctggtctccacgttatgactatatcttggcaacagcaagtgctgacagtagagtaaaattatgggatgtgagaagagcatcaggatgtttgattactcttgatcaacataatgggaaaaagtcacaagctgttgaatcagcaaacactgctcataatgggaaagttaatggcttatgttttacaagtgatggacttcacctcctcactgttggtacagataatcgaatgaggctctggaatagttccaatggagaaaacacacttgtgaactatggaaaagtttgtaataacagtaaaaaaggattgaaattcactgtctcctgtggctgcagttcagaatttgtttttgtaccatatggtagcaccattgctgtttatacagtttactcaggagaacagataactatgcttaagggacattataaaactgttgactgctgtgtatttcagtcaaatttccaggtaagagtgatacaggaatttaaaatgttcagctagctagcttgccagaccagttatatgtaaaagaataaattatgattttattctgaggagttatacttttaatccacatttgtagtaggatttatttaatagagaatagcacagcctagattgttagacagcatacaatgtatgaatgaatcaatataatactgtgcaacttgattggtataaattctgtttcttttgcatatgaccttcatttatttaacaactgaaaatctgtggtgaattaaaataatttcttgaaacaatcttttgggtaagaaataaaatataggcatttaatcataaaatataatttgtatatgttggttta

SEQ ID NO: 289986 - DNA, 2163 bp, Homo sapiens
gcactgttggcctactggccctgagctctgtcatggcgacgtccagtgctccagccggtgtgaggacacgatatgctggggtttttgtccgcacgccaaacgggtttggaggaccctcttcgccttcggagagcagagtcaacacggagttcacagacaattcagtcctgaagtcattatgttgggcagagagttttgggactggaattaaataaagacagagatgttgaaagaatccacggcggtggaattaacacccttgacattgaacctgttgaagggagataccattccttaggaatcaaccagagaatgaaatcattcaaccagaatgacaagagagacagcaacttaaggattgacgcatgttatcaggtggttcagatggtgtgattgtactttatgaccttgagaactccagcagacaatcttattacacatgtaaagcagtgtgttccattggcagagatcatcctgatgttcacagatacagtgtggagactgtacagtggtatcctcatgacactggcatgttcacatcaagctcatttgataaaactctgaaagtatgggatacaaatacattacaaactgcagatgtatttaattttgaggaaacagtttatagtcatcatatgtctccagtctccaccaagcactgtttggtagcagttggtactagaggacccaaagtacaactttgtgacttgaagtctggatcctgttctcacattctacagggtcacagacaagaaatattagcagtttcctggtctccacgttatgactatatcttggcaacagcaagtgctgacagtagagtaaaattatgggatgtgagaagagcatcaggatgtttgattactcttgatcaacataatgggaaaaagtcacaagctgttgaatcagcaaacactgctcataatgggaaagttaatggcttatgttttacaagtgatggacttcacctcctcactgttggtacagataatcgaatgaggctctggaatagttccaatggagaaaacacacttgtgaactatggaaaagtttgtaataacagtaaaaaaggattgaaattcactgtctcctgtggctgcagttcagaatttgtttttgtaccatatggtagcaccattgctgtttatacagtttactcaggagaacagataactatgcttaagggacattataaaactgttgactgctgtgtatttcagtcaaatttccaggaactttatagtggtagcagagactgcaacattctggcttgggttccatccttatatgaaccagttcctgatgatgatgagactacaacaaaatcacaattaaatccggcctttgaagatgcctggagcagcagtgatgaagaaggatgaatatcatctttagtacctttttgtctctgctgaaactttttaaatgagactgtgtttttttcaactgtatggtctattcctgacagctaaattagccctaaatgcgggtaatatttttcctcatgttttaaaatgaggttaatatttgcataaaatcctaaaacagacttctgtatagtttatttagtcaaaatgtgttccttgatcccagatgttgtggcctgggaaagccctcattgctacagtacaagtaacacaagtcgttgtacctcagttgtgaccttcagcagattttatgaactataagatgcagtctcagaggatcagcaagtggaggccatcagtattgactttctcttacttgctgtactatcagcctgctcgtttccacctttaagaatgattttgccaagaatgattatatcaaaaatagtagttgaaatggtaacatcaaaattattttattctttcttcttcatgtattcacatttttcagtggtttcatttaattaaccatgctttatgttaaacattttggggctcaatgtctcctactatccaaaatgtgcatcacaggaggcttttaactttgtgaaaatcccatgtttgctttattttattttaatgtcagaaggcagtttgcgctaatgcttgaactctttttctgtgaaactcattaaggtatgaccaaatcctgcctcattaattcaagcagaaaatatcctggcagggaatctggcttaaacatgaaatgctgtaataaaatttctatgttattgtc

SEQ ID NO: 289987 - DNA, 1951 bp, Homo sapiens
gcactgttggcctactggccctgagctctgtcatggcgacgtccagtgctccagccggtgtgaggacacgatatgctggggtttttgtccgcacgccaaacgggtttggaggaccctcttcgccttcggagagcagagtcaacacggagagttttgggactggaattaaataaagacagagatgttgaaagaatccacggcggtggaattaacacccttgacattgaacctgttgaagggagatacatgttatcaggtggttcagatggtgtgattgtactttatgaccttgagaactccagcagacaatcttattacacatgtaaagcagtgtgttccattggcagagatcatcctgatgttcacagatacagtgtggagactgtacagtggtatcctcatgacactggcatgttcacatcaagctcatttgataaaactctgaaagtatgggatacaaatacattacaaactgcagatgtatttaattttgaggaaacagtttatagtcatcatatgtctccagtctccaccaagcactgtttggtagcagtttcctggtctccacgttatgactatatcttggcaacagcaagtgctgacagtagagtaaaattatgggatgtgagaagagcatcaggatgtttgattactcttgatcaacataatgggaaaaagtcacaagctgttgaatcagcaaacactgctcataatgggaaagttaatggcttatgttttacaagtgatggacttcacctcctcactgttggtacagataatcgaatgaggctctggaatagttccaatggagaaaacacacttgtgaactatggaaaagtttgtaataacagtaaaaaaggattgaaattcactgtctcctgtggctgcagttcagaatttgtttttgtaccatatggtagcaccattgctgtttatacagtttactcaggagaacagataactatgcttaagggacattataaaactgttgactgctgtgtatttcagtcaaatttccaggaactttatagtggtagcagagactgcaacattctggcttgggttccatccttatatgaaccagttcctgatgatgatgagactacaacaaaatcacaattaaatccggcctttgaagatgcctggagcagcagtgatgaagaaggatgaatatcatctttagtacctttttgtctctgctgaaactttttaaatgagactgtgtttttttcaactgtatggtctattcctgacagctaaattagccctaaatgcgggtaatatttttcctcatgttttaaaatgaggttaatatttgcataaaatcctaaaacagacttctgtatagtttatttagtcaaaatgtgttccttgatcccagatgttgtggcctgggaaagccctcattgctacagtacaagtaacacaagtcgttgtacctcagttgtgaccttcagcagattttatgaactataagatgcagtctcagaggatcagcaagtggaggccatcagtattgactttctcttacttgctgtactatcagcctgctcgtttccacctttaagaatgattttgccaagaatgattatatcaaaaatagtagttgaaatggtaacatcaaaattattttattctttcttcttcatgtattcacatttttcagtggtttcatttaattaaccatgctttatgttaaacattttggggctcaatgtctcctactatccaaaatgtgcatcacaggaggcttttaactttgtgaaaatcccatgtttgctttattttattttaatgtcagaaggcagtttgcgctaatgcttgaactctttttctgtgaaactcattaaggtatgaccaaatcctgcctcattaattcaagcagaaaatatcctggcagggaatctggcttaaacatgaaatgctgtaataaaatttctatgttattgtc

SEQ ID NO: 289988 - DNA, 815 bp, Homo sapiens
  misc_feature (800)..(800): n is a, c, g, or t
  misc_feature (815)..(815): n is a, c, g, or t
gcactgttggcctactggccctgagctctgtcatggcgacgtccagtgctccagccggtgtgaggacacgatatgctggggtttttgtccgcacgccaaacgggtttggaggaccctcttcgccttcggagagcagagtcaacacggagcatgttatcaggtggttcagatggtgtgattgtactttatgaccttgagaactccagcagacaatcttattacacatgtaaagcagtgtgttccattggcagagatcatcctgatgttcacagatacagtgtggagactgtacagtggtatcctcatgacactggcatgttcacatcaagctcatttgataaaactctgaaagtatgggatacaaatacattacaaactgcagatgtatttaattttgaggaaacagtttatagtcatcatatgtctccagtctccaccaagcactgtttggtagcagttggtactagaggacccaaagtacaactttgtgacttgaagtctggatcctgttctcacattctacagggtatttttattttatttcaaacggcaactactttgagtaaacgattcaataaaaagaaacgttactaacagtgtattctttgtaagtgacatgactaatgtactttgtgctggttgttgagactcagcagggaaataaagatccttctgtgcattattcttataaaactgaaccattgaaaacacatttatatgaacaatgatcattggggaagctcaaacaatatgaaaaatagttctaactcaaaaccttgtgttatttctacattaaaaanactaatgcaactcan

SEQ ID NO: 289989 - DNA, 436 bp, Homo sapiens
attactgagcgctccgtctcattcccagctgataaatgagagcgtggacgaagccgacatggagaatgctggacaccccagcgcagacacgccaaccgcaacgaactatttcctccagtatatcagttccagtttagagaactcaaccaatagtgccgacgcctccagcaacaaatttgtatttggccagaacatgagcgagcgagttttgagccccccaaaattaaacgaggtcagttcagatgccaacagggaaaatgcagctgccgagtcagggtctgagtcctcgtcccaggaggccacccctgagaaagagtccctggctgagtcggcagccgcctacaccaaggcaacagcgcggaagtgtttgttggaaaaagtggaagtcatcaccggggaggagttttgccatcttgggatcctcaagagtcagctc

SEQ ID NO: 289990 - DNA, 689 bp, Homo sapiens
tcctcgtctcgaatcagtgacactgacggcatggtgagacttggtggcctgaggaagactgtgaagagatcgtccctctgaaatggaggaaaggggttgactactgagagccctgttggggcctctgcctgttaattacatctcctctttccaaggctggacacagactgggggtttaggggtggggtgttctcccaacccctcagctgcatgcccagcacgggcagtccagtgcagtagcccagacacacacacgcatgtacacacaagcatgcacacacacacggtaaccagcaagccaggaggccccagcagaggcccgtgtgtgatgctgtgaactcccagaggagaggagcttgcgggggcctggaagggtgggccaggctcggactgtggagcagggcaggctaaagggcttgaaggccctggacgtgaggcctggtctgagcacaggcctggaggtcggcctggggactcatgcaggctggtacaggagagaggttcctgaggcagataatgccgtcagcactacttaatataacactcagaaagcccggcctcctgccatgggcacaactctgcagatttgagggtaaatgccactgcagggctattctctcgtccccgtcttgacttcccactctggcattgtctcgtggcctctgtcttagctgtctgtagtgccaact

SEQ ID NO: 289991 - DNA, 3156 bp, Homo sapiens
agggcaggctgctctgcagggcaggcgatccggggctcgcctccgcgcggcattcagcgcgcaggcgcgagctggccgcctcacacggagtcggcttgttaagtgcgcacgcgcgggagtttaaaaaagaaagcaggcgagcctgggccggcgcggggccttgtgggagggcttaaggaagtaaaatggcggacctggcgaacgaagaaaagcctgccattgctccgcccgtctttgtgtttcagaaggataaaggacaaaagaggtcagctggcggctccagtcctgaaggcggagaagattctgacagagaagatggaaattactgccctcctgtcaagcgagaaagaacatcctctttaacccagttcccaccctcacagtcagaggaaaggagcagtggcttccggttgaagccaccaacgctgatccacggccaagcccccagcgcaggtctgccaagccagaagcccaaggagcagcagcggagcgtgcttcgcccggcagtgttacaagctccgcagccaaaggcgctgtcccagactgtccccagcagtggcaccaacggggtcagcctcccagcagactgcacgggggcagtgcccgcagcatcccctgacactgctgcatggagaagtccttccgaagctgccgatgaggtgtgtgcacttgaggagaaagagccccagaaaaatgagtccagcaatgcctctgaagaggaagcctgtgagaaaaaagaccccgccacacagcaagcctttgtatttgggcagaacttgagggacagagttaagctgataaatgagagcgtggacgaagccgacatggagaatgctggacaccccagcgcagacacgccaaccgcaacgaactatttcctccagtatatcagttccagtttagagaactcaaccaatagtgccgacgcctccagcaacaaatttgtatttggccagaacatgagcgagcgagttttgagccccccaaaattaaacgaggtcagttcagatgccaacagggaaaatgcagctgccgagtcagggtctgagtcctcgtcccaggaggccacccctgagaaagagtccctggctgagtcggcagccgcctacaccaaggcaacagcgcggaagtgtttgttggaaaaagtggaagtcatcaccggggaggaggcggagagcaatgtgttacagatgcagtgcaagctgtttgtctttgacaagacctcacagtcctgggtggagagaggccgggggctgctcagactcaatgacatggcgtccaccgatgacggcacactacagtcccgactagtgatgcggacccaggggagcctgcgactgatcctcaacaccaagctgtgggcccagatgcagatcgacaaggccagcgagaagagcattcgcatcacagccatggacaccgaggaccagggcgtgaaggtcttcctgatctcggccagctccaaggacacaggtcagttgtatgcagccctgcaccaccgcatcctggccctgcgcagccgcgtggagcaggagcaggaggccaagatgcccgcgcctgagcctggggcagccccatccaacgaggaggacgacagcgacgatgacgatgtcctggctccttcaggggccaccgcagctggtgctggtgacgaaggggacgggcagacgaccgggagcacatagcggccgggagcccggctgcacaccaggctgctgctttgtccgtctatccacccgcccacccgcccccaccccaccggcagcgtccaggtgcggggccgggaaccacacaccccactgggccggccacagtctggacccgcacgtcctgttcaaaagcagactcgggaactgcctgaatgtggtttgggacacgagacctcatcatattgatgagcgaacaaacaagaacatttcctccctcccctcctttgaattgaaatggcacattaagacttgtcacggcttctcactgggactggagacctcgttccttcaccccgcgtgtcgccagcctctgggtccagccagagcccctggcttctccgccacccacacccttcccaccctgctgtggggccctgcctttgtggggagcagccagccctctgcccctgcccagggctccccaactataggcctgggacccccgcccagcttggggggctgctcgtacgagtgtagacactgggcccattggacgtgctgttaactactatcttcatttcccacttcccctctctgattgggggtgtatattttacatctttttttctttttattttcgaaggctttgttttggtttcttaggttaagatgctctcgagcgttgagcaggcacagctctgtcgaggtccctgtcccccacctgtggttctggcctctgaggttgggggactacttgtttcccaccccaggttcctccaggccaagtcatggggtgatgaggagttggggccctgtctgtcctaggcctggagagtgcctgtctgggaaaaggtcactggacctggaagggtccccagggtcccctgactcccgtctccatctgtcacgtggttcaccatcatcaggcaccaggcgcaaactgcttcccgctgttggccatcccttccccagccacaggtgtccctgcccccaggacagtccagggccaggggcttctgtgagaggcagagggggaccctcaccaaatcttggtggaagagcccaggggctggtcccagaacaggcagtctcacaagcacgcagcacactggagtggacgcctgtgcccacccgagcctggagcatggccaagagccagcttgcaccacccacctgggaggccgaggaggaggtcccctgggcacagggcctctttgggacttcagaggaaatctcccagtcccactctcggagggttaagagaaggcctcctgcagctgtgccgtccacacctctaggtcgccagagccctggcccccagcccccagcaagcctgagcccgggaagaaccagaggccctcccgagagacccagtcacacgtctctgctttaagccttagccagctagtgacgagtacaacgagataacgcccatgtgttttggaacatttatgtaagattgtcatatgaaatgtatttgggaactacattaaacttttaactaaaa

SEQ ID NO: 289992 - DNA, 3069 bp, Homo sapiens
agggcaggctgctctgcagggcaggcgatccggggctcgcctccgcgcggcattcagcgcgcaggcgcgagctggccgcctcacacggagtcggcttgttaagtgcgcacgcgcgggagtttaaaaaagaaagcaggcgagcctgggccggcgcggggccttgtgggagggcttaaggaagtaaaatggcggacctggcgaacgaagaaaagcctgccattgctccgcccgtctttgtgtttcagaaggataaaggacaaaagaggtcagctggcggctccagtcctgaaggcggagaagattctgacagagaagatggaaattactgccctcctgtcaagcgagaaagaacatcctctttaacccagttcccaccctcacagtcagaggaaaggagcagtggcttccggttgaagccaccaacgctgatccacggccaagcccccagcgcaggtctgccaagccagaagcccaaggagcagcagcggagcgtgcttcgcccggcagtgttacaagctccgcagccaaaggcgctgtcccagactgtccccagcagtggcaccaacggggtcagcctcccagcagactgcacgggggcagtgcccgcagcatcccctgacactgctgcatggagaagtccttccgaagctgccgatgaggtgtgtgcacttgaggagaaagagccccagaaaaatgagtccagcaatgcctctgaagaggaagcctgtgagaaaaaagaccccgccacacagcaagcctttgtatttgggcagaacttgagggacagagttaagctgataaatgagagcgtggacgaagccgacatggagaatgctggacaccccagcgcagacacgccaaccgcaacgaactatttcctccagtatatcagttccagtttagagaactcaaccaatagtgccgacgcctccagcaacaaatttgtatttggccagaacatgagcgagcgagttttgagccccccaaaattaaacgaggtcagttcagatgccaacagggaaaatgcagctgccgagtcagggtctgagtcctcgtcccaggaggccacccctgagaaagagtccctggctgagtcggcagccgcctacaccaaggcaacagcgcggaagtgtttgttggaaaaagtggaagagagaggccgggggctgctcagactcaatgacatggcgtccaccgatgacggcacactacagtcccgactagtgatgcggacccaggggagcctgcgactgatcctcaacaccaagctgtgggcccagatgcagatcgacaaggccagcgagaagagcattcgcatcacagccatggacaccgaggaccagggcgtgaaggtcttcctgatctcggccagctccaaggacacaggtcagttgtatgcagccctgcaccaccgcatcctggccctgcgcagccgcgtggagcaggagcaggaggccaagatgcccgcgcctgagcctggggcagccccatccaacgaggaggacgacagcgacgatgacgatgtcctggctccttcaggggccaccgcagctggtgctggtgacgaaggggacgggcagacgaccgggagcacatagcggccgggagcccggctgcacaccaggctgctgctttgtccgtctatccacccgcccacccgcccccaccccaccggcagcgtccaggtgcggggccgggaaccacacaccccactgggccggccacagtctggacccgcacgtcctgttcaaaagcagactcgggaactgcctgaatgtggtttgggacacgagacctcatcatattgatgagcgaacaaacaagaacatttcctccctcccctcctttgaattgaaatggcacattaagacttgtcacggcttctcactgggactggagacctcgttccttcaccccgcgtgtcgccagcctctgggtccagccagagcccctggcttctccgccacccacacccttcccaccctgctgtggggccctgcctttgtggggagcagccagccctctgcccctgcccagggctccccaactataggcctgggacccccgcccagcttggggggctgctcgtacgagtgtagacactgggcccattggacgtgctgttaactactatcttcatttcccacttcccctctctgattgggggtgtatattttacatctttttttctttttattttcgaaggctttgttttggtttcttaggttaagatgctctcgagcgttgagcaggcacagctctgtcgaggtccctgtcccccacctgtggttctggcctctgaggttgggggactacttgtttcccaccccaggttcctccaggccaagtcatggggtgatgaggagttggggccctgtctgtcctaggcctggagagtgcctgtctgggaaaaggtcactggacctggaagggtccccagggtcccctgactcccgtctccatctgtcacgtggttcaccatcatcaggcaccaggcgcaaactgcttcccgctgttggccatcccttccccagccacaggtgtccctgcccccaggacagtccagggccaggggcttctgtgagaggcagagggggaccctcaccaaatcttggtggaagagcccaggggctggtcccagaacaggcagtctcacaagcacgcagcacactggagtggacgcctgtgcccacccgagcctggagcatggccaagagccagcttgcaccacccacctgggaggccgaggaggaggtcccctgggcacagggcctctttgggacttcagaggaaatctcccagtcccactctcggagggttaagagaaggcctcctgcagctgtgccgtccacacctctaggtcgccagagccctggcccccagcccccagcaagcctgagcccgggaagaaccagaggccctcccgagagacccagtcacacgtctctgctttaagccttagccagctagtgacgagtacaacgagataacgcccatgtgttttggaacatttatgtaagattgtcatatgaaatgtatttgggaactacattaaacttttaactaaaa

SEQ ID NO: 289993 - DNA, 2784 bp, Homo sapiens
agggcaggctgctctgcagggcaggcgatccggggctcgcctccgcgcggcattcagcgcgcaggcgcgagctggccgcctcacacggagtcggcttgttaagtgcgcacgcgcgggagtttaaaaaagaaagcaggcgagcctgggccggcgcggggccttgtgggagggcttaaggaagtaaaatggcggacctggcgaacgaagaaaagcctgccattgctccgcccgtctttgtgtttcagaaggataaaggacaaaagaggtcagctggcggctccagtcctgaaggcggagaagattctgacagagaagatggaaattactgccctcctgtcaagcgagaaagaacatcctctttaacccagttcccaccctcacagtcagaggaaaggagcagtggcttccggttgaagccaccaacgctgatccacggccaagcccccagcgcaggtctgccaagccagaagcccaaggagcagcagcggagcgtgcttcgcccggcagtgttacaagctccgcagccaaaggcgctgtcccagactgtccccagcagtggcaccaacggggtcagcctcccagcagactgcacgggggcagtgcccgcagcatcccctgacactgctgcatggagaagtccttccgaagctgccgatgaggtgtgtgcacttgaggagaaagagccccagaaaaatgagtccagcaatgcctctgaagaggaagcctgtgagaaaaaagaccccgccacacagcaagcctttgtatttgggcagaacttgagggacagagttaagctgataaatgagagcgtggacgaagccgacatggagaatgctggacaccccagcgcagacacgccaaccgcaacgaactatttcctccagtatatcagttccagtttagagaactcaaccaatagtgccgacgcctccagcaacaaatttgtatttggccagaacatgagcgagcgagttttgagccccccaaaattaaacgaggtcagttcagatgccaacagggaaaatgcagctgccgagtcagggtctgagtcctcgtcccaggaggccacccctgagaaagagtccctggctgagtcggcagccgcctacaccaaggcaacagcgcggaagtgtttgttggaaaaagtggaagtcatcaccggggaggaggcggagagcaatgtgttacagatgcagtgcaagctgtttgtctttgacaagacctcacagtcctgggtggagagaggccgggggctgctcagactcaatgacatggcgtccaccgatgacgggcagacgaccgggagcacatagcggccgggagcccggctgcacaccaggctgctgctttgtccgtctatccacccgcccacccgcccccaccccaccggcagcgtccaggtgcggggccgggaaccacacaccccactgggccggccacagtctggacccgcacgtcctgttcaaaagcagactcgggaactgcctgaatgtggtttgggacacgagacctcatcatattgatgagcgaacaaacaagaacatttcctccctcccctcctttgaattgaaatggcacattaagacttgtcacggcttctcactgggactggagacctcgttccttcaccccgcgtgtcgccagcctctgggtccagccagagcccctggcttctccgccacccacacccttcccaccctgctgtggggccctgcctttgtggggagcagccagccctctgcccctgcccagggctccccaactataggcctgggacccccgcccagcttggggggctgctcgtacgagtgtagacactgggcccattggacgtgctgttaactactatcttcatttcccacttcccctctctgattgggggtgtatattttacatctttttttctttttattttcgaaggctttgttttggtttcttaggttaagatgctctcgagcgttgagcaggcacagctctgtcgaggtccctgtcccccacctgtggttctggcctctgaggttgggggactacttgtttcccaccccaggttcctccaggccaagtcatggggtgatgaggagttggggccctgtctgtcctaggcctggagagtgcctgtctgggaaaaggtcactggacctggaagggtccccagggtcccctgactcccgtctccatctgtcacgtggttcaccatcatcaggcaccaggcgcaaactgcttcccgctgttggccatcccttccccagccacaggtgtccctgcccccaggacagtccagggccaggggcttctgtgagaggcagagggggaccctcaccaaatcttggtggaagagcccaggggctggtcccagaacaggcagtctcacaagcacgcagcacactggagtggacgcctgtgcccacccgagcctggagcatggccaagagccagcttgcaccacccacctgggaggccgaggaggaggtcccctgggcacagggcctctttgggacttcagaggaaatctcccagtcccactctcggagggttaagagaaggcctcctgcagctgtgccgtccacacctctaggtcgccagagccctggcccccagcccccagcaagcctgagcccgggaagaaccagaggccctcccgagagacccagtcacacgtctctgctttaagccttagccagctagtgacgagtacaacgagataacgcccatgtgttttggaacatttatgtaagattgtcatatgaaatgtatttgggaactacattaaacttttaactaaaa

SEQ ID NO: 289994 - DNA, 3251 bp, Homo sapiens
  misc_feature (55)..(55): n is a, c, g, or t
ccacgaacacccggaccatctatgagcgtacactatgaaccccctgggaatttantagcagtgtcggccggaatcagggatcgactggcgaacgaagaaaagcctgccattgctccgcccgtctttgtgtttcagaaggataaaggacaaaagtcccctgcagagcaaaaaaacttgtcggattcgggagaggagcctcggggggaggctgaggccccccaccatggcacgggtcaccccgagtcagctggcgagcatgccctagaacctcctgcccctgctggcgcctcagccagcactcctccgcctcccgctcctgaagcccagcttcctccttttccgcgagaactggcagggaggtcagctggcggctccagtcctgcaaggcggagaagattctgacagagaagatggaaattactgccctcctgtcaagcgagaaagaacatcctctttaacccagttcccaccctcacagtcagaggaaaggagcagtggcttccggttgaagccaccaacgctgatccacggccaagcccccagcgcaggtctgccaagccagaagcccaaggagcagcagcggagcgtgcttcgcccggcagtgttacaagctccgcagccaaaggcgctgtcccagactgtccccagcagtggcaccaacggggtcagcctcccagcagactgcacgggggcagtgcccgcagcatcccctgacactgctgcatggagaagtccttccgaagctgccgatgaggtgtgtgcacttgaggagaaagagccccagaaaaatgagtccagcaatgcctctgaagaggaagcctgtgagaaaaaagaccccgccacacagcaagcctttgtatttgggcagaacttgagggacagagttaagctgataaatgagagcgtggacgaagccgacatggagaatgctggacaccccagcgcagacacgccaaccgcaacgaactatttcctccagtatatcagttccagtttagagaactcaaccaatagtgccgacgcctccagcaacaaatttgtatttggccagaacatgagcgagcgagttttgagccccccaaaattaaacgaggtcagttcagatgccaacagggaaaatgcagctgccgagtcagggtctgagtcctcgtcccaggaggccacccctgagaaagagtccctggctgagtcggcagccgcctacaccaaggcaacagcgcggaagtgtttgttggaaaaagtggaagtcatcaccggggaggaggcggagagcaatgtgttacagatgcagtgcaagctgtttgtctttgacaagacctcacagtcctgggtggagagaggccgggggctgctcagactcaatgacatggcgtccaccgatgacggcacactacagtcccgactagtgatgcggacccaggggagcctgcgactgatcctcaacaccaagctgtgggcccagatgcagatcgacaaggccagcgagaagagcattcgcatcacagccatggacaccgaggaccagggcgtgaaggtcttcctgatctcggccagctccaaggacacaggtcagttgtatgcagccctgcaccaccgcatcctggccctgcgcagccgcgtggagcaggagcaggaggccaagatgcccgcgcctgagcctggggcagccccatccaacgaggaggacgacagcgacgatgacgatgtcctggctccttcaggggccaccgcagctggtgctggtgacgaaggggacgggcagacgaccgggagcacatagcggccgggagcccggctgcacaccaggctgctgctttgtccgtctatccacccgcccacccgcccccaccccaccggcagcgtccaggtgcggggccgggaaccacacaccccactgggccggccacagtctggacccgcacgtcctgttcaaaagcagactcgggaactgcctgaatgtggtttgggacacgagacctcatcatattgatgagcgaacaaacaagaacatttcctccctcccctcctttgaattgaaatggcacattaagacttgtcacggcttctcactgggactggagacctcgttccttcaccccgcgtgtcgccagcctctgggtccagccagagcccctggcttctccgccacccacacccttcccaccctgctgtggggccctgcctttgtggggagcagccagccctctgcccctgcccagggctccccaactataggcctgggacccccgcccagcttggggggctgctcgtacgagtgtagacactgggcccattggacgtgctgttaactactatcttcatttcccacttcccctctctgattgggggtgtatattttacatctttttttctttttattttcgaaggctttgttttggtttcttaggttaagatgctctcgagcgttgagcaggcacagctctgtcgaggtccctgtcccccacctgtggttctggcctctgaggttgggggactacttgtttcccaccccaggttcctccaggccaagtcatggggtgatgaggagttggggccctgtctgtcctaggcctggagagtgcctgtctgggaaaaggtcactggacctggaagggtccccagggtcccctgactcccgtctccatctgtcacgtggttcaccatcatcaggcaccaggcgcaaactgcttcccgctgttggccatcccttccccagccacaggtgtccctgcccccaggacagtccagggccaggggcttctgtgagaggcagagggggaccctcaccaaatcttggtggaagagcccaggggctggtcccagaacaggcagtctcacaagcacgcagcacactggagtggacgcctgtgcccacccgagcctggagcatggccaagagccagcttgcaccacccacctgggaggccgaggaggaggtcccctgggcacagggcctctttgggacttcagaggaaatctcccagtcccactctcggagggttaagagaaggcctcctgcagctgtgccgtccacacctctaggtcgccagagccctggcccccagcccccagcaagcctgagcccgggaagaaccagaggccctcccgagagacccagtcacacgtctctgctttaagccttagccagctagtgacgagtacaacgagataacgcccatgtgttttggaacatttatgtaagattgtcatatgaaatgtatttgggaactacattaaacttttaactaaaa

SEQ ID NO: 289995 - DNA, 3028 bp, Homo sapiens
agggcaggctgctctgcagggcaggcgatccggggctcgcctccgcgcggcattcagcgcgcaggcgcgagctggccgcctcacacggagtcggcttgttaagtgcgcacgcgcgggagtttaaaaaagaaagcaggcgagcctgggccggcgcggggccttgtgggagggcttaaggaagtaaaatggcggacctggcgaacgaagaaaagcctgccattgctccgcccgtctttgtgtttcagaaggataaaggacaaaagaggtcagctggcggctccagtcctgaaggcggagaagattctgacagagaagatggaaattactgccctcctgtcaagcgagaaagaacatcctctttaacccagttcccaccctcacagtcagaggaaaggagcagtggcttccggttgaagccaccaacgctgatccacggccaagcccccagcgcaggtctgccaagccagaagcccaaggagcagcagcggagcgtgcttcgcccggcagtgttacaagctccgcagccaaaggcgctgtcccagactggagaaagagccccagaaaaatgagtccagcaatgcctctgaagaggaagcctgtgagaaaaaagaccccgccacacagcaagcctttgtatttgggcagaacttgagggacagagttaagctgataaatgagagcgtggacgaagccgacatggagaatgctggacaccccagcgcagacacgccaaccgcaacgaactatttcctccagtatatcagttccagtttagagaactcaaccaatagtgccgacgcctccagcaacaaatttgtatttggccagaacatgagcgagcgagttttgagccccccaaaattaaacgaggtcagttcagatgccaacagggaaaatgcagctgccgagtcagggtctgagtcctcgtcccaggaggccacccctgagaaagagtccctggctgagtcggcagccgcctacaccaaggcaacagcgcggaagtgtttgttggaaaaagtggaagtcatcaccggggaggaggcggagagcaatgtgttacagatgcagtgcaagctgtttgtctttgacaagacctcacagtcctgggtggagagaggccgggggctgctcagactcaatgacatggcgtccaccgatgacggcacactacagtcccgactagtgatgcggacccaggggagcctgcgactgatcctcaacaccaagctgtgggcccagatgcagatcgacaaggccagcgagaagagcattcgcatcacagccatggacaccgaggaccagggcgtgaaggtcttcctgatctcggccagctccaaggacacaggtcagttgtatgcagccctgcaccaccgcatcctggccctgcgcagccgcgtggagcaggagcaggaggccaagatgcccgcgcctgagcctggggcagccccatccaacgaggaggacgacagcgacgatgacgatgtcctggctccttcaggggccaccgcagctggtgctggtgacgaaggggacgggcagacgaccgggagcacatagcggccgggagcccggctgcacaccaggctgctgctttgtccgtctatccacccgcccacccgcccccaccccaccggcagcgtccaggtgcggggccgggaaccacacaccccactgggccggccacagtctggacccgcacgtcctgttcaaaagcagactcgggaactgcctgaatgtggtttgggacacgagacctcatcatattgatgagcgaacaaacaagaacatttcctccctcccctcctttgaattgaaatggcacattaagacttgtcacggcttctcactgggactggagacctcgttccttcaccccgcgtgtcgccagcctctgggtccagccagagcccctggcttctccgccacccacacccttcccaccctgctgtggggccctgcctttgtggggagcagccagccctctgcccctgcccagggctccccaactataggcctgggacccccgcccagcttggggggctgctcgtacgagtgtagacactgggcccattggacgtgctgttaactactatcttcatttcccacttcccctctctgattgggggtgtatattttacatctttttttctttttattttcgaaggctttgttttggtttcttaggttaagatgctctcgagcgttgagcaggcacagctctgtcgaggtccctgtcccccacctgtggttctggcctctgaggttgggggactacttgtttcccaccccaggttcctccaggccaagtcatggggtgatgaggagttggggccctgtctgtcctaggcctggagagtgcctgtctgggaaaaggtcactggacctggaagggtccccagggtcccctgactcccgtctccatctgtcacgtggttcaccatcatcaggcaccaggcgcaaactgcttcccgctgttggccatcccttccccagccacaggtgtccctgcccccaggacagtccagggccaggggcttctgtgagaggcagagggggaccctcaccaaatcttggtggaagagcccaggggctggtcccagaacaggcagtctcacaagcacgcagcacactggagtggacgcctgtgcccacccgagcctggagcatggccaagagccagcttgcaccacccacctgggaggccgaggaggaggtcccctgggcacagggcctctttgggacttcagaggaaatctcccagtcccactctcggagggttaagagaaggcctcctgcagctgtgccgtccacacctctaggtcgccagagccctggcccccagcccccagcaagcctgagcccgggaagaaccagaggccctcccgagagacccagtcacacgtctctgctttaagccttagccagctagtgacgagtacaacgagataacgcccatgtgttttggaacatttatgtaagattgtcatatgaaatgtatttgggaactacattaaacttttaactaaaa

SEQ ID NO: 289996 - DNA, 1548 bp, Homo sapiens
gtacggggatcatgaaaagcattactaaggagagtgatggtgactaagggaaaggacagccgtcggggagataatagcgtggaaagacgaggctgaacatcaggtgaaagaaatgtccgtctatccacccgcccacccgcccccaccccaccggcagcgtccaggtgcggggccgggaaccacacaccccactgggccggccacagtctggacccgcacgtcctgttcaaaagcagactcgggaactgcctgaatgtggtttgggacacgagacctcatcatattgatgagcgaacaaacaagaacatttcctccctcccctcctttgaattgaaatggcacattaagacttgtcacggcttctcactgggactggagacctcgttccttcaccccgcgtgtcgccagcctctgggtccagccagagcccctggcttctccgccacccacacccttcccaccctgctgtggggccctgcctttgtggggagcagccagccctctgcccctgcccagggctccccaactataggcctgggacccccgcccagcttggggggctgctcgtacgagtgtagacactgggcccattggacgtgctgttaactactatcttcatttcccacttcccctctctgattgggggtgtatattttacatctttttttctttttattttcgaaggctttgttttggtttcttaggttaagatgctctcgagcgttgagcaggcacagctctgtcgaggtccctgtcccccacctgtggttctggcctctgaggttgggggactacttgtttcccaccccaggttcctccaggccaagtcatggggtgatgaggagttggggccctgtctgtcctaggcctggagagtgcctgtctgggaaaaggtcactggacctggaagggtccccagggtcccctgactcccgtctccatctgtcacgtggttcaccatcatcaggcaccaggcgcaaactgcttcccgctgttggccatcccttccccagccacaggtgtccctgcccccaggacagtccagggccaggggcttctgtgagaggcagagggggaccctcaccaaatcttggtggaagagcccaggggctggtcccagaacaggcagtctcacaagcacgcagcacactggagtggacgcctgtgcccacccgagcctggagcatggccaagagccagcttgcaccacccacctgggaggccgaggaggaggtcccctgggcacagggcctctttgggacttcagaggaaatctcccagtcccactctcggagggttaagagaaggcctcctgcagctgtgccgtccacacctctaggtcgccagagccctggcccccagcccccagcaagcctgagcccgggaagaaccagaggccctcccgagagacccagtcacacgtctctgctttaagccttagccagctagtgacgagtacaacgagataacgcccatgtgttttggaacatttatgtaagattgtcatatgaaatgtatttgggaactacattaaacttttaactaaaa

SEQ ID NO: 289997 - DNA, 1508 bp, Homo sapiens
  misc_feature (22)..(22): n is a, c, g, or t
  misc_feature (73)..(73): n is a, c, g, or t
  misc_feature (85)..(85): n is a, c, g, or t
  misc_feature (98)..(98): n is a, c, g, or t
  misc_feature (172)..(172): n is a, c, g, or t
  misc_feature (243)..(243): n is a, c, g, or t
  misc_feature (280)..(280): n is a, c, g, or t
  misc_feature (319)..(319): n is a, c, g, or t
  misc_feature (345)..(345): n is a, c, g, or t
  misc_feature (384)..(384): n is a, c, g, or t
  misc_feature (389)..(389): n is a, c, g, or t
  misc_feature (399)..(399): n is a, c, g, or t
  misc_feature (408)..(408): n is a, c, g, or t
  misc_feature (412)..(412): n is a, c, g, or t
cgacttggggcccgggccccancaggttcttgggaacccccggccaccgttcccttgttccaaaaagccaagnacttgcgggganacctgccccttgnaatggtgggtttttggggaacacccgaggacccttccaattccattatttgattgaagcggaacccaaaccagnggaaccatttttgcccttcccctccccccccttcccctttttgaaatttgaaaatgggccaccatttaaangaccctttggtcccaccggctttccttccacttgggnacttggagaacccttccggtttcccctttccaccccccncgcggttgtccggcccaaggcccctncttgggtccccaggcccaagaggcccccccttggctttnctccncggcccaccnccacacccncttncccccaacccctgctgtggggccctgcctttgtggggagcagccagccctctgcccctgcccagggctccccaactataggcctgggacccccgcccagcttggggggctgctcgtacgagtgtagacactgggcccattggacgtgctgttaactactatcttcatttcccacttcccctctctgattgggggtgtatattttacatctttttttctttttattttcgaaggctttgttttggtttcttaggttaagatgctctcgagcgttgagcaggcacagctctgtcgaggtccctgtcccccacctgtggttctggcctctgaggttgggggactacttgtttcccaccccaggttcctccaggccaagtcatggggtgatgaggagttggggccctgtctgtcctaggcctggagagtgcctgtctgggaaaaggtcactggacctggaagggtccccagggtcccctgactcccgtctccatctgtcacgtggttcaccatcatcaggcaccaggcgcaaactgcttcccgctgttggccatcccttccccagccacaggtgtccctgcccccaggacagtccagggccaggggcttctgtgagaggcagagggggaccctcaccaaatcttggtggaagagcccaggggctggtcccagaacaggcagtctcacaagcacgcagcacactggagtggacgcctgtgcccacccgagcctggagcatggccaagagccagcttgcaccacccacctgggaggccgaggaggaggtcccctgggcacagggcctctttgggacttcagaggaaatctcccagtcccactctcggagggttaagagaaggcctcctgcagctgtgccgtccacacctctaggtcgccagagccctggcccccagcccccagcaagcctgagcccgggaagaaccagaggccctcccgagagacccagtcacacgtctctgctttaagccttagccagctagtgacgagtacaacgagataacgcccatgtgttttggaacatttatgtaagattgtcatatgaaatgtatttgggaactacattaaacttttaactaaaa

SEQ ID NO: 289998 - DNA, 1040 bp, Homo sapiens
  misc_feature (891)..(891): n is a, c, g, or t
agggcaggctgctctgcagggcaggcgatccggggctcgcctccgcgcggcattcagcgcgcaggcgcgagctggccgcctcacacggagtcggcttgttaagtgcgcacgcgcgggagtttaaaaaagaaagcaggcgagcctgggccggcgcggggccttgtgggagggcttaaggaagtaaaatggcggacctggcgaacgaagaaaagcctgccattgctccgcccgtctttgtgtttcagaaggataaaggacaaaagtcccctgcagagcaaaaaaacttgtcggattcgggagaggagcctcggggggaggctgaggccccccaccatggcacgggtcaccccgagtcagctggcgagcatgccctagaacctcctgcccctgctggcgcctcagccagcactcctccgcctcccgctcctgaagcccagcttcctccttttccgcgagaactggcagggaggtcagctggcggctccagtcctgaaggcggagaagattctgacagagaagatggaaattactgccctcctgtcaagcgagaaagaacatcctctttaacccagttcccaccctcacagtcagaggaaaggagcagtggcttccggttgaagccaccaacgctgatccacggccaagcccccagcgcaggtctgccaagccagaagcccaaggagcagcagcggagcgtgcttcgcccggcagtgttacaagctccgcagccaaaggcgctgtcccagactgtccccagcagtggcaccaacggggtcagcctcccagcagactgcacgggggcagtgcccgcagcatcccctgacactgctgcatggagaagtccttccgaagctgccgatgaggtgtgtgcacttgagagaaagagccccnagaaaaatgagtccagcaatgcctcctacacctacctctctctgggcttctatttcgaccgcgatgatgtggctctggaaggcgtgagccacttcttccgcgaactggccgaggagaagcgcgagggctacgagcgtctcctgaagatg

SEQ ID NO: 289999 - DNA, 580 bp, Homo sapiens
gacgcctccagcaacaaatttgtatttggccagaacatgagcgagcgagttttggtgagtggctgtgttgggaatgttctcagggaccagaggctctcggcgccagccacaggtcaaggggacatggagagcagggctgctgtgtcgtcctatgtgagatggggatgccttcagtagcaagtgagagagggaagaccctgctcagactcagcctgaaaactggccagggccactggctgcctacgaactggcattcgcttttcccggctcctccgtgctgaccagggccaacttcatcccaagatgggcttccctggaggctgcagggtcctgctggcagtcggggtccatggttcctccccaccaggccaactgacaaaagtcctgtgggacggagccagccgtgctggtggacagggttgctggcctccctgctcctgtgagcataaccgcggccaaggccttgggtgcacgaaaggcccatctccgttcccaggagcccagccagcctgggagagggttctagaatggtttgcctacctctttacacatgttcctttttcttcctgattccacccag

SEQ ID NO: 290000 - DNA, 587 bp, Homo sapiens
ttcatcggggggatgtttgagctttaggctaaaatcctggctctcattcgggtgctgggctctgggaactagctgcccgtggtgcatgttgggatatttgttacggccccgagagttgctcggctgccgtgagcctgatgccctctgaccccggctgtgtgctccttgtttcagaggtcagctggcggctccagtcctgaaggcggagaaggtaaggagctctctaacacctttgaccatcttcagttttaaagacagaagcaacctgatttttctcctcctcttctcatcattttctgtagattctgacagagaagatggaaattactgccctcctgtcaagcgagaaagaacatcctctttaacccagttcccaccctcacagtcaggtaaaatatgcaaacttacggaatggtgaaagcgtttatgcttacaaacccgccattcccctcagtgccgcgcatccgtctgctgtgtccttcctgcccagctccggttagagtcgatctgaggctcgggctctgtcaggagtgaggtgagagcttgtccagagtgcagcatcaggggtcctcgtctcgaatcagtga

SEQ ID NO: 290001 - DNA, 836 bp, Homo sapiens
  misc_feature (687)..(687): n is a, c, g, or t
agggcaggctgctctgcagggcaggcgatccggggctcgcctccgcgcggcattcagcgcgcaggcgcgagctggccgcctcacacggagtcggcttgttaagtgcgcacgcgcgggagtttaaaaaagaaagcaggcgagcctgggccggcgcggggccttgtgggagggcttaaggaagtaaaatggcggacctggcgaacgaagaaaagcctgccattgctccgcccgtctttgtgtttcagaaggataaaggacaaaagaggtcagctggcggctccagtcctgaaggcggagaagattctgacagagaagatggaaattactgccctcctgtcaagcgagaaagaacatcctctttaacccagttcccaccctcacagtcagaggaaaggagcagtggcttccggttgaagccaccaacgctgatccacggccaagcccccagcgcaggtctgccaagccagaagcccaaggagcagcagcggagcgtgcttcgcccggcagtgttacaagctccgcagccaaaggcgctgtcccagactgtccccagcagtggcaccaacggggtcagcctcccagcagactgcacgggggcagtgcccgcagcatcccctgacactgctgcatggagaagtccttccgaagctgccgatgaggtgtgtgcacttgagagaaagagccccnagaaaaatgagtccagcaatgcctcctacacctacctctctctgggcttctatttcgaccgcgatgatgtggctctggaaggcgtgagccacttcttccgcgaactggccgaggagaagcgcgagggctacgagcgtctcctgaagatg

SEQ ID NO: 290002 - DNA, 3360 bp, Homo sapiens
agggcaggctgctctgcagggcaggcgatccggggctcgcctccgcgcggcattcagcgcgcaggcgcgagctggccgcctcacacggagtcggcttgttaagtgcgcacgcgcgggagtttaaaaaagaaagcaggcgagcctgggccggcgcggggccttgtgggagggcttaaggaagtaaaatggcggacctggcgaacgaagaaaagcctgccattgctccgcccgtctttgtgtttcagaaggataaaggacaaaagtcccctgcagagcaaaaaaacttgtcggattcgggagaggagcctcggggggaggctgaggccccccaccatggcacgggtcaccccgagtcagctggcgagcatgccctagaacctcctgcccctgctggcgcctcagccagcactcctccgcctcccgctcctgaagcccagcttcctccttttccgcgagaactggcagggaggtcagctggcggctccagtcctgaaggcggagaagattctgacagagaagatggaaattactgccctcctgtcaagcgagaaagaacatcctctttaacccagttcccaccctcacagtcagaggaaaggagcagtggcttccggttgaagccaccaacgctgatccacggccaagcccccagcgcaggtctgccaagccagaagcccaaggagcagcagcggagcgtgcttcgcccggcagtgttacaagctccgcagccaaaggcgctgtcccagactgtccccagcagtggcaccaacggggtcagcctcccagcagactgcacgggggcagtgcccgcagcatcccctgacactgctgcatggagaagtccttccgaagctgccgatgaggtgtgtgcacttgaggagaaagagccccagaaaaatgagtccagcaatgcctctgaagaggaagcctgtgagaaaaaagaccccgccacacagcaagcctttgtatttgggcagaacttgagggacagagttaagctgataaatgagagcgtggacgaagccgacatggagaatgctggacaccccagcgcagacacgccaaccgcaacgaactatttcctccagtatatcagttccagtttagagaactcaaccaatagtgccgacgcctccagcaacaaatttgtatttggccagaacatgagcgagcgagttttgagccccccaaaattaaacgaggtcagttcagatgccaacagggaaaatgcagctgccgagtcagggtctgagtcctcgtcccaggaggccacccctgagaaagagtccctggctgagtcggcagccgcctacaccaaggcaacagcgcggaagtgtttgttggaaaaagtggaagtcatcaccggggaggaggcggagagcaatgtgttacagatgcagtgcaagctgtttgtctttgacaagacctcacagtcctgggtggagagaggccgggggctgctcagactcaatgacatggcgtccaccgatgacggcacactacagtcccgactagtgatgcggacccaggggagcctgcgactgatcctcaacaccaagctgtgggcccagatgcagatcgacaaggccagcgagaagagcattcgcatcacagccatggacaccgaggaccagggcgtgaaggtcttcctgatctcggccagctccaaggacacaggtcagttgtatgcagccctgcaccaccgcatcctggccctgcgcagccgcgtggagcaggagcaggaggccaagatgcccgcgcctgagcctggggcagccccatccaacgaggaggacgacagcgacgatgacgatgtcctggctccttcaggggccaccgcagctggtgctggtgacgaaggggacgggcagacgaccgggagcacatagcggccgggagcccggctgcacaccaggctgctgctttgtccgtctatccacccgcccacccgcccccaccccaccggcagcgtccaggtgcggggccgggaaccacacaccccactgggccggccacagtctggacccgcacgtcctgttcaaaagcagactcgggaactgcctgaatgtggtttgggacacgagacctcatcatattgatgagcgaacaaacaagaacatttcctccctcccctcctttgaattgaaatggcacattaagacttgtcacggcttctcactgggactggagacctcgttccttcaccccgcgtgtcgccagcctctgggtccagccagagcccctggcttctccgccacccacacccttcccaccctgctgtggggccctgcctttgtggggagcagccagccctctgcccctgcccagggctccccaactataggcctgggacccccgcccagcttggggggctgctcgtacgagtgtagacactgggcccattggacgtgctgttaactactatcttcatttcccacttcccctctctgattgggggtgtatattttacatctttttttctttttattttcgaaggctttgttttggtttcttaggttaagatgctctcgagcgttgagcaggcacagctctgtcgaggtccctgtcccccacctgtggttctggcctctgaggttgggggactacttgtttcccaccccaggttcctccaggccaagtcatggggtgatgaggagttggggccctgtctgtcctaggcctggagagtgcctgtctgggaaaaggtcactggacctggaagggtccccagggtcccctgactcccgtctccatctgtcacgtggttcaccatcatcaggcaccaggcgcaaactgcttcccgctgttggccatcccttccccagccacaggtgtccctgcccccaggacagtccagggccaggggcttctgtgagaggcagagggggaccctcaccaaatcttggtggaagagcccaggggctggtcccagaacaggcagtctcacaagcacgcagcacactggagtggacgcctgtgcccacccgagcctggagcatggccaagagccagcttgcaccacccacctgggaggccgaggaggaggtcccctgggcacagggcctctttgggacttcagaggaaatctcccagtcccactctcggagggttaagagaaggcctcctgcagctgtgccgtccacacctctaggtcgccagagccctggcccccagcccccagcaagcctgagcccgggaagaaccagaggccctcccgagagacccagtcacacgtctctgctttaagccttagccagctagtgacgagtacaacgagataacgcccatgtgttttggaacatttatgtaagattgtcatatgaaatgtatttgggaactacattaaacttttaactaaaa

SEQ ID NO: 290003 - DNA, 2658 bp, Homo sapiens
tctagaaagatcacttgtaacttgacccacgagccctggaaagttcctttaaagagaggctgtctgagcagggaggttgggacccctgactgtgagcgtcgtgtgttcagaaaagtgggcagtggtggcacgggagcaggctaggcggggtgcatcgggcgggctccatgcccagcagtagcgcacttggttcagcctgtctgtccttcatgttctggcccccacataccacagtgttcgccccagttagcagggtggctgcattccagcggcgcgctgctagtgagccggctgctagtgaggctgccggggatgctgcacagggcagggcacatgcaagggtccttgtcccatctgcctttggcagagggacttcctcagcatggctgttttgaaaaacaggtgcaaaatgtgcctgtacgtgaccccacaccgagtcctgagcctccaggtagctgcctgtgaatgcactgctctcctcccacagtctccacttgactgttgagtctgccggcgccccgccacgttactgtgctaactggattaattcacaggcgtcggtcactgggagtttcatgtaatcacatgtaaaaataacagtagccagatctcctggccagctgttaaaaaaagacctcaagtttttaaaaaagtgcttccctgcaaagtctagcctgcaaggggcatgaaatgggatgccaggggtcagtctctgaagcgcctgggggcaggcaggggtccacgggcactgggaaggccgccttctgttcctaggtctgccaagccagaagcccaaggagcagcagcggagcgtgcttcgcccggcagtgttacaagctccgcagccaaaggcgctgtcccagactgtccccagcagtggcaccaacggggtcagcctcccagcagactgcacgggggcagtgcccgcagcatcccctgacactgctgcatggagaagtccttccgaagctgccgatgaggtgtgtgcacttgaggagaaagagccccagaaaaatgagtccagcaatgcctctgaagaggaagcctgtgagaaaaaagaccccgccacacagcaagcctttgtatttgggcagaacttgagggacagagttaagctgataaatgagagcgtggacgaagccgacatggagaatgctggacaccccagcgcagacacgccaaccgcaacgaactatttcctccagtatatcagttccaggtgtgtgtctcggtgtcagcggccagcctggcatggcgatgcaggtggccgcgagggcttctgccagagaggggtctgtggtccccgtgcccgactcaggcccagaatccaggttgctctcaggcccctctctctcattccccactctgggcacaaccttgggtgggccagggtggtgggccttgtcctgggattcactggacgcctgagacaggaccagagttctgtggggttgtccaggggcccatggaggctacagcccagcccttggagtgtgccctctgtcttgtggacctcatgcccagagcagaacagacgaggccagaggcgactcaggcgcccccttattctgggtttgggcacctggggcaaagacctcatcatgtccttgactgacatggctgggggtaaagctacccacggaccagctgcccctccaggtgtctcagaagaaagcgtgtcccgactgggagatgggcgggtagagcaggtggaaggtggcttccctcatgctgtggggcccctccatcagggcgagctaagggttaatgttttcaatggcacagggaggtgtgtggcttcctgcctctgacacgccaccccgtgcacagtggcggaggcccctccactgtgccctctgtgtcagtgtgtgctccatgggtacccatacatttgcctggccacgttcccacgtgacgcccacactcattgcacatcttctcttcagtttagagaactcaaccaatagtgccgacgcctccagcaacaaatttgtatttggccagaacatgagcgagcgagttttgagccccccaaaattaaacgaggtcagttcagatgccaacagggaaaatgcagctgccgagtcagggtctgagtcctcgtcccaggaggccacccctgagaaagagtccctggctgagtcggcagccgcctacaccaaggcaacagcgcggaagtgtttgttggaaaaagtggaagtcatcaccggggaggaggcggagagcaatgtgttacagatgcagtgcaagctgtttgtctttgacaagacctcacagtcctgggtggagagaggccgggggctgctcagactcaatgacatggcgtccaccgatgacggcacactacagtcccgactaggtgagctgccgacggcgggggctgtggccgggtccccatggggagggctggggactatgcaattccaaagggaatgaagcgggggagatcctgaccctacccttgtgagagtcaaggcacagagtcggtctcccatgagagccgccccccaaacccccctccctgcacccagccctcaacaccaccctcacacactggctccagctgccagctcgtccgtgaccctcttagtgtcaaaatggacaaaagtctatggaagtttttaagctgattttctgacaaagtggcaggtttatgat

SEQ ID NO: 290004 - DNA, 569 bp, Homo sapiens
cttctcatcattttctgtagattctgacagagaagatggaaattactgccctcctgtcaagcgagaaagaacatcctctttaacccagttcccaccctcacagtcagaggaaaggagcagtggcttccggttgaagccaccaacgctgatccacggccaagcccccagcgcaggtctgccaagccagaagcccaaggagcagcagcggagcgtgcttcgcccggcagtgttacaagctccgcagccaaaggcgctgtcccagactgtccccagcagtggcaccaacggggtcagcctcccagcagactgcacgggggcagtgcccgcagcatcccctgacactgctgcatggagaagtccttccgaagctgccgatgaggtgtgtgcacttgaggagaaagagccccagaaaaatgagtccagcaatgcctctgaagaggaagcctgtgagaaaaaagaccccgccacacagcaagcctttgtatttgggcagaacttgagggacagagttaagctgataaatgagagcgtggacgaagccgacgactttaagtgatcagggtaccgag

SEQ ID NO: 290005 - DNA, 3654 bp, Homo sapiens
agggcaggctgctctgcagggcaggcgatccggggctcgcctccgcgcggcattcagcgcgcaggcgcgagctggccgcctcacacggagtcggcttgttaagtgcgcacgcgcgggagtttaaaaaagaaagcaggcgagcctgggccggcgcggggccttgtgggagggcttaaggaagtaaaatggcggacctggcgaacgaagaaaagcctgccattgctccgcccgtctttgtgtttcagaaggataaaggacaaaagaggtcagctggcggctccagtcctgaaggcggagaagattctgacagagaagatggaaattactgccctcctgtcaagcgagaaagaacatcctctttaacccagttcccaccctcacagtcagaggaaaggagcagtggcttccggttgaagccaccaacgctgatccacggccaagcccccagcgcaggtctgccaagccagaagcccaaggagcagcagcggagcgtgcttcgcccggcagtgttacaagctccgcagccaaaggcgctgtcccagactgtccccagcagtggcaccaacggggtcagcctcccagcagactgcacgggggcagtgcccgcagcatcccctgacactgctgcatggagaagtccttccgaagctgccgatgaggtgtgtgcacttgaggagaaagagccccagaaaaatgagtccagcaatgcctctgaagaggaagcctgtgagaaaaaagaccccgccacacagcaagcctttgtatttgggcagaacttgagggacagagttaagctgataaatgagagcgtggacgaagccgacatggagaatgctggacaccccagcgcagacacgccaaccgcaacgaactatttcctccagtatatcagttccagtttagagaactcaaccaatagtgccgacgcctccagcaacaaatttgtatttggccagaacatgagcgagcgagttttgagccccccaaaattaaacgaggtcagttcagatgccaacagggaaaatgcagctgccgagtcagggtctgagtcctcgtcccaggaggccacccctgagaaagagtccctggctgagtcggcagccgcctacaccaaggcaacagcgcggaagtgtttgttggaaaaagtggaagtcatcaccggggaggaggcggagagcaatgtgttacagatgcagtgcaagctgtttgtctttgacaagacctcacagtcctgggtggagagaggccgggggctgctcagactcaatgacatggcgtccaccgatgacggcacactacagtcccgactagtgatgcggacccaggggagcctgcgactgatcctcaacaccaagctgtgggcccagatgcagatcgacaaggccagcgagaagagcattcgcatcacagccatggacaccgaggaccagggcgtgaaggtcttcctgatctcggccagctccaaggacacaggtcagttgtatgcagccctgcaccaccgcatcctggccctgcgcagccgcgtggagcaggagcaggaggccaagatgcccgcgcctgagcctggggcagccccatccaacgaggaggacgacagcgacgatgacgatgtcctggctccttcaggggccaccgcagctggtgctggtgacgaaggggacgggcagacgaccgggagcacatagcggccgggagcccggctgcacaccaggctgctgctttgtccgtctatccacccgcccacccgcccccaccccaccggcagcgtccaggtgcggggccgggaaccacacaccccactgggccggccacagtctggacccgcacgtcctgttcaaaagcagactcgggaactgcctgaatgtggtttgggacacgagacctcatcatattgatgagcgaacaaacaagaacatttcctccctcccctcctttgaattgaaatggcacattaagacttgtcacggcttctcactgggactggagacctcgttccttcaccccgcgtgtcgccagcctctgggtccagccagagcccctggcttctccgccacccacacccttcccaccctgctgtggggccctgcctttgtggggagcagccagccctctgcccctgcccagggctccccaactataggcctgggacccccgcccagcttggggggctgctcgtacgagtgtagacactgggcccattggacgtgctgttaactactatcttcatttcccacttcccctctctgattgggggtgtatattttacatctttttttctttttattttcgaaggctttgttttggtttcttaggttaagatgctctcgagcgttgagcaggcacagctctgtcgaggtccctgtcccccacctgtggttctggcctctgaggttgggggactacttgtttcccaccccaggttcctccaggccaagtcatggggtgatgaggagttggggccctgtctgtcctaggcctggagagtgcctgtctgggaaaaggtcactggacctggaagggtccccagggtcccctgactcccgtctccatctgtcacgtggttcaccatcatcaggcaccaggcgcaaactgcttcccgctgttggccatcccttccccagccacaggtgtccctgcccccaggacagtccagggccaggggcttctgtgagaggcagagggggaccctcaccaaatcttggtggaagagcccaggggctggtcccagaacaggcagtctcacaagcacgcagcacactggagtggacgcctgtgcccacccgagcctggagcatggccaagagccagcttgcaccacccacctgggaggccgaggaggaggtcccctgggcacagggcctctttgggacttcagaggaaatctcccagtcccactctcggagggttaagagaaggcctcctgcagctgtgccgtccacacctctaggtcgccagagccctggcccccagcccccagcaagcctgagcccgggaagaaccagaggccctcccgagagacccagtcacacgtctctgctttaagccttagccagctagtgacgagtacaacgagataacgcccatgtgttttggaacatttatgtaagattgtcatatgaaatgtatttgggaactacattaaacttttaactaaaaaaaaaaaaaaaaaaaaaaaaaaaaaaaaaaaaaaaaaaaaaaaaaaaaaaaaaaaaaaaaaaaaaaaaaaaaaaaaaaaaaaaaaaaaaaaaaaaaaaaaaaaaaaaaaaaaaaaaaaaaaaaaaattttggggcccctttggcccaagctttttttaatttgggaaattttttttttggggcccaaatttgggtttatttggcaaattccccttaaggggggggttttaaaaaaaaaatggggggggttttaaaaagggggaatgggaaaaacccgggggttaccaaatttaaagggtttggaaaaaatcccctttttcaaagggggggaaaaaaaaaaagggccccaaccgatccccttttcaaaaaattggccacctttaatgggaaaggaaaattggggggcttatttttttgtaaaaatcgcggtaaaatttttgttaaaaagatttttttttaaccaaaagggcaaaaggggaaaaatcctttttaaaaaaa

SEQ ID NO: 290006 - DNA, 2352 bp, Homo sapiens
agggcaggctgctctgcagggcaggcgatccggggctcgcctccgcgcggcattcagcgcgcaggcgcgagctggccgcctcacacggagtcggcttgttaagtgcgcacgcgcgggagtttaaaaaagaaagcaggcgagcctgggccggcgcggggccttgtgggagggcttaaggaagtaaaatggcggacctggcgaacgaagaaaagcctgccattgctccgcccgtctttgtgtttcagaaggataaaggacaaaagaggtcagctggcggctccagtcctgaaggcggagaagattctgacagagaagatggaaattactgccctcctgtcaagcgagaaagaacatcctctttaacccagttcccaccctcacagtcagaggaaaggagcagtggcttccggttgaagccaccaacgctgatccacggccaagcccccagcgcaggtctgccaagccagaagcccaaggagcagcagcggagcgtgcttcgcccggcagtgttacaagctccgcagccaaaggcgctgtcccagactgtccccagcagtggcaccaacggggtcagcctcccagcagactgcacgggggcagtgcccgcagcatcccctgacactgctgcatggagaagtccttccgaagctgccgatgaggtgtgtgcacttgaggagaaagagccccagaaaaatgagtccagcaatgcctctgaagaggaagcctgtgagaaaaaagaccccgccacacagcaagcctttgtatttgggcagaacttgagggacagagttaagctgataaatgagagcgtggacgaagccgacatggagaatgctggacaccccagcgcagacacgccaaccgcaacgaactatttcctccagtatatcagttccagtttagagaactcaaccaatagtgccgacgcctccagcaacaaatttgtatttggccagaacatgagcgagcgagttttgagccccccaaaattaaacgaggtcagttcagatgccaacagggaaaatgcagctgccgagtcagggtctgagtcctcgtcccaggaggccacccctgagaaagagtccctggctgagtcggcagccgcctacaccaaggcaacagcgcggaagtgtttgttggaaaaagtggaagtcatcaccggggaggaggcggagagcaatgtgttacagatgcagtgcaagctgtttgtctttgacaagacctcacagtcctgggtgcttctccgccacccacacccttcccaccctgctgtggggccctgcctttgtggggagcagccagccctctgcccctgcccagggctccccaactataggcctgggacccccgcccagcttggggggctgctcgtacgagtgtagacactgggcccattggacgtgctgttaactactatcttcatttcccacttcccctctctgattgggggtgtatattttacatctttttttctttttattttcgaaggctttgttttggtttcttaggttaagatgctctcgagcgttgagcaggcacagctctgtcgaggtccctgtcccccacctgtggttctggcctctgaggttgggggactacttgtttcccaccccaggttcctccaggccaagtcatggggtgatgaggagttggggccctgtctgtcctaggcctggagagtgcctgtctgggaaaaggtcactggacctggaagggtccccagggtcccctgactcccgtctccatctgtcacgtggttcaccatcatcaggcaccaggcgcaaactgcttcccgctgttggccatcccttccccagccacaggtgtccctgcccccaggacagtccagggccaggggcttctgtgagaggcagagggggaccctcaccaaatcttggtggaagagcccaggggctggtcccagaacaggcagtctcacaagcacgcagcacactggagtggacgcctgtgcccacccgagcctggagcatggccaagagccagcttgcaccacccacctgggaggccgaggaggaggtcccctgggcacagggcctctttgggacttcagaggaaatctcccagtcccactctcggagggttaagagaaggcctcctgcagctgtgccgtccacacctctaggtcgccagagccctggcccccagcccccagcaagcctgagcccgggaagaaccagaggccctcccgagagacccagtcacacgtctctgctttaagccttagccagctagtgacgagtacaacgagataacgcccatgtgttttggaacatttatgtaagattgtcatatgaaatgtatttgggaactacattaaacttttaactaaaa

SEQ ID NO: 290007 - DNA, 2963 bp, Homo sapiens
agggcaggctgctctgcagggcaggcgatccggggctcgcctccgcgcggcattcagcgcgcaggcgcgagctggccgcctcacacggagtcggcttgttaagtgcgcacgcgcgggagtttaaaaaagaaagcaggcgagcctgggccggcgcggggccttgtgggagggcttaaggaagtaaaatggcggacaggaaaggagcagtggcttccggttgaagccaccaacgctgatccacggccaagcccccagcgcaggtctgccaagccagaagcccaaggagcagcagcggagcgtgcttcgcccggcagtgttacaagctccgcagccaaaggcgctgtcccagactgtccccagcagtggcaccaacggggtcagcctcccagcagactgcacgggggcagtgcccgcagcatcccctgacactgctgcatggagaagtccttccgaagctgccgatgaggtgtgtgcacttgaggagaaagagccccagaaaaatgagtccagcaatgcctctgaagaggaagcctgtgagaaaaaagaccccgccacacagcaagcctttgtatttgggcagaacttgagggacagagttaagctgataaatgagagcgtggacgaagccgacatggagaatgctggacaccccagcgcagacacgccaaccgcaacgaactatttcctccagtatatcagttccagtttagagaactcaaccaatagtgccgacgcctccagcaacaaatttgtatttggccagaacatgagcgagcgagttttgagccccccaaaattaaacgaggtcagttcagatgccaacagggaaaatgcagctgccgagtcagggtctgagtcctcgtcccaggaggccacccctgagaaagagtccctggctgagtcggcagccgcctacaccaaggcaacagcgcggaagtgtttgttggaaaaagtggaagtcatcaccggggaggaggcggagagcaatgtgttacagatgcagtgcaagctgtttgtctttgacaagacctcacagtcctgggtggagagaggccgggggctgctcagactcaatgacatggcgtccaccgatgacggcacactacagtcccgactagtgatgcggacccaggggagcctgcgactgatcctcaacaccaagctgtgggcccagatgcagatcgacaaggccagcgagaagagcattcgcatcacagccatggacaccgaggaccagggcgtgaaggtcttcctgatctcggccagctccaaggacacaggtcagttgtatgcagccctgcaccaccgcatcctggccctgcgcagccgcgtggagcaggagcaggaggccaagatgcccgcgcctgagcctggggcagccccatccaacgaggaggacgacagcgacgatgacgatgtcctggctccttcaggggccaccgcagctggtgctggtgacgaaggggacgggcagacgaccgggagcacatagcggccgggagcccggctgcacaccaggctgctgctttgtccgtctatccacccgcccacccgcccccaccccaccggcagcgtccaggtgcggggccgggaaccacacaccccactgggccggccacagtctggacccgcacgtcctgttcaaaagcagactcgggaactgcctgaatgtggtttgggacacgagacctcatcatattgatgagcgaacaaacaagaacatttcctccctcccctcctttgaattgaaatggcacattaagacttgtcacggcttctcactgggactggagacctcgttccttcaccccgcgtgtcgccagcctctgggtccagccagagcccctggcttctccgccacccacacccttcccaccctgctgtggggccctgcctttgtggggagcagccagccctctgcccctgcccagggctccccaactataggcctgggacccccgcccagcttggggggctgctcgtacgagtgtagacactgggcccattggacgtgctgttaactactatcttcatttcccacttcccctctctgattgggggtgtatattttacatctttttttctttttattttcgaaggctttgttttggtttcttaggttaagatgctctcgagcgttgagcaggcacagctctgtcgaggtccctgtcccccacctgtggttctggcctctgaggttgggggactacttgtttcccaccccaggttcctccaggccaagtcatggggtgatgaggagttggggccctgtctgtcctaggcctggagagtgcctgtctgggaaaaggtcactggacctggaagggtccccagggtcccctgactcccgtctccatctgtcacgtggttcaccatcatcaggcaccaggcgcaaactgcttcccgctgttggccatcccttccccagccacaggtgtccctgcccccaggacagtccagggccaggggcttctgtgagaggcagagggggaccctcaccaaatcttggtggaagagcccaggggctggtcccagaacaggcagtctcacaagcacgcagcacactggagtggacgcctgtgcccacccgagcctggagcatggccaagagccagcttgcaccacccacctgggaggccgaggaggaggtcccctgggcacagggcctctttgggacttcagaggaaatctcccagtcccactctcggagggttaagagaaggcctcctgcagctgtgccgtccacacctctaggtcgccagagccctggcccccagcccccagcaagcctgagcccgggaagaaccagaggccctcccgagagacccagtcacacgtctctgctttaagccttagccagctagtgacgagtacaacgagataacgcccatgtgttttggaacatttatgtaagattgtcatatgaaatgtatttgggaactacattaaacttttaactaaaa

SEQ ID NO: 290008 - DNA, 1583 bp, Homo sapiens
  misc_feature (47)..(47): n is a, c, g, or t
  misc_feature (49)..(49): n is a, c, g, or t
gatgtaccgacaaactgaccgattgcatattgtccctggctcctttnanggggcccacccgacagctggtgctggtgacgaaggggacgggcagacgaccgggagcacatagcggccgggagcccggctgcacaccaggctgctgctttgtccgtctatccacccgcccacccgcccccaccccaccggcagcgtccaggtgcggggccgggaaccacacaccccactgggccggccacagtctggacccgcacgtcctgttcaaaagcagactcgggaactgcctgaatgtggtttgggacacgagacctcatcatattgatgagcgaacaaacaagaacatttcctccctcccctcctttgaattgaaatggcacattaagacttgtcacggcttctcactgggactggagacctcgttccttcaccccgcgtgtcgccagcctctgggtccagccagagcccctggcttctccgccacccacacccttcccaccctgctgtggggccctgcctttgtggggagcagccagccctctgcccctgcccagggctccccaactataggcctgggacccccgcccagcttggggggctgctcgtacgagtgtagacactgggcccattggacgtgctgttaactactatcttcatttcccacttcccctctctgattgggggtgtatattttacatctttttttctttttattttcgaaggctttgttttggtttcttaggttaagatgctctcgagcgttgagcaggcacagctctgtcgaggtccctgtcccccacctgtggttctggcctctgaggttgggggactacttgtttcccaccccaggttcctccaggccaagtcatggggtgatgaggagttggggccctgtctgtcctaggcctggagagtgcctgtctgggaaaaggtcactggacctggaagggtccccagggtcccctgactcccgtctccatctgtcacgtggttcaccatcatcaggcaccaggcgcaaactgcttcccgctgttggccatcccttccccagccacaggtgtccctgcccccaggacagtccagggccaggggcttctgtgagaggcagagggggaccctcaccaaatcttggtggaagagcccaggggctggtcccagaacaggcagtctcacaagcacgcagcacactggagtggacgcctgtgcccacccgagcctggagcatggccaagagccagcttgcaccacccacctgggaggccgaggaggaggtcccctgggcacagggcctctttgggacttcagaggaaatctcccagtcccactctcggagggttaagagaaggcctcctgcagctgtgccgtccacacctctaggtcgccagagccctggcccccagcccccagcaagcctgagcccgggaagaaccagaggccctcccgagagacccagtcacacgtctctgctttaagccttagccagctagtgacgagtacaacgagataacgcccatgtgttttggaacatttatgtaagattgtcatatgaaatgtatttgggaactacattaaacttttaactaaaa

SEQ ID NO: 290009 - DNA, 770 bp, Homo sapiens
agggcaggctgctctgcagggcaggcgatccggggctcgcctccgcgcggcattcagcgcgcaggcgcgagctggccgcctcacacggagtcggcttgttaagtgcgcacgcgcgggagtttaaaaaagaaagcaggcgagcctgggccggcgcggggccttgtgggagggcttaaggaagtaaaatggcggacctggcgaacgaagaaaagcctgccattgctccgcccgtctttgtgtttcagaaggataaaggacaaaagaggtcagctggcggctccagtcctgaaggcggagaagattctgacagagaagatggaaattactgccctcctgtcaagcgagaaagaacatcctctttaacccagttcccaccctcacagtcagaggaaaggagcagtggcttccggttgaagccaccaacgctgatccacggccaagcccccagcgcaggtctgccaagccagaagcccaaggagcagcagcggagcgtgcttcgcccggcagtgttacaagctccgcagccaaaggcgctgtcccagactgtccccagcagtggcaccaacggggtcagcctcccagcagactgcacgggggcagtgcccgcagcatcccctgacactgctgcatggagaagtccttccgaagctgccgatgaggtgtgtgcacttgaggagaaagagccccagaaaaatgagtccagcaatgcctctgaagaggaagcctgtgagaaaaaagaccccgccacagtttatgtagcttacctcctc

SEQ ID NO: 290010 - DNA, 1938 bp, Homo sapiens
gaatcaaggcaccccagcgatggctggcacccctttctagagcggccaggcgcaggcggagggagcgataacgtcgcccggagagtgtcagccgctccctcgcgaaagttggccccgtgcggccgcagcggaccgagggttcgttgagagcgttgtgcgcacgcgcagtttgccttccaggccgcgctttcagcctctccccctccagccttttccttcgcgcctcgggaccctctgactcacgccgctgggcgggccaggcatgcgcacaccagagggcccgtctcatttgccccggaagtgctttctttgcccgccgttcgccaaacgaagtcgtggaggtggcgaaacgaggaggagataacgcggccttgggctctggtgtctcccagtctgctaaagccctaaggccatcaccatggacttccagcatcgccccgggggcaagaccgggagcgggggcgtggcctcctcctccgagagcaaccgtgaccgcagggagcgcctccggcagctggccctggagaccatcgacatcaacaaggacccgtacttcatgaagaaccacctgggctcctatgaatgcaaactctgcctgacacttcacaacaatgaggggagctacctggcacatacgcaggggaagaagcaccagaccaacctggcccggcgagcagccaaggaggccaaggaggcccctgcccagcccgcgcctgagaaggtcaaggtggaggtgaagaagtttgtgaagatcggccgcccgggctacaaagtgaccaagcagagagactcggagatgggccagcagagcctcctcttccagattgactaccctgagatcgccgagggcatcatgccacgtcaccgcttcatgtctgcgtacgagcagaggatcgagcctccggaccggcgctggcagtacctgctcatggccgccgagccctacgagaccattgccttcaaggtgccgagcagagagatcgacaaggcggagggcaagttctggacacactggaaccgggagaccaagcagttcttcctccagttccactttaagatggagaagcccccggctccacccagcctccctgctggcccccctggggtgaagcggcctccacccccgctgatgaacggtctgccccctcggccaccgctgcctgagtctttgccaccgcccccgccaggaggcctgcctctgccacccatgccccccacagggcctgcgccctcagggcccccgggaccaccccagctacccccgccagctccaggggtccaccccccggccccagtggtgcatccccctgcatctggggtccatcccccagctcctggcgtccaccccccagctcctggcgtccatcccccagcccctggggtccacccaccaacctctggggtccaccccccagctcctggagtccaccctccagcccccggggttcacccaccagcccccggagtccacccaccagcccctggggttcacccaccagccccaggggtccatcctcccccatcagcgggggttcacccccaggccccgggggtgcacccagcagcccccgccgttcaccctcaggccccaggggtgcacccaccagccccagggatgcaccctcaggccccgggggtccacccccaacctcccggggtccatccgtcggctcctggggtccaccctcagcctccgggagttcacccctcaaatcctggggtgcaccccccaactcccatgcccccaatgctgaggcccccacttccctccgaaggcccagggaacatacctccccctcccccaaccaactgagaagctgctccctcccccagcaagcccagcgccaggtgctcttgccttttcccactgagagaaggctgctcttttgtactgccccccgctcattaaacagcctcccccagccctgagtgcactga

SEQ ID NO: 290011 - DNA, 2218 bp, Homo sapiens
cagatagcccaccaggggtggggagggtgagcagggacagggcgcccccactgacttgggaccctcctcctccaggcccacacctcagcacccaggacatctgggccccccgcccccagcgctgtctagtttggttgcctggccgtcactcccagcctggttcccactcctgtgtcttctggggatggccctcaaggacggcatgttgacacatcaggcccagctctatcactggggagggagataggctgccagggacagaaagggctctttgagaaggccactctgcctggagtgggggcgccgggcactgtcccccaaggtcgcggcagaggagataggggtctgtcctgcacaaacaccccaccttccactcggctcacttaaggcaggcagcccagcccctggcagcacccacgatgcgggacctgcctctcaccagcctggccctagtgctgtctgccctgggggctctgctggggactgaggccctcagagcagaggagccagctgtgggcaccagtggcctcatcttccgagaagacttggactggcctccaggcagcccacaagagcctctgtgcctggtggcactgggcggggacagcaatggcagcagctcccccctgcgggtggtgggggctctaagcgcctatgagcaggccttcctgggggccgtgcagagggcccgctggggcccccgagacctggccaccttcggggtctgcaacaccggtgacaggcaggctgccttgccctctctacggcggctgggggcctggctgcgggaccctggggggcagcgcctggtggtcctacacctggaggaagtgacctgggagccaacaccctcgctgaggttccaggagcccccgcctggaggagctggccccccagagctggcgctgctggtgctgtaccctgggcctggccctgaggtcactgtgacgagggctgggctgccgggtgcccagagcctctgcccctcccgagacacccgctacctggtgttagcggtggaccgccctgcgggggcctggcgcggctccgggctggccttgaccctgcagccccgcggagaggactcccggctgagtaccgcccggctgcaggcactgctgttcggcgacgaccaccgctgcttcacacggatgaccccggccctgctcctgctgccgcggtccgagcccgcgccgctgcctgcgcacggccagctggacaccgtgcccttcccgccgcccaggccatccgcggaactcgaggagtcgccacccagcgcagaccccttcctggagacgctcacgcgcctggtgcgggcgctgcgggtccccccggcccgggcctccgcgccgcgcctggccctggatccggacgcgctggccggcttcccgcagggcctagtcaacctgtcggaccccgcggcgctggagcgcctactcgacggcgaggagccgctgctgctgctgctgaggcccactgcggccaccaccggggatcctgcgcccctgcacgaccccacgtcggcgccgtgggccacggccctggcgcgccgcgtggctgctgaactgcaagcggcggctgccgagctgcgaagcctcccgggtctgcctccggccacagccccgctgctggcgcgcctgctcgcgctctgcccaggaggccccggcggcctcggcgatcccctgcgagcgctgctgctcctgaaggcgctgcagggcctgcgcgtggagtggcgcgggcgggatccgcgcgggccgggtcgggcacagcgcagcgcgggggccaccgccgccgacgggccgtgcgcgctgcgcgagctcagcgtagacctccgcgccgagcgctccgtactcatccccgagacctaccaggccaacaattgccagggcgtgtgcggctggcctcagtccgaccgcaacccgcgctacggcaaccacgtggtgctgctgctgaagatgcaggcccgtggggccgccctggcgcgcccaccctgctgcgtgcccaccgcctacgcgggcaagctgctcatcagcctgtcggaggagcgcatcagcgcgcaccacgtgcccaacatggtggccaccgagtgtggctgccggtgacccctgcgccgcgcggactcctgccccgagggtccggacgcgccccagctcgcgccccttcccatatttattcggaccccaagcatcgccccaataaagaccagcaagcaaccggc

SEQ ID NO: 290012 - DNA, 562 bp, Homo sapiens
aaaaaaaaaaaaaaaattagccgggcgtggttggtgacgcgcgcctgtagtcccagctactctggaggctgaagcgggaagatcgcttgagtccaggaggtcgaggctgcagtgagttgtgattgtgccgttgcactccagcctggacaacagagcaagaccctgtttgacaaaataaaaaagaaacaaccaagattcgttggggtcgaatcgggatcgcggctgaaatggtttcggccgccttccttgtagccgagaacgcttctgtatgctcatctatacctgttagttgactggggctctgtgatgtaattcctgtgagcctcagttcccttaaaatgggagtgacggcttcaacatcatgccaaaggcgaccagaacacgttagctggccccattttgcaggtgcaccccgctgtgaccgttgttcttgtgtatccttggacgacaccaaacagccaggcggagctctggaaaataggttgttggctaggttaaggagagaacggtgttgccacgaaaaactaattccttctcaatggtctagtcccaggtcccagag

SEQ ID NO: 290013 - DNA, 250 bp, Homo sapiens
tagagacgaggtttcgccatgttgcccaggctggtctcgaactcctgaccaggtgatccacctgccacggcctcccaaagtggtaggattacaggcatgagccactgcacccggctaatttttgtattttttgtagagatggggttttaccaggttggccaggctgtcccctgatctttaccttagtaagtaacagatttcttcatggatttatcaatttgtagacatcatctgctgatttcttgtcacg

SEQ ID NO: 290014 - DNA, 1639 bp, Homo sapiens
cggacgcggggtcgacccacgcgtccggacgaagtcgtggaggtggcgaaacgaggaggagataacgcggccttgggctctggtgtctcccagtctgctaaagccctaaggccatcaccatggacttccagcatcgccccgggggcaagaccgggagcgggggcgtggcctcctcctccgagagcaaccgtgaccgcagggagcgcctccggcagctggccctggagaccatcgacatcaacaaggacccgtacttcatgaagaaccacctgggctcctatgaatgcaaactctgcctgacacttcacaacaatgaggggagctacctggcacatacgcaggggaagaagcaccagaccaacctggcccggcgagcagccaaggaggccaaggaggcccctgcccagcccgcgcctgagaaggtcaaggtggaggtgaagaagtttgtgaagatcggccgcccgggctacaaagtgaccaagcagagagactcggagatgggccagcagagcctcctcttccagattgactaccctgagatcgccgagggcatcatgccacgtcaccgcttcatgtctgcgtacgagcagaggatcgagcctccggaccggcgctggcagtacctgctcatggccgccgagccctacgagaccattgccttcaaggtgccgagcagagagatcgacaaggcggagggcaagttctggacacactggaaccgggagaccaagcagttcttcctccagttccactttaagatggagaagcccccggctccacccagcctccctgctggcccccctggggtgaagcggcctccacccccgctgatgaacggtctgccccctcggccaccgctgcctgagtctttgccaccgcccccgccaggaggcctgcctctgccacccatgccccccacagggcctgcgccctcagggcccccgggaccaccccagctacccccgccagctccaggggtccaccccccggccccagtggtgcatccccctgcatctggggtccatcccccagctcctggcgtccaccccccagctcctggcgtccatcccccagcccctggggtccacccaccaacctctggggtccaccccccagctcctggagtccaccctccagcccccggggttcacccaccagcccccggagtccacccaccagcccctggggttcacccaccagccccaggggtccatcctcccccatcagcgggggttcacccccaggccccgggggtgcacccagcagcccccgccgttcaccctcaggccccaggggtgcacccaccagccccagggatgcaccctcaggccccgggggtccacccccaacctcccggggtccatccgtcggctcctggggtccaccctcagcctccgggagttcacccctcaaatcctggggtgcaccccccaactcccatgcccccaatgctgaggcccccacttccctccgaaggcccagggaacatacctccccctcccccaaccaactgagaagctgctccctcccccagcaagcccagcgccaggtgctcttgccttttcccactgagagaaggctgctcttttgtactgccccccgctcattaaacagcctcccccagccctgagtgcactga

SEQ ID NO: 290015 - DNA, 1635 bp, Homo sapiens
ggcacgaggccaggggcaggggctacgaagtcgtggaggtggcgaaacgaggaggagataacgcggccttgggctctggtgtctcccagtctgctaaagccctaaggccatcaccatggacttccagcatcgccccgggggcaagaccgggagcgggggcgtggcctcctcctccgagagcaaccgtgaccgcagggagcgcctccggcagctggccctggagaccatcgacatcaacaaggacccgtacttcatgaagaaccacctgggctcctatgaatgcaaactctgcctgacacttcacaacaatgaggggagctacctggcacatacgcaggggaagaagcaccagaccaacctggcccggcgagcagccaaggaggccaaggaggcccctgcccagcccgcgcctgagaaggtcaaggtggaggtgaagaagtttgtgaagatcggccgcccgggctacaaagtgaccaagcagagagactcggagatgggccagcagagcctcctcttccagattgactaccctgagatcgccgagggcatcatgccacgtcaccgcttcatgtctgcgtacgagcagaggatcgagcctccggaccggcgctggcagtacctgctcatggccgccgagccctacgagaccattgccttcaaggtgccgagcagagagatcgacaaggcggagggcaagttctggacacactggaaccgggagaccaagcagttcttcctccagttccactttaagatggagaagcccccggctccacccagcctccctgctggcccccctggggtgaagcggcctccacccccgctgatgaacggtctgccccctcggccaccgctgcctgagtctttgccaccgcccccgccaggaggcctgcctctgccacccatgccccccacagggcctgcgccctcagggcccccgggaccaccccagctacccccgccagctccaggggtccaccccccggccccagtggtgcatccccctgcatctggggtccatcccccagctcctggcgtccaccccccagctcctggcgtccatcccccagcccctggggtccacccaccaacctctggggtccaccccccagctcctggagtccaccctccagcccccggggttcacccaccagcccccggagtccacccaccagcccctggggttcacccaccagccccaggggtccatcctcccccatcagcgggggttcacccccaggccccgggggtgcacccagcagcccccgccgttcaccctcaggccccaggggtgcacccaccagccccagggatgcaccctcaggccccgggggtccacccccaacctcccggggtccatccgtcggctcctggggtccaccctcagcctccgggagttcacccctcaaatcctggggtgcaccccccaactcccatgcccccaatgctgaggcccccacttccctccgaaggcccagggaacatacctccccctcccccaaccaactgagaagctgctccctcccccagcaagcccagcgccaggtgctcttgccttttcccactgagagaaggctgctcttttgtactgccccccgctcattaaacagcctcccccagccctgagtgcactga

SEQ ID NO: 290016 - DNA, 2255 bp, Homo sapiens
gaatcaaggcaccccagcgatggctggcacccctttctagagcggccaggcgcaggcggagggagcgataacgtcgcccggagagtgtcagccgctccctcgcgaaagttggccccgtgcggccgcagcggaccgagggttcgttgagagcgttgtgcgcacgcgcagtttgccttccaggccgcgctttcagcctctccccctccagccttttccttcgcgcctcgggaccctctgactcacgccgctgggcgggccaggcatgcgcacaccagagggcccgtctcatttgccccggaagtgctttctttgcccgccgttcgccaaacgaagtcgtggaggtggcgaaacgaggaggagataacgcggccttgggctctggtgtctcccagtctgctaaagccctaaggccatcaccatggacttccagcatcgccccgggggcaagaccgggagcgggggcgtggcctcctcctccgagagcaaccgtgaccgcagggagcgcctccggcagctggccctggagaccatcgacatcaacaaggacccgtacttcatgaagaaccacctgggctcctatgaatgcaaactctgcctgacacttcacaacaatgaggggagctacctggcacatacgcaggggaagaagcaccagaccaacctggcccggcgagcagccaaggaggccaaggaggcccctgcccagcccgcgcctgagaaggtcaaggtggaggtgaagaagtttgtgaagatcggccgcccgggctacaaagtgaccaagcagagagactcggagatgggccagcagagcctcctcttccagattgactaccctgagatcgccgagggcatcatgccacgtcaccgcttcatgtctgcgtacgagcagaggatcgagcctccggaccggcgctggcagtacctgctcatggccgccgagccctacgagaccattgccttcaaggtgccgagcagagagatcgacaaggcggagggcaagttctggacacactggaaccgggagaccaagcagttcttcctccagttccactttaagatggagaagcccccggctccacccagcctccctgctggcccccctggggtgaagcggcctccacccccgctgatgaacggtctgccccctcggccaccgctgcctgagtctttgccaccgcccccgccaggaggcctgcctctgccacccatgccccccacagggcctgcgccctcagggcccccgggaccaccccagctacccccgccagctccaggggtccaccccccggccccagtggtgcatccccctgcatctggggtccatcccccagctcctggcgtccaccccccagctcctggcgtccatcccccagcccctggggtccacccaccaacctctggggtccaccccccagctcctggagtccaccctccagcccccggggttcacccaccagcccccggagtccacccaccagcccctggggttcacccaccagccccaggggtccatcctcccccatcagcgggggttcacccccaggccccgggggtgcacccagcagcccccgccgttcaccctcaggccccaggggtgcacccaccagccccagggatgcaccctcaggccccgggggtccacccccaacctcccggggtccatccgtcggctcctggggtccaccctcagcctccgggagttcacccctcaaatcctggggtgcaccccccaactcccatgcccccaatgctgaggcccccacttccctccgaaggcccagggaacatacctccccctcccccaaccaactgagaagctgctccctcccccagcaagcccagcgccaggtgctcttgccttttcccactgagagaaggctgctcttttgtactgccccccgctcattaaacagcctcccccagccctgagtgcactgatgtccgcagcgctgccctactgtgtcagtgtgtgtgggagtgccaggcacagcaccatcccccagtttgggccgactggggagggcctggggcccgccaggagacacctgtgggaggcctgagagatggctgtaccttggagatggcctggtggaggacagaccccaccagccagctaggaggggatctggggtcctgttctggggagggaagagcagatcctgccccgagggtccggacgcgccccagctcgcgccccttcccatatttattcggaccccaagcatcgccccaataaagaccagcaagcaaccggc

SEQ ID NO: 290017 - DNA, 2412 bp, Homo sapiens
gaatcaaggcaccccagcgatggctggcacccctttctagagcggccaggcgcaggcggagggagcgataacgtcgcccggagagtgtcagccgctccctcgcgaaagttggccccgtgcggccgcagcggaccgagggttcgttgagagcgttgtgcgcacgcgcagtttgccttccaggccgcgctttcagcctctccccctccagccttttccttcgcgcctcgggaccctctgactcacgccgctgggcgggccaggcatgcgcacaccagagggcccgtctcatttgccccggaagtgctttctttgcccgccgttcgccaaacgaagtcgtggaggtggcgaaacgaggaggagataacgcggccttgggctctggtgtctcccagtctgctaaagccctaaggccatcaccatggacttccagcatcgccccgggggcaagaccgggagcgggggcgtggcctcctcctccgagagcaaccgtgaccgcagggagcgcctccggcagctggccctggagaccatcgacatcaacaaggacccgtacttcatgaagaaccacctgggctcctatgaatgcaaactctgcctgacacttcacaacaatgaggggagctacctggcacatacgcaggggaagaagcaccagaccaacctggcccggcgagcagccaaggaggccaaggaggcccctgcccagcccgcgcctgagaaggtcaaggtggaggtgaagaagtttgtgaagatcggccgcccgggctacaaagtgaccaagcagagagactcggagatgggccagcagagcctcctcttccagattgactaccctgagatcgccgagggcatcatgccacgtcaccgcttcatgtctgcgtacgagcagaggatcgagcctccggaccggcgctggcagtacctgctcatggccgccgagccctacgagaccattgccttcaaggtgccgagcagagagatcgacaaggcggagggcaagttctggacacactggaaccgggagaccaagcagttcttcctccagttccactttaagatggagaagcccccggctccacccagcctccctgctggcccccctggggtgaagcggcctccacccccgctgatgaacggtctgccccctcggccaccgctgcctgagtctttgccaccgcccccgccaggaggcctgcctctgccacccatgccccccacagggcctgcgccctcagggcccccgggaccaccccagctacccccgccagctccaggggtccaccccccggccccagtggtgcatccccctgcatctggggtccatcccccagctcctggcgtccaccccccagctcctggcgtccatcccccagcccctggggtccacccaccaacctctggggtccaccccccagctcctggagtccaccctccagcccccggggttcacccaccagcccccggagtccacccaccagcccctggggttcacccaccagccccaggggtccatcctcccccatcagcgggggttcacccccaggccccgggggtgcacccagcagcccccgccgttcaccctcaggccccaggggtgcacccaccagccccagggatgcaccctcaggccccgggggtccacccccaacctcccggggtccatccgtcggctcctggggtccaccctcagcctccgggagttcacccctcaaatcctggggtgcaccccccaactcccatgcccccaatgctgaggcccccacttccctccgaaggcccagggaacatacctccccctcccccaaccaactgagaagctgctccctcccccagcaagcccagcgccaggtgctcttgccttttcccactgagagaaggctgctcttttgtactgccccccgctcattaaacagcctcccccagccctgagtgcactgatgtccgcagcgctgccctactgtgtcagtgtgtgtgggagtgccaggcacagcaccatcccccagtttgggccgactggggagggcctggggcccgccaggagacacctgtgggaggcctgagagatggctgtaccttggagatggcctggtggaggacagaccccaccagccagctaggaggggatctggggtcctgttctggggagggaagagcagatcctgccccgagggtccggacgcgccccagctcgcgccccttcccatatttattcggaccccaagcatcgccccaataaagaccagcaagcaaccggctggggtgtccgtgcgtgttagggggcccgtgggacctcccttgccgtctctcctcgcgcacggcccgggtccgccctgtagcgctcgctgtctctcccctgcctgaagcgccccaccaccgtctttcaggccccggacttggtgccgggtccaggcg

SEQ ID NO: 290018 - DNA, 2025 bp, Homo sapiens
gaatcaaggcaccccagcgatggctggcacccctttctagagcggccaggcgcaggcggagggagcgataacgtcgcccggagagtgtcagccgctccctcgcgaaagttggccccgtgcggccgcagcggaccgagggttcgttgagagcgttgtgcgcacgcgcagtttgccttccaggccgcgctttcagcctctccccctccagccttttccttcgcgcctcgggaccctctgactcacgccgctgggcgggccaggcatgcgcacaccagagggcccgtctcatttgccccggaagtgctttctttgcccgccgttcgccaaacgaagtcgtggaggtggcgaaacgaggaggagataacgcggccttgggctctggtgtctcccagtctgctaaagccctaaggccatcaccatggacttccagcatcgccccgggggcaagaccgggagcgggggcgtggcctcctcctccgagagcaaccgtgaccgcagggagcgcctccggcagctggccctggagaccatcgacatcaacaaggacccgtacttcatgaagaaccacctgggctcctatgaatgcaaactctgcctgacacttcacaacaatgaggggagctacctggcacatacgcaggggaagaagcaccagaccaacctggcccggcgagcagccaaggaggccaaggaggcccctgcccagcccgcgcctgagaaggtcaaggtggaggtgaagaagtttgtgaagatcggccgcccgggctacaaagtgaccaagcagagagactcggagatgggccagcagagcctcctcttccagattgactaccctgagatcgccgagggcatcatgccacgtcaccgcttcatgtctgcgtacgagcagaggatcgagcctccggaccggcgctggcagtacctgctcatggccgccgagccctacgagaccattgccttcaaggtgccgagcagagagatcgacaaggcggagggcaagttctggacacactggaaccgggagaccaagcagttcttcctccagttccactttaagatggagaagcccccggctccacccagcctccctgctggcccccctggggtgaagcggcctccacccccgctgatgaacggtctgccccctcggccaccgctgcctgagtctttgccaccgcccccgccaggaggcctgcctctgccacccatgccccccacagggcctgcgccctcagggcccccgggaccaccccagctacccccgccagctccaggggtccaccccccggccccagtggtgcatccccctgcatctggggtccatcccccagctcctggcgtccaccccccagctcctggcgtccatcccccagcccctggggtccacccaccaacctctggggtccaccccccagctcctggagtccaccctccagcccccggggttcacccaccagcccccggagtccacccaccagcccctggggttcacccaccagccccaggggtccatcctcccccatcagcgggggttcacccccaggccccgggggtgcacccagcagcccccgccgttcaccctcaggccccaggggtgcacccaccagccccagggatgcaccctcaggccccgggggtccacccccaacctcccggggtccatccgtcggctcctggggtccaccctcagcctccgggagttcacccctcaaatcctggggtgcaccccccaactcccatgcccccaatgctgaggcccccacttccctccgaaggcccagggaacatacctccccctcccccaaccaactgagaagctgctccctcccgccaaaaaaaaaaaagaaaaaagaaagaaacaaaaaaaaaaaaacggggaggaggagaagaaaacaaaaaacaaatggagaaagaggagaggaggagggggggggggagtcgcgaaggaggagtcgccgcggggggggcgcaggcgagggggcgacgaagcgacggagggttgggaaggcgagggggggcaccgaa

SEQ ID NO: 290019 - DNA, 1487 bp, Homo sapiens
  misc_feature (1413)..(1413): n is a, c, g, or t
  misc_feature (1419)..(1420): n is a, c, g, or t
  misc_feature (1487)..(1487): n is a, c, g, or t
gaatcaaggcaccccagcgatggctggcacccctttctagagcggccaggcgcaggcggagggagcgataacgtcgcccggagagtgtcagccgctccctcgcgaaagttggccccgtgcggccgcagcggaccgagggttcgttgagagcgttgtgcgcacgcgcagtttgccttccaggccgcgctttcagcctctccccctccagccttttccttcgcgcctcgggaccctctgactcacgccgctgggcgggccaggcatgcgcacaccagagggcccgtctcatttgccccggaagtgctttctttgcccgccgttcgccaaacgaagtcgtggaggtggcgaaacgaggaggagataacgcggccttgggctctggtgtctcccagtctgctaaagccctaaggccatcaccatggacttccagcatcgccccgggggcaagaccgggagcgggggcgtggcctcctcctccgagagcaaccgtgaccgcagggagcgcctccggcagctggccctggagaccatcgacatcaacaaggacccgtacttcatgaagaaccacctgggctcctatgaatgcaaactctgcctgacacttcacaacaatgaggggagctacctggcacatacgcaggggaagaagcaccagaccaacctggcccggcgagcagccaaggaggccaaggaggcccctgcccagcccgcgcctgagaaggtcaaggtggaggtgaagaagtttgtgaagatcggccgcccgggctacaaagtgaccaagcagagagactcggagatgggccagcagagcctcctcttccagattgactaccctgagatcgccgagggcatcatgccacgtcaccgcttcatgtctgcgtacgagcagaggatcgagcctccggaccggcgctggcagtacctgctcatggccgccgagccctacgagaccattgccttcaaggtgccgagcagagagatcgacaaggcggagggcaagttctggacacactggaaccgggagaccaagcagttcttcctccagttccactttaagatggagaagcccccggctccacccagcctccctgctggcccccctggggtgaagcggcctccacccccgctgatgaacggtctgccccctcggccaccgctgcctgagtctttgccaccgcccccgccaggaggcctgcctctgccacccatgccccccacagggcctgcgccctcagggcccccgggaccaccccagctacccccgccagctccaggggtccaccccccggccccagtggtgcatccccctgcatctggggtccatcccccagctcctggcgtccaccccccagctcctggcgtccatcccccagcccctggggtccacccaccaacctctggggtccaccccantctggnntcacctcaaccccgggttaacacaacccggagtcaccacagcctgcggtcacacaacccaggtcatn

SEQ ID NO: 290020 - DNA, 1180 bp, Homo sapiens
gaatcaaggcaccccagcgatggctggcacccctttctagagcggccaggcgcaggcggagggagcgataacgtcgcccggagagtgtcagccgctccctcgcgaaagttggccccgtgcggccgcagcggaccgagggttcgttgagagcgttgtgcgcacgcgcagtttgccttccaggccgcgctttcagcctctccccctccagccttttccttcgcgcctcgggaccctctgactcacgccgctgggcgggccaggcatgcgcacaccagagggcccgtctcatttgccccggaagtgctttctttgcccgccgttcgccaaacgaagtcgtggaggtggcgaaacgaggaggagataacgcggccttgggctctggtgtctcccagtctgctaaagccctaaggccatcaccatggacttccagcatcgccccgggggcaagaccgggagcgggggcgtggcctcctcctccgagagcaaccgtgaccgcagggagcgcctccggcagctggccctggagaccatcgacatcaacaaggacccgtacttcatgaagaaccacctgggctcctatgaatgcaaactctgcctgacacttcacaacaatgaggggagctacctggcacatacgcaggggaagaagcaccagaccaacctggcccggcgagcagccaaggaggccaaggaggcccctgcccagcccgcgcctgagaaggtcaaggtggaggtgaagaagtttgtgaagatcggccgcccgggctacaaagtgaccaagcagagagactcggagatgggccagcagagcctcctcttccagattgactaccctgagatcgccgagggcatcatgccacgtcaccgcttcatgtctgcgtacgagcagaggatcgagcctccggaccggcgctggcagtacctgctcatggccgccgagccctacgagaccattgccttcaaggtgccgagcagagagatcgacaaggcggagggcaagttctggacacactggaaccgggagaccaagcagttcttcctccagttccactttaagatggagaagcccccggctccacccagcctccctgctggcccccctggggtgaagcggcctccaccccccgctcattaaacagcctcccccagcaaaaaaaaaaagaatgagactatgcatatc

SEQ ID NO: 290021 - DNA, 1969 bp, Homo sapiens
gtgaacactaggggcttgggcagtccgggatggcttcctggaggtggtgactcgtttgtgagatcttggtcttgtcttccctttatgccttctctgggctccctattacaatttcaggtctccaggccttggcaccctgggctggagcggcttcctctccatccctcatgcctggtcacttggagacaggctccagcttccttgtgtctgtgcctgtccacagtgggcctcagcctcctggaagagactgggtgcgctatggggtggccccctcagggctggttagaccctggcgctgggagtgcagggtgaggggcagtctcgagggctccagcccagcccgcccagggaggtcccagcagcagccccgagttctgagccatcttcctcactctcctcttggcctccacaggtgtctcccagtctgctaaagccctaaggccatcaccatggacttccagcatcgccccgggggcaagaccgggagcgggggcgtggcctcctcctccgagagcaaccgtgaccgcagggagcgcctccggcagctggccctggagaccatcgacatcaacaaggacccgtacttcatgaagaaccacctgggctcctatgaatgcaaactctgcctgacacttcacaacaatgaggggagctacctggcacatacgcaggggaagaagcaccagaccaacctggcccggcgagcagccaaggaggccaaggaggcccctgcccagcccgcgcctgagaaggtcaaggtggaggtgaagaagtttgtgaagatcggccgcccgggctacaaagtgaccaagcagagagactcggagatgggccagcagagcctcctcttccagattgactaccctgagatcgccgagggcatcatgccacgtcaccgcttcatgtctgcgtacgagcagaggatcgagcctccggaccggcgctggcagtacctgctcatggccgccgagccctacgagaccattgccttcaaggtgccgagcagagagatcgacaaggcggagggcaagttctggacacactggaaccgggagaccaagcagttcttcctccagttccactttaagatggagaagcccccggctccacccagcctccctgctggcccccctggggtgaagcggcctccacccccgctgatgaacggtctgccccctcggccaccgctgcctgagtctttgccaccgcccccgccaggaggcctgcctctgccacccatgccccccacagggcctgcgccctcagggcccccgggaccaccccagctacccccgccagctccaggggtccaccccccggccccagtggtgcatccccctgcatctggggtccatcccccagctcctggcgtccaccccccagctcctggcgtccatcccccagcccctggggtccacccaccaacctctggggtccaccccccagctcctggagtccaccctccagcccccggggttcacccaccagcccccggagtccacccaccagcccctggggttcacccaccagccccaggggtccatcctcccccatcagcgggggttcacccccaggccccgggggtgcacccagcagcccccgccgttcaccctcaggccccaggggtgcacccaccagccccagggatgcaccctcaggccccgggggtccacccccaacctcccggggtccatccgtcggctcctggggtccaccctcagcctccgggagttcacccctcaaatcctggggtgcaccccccaactcccatgcccccaatgctgaggcccccacttccctccgaaggcccagggaacatacctccccctcccccaaccaactgagaagctgctccctcccccagcaagcccagcgccaggtgctcttgccttttcccactgagagaaggctgctcttttgtactgccccccgctcattaaacagcctcccccagccctgagtgcactga

SEQ ID NO: 290022 - DNA, 2038 bp, Homo sapiens
aaaaaaaaaaaaaaaattagccgggcgtggttggtgacgcgcgcctgtagtcccagctactctggaggctgaagcgggaagatcgcttgagtccaggaggtcgaggctgcagtgagttgtgattgtgccgttgcactccagcctggacaacagagcaagaccctgtttgacaaaataaaaaagaaacaaccaagattcgttggggtcgaatcgggatcgcggctgaaatggtttcggccgccttccttgtagccgagaacgcttctgtatgctcatctatacctgttagttgactggggctctgtgatgtaattcctgtgagcctcagttcccttaaaatgggagtgacggcttcaacatcatgccaaaggcgaccagaacacgttagctggccccattttgcaggtgcaccccgctgtgaccgttgttcttgtgtatccttggacgacaccaaacagccaggcggagctctggaaaataggtgtctcccagtctgctaaagccctaaggccatcaccatggacttccagcatcgccccgggggcaagaccgggagcgggggcgtggcctcctcctccgagagcaaccgtgaccgcagggagcgcctccggcagctggccctggagaccatcgacatcaacaaggacccgtacttcatgaagaaccacctgggctcctatgaatgcaaactctgcctgacacttcacaacaatgaggggagctacctggcacatacgcaggggaagaagcaccagaccaacctggcccggcgagcagccaaggaggccaaggaggcccctgcccagcccgcgcctgagaaggtcaaggtggaggtgaagaagtttgtgaagatcggccgcccgggctacaaagtgaccaagcagagagactcggagatgggccagcagagcctcctcttccagattgactaccctgagatcgccgagggcatcatgccacgtcaccgcttcatgtctgcgtacgagcagaggatcgagcctccggaccggcgctggcagtacctgctcatggccgccgagccctacgagaccattgccttcaaggtgccgagcagagagatcgacaaggcggagggcaagttctggacacactggaaccgggagaccaagcagttcttcctccagttccactttaagatggagaagcccccggctccacccagcctccctgctggcccccctggggtgaagcggcctccacccccgctgatgaacggtctgccccctcggccaccgctgcctgagtctttgccaccgcccccgccaggaggcctgcctctgccacccatgccccccacagggcctgcgccctcagggcccccgggaccaccccagctacccccgccagctccaggggtccaccccccggccccagtggtgcatccccctgcatctggggtccatcccccagctcctggcgtccaccccccagctcctggcgtccatcccccagcccctggggtccacccaccaacctctggggtccaccccccagctcctggagtccaccctccagcccccggggttcacccaccagcccccggagtccacccaccagcccctggggttcacccaccagccccaggggtccatcctcccccatcagcgggggttcacccccaggccccgggggtgcacccagcagcccccgccgttcaccctcaggccccaggggtgcacccaccagccccagggatgcaccctcaggccccgggggtccacccccaacctcccggggtccatccgtcggctcctggggtccaccctcagcctccgggagttcacccctcaaatcctggggtgcaccccccaactcccatgcccccaatgctgaggcccccacttccctccgaaggcccagggaacatacctccccctcccccaaccaactgagaagctgctccctcccccagcaagcccagcgccaggtgctcttgccttttcccactgagagaaggctgctcttttgtactgccccccgctcattaaacagcctcccccagccctgagtgcactga

SEQ ID NO: 290023 - DNA, 1443 bp, Homo sapiens
agaaaggaatatgctagtcgaggctggctgaatcggacgaggcacaacggacccgtacttcatgaagaaccacctgggctcctatgaatgcaaactctgcctgacacttcacaacaatgaggggagctacctggcacatacgcaggggaagaagcaccagaccaacctggcccggcgagcagccaaggaggccaaggaggcccctgcccagcccgcgcctgagaaggtcaaggtggaggtgaagaagtttgtgaagatcggccgcccgggctacaaagtgaccaagcagagagactcggagatgggccagcagagcctcctcttccagattgactaccctgagatcgccgagggcatcatgccacgtcaccgcttcatgtctgcgtacgagcagaggatcgagcctccggaccggcgctggcagtacctgctcatggccgccgagccctacgagaccattgccttcaaggtgccgagcagagagatcgacaaggcggagggcaagttctggacacactggaaccgggagaccaagcagttcttcctccagttccactttaagatggagaagcccccggctccacccagcctccctgctggcccccctggggtgaagcggcctccacccccgctgatgaacggtctgccccctcggccaccgctgcctgagtctttgccaccgcccccgccaggaggcctgcctctgccacccatgccccccacagggcctgcgccctcagggcccccgggaccaccccagctacccccgccagctccaggggtccaccccccggccccagtggtgcatccccctgcatctggggtccatcccccagctcctggcgtccaccccccagctcctggcgtccatcccccagcccctggggtccacccaccaacctctggggtccaccccccagctcctggagtccaccctccagcccccggggttcacccaccagcccccggagtccacccaccagcccctggggttcacccaccagccccaggggtccatcctcccccatcagcgggggttcacccccaggccccgggggtgcacccagcagcccccgccgttcaccctcaggccccaggggtgcacccaccagccccagggatgcaccctcaggccccgggggtccacccccaacctcccggggtccatccgtcggctcctggggtccaccctcagcctccgggagttcacccctcaaatcctggggtgcaccccccaactcccatgcccccaatgctgaggcccccacttccctccgaaggcccagggaacatacctccccctcccccaaccaactgagaagctgctccctcccccagcaagcccagcgccaggtgctcttgccttttcccactgagagaaggctgctcttttgtactgccccccgctcattaaacagcctcccccagccctgagtgcactga

SEQ ID NO: 290024 - DNA, 1853 bp, Homo sapiens
gaatcaaggcaccccagcgatggctggcacccctttctagagcggccaggcgcaggcggagggagcgataacgtcgcccggagagtgtcagccgctccctcgcgaaagttggccccgtgcggccgcagcggaccgagggttcgttgagagcgttgtgcgcacgcgcagtttgccttccaggccgcgctttcagcctctccccctccagccttttccttcgcgcctcgggaccctctgactcacgccgctgggcgggccaggcatgcgcacaccagagggcccgtctcatttgccccggaagtgctttctttgcccgccgttcgccaaacgaagtcgtggaggtggcgaaacgaggaggagataacgcggccttgggctctggtgtctcccagtctgctaaagccctaaggccatcaccatggacttccagcatcgccccgggggcaagaccgggagcgggggcgtggcctcctcctccgagagcaaccgtgaccgcagggagcgcctccggcagctggccctggagaccatcgacatcaacaagacccgtacttcatgaagaagcaccagaccaacctggcccggcgagcagccaaggaggccaaggaggcccctgcccagcccgcgcctgagaaggtcaaggtggaggtgaagaagtttgtgaagatcggccgcccgggctacaaagtgaccaagcagagagactcggagatgggccagcagagcctcctcttccagattgactaccctgagatcgccgagggcatcatgccacgtcaccgcttcatgtctgcgtacgagcagaggatcgagcctccggaccggcgctggcagtacctgctcatggccgccgagccctacgagaccattgccttcaaggtgccgagcagagagatcgacaaggcggagggcaagttctggacacactggaaccgggagaccaagcagttcttcctccagttccactttaagatggagaagcccccggctccacccagcctccctgctggcccccctggggtgaagcggcctccacccccgctgatgaacggtctgccccctcggccaccgctgcctgagtctttgccaccgcccccgccaggaggcctgcctctgccacccatgccccccacagggcctgcgccctcagggcccccgggaccaccccagctacccccgccagctccaggggtccaccccccggccccagtggtgcatccccctgcatctggggtccatcccccagctcctggcgtccaccccccagctcctggcgtccatcccccagcccctggggtccacccaccaacctctggggtccaccccccagctcctggagtccaccctccagcccccggggttcacccaccagcccccggagtccacccaccagcccctggggttcacccaccagccccaggggtccatcctcccccatcagcgggggttcacccccaggccccgggggtgcacccagcagcccccgccgttcaccctcaggccccaggggtgcacccaccagccccagggatgcaccctcaggccccgggggtccacccccaacctcccggggtccatccgtcggctcctggggtccaccctcagcctccgggagttcacccctcaaatcctggggtgcaccccccaactcccatgcccccaatgctgaggcccccacttccctccgaaggcccagggaacatacctccccctcccccaaccaactgagaagctgctccctcccccagcaagcccagcgccaggtgctcttgccttttcccactgagagaaggctgctcttttgtactgccccccgctcattaaacagcctcccccagccctgagtgcactga

SEQ ID NO: 290025 - DNA, 1397 bp, Homo sapiens
tacccagcaagtgttctttacagaaggcggggacagcctgtgtgcctggcctccagacagaagcctgcagggcagaggtcccggggcaggtgcaccgggtgggcgagggtggctagagcggcaggctcccccggggtcccgctctcgttcagtgggtggcattagcctgccccaggttcctcagcttcggagaggacaagcagccgggacctgagagctttctgtgttgcagtgaccaagcagagagactcggagatgggccagcagagcctcctcttccagattgactaccctgagatcgccgagggcatcatgccacgtcaccgcttcatgtctgcgtacgagcagaggatcgagcctccggaccggcgctggcagtacctgctcatggccgccgagccctacgagaccattgccttcaaggtgccgagcagagagatcgacaaggcggagggcaagttctggacacactggaaccgggagaccaagcagttcttcctccagttccactttaagatggagaagcccccggctccacccagcctccctgctggcccccctggggtgaagcggcctccacccccgctgatgaacggtctgccccctcggccaccgctgcctgagtctttgccaccgcccccgccaggaggcctgcctctgccacccatgccccccacagggcctgcgccctcagggcccccgggaccaccccagctacccccgccagctccaggggtccaccccccggccccagtggtgcatccccctgcatctggggtccatcccccagctcctggcgtccaccccccagctcctggcgtccatcccccagcccctggggtccacccaccaacctctggggtccaccccccagctcctggagtccaccctccagcccccggggttcacccaccagcccccggagtccacccaccagcccctggggttcacccaccagccccaggggtccatcctcccccatcagcgggggttcacccccaggccccgggggtgcacccagcagcccccgccgttcaccctcaggccccaggggtgcacccaccagccccagggatgcaccctcaggccccgggggtccacccccaacctcccggggtccatccgtcggctcctggggtccaccctcagcctccgggagttcacccctcaaatcctggggtgcaccccccaactcccatgcccccaatgctgaggcccccacttccctccgaaggcccagggaacatacctccccctcccccaaccaactgagaagctgctccctcccccagcaagcccagcgccaggtgctcttgccttttcccactgagagaaggctgctcttttgtactgccccccgctcattaaacagcctcccccagccctgagtgcactga

SEQ ID NO: 290026 - DNA, 821 bp, Homo sapiens
caatgctgctggtacgctccggaagtatgggataacacgaagtcgtggaggtggcgaaacgaggaggagataacgcggccttgggctctggtgtctcccagtctgctaaagccctaaggccatcaccatggacttccactacccccgccagctccaggggtccaccccccggccccagtggtgcatccccctgcatctggggtccatcccccagctcctggcgtccaccccccagctcctggcgtccatcccccagcccctggggtccacccaccaacctctggggtccaccccccagctcctggagtccaccctccagcccccggggttcacccaccagcccccggagtccacccaccagcccctggggttcacccaccagccccaggggtccatcctcccccatcagcgggggttcacccccaggccccgggggtgcacccagcagcccccgccgttcaccctcaggccccaggggtgcacccaccagccccagggatgcaccctcaggccccgggggtccacccccaacctcccggggtccatccgtcggctcctggggtccaccctcagcctccgggagttcacccctcaaatcctggggtgcaccccccaactcccatgcccccaatgctgaggcccccacttccctccgaaggcccagggaacatacctccccctcccccaaccaactgagaagctgctccctcccccagcaagcccagcgccaggtgctcttgccttttcccactgagagaaggctgctcttttgtactgccccccgctcattaaacagcctcccccagccctgagtgcactga

SEQ ID NO: 290027 - DNA, 2075 bp, Homo sapiens
cagatagcccaccaggggtggggagggtgagcagggacagggcgcccccactgacttgggaccctcctcctccaggcccacacctcagcacccaggacatctgggccccccgcccccagcgctgtctagtttggttgcctggccgtcactcccagcctggttcccactcctgtgtcttctggggatggccctcaaggacggcatgttgacacatcaggcccagctctatcactggggagggagataggctgccagggacagaaagggctctttgagaaggccactctgcctggagtgggggcgccgggcactgtcccccaaggtcgcggcagaggagataggggtctgtcctgcacaaacaccccaccttccactcggctcacttaaggcaggcagcccagcccctggcagcacccacgatgcgggacctgcctctcaccagcctggccctagtgctgtctgccctgggggctctgctggggactgaggccctcagagcagaggagccagctgtgggcaccagtggcctcatcttccgagaagacttggactggcctccaggcagcccacaagagcctctgtgcctggtggcactgggcggggacagcaatggcagcagctcccccctgcgggtggtgggggctctaagcgcctatgagcaggccttcctgggggccgtgcagagggcccgctggggcccccgagacctggccaccttcggggtctgcaacaccggtgacaggcaggctgccttgccctctctacggcggctgggggcctggctgcgggaccctggggggcagcgcctggtggtcctacacctggaggaagagcctctgcccctcccgagacacccgctacctggtgttagcggtggaccgccctgcgggggcctggcgcggctccgggctggccttgaccctgcagccccgcggagaggactcccggctgagtaccgcccggctgcaggcactgctgttcggcgacgaccaccgctgcttcacacggatgaccccggccctgctcctgctgccgcggtccgagcccgcgccgctgcctgcgcacggccagctggacaccgtgcccttcccgccgcccaggccatccgcggaactcgaggagtcgccacccagcgcagaccccttcctggagacgctcacgcgcctggtgcgggcgctgcgggtccccccggcccgggcctccgcgccgcgcctggccctggatccggacgcgctggccggcttcccgcagggcctagtcaacctgtcggaccccgcggcgctggagcgcctactcgacggcgaggagccgctgctgctgctgctgaggcccactgcggccaccaccggggatcctgcgcccctgcacgaccccacgtcggcgccgtgggccacggccctggcgcgccgcgtggctgctgaactgcaagcggcggctgccgagctgcgaagcctcccgggtctgcctccggccacagccccgctgctggcgcgcctgctcgcgctctgcccaggaggccccggcggcctcggcgatcccctgcgagcgctgctgctcctgaaggcgctgcagggcctgcgcgtggagtggcgcgggcgggatccgcgcgggccgggtcgggcacagcgcagcgcgggggccaccgccgccgacgggccgtgcgcgctgcgcgagctcagcgtagacctccgcgccgagcgctccgtactcatccccgagacctaccaggccaacaattgccagggcgtgtgcggctggcctcagtccgaccgcaacccgcgctacggcaaccacgtggtgctgctgctgaagatgcaggcccgtggggccgccctggcgcgcccaccctgctgcgtgcccaccgcctacgcgggcaagctgctcatcagcctgtcggaggagcgcatcagcgcgcaccacgtgcccaacatggtggccaccgagtgtggctgccggtgacccctgcgccgcgcggactcctgccccgagggtccggacgcgccccagctcgcgccccttcccatatttattcggaccccaagcatcgccccaataaagaccagcaagcaaccggc

SEQ ID NO: 290028 - DNA, 1005 bp, Homo sapiens
aacataggctaggtacgaggccgggtgtgcacgaagtcgtggaggtggcgaaacgaggaggagataacgcggccttgggctctggtgtctcccagtctgctaaagccctaaggccatcaccatggacttccagcatcgccccgggggcaagaccgggagcgggggcgtggcctcctcctccgagagcaaccgtgaccgcagggagcgcctccggcagctggccctggagaccatcgacatcaacaaggacccgtacttcatgaagaaccacctgggctcctatgaatgcaaactctgcctgacacttcacaacaatgaggggagctacctggcacatacgcaggggaagaagcaccagaccaacctggcccggcgagcagccaaggaggccaaggaggcccctgcccagcccgcgcctgagaaggtcaaggtggaggtgaagaagtttgtgaagatcggccgcccgggctacaaagcccccaactcccatgcccccaatgctgaggcccccacttccctccgaaggcccagggaacatacctccccctcccccaaccaactgagaagctgctccctcccccagcaagcccagcgccaggtgctcttgccttttcccactgagagaaggctgctcttttgtactgccccccgctcattaaacagcctcccccagccctgagtgcactgatgtccgcagcgctgccctactgtgtcagtgtgtgtgggagtgccaggcacagcaccatcccccagtttgggccgactggggagggcctggggcccgccaggagacacctgtgggaggcctgagagatggctgtaccttggagatggcctggtggaggacagaccccaccagccagctaggaggggatctggggtcctgttctggggagggaagagcagatcctgccccgagggtccggacgcgccccagctcgcgccccttcccatatttattcggaccccaagcatcgccccaataaagaccagcaagcaaccggc

SEQ ID NO: 290029 - DNA, 385 bp, Homo sapiens
tacgcaggggaagaagcaccagaccaacctgtgagtacctcatgtccctttgatgcctggtgctccagcagccgttggctcaagtctctgtgagcctcgcgggccactgctccacagccggggagccagcctggcctgagcctccctgggcgcttgagtacggttcctggggagcattagagaacagaggcatggatggctgaggcgggcagatcacttgaggtcaggagttcgagaccagcctggccaacattgtgaaactccatctctactaaaaatacaaaaattaggccaggcatggtggcacacgtctgtaatcacagctactatggaggctgaggcaggagaatcttgaatctgggaggcagagattgcagtgaaccaa

SEQ ID NO: 290030 - DNA, 812 bp, Homo sapiens
gggcctggctgcgggaccctggggggcagcgcctggtggtcctacacctggaggaaggtatgtggggcccagccccaagcttggcaccgccgtcttccttcaggtgggccgggtcctcctagggaagatcaggggctggcagagcccccaccctgggcagggaggctgtggtcttgttcctaggactgggttgcgggtccgtggcctggaaggtgggcaccacactctgtcctgtccccgaagcccagctcttagacttgcccctgcctcggtgccagggagagagctgctgccttctccccacccctgaagacgacgcagggctcggggccagtggaacccttcttcccacagccccagcctgttctcagggccgctggcctaagatactccctgcggggaaggggcttcatcgggcaccccaacccagagaccccagggcggcagccccacccacagcctcagacgcagcccctgcctgcccctgccgtcaccgctccctggctgcaggaaggcagctaagaggggcacccttgtcccccgcttgaggtcccctgcacagtggccagagcggcagggacagatcccaaagattcccggggggtgtggccttcaatggctcaggcgtcccctgctgtcccggctgcagtgacctgggagccaacaccctcgctgaggttccaggagcccccgcctggaggagctggccccccagagctggcgctgctggtgctgtaccctgggcctggccctgaggtcactgtgacgagggctgggctgccgggtgcccaggtaccagggagttgcatggg

SEQ ID NO: 290031 - DNA, 335 bp, Homo sapiens
tggcgaattcggcacgagggagaagccccgggggtccacccccaacctcccggggtccatccgtcggctcctggggtccaccctcagcctccgggagttcacccctcaaatcctggggtgcaccccccaactcccatgcccccaatgctgaggcccccacttccctccgaaggcccagggaacatacctccccctcccccaaccaactgagaagctgctccctcccccagcaagcccagcgccaggtgctcttgccttttcccactgagagaaggctgctcttttgtactgccccccgctcattaaacagcctcccccagccctgagtgcactga

SEQ ID NO: 290032 - DNA, 942 bp, Homo sapiens
  misc_feature (942)..(942): n is a, c, g, or t
ataggctaggtacgaggctgtgtgttgggcgaaacgaggaggagataacgcggcttgggctctggtgtctcccagtctgctaaagccctaaggccatcaccatggacttccagcatcgccccgggggcaagaccgggagcgggggcgtggcctcctcctccgagagcaaccgtgaccgcagggagcgcctccggcagctggccctggagaccatcgacatcaacaaggacccgtacttcatgaagaaccacctgggctcctatgaatgcaaactctgcctgacacttcacaacaatgaggggagctacctggcacatacgcaggggaagaagcaccagaccaacctggcccggcgagcagccaaggaggccaaggaggcccctgcccagcccgcgcctgagaaggtcaaggtggaggtgaagaagtttgtgaagatcggccgcccgggctacaaagtgaccaagcagagagactcggagatgggccagcagagcctcctcttccagattgactaccctgagatcgccgagggcatcatgccacgtcaccgcttcatgtctgcgtacgagcagaggatcgagcctccggaccggcgctggcagtacctgctcatggccgccgagccctacgagaccattgccttcaaggtgccgagcagagagatcgacaaggcggagggcaagttctggacacactggaaccgggagaccaagcagttcttcctccagttccactttaagatggagaagcccccggctccacccagcctccctgctggcccccctggggtgaagcggcctccacccccgctgatgaacggtctgccccctcggccaccgctgcctgagtctttgccaccgccccaggtgcgctgtcattccaaaggtcgcgccagcgcccgggaccacatagacgacagcaaccacggggagtacatctagn

SEQ ID NO: 290033 - DNA, 788 bp, Homo sapiens
gaaaaggatggtcatggatccagagatctcacgaagtcgtggaggtggcgaaacgaggaggagataacgcggccttgggctctggtgtctcccagtctgctaaagccctaaggccatcaccatggacttccagcatcgccccgggggcaagaccgggagcgggggcgtggcctcctcctccgagagcaaccgtgaccgcagggagcgcctccggcagctggccctggagaccatcgacatcaacaaggacccgtacttcatgaagaaccacctgggctcctatgaatgcaaactctgcctgacacttcacaacaatgaggggagctacctggcacatacgcaggggaagaagcaccagaccaacctggcccggcgagcagccaaggaggccaaggaggcccctgcccagcccgcgcctgagaaggtcaaggtggaggtgaagaagtttgtgaagatcggccgcccgggctacaaagtgaccaagcagagagactcggagatgggccagcagagcctcctcttccagattgactaccctgagatcgccgagggcatcatgccacgtcaccgcttcatgtctgcgtacgagcagaggatcgagcctccggaccggcgctggcagtacctgctcatggccgccgagccctacgagaccattgccttcaaggtgcgagcagagagatcgacaagggcggagcgcgcgtcctgacacactggaccgggaaccagcgtcttcctccgtcctaaggaaagcccgcccaccggccccggagggcgcaagagctgcg

SEQ ID NO: 290034 - DNA, 1647 bp, Homo sapiens
caatgctgctggtacgctccggaagtatgggataacacgaagtcgtggaggtggcgaaacgaggaggagataacgcggccttgggctctggtgtctcccagtctgctaaagccctaaggccatcaccatggacttccagcatcgccccgggggcaagaccgggagcgggggcgtggcctcctcctccgagagcaaccgtgaccgcagggagcgcctccggcagctggccctggagaccatcgacatcaacaaggacccgtacttcatgaagaaccacctgggctcctatgaatgcaaactctgcctgacacttcacaacaatgaggggagctacctggcacatacgcaggggaagaagcaccagaccaacctggcccggcgagcagccaaggaggccaaggaggcccctgcccagcccgcgcctgagaaggtcaaggtggaggtgaagaagtttgtgaagatcggccgcccgggctacaaagtgaccaagcagagagactcggagatgggccagcagagcctcctcttccagattgactaccctgagatcgccgagggcatcatgccacgtcaccgcttcatgtctgcgtacgagcagaggatcgagcctccggaccggcgctggcagtacctgctcatggccgccgagccctacgagaccattgccttcaaggtgccgagcagagagatcgacaaggcggagggcaagttctggacacactggaaccgggagaccaagcagttcttcctccagttccactttaagatggagaagcccccggctccacccagcctccctgctggcccccctggggtgaagcggcctccacccccgctgatgaacggtctgccccctcggccaccgctgcctgagtctttgccaccgcccccgccaggaggcctgcctctgccacccatgccccccacagggcctgcgccctcagggcccccgggaccaccccagctacccccgccagctccaggggtccaccccccggccccagtggtgcatccccctgcatctggggtccatcccccagctcctggcgtccaccccccagctcctggcgtccatcccccagcccctggggtccacccaccaacctctggggtccaccccccagctcctggagtccaccctccagcccccggggttcacccaccagcccccggagtccacccaccagcccctggggttcacccaccagccccaggggtccatcctcccccatcagcgggggttcacccccaggccccgggggtgcacccagcagcccccgccgttcaccctcaggccccaggggtgcacccaccagccccagggatgcaccctcaggccccgggggtccacccccaacctcccggggtccatccgtcggctcctggggtccaccctcagcctccgggagttcacccctcaaatcctggggtgcaccccccaactcccatgcccccaatgctgaggcccccacttccctccgaaggcccagggaacatacctccccctcccccaaccaactgagaagctgctccctcccccagcaagcccagcgccaggtgctcttgccttttcccactgagagaaggctgctcttttgtactgccccccgctcattaaacagcctcccccagccctgagtgcactga

SEQ ID NO: 290035 - DNA, 1877 bp, Homo sapiens
gaatcaaggcaccccagcgatggctggcacccctttctagagcggccaggcgcaggcggagggagcgataacgtcgcccggagagtgtcagccgctccctcgcgaaagttggccccgtgcggccgcagcggaccgagggttcgttgagagcgttgtgcgcacgcgcagtttgccttccaggccgcgctttcagcctctccccctccagccttttccttcgcgcctcgggaccctctgactcacgccgctgggcgggccaggcatgcgcacaccagagggcccgtctcatttgccccggaagtgctttctttgcccgccgttcgccaaacgaagtcgtggaggtggcgaaacgaggaggagataacgcggccttgggctctggtgtctcccagtctgctaaagccctaaggccatcaccatggacttccagcatcgccccgggggcaagaccgggagcgggggcgtggcctcctcctccgagagcaaccgtgaccgcagggagcgcctccggcagctggccctggagaccatcgacatcaacaaggacccgtacttcatgaagaaccacctgggctcctatgaatgcaaactctgcctgacacttcacaacaatgaggggagctacctggcacatacgcaggggaagaagcaccagaccaacctggcccggcgagcagccaaggaggccaaggaggcccctgcccagcccgcgcctgagaaggtcaaggtggaggtgaagaagtttgtgaagatcggccgcccgggctacaaagtgaccaagcagagagactcggagatgggccagcagagcctcctcttccagattgactaccctgagatcgccgagggcatcatgccacgtcaccgcttcatgtctgcgtacgagcagaggatcgagcctccggaccggcgctggcagtacctgctcatggccgccgagccctacgagaccattgccttcaaggtgccgagcagagagatcgacaaggcggagggcaagttctggacacactggaaccgggagaccaagcagttcttcctccagttccactttaagatggagaagcccccggctccacccagcctccctgctggcccccctggggtgaagcggcctccacccccgctgatgaacggtctgccccctcggccaccgctgcctgagtctttgccaccgcccccgccaggaggcctgcctctgccacccatgccccccacagggcctgcgccctcagggcccccgggaccaccccagctacccccgccagctccaggggtccaccccccggccccagtggtgcatccccctgcatctggggtccatcccccagctcctggcgtccaccccccagctcctggcgtccatcccccagcccctggggtccacccaccaacctctggggtccaccccccagctcctggagtccaccctccagcccccggggttcacccaccagcccccggagtccacccaccagcccctggggttcacccaccagccccaggggtccatcctcccccatcagcgggggttcacccccaggccccgggggtgcacccagcagcccccgccgttcaccctcaggccccaggggtgcacccaccagccccagggatgcaccctcaggccccgggggtccacccccaacctcccggggtccatccgtcggctcctggggtccaccctcagcctccgggagttcacccctcaaatcctggggtgcaccccccaactcccatgcccccaatgctgaggcccccacttccctccgaaggcccagggaacatacctccccctcccccaaccaactgagaagctgctcttttgtactgccccccgctcattaaacagcctcccccagccctgagtgcactga

SEQ ID NO: 290036 - DNA, 1937 bp, Homo sapiens
gaatcaaggcaccccagcgatggctggcacccctttctagagcggccaggcgcaggcggagggagcgataacgtcgcccggagagtgtcagccgctccctcgcgaaagttggccccgtgcggccgcagcggaccgagggttcgttgagagcgttgtgcgcacgcgcagtttgccttccaggccgcgctttcagcctctccccctccagccttttccttcgcgcctcgggaccctctgactcacgccgctgggcgggccaggcatgcgcacaccagagggcccgtctcatttgccccggaagtgctttctttgcccgccgttcgccaaacgaagtcgtggaggtggcgaaacgaggaggagataacgcggccttgggctctggtgtctcccagtctgctaaagccctaaggccatcaccatggacttccagcatcgccccgggggcaagaccgggagcgggggcgtggcctcctcctccgagagcaaccgtgaccgcagggagcgcctccggcagctggccctggagaccatcgacatcaacaaggacccgtacttcatgaagaaccacctgggctcctatgaatgcaaactctgcctgacacttcacaacaatgaggggagctacctggcacatacgcaggggaagaagcaccagaccaacctggcccggcgagcagccaaggaggccaaggaggcccctgcccagcccgcgcctgagaaggtcaaggtggaggtgaagaagtttgtgaagatcggccgcccgggctacaaagtgaccaagcagagagactcggagatgggccagcagagcctcctcttccagattgactaccctgagatcgccgagggcatcatgccacgtcaccgcttcatgtctgcgtacgagcagaggatcgagcctccggaccggcgctggcagtacctgctcatggccgccgagccctacgagaccattgccttcaaggtgccgagcagagagatcgacaaggcggagggcaagttctggacacactggaaccgggagaccaagcagttcttcctccagttccactttaagatggagaagcccccggctccacccagcctccctgctggcccccctggggtgaagcggcctccacccccgctgatgaacggtctgccccctcggccaccgctgcctgagtctttgccaccgcccccgccaggaggcctgcctctgccacccatgccccccacagggcctgcgccctcagggcccccgggaccaccccagctacccccgccagctccaggggtccaccccccagccccagggatgcaccctcaggccccgggggtccacccccaacctcccggggtccatccgtcggctcctggggtccaccctcagcctccgggagttcacccctcaaatcctggggtgcaccccccaactcccatgcccccaatgctgaggcccccacttccctccgaaggcccagggaacatacctccccctcccccaaccaactgagaagctgctccctcccccagcaagcccagcgccaggtgctcttgccttttcccactgagagaaggctgctcttttgtactgccccccgctcattaaacagcctcccccagccctgagtgcactgatgtccgcagcgctgccctactgtgtcagtgtgtgtgggagtgccaggcacagcaccatcccccagtttgggccgactggggagggcctggggcccgccaggagacacctgtgggaggcctgagagatggctgtaccttggagatggcctggtggaggacagaccccaccagccagctaggaggggatctggggtcctgttctggggagggaagagcagatcctgccccgagggtccggacgcgccccagctcgcgccccttcccatatttattcggaccccaagcatcgccccaataaagaccagcaagcaaccggc

SEQ ID NO: 290037 - DNA, 1390 bp, Homo sapiens
  misc_feature (1166)..(1166): n is a, c, g, or t
  misc_feature (1172)..(1172): n is a, c, g, or t
  misc_feature (1184)..(1184): n is a, c, g, or t
  misc_feature (1186)..(1186): n is a, c, g, or t
  misc_feature (1193)..(1193): n is a, c, g, or t
  misc_feature (1202)..(1203): n is a, c, g, or t
  misc_feature (1209)..(1209): n is a, c, g, or t
  misc_feature (1211)..(1211): n is a, c, g, or t
  misc_feature (1213)..(1213): n is a, c, g, or t
  misc_feature (1226)..(1226): n is a, c, g, or t
  misc_feature (1236)..(1236): n is a, c, g, or t
  misc_feature (1239)..(1239): n is a, c, g, or t
  misc_feature (1242)..(1242): n is a, c, g, or t
  misc_feature (1252)..(1252): n is a, c, g, or t
  misc_feature (1265)..(1265): n is a, c, g, or t
  misc_feature (1269)..(1269): n is a, c, g, or t
  misc_feature (1275)..(1275): n is a, c, g, or t
  misc_feature (1282)..(1283): n is a, c, g, or t
  misc_feature (1297)..(1297): n is a, c, g, or t
  misc_feature (1301)..(1303): n is a, c, g, or t
  misc_feature (1307)..(1307): n is a, c, g, or t
  misc_feature (1312)..(1312): n is a, c, g, or t
  misc_feature (1327)..(1327): n is a, c, g, or t
  misc_feature (1384)..(1384): n is a, c, g, or t
gaatcaaggcaccccagcgatggctggcacccctttctagagcggccaggcgcaggcggagggagcgataacgtcgcccggagagtgtcagccgctccctcgcgaaagttggccccgtgcggccgcagcggaccgagggttcgttgagagcgttgtgcgcacgcgcagtttgccttccaggccgcgctttcagcctctccccctccagccttttccttcgcgcctcgggaccctctgactcacgccgctgggcgggccaggcatgcgcacaccagagggcccgtctcatttgccccggaagtgctttctttgcccgccgttcgccaaacgaagtcgtggaggtggcgaaacgaggaggagataacgcggccttgggctctggtgtctcccagtctgctaaagccctaaggccatcaccatggacttccagcatcgccccgggggcaagaccgggagcgggggcgtggcctcctcctccgagagcaaccgtgaccgcagggagcgcctccggcagctggccctggagaccatcgacatcaacaaggacccgtacttcatgaagaaccacctgggctcctatgaatgcaaactctgcctgacacttcacaacaatgaggggagctacctggcacatacgcaggggaagaagcaccagaccaacctggcccggcgagcagccaaggaggccaaggaggcccctgcccagcccgcgcctgagaaggtcaaggtggaggtgaagaagtttgtgaagatcggccgcccgggctacaaagtgaccaagcagagagactcggagatgggccagcagagcctcctcttccagattgactaccctgagatcgccgagggcatcatgccacgtcaccgcttcatgtctgcgtacgagcagaggatcgagcctccggaccggcgctggcagtacctgctcatggccgccgagccctacgagaccattgccttcaaggtgccgagcagagagatcgacaaggcggagggcaagttctggacacactggaaccgggagaccaagcagttcttcctccagttccactttaagatggagaagcccccggctccacccagcctccctgctggcccccctggggtgaagcggcctccacccccgctgatgaacggtctgccccctcggccactcttccttaatnttttcnatttccctccanantcttctnttcaccatnnccccanangncttcccctcaggnccccggacanccnacnacccccaacncaaggtcaccccngccnatatcnacccttnnttgggtcatcccantctnnntcancccantctgcgtcatcccancctgtgtcacaccactctggtcacccagtctgaatcactcaccccgggttacacacncggatc

SEQ ID NO: 290038 - DNA, 1621 bp, Homo sapiens
ataggctaggtacgaggctgtgtgttgggcgaaacgaggaggagataacgcggcttgggctctggtgtctcccagtctgctaaagccctaaggccatcaccatggacttccagcatcgccccgggggcaagaccgggagcgggggcgtggcctcctcctccgagagcaaccgtgaccgcagggagcgcctccggcagctggccctggagaccatcgacatcaacaaggacccgtacttcatgaagaaccacctgggctcctatgaatgcaaactctgcctgacacttcacaacaatgaggggagctacctggcacatacgcaggggaagaagcaccagaccaacctggcccggcgagcagccaaggaggccaaggaggcccctgcccagcccgcgcctgagaaggtcaaggtggaggtgaagaagtttgtgaagatcggccgcccgggctacaaagtgaccaagcagagagactcggagatgggccagcagagcctcctcttccagattgactaccctgagatcgccgagggcatcatgccacgtcaccgcttcatgtctgcgtacgagcagaggatcgagcctccggaccggcgctggcagtacctgctcatggccgccgagccctacgagaccattgccttcaaggtgccgagcagagagatcgacaaggcggagggcaagttctggacacactggaaccgggagaccaagcagttcttcctccagttccactttaagatggagaagcccccggctccacccagcctccctgctggcccccctggggtgaagcggcctccacccccgctgatgaacggtctgccccctcggccaccgctgcctgagtctttgccaccgcccccgccaggaggcctgcctctgccacccatgccccccacagggcctgcgccctcagggcccccgggaccaccccagctacccccgccagctccaggggtccaccccccggccccagtggtgcatccccctgcatctggggtccatcccccagctcctggcgtccaccccccagctcctggcgtccatcccccagcccctggggtccacccaccaacctctggggtccaccccccagctcctggagtccaccctccagcccccggggttcacccaccagcccccggagtccacccaccagcccctggggttcacccaccagccccaggggtccatcctcccccatcagcgggggttcacccccaggccccgggggtgcacccagcagcccccgccgttcaccctcaggccccaggggtgcacccaccagccccagggatgcaccctcaggccccgggggtccacccccaacctcccggggtccatccgtcggctcctggggtccaccctcagcctccgggagttcacccctcaaatcctggggtgcaccccccaactcccatgcccccaatgctgaggcccccacttccctccgaaggcccagggaacatacctccccctcccccaaccaactgagaagctgctccctcccccagcaagcccagcgccaggtgctcttgccttttcccactgagagaaggctgctcttttgtactgccccccgctcattaaacagcctcccccagccctgagtgcactga

SEQ ID NO: 290039 - DNA, 1696 bp, Homo sapiens
caatgctgctggtacgctccggaagtatgggataacacgaagtcgtggaggtggcgaaacgaggaggagataacgcggccttgggctctgagatggggttttaccaggttggccaggctgtcccctgatctttaccttagtgtctcccagtctgctaaagccctaaggccatcaccatggacttccagcatcgccccgggggcaagaccgggagcgggggcgtggcctcctcctccgagagcaaccgtgaccgcagggagcgcctccggcagctggccctggagaccatcgacatcaacaaggacccgtacttcatgaagaaccacctgggctcctatgaatgcaaactctgcctgacacttcacaacaatgaggggagctacctggcacatacgcaggggaagaagcaccagaccaacctggcccggcgagcagccaaggaggccaaggaggcccctgcccagcccgcgcctgagaaggtcaaggtggaggtgaagaagtttgtgaagatcggccgcccgggctacaaagtgaccaagcagagagactcggagatgggccagcagagcctcctcttccagattgactaccctgagatcgccgagggcatcatgccacgtcaccgcttcatgtctgcgtacgagcagaggatcgagcctccggaccggcgctggcagtacctgctcatggccgccgagccctacgagaccattgccttcaaggtgccgagcagagagatcgacaaggcggagggcaagttctggacacactggaaccgggagaccaagcagttcttcctccagttccactttaagatggagaagcccccggctccacccagcctccctgctggcccccctggggtgaagcggcctccacccccgctgatgaacggtctgccccctcggccaccgctgcctgagtctttgccaccgcccccgccaggaggcctgcctctgccacccatgccccccacagggcctgcgccctcagggcccccgggaccaccccagctacccccgccagctccaggggtccaccccccggccccagtggtgcatccccctgcatctggggtccatcccccagctcctggcgtccaccccccagctcctggcgtccatcccccagcccctggggtccacccaccaacctctggggtccaccccccagctcctggagtccaccctccagcccccggggttcacccaccagcccccggagtccacccaccagcccctggggttcacccaccagccccaggggtccatcctcccccatcagcgggggttcacccccaggccccgggggtgcacccagcagcccccgccgttcaccctcaggccccaggggtgcacccaccagccccagggatgcaccctcaggccccgggggtccacccccaacctcccggggtccatccgtcggctcctggggtccaccctcagcctccgggagttcacccctcaaatcctggggtgcaccccccaactcccatgcccccaatgctgaggcccccacttccctccgaaggcccagggaacatacctccccctcccccaaccaactgagaagctgctccctcccccagcaagcccagcgccaggtgctcttgccttttcccactgagagaaggctgctcttttgtactgccccccgctcattaaacagcctcccccagccctgagtgcactga

SEQ ID NO: 290040 - DNA, 2017 bp, Homo sapiens
gaatcaaggcaccccagcgatggctggcacccctttctagagcggccaggcgcaggcggagggagcgataacgtcgcccggagagtgtcagccgctccctcgcgaaagttggccccgtgcggccgcagcggaccgagggttcgttgagagcgttgtgcgcacgcgcagtttgccttccaggccgcgctttcagcctctccccctccagccttttccttcgcgcctcgggaccctctgactcacgccgctgggcgggccaggcatgcgcacaccagagggcccgtctcatttgccccggaagtgctttctttgcccgccgttcgccaaacgaagtcgtggaggtggcgaaacgaggaggagataacgcggccttgggctctggtgtctcccagtctgctaaagccctaaggccatcaccatggacttccagcatcgccccgggggcaagaccgggagcgggggcgtggcctcctcctccgagagcaaccgtgaccgcagggagcgcctccggcagctggccctggagaccatcgacatcaacaaggacccgtacttcatgaagaaccacctgggctcctatgaatgcaaactctgcctgacacttcacaacaatgaggggagctacctggcacatacgcaggggaagaagcaccagaccaacctggcccggcgagcagccaaggaggccaaggaggcccctgcccagcccgcgcctgagaaggtcaaggtggaggtgaagaagtttgtgaagatcggccgcccgggctacaaagtgaccaagcagagagactcggagatgggccagcagagcctcctcttccaggtgagatcagggacttgggcgtggggggcggccaaaggcacccaagaggcggctctgccacccggccgtgtccctgcagattgactaccctgagatcgccgagggcatcatgccacgtcaccgcttcatgtctgcgtacgagcagaggatcgagcctccggaccggcgctggcagtacctgctcatggccgccgagccctacgagaccattgccttcaaggtgccgagcagagagatcgacaaggcggagggcaagttctggacacactggaaccgggagaccaagcagttcttcctccagttccactttaagatggagaagcccccggctccacccagcctccctgctggcccccctggggtgaagcggcctccacccccgctgatgaacggtctgccccctcggccaccgctgcctgagtctttgccaccgcccccgccaggaggcctgcctctgccacccatgccccccacagggcctgcgccctcagggcccccgggaccaccccagctacccccgccagctccaggggtccaccccccggccccagtggtgcatccccctgcatctggggtccatcccccagctcctggcgtccaccccccagctcctggcgtccatcccccagcccctggggtccacccaccaacctctggggtccaccccccagctcctggagtccaccctccagcccccggggttcacccaccagcccccggagtccacccaccagcccctggggttcacccaccagccccaggggtccatcctcccccatcagcgggggttcacccccaggccccgggggtgcacccagcagcccccgccgttcaccctcaggccccaggggtgcacccaccagccccagggatgcaccctcaggccccgggggtccacccccaacctcccggggtccatccgtcggctcctggggtccaccctcagcctccgggagttcacccctcaaatcctggggtgcaccccccaactcccatgcccccaatgctgaggcccccacttccctccgaaggcccagggaacatacctccccctcccccaaccaactgagaagctgctccctcccccagcaagcccagcgccaggtgctcttgccttttcccactgagagaaggctgctcttttgtactgccccccgctcattaaacagcctcccccagccctgagtgcactga

SEQ ID NO: 290041 - DNA, 1287 bp, Homo sapiens
gtgtgtgtgtgtgtgtgtatatatatatttttttttttttagatggagtcttgctctgttgcccaggctggagtgcagtggcgccatctcggctcactgcaagccccgcctcccgggttcattgaccaagcagagagactcggagatgggccagcagagcctcctcttccagattgactaccctgagatcgccgagggcatcatgccacgtcaccgcttcatgtctgcgtacgagcagaggatcgagcctccggaccggcgctggcagtacctgctcatggccgccgagccctacgagaccattgccttcaaggtgccgagcagagagatcgacaaggcggagggcaagttctggacacactggaaccgggagaccaagcagttcttcctccagttccactttaagatggagaagcccccggctccacccagcctccctgctggcccccctggggtgaagcggcctccacccccgctgatgaacggtctgccccctcggccaccgctgcctgagtctttgccaccgcccccgccaggaggcctgcctctgccacccatgccccccacagggcctgcgccctcagggcccccgggaccaccccagctacccccgccagctccaggggtccaccccccggccccagtggtgcatccccctgcatctggggtccatcccccagctcctggcgtccaccccccagctcctggcgtccatcccccagcccctggggtccacccaccaacctctggggtccaccccccagctcctggagtccaccctccagcccccggggttcacccaccagcccccggagtccacccaccagcccctggggttcacccaccagccccaggggtccatcctcccccatcagcgggggttcacccccaggccccgggggtgcacccagcagcccccgccgttcaccctcaggccccaggggtgcacccaccagccccagggatgcaccctcaggccccgggggtccacccccaacctcccggggtccatccgtcggctcctggggtccaccctcagcctccgggagttcacccctcaaatcctggggtgcaccccccaactcccatgcccccaatgctgaggcccccacttccctccgaaggcccagggaacatacctccccctcccccaaccaactgagaagctgctccctcccccagcaagcccagcgccaggtgctcttgccttttcccactgagagaaggctgctcttttgtactgccccccgctcattaaacagcctcccccagccctgagtgcactga

SEQ ID NO: 290042 - DNA, 995 bp, Homo sapiens
  misc_feature (948)..(948): n is a, c, g, or t
gaatcaaggcaccccagcgatggctggcacccctttctagagcggccaggcgcaggcggagggagcgataacgtcgcccggagagtgtcagccgctccctcgcgaaagttggccccgtgcggccgcagcggaccgagggttcgttgagagcgttgtgcgcacgcgcagtttgccttccaggccgcgctttcagcctctccccctccagccttttccttcgcgcctcgggaccctctgactcacgccgctgggcgggccaggcatgcgcacaccagagggcccgtctcatttgccccggaagtgctttctttgcccgccgttcgccaaacgaagtcgtggaggtggcgaaacgaggaggagataacgcggccttgggctctggtgtctcccagtctgctaaagccctaaggccatcaccatggacttccagcatcgccccgggggcaagaccgggagcgggggcgtggcctcctcctccgagagcaaccgtgaccgcagggagcgcctccggcagctggccctggagaccatcgacatcaacaaggacccgtacttcatgaagaaccacctgggctcctatgaatgcaaactctgcctgacacttcacaacaatgaggggagctacctggcacatacgcaggggaagaagcaccagaccaacctggcccggcgagcagccaaggaggccaaggaggcccctgcccagcccgcgcctgagaaggtcaaggtggaggtgaagaagtttgtgaagatcggccgcccgggctacaaagtgaccaagcagagagactcggagatgggccagcagagcctcctcttccagattgactaccctgagatcgccgagggcatcatgccacgtcaccgcttcatgtctgcgtacgagcagaggatcgagcctccgggacccgggcgcctgggcaattaacccttggcttccaattgggncccggcccgaaggccccccttaccgggaggaaccccaattttggccc

SEQ ID NO: 290043 - DNA, 1370 bp, Homo sapiens
atggatttgttgcagggtctgcagtactgagaacagcgtagaaccagtggcgatgggaggaaggggaccggtagagcggggctgggtaagcctccatccagccgggctgagccctggtctccgcagagcctctgcccctcccgagacacccgctacctggtgttagcggtggaccgccctgcgggggcctggcgcggctccgggctggccttgaccctgcagccccgcggagaggactcccggctgagtaccgcccggctgcaggcactgctgttcggcgacgaccaccgctgcttcacacggatgaccccggccctgctcctgctgccgcggtccgagcccgcgccgctgcctgcgcacggccagctggacaccgtgcccttcccgccgcccaggccatccgcggaactcgaggagtcgccacccagcgcagaccccttcctggagacgctcacgcgcctggtgcgggcgctgcgggtccccccggcccgggcctccgcgccgcgcctggccctggatccggacgcgctggccggcttcccgcagggcctagtcaacctgtcggaccccgcggcgctggagcgcctactcgacggcgaggagccgctgctgctgctgctgaggcccactgcggccaccaccggggatcctgcgcccctgcacgaccccacgtcggcgccgtgggccacggccctggcgcgccgcgtggctgctgaactgcaagcggcggctgccgagctgcgaagcctcccgggtctgcctccggccacagccccgctgctggcgcgcctgctcgcgctctgcccaggaggccccggcggcctcggcgatcccctgcgagcgctgctgctcctgaaggcgctgcagggcctgcgcgtggagtggcgcgggcgggatccgcgcgggccgggtcgggcacagcgcagcgcgggggccaccgccgccgacgggccgtgcgcgctgcgcgagctcagcgtagacctccgcgccgagcgctccgtactcatccccgagacctaccaggccaacaattgccagggcgtgtgcggctggcctcagtccgaccgcaacccgcgctacggcaaccacgtggtgctgctgctgaagatgcaggcccgtggggccgccctggcgcgcccaccctgctgcgtgcccaccgcctacgcgggcaagctgctcatcagcctgtcggaggagcgcatcagcgcgcaccacgtgcccaacatggtggccaccgagtgtggctgccggtgacccctgcgccgcgcggactcctgccccgagggtccggacgcgccccagctcgcgccccttcccatatttattcggaccccaagcatcgccccaataaagaccagcaagcaaccggc

SEQ ID NO: 290044 - DNA, 221 bp, Homo sapiens
ggtcccagcagcagccccgagttctgagccatcttcctcactctcctcttggcctccacaggtgtctcccagtctgctaaagccctaaggccatcaccatggacttccagcatcgccccgggggcaagaccgggagcgggggcgtggcctcctcctccgagagcaaccgtgaccgcagggagcgcctccggcagctggccctggagaccatcgacatcaac

SEQ ID NO: 290045 - DNA, 1856 bp, Homo sapiens
  misc_feature (18)..(18): n is a, c, g, or t
  misc_feature (20)..(20): n is a, c, g, or t
  misc_feature (24)..(24): n is a, c, g, or t
  misc_feature (26)..(27): n is a, c, g, or t
tcggctaggtacgaggcngngtgntnngtacggctcctgggcctctcccgggtcaagggtctccaggtcccgctgcctcggcgtggatctcggacccagagactcggggagacccgggcggtccgtgggggatgtggaggggtagtgacctgcgcccccggccggtgtcactcacaggcctcactctggttgtagtagccgctcagggtccgcaggttcactcggtaaaactgtgctttggccttggcggtccctgtctcctcttcccaatattccggcccctcctgctccatccacggcgcccgcggctccatcctgggactcgtggcgtcgctgtcgagccgcacgcactgcgtgtcgtccacgtcgcccacggagaggaagcggggatccgcgcggccgggccgggacatggtggtgtggaaatacctcaaggagtggaagcctgggagcaaggagggggctgagaccctcccgaccctcctcccggcaccgcaaccgggttcctgcgcccccgccgggcaggcccctagctactccccacagacgccgtttccctcccgaccccgcactcacctgcccaggtctgggtcaggaccagggcccccgagagcagcagaagcagggttcggggcgccatgacaccatcctcggcgactgggaagaatcggagtcccggtgggtgcgtgggaactttagaaccgggaccgcggctacattgattggcttctctagaaacccgacactcaatgggagtgagaactggggcagcccggtgagtacccaggaagaaggacccgacacaggttgggagagggagaagagaaaccctgcaaagatggggaatgcccagcgctgggcctccccaatccatacaccgcctttggggcctgagatcctgagagccacgcctgaggccctgggacttcgccctgaccccgctacttctgtgccaagcgctctgtctcaatgtttccctgagtcttggcccaggagctgtctgagaaaccagggagaaaccctcggaatgggccccgtccctctctcttcactttgcatcacggaatccccgtcccagaactggactccctgcctcctactccttacctgtccccgtggactcttctagaagaaaaatcaccccagggagcttgttgccagagagtgagcttgccctgggaatggaggtgtagagacagggttttttgttgttgttgtttgtttgttttttaaatctggaaaagttgtgcctgagtgcatgagatagaatagagaccagtttgctttttgtttattaactacagtgggtagcagaatcttggtaactcctaatgatcaggaatctaatcggccaaaaatgtgactttggtcccttgacatataaatgtgtctaaaagcattacaacaggaatcacaaagctcctaagtttcactttcccagacaatgtatctgtgactcccgcttgtagtattttaaatttaccttcattccatagccctgagtttctgtgtgagtccaggacatctcctaatacaaggtagccactgtgttactatatgttgtaaccaggagccagtacggactttattcatctcacagtggcaagcactcaatgcagtcacaatgcccctcaccagtgctcatgcactgcctgtttttaggaagtatccacttctaagtgttgtgtatattttatatgaacacttagtattttttaaacctgattaacataaaaaaattagtttttaggcagacccacataaggtattaaaggccaactgcaaagatcaccctgcaaggctctgtagattgatgtattaaaatatataaaacaatgtgtttaaacctgagttct

SEQ ID NO: 290046 - DNA, 2048 bp, Homo sapiens
caaggagcacaggtcctcgttcaggacgatgtaatccttgccatcgtaagcaagctggtgatacccgcggagtaggcgcccgtccgaccccacgtcgcagacagacatcctctagatgggtgtgagaccctggccccgcccccgcggccagccccgcccaccgagccccgccctcgccaggaccaacctgcggggattttggctgaaaatgaaaccgggtaacggctcctgggcctctcccgggtcaagggtctccaggtcccgctgcctcggcgtggatctcggacccagagactcggggagacccgggcggtccgtgggggatgtggaggggtagtgacctgcgcccccggccggtgtcactcacaggcctcactctggttgtagtagccgctcagggtccgcaggttcactcggtaaaactgtgctttggccttggcggtccctgtctcctcttcccaatattccggcccctcctgctccatccacggcgcccgcggctccatcctgggactcgtggcgtcgctgtcgagccgcacgcactgcgtgtcgtccacgtcgcccacggagaggaagcggggatccgcgcggccgggccgggacatggtggtgtggaaatacctcaaggagtggaagcctgggagcaaggagggggctgagaccctcccgaccctcctcccggcaccgcaaccgggttcctgcgcccccgccgggcaggcccctagctactccccacagacgccgtttccctcccgaccccgcactcacctgcccaggtctgggtcaggaccagggcccccgagagcagcagaagcagggttcggggcgccatgacaccatcctcggcgactgggaagaatcggagtcccggtgggtgcgtgggaactttagaaccgggaccgcggctacattgattggcttctctagaaacccgacactcaatgggagtgagaactggggcagcccggtgagtacccaggaagaaggacccgacacaggttgggagagggagaagagaaaccctgcaaagatggggaatgcccagcgctgggcctccccaatccatacaccgcctttggggcctgagatcctgagagccacgcctgaggccctgggacttcgccctgaccccgctacttctgtgccaagcgctctgtctcaatgtttccctgagtcttggcccaggagctgtctgagaaaccagggagaaaccctcggaatgggccccgtccctctctcttcactttgcatcacggaatccccgtcccagaactggactccctgcctcctactccttacctgtccccgtggactcttctagaagaaaaatcaccccagggagcttgttgccagagagtgagcttgccctgggaatggaggtgtagagacagggttttttgttgttgttgtttgtttgttttttaaatctggaaaagttgtgcctgagtgcatgagatagaatagagaccagtttgctttttgtttattaactacagtgggtagcagaatcttggtaactcctaatgatcaggaatctaatcggccaaaaatgtgactttggtcccttgacatataaatgtgtctaaaagcattacaacaggaatcacaaagctcctaagtttcactttcccagacaatgtatctgtgactcccgcttgtagtattttaaatttaccttcattccatagccctgagtttctgtgtgagtccaggacatctcctaatacaaggtagccactgtgttactatatgttgtaaccaggagccagtacggactttattcatctcacagtggcaagcactcaatgcagtcacaatgcccctcaccagtgctcatgcactgcctgtttttaggaagtatccacttctaagtgttgtgtatattttatatgaacacttagtattttttaaacctgattaacataaaaaaattagtttttaggcagacccacataaggtattaaaggccaactgcaaagatcaccctgcaaggctctgtagattgatgtattaaaatatataaaacaatgtgtttaaacctgagttct

SEQ ID NO: 290047 - DNA, 745 bp, Homo sapiens
acttgcatcattgtctgacagctctctcatctttcattgactcccaactctcagcaacatggaaatgcccaaattcccctgacatatggtagaggaagaaataaagagtttgagggaaatgagcatgaaggaatggatatattagggaggaatggcctacaggggccatgcaggggctgcatggaggaattggtcagtacacacagaagtggatggcactgggccaggcacagtggctcacacctgtactcccagcactttgggaagctgaggtgggtggatcgcctgagcccaggagttcgagaccagtcaagacaacatgacaaaactccacgtctactaaaaatacaaaaactagctgggcatggtggcatgtgcctgcaatcccagctacttgggaggctgaggcaggagaatcgcttgaggtggaggttgcagtgagccaagatagtgcccctacactccagcctgggtgacagagtgagactttgtctcaaataaataaataaataagaagtggactgctgtggtgtgagaatgcacctgacagacctccaattatggagagcttacacagccaagggccccaactgctgctctctgaaactcatcctgcttttgtgctgaggccacacttcccacaggctgctccagccagtgaccaagcacagcatggacactaagacaggcccattctgggagacgtgggactcctctgatggccaactttgacttggggactccc

SEQ ID NO: 290048 - DNA, 3332 bp, Homo sapiens
ggcacgaggtcctcacgtgaggtgaagcgcaggcgagtagggccagacatggtggctcatgcctgtaatctcagcactttgggagactgagatgagaagatcacttgaggccaggagttcgagaccagactggcaacatagtgagaccctgtctctacaaaatgctggccaaggagcagggcctgcgcccgtggtctcatagagcctggcctgttctggaagagcacccagttgttccttctaggctgcccaagccccactgatgatggctgagagggaagaggacgacgacactgaggaagcctggatgcagctacggcccacagaacccttgccttcccagtgctgcggcagtggctgctcaccctgtgtgtttgacctctatcaccgagatctggcaaggtgggaggcagcccaagccagcaaggacaggagcctgctgcgtgggccagagtcacagagggatagtagatgacttagaaattcagagagcctatacgcccatcagccctgccaacgcagaaggatactttgaagtgttaattaagtgctaccagatggggctgatgtcccggtatgttgagtcctggagagtaggagacacagctttctggcgaggacctttcggagatttcttctataaaccaaaccagtatggtgagctcctcttgctggctgcgggcacgggcctggcccccatggtgcctatcctgcagagcatcacagacaatgagaatgacgagacttttgtcactctggtcggttgcttcaagacctttgagagcatctacctgaaaaccttcctccaagagcaggcccgtttctggaatgtccgtaccttctttgtactcagccaggagagctcctcagagcagcttccctggagttaccaagagaaaacccactttggccacctgggccaggacctaattaaagagctggtcagctgctgtcggagaaagccattcgcactggtctgtggctcggctgagttcaccaaagacatagccaggtgcttactgtgcgcaggcctcactgaggactcctatttcctcttctagccctggcctctcttccaaagcctaggccatgagcctgctactgggacccaggaaggagcacagactggaatcagaagacacggagtccaggcctggtcctgctgctcatttgccaggtgaccttgggcaagtgtctttactgctcagaacctctacttctcatctgccccatgaggttaatcactcctcctggcctcctactatgtagaaggaggatgggctgtaggggccctgaggaggtgagcaaccagcctgggagtcagggaggactcttcagaggaagccaagtccaggctgagccccaggaggagtaggagttgggcaggggaagagtcgggaggagcttccctggcccctccgattagaggatctaatgggggctccaactgtggcctcagcaccatctcggattaggggctcctgagtgtgtagggaaggacacgggagaggcttagagctctttggaggaggattctgcctttcctccagtgccatgagcctgacacatgaaggtcttgggttctatgacttgaccacatcctgagagcaaggtggggccctcgactgtcttgtattggccccaagcctttcttgctgtgaacagcttcattctcagtcccctttcctggctcaaaaatcgagcctagcaaaagaagaggcacgggaaggaaacgcccctccctcctcctgcaggcagccactcagcctgtgccttcagcttggtgccctggtgatggttgctatggagatctaaagatagagcaggagtcaggagacctgggtccctctcccagcttgtcccactgagcggctgccgatcacggtccacccaccccaggaacctggcacccctatcccaggaacccagtgcccctgggcagcgcactgcagttaatgaattctgccttcaacagcctgggctctagcgtgctgcaccagcttgggctagctacaggcagtcccagaattggaatattaagccatggaatcttagagttagacttttatagtcatagaaatgtactcttcaccatatcaaagctgaaagttcaggactctaagaaacatacagtgtgacagacttatcgtatacacgggaaactgaagcccagtgagactaaatgacttgcccagggtaaaacagtccatggcagagccagcactagaagcctcctagcttcaacctcatgtgccaattctgcatcagtgattttcgaactgcgctctacaggaagcaagggttctttgcatagcagcagtgaaaggacagctccagatggatccccagtacccccttcaaccagagcagctgcatttttatcccattcatatattggggttttgaattatttttatttgtacaaaaggattttcctagccactaaaaaaaatggcaacaaatctctctgctgtgtcacatttaataaataattgtgacacatagctggggggtggtgctggaggtttcagaccgcctcacaggcagagttccagggtcagagagcatggagtactgtgtgtgaccttcttccagaagcacgggcacaggagcatgttaaaggccctgaaaagaccagtggcaaagaaactcctttcattttgtttaatccagagtttttcaagcttatttaactatagaacacttttctgtgggtttcgtagcctctttctagcacagtatagtgagtgggaaaggccctgactgagagtcaaagattctgagcaggaaccatgatctcttcctgcctagtatgtgacttgagcaagacacttttcctctccccaggcctctgaggtctgcgagttttcctccaccctttcctctccctcagtttgcacatcctattgactcagctccaaatagcgggggcctgtcaggagcctgactctgttcagacaccagggaaacaacagcacaccaggcagatgcagttatgtccatcggggaacttacagcctagcaaggaaggcagcaattcaacctgtaagtctaaaagtgatgggtgtcatgaaaaggtaagtgcagggtgctgggagagtggttggcaggggctttagcctagtctagggagagcccaggggcacaccactgccagcggggatagaggcttcaaaagctttgaagtcactcatattaagagtgttgccggacacggtggctcatgcctgtaatcccagcactttgggaggctgcggcaggcagattgcctgagcccagaagttcgaggccagcctggccaacatgacaaaaccctgtctctacaaaaaaaa

SEQ ID NO: 290049 - DNA, 834 bp, Homo sapiens
ggcacgaggtcctcacgtgaggtgaagcgcaggcgagtagggccagacatggtggctcatgcctgtaatctcagcactttgggagactgagatgagaagatcacttgaggccaggagttcgagaccagactggcaacatagtgagaccctgtctctacaaaatgctggccaaggagcagggcctgcgcccgtggtctcatagagcctggcctgttctggaagagcacccagttgttccttctaggctgcccaagccccactgatgatggctgagagggaagaggacgacgacactgaggaagcctggatgcagctacggcccacagaacccttgccttcccagtgctgcggcagtggctgctcaccctgtgtgtttgacctctatcaccgagatctggcaaggtgggaggcagcccaagccagcaaggacaggagcctgctgcgtgggccagagtcacagagctgcccctccaagctgaacccagagaccttcgtggccttctgcatcattgccatggacaggctcactaaggacacctaccgtgtccggtttgctctacccgggaacagccagcttggcctgcggcccggccagcacctcatcctacgagggatagtagatgacttagaaattcagagagcctatacgcccatcagccctgccaacgcagaaggatactttgaagtgttaattaagatgaagaaactgaagctcaaaaagatgacatcatttgtctcaaggcctcttgggtaatatgatccaaatggaaggacaaaagttcagtgtcagttctgtttaacaagtatgtattaaacatttactctgtgccaggc

SEQ ID NO: 290050 - DNA, 973 bp, Homo sapiens
ggcacgaggtcctcacgtgaggtgaagcgcaggcgagtagggccagacatggtggctcatgcctgtaatctcagcactttgggagactgagatgagaagatcacttgaggccaggagttcgagaccagactggcaacatagtgagaccctgtctctacaaaatgctggccaaggagcagggcctgcgcccgtggtctcatagagcctggcctgttctggaagagcacccagttgttccttctaggctgcccaagccccactgatgatggctgagagggaagaggacgacgacactgaggaagcctggatgcagctacggcccacagaacccttgccttcccagtgctgcggcagtggctgctcaccctgtgtgtttgacctctatcaccgagatctggcaaggtgggaggcagcccaagccagcaaggacaggagcctgctgcgtgggccagagtcacagagggatagtagatgacttagaaattcagagagcctatacgcccatcagccctgccaacgcagaaggatactttgaagtgttaattaagatgaagaaactgaagctcaaaaagatgacatcatttgtctcaaggcctcttgggtaatatgatccaaatggaaggacaaaagttcagtgtcagttctgtttaacaatgctaccagatggggctgatgtcccggtatgttgagtcctggagagtaggagacacagctttctggcgaggacctttcggagatttcttctataaaccaaaccagatggaatcttgctctgttgcccaggctggagtgcagtggcatgatctcgactcactgcaacctctgcctcccaggctcaagcaattcttctgcctcagcctcccaagtagctgggactacaggcgtgcaccaccacgcttggctaatttttgtatttttagtagagacggagttttgccacgttggtctcgaactcctgaccttaagtgatccg

SEQ ID NO: 290051 - DNA, 2577 bp, Homo sapiens
  misc_feature (2479)..(2479): n is a, c, g, or t
  misc_feature (2485)..(2485): n is a, c, g, or t
  misc_feature (2496)..(2497): n is a, c, g, or t
ggcacgaggtcctcacgtgaggtgaagcgcaggcgagtagggccagacatggtggctcatgcctgtaatctcagcactttgggagactgagatgagaagatcacttgaggccaggagttcgagaccagactggcaacatagtgagaccctgtctctacaaaatgctggccaaggagcagggcctgcgcccgtggtctcatagagcctggcctgttctggaagagcacccagttgttccttctaggctgcccaagccccactgatgatggctgagagggaagaggacgacgacactgaggaagcctggatgcagctacggcccacagaacccttgccttcccagtgctgcggcagtggctgctcaccctgtgtgtttgacctctatcaccgagatctggcaaggtgggaggcagcccaagccagcaaggacaggagcctgctgcgtgggccagagtcacagagggatagtagatgacttagaaattcagagagcctatacgcccatcagccctgccaacgcagaaggatactttgaagtgttaattaagtgctaccagatggggctgatgtcccggtatgttgagtcctggagagtaggagacacagctttctggcgaggacctttcggagatttcttctataaaccaaaccagtatggtgagctcctcttgctggctgcgggcacgggcctggcccccatggtgcctatcctgcagagcatcacagacaatgagaatgacgagacttttgtcactctggtcggttgcttcaagacctttgagagcatctacctgaaaaccttcctccaagagcaggcccgtttctggaatgtccgtaccttctttgtactcagccaggagagctcctcagagcagcttccctggagttaccaagagaaaacccactttggccacctgggccaggacctaattaaagagctggtcagctgctgtcggagaaagccattcgcactggtctgtggctcggctgagttcaccaaagacatagccaggtgcttactgtgcgcaggcctcactgaggactcctatttcctcttctagccctggcctctcttccaaagcctaggccatgagcctgctactgggacccaggaaggagcacagactggaatcagaagacacggagtccaggcctggtcctgctgctcatttgccaggtgaccttgggcaagtgtctttactgctcagaacctctacttctcatctgccccatgaggttaatcactcctcctggcctcctactatgtagaaggaggatgggctgtaggggccctgaggaggtgagcaaccagcctgggagtcagggaggactcttcagaggaagccaagtccaggctgagccccaggaggagtaggagttgggcaggggaagagtcgggaggagcttccctggcccctccgattagaggatctaatgggggctccaactgtggcctcagcaccatctcggattaggggctcctgagtgtgtagggaaggacacgggagaggcttagagctctttggaggaggattctgcctttcctccagtgccatgagcctgacacatgaaggtcttgggttctatgacttgaccacatcctgagagcaaggtggggccctcgactgtcttgtattggccccaagcctttcttgctgtgaacagcttcattctcagtcccctttcctggctcaaaaatcgagcctagcaaaagaagaggcacgggaaggaaacgcccctccctcctcctgcaggcagccactcagcctgtgccttcagcttggtgccctggtgatggttgctatggagatctaaagatagagcaggagtcaggagacctgggtccctctcccagcttgtcccactgagcggctgccgatcacggtccacccaccccaggaacctggcacccctatcccaggaacccagtgcccctgggcagcgcactgcagttaatgaattctgccttcaacagcctgggctctagcgtgctgcaccagcttgggctagctacaggcagtcccagaattggaatattaagccatggaatcttagagttagacttttatagtcatagaaatgtactcttcaccatatcaaagctgaaagttcaggactctaagaaacatacagtgtgacagacttatcgtatacacgggaaactgaagcccagtgagactaaatgacttgcccagggtaaaacagtccatggcagagccagcactagaagcctcctagcttcaacctcatgtgccaattctgcatcagtgattttcgaactgcgctctacaggaagcaagggttctttgcatagcagcagtgaaaggacagctccagatggatccccagtacccccttcaaccagagcagctgcatttttatcccattcatatattggggttttgaattatttttatttgtacaaaaggattttcctagccactaaaaaaaatggcaacaaatctctctgctgtgtccnttatantatgggcctanngggggggggggggtaaaccgcccagggagccggcaaactggacagggggcctcaaacgggaattaggcgaaacgggacct

SEQ ID NO: 290052 - DNA, 977 bp, Homo sapiens
ggcacgaggtcctcacgtgaggtgaagcgcaggcgagtagggccagacatggtggctcatgcctgtaatctcagcactttgggagactgagatgagaagatcacttgaggccaggagttcgagaccagactggcaacatagtgagaccctgtctctacaaaatgctggccaaggagcagggcctgcgcccgtggtctcatagagcctggcctgttctggaagagcacccagttgttccttctaggctgcccaagccccactgatgatggctgagagggaagaggacgacgacactgaggaagcctggatgcagctacggcccacagaacccttgccttcccagtgctgcggcagtggctgctcaccctgtgtgtttgacctctatcaccgagatctggcaaggtgggaggcagcccaagccagcaaggacaggagcctgctgcgtgggccagagtcacagagctgcccctccaagctgaacccagagaccttcgtggccttctgcatcattgccatggacaggctcactaaggacacctaccgtgtccggtttgctctacccgggaacagccagcttggcctgcggcccggccagcacctcatcctacggctggtctcaaactcctgacctcaagtgatcagcccacctcggcctcccaaagtgtggggattacagacatgagccaccgtgcccagccttaaaagggtttgctgaatgactggctgactgactgcacacttctgtttctcagagggatagtagatgacttagaaattcagagagcctatacgcccatcagccctgccaacgcagaaggatactttgaagtgttaattaagatgaagaaactgaagctcaaaaagatgacatcatttgtctcaaggcctcttgggtaatatgatccaaatggaaggacaaaagttcagtgtcagttctgtttaacaagtatgtattaaacatttactctgtgccaggc

SEQ ID NO: 290053 - DNA, 482 bp, Homo sapiens
ttcatgtgactcagcctcccaggtagctgagactacaggcgtgagccaccacacccagctaaatttttgtacttttagtagtgacgggtttcactatgttgtccaggctggtctcaaactcctgacctcaagtgatcagcccacctcggcctcccaaagtgtggggattacagacatgagccaccgtgcccagccttaaaagggtttgctgaatgactggctgactgactgcacacttctgtttctcagagggatagtagatgacttagaaattcagagagcctatacgcccatcagccctgccaacgcagaaggatactttgaagtgttaattaaggtgagttgacccttgaggatgctccaagatgccgtggagaagctatgggtctaagaatggagagctaaagggaaaatgtgggaaggaaactcagtgctgggaacaacatggacaaaggcaattggggaagtaagtcctttgtcct

SEQ ID NO: 290054 - DNA, 886 bp, Homo sapiens
atcgatagggctgcacagaggtggcacagttgtgccagaggtagcagggacaggagggctggcaagggagggtccagggctaggggattcggagtggcttcaggcggaccacgtggctaccttttttccagggccagactttggcagcgtgtaaggtctgaggacaggggcaccggaggccgaggatgagaggccagtgcctgtttccaggcagccagggcctcagaaactccggccggagcactcacccgtcggtggaggccgttaccagggccaccttatttgcgagcgggtcccggcgggtcatcccggagctggccatccgcaccgaattccaagcccgggcacagaggcctagcagccccgccttgtgcatggatcagaccagcaagtgccacttcggataaaccctttggactcctaactccaatcaggtgtctgctttgttgaggactcacagacacagtctcctttcttcaagatctttacaatgcaagacctcactaacacacagggatggtctcccagagggtctgtgctgttccttcactcagaacatcaagatgcactgaagtaaggatcctctattctacagttcctgctagctgagctattccatgggggcttcagcaggaaattccaaggttggctttgacaagctaaggccggctggtggagcacatcgagttctggaggttcatgtgtgttttcatgaagatctgtctgcccgtagcagataaagagttgttgccccactcctcctggggtcttctattttcctgggaggaatttctggattaactgaacacacacacacacacaatcttcaggccaataccctcgatgaacatcaatgcaaaaatcctcaacaaaacgaaagcggccg

SEQ ID NO: 290055 - DNA, 2478 bp, Homo sapiens
gcgcccctccaccatctaccttccgcctgactggggcttgcctttccgggctggcgggtgccacttcggataaaccctttggactcctaactccaatcaggtgtctgctttgttgaggactcacagacacagtctcctttcttcaagatctttacaatgcaagacctcactaacacacagggatggtctcccagagggtctgtgctgttccttcactcagaacatcaagatgcactgaagtaaggatcctctattctacagttcctgctagctgagctattccatgggggcttcagcaggaaattccaaggttggctttgacaagctaaggccggctggtggagcacatcgagttctggaggttcatgtgtgttttcatgaagatctgtctgcccgtagcagataaagagttgttgccccactcctcctggggtcttctattttcctgggaggaatttctggattaactgaacacacacacacacacacacacccttttgaagcatcaacagtaattctgagttcttagggacaatgcagattaaatccacaataagaaagacaactatggccaggtgtggtggctcacgcctgtaatcccagaactttgggaggctgaggcggatggatcacctgaggtcaggagttagagaccaacctgaccaacatggagaaaccccgtttctactaaaaatgcaaaattagccgggcatggtggcaggcgcctgtaatcccaaatactcgggaggctgaggcaggagaatcacttaaacccgggaggcagaggttgcagtgagccaagatcgcgccattgcactccagcctgggcaagaagagcaaaactccatctcaaaaaaaaaaaaaaagagtactattgatccagaggtgaccagactagcctcactggagataataggtgacattattatgcaaagtggtttcagttcccttgtcttgtttttggaatagtataagaggcctacaatacgaataaataaggcccatcacaagcctcaccaaaggacaaaactaatccacttctgaagaaggctctttgttgggccagatcaaatccttggacagaactgtactcttaatctctgtagtgaaagtggggggtagtttaagaatttattaaccttctaccttgagcaatccctcagaagtaagaggtgtcaggcctctgagccgaagctcagccattgtaacccctgtgacctgcacatatatgtccagatggcctgcaggagccaagaagtctggggcagctgaaaaaccacacaagaagtaaaacagccagttcctgccttaactgattaaccaacattacaacattccaccattgtgacctgtccctgtcctaccttaactgatcaatcgaccttgtgacagtcttcttctggacaatgggtcttatcatctccccaccatgtaccttgtgaccccctcctctgctaacaatagataaccactttttactgtaattttccattacctacccaactcctataaagcaaccccttccccatctcccttcactgactctgttttcagactcagcccacttgcactcaagtgaataaacagccttgttgctcacacaaagcctgttggtggtctcttcacacagatgtgcttgacaaaagggaagggtggatttgtccttctggttacatatgttctgctcactcattttgaatttaattaaacaaggattgcccttaccttttcatactttgtaagaaaccataaatacttatgcaccatgatttttttaaagaaacactttttattttgaagtaattatagtctcataggaagttgcaaaagtagtacatagagtccctgagtactcttcccccagtggtgacaactgtagtataatatcaattctgggaaattgacattggtacaataccaaatatactatgcctttttctctaaggcatgatgttgcagtagcatccttgtacatgtagctaggagaacttgtactaagcccagataaatagttgaagtacaagggcaaggagtgtgtctttgatattttaatagaaatcacctattgccctctagaaaagctgtacccttttccagtggcagagaaccttcctgaaaggcagtcctgtgtaatggtgtccatttcatcacacccttaaaacactcagctttaacaaacatgcagatttttgctgatgtgggagaaaatattaattattaatgatattaaggtgattatcttttcgtatgtttatagatatttgtatttctttttaaatgaactgctcatgacctttgtctacttttatttgggtttacttctttctcatttattcctataaactctttataaaaggaaattaaccatttgattgtcatatgttgtgaatatttttaccattttgacttttgaatttatgtctttttaatgaattgtagaagtttaaaatctttatggaataaatttatttagttttt

SEQ ID NO: 290056 - DNA, 2812 bp, Homo sapiens
atcgatagggctgcacagaggtggcacagttgtgccagaggtagcagggacaggagggctggcaagggagggtccagggctaggggattcggagtggcttcaggcggaccacgtggctaccttttttccagggccagactttggcagcgtgtaaggtctgaggacaggggcaccggaggccgaggatgagaggccagtgcctgtttccaggcagccagggcctcagaaactccggccggagcactcacccgtcggtggaggccgttaccagggccaccttatttgcgagcgggtcccggcgggtcatcccggagctggccatccgcaccgaattccaagcccgggcacagaggcctagcagccccgccttgtgcatggatcagaccagcaagtgccacttcggataaaccctttggactcctaactccaatcaggtgtctgctttgttgaggactcacagacacagtctcctttcttcaagatctttacaatgcaagacctcactaacacacagggatggtctcccagagggtctgtgctgttccttcactcagaacatcaagatgcactgaagtaaggatcctctattctacagttcctgctagctgagctattccatgggggcttcagcaggaaattccaaggttggctttgacaagctaaggccggctggtggagcacatcgagttctggaggttcatgtgtgttttcatgaagatctgtctgcccgtagcagataaagagttgttgccccactcctcctggggtcttctattttcctgggaggaatttctggattaactgaacacacacacacacacacacacccttttgaagcatcaacagtaattctgagttcttagggacaatgcagattaaatccacaataagaaagacaactatggccaggtgtggtggctcacgcctgtaatcccagaactttgggaggctgaggcggatggatcacctgaggtcaggagttagagaccaacctgaccaacatggagaaaccccgtttctactaaaaatgcaaaattagccgggcatggtggcaggcgcctgtaatcccaaatactcgggaggctgaggcaggagaatcacttaaacccgggaggcagaggttgcagtgagccaagatcgcgccattgcactccagcctgggcaagaagagcaaaactccatctcaaaaaaaaaaaaaaagagtactattgatccagaggtgaccagactagcctcactggagataataggtgacattattatgcaaagtggtttcagttcccttgtcttgtttttggaatagtataagaggcctacaatacgaataaataaggcccatcacaagcctcaccaaaggacaaaactaatccacttctgaagaaggctctttgttgggccagatcaaatccttggacagaactgtactcttaatctctgtagtgaaagtggggggtagtttaagaatttattaaccttctaccttgagcaatccctcagaagtaagaggtgtcaggcctctgagccgaagctcagccattgtaacccctgtgacctgcacatatatgtccagatggcctgcaggagccaagaagtctggggcagctgaaaaaccacacaagaagtaaaacagccagttcctgccttaactgattaaccaacattacaacattccaccattgtgacctgtccctgtcctaccttaactgatcaatcgaccttgtgacagtcttcttctggacaatgggtcttatcatctccccaccatgtaccttgtgaccccctcctctgctaacaatagataaccactttttactgtaattttccattacctacccaactcctataaagcaaccccttccccatctcccttcactgactctgttttcagactcagcccacttgcactcaagtgaataaacagccttgttgctcacacaaagcctgttggtggtctcttcacacagatgtgcttgacaaaagggaagggtggatttgtccttctggttacatatgttctgctcactcattttgaatttaattaaacaaggattgcccttaccttttcatactttgtaagaaaccataaatacttatgcaccatgatttttttaaagaaacactttttattttgaagtaattatagtctcataggaagttgcaaaagtagtacatagagtccctgagtactcttcccccagtggtgacaactgtagtataatatcaattctgggaaattgacattggtacaataccaaatatactatgcctttttctctaaggcatgatgttgcagtagcatccttgtacatgtagctaggagaacttgtactaagcccagataaatagttgaagtacaagggcaaggagtgtgtctttgatattttaatagaaatcacctattgccctctagaaaagctgtacccttttccagtggcagagaaccttcctgaaaggcagtcctgtgtaatggtgtccatttcatcacacccttaaaacactcagctttaacaaacatgcagatttttgctgatgtgggagaaaatattaattattaatgatattaaggtgattatcttttcgtatgtttatagatatttgtatttctttttaaatgaactgctcatgacctttgtctacttttatttgggtttacttctttctcatttattcctataaactctttataaaaggaaattaaccatttgattgtcatatgttgtgaatatttttaccattttgacttttgaatttatgtctttttaatgaattgtagaagtttaaaatctttatggaataaatttatttagttttt

SEQ ID NO: 290057 - DNA, 2764 bp, Homo sapiens
tgacgaccacatgggccccgtcctgggccaaacgccgggcgatggcgaagccgatcctgtgagcagaaagagacaaagactgctaaggcctgtgcaggggaagaggtcgacagtatgagctctgaagttaagactgcccgggtttgaattctggctctttctctatataacccctacgtgtgcctactatgtgtaaaacaggcttaatggcatggccatttttggcattcctttacttgtttttattatgacctggaccacagcctcagttcccaagaactgacatcactttctacagttcccaccatgggtgacaggcttcatcccctcttgggactgagaggtgccacttcggataaaccctttggactcctaactccaatcaggtgtctgctttgttgaggactcacagacacagtctcctttcttcaagatctttacaatgcaagacctcactaacacacagggatggtctcccagagggtctgtgctgttccttcactcagaacatcaagatgcactgaagtaaggatcctctattctacagttcctgctagctgagctattccatgggggcttcagcaggaaattccaaggttggctttgacaagctaaggccggctggtggagcacatcgagttctggaggttcatgtgtgttttcatgaagatctgtctgcccgtagcagataaagagttgttgccccactcctcctggggtcttctattttcctgggaggaatttctggattaactgaacacacacacacacacacacacccttttgaagcatcaacagtaattctgagttcttagggacaatgcagattaaatccacaataagaaagacaactatggccaggtgtggtggctcacgcctgtaatcccagaactttgggaggctgaggcggatggatcacctgaggtcaggagttagagaccaacctgaccaacatggagaaaccccgtttctactaaaaatgcaaaattagccgggcatggtggcaggcgcctgtaatcccaaatactcgggaggctgaggcaggagaatcacttaaacccgggaggcagaggttgcagtgagccaagatcgcgccattgcactccagcctgggcaagaagagcaaaactccatctcaaaaaaaaaaaaaaagagtactattgatccagaggtgaccagactagcctcactggagataataggtgacattattatgcaaagtggtttcagttcccttgtcttgtttttggaatagtataagaggcctacaatacgaataaataaggcccatcacaagcctcaccaaaggacaaaactaatccacttctgaagaaggctctttgttgggccagatcaaatccttggacagaactgtactcttaatctctgtagtgaaagtggggggtagtttaagaatttattaaccttctaccttgagcaatccctcagaagtaagaggtgtcaggcctctgagccgaagctcagccattgtaacccctgtgacctgcacatatatgtccagatggcctgcaggagccaagaagtctggggcagctgaaaaaccacacaagaagtaaaacagccagttcctgccttaactgattaaccaacattacaacattccaccattgtgacctgtccctgtcctaccttaactgatcaatcgaccttgtgacagtcttcttctggacaatgggtcttatcatctccccaccatgtaccttgtgaccccctcctctgctaacaatagataaccactttttactgtaattttccattacctacccaactcctataaagcaaccccttccccatctcccttcactgactctgttttcagactcagcccacttgcactcaagtgaataaacagccttgttgctcacacaaagcctgttggtggtctcttcacacagatgtgcttgacaaaagggaagggtggatttgtccttctggttacatatgttctgctcactcattttgaatttaattaaacaaggattgcccttaccttttcatactttgtaagaaaccataaatacttatgcaccatgatttttttaaagaaacactttttattttgaagtaattatagtctcataggaagttgcaaaagtagtacatagagtccctgagtactcttcccccagtggtgacaactgtagtataatatcaattctgggaaattgacattggtacaataccaaatatactatgcctttttctctaaggcatgatgttgcagtagcatccttgtacatgtagctaggagaacttgtactaagcccagataaatagttgaagtacaagggcaaggagtgtgtctttgatattttaatagaaatcacctattgccctctagaaaagctgtacccttttccagtggcagagaaccttcctgaaaggcagtcctgtgtaatggtgtccatttcatcacacccttaaaacactcagctttaacaaacatgcagatttttgctgatgtgggagaaaatattaattattaatgatattaaggtgattatcttttcgtatgtttatagatatttgtatttctttttaaatgaactgctcatgacctttgtctacttttatttgggtttacttctttctcatttattcctataaactctttataaaaggaaattaaccatttgattgtcatatgttgtgaatatttttaccattttgacttttgaatttatgtctttttaatgaattgtagaagtttaaaatctttatggaataaatttatttagttttt

SEQ ID NO: 290058 - DNA, 2425 bp, Homo sapiens
gcgcccctccaccatctaccttccgcctgactggggcttgcctttccgggctggcgggtgccacttcggataaaccctttggactcctaactccaatcaggtgtctgctttgttgaggactcacagacacagtctcctttcttcaagatctttacaatgcaagacctcactaacacacagggatggtctcccagagggtctgtgctgttccttcactcagaacatcaagatgcactgaagtaaggatcctctattctacagttcctgctagctgagctattccatgggggcttcagcaggaaattccaaggttggctttgacaagctaaggccggctggtggagcacatcgagttctggaggttcatgtgtgttttcatgaagatctgtctgcccgtagcagataaagagttgttgccccactcctcctggggtcttctattttcctgggaggaatttctggattaactgaacacacacacacacacacacacccttttgaagcatcaacagtaattctgagttcttagggacaatgcagattaaatccacaataagaaagacaactatggccaggtgtggtggctcacgcctgtaatcccagaactttgggaggctgaggcggatggatcacctgaggtcaggagttagagaccaacctgaccaacatggagaaaccccgtttctactaaaaatgcaaaattagccgggcatggtggcaggcgcctgtaatcccaaatactcgggaggctgaggcaggagaatcacttaaacccgggaggcagaggttgcagtgagccaagatcgcgccattgcactccagcctgggcaagaagagcaaaactccatctcaaaaaaaaaaaaaaagagtactattgatccagaggtgaccagactagcctcactggagataataggtgacattattatgcaaagtggtttcagttcccttgtcttgtttttggaatagtataagaggcctacaatacgaataaataaggcccatcacaagcctcaccaaaggacaaaactaatccacttctgaagaaggctctttgttgggccagatcaaatccttggacagaactgtactcttaatctctgtagtgaaagtggggggtagtttaagaatttattaaccttctaccttgagcaatccctcagaagtaagaggtgtcaggcctctgagccgaagctcagccattgtaacccctgtgacctgcacatatatgtccagatggcctgcaggagccaagaagtctggggcagctgaaaaaccacacaagaacattgtgacctgtccctgtcctaccttaactgatcaatcgaccttgtgacagtcttcttctggacaatgggtcttatcatctccccaccatgtaccttgtgaccccctcctctgctaacaatagataaccactttttactgtaattttccattacctacccaactcctataaagcaaccccttccccatctcccttcactgactctgttttcagactcagcccacttgcactcaagtgaataaacagccttgttgctcacacaaagcctgttggtggtctcttcacacagatgtgcttgacaaaagggaagggtggatttgtccttctggttacatatgttctgctcactcattttgaatttaattaaacaaggattgcccttaccttttcatactttgtaagaaaccataaatacttatgcaccatgatttttttaaagaaacactttttattttgaagtaattatagtctcataggaagttgcaaaagtagtacatagagtccctgagtactcttcccccagtggtgacaactgtagtataatatcaattctgggaaattgacattggtacaataccaaatatactatgcctttttctctaaggcatgatgttgcagtagcatccttgtacatgtagctaggagaacttgtactaagcccagataaatagttgaagtacaagggcaaggagtgtgtctttgatattttaatagaaatcacctattgccctctagaaaagctgtacccttttccagtggcagagaaccttcctgaaaggcagtcctgtgtaatggtgtccatttcatcacacccttaaaacactcagctttaacaaacatgcagatttttgctgatgtgggagaaaatattaattattaatgatattaaggtgattatcttttcgtatgtttatagatatttgtatttctttttaaatgaactgctcatgacctttgtctacttttatttgggtttacttctttctcatttattcctataaactctttataaaaggaaattaaccatttgattgtcatatgttgtgaatatttttaccattttgacttttgaatttatgtctttttaatgaattgtagaagtttaaaatctttatggaataaatttatttagttttt

SEQ ID NO: 290059 - DNA, 2677 bp, Homo sapiens
gcgcccctccaccatctaccttccgcctgactggggcttgcctttccgggctggcgggtgccacttcggataaaccctttggactcctaactccaatcaggtgtctgctttgttgaggactcacagacacagtctcctttcttcaagatctttacaatgcaagacctcactaacacacagggatggtctcccagagggtctgtgctgttccttcactcagaacatcaagatgcactgaagtaaggatcctctattctacagttcctgctagctgagctattccatgggggcttcagcaggaaattccaaggttggctttgacaagctaaggccggctggtggagcacatcgagttctggaggttcatgtgtgttttcatgaagatctgtctgcccgtagcagataaagagttgttgccccactcctcctggggtcttctattttcctgggaggaatttctggattaactgaacacacacacacacacacacacccttttgaagcatcaacagtaattctgagttcttagggacaatgcagattaaatccacaataagaaagacaactatggccaggtgtggtggctcacgcctgtaatcccagaactttgggaggctgaggcggatggatcacctgaggtcaggagttagagaccaacctgaccaacatggagaaaccccgtttctactaaaaatgcaaaattagccgggcatggtggcaggcgcctgtaatcccaaatactcgggaggctgaggcaggagaatcacttaaacccgggaggcagaggttgcagtgagccaagatcgcgccattgcactccagcctgggcaagaagagcaaaactccatctcaaaaaaaaaaaaaaagagtactattgatccagaggtgaccagactagcctcactggagataataggtgacattattatgcaaagtggtttcagttcccttgtcttgtttttggaatagtataagaggcctacaatacgaataaataaggcccatcacaagcctcaccaaaggacaaaactaatccacttctgaagaaggctctttgttgggccagatcaaatccttggacagaactgtactcttaatctctgtagtgaaagtggggggtagtttaagaatttattaaccttctaccttgagcaatccctcagaagtaagaggtgtcaggcctctgagccgaagctcagccattgtaacccctgtgacctgcacatatatgtccagatggcctgcaggagccaagaagtctggggcagctgaaaaaccacacaagaagtaaaacagccagttcctgccttaactgattaaccaacattacaacattccaccattgtgacctgtccctgtcctaccttaactgatcaatcgaccttgtgacagtcttcttctggacaatgggtcttatcatctccccaccatgtaccttgtgaccccctcctctgctaacaatagataaccactttttactgtaattttccattacctacccaactcctataaagcaaccccttccccatctcccttcactgactctgttttcagactcagcccacttgcactcaagtgaataaacagccttgttgctcacacaaagcctgttggtggtctcttcacacagatgtgcttgacaaaagggaagggtggatttgtccttctggttacatatgttctgctcactcattttgaatttaattaaacaaggattgcccttaccttttcatactttgtaagaaaccataaatacttatgcaccatgatttttttaaagaaacactttttattttgaagtaattatagtctcataggaagttgcaaaagtagtacatagagtccctgagtactcttcccccagtggtgacaactgtagtataatatcaattctgggaaattgacattggtacaataccaaatatactatgccttattcagttttcattattttttacatgcactcatttgtgtgtgtcaatgtgtgtctgtgcttctctgcttgtgatgtatttaggagaattttgactagcgagccatacagatctactccattcttattcctttgttcattatctggatgaactatcacttaccagtcccctattggaatccacttcagttgtttatggtttttctctaaggcatgatgttgcagtagcatccttgtacatgtagctaggagaacttgtactaagcccagataaatagttgaagtacaagggcaaggagtgtgtctttgatattttaatagaaatcacctattgccctctagaaaagctgtacccttttccagtggcagagaaccttcctgaaaggcagtcctgtgtaatggtgtccatttcatcacacccttaaaacactcagctttaacaaacatgcagatttttgctgatgtgggagaaaatattaattattaatgatattaaggtgattatcttttcgtatgtttatagatatttgtatttctttttaaatgaactgctcatgacctttgtctacttttatttgggtttacttctttctcatttattcctataaactctttataaaaggaaattaaccatttgattgtcatatgttgtgaatatttttaccattttgacttttgaatttatgtctttttaatgaattgtagaagtttaaaatctttatggaataaatttatttagttttt

SEQ ID NO: 290060 - DNA, 2797 bp, Homo sapiens
gcgcccctccaccatctaccttccgcctgactggggcttgcctttccgggctggcgggtgccacttcggataaaccctttggactcctaactccaatcaggtgtctgctttgttgaggactcacagacacagtctcctttcttcaagatctttacaatgcaagacctcactaacacacagggatggtctcccagagggtctgtgctgttccttcactcagaacatcaagatgcactgaagtaaggatcctctattctacagttcctgctagctgagctattccatgggggcttcagcaggaaattccaaggttggctttgacaagctaaggccggctggtggagcacatcgagttctggaggttcatgtgtgttttcatgaagatctgtctgcccgtagcagataaagagttgttgccccactcctcctggggtcttctattttcctgggaggaatttctggattaactgaacacacacacacacacacacacccttttgaagcatcaacagtaattctgagttcttagggacaatgcagattaaatccacaataagaaagacaactatggccaggtgtggtggctcacgcctgtaatcccagaactttgggaggctgaggcggatggatcacctgaggtcaggagttagagaccaacctgaccaacatggagaaaccccgtttctactaaaaatgcaaaattagccgggcatggtggcaggcgcctgtaatcccaaatactcgggaggctgaggcaggagaatcacttaaacccgggaggcagaggttgcagtgagccaagatcgcgccattgcactccagcctgggcaagaagagcaaaactccatctcaaaaaaaaaaaaaaagagtactattgatccagaggtgaccagactagcctcactggagataataggtgacattattatgcaaagtggtttcagttcccttgtcttgtttttggaatagtataagaggcctacaatacgaataaataaggcccatcacaagcctcaccaaaggacaaaactaatccacttctgaagaaggctctttgttgggccagatcaaatccttggacagaactgtactcttaatctctgtagtgaaagtggggggtagtttaagaatttattaaccttctaccttgagcaatccctcagaagtaagaggtgtcaggcctctgagccgaagctcagccattgtaacccctgtgacctgcacatatatgtccagatggcctgcaggagccaagaagtctggggcagctgaaaaaccacacaagaagtaaaacagccagttcctgccttaactgattaaccaacattacaacattccaccattgtgacctgtccctgtcctaccttaactgatcaatcgaccttgtgacagtcttcttctggacaatgggtcttatcatctccccaccatgtaccttgtgaccccctcctctgctaacaatagataaccactttttactgtaattttccattacctacccaactcctataaagcaaccccttccccatctcccttcactgactctgttttcagactcagcccacttgcactcaagtgaataaacagccttgttgctcacacaaagcctgttggtggtctcttcacacagatgtgcttgacaaaagggaagggtggatttgtccttctggttacatatgttctgctcactcattttgaatttaattaaacaaggattgcccttaccttttcatactttgtaagaaaccataaatacttatgcaccatgatttttttaaagaaacactttttattttgaagtaattatagtctcataggaagttgcaaaagtagtacatagagtccctgagtactcttcccccagtggtgacaactgtagtataatatcaattctgggaaattgacattggtacaataccaaatatactatgcctttttctctaaggcatgatgttgcagtagcatccttgtacatgtagctaggagaacttgtactaagcccagataaatagttgaagtacaagggcaaggagtgtgtctttgatattttaatagaaatcacctattgccctctagaaaagctgtacccttttccagtggcagagaaccttcctgaaaggcagtcctgtgtaatggtgtccatttcatcacacccttaaaacactcagctttaacaaacatgcagatttttgctgatgtgggagaaaatattaattattaatgatattaaggtgattatcttttcgtatgtttatagatatttgtatttctttttaaatgaactgctcatgacctttgtctacttttatttgggtttacttctttctcatttattcctataaactctttataaaaggaaattaaccatttgattgtcatatgttgtgaatatttttaccattttgacttttgaatttatgtctttttaatgaattgtagaagtttaaaatctttatggaataaatttatttagtttttaaaaaaaaaaaaaaaaaacaaaaaaaaaacaaaaaaaaaaacaaaacaggagagcaacacgataaaacaaacaacagagagaaggaacacaaaggaacataaacgaaccagaagcgggagacaacagcacaagatacatgcagccaccatctatgagaagcgaaggacgggccctacccttgcagtcaaggccgctcgaatagagcgaagaagcagccgcagacggagcacagacatgcggagagacaacgagcgactccaaacaagagaggcgagagaacaagcaagcgaggagcgcgcccaatgacgggaactacta

SEQ ID NO: 290061 - DNA, 1379 bp, Homo sapiens
  misc_feature (192)..(192): n is a, c, g, or t
  misc_feature (263)..(264): n is a, c, g, or t
  misc_feature (1257)..(1257): n is a, c, g, or t
  misc_feature (1266)..(1266): n is a, c, g, or t
agcgggcaccgaggcgcggagcgcggcgcacggcggtgcccaggccgcgggcgggcaggcgggagcgcggtgggtggccggccttggacgggtatggcggaccggcggcgcgcgtggaacaccgaggacgacctgcccgtgtacctggcgcggccgggcagcgcggcgcagaccccgcgccagaagtacggnggcatgttcgccgcggtggagggcgcctacgagaacaagaccatcgacttcgacgcctacagtgtgggccnncgcggctcggcgcacacgccgcgcagcgctggccggcccgacgcggtcgggctgccagggccgggaggcagcgaggacacggccagcgacgtgagcgagccctcgggctccgcggtcagctctcccggagagcgcgacgagcggccgccgacgctgcgcatccgccgccccgcgccccgcgacctgcccctcggccgggacaatggccagagtgaccgactcctcatcaaaggtggacggatcatcaacgatgaccaatccctttatgctgacgtctacctggaggatggacttatcaaacaaataggagagaacttaatcgttcctggtggagtgaagaccattgaagccaacgggcggatggttattcccggaggtattgatgtcaacacgtacctgcagaagccctcccaggggatgactgcggctgatgacttcttccaagggaccagggcggcactggtgggcgggaccacgatgatcattgaccatgttgttcctgaacctgggtccagcctactgacctctttcgagaagtggcacgaagcagctgacaccaaatcctgctgtgattactccctccacgtggacatcacaagctggtacgatggcgttcgggaggagctggaggtgctggtgcaggacaaaggcgtcaattccttccaagtctacatggcctataaggatgtctaccaaatgtccgacagccagctctatgaagcctttaccttccttaagggcctgggagctgtgatcttggtccatgcagaaaatggagatttgatagctcaggaacaaaagcggatcctggagatgggcatcacgggtcccgagggccatgccctgagcagacctgaagagctggaggccgaggcggtgttccgggccatcaccattgcgggccggatcaactgccctgtgtacatcaccaaggtcatgagcaagagtgcagccgacatcatcgctctggccaggaagaaaggccctagtttngggaagccnttgcgccagctgggccggtggcccattatggccaaactggcaggttggggtcgggattccttccttgaccggctaccgccgattgctctcttggcggggtttggcctagcggc

SEQ ID NO: 290062 - DNA, 536 bp, Homo sapiens
atcacctttttcaggaatgtcggattttactggggattttgacaagaacaccacaaggtggtcagggctgaaggtggggggagcccagggactgaggggcacagaagagggagcagtggactctgtggaggccagggaggcttcccatggctggtcctggactgagccctgaatgaaggtgggtccagtggagtgcatggcagagtacatggcctccaggagcagcgtggaactgatgctaacagatcccatccagcagcgattggcgctctctttcaggtgcccagatagatgacaacaatcccaggcgcaccggccaccgcatcgtggcgccccctggtggccgctccaacatcaccagcctcggttgaacgtggattccatgcagtgtggtgcagtggattctgattgaatgcagtggattccatgcagcctgtgttgaatgcagtgtatgccatacagcgcgaagaaatggaaccctatcgaatgcaatggattttactgcggcatgattgatcgcagtggatgtacatgca

SEQ ID NO: 290063 - DNA, 161 bp, Homo sapiens
agaacatacatgaagatgggcccgttgctgctgccttgtctgggactcaggggtcctttccgggggtgggtaggtggtagtgtcaggcaaagtgacttctctttggaagggatttggggtcctcctgcagttggccactcacgccaacgggatcctctaga

SEQ ID NO: 290064 - DNA, 3131 bp, Homo sapiens
  misc_feature (192)..(192): n is a, c, g, or t
  misc_feature (263)..(264): n is a, c, g, or t
agcgggcaccgaggcgcggagcgcggcgcacggcggtgcccaggccgcgggcgggcaggcgggagcgcggtgggtggccggccttggacgggtatggcggaccggcggcgcgcgtggaacaccgaggacgacctgcccgtgtacctggcgcggccgggcagcgcggcgcagaccccgcgccagaagtacggnggcatgttcgccgcggtggagggcgcctacgagaacaagaccatcgacttcgacgcctacagtgtgggccnncgcggctcggcgcacacgccgcgcagcgctggccggcccgacgcggtcgggctgccagggccgggaggcagcgaggacacggccagcgacgtgagcgagccctcgggctccgcggtcagctctcccggagagcgcgacgagcggccgccgacgctgcgcatccgccgccccgcgccccgcgacctgcccctcggccgggacaatggccagagtgaccgactcctcatcaaaggtggacggatcatcaacgatgaccaatccctttatgctgacgtctacctggaggatggacttatcaaacaaataggagagaacttaatcgttcctggtggagtgaagaccattgaagccaacgggcggatggttattcccggaggtattgatgtcaacacgtacctgcagaagccctcccaggggatgactgcggctgatgacttcttccaagggaccagggcggcactggtgggcgggaccacgatgatcattgaccatgttgttcctgaacctgggtccagcctactgacctctttcgagaagtggcacgaagcagctgacaccaaatcctgctgtgattactccctccacgtggacatcacaagctggtacgatggcgttcgggaggagctggaggtgctggtgcaggacaaaggcgtcaattccttccaagtctacatggcctataaggatgtctaccaaatgtccgacagccagctctatgaagcctttaccttccttaagggcctgggagctgtgatcttggtccatgcagaaaatggagatttgatagctcaggaacaaaagcggatcctggagatgggcatcacgggtcccgagggccatgccctgagcagacctgaagagctggaggccgaggcggtgttccgggccatcaccattgcgggccggatcaactgccctgtgtacatcaccaaggtcatgagcaagagtgcagccgacatcatcgctctggccaggaagaaagggcccctagtttttggagagcccattgccgccagcctggggaccgatggcacccattactggagcaagaactgggccaaggctgcggcgttcgtgacttcccctcccctgagcccggaccctaccacgcccgactacttgacctccctactggcctgtggggacttgcaggtcacaggcagcggccactgtccctacagcactgcccagaaggcggtgggcaaggacaactttaccctgatccccgagggtgtcaacgggatagaggagcggatgacggtcgtctgggacaaggcggtggctactggcaaaatggatgagaaccagtttgtcgctgtcaccagcaccaatgcagccaagatctttaacctgtacccaaggaaagggcggattgccgtgggctcggatgccgacgtggtcatctgggaccccgacaagttgaagaccataacagccaaaagtcacaagtcggcggtggagtacaacatcttcgagggtatggagtgccacggctccccactagtggtcatcagccagggcaagatcgtctttgaagacggaaacatcaacgtcaacaagggcatgggccgcttcattccgcggaaggcgttcccggagcacctgtaccagcgcgtcaaaatcaggaataaggtttttggattgcaaggggtttccaggggcatgtatgacggtcctgtgtacgaggtaccagctacacccaaatatgcaactcccgctccttcagccaaatcttcgccttctaaacaccagcccccacccatcagaaacctccaccagtccaacttcagcttatcaggtgcccagatagatgacaacaatcccaggcgcaccggccaccgcatcgtggcgccccctggtggccgctccaacatcaccagcctcggttgaacgtggatgcgcggaggagctagcctgaaggattctgggaatcatgtccatcccttttcctgtcagtgtttttgaaacccacagttttagttggtgctgatggagggagggggaagtcgaaggatgctctttcccttttctgtttaggaagaagtggtactagtgtggtgtgtttgcttggaaattccttgccccacagttgtgttcatgctgaatccacctcggagcatggtgttttcattcccccttcctagtgaaccacaggttttagcattgtcttgttctgtcccttccacttctaactccactggctccatgattctctgagtggtggttcctttgcaccctgtagatgttctaggatagttgatgcatgttactaaattacgtatgcaagtctgtgagtgcgtctgaggggacatcgccaaggactgactgagacacgatgccgagacctcaagccctgaggggcagtcccaaaacccttacagtgaagatgtttactcattgcccccacctctggtccacactagaaagaagctcgccccacctccacctgtgagatccgtgaattctcggaatggcaggggaagccttgcactaggttgcagagaagcatcctccacatcctgtgtcagaaaccctggtctccgtggcacttgtaactcaccgtgctgtcttctggtctgtgtgtgttcttcaagccagctctaggcttcaggccgagccaggttcacactcagaaagaggtctccccatccccattcggggctgacgatggggggctgatggctgcccctgcgtggcctgagtcctggtccctctgaggcagttgacggggcagtcagatttttaaagttttgtacaaagttttcctttgtaatcactcccatttttacttaacaaccaacttgttgtggctcttatttctgaattcaaagcttgtgaaaaaataaagaaaatgaactgcccactga

SEQ ID NO: 290065 - DNA, 3256 bp, Homo sapiens
ctcagatctccagactgaccccagggaacgccctggtacggggaacctaggacttaacaactccaaggaagggagtgtaggagttggggagggacagtgtccccatctgcaatttccggtcattgacagggattttaggccccgctgagagccagggatgcatgaatgcgtggagggaaatgagttgtaaacagagtgtaggggaacctggcatctccatgctgctttgctgcagctaatatgttttgcacccggggtacatcattttacctctgtaagcctcaatttcctgtctgtaaaatgggaaaattatgcctagtgttcctgggatactgagctggcttctctgtgaagctaaaacctcacctctattttaaggcccaggtgtctctggcctcctgccctggattaggggactggcccctggggtggtgaaggtcagggccccagcccccaaccacagtgctgggggagctgtaccaagcctaggccaccctcgctctggatggcaacttgaaagcagaaaagatgagtagtttcataggacctgtggggttggatttcgcatgcagaaaatgaacaacgaagtggtggacaagagtgaccgactcctcatcaaaggtggacggatcatcaacgatgaccaatccctttatgctgacgtctacctggaggatggacttatcaaacaaataggagagaacttaatcgttcctggtggagtgaagaccattgaagccaacgggcggatggttattcccggaggtattgatgtcaacacgtacctgcagaagccctcccaggggatgactgcggctgatgacttcttccaagggaccagggcggcactggtgggcgggaccacgatgatcattgaccatgttgttcctgaacctgggtccagcctactgacctctttcgagaagtggcacgaagcagctgacaccaaatcctgctgtgattactccctccacgtggacatcacaagctggtacgatggcgttcgggaggagctggaggtgctggtgcaggacaaaggcgtcaattccttccaagtctacatggcctataaggatgtctaccaaatgtccgacagccagctctatgaagcctttaccttccttaagggcctgggagctgtgatcttggtccatgcagaaaatggagatttgatagctcaggaacaaaagcggatcctggagatgggcatcacgggtcccgagggccatgccctgagcagacctgaagagctggaggccgaggcggtgttccgggccatcaccattgcgggccggatcaactgccctgtgtacatcaccaaggtcatgagcaagagtgcagccgacatcatcgctctggccaggaagaaagggcccctagtttttggagagcccattgccgccagcctggggaccgatggcacccattactggagcaagaactgggccaaggctgcggcgttcgtgacttcccctcccctgagcccggaccctaccacgcccgactacttgacctccctactggcctgtggggacttgcaggtcacaggcagcggccactgtccctacagcactgcccagaaggcggtgggcaaggacaactttaccctgatccccgagggtgtcaacgggatagaggagcggatgacggtcgtctgggacaaggcggtggctactggcaaaatggatgagaaccagtttgtcgctgtcaccagcaccaatgcagccaagatctttaacctgtacccaaggaaagggcggattgccgtgggctcggatgccgacgtggtcatctgggaccccgacaagttgaagaccataacagccaaaagtcacaagtcggcggtggagtacaacatcttcgagggtatggagtgccacggctccccactagtggtcatcagccagggcaagatcgtctttgaagacggaaacatcaacgtcaacaagggcatgggccgcttcattccgcggaaggcgttcccggagcacctgtaccagcgcgtcaaaatcaggaataaggtttttggattgcaaggggtttccaggggcatgtatgacggtcctgtgtacgaggtaccagctacacccaaatatgcaactcccgctccttcagccaaatcttcgccttctaaacaccagcccccacccatcagaaacctccaccagtccaacttcagcttatcaggtgcccagatagatgacaacaatcccaggcgcaccggccaccgcatcgtggcgccccctggtggccgctccaacatcaccagcctcggttgaacgtggatgcgcggaggagctagcctgaaggattctgggaatcatgtccatcccttttcctgtcagtgtttttgaaacccacagttttagttggtgctgatggagggagggggaagtcgaaggatgctctttcccttttctgtttaggaagaagtggtactagtgtggtgtgtttgcttggaaattccttgccccacagttgtgttcatgctgaatccacctcggagcatggtgttttcattcccccttcctagtgaaccacaggttttagcattgtcttgttctgtcccttccacttctaactccactggctccatgattctctgagtggtggttcctttgcaccctgtagatgttctaggatagttgatgcatgttactaaattacgtatgcaagtctgtgagtgcgtctgaggggacatcgccaaggactgactgagacacgatgccgagacctcaagccctgaggggcagtcccaaaacccttacagtgaagatgtttactcattgcccccacctctggtccacactagaaagaagctcgccccacctccacctgtgagatccgtgaattctcggaatggcaggggaagccttgcactaggttgcagagaagcatcctccacatcctgtgtcagaaaccctggtctccgtggcacttgtaactcaccgtgctgtcttctggtctgtgtgtgttcttcaagccagctctaggcttcaggccgagccaggttcacactcagaaagaggtctccccatccccattcggggctgacgatggggggctgatggctgcccctgcgtggcctgagtcctggtccctctgaggcagttgacggggcagtcagatttttaaagttttgtacaaagttttcctttgtaatcactcccatttttacttaacaaccaacttgttgtggctcttatttctgaattcaaagcttgtgaaaaaataaagaaaatgaactgcccactga

SEQ ID NO: 290066 - DNA, 2688 bp, Homo sapiens
ctaggtgagccgggggtgaatcggacgagggagtgaccgactcctcatcaaaggtggacggatcatcaacgatgaccaatccctttatgctgacgtctacctggaggatggacttatcaaacaaataggagagaacttaatcgttcctggtggagtgaagaccattgaagccaacgggcggatggttattcccggaggtattgatgtcaacacgtacctgcagaagccctcccaggggatgactgcggctgatgacttcttccaagggaccagggcggcactggtgggcgggaccacgatgatcattgaccatgttgttcctgaacctgggtccagcctactgacctctttcgagaagtggcacgaagcagctgacaccaaatcctgctgtgattactccctccacgtggacatcacaagctggtacgatggcgttcgggaggagctggaggtgctggtgcaggacaaaggcgtcaattccttccaagtctacatggcctataaggatgtctaccaaatgtccgacagccagctctatgaagcctttaccttccttaagggcctgggagctgtgatcttggtccatgcagaaaatggagatttgatagctcaggaacaaaagcggatcctggagatgggcatcacgggtcccgagggccatgccctgagcagacctgaagagctggaggccgaggcggtgttccgggccatcaccattgcgggccggatcaactgccctgtgtacatcaccaaggtcatgagcaagagtgcagccgacatcatcgctctggccaggaagaaagggcccctagtttttggagagcccattgccgccagcctggggaccgatggcacccattactggagcaagaactgggccaaggctgcggcgttcgtgacttcccctcccctgagcccggaccctaccacgcccgactacttgacctccctactggcctgtggggacttgcaggtcacaggcagcggccactgtccctacagcactgcccagaaggcggtgggcaaggacaactttaccctgatccccgagggtgtcaacgggatagaggagcggatgacggtcgtctgggacaaggcggtggctactggcaaaatggatgagaaccagtttgtcgctgtcaccagcaccaatgcagccaagatctttaacctgtacccaaggaaagggcggattgccgtgggctcggatgccgacgtggtcatctgggaccccgacaagttgaagaccataacagccaaaagtcacaagtcggcggtggagtacaacatcttcgagggtatggagtgccacggctccccactagtggtcatcagccagggcaagatcgtctttgaagacggaaacatcaacgtcaacaagggcatgggccgcttcattccgcggaaggcgttcccggagcacctgtaccagcgcgtcaaaatcaggaataaggtttttggattgcaaggggtttccaggggcatgtatgacggtcctgtgtacgaggtaccagctacacccaaatatgcaactcccgctccttcagccaaatcttcgccttctaaacaccagcccccacccatcagaaacctccaccagtccaacttcagcttatcaggtgcccagatagatgacaacaatcccaggcgcaccggccaccgcatcgtggcgccccctggtggccgctccaacatcaccagcctcggttgaacgtggatgcgcggaggagctagcctgaaggattctgggaatcatgtccatcccttttcctgtcagtgtttttgaaacccacagttttagttggtgctgatggagggagggggaagtcgaaggatgctctttcccttttctgtttaggaagaagtggtactagtgtggtgtgtttgcttggaaattccttgccccacagttgtgttcatgctgaatccacctcggagcatggtgttttcattcccccttcctagtgaaccacaggttttagcattgtcttgttctgtcccttccacttctaactccactggctccatgattctctgagtggtggttcctttgcaccctgtagatgttctaggatagttgatgcatgttactaaattacgtatgcaagtctgtgagtgcgtctgaggggacatcgccaaggactgactgagacacgatgccgagacctcaagccctgaggggcagtcccaaaacccttacagtgaagatgtttactcattgcccccacctctggtccacactagaaagaagctcgccccacctccacctgtgagatccgtgaattctcggaatggcaggggaagccttgcactaggttgcagagaagcatcctccacatcctgtgtcagaaaccctggtctccgtggcacttgtaactcaccgtgctgtcttctggtctgtgtgtgttcttcaagccagctctaggcttcaggccgagccaggttcacactcagaaagaggtctccccatccccattcggggctgacgatggggggctgatggctgcccctgcgtggcctgagtcctggtccctctgaggcagttgacggggcagtcagatttttaaagttttgtacaaagttttcctttgtaatcactcccatttttacttaacaaccaacttgttgtggctcttatttctgaattcaaagcttgtgaaaaaataaagaaaatgaactgcccactga

SEQ ID NO: 290067 - DNA, 3072 bp, Homo sapiens
agatcggaagggaagcgcttcctggttcgagccgagaggggcgaatccggcttcgctccgcgccgccgggaggagctgtctgcagccccctcctcccgccctcgcctctccctcctccttctcccgccctcctcgccgatccgggcggtgctggcagccggagcggcggcgggcgggccgagcagccggggcagccgcgcgtgggcatccacgggcgccgagcctccgtccgtgtctctatccctcccgggcctttgtcagcgcgcccgctgggagcggggccgagagcgccggttccagtcagacagccccgcaggtcagcggccgggccgagggcgccagagggggccatgtcgtaccagggcaagaagagcatcccgcacatcacgagtgaccgactcctcatcaaaggtggacggatcatcaacgatgaccaatccctttatgctgacgtctacctggaggatggacttatcaaacaaataggagagaacttaatcgttcctggtggagtgaagaccattgaagccaacgggcggatggttattcccggaggtattgatgtcaacacgtacctgcagaagccctcccaggggatgactgcggctgatgacttcttccaagggaccagggcggcactggtgggcgggaccacgatgatcattgaccatgttgttcctgaacctgggtccagcctactgacctctttcgagaagtggcacgaagcagctgacaccaaatcctgctgtgattactccctccacgtggacatcacaagctggtacgatggcgttcgggaggagctggaggtgctggtgcaggacaaaggcgtcaattccttccaagtctacatggcctataaggatgtctaccaaatgtccgacagccagctctatgaagcctttaccttccttaagggcctgggagctgtgatcttggtccatgcagaaaatggagatttgatagctcaggaacaaaagcggatcctggagatgggcatcacgggtcccgagggccatgccctgagcagacctgaagagctggaggccgaggcggtgttccgggccatcaccattgcgggccggatcaactgccctgtgtacatcaccaaggtcatgagcaagagtgcagccgacatcatcgctctggccaggaagaaagggcccctagtttttggagagcccattgccgccagcctggggaccgatggcacccattactggagcaagaactgggccaaggctgcggcgttcgtgacttcccctcccctgagcccggaccctaccacgcccgactacttgacctccctactggcctgtggggacttgcaggtcacaggcagcggccactgtccctacagcactgcccagaaggcggtgggcaaggacaactttaccctgatccccgagggtgtcaacgggatagaggagcggatgacggtcgtctgggacaaggcggtggctactggcaaaatggatgagaaccagtttgtcgctgtcaccagcaccaatgcagccaagatctttaacctgtacccaaggaaagggcggattgccgtgggctcggatgccgacgtggtcatctgggaccccgacaagttgaagaccataacagccaaaagtcacaagtcggcggtggagtacaacatcttcgagggtatggagtgccacggctccccactagtggtcatcagccagggcaagatcgtctttgaagacggaaacatcaacgtcaacaagggcatgggccgcttcattccgcggaaggcgttcccggagcacctgtaccagcgcgtcaaaatcaggaataaggtttttggattgcaaggggtttccaggggcatgtatgacggtcctgtgtacgaggtaccagctacacccaaatatgcaactcccgctccttcagccaaatcttcgccttctaaacaccagcccccacccatcagaaacctccaccagtccaacttcagcttatcaggtgcccagatagatgacaacaatcccaggcgcaccggccaccgcatcgtggcgccccctggtggccgctccaacatcaccagcctcggttgaacgtggatgcgcggaggagctagcctgaaggattctgggaatcatgtccatcccttttcctgtcagtgtttttgaaacccacagttttagttggtgctgatggagggagggggaagtcgaaggatgctctttcccttttctgtttaggaagaagtggtactagtgtggtgtgtttgcttggaaattccttgccccacagttgtgttcatgctgaatccacctcggagcatggtgttttcattcccccttcctagtgaaccacaggttttagcattgtcttgttctgtcccttccacttctaactccactggctccatgattctctgagtggtggttcctttgcaccctgtagatgttctaggatagttgatgcatgttactaaattacgtatgcaagtctgtgagtgcgtctgaggggacatcgccaaggactgactgagacacgatgccgagacctcaagccctgaggggcagtcccaaaacccttacagtgaagatgtttactcattgcccccacctctggtccacactagaaagaagctcgccccacctccacctgtgagatccgtgaattctcggaatggcaggggaagccttgcactaggttgcagagaagcatcctccacatcctgtgtcagaaaccctggtctccgtggcacttgtaactcaccgtgctgtcttctggtctgtgtgtgttcttcaagccagctctaggcttcaggccgagccaggttcacactcagaaagaggtctccccatccccattcggggctgacgatggggggctgatggctgcccctgcgtggcctgagtcctggtccctctgaggcagttgacggggcagtcagatttttaaagttttgtacaaagttttcctttgtaatcactcccatttttacttaacaaccaacttgttgtggctcttatttctgaattcaaagcttgtgaaaaaataaagaaaatgaactgcccactgaaaaaaaaacacaccacacaaacaaag

SEQ ID NO: 290068 - DNA, 3411 bp, Homo sapiens
agatcggaagggaagcgcttcctggttcgagccgagaggggcgaatccggcttcgctccgcgccgccgggaggagctgtctgcagccccctcctcccgccctcgcctctccctcctccttctcccgccctcctcgccgatccgggcggtgctggcagccggagcggcggcgggcgggccgagcagccggggcagccgcgcgtgggcatccacgggcgccgagcctccgtccgtgtctctatccctcccgggcctttgtcagcgcgcccgctgggagcggggccgagagcgccggttccagtcagacagccccgcaggtcagcggccgggccgagggcgccagagggggccatgtcgtaccagggcaagaagagcatcccgcacatcacgagtgaccgactcctcatcaaaggtggacggatcatcaacgatgaccaatccctttatgctgacgtctacctggaggatggacttatcaaacaaataggagagaacttaatcgttcctggtggagtgaagaccattgaagccaacgggcggatggttattcccggaggtattgatgtcaacacgtacctgcagaagccctcccaggggatgactgcggctgatgacttcttccaagggaccagggcggcactggtgggcgggaccacgatgatcattgaccatgttgttcctgaacctgggtccagcctactgacctctttcgagaagtggcacgaagcagctgacaccaaatcctgctgtgattactccctccacgtggacatcacaagctggtacgatggcgttcgggaggagctggaggtgctggtgcaggacaaaggcgtcaattccttccaagtctacatggcctataaggatgtctaccaaatgtccgacagccagctctatgaagcctttaccttccttaagggcctgggagctgtgatcttggtccatgcagaaaatggagatttgatagctcaggaacaaaagcggatcctggagatgggcatcacgggtcccgagggccatgccctgagcagacctgaagagctggaggccgaggcggtgttccgggccatcaccattgcgggccggatcaactgccctgtgtacatcaccaaggtcatgagcaagagtgcagccgacatcatcgctctggccaggaagaaagggcccctagtttttggagagcccattgccgccagcctggggaccgatggcacccattactggagcaagaactgggccaaggctgcggcgttcgtgacttcccctcccctgagcccggaccctaccacgcccgactacttgacctccctactggcctgtggggacttgcaggtcacaggcagcggccactgtccctacagcactgcccagaaggcggtgggcaaggacaactttaccctgatccccgagggtgtcaacgggatagaggagcggatgacggtcgtctgggacaaggcggtggctactggcaaaatggatgagaaccagtttgtcgctgtcaccagcaccaatgcagccaagatctttaacctgtacccaaggaaagggcggattgccgtgggctcggatgccgacgtggtcatctgggaccccgacaagttgaagaccataacagccaaaagtcacaagtcggcggtggagtacaacatcttcgagggtatggagtgccacggctccccactagtggtcatcagccagggcaagatcgtctttgaagacggaaacatcaacgtcaacaagggcatgggccgcttcattccgcggaaggcgttcccggagcacctgtaccagcgcgtcaaaatcaggaataaggtttttggattgcaaggggtttccaggggcatgtatgacggtcctgtgtacgaggtaccagctacacccaaatatgcaactcccgctccttcagccaaatcttcgccttctaaacaccagcccccacccatcagaaacctccaccagtccaacttcagcttatcaggtgcccagatagatgacaacaatcccaggcgcaccggccaccgcatcgtggcgccccctggtggccgctccaacatcaccagcctcggttgaacgtggatgcgcggaggagctagcctgaaggattctgggaatcatgtccatcccttttcctgtcagtgtttttgaaacccacagttttagttggtgctgatggagggagggggaagtcgaaggatgctctttcccttttctgtttaggaagaagtggtactagtgtggtgtgtttgcttggaaattccttgccccacagttgtgttcatgctgaatccacctcggagcatggtgttttcattcccccttcctagtgaaccacaggttttagcattgtcttgttctgtcccttccacttctaactccactggctccatgattctctgagtggtggttcctttgcaccctgtagatgttctaggatagttgatgcatgttactaaattacgtatgcaagtctgtgagtgcgtctgaggggacatcgccaaggactgactgagacacgatgccgagacctcaagccctgaggggcagtcccaaaacccttacagtgaagatgtttactcattgcccccacctctggtccacactagaaagaagctcgccccacctccacctgtgagatccgtgaattctcggaatggcaggggaagccttgcactaggttgcagagaagcatcctccacatcctgtgtcagaaaccctggtctccgtggcacttgtaactcaccgtgctgtcttctggtctgtgtgtgttcttcaagccagctctaggcttcaggccgagccaggttcacactcagaaagaggtctccccatccccattcggggctgacgatggggggctgatggctgcccctgcgtggcctgagtcctggtccctctgaggcagttgacggggcagtcagatttttaaagttttgtacaaagttttcctttgtaatcactcccatttttacttaacaaccaacttgttgtggctcttatttctgaattcaaagcttgtgaaaaaataaagaaaatgaactgcccactgacctgactagggcactttcatttcagtggtggtgtctggattgggtacgaatgcttggcagtccccccgcgtgataacgaatggtggtggctgcttcctgaggactcactcttggtagagactggtggatgtgggggtgggaggagagattcagttcatgacttctgaaggctgagttcctgagacccaaggaggcgaagagagggaagacggctgatgggcgggcttccacaaaataggctcaaatcttgcattgattccctcctgttgggcctttcctggctctctttcttcttgtattgtatggatcagcctcagactggaagctccaatctcctaaacttcacatttcttccttccatttcc

SEQ ID NO: 290069 - DNA, 3408 bp, Homo sapiens
agatcggaagggaagcgcttcctggttcgagccgagaggggcgaatccggcttcgctccgcgccgccgggaggagctgtctgcagccccctcctcccgccctcgcctctccctcctccttctcccgccctcctcgccgatccgggcggtgctggcagccggagcggcggcgggcgggccgagcagccggggcagccgcgcgtgggcatccacgggcgccgagcctccgtccgtgtctctatccctcccgggcctttgtcagcgcgcccgctgggagcggggccgagagcgccggttccagtcagacagccccgcaggtcagcggccgggccgagggcgccagagggggccatgtcgtaccagggcaagaagagcatcccgcacatcacgagtgaccgactcctcatcaaaggtggacggatcatcaacgatgaccaatccctttatgctgacgtctacctggaggatggacttatcaaacaaataggagagaacttaatcgttcctggtggagtgaagaccattgaagccaacgggcggatggttattcccggaggtattgatgtcaacacgtacctgcagaagccctcccaggggatgactgcggctgatgacttcttccaagggaccagggcggcactggtgggcgggaccacgatgatcattgaccatgttgttcctgaacctgggtccagcctactgacctctttcgagaagtggcacgaagcagctgacaccaaatcctgctgtgattactccctccacgtggacatcacaagctggtacgatggcgttcgggaggagctggaggtgctggtgcaggacaaaggcgtcaattccttccaagtctacatggcctataaggatgtctaccaaatgtccgacagccagctctatgaagcctttaccttccttaagggcctgggagctgtgatcttggtccatgcagaaaatggagatttgatagctcaggaacaaaagcggatcctggagatgggcatcacgggtcccgagggccatgccctgagcagacctgaagagctggaggccgaggcggtgttccgggccatcaccattgcgggccggatcaactgccctgtgtacatcaccaaggtcatgagcaagagtgcagccgacatcatcgctctggccaggaagaaagggcccctagtttttggagagcccattgccgccagcctggggaccgatggcacccattactggagcaagaactgggccaaggctgcggcgttcgtgacttcccctcccctgagcccggaccctaccacgcccgactacttgacctccctactggcctgtggggacttgcaggtcacaggcagcggccactgtccctacagcactgcccagaaggcggtgggcaaggacaactttaccctgatccccgagggtgtcaacgggatagaggagcggatgacggtcgtctgggacaaggcggtggctactggcaaaatggatgagaaccagtttgtcgctgtcaccagcaccaatgcagccaagatctttaacctgtacccaaggaaagggcggattgccgtgggctcggatgccgacgtggtcatctgggaccccgacaagttgaagaccataacagccaaaagtcacaagtcggcggtggagtacaacatcttcgagggtatggagtgccacggctccccactagtggtcatcagccagggcaagatcgtctttgaagacggaaacatcaacgtcaacaagggcatgggccgcttcattccgcggaaggcgttcccggagcacctgtaccagcgcgtcaaaatcaggaataaggtttttggattgcaaggggtttccaggggcatgtatgacggtcctgtgtacgaggtaccagctacacccaaatatgcaactcccgctccttcagccaaatcttcgccttctaaacaccagcccccacccatcagaaacctccaccagtccaacttcagcttatcaggtgcccagatagatgacaacaatcccaggcgcaccggccaccgcatcgtggcgccccctggtggccgctccaacatcaccagcctcggttgaacgtggatgcgcggaggagctagcctgaaggattctgggaatcatgtccatcccttttcctgtcagtgtttttgaaacccacagttttagttggtgctgatggagggagggggaagtcgaaggatgctctttcccttttctgtttaggaagaagtggtactagtgtggtgtgtttgcttggaaattccttgccccacagttgtgttcatgctgaatccacctcggagcatggtgttttcattcccccttcctagtgaaccacaggttttagcattgtcttgttctgtcccttccacttctaactccactggctccatgattctctgagtggtggttcctttgcaccctgtagatgttctaggatagttgatgcatgttactaaattacgtatgcaagtctgtgagtgcgtctgaggggacatcgccaaggactgactgagacacgatgccgagacctcaagccctgaggggcagtcccaaaacccttacagtgaagatgtttactcattgcccccacctctggtccacactagaaagaagctcgccccacctccacctgtgagatccgtgaattctcggaatggcaggggaagccttgcactaggttgcagagaagcatcctccacatcctgtgtcagaaaccctggtctccgtggcacttgtaactcaccgtgctgtcttctggtctgtgtgtgttcttcaagccagctctaggcttcaggccgagccaggttcacactcagaaagaggtctccccatccccattcggggctgacgatggggggctgatggctgcccctgcgtggcctgagtcctggtccctctgaggcagttgacggggcagtcagatttttaaagttttgtacaaagttttcctttgtaatcactcccatttttacttaacaaccaacttgttgtggctcttatttctgaattcaaagcttgtgaaaaaataaagaaaatgaactgcccactgaaaaaaaaaaaaaaaaaaaaaaaaaaaaaaaaaaaaaaaaaaaaaaaaaaaaaaaaaaaaaaaaaaaaaaagggcgggcgcgccgcgcccataaaaaatcctcttcccgcggcggggcgcgccacttaccgtccttcccgcccccccggttgtttggtgaaaaaggggcggccccccttacgatggggtggctattctatttcctcccgcgcctgccgcggcgcgcgggcgcttaatacacatccggtctgcggtgcgggactgcacttcctcctcttctcttcctcgttcttctcgggcggcgagcgcccctctcctcctccgtgcggcgcgcactttgtcgggcgccttctcccccctggg

SEQ ID NO: 290070 - DNA, 2570 bp, Homo sapiens
agatcggaagggaagcgcttcctggttcgagccgagaggggcgaatccggcttcgctccgcgccgccgggaggagctgtctgcagccccctcctcccgccctcgcctctccctcctccttctcccgccctcctcgccgatccgggcggtgctggcagccggagcggcggcgggcgggccgagcagccggggcagccgcgcgtgggcatccacgggcgccgagcctccgtccgtgtctctatccctcccgggcctttgtcagcgcgcccgctgggagcggggccgagagcgccggttccagtcagacagccccgcaggtcagcggccgggccgagggcgccagagggggccatgtcgtaccagggcaagaagagcatcccgcacatcacgagtgaccgactcctcatcaaaggtggacggatcatcaacgatgaccaatccctttatgctgacgtctacctggaggatggacttatcaaacaaataggagagaacttaatcgttcctggtggagtgaagaccattgaagccaacgggcggatggttattcccggaggtattgatgtcaacacgtacctgcagaagccctcccaggggatgactgcggctgatgacttcttccaagggaccagggcggcactggtgggcgggaccacgatgatcattgaccatgttgttcctgaacctgggtccagcctactgacctctttcgagaagtggcacgaagcagctgacaccaaatcctgctgtgattactccctccacgtggacatcacaagctggtacgatggcgttcgggaggagctggaggtgctggtgcaggacaaaggcgtcaattccttccaagtctacatggcctataaggatgtctaccaaatgtccgacagccagctctatgaagcctttaccttccttaagggcctgggagctgtgatcttggtccatgcagaaaatggagatttgatagctcaggaacaaaagcggatcctggagatgggcatcacgggtcccgagggccatgccctgagcagacctgaagagctggaggccgaggcggtgttccgggccatcaccattgcgggccggatcaactgccctgtgtacatcaccaaggtcatgagcaagagtgcagccgacatcatcgctctggccaggaagaaagggcccctagtttttggagagcccattgccgccagcctggggaccgatggcacccattactggagcaagaactgggccaaggctgcggcgttcgtgacttcccctcccctgagcccggaccctaccacgcccgactacttgacctccctactggcctgtggggacttgcaggtcacaggcagcggccactgtccctacagcactgcccagaaggcggtgggcaaggacaactttaccctgatccccgagggtgtcaacgggatagaggagcggatgacggtcgtctgggacaaggcggtggctactggcaaaatggatgagaaccagtttgtcgctgtcaccagcaccaatgcagccaagatctttaacctgtacccaaggaaagggcggattgccgtgggctcggatgccgacgtggtcatctgggaccccgacaagttgaagaccataacagccaaaagtcacaagtcggcggtggagtacaacatcttcgagggtatggagtgccacggctccccactagtggtcatcagccagggcaagatcgtctttgaagacggaaacatcaacgtcaacaagggcatgggccgcttcattccgcggaaggcgttcccggagcacctgtaccagcgcgtcaaaatcaggaataaggtttttggattgcaaggggtttccaggggcatgtatgacggtcctgtgtacgaggtaccagctacacccaaatatgcaactcccgctccttcagccaaatcttcgccttctaaacaccagcccccacccatcagaaacctccaccagtccaacttcagcttatcaggtgcccagatagatgacaacaatcccaggcgcaccggccaccgcatcgtggcgccccctggtggccgctccaacatcaccagcctcggttgaacgtggatgcgcggaggagctagcctgaaggattctgggaatcatgtccatcccttttcctgtcagtgtttttgaaacccacagttttagttggtgctgatggagggagggggaagtcgaaggatgctctttcccttttctgtttaggaagaagtggtactagtgtggtgtgtttgcttggaaattccttgccccacagttgtgttcatgctgaatccacctcggagcatggtgttttcattcccccttcctagtgaaccacaggttttagcattgtcttgttctgtcccttccacttctaactccactggctccatgattctctgagtggtggttcctttgcaccctgtagatgttctaggatagttgatgcatgttactaaattacgtatgcaagtctgtgagtgcgtctgaggggacatcgccaaggactgactgagacacgatgccgagacctcagcctgtcggctagtcgggtaagatcctgtagagtcacttcgc

SEQ ID NO: 290071 - DNA, 1861 bp, Homo sapiens
agaacatacatgaagatgggcccgttgctgctgccttgtctgggactcaggggtcctttccgggggtgggtaggtggtagtgtcaggcaaagtgacttctctttggaagggatttggggtcctcctgcatgaagctttgtgtgtatgagtatgcgtgtgtgtaagtgtatatatgggtgtgcatacctgtatgagtgtgtgtgtgggcatgtatgcatgtgtatacatatgtgagtatgcctttgtgaagatctgtatgtgatttaagtgtgtgtgcgtgttcacgcgtgtatgctactgtgtaggcctgttttgttactgcatgtgcatgcatatatgtgtgcatgactgcatgtatgtgagtgcgtgtgcgtggtgtgtgcgtctgtatgtgtatgcatgtgggtatgtagatgtgtgtgtatgcatgcttgtgtgtatgaatgcctgtgtgcggctgcatgtgtgtgaagtgcacctgtcgtgtgtgcgtgttgtgtgtgtgtgtgcatgcacatttgaagtgacctcaggtttctctctcgcccgcagggctctgctttatctgcccagaagggcacacatgcacagtgtcgatcaatcacactctcccttcctctgtttaggtttttggattgcaaggggtttccaggggcatgtatgacggtcctgtgtacgaggtaccagctacacccaaatatgcaactcccgctccttcagccaaatcttcgccttctaaacaccagcccccacccatcagaaacctccaccagtccaacttcagcttatcaggtgcccagatagatgacaacaatcccaggcgcaccggccaccgcatcgtggcgccccctggtggccgctccaacatcaccagcctcggttgaacgtggatgcgcggaggagctagcctgaaggattctgggaatcatgtccatcccttttcctgtcagtgtttttgaaacccacagttttagttggtgctgatggagggagggggaagtcgaaggatgctctttcccttttctgtttaggaagaagtggtactagtgtggtgtgtttgcttggaaattccttgccccacagttgtgttcatgctgaatccacctcggagcatggtgttttcattcccccttcctagtgaaccacaggttttagcattgtcttgttctgtcccttccacttctaactccactggctccatgattctctgagtggtggttcctttgcaccctgtagatgttctaggatagttgatgcatgttactaaattacgtatgcaagtctgtgagtgcgtctgaggggacatcgccaaggactgactgagacacgatgccgagacctcaagccctgaggggcagtcccaaaacccttacagtgaagatgtttactcattgcccccacctctggtccacactagaaagaagctcgccccacctccacctgtgagatccgtgaattctcggaatggcaggggaagccttgcactaggttgcagagaagcatcctccacatcctgtgtcagaaaccctggtctccgtggcacttgtaactcaccgtgctgtcttctggtctgtgtgtgttcttcaagccagctctaggcttcaggccgagccaggttcacactcagaaagaggtctccccatccccattcggggctgacgatggggggctgatggctgcccctgcgtggcctgagtcctggtccctctgaggcagttgacggggcagtcagatttttaaagttttgtacaaagttttcctttgtaatcactcccatttttacttaacaaccaacttgttgtggctcttatttctgaattcaaagcttgtgaaaaaataaagaaaatgaactgcccactga

SEQ ID NO: 290072 - DNA, 1348 bp, Homo sapiens
atcacctttttcaggaatgtcggattttactggggattttgacaagaacaccacaaggtggtcagggctgaaggtggggggagcccagggactgaggggcacagaagagggagcagtggactctgtggaggccagggaggcttcccatggctggtcctggactgagccctgaatgaaggtgggtccagtggagtgcatggcagagtacatggcctccaggagcagcgtggaactgatgctaacagatcccatccagcagcgattggcgctctctttcaggtgcccagatagatgacaacaatcccaggcgcaccggccaccgcatcgtggcgccccctggtggccgctccaacatcaccagcctcggttgaacgtggatgcgcggaggagctagcctgaaggattctgggaatcatgtccatcccttttcctgtcagtgtttttgaaacccacagttttagttggtgctgatggagggagggggaagtcgaaggatgctctttcccttttctgtttaggaagaagtggtactagtgtggtgtgtttgcttggaaattccttgccccacagttgtgttcatgctgaatccacctcggagcatggtgttttcattcccccttcctagtgaaccacaggttttagcattgtcttgttctgtcccttccacttctaactccactggctccatgattctctgagtggtggttcctttgcaccctgtagatgttctaggatagttgatgcatgttactaaattacgtatgcaagtctgtgagtgcgtctgaggggacatcgccaaggactgactgagacacgatgccgagacctcaagccctgaggggcagtcccaaaacccttacagtgaagatgtttactcattgcccccacctctggtccacactagaaagaagctcgccccacctccacctgtgagatccgtgaattctcggaatggcaggggaagccttgcactaggttgcagagaagcatcctccacatcctgtgtcagaaaccctggtctccgtggcacttgtaactcaccgtgctgtcttctggtctgtgtgtgttcttcaagccagctctaggcttcaggccgagccaggttcacactcagaaagaggtctccccatccccattcggggctgacgatggggggctgatggctgcccctgcgtggcctgagtcctggtccctctgaggcagttgacggggcagtcagatttttaaagttttgtacaaagttttcctttgtaatcactcccatttttacttaacaaccaacttgttgtggctcttatttctgaattcaaagcttgtgaaaaaataaagaaaatgaactgcccactga

SEQ ID NO: 290073 - DNA, 1294 bp, Homo sapiens
  misc_feature (1172)..(1172): n is a, c, g, or t
  misc_feature (1181)..(1181): n is a, c, g, or t
agatcggaagggaagcgcttcctggttcgagccgagaggggcgaatccggcttcgctccgcgccgccgggaggagctgtctgcagccccctcctcccgccctcgcctctccctcctccttctcccgccctcctcgccgatccgggcggtgctggcagccggagcggcggcgggcgggccgagcagccggggcagccgcgcgtgggcatccacgggcgccgagcctccgtccgtgtctctatccctcccgggcctttgtcagcgcgcccgctgggagcggggccgagagcgccggttccagtcagacagccccgcaggtcagcggccgggccgagggcgccagagggggccatgtcgtaccagggcaagaagagcatcccgcacatcacgagtgaccgactcctcatcaaaggtggacggatcatcaacgatgaccaatccctttatgctgacgtctacctggaggatggacttatcaaacaaataggagagaacttaatcgttcctggtggagtgaagaccattgaagccaacgggcggatggttattcccggaggtattgatgtcaacacgtacctgcagaagccctcccaggggatgactgcggctgatgacttcttccaagggaccagggcggcactggtgggcgggaccacgatgatcattgaccatgttgttcctgaacctgggtccagcctactgacctctttcgagaagtggcacgaagcagctgacaccaaatcctgctgtgattactccctccacgtggacatcacaagctggtacgatggcgttcgggaggagctggaggtgctggtgcaggacaaaggcgtcaattccttccaagtctacatggcctataaggatgtctaccaaatgtccgacagccagctctatgaagcctttaccttccttaagggcctgggagctgtgatcttggtccatgcagaaaatggagatttgatagctcaggaacaaaagcggatcctggagatgggcatcacgggtcccgagggccatgccctgagcagacctgaagagctggaggccgaggcggtgttccgggccatcaccattgcgggccggatcaactgccctgtgtacatcaccaaggtcatgagcaagagtgcagccgacatcatcgctctggccaggaagaaaggccctagtttngggaagccnttgcgccagctgggccggtggcccattatggccaaactggcaggttggggtcgggattccttccttgaccggctaccgccgattgctctcttggcggggtttggcctagcggc

SEQ ID NO: 290074 - DNA, 868 bp, Homo sapiens
agaacatacatgaagatgggcccgttgctgctgccttgtctgggactcaggggtcctttccgggggtgggtaggtggtagtgtcaggcaaagtgacttctctttggaagggatttggggtcctcctgcatgaagctttgtgtgtatgagtatgcgtgtgtgtaagtgtatatatgggtgtgcatacctgtatgagtgtgtgtgtgggcatgtatgcatgtgtatacatatgtgagtatgcctttgtgaagatctgtatgtgatttaagtgtgtgtgcgtgttcacgcgtgtatgctactgtgtaggcctgttttgttactgcatgtgcatgcatatatgtgtgcatgactgcatgtatgtgagtgcgtgtgcgtggtgtgtgcgtctgtatgtgtatgcatgtgggtatgtagatgtgtgtgtatgcatgcttgtgtgtatgaatgcctgtgtgcggctgcatgtgtgtgaagtgcacctgtcgtgtgtgcgtgttgtgtgtgtgtgtgcatgcacatttgaagtgacctcaggtttctctctcgcccgcagggctctgctttatctgcccagaagggcacacatgcacagtgtcgatcaatcacactctcccttcctctgtttaggtttttggattgcaaggggtttccaggggcatgtatgacggtcctgtgtacgaggtaccagctacacccaaatatgcaactcccgctccttcagccaaatcttcgccttctaaacaccagcccccacccatcagaaacctccaccagtccaacttcagcttatcaggtaggaaagagtggtggcccaggctccccacaattgcagcagttcaggccgagtccttcctgctgcttctgaggaa

SEQ ID NO: 290075 - DNA, 3046 bp, Homo sapiens
agatcggaagggaagcgcttcctggttcgagccgagaggggcgaatccggcttcgctccgcgccgccgggaggagctgtctgcagccccctcctcccgccctcgcctctccctcctccttctcccgccctcctcgccgatccgggcggtgctggcagccggagcggcggcgggcgggccgagcagccggggcagccgcgcgtgggcatccacgggcgccgagcctccgtccgtgtctctatccctcccgggcctttgtcagcgcgcccgctgggagcggggccgagagcgccggttccagtcagacagccccgcaggtcagcggccgggccgagggcgccagagggggccatgtcgtaccagggcaagaagagcatcccgcacatcacgagtgaccgactcctcatcaaaggtggacggatcatcaacgatgaccaatccctttatgctgacgtctacctggaggatggacttatcaaacaaataggagagaacttaatcgttcctggtggagtgaagaccattgaagccaacgggcggatggttattcccggaggtattgatgtcaacacgtacctgcagaagccctcccaggggatgactgcggctgatgacttcttccaagggaccagggcggcactggtgggcgggaccacgatgatcattgaccatgttgttcctgaacctgggtccagcctactgacctctttcgagaagtggcacgaagcagctgacaccaaatcctgctgtgattactccctccacgtggacatcacaagctggtacgatggcgttcgggaggagctggaggtgctggtgcaggacaaaggcgtcaattccttccaagtctacatggcctataaggatgtctaccaaatgtccgacagccagctctatgaagcctttaccttccttaagggcctgggagctgtgatcttggtccatgcagaaaatggagatttgatagctcaggaacaaaagcggatcctggagatgggcatcacgggtcccgagggccatgccctgagcagacctgaagagctggaggccgaggcggtgttccgggccatcaccattgcgggccggatcaactgccctgtgtacatcaccaaggtcatgagcaagagtgcagccgacatcatcgctctggccaggaagaaagggcccctagtttttggagagcccattgccgccagcctggggaccgatggcacccattactggagcaagaactgggccaaggctgcggcgttcgtgacttcccctcccctgagcccggaccctaccacgcccgactacttgacctccctactggcctgtggggacttgcaggtcacaggcagcggccactgtccctacagcactgcccagaaggcggtgggcaaggacaactttaccctgatccccgagggtgtcaacgggatagaggagcggatgacggtcgtctgggacaaggcggtggctactggcaaaatggatgagaaccagtttgtcgctgtcaccagcaccaatgcagccaagatctttaacctgtacccaaggaaagggcggattgccgtgggctcggatgccgacgtggtcatctgggaccccgacaagttgaagaccataacagccaaaagtcacaagtcggcggtggagtacaacatcttcgagggtatggagtgccacggctccccactagtggtcatcagccagggcaagatcgtctttgaagacggaaacatcaacgtcaacaagggcatgggccgcttcattccgcggaaggcgttcccggagcacctgtaccagcgcgtcaaaatcaggaataaggtttttggattgcaaggggtttccaggggcatgtatgacggtcctgtgtacgaggtaccagctacacccaaatatgcaactcccgctccttcagccaaatcttcgccttctaaacaccagcccccacccatcagaaacctccaccagtccaacttcagcttatcaggtgcccagatagatgacaacaatcccaggcgcaccggccaccgcatcgtggcgccccctggtggccgctccaacatcaccagcctcggttgaacgtggatgcgcggaggagctagcctgaaggattctgggaatcatgtccatcccttttcctgtcagtgtttttgaaacccacagttttagttggtgctgatggagggagggggaagtcgaaggatgctctttcccttttctgtttaggaagaagtggtactagtgtggtgtgtttgcttggaaattccttgccccacagttgtgttcatgctgaatccacctcggagcatggtgttttcattcccccttcctagtgaaccacaggttttagcattgtcttgttctgtcccttccacttctaactccactggctccatgattctctgagtggtggttcctttgcaccctgtagatgttctaggatagttgatgcatgttactaaattacgtatgcaagtctgtgagtgcgtctgaggggacatcgccaaggactgactgagacacgatgccgagacctcaagccctgaggggcagtcccaaaacccttacagtgaagatgtttactcattgcccccacctctggtccacactagaaagaagctcgccccacctccacctgtgagatccgtgaattctcggaatggcaggggaagccttgcactaggttgcagagaagcatcctccacatcctgtgtcagaaaccctggtctccgtggcacttgtaactcaccgtgctgtcttctggtctgtgtgtgttcttcaagccagctctaggcttcaggccgagccaggttcacactcagaaagaggtctccccatccccattcggggctgacgatggggggctgatggctgcccctgcgtggcctgagtcctggtccctctgaggcagttgacggggcagtcagatttttaaagttttgtacaaagttttcctttgtaatcactcccatttttacttaacaaccaacttgttgtggctcttatttctgaattcaaagcttgtgaaaaaataaagaaaatgaactgcccactga

SEQ ID NO: 290076 - DNA, 936 bp, Homo sapiens
  misc_feature (192)..(192): n is a, c, g, or t
  misc_feature (263)..(264): n is a, c, g, or t
agcgggcaccgaggcgcggagcgcggcgcacggcggtgcccaggccgcgggcgggcaggcgggagcgcggtgggtggccggccttggacgggtatggcggaccggcggcgcgcgtggaacaccgaggacgacctgcccgtgtacctggcgcggccgggcagcgcggcgcagaccccgcgccagaagtacggnggcatgttcgccgcggtggagggcgcctacgagaacaagaccatcgacttcgacgcctacagtgtgggccnncgcggctcggcgcacacgccgcgcagcgctggccggcccgacgcggtcgggctgccagggccgggaggcagcgaggacacggccagcgacgtgagcgagccctcgggctccgcggtcagctctcccggagagcgcgacgagcggccgccgacgctgcgcatccgccgccccgcgccccgcgacctgcccctcggccgggacaatggccagagtgaccgactcctcatcaaaggtggacggatcatcaacgatgaccaatccctttatgctgacgtctacctggaggatggacttatcaaacaaataggagagaacttaatcgttcctggtggagtgaagaccattgaagccaacgggcggatggttattcccggaggtattgatgtcaacacgtacctgcagaagccctcccaggggatgactgcggctgatgacttcttccaagggaccagggcggcactggtgggcgggaccacgatgatcagtgagtgacactgtcccctgccttagggacatagactgtgaggtctcctccccatcaccagcatcacaagtgctcagtgtgttcgaggctctctgcccagggtgccattggatttcattctccccccagccctatgacacaggtcactgttttacagagcataccgtgtgtgccactggggccacaga

SEQ ID NO: 290077 - DNA, 2861 bp, Homo sapiens
agatcggaagggaagcgcttcctggttcgagccgagaggggcgaatccggcttcgctccgcgccgccgggaggagctgtctgcagccccctcctcccgccctcgcctctccctcctccttctcccgccctcctcgccgatccgggcggtgctggcagccggagcggcggcgggcgggccgagcagccggggcagccgcgcgtgggcatccacgggcgccgagcctccgtccgtgtctctatccctcccgggcctttgtcagcgcgcccgctgggagcggggccgagagcgccggttccagtcagacagccccgcaggtcagcggccgggccgagggcgccagagggggccatgtcgtaccagggcaagaagagcatcccgcacatcacgagtgaccgactcctcatcaaaggtggacggatcatcaacgatgaccaatccctttatgctgacgtctacctggaggatggacttatcaattgaccatgttgttcctgaacctgggtccagcctactgacctctttcgagaagtggcacgaagcagctgacaccaaatcctgctgtgattactccctccacgtggacatcacaagctggtacgatggcgttcgggaggagctggaggtgctggtgcaggacaaaggcgtcaattccttccaagtctacatggcctataaggatgtctaccaaatgtccgacagccagctctatgaagcctttaccttccttaagggcctgggagctgtgatcttggtccatgcagaaaatggagatttgatagctcaggaacaaaagcggatcctggagatgggcatcacgggtcccgagggccatgccctgagcagacctgaagagctggaggccgaggcggtgttccgggccatcaccattgcgggccggatcaactgccctgtgtacatcaccaaggtcatgagcaagagtgcagccgacatcatcgctctggccaggaagaaagggcccctagtttttggagagcccattgccgccagcctggggaccgatggcacccattactggagcaagaactgggccaaggctgcggcgttcgtgacttcccctcccctgagcccggaccctaccacgcccgactacttgacctccctactggcctgtggggacttgcaggtcacaggcagcggccactgtccctacagcactgcccagaaggcggtgggcaaggacaactttaccctgatccccgagggtgtcaacgggatagaggagcggatgacggtcgtctgggacaaggcggtggctactggcaaaatggatgagaaccagtttgtcgctgtcaccagcaccaatgcagccaagatctttaacctgtacccaaggaaagggcggattgccgtgggctcggatgccgacgtggtcatctgggaccccgacaagttgaagaccataacagccaaaagtcacaagtcggcggtggagtacaacatcttcgagggtatggagtgccacggctccccactagtggtcatcagccagggcaagatcgtctttgaagacggaaacatcaacgtcaacaagggcatgggccgcttcattccgcggaaggcgttcccggagcacctgtaccagcgcgtcaaaatcaggaataaggtttttggattgcaaggggtttccaggggcatgtatgacggtcctgtgtacgaggtaccagctacacccaaatatgcaactcccgctccttcagccaaatcttcgccttctaaacaccagcccccacccatcagaaacctccaccagtccaacttcagcttatcaggtgcccagatagatgacaacaatcccaggcgcaccggccaccgcatcgtggcgccccctggtggccgctccaacatcaccagcctcggttgaacgtggatgcgcggaggagctagcctgaaggattctgggaatcatgtccatcccttttcctgtcagtgtttttgaaacccacagttttagttggtgctgatggagggagggggaagtcgaaggatgctctttcccttttctgtttaggaagaagtggtactagtgtggtgtgtttgcttggaaattccttgccccacagttgtgttcatgctgaatccacctcggagcatggtgttttcattcccccttcctagtgaaccacaggttttagcattgtcttgttctgtcccttccacttctaactccactggctccatgattctctgagtggtggttcctttgcaccctgtagatgttctaggatagttgatgcatgttactaaattacgtatgcaagtctgtgagtgcgtctgaggggacatcgccaaggactgactgagacacgatgccgagacctcaagccctgaggggcagtcccaaaacccttacagtgaagatgtttactcattgcccccacctctggtccacactagaaagaagctcgccccacctccacctgtgagatccgtgaattctcggaatggcaggggaagccttgcactaggttgcagagaagcatcctccacatcctgtgtcagaaaccctggtctccgtggcacttgtaactcaccgtgctgtcttctggtctgtgtgtgttcttcaagccagctctaggcttcaggccgagccaggttcacactcagaaagaggtctccccatccccattcggggctgacgatggggggctgatggctgcccctgcgtggcctgagtcctggtccctctgaggcagttgacggggcagtcagatttttaaagttttgtacaaagttttcctttgtaatcactcccatttttacttaacaaccaacttgttgtggctcttatttctgaattcaaagcttgtgaaaaaataaagaaaatgaactgcccactga

SEQ ID NO: 290078 - DNA, 2206 bp, Homo sapiens
agatcggaagggaagcgcttcctggttcgagccgagaggggcgaatccggcttcgctccgcgccgccgggaggagctgtctgcagccccctcctcccgccctcgcctctccctcctccttctcccgccctcctcgccgatccgggcggtgctggcagccggagcggcggcgggcgggccgagcagccggggcagccgcgcgtgggcatccacgggcgccgagcctccgtccgtgtctctatccctcccgggcctttgtcagcgcgcccgctgggagcggggccgagagcgccggttccagtcagacagccccgcaggtcagcggccgggccgagggcgccagagggggccatgtcgtaccagggcaagaagagcatcccgcacatcacgagtgaccgactcctcatcaaaggtggacggatcatcaacgatgaccaatccctttatgctgacgtctacctggaggatggacttatcaaacaaataggagagaacttaatcgttcctggtggagtgaagaccattgaagccaacgggcggatggttattcccggaggtattgatgtcaacacgtacctgcagaagccctcccaggggatgactgcggctgatgacttcttccaagggaccagggcggcactggtgggcgggaccacgatgatcattgaccatgttgttcctgaacctgggtccagcctactgacctctttcgagaagtggcacgaagcagctgacaccaaatcctgctgtgattactccctccacgtggacatcacaagctggtacgatggcgttcgggaggagctggaggtgctggtgcaggacaaaggcgtcaattccttccaagtctacatggcctataaggatgtctaccaaatgtccgacagccagctctatgaagcctttaccttccttaagggcctgggagctgtgatcttggtccatgcagaaaatggagatttgatagctcaggaacaaaagcggatcctggagatgggcatcacgggtcccgagggccatgccctgagcagacctgaagagctggaggccgaggcggtgttccgggccatcaccattgcgggccggatcaactgccctgtgtacatcaccaaggtcatgagcaagagtgcagccgacatcatcgctctggccaggaagaaagggcccctagtttttggagagcccattgccgccagcctggggaccgatggcacccattactggagcaagaactgggccaaggctgcggcgttcgtgacttcccctcccctgagcccggaccctaccacgcccgactacttgacctccctactggcctgtggggacttgcaggtcacaggcagcggccactgtccctacagcactgcccagaaggcggtgggcaaggacaactttaccctgatccccgagggtgtcaacgggatagaggagcggatgacggtcgtctgggacaaggcggtggctactggcaaaatggatgagaaccagtttgtcgctgtcaccagcaccaatgcagccaagatctttaacctgtacccaaggaaagggcggattgccgtgggctcggatgccgacgtggtcatctgggaccccgacaagttgaagaccataacagccaaaagtcacaagtcggcggtggagtacaacatcttcgagggtatggagtgccacggctccccactagtggtcatcagccagggcaagatcgtctttgaagacggaaacatcaacgtcaacaagggcatgggccgcttcattccgcggaaggcgttcccggagcacctgtaccagcgcgtcaaaatcaggaataaggtttttggattgcaaggggtttccaggggcatgtatgacggtcctgtgtacgaggtaccagctacacccaaatatgcaactcccgctccttcagccaaatcttcgccttctaaacaccagcccccacccatcagaaacctccaccagtccaacttcagcttatcagcattaccagagcctgcagctcctgagaatcgcacaatagcccttcggctgcaatcattctttccgtcagagtcatcatcagctgtcgggctttggagctggaacacttaaactggtccacaagaaagtgctggatatttgccatctgtttccagaaagcttccatctgtgaaatgagcacaagcagcaagaagtgaggtgaaaaacttacttaagaaagccaaacggtg

SEQ ID NO: 290079 - DNA, 1236 bp, Homo sapiens
  misc_feature (192)..(192): n is a, c, g, or t
  misc_feature (263)..(264): n is a, c, g, or t
agcgggcaccgaggcgcggagcgcggcgcacggcggtgcccaggccgcgggcgggcaggcgggagcgcggtgggtggccggccttggacgggtatggcggaccggcggcgcgcgtggaacaccgaggacgacctgcccgtgtacctggcgcggccgggcagcgcggcgcagaccccgcgccagaagtacggnggcatgttcgccgcggtggagggcgcctacgagaacaagaccatcgacttcgacgcctacagtgtgggccnncgcggctcggcgcacacgccgcgcagcgctggccggcccgacgcggtcgggctgccagggccgggaggcagcgaggacacggccagcgacgtgagcgagccctcgggctccgcggtcagctctcccggagagcgcgacgagcggccgccgacgctgcgcatccgccgccccgcgccccgcgacctgcccctcggccgggacaatggccagagtgaccgactcctcatcaaaggtggacggatcatcaacgatgaccaatccctttatgctgacgtctacctggaggatggacttatcaaacaaataggagagaacttaatcgttcctggtggagtgaagaccattgaagccaacgggcggatggttattcccggaggtattgatgtcaacacgtacctgcagaagccctcccaggggatgactgcggtgactgagacacgatgccgagacctcaagccctgaggggcagtcccaaaacccttacagtgaagatgtttactcattgcccccacctctggtccacactagaaagaagctcgccccacctccacctgtgagatccgtgaattctcggaatggcaggggaagccttgcactaggttgcagagaagcatcctccacatcctgtgtcagaaaccctggtctccgtggcacttgtaactcaccgtgctgtcttctggtctgtgtgtgttcttcaagccagctctaggcttcaggccgagccaggttcacactcagaaagaggtctccccatccccattcggggctgacgatggggggctgatggctgcccctgcgtggcctgagtcctggtccctctgaggcagttgacggggcagtcagatttttaaagttttgtacaaagttttcctttgtaatcactcccatttttacttaacaaccaacttgttgtggctcttatttctgaattcaaagcttgtgaaaaaataaagaaaatgaactgcccactga

SEQ ID NO: 290080 - DNA, 672 bp, Homo sapiens
cggtccggagcctctggacctcggcagccagctcctccacctggcggcaggactgctggccggtgcacgcctgcagctgctgcagcctcctagtctcctcctccgcctgcgacagccgcttctccagctccaggtagtctcgcaccagctcctgcttgctgcggccctgcaggctctcggtgtggaagcgttccccagctcagctccaggtagggtcgccagtgccttttgcgcttcgatggccgccgacggtgtttcttccgggccagcacagcctccgctgagcagccccctgggctctgggtccggggactcctactgttccagcccaggccaccgacagccccagcaagatcttcatcctctgagtggctctccatccgcggtgtcaggggcagggaaccaccagagtcatgacgctcagggggtgtttgggggctccccggggcaccagaggtctaaagagagggaggaggaagaaggatggatcagacagcctgtccttggaggtggaacctttccctctctacctagcctgaagcctaccttcctacactcagctaacttggtcactcttagcccctcaaccttttggaaccatttgtttacaaagagacctgtctactgtctgtcccccaaccttccccaagtaaactcatggtgagagcagga

SEQ ID NO: 290081 - DNA, 920 bp, Homo sapiens
aaaaggtagatttaatgcagtaacaataatctgaggataaataaatccacgacagactttaaagtttgcaaatctgtttcctttctttgcagagaaaatggttttctgaaagcacacaggactgaagatgtcaaaacaaaacttaatttcttagtctccaggtgacacaggcttggtcctctctgctgccctccgaacacttgtcactggccaagatggtagtttctcttgtttagctcaggatggatgttagtttcaagaataactggatggtttgtttcctgaatcatcttcttgtgagcccatactcttttggtacaaacgtgagggattcactggtgaatctccgtggtccagtggcattacagcccgtctcactccagcttcaagtgcaacttcagccactcttccgtgactcaagtgatatatgacagcattggccctgggcctctattactactctttctcaagggccttactcagtggcacaaccgtgcaccatatacccgctccctatcgtgagctctaactacgtatgccaaaacaaactctcgaccaatcattcgtactcactggctgccagaaaccgctattctcctcatgaccatacctggaaggtcccagcaacaacgtggcaacacggaactatggccataatctatggtcaactgatacgacgttcaacacacggctccaagcgtaacgcctctcctgaaaccttagttccctcacccctctcagttcaacccgcacgaaagtggcagcagaaggggcaaaatagcgccctatccaaccacgaggacaccaccaaattgatcacggctctaatacccgacgaaagataaaaaacagcggctaaatccacaatggggcttgcgccactccaattgacaaacccaaaagggaccacagccgggaca

SEQ ID NO: 290082 - DNA, 334 bp, Homo sapiens
gacaagattgtgccactgcactccagcctgggcaacagagcgaaactccgtctcaaaagaaaaaaaaaaatttgcccctggcaaatgcatacacctcatactagcctcacgaaactggaataagcctttgaaagaagtttgtccttaagagaaaatggttttctgaaagcacacaggactgaagatgtcctccgaacacttgtcactggccaagatggtagtttctcttgtttagctcaggatggatgttagtttcaagaataactggatggtttgtttcctgaatcatcttcttgtgagcccatactctgtaaaggtaaagtgaagttatgta

SEQ ID NO: 290083 - DNA, 227 bp, Homo sapiens
ggaaaggagcatgcgctggaagctgtgtgctgttggttttgaggatcttcagtaagctgaaagcggagagtcaggggccttgtgtcctaccatggtatttgctaacgtttagagagtgcttccccttgccgagcactggcaagaaggccctcaccagatgccagcaccttgacattggactttccagcctccagaaatgtgagaaataaatgtctttactttataaa

SEQ ID NO: 290084 - DNA, 826 bp, Homo sapiens
ctaggtgaggccggggtgaatcggccgaggcatcacagaggcacacacggtggttgcggacgccttggcgaaggctgtggctgagaacttcttcgtggagaccctgcagccccagctcctgcacgtgtccgagcagagcatcttgacctccaccgccctcctcacagccatgctgcgccagcttcgctcccctgcgctgctgcgggaggccgtggctttcctcctgggcacagaccggcagcctgaagcccccggggacaacccccacaccctgtatgctcatctcatcgggcattgtgaccacctctctgatgagatcagcatcaccacactccggctgtttgaggagctgctgcagaagccccacgaggggatcatccacagcctggtcctgcgcaaccttgagggccgcccttacgtggcctggggctcaccagagcctgagagctatgaggacaccctagacctggaggaagacccctacttcaccgacagcttcctggattccggctttcaaactcccgcaaagcctcgcctagctcctgctaccagttacgatggcaaaacagcagtgaccgagatcgtcaacagtttcctgtgcctggtccccgaggaagccaagacctctgccttcctggaggagacaggctatgacacatacgtccacgatgcttatggcctgtgtcacgggtggggtcccgggtccctctgggggggctttgccccaaccttggtgccctgtgacggggctttttcgggcgctccccgggtggtgcggtgccggtcgggtactagctgactgggcctgtgtcggtgctcccccatt

SEQ ID NO: 290085 - DNA, 367 bp, Homo sapiens
agctcggtacccgccgccgggattcctacgcactactacatcgagagcacaggtgcggcctggccctccccagcccagggaccctggagggagcggggaggaaggagtgtgcagagtgtcaccattcaggtgtcctgggaaaggtaacctgcccagtcgttcagaattggagccgagttcacggagacagagaaccagacagacagaagacccagagccctgggccactccactcctgatgatttagctgccggtcccactctgaccttttggaaagaggctgtgtgaggaaggagtagcctggttgggggtctcactggcctgactctgcaaggaagcgcacagccccaggactgcgaggacgggg

SEQ ID NO: 290086 - DNA, 3953 bp, Homo sapiens
gaattacagcttctaagttatgtgacaagagccctgagcccacagtgtccactcaggcccagagctgacagcagccttctgtgggcccaggaccatgtgtccctgtctctgtacccatcctagggtttgaaggaaaccgatgctgctgccccctgataaagggctgggcatgcatgcgttctcagaggactgtgtcctgagcctggaaggacttttgtcttcttaaatattgaagcattcactgtaaacttccatttcccagttgccagcagctgtcttcccccacctctcccagacaggacctcccctttctgggctttggcaggagagggtgaagttttcaagccggggtgcccctctttaccctactcacccttgtttcccaaacatcattagatgaaagcacccccgccaagaagacagacattccctggcggctgaagcagatgctggatatcctggtgtatgaagagcagcagcaggcggccgcgggtgaggcagggccctgcctggagtacctgctgcagcacaagatcctggagactctctgcacgctgggcaaggccgagtaccccccaggcatgcggcagcaggtgttccagttcttcagcaaggttctggcgcaggtgcagcaccccctgctgcattacctcagcgtccacaggcctgtgcagaaactcctccgacttggtgggactgcttccggatccgttacagaaaaggaggaggtgcagttcaccaccgtcctctgctccaagatccagcaggacccagagctgctcgcctacatcctggaaggtaaaaagattgtaggtaggaagaaagcatgcggagaacccactgccctgcctaaggacacaaccagccacggggacaaggactgctcccacgatggtgctcctgccaggccccagctggacggggagtcctgtggggcccaggccttgaacagccacatgcctgctgagaccgaggagctggacggtgggaccacagagagcaacctgattacctccctgcttgggctgtgccagagcaagaagagtcgggtggccttgaaggcccaggagaacctgctgctcctggtgagcatggcctccccagcagctgccacctacctggtacagagcagcgcctgctgccctgcgatcgtccggcacctttgccagttgtaccggtccatgcctgtcttcctggaccccgcagacattgccaccttagagggcatcagctggaggttacccagtgccccgtctgatgaggcttccttccctggcaaggaggccttggctgccttcttgggctggtttgattactgcgaccacctcatcacagaggcacacacggtggttgcggacgccttggcgaaggctgtggctgagaacttcttcgtggagaccctgcagccccagctcctgcacgtgtccgagcagagcatcttgacctccaccgccctcctcacagccatgctgcgccagcttcgctcccctgcgctgctgcgggaggccgtggctttcctcctgggcacagaccggcagcctgaagcccccggggacaacccccacaccctgtatgctcatctcatcgggcattgtgaccacctctctgatgagatcagcatcaccacactccggctgtttgaggagctgctgcagaagccccacgaggggatcatccacagcctggtcctgcgcaaccttgagggccgcccttacgtggcctggggctcaccagagcctgagagctatgaggacaccctagacctggaggaagacccctacttcaccgacagcttcctggattccggctttcaaactcccgcaaagcctcgcctagctcctgctaccagttacgatggcaaaacagcagtgaccgagatcgtcaacagtttcctgtgcctggtccccgaggaagccaagacctctgccttcctggaggagacaggctatgacacatacgtccacgatgcttatggcctgttccaggagtgcagctcccgcgtcgcctcctggggctggcctctgacccccacacctttggacccccatgagcccgagcgacctttcttcgagggccacttcctccgagtgctgtttgaccgcatgtcccggattctggatcagccatacagcctgaacctgcaggtgacctcggtcctgtcccggcttgccctcttcccccacccccatattcatgagtacctgctggatccgtacatcagcctggcccccggctgcaggagcctattctccgtgttggtgagggtgatcggggacttgatgcagagaatccagagggtaccccagttcccaggcaagctgctcctggtgcgcaagcagttgacgggccaggctcctggggagcagctggaccaccagaccctcctccagggcgtggtggtgctggaggagttctgcaaggagctggctgccattgccttcgtcaagtttcccccacatgatcctcgccagaacgtctccccagccccggaagggcaggtctgagccagcaccagggcggtgggagactcctgtccacacctctgccccagagctgcctcctgcctggcactgccgccacactcccctcctgggatggggcttctgctcccgggctcactcaaggagactgcggcatgttgaccacaccagactgggtttcagggaatgggcatgccaggtgccaaggagccaaacagatggctttccaggcagcaaggtccttggggccttcttggaggagcttgggtgacagccaggtgagcacccagaccccagaccctcatgtgctgtgtgcctggccccttctgtactggccatttgtggccagggccaagcctgtgactcaactccaggggcaagatggggagtgagctgatggctccgagactggtcaggagcccaggccagtgagatggggcctggagccttgtctgtgtcacattaggtaccatgggagctgctgagacctgacattttgtcccctgcctacatggcttggcccatggagaaggagcagtgaatgggatcgtcggggaagcccctcttcctgctctgctcccctggaaactgttgcaaaactcccagccgcctcatggcaaatgcccaaagcatgttccgcacccaggcgggggcccctgctaatgagaaccttggtgcagctgcagccaggaggggagcgggcccaggagccaggctcaggtccagctggttcctctctggcgccttctgaacccgtctcagcaggtccacagcacctgggcagaggtcagagaccaggggaggccgggccttgccctcccttctgcccagggcccagtgttcttgatagaagacccttctggggagccagggagctcaggggacagataagggaaggacgccccctgactccaggcccctgagcctggcgggaagtggctgcggcccaggcagccagtcctggtggtgttctccctgcatgccctccgtggctgggctgccaccccacccggcccgaatctgtcttgacctgcaggaatacacgggcggcgccaggcattacctcacagcgggactacacagttgctggctttgctcctgggcaaggaggagcaggccagagcctcttttgcttccttttcttgcccatgccgcttctagaagccaggcacaggttgccaagaggtgacacgaaacaggaggaaactcagtgacctctgcctctcccacattcctccccgcgggggaggacctcgccgctctgaagagcaccgtgcacatgtgggtgcacaaacgtgggtgttggtgtggacggggcgcagatctccgtggatgaactgcgtctggactcttagattcataaaatattcgagggtttgggagtcacagaccctcccctctcctcagtgcactttggcatttgcacggtgtcttccccggacagcacagcaataaatggtgtgattgcgtgga

SEQ ID NO: 290087 - DNA, 3944 bp, Homo sapiens
agctcggtacccgccgccgggattcctacgcactactacatcgagagcacaggtgcggcctggccctccccagcccagggaccctggagggagcggggaggaaggagtgtgcagagtgtcaccattcaggtgtcctgggaaaggtaacctgcccagtcgttcagaattggagccgagttcacggagacagagaaccagacagacagaagacccagagccctgggccactccactcctgatgatttagctgccggtcccactctgaccttttggaaagaggctgtgtgaggaaggagtagcctggttgggggtctcactggcctgactctgcaaggaagaggtggctgcacttcccccagcttccagctccagaccttcaggccccagatgaaagcacccccgccaagaagacagacattccctggcggctgaagcagatgctggatatcctggtgtatgaagagcagcagcaggcggccgcgggtgaggcagggccctgcctggagtacctgctgcagcacaagatcctggagactctctgcacgctgggcaaggccgagtaccccccaggcatgcggcagcaggtgttccagttcttcagcaaggttctggcgcaggtgcagcaccccctgctgcattacctcagcgtccacaggcctgtgcagaaactcctccgacttggtgggactgcttccggatccgttacagaaaaggaggaggtgcagttcaccaccgtcctctgctccaagatccagcaggacccagagctgctcgcctacatcctggaaggtaaaaagattgtaggtaggaagaaagcatgcggagaacccactgccctgcctaaggacacaaccagccacggggacaaggactgctcccacgatggtgctcctgccaggccccagctggacggggagtcctgtggggcccaggccttgaacagccacatgcctgctgagaccgaggagctggacggtgggaccacagagagcaacctgattacctccctgcttgggctgtgccagagcaagaagagtcgggtggccttgaaggcccaggagaacctgctgctcctggtgagcatggcctccccagcagctgccacctacctggtacagagcagcgcctgctgccctgcgatcgtccggcacctttgccagttgtaccggtccatgcctgtcttcctggaccccgcagacattgccaccttagagggcatcagctggaggttacccagtgccccgtctgatgaggcttccttccctggcaaggaggccttggctgccttcttgggctggtttgattactgcgaccacctcatcacagaggcacacacggtggttgcggacgccttggcgaaggctgtggctgagaacttcttcgtggagaccctgcagccccagctcctgcacgtgtccgagcagagcatcttgacctccaccgccctcctcacagccatgctgcgccagcttcgctcccctgcgctgctgcgggaggccgtggctttcctcctgggcacagaccggcagcctgaagcccccggggacaacccccacaccctgtatgctcatctcatcgggcattgtgaccacctctctgatgagatcagcatcaccacactccggctgtttgaggagctgctgcagaagccccacgaggggatcatccacagcctggtcctgcgcaaccttgagggccgcccttacgtggcctggggctcaccagagcctgagagctatgaggacaccctagacctggaggaagacccctacttcaccgacagcttcctggattccggctttcaaactcccgcaaagcctcgcctagctcctgctaccagttacgatggcaaaacagcagtgaccgagatcgtcaacagtttcctgtgcctggtccccgaggaagccaagacctctgccttcctggaggagacaggctatgacacatacgtccacgatgcttatggcctgttccaggagtgcagctcccgcgtcgcctcctggggctggcctctgacccccacacctttggacccccatgagcccgagcgacctttcttcgagggccacttcctccgagtgctgtttgaccgcatgtcccggattctggatcagccatacagcctgaacctgcaggtgacctcggtcctgtcccggcttgccctcttcccccacccccatattcatgagtacctgctggatccgtacatcagcctggcccccggctgcaggagcctattctccgtgttggtgagggtgatcggggacttgatgcagagaatccagagggtaccccagttcccaggcaagctgctcctggtgcgcaagcagttgacgggccaggctcctggggagcagctggaccaccagaccctcctccagggcgtggtggtgctggaggagttctgcaaggagctggctgccattgccttcgtcaagtttcccccacatgatcctcgccagaacgtctccccagccccggaagggcaggtctgagccagcaccagggcggtgggagactcctgtccacacctctgccccagagctgcctcctgcctggcactgccgccacactcccctcctgggatggggcttctgctcccgggctcactcaaggagactgcggcatgttgaccacaccagactgggtttcagggaatgggcatgccaggtgccaaggagccaaacagatggctttccaggcagcaaggtccttggggccttcttggaggagcttgggtgacagccaggtgagcacccagaccccagaccctcatgtgctgtgtgcctggccccttctgtactggccatttgtggccagggccaagcctgtgactcaactccaggggcaagatggggagtgagctgatggctccgagactggtcaggagcccaggccagtgagatggggcctggagccttgtctgtgtcacattaggtaccatgggagctgctgagacctgacattttgtcccctgcctacatggcttggcccatggagaaggagcagtgaatgggatcgtcggggaagcccctcttcctgctctgctcccctggaaactgttgcaaaactcccagccgcctcatggcaaatgcccaaagcatgttccgcacccaggcgggggcccctgctaatgagaaccttggtgcagctgcagccaggaggggagcgggcccaggagccaggctcaggtccagctggttcctctctggcgccttctgaacccgtctcagcaggtccacagcacctgggcagaggtcagagaccaggggaggccgggccttgccctcccttctgcccagggcccagtgttcttgatagaagacccttctggggagccagggagctcaggggacagataagggaaggacgccccctgactccaggcccctgagcctggcgggaagtggctgcggcccaggcagccagtcctggtggtgttctccctgcatgccctccgtggctgggctgccaccccacccggcccgaatctgtcttgacctgcaggaatacacgggcggcgccaggcattacctcacagcgggactacacagttgctggctttgctcctgggcaaggaggagcaggccagagcctcttttgcttccttttcttgcccatgccgcttctagaagccaggcacaggttgccaagaggtgacacgaaacaggaggaaactcagtgacctctgcctctcccacattcctccccgcgggggaggacctcgccgctctgaagagcaccgtgcacatgtgggtgcacaaacgtgggtgttggtgtggacggggcgcagatctccgtggatgaactgcgtctggactcttagattcataaaatattcgagggtttgggagtcacagaccctcccctctcctcagtgcactttggcatttgcacggtgtcttccccggacagcacagcaataaatggtgtgattgcgtgga

SEQ ID NO: 290088 - DNA, 3310 bp, Homo sapiens
ggcagaagcagagatcaggtacccgggaggcacgcaggcagcttcccctccagctccaggccgacgccctgctggcagcccaccctgcggtcccagtgggggaccctgggaagtggtccccaccaggtctggcctcatctcaccctcttttcagggtaaaaagattgtaggtaggaagaaagcatgcggagaacccactgccctgcctaaggacacaaccagccacggggacaaggactgctcccacgatggtgctcctgccaggccccagctggacggggagtcctgtggggcccaggccttgaacagccacatgcctgctgagaccgaggagctggacggtgggaccacagagagcaacctgattacctccctgcttgggctgtgccagagcaagaagagtcgggtggccttgaaggcccaggagaacctgctgctcctggtgagcatggcctccccagcagctgccacctacctggtacagagcagcgcctgctgccctgcgatcgtccggcacctttgccagttgtaccggtccatgcctgtcttcctggaccccgcagacattgccaccttagagggcatcagctggaggttacccagtgccccgtctgatgaggcttccttccctggcaaggaggccttggctgccttcttgggctggtttgattactgcgaccacctcatcacagaggcacacacggtggttgcggacgccttggcgaaggctgtggctgagaacttcttcgtggagaccctgcagccccagctcctgcacgtgtccgagcagagcatcttgacctccaccgccctcctcacagccatgctgcgccagcttcgctcccctgcgctgctgcgggaggccgtggctttcctcctgggcacagaccggcagcctgaagcccccggggacaacccccacaccctgtatgctcatctcatcgggcattgtgaccacctctctgatgagatcagcatcaccacactccggctgtttgaggagctgctgcagaagccccacgaggggatcatccacagcctggtcctgcgcaaccttgagggccgcccttacgtggcctggggctcaccagagcctgagagctatgaggacaccctagacctggaggaagacccctacttcaccgacagcttcctggattccggctttcaaactcccgcaaagcctcgcctagctcctgctaccagttacgatggcaaaacagcagtgaccgagatcgtcaacagtttcctgtgcctggtccccgaggaagccaagacctctgccttcctggaggagacaggctatgacacatacgtccacgatgcttatggcctgttccaggagtgcagctcccgcgtcgcctcctggggctggcctctgacccccacacctttggacccccatgagcccgagcgacctttcttcgagggccacttcctccgagtgctgtttgaccgcatgtcccggattctggatcagccatacagcctgaacctgcaggtgacctcggtcctgtcccggcttgccctcttcccccacccccatattcatgagtacctgctggatccgtacatcagcctggcccccggctgcaggagcctattctccgtgttggtgagggtgatcggggacttgatgcagagaatccagagggtaccccagttcccaggcaagctgctcctggtgcgcaagcagttgacgggccaggctcctggggagcagctggaccaccagaccctcctccagggcgtggtggtgctggaggagttctgcaaggagctggctgccattgccttcgtcaagtttcccccacatgatcctcgccagaacgtctccccagccccggaagggcaggtctgagccagcaccagggcggtgggagactcctgtccacacctctgccccagagctgcctcctgcctggcactgccgccacactcccctcctgggatggggcttctgctcccgggctcactcaaggagactgcggcatgttgaccacaccagactgggtttcagggaatgggcatgccaggtgccaaggagccaaacagatggctttccaggcagcaaggtccttggggccttcttggaggagcttgggtgacagccaggtgagcacccagaccccagaccctcatgtgctgtgtgcctggccccttctgtactggccatttgtggccagggccaagcctgtgactcaactccaggggcaagatggggagtgagctgatggctccgagactggtcaggagcccaggccagtgagatggggcctggagccttgtctgtgtcacattaggtaccatgggagctgctgagacctgacattttgtcccctgcctacatggcttggcccatggagaaggagcagtgaatgggatcgtcggggaagcccctcttcctgctctgctcccctggaaactgttgcaaaactcccagccgcctcatggcaaatgcccaaagcatgttccgcacccaggcgggggcccctgctaatgagaaccttggtgcagctgcagccaggaggggagcgggcccaggagccaggctcaggtccagctggttcctctctggcgccttctgaacccgtctcagcaggtccacagcacctgggcagaggtcagagaccaggggaggccgggccttgccctcccttctgcccagggcccagtgttcttgatagaagacccttctggggagccagggagctcaggggacagataagggaaggacgccccctgactccaggcccctgagcctggcgggaagtggctgcggcccaggcagccagtcctggtggtgttctccctgcatgccctccgtggctgggctgccaccccacccggcccgaatctgtcttgacctgcaggaatacacgggcggcgccaggcattacctcacagcgggactacacagttgctggctttgctcctgggcaaggaggagcaggccagagcctcttttgcttccttttcttgcccatgccgcttctagaagccaggcacaggttgccaagaggtgacacgaaacaggaggaaactcagtgacctctgcctctcccacattcctccccgcgggggaggacctcgccgctctgaagagcaccgtgcacatgtgggtgcacaaacgtgggtgttggtgtggacggggcgcagatctccgtggatgaactgcgtctggactcttagattcataaaatattcgagggtttgggagtcacagaccctcccctctcctcagtgcactttggcatttgcacggtgtcttccccggacagcacagcaataaatggtgtgattgcgtgga

SEQ ID NO: 290089 - DNA, 4196 bp, Homo sapiens
gcgctgccgccgccgctttcgcccgggagccgggggccgggcgccatcatgctgagccggctcggggcgctgctgcaggaagccgtgggggcgcgcgagcccagcattgacctgctgcaggccttcgtggagcactggaagggcatcacgcactactacatcgagagcacagatgaaagcacccccgccaagaagacagacattccctggcggctgaagcagatgctggatatcctggtgtatgaagagcagcagcaggcggccgcgggtgaggcagggccctgcctggagtacctgctgcagcacaagatcctggagactctctgcacgctgggcaaggccgagtaccccccaggcatgcggcagcaggtgttccagttcttcagcaaggttctggcgcaggtgcagcaccccctgctgcattacctcagcgtccacaggcctgtgcagaaactcctccgacttggtgggactgcttccggatccgttacagaaaaggaggaggtgcagttcaccaccgtcctctgctccaagatccagcaggacccagagctgctcgcctacatcctggaaggtaaaaagattgtaggtaggaagaaagcatgcggagaacccactgccctgcctaaggacacaaccagccacggggacaaggactgctcccacgatggtgctcctgccaggccccagctggacggggagtcctgtggggcccaggccttgaacagccacatgcctgctgagaccgaggagctggacggtgggaccacagagagcaacctgattacctccctgcttgggctgtgccagagcaagaagagtcgggtggccttgaaggcccaggagaacctgctgctcctggtgagcatggcctccccagcagctgccacctacctggtacagagcagcgcctgctgccctgcgatcgtccggcacctttgccagttgtaccggtccatgcctgtcttcctggaccccgcagacattgccaccttagagggcatcagctggaggttacccagtgccccgtctgatgaggcttccttccctggcaaggaggccttggctgccttcttgggctggtttgattactgcgaccacctcatcacagaggcacacacggtggttgcggacgccttggcgaaggctgtggctgagaacttcttcgtggagaccctgcagccccagctcctgcacgtgtccgagcagagcatcttgacctccaccgccctcctcacagccatgctgcgccagcttcgctcccctgcgctgctgcgggaggccgtggctttcctcctgggcacagaccggcagcctgaagcccccggggacaacccccacaccctgtatgctcatctcatcgggcattgtgaccacctctctgatgagatcagcatcaccacactccggctgtttgaggagctgctgcagaagccccacgaggggatcatccacagcctggtcctgcgcaaccttgagggccgcccttacgtggcctggggctcaccagagcctgagagctatgaggacaccctagacctggaggaagacccctacttcaccgacagcttcctggattccggctttcaaactcccgcaaagcctcgcctagctcctgctaccagttacgatggcaaaacagcagtgaccgagatcgtcaacaggtggggagcaagttaggcagtctgaaccacttgagttttattttattttattttattttttgagatagagtctcgctccgtcacccaggatggagtgcagtggtacaatctcggctcactgcaacctccacctcccgggttccggatccaagcgattcctgtgcctcagcctcccgagtacctgggattacagacatgcaccaccacacccagctaatttttatagttttagtagagactgggtttccccatgttggccaggcaggtctcgaactcctgacctcaggtgatccgcccacctcagcctcccaaagtgctgggattacagacatgagccaccgtgcctgccctgagttttactctttggccacagccctggggtccagtcagggagggagatggggtcccacaagcaggggagagcagggtgagccgggagcgcctccacaccggcttctatctctcagtttcctgtgcctggtccccgaggaagccaagacctctgccttcctggaggagacaggctatgacacatacgtccacgatgcttatggcctgttccaggagtgcagctcccgcgtcgcctcctggggctggcctctgacccccacacctttggacccccatgagcccgagcgacctttcttcgagggccacttcctccgagtgctgtttgaccgcatgtcccggattctggatcagccatacagcctgaacctgcaggtgacctcggtcctgtcccggcttgccctcttcccccacccccatattcatgagtacctgctggatccgtacatcagcctggcccccggctgcaggagcctattctccgtgttggtgagggtgatcggggacttgatgcagagaatccagagggtaccccagttcccaggcaagctgctcctggtgcgcaagcagttgacgggccaggctcctggggagcagctggaccaccagaccctcctccagggcgtggtggtgctggaggagttctgcaaggagctggctgccattgccttcgtcaagtttcccccacatgatcctcgccagaacgtctccccagccccggaagggcaggtctgagccagcaccagggcggtgggagactcctgtccacacctctgccccagagctgcctcctgcctggcactgccgccacactcccctcctgggatggggcttctgctcccgggctcactcaaggagactgcggcatgttgaccacaccagactgggtttcagggaatgggcatgccaggtgccaaggagccaaacagatggctttccaggcagcaaggtccttggggccttcttggaggagcttgggtgacagccaggtgagcacccagaccccagaccctcatgtgctgtgtgcctggccccttctgtactggccatttgtggccagggccaagcctgtgactcaactccaggggcaagatggggagtgagctgatggctccgagactggtcaggagcccaggccagtgagatggggcctggagccttgtctgtgtcacattaggtaccatgggagctgctgagacctgacattttgtcccctgcctacatggcttggcccatggagaaggagcagtgaatgggatcgtcggggaagcccctcttcctgctctgctcccctggaaactgttgcaaaactcccagccgcctcatggcaaatgcccaaagcatgttccgcacccaggcgggggcccctgctaatgagaaccttggtgcagctgcagccaggaggggagcgggcccaggagccaggctcaggtccagctggttcctctctggcgccttctgaacccgtctcagcaggtccacagcacctgggcagaggtcagagaccaggggaggccgggccttgccctcccttctgcccagggcccagtgttcttgatagaagacccttctggggagccagggagctcaggggacagataagggaaggacgccccctgactccaggcccctgagcctggcgggaagtggctgcggcccaggcagccagtcctggtggtgttctccctgcatgccctccgtggctgggctgccaccccacccggcccgaatctgtcttgacctgcaggaatacacgggcggcgccaggcattacctcacagcgggactacacagttgctggctttgctcctgggcaaggaggagcaggccagagcctcttttgcttccttttcttgcccatgccgcttctagaagccaggcacaggttgccaagaggtgacacgaaacaggaggaaactcagtgacctctgcctctcccacattcctccccgcgggggaggacctcgccgctctgaagagcaccgtgcacatgtgggtgcacaaacgtgggtgttggtgtggacggggcgcagatctccgtggatgaactgcgtctggactcttagattcataaaatattcgagggtttgggagtcacagaccctcccctctcctcagtgcactttggcatttgcacggtgtcttccccggacagcacagcaataaatggtgtgattgcgtgga

SEQ ID NO: 290090 - DNA, 1788 bp, Homo sapiens
tggcgaattcggcacgagggagggctgcctcctccgcctagagcgctgccgccgccgctttcgcccggctgcaggagcctattctccgtgttggtgagggtgatcggggacttgatgcagagaatccagagggtaccccagttcccaggcaagctgctcctggtgcgcaagcagttgacgggccaggctcctggggagcagctggaccaccagaccctcctccagggcgtggtggtgctggaggagttctgcaaggagctggctgccattgccttcgtcaagtttcccccacatgatcctcgccagaacgtctccccagccccggaagggcaggtctgagccagcaccagggcggtgggagactcctgtccacacctctgccccagagctgcctcctgcctggcactgccgccacactcccctcctgggatggggcttctgctcccgggctcactcaaggagactgcggcatgttgaccacaccagactgggtttcagggaatgggcatgccaggtgccaaggagccaaacagatggctttccaggcagcaaggtccttggggccttcttggaggagcttgggtgacagccaggtgagcacccagaccccagaccctcatgtgctgtgtgcctggccccttctgtactggccatttgtggccagggccaagcctgtgactcaactccaggggcaagatggggagtgagctgatggctccgagactggtcaggagcccaggccagtgagatggggcctggagccttgtctgtgtcacattaggtaccatgggagctgctgagacctgacattttgtcccctgcctacatggcttggcccatggagaaggagcagtgaatgggatcgtcggggaagcccctcttcctgctctgctcccctggaaactgttgcaaaactcccagccgcctcatggcaaatgcccaaagcatgttccgcacccaggcgggggcccctgctaatgagaaccttggtgcagctgcagccaggaggggagcgggcccaggagccaggctcaggtccagctggttcctctctggcgccttctgaacccgtctcagcaggtccacagcacctgggcagaggtcagagaccaggggaggccgggccttgccctcccttctgcccagggcccagtgttcttgatagaagacccttctggggagccagggagctcaggggacagataagggaaggacgccccctgactccaggcccctgagcctggcgggaagtggctgcggcccaggcagccagtcctggtggtgttctccctgcatgccctccgtggctgggctgccaccccacccggcccgaatctgtcttgacctgcaggaatacacgggcggcgccaggcattacctcacagcgggactacacagttgctggctttgctcctgggcaaggaggagcaggccagagcctcttttgcttccttttcttgcccatgccgcttctagaagccaggcacaggttgccaagaggtgacacgaaacaggaggaaactcagtgacctctgcctctcccacattcctccccgcgggggaggacctcgccgctctgaagagcaccgtgcacatgtgggtgcacaaacgtgggtgttggtgtggacggggcgcagatctccgtggatgaactgcgtctggactcttagattcataaaatattcgagggtttgggagtcacagaccctcccctctcctcagtgcactttggcatttgcacggtgtcttccccggacagcacagcaataaatggtgtgattgcgtgga

SEQ ID NO: 290091 - DNA, 3813 bp, Homo sapiens
gcgctgccgccgccgctttcgcccgggagccgggggccgggcgccatcatgctgagccggctcggggcgctgctgcaggaagccgtgggggcgcgcgagcccagcattgacctgctgcaggccttcgtggagcactggaagggcatcacgcactactacatcgagagcacagatgaaagcacccccgccaagaagacagacattccctggcggctgaagcagatgctggatatcctggtgtatgaagagcagcagcaggcggccgcgggtgaggcagggccctgcctggagtacctgctgcagcacaagatcctggagactctctgcacgctgggcaaggccgagtaccccccaggcatgcggcagcaggtgttccagttcttcagcaaggttctggcgcaggtgcagcaccccctgctgcattacctcagcgtccacaggcctgtgcagaaactcctccgacttggtgggactgcttccggatccgttacagaaaaggaggaggtgcagttcaccaccgtcctctgctccaagatccagcaggacccagagctgctcgcctacatcctggaaggtaaaaagattgtaggtaggaagaaagcatgcggagaacccactgccctgcctaaggacacaaccagccacggggacaaggactgctcccacgatggtgctcctgccaggccccagctggacggggagtcctgtggggcccaggccttgaacagccacatgcctgctgagaccgaggagctggacggtgggaccacagagagcaacctgattacctccctgcttgggctgtgccagagcaagaagagtcgggtggccttgaaggcccaggagaacctgctgctcctggtgagcatggcctccccagcagctgccacctacctggtacagagcagcgcctgctgccctgcgatcgtccggcacctttgccagttgtaccggtccatgcctgtcttcctggaccccgcagacattgccaccttagagggcatcagctggaggttacccagtgccccgtctgatgaggcttccttccctggcaaggaggccttggctgccttcttgggctggtttgattactgcgaccacctcatcacagaggcacacacggtggttgcggacgccttggcgaaggctgtggctgagaacttcttcgtggagaccctgcagccccagctcctgcacgtgtccgagcagagcatcttgacctccaccgccctcctcacagccatgctgcgccagcttcgctcccctgcgctgctgcgggaggccgtggctttcctcctgggcacagaccggcagcctgaagcccccggggacaacccccacaccctgtatgctcatctcatcgggcattgtgaccacctctctgatgagatcagcatcaccacactccggctgtttgaggagctgctgcagaagccccacgaggggatcatccacagcctggtcctgcgcaaccttgagggccgcccttacgtggcctggggctcaccagagcctgagagctatgaggacaccctagacctggaggaagacccctacttcaccgacagcttcctggattccggctttcaaactcccgcaaagcctcgcctagctcctgctaccagttacgatggcaaaacagcagtgaccgagatcgtcaacagtttcctgtgcctggtccccgaggaagccaagacctctgccttcctggaggagacaggctatgacacatacgtccacgatgcttatggcctgttccaggagtgcagctcccgcgtcgcctcctggggctggcctctgacccccacacctttggacccccatgagcccgagcgacctttcttcgagggccacttcctccgagtgctgtttgaccgcatgtcccggattctggatcagccatacagcctgaacctgcaggtgacctcggtcctgtcccggcttgccctcttcccccacccccatattcatgagtacctgctggatccgtacatcagcctggcccccggctgcaggagcctattctccgtgttggtgagggtgatcggggacttgatgcagagaatccagagggtaccccagttcccaggcaagctgctcctggtgcgcaagcagttgacgggccaggctcctggggagcagctggaccaccagaccctcctccagggcgtggtggtgctggaggagttctgcaaggagctggctgccattgccttcgtcaagtttcccccacatgatcctcgccagaacgtctccccagccccggaagggcaggtctgagccagcaccagggcggtgggagactcctgtccacacctctgccccagagctgcctcctgcctggcactgccgccacactcccctcctgggatggggcttctgctcccgggctcactcaaggagactgcggcatgttgaccacaccagactgggtttcagggaatgggcatgccaggtgccaaggagccaaacagatggctttccaggcagcaaggtccttggggccttcttggaggagcttgggtgacagccaggtgagcacccagaccccagaccctcatgtgctgtgtgcctggccccttctgtactggccatttgtggccagggccaagcctgtgactcaactccaggggcaagatggggagtgagctgatggctccgagactggtcaggagcccaggccagtgagatggggcctggagccttgtctgtgtcacattaggtaccatgggagctgctgagacctgacattttgtcccctgcctacatggcttggcccatggagaaggagcagtgaatgggatcgtcggggaagcccctcttcctgctctgctcccctggaaactgttgcaaaactcccagccgcctcatggcaaatgcccaaagcatgttccgcacccaggcgggggcccctgctaatgagaaccttggtgcagctgcagccaggaggggagcgggcccaggagccaggctcaggtccagctggttcctctctggcgccttctgaacccgtctcagcaggtccacagcacctgggcagaggtcagagaccaggggaggccgggccttgccctcccttctgcccagggcccagtgttcttgatagaagacccttctggggagccagggagctcaggggacagataagggaaggacgccccctgactccaggcccctgagcctggcgggaagtggctgcggcccaggcagccagtcctggtggtgttctccctgcatgccctccgtggctgggctgccaccccacccggcccgaatctgtcttgacctgcaggaatacacgggcggcgccaggcattacctcacagcgggactacacagttgctggctttgctcctgggcaaggaggagcaggccagagcctcttttgcttccttttcttgcccatgccgcttctagaagccaggcacaggttgccaagaggtgacacgaaacaggaggaaactcagtgacctctgcctctcccacattcctccccgcgggggaggacctcgccgctctgaagagcaccgtgcacatgtgggtgcacaaacgtgggtgttggtgtggacggggcgcagatctccgtggatgaactgcgtctggactcttagattcatagcatttgcacggtgtcttccccggacagcacagcaataaatggtgtgattgcgtggactcgtgccgaattcggcacgagctggggcagcttccgcgcctacctgtccacgtgctaacagatcatgacgcccccagcacccctgcctgcttttgctggtggcagtgacgggaccccgactcttactctcggccgag

SEQ ID NO: 290092 - DNA, 2846 bp, Homo sapiens
gcgctgccgccgccgctttcgcccgggagccgggggccgggcgccatcatgctgagccggctcggggcgctgctgcaggaagccgtgggggcgcgcgagcccagcattgacctgctgcaggccttcgtggagcactggaagggcatcacgcactactacatcgagagcacagatgaaagcacccccgccaagaagacagacattccctggcggctgaagcagatgctggatatcctggtgtatgaagagcagcagcaggcggccgcgggtgaggcagggccctgcctggagtacctgctgcagcacaagatcctggagactctctgcacgctgggcaaggccgagtaccccccaggcatgcggcagcaggtgttccagttcttcagcaaggttctggcgcaggtgcagcaccccctgctgcattacctcagcgtccacaggcctgtgcagaaactcctccgacttggtgggactgcttccggatccgttacagaaaaggaggaggtgcagttcaccaccgtcctctgctccaagatccagcaggacccagagctgctcgcctacatcctggaaggtaaaaagattgtaggtaggaagaaagcatgcggagaacccactgccctgcctaaggacacaaccagccacggggacaaggactgctcccacgatggtgctcctgccaggccccagctggacggggagtcctgtggggcccaggccttgaacagccacatgcctgctgagaccgaggagctggacggtgggaccacagagagcaacctgattacctccctgcttgggctgtgccagagcaagaagagtcgggtggccttgaaggcccaggagaacctgctgctcctggtgagcatggcctccccagcagctgccacctacctggtacagagcagcgcctgctgccctgcgatcgtccggcacctttgccagttgtaccggtccatgcctgtcttcctggaccccgcagacattgccaccttagagggcatcagctggaggttacccagtgccccgtctgatgaggcttccttccctggcaaggaggccttggctgccttcttgggctggtttgattactgcgaccacctcatcacagaggcacacacggtggttgcggacgccttggcgaaggctgtggctgagaacttcttcgtggagaccctgcagccccagctcctgcacgtgtccgagcagagcatcttgacctccaccgccctcctcacagccatgctgcgccagcttcgctcccctgcgctgctgcgggaggccgtggctttcctcctgggcacagaccggcagcctgaagcccccggggacaacccccacaccctgtatgctcatctcatcgggcattgtgaccacctctctgatgagatcagcatcaccacactccggctgtttgaggagctgctgcagaagccccacgaggggatcatccacagcctggtcctgcgcaaccttgagggccgcccttacgtggcctggggctcaccagagcctgagagctatgaggacaccctagacctggaggaagacccctacttcaccgacagcttcctggattccggctttcaaactcccgcaaagcctcgcctagctcctgctaccagttacgatggcaaaacagcagtgaccgagatcgtcaacagtttcctgtgcctggtccccgaggaagccaagacctctgccttcctggaggagacaggctatgacacatacgtccacgatgcttatggcctgttccaggagtgcagctcccgcgtcgcctcctggggctggcctctgacccccacacctttggacccccatgagcccgagcgacctttcttcgagggccacttcctccgagtgctgtttgaccgcatgtcccggattctggatcagccatacagcctgaacctgcaggtgacctcggtcctgtcccggcttgccctcttcccccacccccatattcatgagtacctgctggatccgtacatcagcctggcccccggctgcaggagcctattctccgtgttggtgagggtgatcggggacttgatgcagagaatccagagggtaccccagttcccaggcaagctgctcctggtgcgcaagcagttgacgggccaggctcctggggagcagctggaccaccagaccctcctccagggcgtggtggtgctggaggagttctgcaaggagctggctgccattgccttcgtcaagtttcccccacatgatcctcgccagaacgtctccccagccccggaagggcaggtctgagccagcaccagggcggtgggagactcctgtccacacctctgccccagagctgcctcctgcctggcactgccgccacactcccctcctgggatggggcttctgctcccgggctcactcaaggagactgcggcatgttgaccacaccagactgggtttcagggaatgggcatgccaggtgccaaggagccaaacagatggctttccaggcagcaaggtccttggggccttcttggaggagcttgggtgacagccagaagccaggcacaggttgccaagaggtgacacgaaacaggaggaaactcagtgacctctgcctctcccacattcctccccgcgggggaggacctcgccgctctgaagagcaccgtgcacatgtgggtgcacaaacgtgggtgttggtgtggacggggcgcagatctccgtggatgaactgcgtctggactcttagattcataaaatattcgagggtttgggagtcacagaccctcccctctcctcagtgcactttggcatttgcacggtgtcttccccggacagcacagcaataaatggtgtgattgcgtgga

SEQ ID NO: 290093 - DNA, 3011 bp, Homo sapiens
gcgctgccgccgccgctttcgcccgggagccgggggccgggcgccatcatgctgagccggctcggggcgctgctgcaggaagccgtgggggcgcgcgagcccagcattgacctgctgcaggccttcgtggagcactggaagggcatcacgcactactacatcgagagcacagatgaaagcacccccgccaagaagacagacattccctggcggctgaagcagatgctggatatcctggtgtatgaagagcagcagcaggcggccgcgggtgaggcagggccctgcctggagtacctgctgcagcacaagatcctggagactctctgcacgctgggcaaggccgagtaccccccaggcatgcggcagcaggtgttccagttcttcagcaaggttctggcgcaggtgcagcaccccctgctgcattacctcagcgtccacaggcctgtgcagaaactcctccgacttggtgggactgcttccggatccgttacagaaaaggaggaggtgcagttcaccaccgtcctctgctccaagatccagcaggacccagagctgctcgcctacatcctggaaggtaaaaagattgtaggtaggaagaaagcatgcggagaacccactgccctgcctaaggacacaaccagccacggggacaaggactgctcccacgatggtgctcctgccaggccccagctggacggggagtcctgtggggcccaggccttgaacagccacatgcctgctgagaccgaggagctggacggtgggaccacagagagcaacctgattacctccctgcttgggctgtgccagagcaagaagagtcgggtggccttgaaggcccaggagaacctgctgctcctggtgagcatggcctccccagcagctgccacctacctggtacagagcagcgcctgctgccctgcgatcgtccggcacctttgccagttgtaccggtccatgcctgtcttcctggaccccgcagacattgccaccttagagggcatcagctggaggttacccagtgccccgtctgatgaggcttccttccctggcaaggaggccttggctgccttcttgggctggtttgattactgcgaccacctcatcacagaggcacacacggtggttgcggacgccttggcgaaggctgtggctgagaacttcttcgtggagaccctgcagccccagctcctgcacgtgtccgagcagagcatcttgacctccaccgccctcctcacagccatgctgcgccagcttcgctcccctgcgctgctgcgggaggccgtggctttcctcctgggcacagaccggcagcctgaagcccccggggacaacccccacaccctgtatgctcatctcatcgggcattgtgaccacctctctgatgagatcagcatcaccacactccggctgtttgaggagctgctgcagaagccccacgaggggatcatccacagcctggtcctgcgcaaccttgagggccgcccttacgtggcctggggctcaccagagcctgagagctatgaggacaccctagacctggaggaagacccctacttcaccgacagcttcctggattccggctttcaaactcccgcaaagcctcgcctagctcctgctaccagttacgatggcaaaacagcagtgaccgagatcgtcaacagtttcctgtgcctggtccccgaggaagccaagacctctgccttcctggaggagacaggctatgacacatacgtccacgatgcttatggcctgttccaggagtgcagctcccgcgtcgcctcctggggctggcctctgacccccacacctttggacccccatgagcccgagcgacctttcttcgagggccacttcctccgagtgctgtttgaccgcatgtcccggattctggatcagccatacagcctgaacctgcaggtgacctcggtcctgtcccggcttgccctcttcccccacccccatattcatgagtacctgctggatccgtacatcagcctggcccccggctgcaggagcctattctccgtgttggtgagggtgatcggggacttgatgcagagaatccagagggtaccccagttcccaggcaagctgctcctggtgcgcaagcagttgacgggccaggctcctggggagcagctggaccaccagaccctcctccagggcgtggtggtgctggaggagttctgcaaggagctggctgccattgccttcgtcaagtttcccccacatgatcctcgccagaacgtctccccagccccggaagggcaggtctgagccagcaccagggcggtgggagactcctgtccacacctctgccccagagctgcctcctgcctggcactgccgccacactcccctcctgggatggggcttctgctcccgggctcactcaaggagactgcggcatgttgaccacaccagactgggtttcagggaatgggcatgccaggtgccaaggagccaaacagatggctttccaggcagcaaggtccttggggccttcttggaggagcttgggtgacagccagaagccaggcacaggttgccaagaggtgacacgaaacaggaggaaactcagtgacctctgcctctcccacattcctccccgcgggggaggacctcgccgctctgaagagcaccgtgcacatgtgggtgcacaaacgtgggtgttggtgtggacggggcgcagatctccgtggatgaactgcgtctggactcttagattcataaaatattcgagggtttgggagtcacagaccctcccctctcctcagtgcactttggcatttgcacggtgtcttccccggacagcacagcaataaatggtgtgattgcgtggagacaccgtggctctgttcttggccaagtttccccaccttctgcccaggactccactgctaattcgggcccatcttcctccccaaggaagacaaattctttttctagcgctgcagcagggaggtggggtgggcggtaaacagacaggctctggcagtgcagatctg

SEQ ID NO: 290094 - DNA, 2404 bp, Homo sapiens
gcgctgccgccgccgctttcgcccgggagccgggggccgggcgccatcatgctgagccggctcggggcgctgctgcaggaagccgtgggggcgcgcgagcccagcattgacctgctgcaggccttcgtggagcactggaagggcatcacgcactactacatcgagagcacagatgaaagcacccccgccaagaagacagacattccctggcggctgaagcagatgctggatatcctggtgtatgaagagcagcagcaggcggccgcgggtgaggcagggccctgcctggagtacctgctgcagcacaagatcctggagactctctgcacgctgggcaaggccgagtaccccccaggcatgcggcagcaggtgttccagttcttcagcaaggttctggcgcaggtgcagcaccccctgctgcattacctcagcgtccacaggcctgtgcagaaactcctccgacttggtgggactgcttccggatccgttacagaaaaggaggaggtgcagttcaccaccgtcctctgctccaagatccagcaggacccagagctgctcgcctacatcctggaaggtaaaaagattgtaggtaggaagaaagcatgcggagaacccactgccctgcctaaggacacaaccagccacggggacaaggactgctcccacgatggtgctcctgccaggccccagctggacggggagtcctgtggggcccaggccttgaacagccacatgcctgctgagaccgaggagctggacggtgggaccacagagagcaacctgattacctccctgcttgggctgtgccagagcaagaagagtcgggtggccttgaaggcccaggagaacctgctgctcctggtgagcatggcctccccagcagctgccacctacctggtacagagcagcgcctgctgccctgcgatcgtccggcacctttgccagttgtaccggtccatgcctgtcttcctggaccccgcagacattgccaccttagagggcatcagctggaggttacccagtgccccgtctgatgaggcttccttccctggcaaggaggccttggctgccttcttgggctggtttgattactgcgaccacctcatcacagaggcacacacggtggttgcggacgccttggcgaaggctgtggctgagaacttcttcgtggagaccctgcagccccagctcctgcacgtgtccgagcagagcatcttgacctccaccgccctcctcacagccatgctgcgccagcttcgctcccctgcgctgctgcgggaggccgtggctttcctcctgggcacagaccggcagcctgaagcccccggggacaacccccacaccctgtatgctcatctcatcgggcattgtgaccacctctctgatgagatcagcatcaccacactccggctgtttgaggagctgctgcagaagccccacgaggggatcatccacagcctggtcctgcgcaaccttgagggccgcccttacgtggcctggggctcaccagagcctgagagctatgaggacaccctagacctggaggaagacccctacttcaccgacagcttcctggattccggctttcaaactcccgcaaagcctcgcctagctcctgctaccagttacgatggcaaaacagcagtgaccgagatcgtcaacagtttcctgtgcctggtccccgaggaagccaagacctctgccttcctggaggagacaggctatgacacatacgtccacgatgcttatggcctgttccaggagtgcagctcccgcgtcgcctcctggggctggcctctgacccccacacctttggacccccatgagcccgagcgacctttcttcgagggccacttcctccgagtgctgtttgaccgcatgtcccggattctggatcagccatacagcctgaacctgcaggtgacctcggtcctgtcccggcttgccctcttcccccacccccatattcatgagtacctgctggatccgtacatcagcctggcccccggctgcaggagcctattctccgtgttggtgagggtgatcggggacttgatgcagagaatccagagggtaccccagttcccaggcaagctgctcctggtgcgcaagcagttgacgggccaggctcctggggagcagctggaccaccagaccctcctccagggcgtggtggtgctggaggagttctgcaaggagctggctgccattgccttcgtcaagtttcccccacatgatcctcctgggtcggggtttcgtacgtagcagaggcagcttactgattgccaccccctggccccttaatggccaccttaactaagggtgtgaacgggctgacttggtgaattgggcaactccttatagtgttgtgcacacaaaagcatcaaataaagaacatttaatc

SEQ ID NO: 290095 - DNA, 1237 bp, Homo sapiens
gcgctgccgccgccgctttcgcccgggagccgggggccgggcgccatcatgctgagccggctcggggcgctgctgcaggaagccgtgggggcgcgcgagcccagcattgacctgctgcaggccttcgtggagcactggaagggcatcacgcactactacatcgagagcacagatgaaagcacccccgccaagaagacagacattccctggcggctgaagcagatgctggatatcctggtgtatgaagagcagcagcaggcggccgcgggtgaggcagggccctgcctggagtacctgctgcagcacaagatcctggagactctctgcacgctgggcaaggccgagtaccccccaggcatgcggcagcaggtgttccagttcttcagcaaggttctggcgcaggtgcagcaccccctgctgcattacctcagcgtccacaggcctgtgcagaaactcctccgacttggtgggactgcttccggatccgttacagaaaaggaggaggtgcagttcaccaccgtcctctgctccaagatccagcaggacccagagctgctcgcctacatcctggaaggtaaaaagattgtaggtaggaagaaagcatgcggagaacccactgccctgcctaaggacacaaccagccacggggacaaggactgctcccacgatggtgctcctgccaggccccagctggacggggagtcctgtggggcccaggccttgaacagccacatgcctgctgagaccgaggagctggacggtgggaccacagagagcaacctgattacctccctgcttgggctgtgccagagcaagaagagtcgggtggccttgaaggcccaggagaacctgctgctcctggtgagcatggcctccccagcagctgccacctacctggtacagagcagcgcctgctgccctgcgatcgtccggcacctttgccagttgtaccggtccatgcctgtcttcctggaccccgcagacattgccaccttagagggcatcagctggaggttacccagtgccccgtctgatgaggcttccttccctggcaaggaggccttggctgccttcttgggctggtttgattactgcgaccacctcatcacagaggcacacacggtggttgcggacgccttggcgaaggctgtggctgagaacttcttcgtggaggctgcagtgaactgttatcgtgagaccgcacgtctcctaggaggcagagcaagacactgtctct

SEQ ID NO: 290096 - DNA, 2257 bp, Homo sapiens
gaaggccccgtgcggtgtgtttaactcggcgaggccagagcctgagagctatgaggacaccctagacctggaggaagacccctacttcaccgacagcttcctggattccggctttcaaactcccgcaaagcctcgcctagctcctgctaccagttacgatggcaaaacagcagtgaccgagatcgtcaacagtttcctgtgcctggtccccgaggaagccaagacctctgccttcctggaggagacaggctatgacacatacgtccacgatgcttatggcctgttccaggagtgcagctcccgcgtcgcctcctggggctggcctctgacccccacacctttggacccccatgagcccgagcgacctttcttcgagggccacttcctccgagtgctgtttgaccgcatgtcccggattctggatcagccatacagcctgaacctgcaggtgacctcggtcctgtcccggcttgccctcttcccccacccccatattcatgagtacctgctggatccgtacatcagcctggcccccggctgcaggagcctattctccgtgttggtgagggtgatcggggacttgatgcagagaatccagagggtaccccagttcccaggcaagctgctcctggtgcgcaagcagttgacgggccaggctcctggggagcagctggaccaccagaccctcctccagggcgtggtggtgctggaggagttctgcaaggagctggctgccattgccttcgtcaagtttcccccacatgatcctcgccagaacgtctccccagccccggaagggcaggtctgagccagcaccagggcggtgggagactcctgtccacacctctgccccagagctgcctcctgcctggcactgccgccacactcccctcctgggatggggcttctgctcccgggctcactcaaggagactgcggcatgttgaccacaccagactgggtttcagggaatgggcatgccaggtgccaaggagccaaacagatggctttccaggcagcaaggtccttggggccttcttggaggagcttgggtgacagccaggtgagcacccagaccccagaccctcatgtgctgtgtgcctggccccttctgtactggccatttgtggccagggccaagcctgtgactcaactccaggggcaagatggggagtgagctgatggctccgagactggtcaggagcccaggccagtgagatggggcctggagccttgtctgtgtcacattaggtaccatgggagctgctgagacctgacattttgtcccctgcctacatggcttggcccatggagaaggagcagtgaatgggatcgtcggggaagcccctcttcctgctctgctcccctggaaactgttgcaaaactcccagccgcctcatggcaaatgcccaaagcatgttccgcacccaggcgggggcccctgctaatgagaaccttggtgcagctgcagccaggaggggagcgggcccaggagccaggctcaggtccagctggttcctctctggcgccttctgaacccgtctcagcaggtccacagcacctgggcagaggtcagagaccaggggaggccgggccttgccctcccttctgcccagggcccagtgttcttgatagaagacccttctggggagccagggagctcaggggacagataagggaaggacgccccctgactccaggcccctgagcctggcgggaagtggctgcggcccaggcagccagtcctggtggtgttctccctgcatgccctccgtggctgggctgccaccccacccggcccgaatctgtcttgacctgcaggaatacacgggcggcgccaggcattacctcacagcgggactacacagttgctggctttgctcctgggcaaggaggagcaggccagagcctcttttgcttccttttcttgcccatgccgcttctagaagccaggcacaggttgccaagaggtgacacgaaacaggaggaaactcagtgacctctgcctctcccacattcctccccgcgggggaggacctcgccgctctgaagagcaccgtgcacatgtgggtgcacaaacgtgggtgttggtgtggacggggcgcagatctccgtggatgaactgcgtctggactcttagattcataaaatattcgagggtttgggagtcacagaccctcccctctcctcagtgcactttggcatttgcacggtgtcttccccggacagcacagcaataaatggtgtgattgcgtgga

SEQ ID NO: 290097 - DNA, 3729 bp, Homo sapiens
gcgctgccgccgccgctttcgcccgggagccgggggccgggcgccatcatgctgagccggctcggggcgctgctgcaggaagccgtgggggcgcgcgagcccagcattgacctgctgcaggccttcgtggagcactggaagggcatcacgcactactacatcgagagcacagatgaaagcacccccgccaagaagacagacattccctggcggctgaagcagatgctggatatcctggtgtatgaagagcagcagcaggcggccgcgggtgaggcagggccctgcctggagtacctgctgcagcacaagatcctggagactctctgcacgctgggcaaggccgagtaccccccaggcatgcggcagcaggtgttccagttcttcagcaaggttctggcgcaggtgcagcaccccctgctgcattacctcagcgtccacaggcctgtgcagaaactcctccgacttggtgggactgcttccggatccgttacagaaaaggaggaggtgcagttcaccaccgtcctctgctccaagatccagcaggacccagagctgctcgcctacatcctggaaggtaaaaagattgtaggtaggaagaaagcatgcggagaacccactgccctgcctaaggacacaaccagccacggggacaaggactgctcccacgatggtgctcctgccaggccccagctggacggggagtcctgtggggcccaggccttgaacagccacatgcctgctgagaccgaggagctggacggtgggaccacagagagcaacctgattacctccctgcttgggctgtgccagagcaagaagagtcgggtggccttgaaggcccaggagaacctgctgctcctggtgagcatggcctccccagcagctgccacctacctggtacagagcagcgcctgctgccctgcgatcgtccggcacctttgccagttgtaccggtccatgcctgtcttcctggaccccgcagacattgccaccttagagggcatcagctggaggttacccagtgccccgtctgatgaggcttccttccctggcaaggaggccttggctgccttcttgggctggtttgattactgcgaccacctcatcacagaggcacacacggtggttgcggacgccttggcgaaggctgtggctgagaacttcttcgtggagaccctgcagccccagctcctgcacgtgtccgagcagagcatcttgacctccaccgccctcctcacagccatgctgcgccagcttcgctcccctgcgctgctgcgggaggccgtggctttcctcctgggcacagaccggcagcctgaagcccccggggacaacccccacaccctgtatgctcatctcatcgggcattgtgaccacctctctgatgagatcagcatcaccacactccggctgtttgaggagctgctgcagaagccccacgaggggatcatccacagcctggtcctgcgcaaccttgagggccgcccttacgtggcctggggctcaccagagcctgagagctatgaggacaccctagacctggaggaagacccctacttcaccgacagcttcctggattccggctttcaaactcccgcaaagcctcgcctagctcctgctaccagttacgatggcaaaacagcagtgaccgagatcgtcaacagtttcctgtgcctggtccccgaggaagccaagacctctgccttcctggaggagacaggctatgacacatacgtccacgatgcttatggcctgttccaggagtgcagctcccgcgtcgcctcctggggctggcctctgacccccacacctttggacccccatgagcccgagcgacctttcttcgagggccacttcctccgagtgctgtttgaccgcatgtcccggattctggatcagccatacagcctgaacctgcaggtgacctcggtcctgtcccggcttgccctcttcccccacccccatattcatgagtacctgctggatccgtacatcagcctggcccccggctgcaggagcctattctccgtgttggtgagggtgatcggggacttgatgcagagaatccagagggtaccccagttcccaggcaagctgctcctggtgcgcaagcagttgacgggccaggctcctggggagcagctggaccaccagaccctcctccagggcgtggtggtgctggaggagttctgcaaggagctggctgccattgccttcgtcaagtttcccccacatgatcctcgccagaacgtctccccagccccggaagggcaggtctgagccagcaccagggcggtgggagactcctgtccacacctctgccccagagctgcctcctgcctggcactgccgccacactcccctcctgggatggggcttctgctcccgggctcactcaaggagactgcggcatgttgaccacaccagactgggtttcagggaatgggcatgccaggtgccaaggagccaaacagatggctttccaggcagcaaggtccttggggccttcttggaggagcttgggtgacagccaggtgagcacccagaccccagaccctcatgtgctgtgtgcctggccccttctgtactggccatttgtggccagggccaagcctgtgactcaactccaggggcaagatggggagtgagctgatggctccgagactggtcaggagcccaggccagtgagatggggcctggagccttgtctgtgtcacattaggtaccatgggagctgctgagacctgacattttgtcccctgcctacatggcttggcccatggagaaggagcagtgaatgggatcgtcggggaagcccctcttcctgctctgctcccctggaaactgttgcaaaactcccagccgcctcatggcaaatgcccaaagcatgttccgcacccaggcgggggcccctgctaatgagaaccttggtgcagctgcagccaggaggggagcgggcccaggagccaggctcaggtccagctggttcctctctggcgccttctgaacccgtctcagcaggtccacagcacctgggcagaggtcagagaccaggggaggccgggccttgccctcccttctgcccagggcccagtgttcttgatagaagacccttctggggagccagggagctcaggggacagataagggaaggacgccccctgactccaggcccctgagcctggcgggaagtggctgcggcccaggcagccagtcctggtggtgttctccctgcatgccctccgtggctgggctgccaccccacccggcccgaatctgtcttgacctgcaggaatacacgggcggcgccaggcattacctcacagcgggactacacagttgctggctttgctcctgggcaaggaggagcaggccagagcctcttttgcttccttttcttgcccatgccgcttctagaagccaggcacaggttgccaagaggtgacacgaaacaggaggaaactcagtgacctctgcctctcccacattcctccccgcgggggaggacctcgccgctctgaagagcaccgtgcacatgtgggtgcacaaacgtgggtgttggtgtggacggggcgcagatctccgtggatgaactgcgtctggactcttagattcataaaatattcgagggtttgggagtcacagaccctcccctctcctcagtgcactttggcatttgcacggtgtcttccccggacagcacagcaataaatggtgtgattgcgtgga

SEQ ID NO: 290098 - DNA, 4067 bp, Homo sapiens
gcgctgccgccgccgctttcgcccgggagccgggggccgggcgccatcatgctgagccggctcggggcgctgctgcaggaagccgtgggggcgacaactccaggaccttgttggggtgcaggacgcccttcccgtcaccccgggacgtgggaagtgcaggccctgccggtccaagtccccacgaaggcgcgagcccagcattgacctgctgcaggccttcgtggagcactggaagggcatcacgcactactacatcgagagcacaggtaacctgcccagtcgttcagaattggagccgagttcacggagacagagaaccagacagacagaagacccagagccctgggccactccactcctgatgatttagctgccggtcccactctgaccttttggaaagaggctgtgtgaggaaggagtagcctggttgggggtctcactggcctgactctgcaaggaagaggtggctgcacttcccccagcttccagctccagaccttcaggccccagatgaaagcacccccgccaagaagacagacattccctggcggctgaagcagatgctggatatcctggtgtatgaagagcagcagcaggcggccgcgggtgaggcagggccctgcctggagtacctgctgcagcacaagatcctggagactctctgcacgctgggcaaggccgagtaccccccaggcatgcggcagcaggtgttccagttcttcagcaaggttctggcgcaggtgcagcaccccctgctgcattacctcagcgtccacaggcctgtgcagaaactcctccgacttggtgggactgcttccggatccgttacagaaaaggaggaggtgcagttcaccaccgtcctctgctccaagatccagcaggacccagagctgctcgcctacatcctggaaggtaaaaagattgtaggtaggaagaaagcatgcggagaacccactgccctgcctaaggacacaaccagccacggggacaaggactgctcccacgatggtgctcctgccaggccccagctggacggggagtcctgtggggcccaggccttgaacagccacatgcctgctgagaccgaggagctggacggtgggaccacagagagcaacctgattacctccctgcttgggctgtgccagagcaagaagagtcgggtggccttgaaggcccaggagaacctgctgctcctggtgagcatggcctccccagcagctgccacctacctggtacagagcagcgcctgctgccctgcgatcgtccggcacctttgccagttgtaccggtccatgcctgtcttcctggaccccgcagacattgccaccttagagggcatcagctggaggttacccagtgccccgtctgatgaggcttccttccctggcaaggaggccttggctgccttcttgggctggtttgattactgcgaccacctcatcacagaggcacacacggtggttgcggacgccttggcgaaggctgtggctgagaacttcttcgtggagaccctgcagccccagctcctgcacgtgtccgagcagagcatcttgacctccaccgccctcctcacagccatgctgcgccagcttcgctcccctgcgctgctgcgggaggccgtggctttcctcctgggcacagaccggcagcctgaagcccccggggacaacccccacaccctgtatgctcatctcatcgggcattgtgaccacctctctgatgagatcagcatcaccacactccggctgtttgaggagctgctgcagaagccccacgaggggatcatccacagcctggtcctgcgcaaccttgagggccgcccttacgtggcctggggctcaccagagcctgagagctatgaggacaccctagacctggaggaagacccctacttcaccgacagcttcctggattccggctttcaaactcccgcaaagcctcgcctagctcctgctaccagttacgatggcaaaacagcagtgaccgagatcgtcaacagtttcctgtgcctggtccccgaggaagccaagacctctgccttcctggaggagacaggctatgacacatacgtccacgatgcttatggcctgttccaggagtgcagctcccgcgtcgcctcctggggctggcctctgacccccacacctttggacccccatgagcccgagcgacctttcttcgagggccacttcctccgagtgctgtttgaccgcatgtcccggattctggatcagccatacagcctgaacctgcaggtgacctcggtcctgtcccggcttgccctcttcccccacccccatattcatgagtacctgctggatccgtacatcagcctggcccccggctgcaggagcctattctccgtgttggtgagggtgatcggggacttgatgcagagaatccagagggtaccccagttcccaggcaagctgctcctggtgcgcaagcagttgacgggccaggctcctggggagcagctggaccaccagaccctcctccagggcgtggtggtgctggaggagttctgcaaggagctggctgccattgccttcgtcaagtttcccccacatgatcctcgccagaacgtctccccagccccggaagggcaggtctgagccagcaccagggcggtgggagactcctgtccacacctctgccccagagctgcctcctgcctggcactgccgccacactcccctcctgggatggggcttctgctcccgggctcactcaaggagactgcggcatgttgaccacaccagactgggtttcagggaatgggcatgccaggtgccaaggagccaaacagatggctttccaggcagcaaggtccttggggccttcttggaggagcttgggtgacagccaggtgagcacccagaccccagaccctcatgtgctgtgtgcctggccccttctgtactggccatttgtggccagggccaagcctgtgactcaactccaggggcaagatggggagtgagctgatggctccgagactggtcaggagcccaggccagtgagatggggcctggagccttgtctgtgtcacattaggtaccatgggagctgctgagacctgacattttgtcccctgcctacatggcttggcccatggagaaggagcagtgaatgggatcgtcggggaagcccctcttcctgctctgctcccctggaaactgttgcaaaactcccagccgcctcatggcaaatgcccaaagcatgttccgcacccaggcgggggcccctgctaatgagaaccttggtgcagctgcagccaggaggggagcgggcccaggagccaggctcaggtccagctggttcctctctggcgccttctgaacccgtctcagcaggtccacagcacctgggcagaggtcagagaccaggggaggccgggccttgccctcccttctgcccagggcccagtgttcttgatagaagacccttctggggagccagggagctcaggggacagataagggaaggacgccccctgactccaggcccctgagcctggcgggaagtggctgcggcccaggcagccagtcctggtggtgttctccctgcatgccctccgtggctgggctgccaccccacccggcccgaatctgtcttgacctgcaggaatacacgggcggcgccaggcattacctcacagcgggactacacagttgctggctttgctcctgggcaaggaggagcaggccagagcctcttttgcttccttttcttgcccatgccgcttctagaagccaggcacaggttgccaagaggtgacacgaaacaggaggaaactcagtgacctctgcctctcccacattcctccccgcgggggaggacctcgccgctctgaagagcaccgtgcacatgtgggtgcacaaacgtgggtgttggtgtggacggggcgcagatctccgtggatgaactgcgtctggactcttagattcataaaatattcgagggtttgggagtcacagaccctcccctctcctcagtgcactttggcatttgcacggtgtcttccccggacagcacagcaataaatggtgtgattgcgtgga

SEQ ID NO: 290099 - DNA, 3914 bp, Homo sapiens
gcgctgccgccgccgctttcgcccgggagccgggggccgggcgccatcatgctgagccggctcggggcgctgctgcaggaagccgtgggggcgacaactccaggaccttgttggggtgcaggacgcccttcccgtcaccccgggacgtgggaagtgcaggccctgccggtccaagtccccacgaaggcgcgagcccagcattgacctgctgcaggccttcgtggagcactggaagggcatcacgcactactacatcgagagcacaggtgcggcctggccctccccagcccagggaccctggagggagcggggaggaaggagtgtgcagagtgtcaccattcaggtgtcctgggaaagatgaaagcacccccgccaagaagacagacattccctggcggctgaagcagatgctggatatcctggtgtatgaagagcagcagcaggcggccgcgggtgaggcagggccctgcctggagtacctgctgcagcacaagatcctggagactctctgcacgctgggcaaggccgagtaccccccaggcatgcggcagcaggtgttccagttcttcagcaaggttctggcgcaggtgcagcaccccctgctgcattacctcagcgtccacaggcctgtgcagaaactcctccgacttggtgggactgcttccggatccgttacagaaaaggaggaggtgcagttcaccaccgtcctctgctccaagatccagcaggacccagagctgctcgcctacatcctggaaggtaaaaagattgtaggtaggaagaaagcatgcggagaacccactgccctgcctaaggacacaaccagccacggggacaaggactgctcccacgatggtgctcctgccaggccccagctggacggggagtcctgtggggcccaggccttgaacagccacatgcctgctgagaccgaggagctggacggtgggaccacagagagcaacctgattacctccctgcttgggctgtgccagagcaagaagagtcgggtggccttgaaggcccaggagaacctgctgctcctggtgagcatggcctccccagcagctgccacctacctggtacagagcagcgcctgctgccctgcgatcgtccggcacctttgccagttgtaccggtccatgcctgtcttcctggaccccgcagacattgccaccttagagggcatcagctggaggttacccagtgccccgtctgatgaggcttccttccctggcaaggaggccttggctgccttcttgggctggtttgattactgcgaccacctcatcacagaggcacacacggtggttgcggacgccttggcgaaggctgtggctgagaacttcttcgtggagaccctgcagccccagctcctgcacgtgtccgagcagagcatcttgacctccaccgccctcctcacagccatgctgcgccagcttcgctcccctgcgctgctgcgggaggccgtggctttcctcctgggcacagaccggcagcctgaagcccccggggacaacccccacaccctgtatgctcatctcatcgggcattgtgaccacctctctgatgagatcagcatcaccacactccggctgtttgaggagctgctgcagaagccccacgaggggatcatccacagcctggtcctgcgcaaccttgagggccgcccttacgtggcctggggctcaccagagcctgagagctatgaggacaccctagacctggaggaagacccctacttcaccgacagcttcctggattccggctttcaaactcccgcaaagcctcgcctagctcctgctaccagttacgatggcaaaacagcagtgaccgagatcgtcaacagtttcctgtgcctggtccccgaggaagccaagacctctgccttcctggaggagacaggctatgacacatacgtccacgatgcttatggcctgttccaggagtgcagctcccgcgtcgcctcctggggctggcctctgacccccacacctttggacccccatgagcccgagcgacctttcttcgagggccacttcctccgagtgctgtttgaccgcatgtcccggattctggatcagccatacagcctgaacctgcaggtgacctcggtcctgtcccggcttgccctcttcccccacccccatattcatgagtacctgctggatccgtacatcagcctggcccccggctgcaggagcctattctccgtgttggtgagggtgatcggggacttgatgcagagaatccagagggtaccccagttcccaggcaagctgctcctggtgcgcaagcagttgacgggccaggctcctggggagcagctggaccaccagaccctcctccagggcgtggtggtgctggaggagttctgcaaggagctggctgccattgccttcgtcaagtttcccccacatgatcctcgccagaacgtctccccagccccggaagggcaggtctgagccagcaccagggcggtgggagactcctgtccacacctctgccccagagctgcctcctgcctggcactgccgccacactcccctcctgggatggggcttctgctcccgggctcactcaaggagactgcggcatgttgaccacaccagactgggtttcagggaatgggcatgccaggtgccaaggagccaaacagatggctttccaggcagcaaggtccttggggccttcttggaggagcttgggtgacagccaggtgagcacccagaccccagaccctcatgtgctgtgtgcctggccccttctgtactggccatttgtggccagggccaagcctgtgactcaactccaggggcaagatggggagtgagctgatggctccgagactggtcaggagcccaggccagtgagatggggcctggagccttgtctgtgtcacattaggtaccatgggagctgctgagacctgacattttgtcccctgcctacatggcttggcccatggagaaggagcagtgaatgggatcgtcggggaagcccctcttcctgctctgctcccctggaaactgttgcaaaactcccagccgcctcatggcaaatgcccaaagcatgttccgcacccaggcgggggcccctgctaatgagaaccttggtgcagctgcagccaggaggggagcgggcccaggagccaggctcaggtccagctggttcctctctggcgccttctgaacccgtctcagcaggtccacagcacctgggcagaggtcagagaccaggggaggccgggccttgccctcccttctgcccagggcccagtgttcttgatagaagacccttctggggagccagggagctcaggggacagataagggaaggacgccccctgactccaggcccctgagcctggcgggaagtggctgcggcccaggcagccagtcctggtggtgttctccctgcatgccctccgtggctgggctgccaccccacccggcccgaatctgtcttgacctgcaggaatacacgggcggcgccaggcattacctcacagcgggactacacagttgctggctttgctcctgggcaaggaggagcaggccagagcctcttttgcttccttttcttgcccatgccgcttctagaagccaggcacaggttgccaagaggtgacacgaaacaggaggaaactcagtgacctctgcctctcccacattcctccccgcgggggaggacctcgccgctctgaagagcaccgtgcacatgtgggtgcacaaacgtgggtgttggtgtggacggggcgcagatctccgtggatgaactgcgtctggactcttagattcataaaatattcgagggtttgggagtcacagaccctcccctctcctcagtgcactttggcatttgcacggtgtcttccccggacagcacagcaataaatggtgtgattgcgtgga

SEQ ID NO: 290100 - DNA, 3823 bp, Homo sapiens
gcgctgccgccgccgctttcgcccgggagccgggggccgggcgccatcatgctgagccggctcggggcgctgctgcaggaagccgtgggggcgacaactccaggaccttgttggggtgcaggacgcccttcccgtcaccccgggacgtgggaagtgcaggccctgccggtccaagtccccacgaaggcgcgagcccagcattgacctgctgcaggccttcgtggagcactggaagggcatcacgcactactacatcgagagcacagatgaaagcacccccgccaagaagacagacattccctggcggctgaagcagatgctggatatcctggtgtatgaagagcagcagcaggcggccgcgggtgaggcagggccctgcctggagtacctgctgcagcacaagatcctggagactctctgcacgctgggcaaggccgagtaccccccaggcatgcggcagcaggtgttccagttcttcagcaaggttctggcgcaggtgcagcaccccctgctgcattacctcagcgtccacaggcctgtgcagaaactcctccgacttggtgggactgcttccggatccgttacagaaaaggaggaggtgcagttcaccaccgtcctctgctccaagatccagcaggacccagagctgctcgcctacatcctggaaggtaaaaagattgtaggtaggaagaaagcatgcggagaacccactgccctgcctaaggacacaaccagccacggggacaaggactgctcccacgatggtgctcctgccaggccccagctggacggggagtcctgtggggcccaggccttgaacagccacatgcctgctgagaccgaggagctggacggtgggaccacagagagcaacctgattacctccctgcttgggctgtgccagagcaagaagagtcgggtggccttgaaggcccaggagaacctgctgctcctggtgagcatggcctccccagcagctgccacctacctggtacagagcagcgcctgctgccctgcgatcgtccggcacctttgccagttgtaccggtccatgcctgtcttcctggaccccgcagacattgccaccttagagggcatcagctggaggttacccagtgccccgtctgatgaggcttccttccctggcaaggaggccttggctgccttcttgggctggtttgattactgcgaccacctcatcacagaggcacacacggtggttgcggacgccttggcgaaggctgtggctgagaacttcttcgtggagaccctgcagccccagctcctgcacgtgtccgagcagagcatcttgacctccaccgccctcctcacagccatgctgcgccagcttcgctcccctgcgctgctgcgggaggccgtggctttcctcctgggcacagaccggcagcctgaagcccccggggacaacccccacaccctgtatgctcatctcatcgggcattgtgaccacctctctgatgagatcagcatcaccacactccggctgtttgaggagctgctgcagaagccccacgaggggatcatccacagcctggtcctgcgcaaccttgagggccgcccttacgtggcctggggctcaccagagcctgagagctatgaggacaccctagacctggaggaagacccctacttcaccgacagcttcctggattccggctttcaaactcccgcaaagcctcgcctagctcctgctaccagttacgatggcaaaacagcagtgaccgagatcgtcaacagtttcctgtgcctggtccccgaggaagccaagacctctgccttcctggaggagacaggctatgacacatacgtccacgatgcttatggcctgttccaggagtgcagctcccgcgtcgcctcctggggctggcctctgacccccacacctttggacccccatgagcccgagcgacctttcttcgagggccacttcctccgagtgctgtttgaccgcatgtcccggattctggatcagccatacagcctgaacctgcaggtgacctcggtcctgtcccggcttgccctcttcccccacccccatattcatgagtacctgctggatccgtacatcagcctggcccccggctgcaggagcctattctccgtgttggtgagggtgatcggggacttgatgcagagaatccagagggtaccccagttcccaggcaagctgctcctggtgcgcaagcagttgacgggccaggctcctggggagcagctggaccaccagaccctcctccagggcgtggtggtgctggaggagttctgcaaggagctggctgccattgccttcgtcaagtttcccccacatgatcctcgccagaacgtctccccagccccggaagggcaggtctgagccagcaccagggcggtgggagactcctgtccacacctctgccccagagctgcctcctgcctggcactgccgccacactcccctcctgggatggggcttctgctcccgggctcactcaaggagactgcggcatgttgaccacaccagactgggtttcagggaatgggcatgccaggtgccaaggagccaaacagatggctttccaggcagcaaggtccttggggccttcttggaggagcttgggtgacagccaggtgagcacccagaccccagaccctcatgtgctgtgtgcctggccccttctgtactggccatttgtggccagggccaagcctgtgactcaactccaggggcaagatggggagtgagctgatggctccgagactggtcaggagcccaggccagtgagatggggcctggagccttgtctgtgtcacattaggtaccatgggagctgctgagacctgacattttgtcccctgcctacatggcttggcccatggagaaggagcagtgaatgggatcgtcggggaagcccctcttcctgctctgctcccctggaaactgttgcaaaactcccagccgcctcatggcaaatgcccaaagcatgttccgcacccaggcgggggcccctgctaatgagaaccttggtgcagctgcagccaggaggggagcgggcccaggagccaggctcaggtccagctggttcctctctggcgccttctgaacccgtctcagcaggtccacagcacctgggcagaggtcagagaccaggggaggccgggccttgccctcccttctgcccagggcccagtgttcttgatagaagacccttctggggagccagggagctcaggggacagataagggaaggacgccccctgactccaggcccctgagcctggcgggaagtggctgcggcccaggcagccagtcctggtggtgttctccctgcatgccctccgtggctgggctgccaccccacccggcccgaatctgtcttgacctgcaggaatacacgggcggcgccaggcattacctcacagcgggactacacagttgctggctttgctcctgggcaaggaggagcaggccagagcctcttttgcttccttttcttgcccatgccgcttctagaagccaggcacaggttgccaagaggtgacacgaaacaggaggaaactcagtgacctctgcctctcccacattcctccccgcgggggaggacctcgccgctctgaagagcaccgtgcacatgtgggtgcacaaacgtgggtgttggtgtggacggggcgcagatctccgtggatgaactgcgtctggactcttagattcataaaatattcgagggtttgggagtcacagaccctcccctctcctcagtgcactttggcatttgcacggtgtcttccccggacagcacagcaataaatggtgtgattgcgtgga

SEQ ID NO: 290101 - DNA, 3638 bp, Homo sapiens
gcgctgccgccgccgctttcgcccgggagccgggggccgggcgccatcatgctgagccggctcggggcgctgctgcaggaagccgtgggggcgcgcgagcccagcattgacctgctgcaggccttcgtggagcactggaagggcatcacgcactactacatcgagagcacagatgaaagcacccccgccaagaagacagacattccctggcggctgaagcagatgctggatatcctggtgtatgaagagcagcagcaggcggccgcgggtgaggcagggccctgcctggagtacctgctgcagcacaagatcctggagactctctgcacgctgggcaaggccgagtaccccccaggcatgcggcagcaggtgttccagttcttcagcaaggttctggcgcaggtgcagcaccccctgctgcattacctcagcgtccacaggcctgtgcagaaactcctccgacttggtgggactgcttccggatccgttacagaaaaggaggaggtgcagttcaccaccgtcctctgctccaagatccagcaggacccagagctgctcgcctacatcctggaaggtaaaaagattgtaggtaggaagaaagcatgcggagaacccactgccctgcctaaggacacaaccagccacggggacaaggactgctcccacgatggtgctcctgccaggccccagctggacggggagtcctgtggggcccaggccttgaacagccacatgcctgctgagaccgaggagctggacggtgggaccacagagagcaacctgattacctccctgcttgggctgtgccagagcaagaagagtcgggtggccttgaaggcccaggagaacctgctgctcctggtgagcatggcctccccagcagctgccacctacctggtacagagcagcgcctgctgccctgcgatcgtccggcacctttgccagttgtaccggtccatgcctgtcttcctggaccccgcagacattgccaccttagagggcatcagctggaggttacccagtgccccgtctgatgaggcttccttccctggcaaggaggccttggctgccttcttgggctggtttgattactgcgaccacctcatcacagaggcacacacggtggttgcggacgccttggcgaaggctgtggctgagaacttcttcgtggagaccctgcagccccagctcctgcacgtgtccgagcagagcatcttgacctccaccgccctcctcacagccatgctgcgccagcttcgctcccctgcgctgctgcgggaggccgtggctttcctcctgggcacagaccggcagcctgaagcccccggggacaacccccacaccctgtatgctcatctcatcgggcattgtgaccacctctctgatgagatcagcatcaccacactccggctgtttgaggagctgctgcagaagccccacgaggggatcatccacagcctggtcctgcgcaaccttgagggccgcccttacgtggcctggggctcaccagagcctgagagctatgaggacaccctagacctggaggaagacccctacttcaccgacagcttcctggattccggctttcaaactcccgcaaagcctcgcctagctcctgctaccagttacgatggcaaaacagcagtgaccgagatcgtcaacagttccaggagtgcagctcccgcgtcgcctcctggggctggcctctgacccccacacctttggacccccatgagcccgagcgacctttcttcgagggccacttcctccgagtgctgtttgaccgcatgtcccggattctggatcagccatacagcctgaacctgcaggtgacctcggtcctgtcccggcttgccctcttcccccacccccatattcatgagtacctgctggatccgtacatcagcctggcccccggctgcaggagcctattctccgtgttggtgagggtgatcggggacttgatgcagagaatccagagggtaccccagttcccaggcaagctgctcctggtgcgcaagcagttgacgggccaggctcctggggagcagctggaccaccagaccctcctccagggcgtggtggtgctggaggagttctgcaaggagctggctgccattgccttcgtcaagtttcccccacatgatcctcgccagaacgtctccccagccccggaagggcaggtctgagccagcaccagggcggtgggagactcctgtccacacctctgccccagagctgcctcctgcctggcactgccgccacactcccctcctgggatggggcttctgctcccgggctcactcaaggagactgcggcatgttgaccacaccagactgggtttcagggaatgggcatgccaggtgccaaggagccaaacagatggctttccaggcagcaaggtccttggggccttcttggaggagcttgggtgacagccaggtgagcacccagaccccagaccctcatgtgctgtgtgcctggccccttctgtactggccatttgtggccagggccaagcctgtgactcaactccaggggcaagatggggagtgagctgatggctccgagactggtcaggagcccaggccagtgagatggggcctggagccttgtctgtgtcacattaggtaccatgggagctgctgagacctgacattttgtcccctgcctacatggcttggcccatggagaaggagcagtgaatgggatcgtcggggaagcccctcttcctgctctgctcccctggaaactgttgcaaaactcccagccgcctcatggcaaatgcccaaagcatgttccgcacccaggcgggggcccctgctaatgagaaccttggtgcagctgcagccaggaggggagcgggcccaggagccaggctcaggtccagctggttcctctctggcgccttctgaacccgtctcagcaggtccacagcacctgggcagaggtcagagaccaggggaggccgggccttgccctcccttctgcccagggcccagtgttcttgatagaagacccttctggggagccagggagctcaggggacagataagggaaggacgccccctgactccaggcccctgagcctggcgggaagtggctgcggcccaggcagccagtcctggtggtgttctccctgcatgccctccgtggctgggctgccaccccacccggcccgaatctgtcttgacctgcaggaatacacgggcggcgccaggcattacctcacagcgggactacacagttgctggctttgctcctgggcaaggaggagcaggccagagcctcttttgcttccttttcttgcccatgccgcttctagaagccaggcacaggttgccaagaggtgacacgaaacaggaggaaactcagtgacctctgcctctcccacattcctccccgcgggggaggacctcgccgctctgaagagcaccgtgcacatgtgggtgcacaaacgtgggtgttggtgtggacggggcgcagatctccgtggatgaactgcgtctggactcttagattcataaaatattcgagggtttgggagtcacagaccctcccctctcctcagtgcactttggcatttgcacggtgtcttccccggacagcacagcaataaatggtgtgattgcgtgga

SEQ ID NO: 290102 - DNA, 2971 bp, Homo sapiens
gcgctgccgccgccgctttcgcccgggagccgggggccgggcgccatcatgctgagccggctcggggcgctgctgcaggaagccgtgggggcgcgcgagcccagcattgacctgctgcaggccttcgtggagcactggaagggcatcacgcactactacatcgagagcacagatgaaagcacccccgccaagaagacagacattccctggcggctgaagcagatgctggatatcctggtgtatgaagagcagcagcaggcggccgcgggtgaggcagggccctgcctggagtacctgctgcagcacaagatcctggagactctctgcacgctgggcaaggccgagtaccccccaggcatgcggcagcaggtgttccagttcttcagcaaggttctggcgcaggtgcagcaccccctgctgcattacctcagcgtccacaggcctgtgcagaaactcctccgacttggtgggactgcttccggatccgttacagaaaaggaggaggtgcagttcaccaccgtcctctgctccaagatccagcaggacccagagctgctcgcctacatcctggaaggtaaaaagattgtaggtaggaagaaagcatgcggagaacccactgccctgcctaaggacacaaccagccacggggacaaggactgctcccacgatggtgctcctgccaggccccagctggacggggagtcctgtggggcccaggccttgaacagccacatgcctgctgagaccgaggagctggacggtgggaccacagagagcaacctgattacctccctgcttgggctgtgccagagcaagaagagtcgggtggccttgaaggcccaggagaacctgctgctcctggtgagcatggcctccccagcagctgccacctacctggtacagagcagcgcctgctgccctgcgatcgtccggcacctttgccagttgtaccggtccatgcctgtcttcctggaccccgcagacattgccaccttagagggcatcagctggaggttacccagtgccccgtctgatgaggcttccttccctggcaaggaggccttggctgccttcttgggctggtttgattactgcgaccacctcatcacagaggcacacacggtggttgcggacgccttggcgaaggctgtggctgagaacttcttcgtggagaccctgcagccccagctcctgcacgtgtccgagcagagcatcttgacctccaccgccctcctcacagccatgctgcgccagcttcgctcccctgcgctgctgcgggaggccgtggctttcctcctgggcacagaccggcagcctgaagcccccggggacaacccccacaccctgtatgctcatctcatcgggcattgtgaccacctctctgatgagatcagcatcaccacactccggctgtttgaggagctgctgcagaagccccacgaggggatcatccacagcctggtcctgcgcaaccttgagggccgcccttacgtggcctggggctcaccagagcctgagagctatgaggacaccctagacctggaggaagacccctacttcaccgacagcttcctggattccggctttcaaactcccgcaaagcctcgcctagctcctgctaccagttacgatggcaaaacagcagtgaccgagatcgtcaacagtttcctgtgcctggtccccgaggaagccaagacctctgccttcctggaggagacaggctatgacacatacgtccacgatgcttatggcctgttccaggagtgcagctcccgcgtcgcctcctggggctggcctctgacccccacacctttggacccccatgagcccgagcgacctttcttcgagggccacttcctccgagtgctgtttgaccgcatgtcccggattctggatcagccatacagcctgaacctgcaggtgacctcggtcctgtcccggcttgccctcttcccccacccccatattcatgagtacctgctggatccgtacatcagcctggcccccggctgcaggagcctattctccgtgttggtgagggtgatcggggacttgatgcagagaatccagagggtaccccagttcccaggcaagctgctcctggtgcgcaagcagttgacgggccaggctcctggggagcagctggaccaccagaccctcctccagggcgtggtggtgctggaggagttctgcaaggagctggctgccattgccttcgtcaagtttcccccacatgatcctcgccagaacgtctccccagccccggaagggcaggtctgagccagcaccagggcggtgggagactcctgtccacacctctgccccagagctgcctcctgcctggcactgccgccacactcccctcctgggatggggcttctgctcccgggctcactcaaggagactgcggcatgttgaccacaccagactgggtttcagggaatgggcatgccaggtgccaaggagccaaacagatggctttccaggcagcaaggtccttggggccttcttggaggagcttgggtgacagccaggaatacacgggcggcgccaggcattacctcacagcgggactacacagttgctggctttgctcctgggcaaggaggagcaggccagagcctcttttgcttccttttcttgcccatgccgcttctagaagccaggcacaggttgccaagaggtgacacgaaacaggaggaaactcagtgacctctgcctctcccacattcctccccgcgggggaggacctcgccgctctgaagagcaccgtgcacatgtgggtgcacaaacgtgggtgttggtgtggacggggcgcagatctccgtggatgaactgcgtctggactcttagattcataaaatattcgagggtttgggagtcacagaccctcccctctcctcagtgcactttggcatttgcacggtgtcttccccggacagcacagcaataaatggtgtgattgcgtgga

SEQ ID NO: 290103 - DNA, 1358 bp, Homo sapiens
gcgagctgtctatgagtatccctcgtgatccgatctctgcgcgtttgacacaccagactgggtttcagggaatgggcatgccaggtgccaaggagccaaacagatggctttccaggcagcaaggtccttggggccttcttggaggagcttgggtgacagccaggtgagcacccagaccccagaccctcatgtgctgtgtgcctggccccttctgtactggccatttgtggccagggccaagcctgtgactcaactccaggggcaagatggggagtgagctgatggctccgagactggtcaggagcccaggccagtgagatggggcctggagccttgtctgtgtcacattaggtaccatgggagctgctgagacctgacattttgtcccctgcctacatggcttggcccatggagaaggagcagtgaatgggatcgtcggggaagcccctcttcctgctctgctcccctggaaactgttgcaaaactcccagccgcctcatggcaaatgcccaaagcatgttccgcacccaggcgggggcccctgctaatgagaaccttggtgcagctgcagccaggaggggagcgggcccaggagccaggctcaggtccagctggttcctctctggcgccttctgaacccgtctcagcaggtccacagcacctgggcagaggtcagagaccaggggaggccgggccttgccctcccttctgcccagggcccagtgttcttgatagaagacccttctggggagccagggagctcaggggacagataagggaaggacgccccctgactccaggcccctgagcctggcgggaagtggctgcggcccaggcagccagtcctggtggtgttctccctgcatgccctccgtggctgggctgccaccccacccggcccgaatctgtcttgacctgcaggaatacacgggcggcgccaggcattacctcacagcgggactacacagttgctggctttgctcctgggcaaggaggagcaggccagagcctcttttgcttccttttcttgcccatgccgcttctagaagccaggcacaggttgccaagaggtgacacgaaacaggaggaaactcagtgacctctgcctctcccacattcctccccgcgggggaggacctcgccgctctgaagagcaccgtgcacatgtgggtgcacaaacgtgggtgttggtgtggacggggcgcagatctccgtggatgaactgcgtctggactcttagattcataaaatattcgagggtttgggagtcacagaccctcccctctcctcagtgcactttggcatttgcacggtgtcttccccggacagcacagcaataaatggtgtgattgcgtgga

SEQ ID NO: 290104 - DNA, 2891 bp, Homo sapiens
gcgctgccgccgccgctttcgcccgggagccgggggccgggcgccatcatgctgagccggctcggggcgctgctgcaggaagccgtgggggcgcgcgagcccagcattgacctgctgcaggccttcgtggagcactggaagggcatcacgcactactacatcgagagcacagatgaaagcacccccgccaagaagacagacattccctggcggctgaagcagatgctggatatcctggtgtatgaagagcagcagcaggcggccgcgggtgaggcagggccctgcctggagtacctgctgcagcacaagatcctggagactctctgcacgctgggcaaggccgagtaccccccaggcatgcggcagcaggtgttccagttcttcagcaaggttctggcgcaggtgcagcaccccctgctgcattacctcagcgtccacaggcctgtgcagaaactcctccgacttggtgggactgcttccggatccgttacagaaaaggaggaggtgcagttcaccaccgtcctctgctccaagatccagcaggacccagagctgctcgcctacatcctggaaggtaaaaagattgtaggtaggaagaaagcatgcggagaacccactgccctgcctaaggacacaaccagccacggggacaaggactgctcccacgatggtgctcctgccaggccccagctggacggggagtcctgtggggcccaggccttgaacagccacatgcctgctgagaccgaggagctggacggtgggaccacagagagcaacctgattacctccctgcttgggctgtgccagagcaagaagagtcgggtggccttgaaggcccaggagaacctgctgctcctggtgagcatggcctccccagcagctgccacctacctggtacagagcagcgcctgctgccctgcgatcgtccggcacctttgccagttgtaccggtccatgcctgtcttcctggaccccgcagacattgccaccttagagggcatcagctggaggttacccagtgccccgtctgatgaggcttccttccctggcaaggaggccttggctgccttcttgggctggtttgattactgcgaccacctcatcacagaggcacacacggtggttgcggacgccttggcgaaggctgtggctgagaacttcttcgtggagaccctgcagccccagctcctgcacgtgtccgagcagagcatcttgacctccaccgccctcctcacagccatgctgcgccagcttcgctcccctgcgctgctgcgggaggccgtggctttcctcctgggcacagaccggcagcctgaagcccccggggacaacccccacaccctgtatgctcatctcatcgggcattgtgaccacctctctgatgagatcagcatcaccacactccggctgtttgaggagctgctgcagaagccccacgaggggatcatccacagcctggtcctgcgcaaccttgagggccgcccttacgtggcctggggctcaccagagcctgagagctatgaggacaccctagacctggaggaagacccctacttcaccgacagcttcctggattccggctttcaaactcccgcaaagcctcgcctagctcctgctaccagttacgatggcaaaacagcagtgaccgagatcgtcaacagtttcctgtgcctggtccccgaggaagccaagacctctgccttcctggaggagacaggctatgacacatacgtccacgatgcttatggcctgttccaggagtgcagctcccgcgtcgcctcctggggctggcctctgacccccacacctttggacccccatgagcccgagcgacctttcttcgagggccacttcctccgagtgctgtttgaccgcatgtcccggattctggatcagccatacagcctgaacctgcaggtgacctcggtcctgtcccggcttgccctcttcccccacccccatattcatgagtacctgctggatccgtacatcagcctggcccccggctgcaggagcctattctccgtgttggtgagggtgatcggggacttgatgcagagaatccagagggtaccccagttcccaggcaagctgctcctggtgcgcaagcagttgacgggccaggctcctggggagcagctggaccaccagaccctcctccagggcgtggtggtgctggaggagttctgcaaggagctggctgccattgccttcgtcaagtttcccccacatgatcctcgccagaacgtctccccagccccggaagggcaggtctgagccagcaccagggcggtgggagactcctgtccacacctctgccccagagctgcctcctgcctggcactgccgccacactcccctcctgggatggggcttctgctcccgggctcactcaaggagactgcggcatgttgaccacaccagactgggtttcagggaatgggcatgccaggtgccaaggagccaaacagatggctttccaggcagcaaggtccttggggccttcttggaggagcttgggtgacagccaggtgagcacccagaccccagaccctcatgtgctgtgtgcctggccccttctgtactggccatttgtggccagggccaagcctgtgactcaactccaggggcaagatggggagtgagctgatggctccgagactggtcaggagcccaggccagtgagatggggcctggagccttgtctgtgtcacattaggtaccatgggagctgctgagacctgacattttgtcccctgcctacatggcttggcccatggagaaggagcagtgaatgggatcgtcggggaagcccctcttcctgctctgctcccctggaaactgttgcaaaactcccagccgcggagtccgatccggggtcgagctgg

SEQ ID NO: 290105 - DNA, 1208 bp, Homo sapiens
gcgctgccgccgccgctttcgcccgggagccgggggccgggcgccatcatgctgagccggctcggggcgctgctgcaggaagccgtgggggcgacaactccaggaccttgttggggtgcaggacgcccttcccgtcaccccgggacgtgggaagtgcaggccctgccggtccaagtccccacgaaggcgcgagcccagcattgacctgctgcaggccttcgtggagcactggaagggcatcacgcactactacatcgagagcacaggtaacctgcccagtcgttcagaattggagccgagttcacggagacagagaaccagacagacagaagacccagagccctgggccactccactcctgatgatttagctgccggtcccactctgaccttttggaaagaggctgtgtgaggaaggagtagcctggttgggggtctcactggcctgactctgcaaggaagaggtggctgcacttcccccagcttccagctccagaccttcaggccccagatgaaagcacccccgccaagaagacagacattccctggcggctgaagcagatgctggatatcctggtgtatgaagagcagcagcaggcggccgcgggtgaggcagggccctgcctggagtacctgctgcagcacaagatcctggagactctctgcacgctgggcaaggccgaggtgggaggccctctgcgcgctgggccaggccgaggtgggaggcctctgcgcgcttggccaggccgaggtgggaggcctctgtgcgctgggccaggccgaggtgggagaccctctgagtgctgggccaggctgaggtgggcggtgggcagtgggcagcctggggctccctggattccaggcctttctgcctatgctcttcccagtcctgacactgaaagtggcagttcgggcgagaggagcaaacaggacgggcactgtggctgtctcacttagaacactccaccatcccagcgctcctgttcccagttcactccacaaagatgggcctgccatgtgccaggctctgctctagatgctggggacacagcagggattcatactgacaagagccaggcatggtgatgcgtgcctgtagccccagctacgtgggaggccgaggtgggtggattgcttgagcccaggagatggaggctgcagtgaactgttatcgtgagaccgcactcctgcctaggaggcagagcaaga

SEQ ID NO: 290106 - DNA, 1040 bp, Homo sapiens
agctcggtacccgccgccgggattcctacgcactactacatcgagagcacaggtgcggcctggccctccccagcccagggaccctggagggagcggggaggaaggagtgtgcagagtgtcaccattcaggtgtcctgggaaaggtaacctgcccagtcgttcagaattggagccgagttcacggagacagagaaccagacagacagaagacccagagccctgggccactccactcctgatgatttagctgccggtcccactctgaccttttggaaagaggctgtgtgaggaaggagtagcctggttgggggtctcactggcctgactctgcaaggaagaggtggctgcacttcccccagcttccagctccagaccttcaggccccaggtgcttgtgcctaggatttaatgatcaaaagaaaagaatttaataaattcccctttcccctgagccagcttaggggcaatgtccttgtagagatctggggtaggaggagaacgaaaaccaaggtgggtaacatgcctgggtccctctctccaagctgacaccccaaagagccaaagccttggcacctggtcccatcaggaccgctcactgaggggatggcatctgagtggctgctctgcagtcatgaggctgccatgggtggatacggactggttgccaggtaaccatatcctgcatccctcacttttcccttcctggagttcatactggggcttgatcccagcccacacctttcctacaggctttctttccagcccgggccagcccaggaaattcagaaatctgtgggaccctctgagggttctgctagaccaggtttctcaatcttggcacagttggcattggacctggagccttccctgcgcggggctgtcctgggcggtgtgggatgtgcagcagtaattctggcctctacccactaggtgccagtagcacaccccacccccgaattgggacaaccaggaaggtctccagacattgcctcatgttccctgggggggaaaagcgcacccctggttctgaacctatctctt

SEQ ID NO: 290107 - DNA, 2042 bp, Homo sapiens
aaagggccggctgtttcggcggccgcgggatgcccctgcgctgaccgccaggggcaggtgcccgcccgcgtagacgcacccggcctgaccccgcgccaccatgtaaacggcgccagcaggcggacgctggcttctccgcctgggacccctccgccccgacccgggccccgcggccctcgatgaggacacaccatgctgaccggggtgaccgacggtatcttctgttgcctgctgggcacgccccccaacgccgtggggccactggagagcgtcgagtccagcgatggctacacctttgtagaggtcaagcccggccgcgtgctgcgggtgaagcatgcaggacccgccccagccgctgccccacctccaccatcatccgcatcctcggatgcagcccagggggacctctccggcttggtccgctgtcagcgccggatcaccgtgtaccgcaatgggcggttgctggtggaaaacctgggccgagcccctcgagccgacctcctacacgggcagaatggctctggggagccgccggccgccctggaggtggagctggcagatccggcgggcagcgatggccgcttggcccccggcagcgcaggcagcggcagcggcagtggcagtggtgggcggcggcggcgagccaggcgccccaagaggaccatccatattgactgtgagaagcgcatcactagctgcaaaggcgcccaggccgacgtggtgctctttttcatccatggtgtcggcggttccctggccatctggaaggagcagctggacttctttgtgcgcctaggctatgaggtggtggctcctgacctggccggccacggggccagctctgcgccccaggtggccgcagcctacaccttctatgcgctggctgaggacatgcgagcaatcttcaagcgctatgccaagaagcgaaatgtgctcattggccattcctacggtgtctctttctgcacattcctggcacatgagtacccagacctagtgcacaaggtgatcatgatcaatggcgggggccctacggcgctggagcccagcttctgctcaatcttcaacatgcccacctgcgtcctgcactgcttgtcgccctgcctggcctggagcttcctcaaggccggcttcgcccgccaaggagccaaggagaagcagctgttaaaggagggcaacgctttcaacgtgtcatccttcgtactccgggccatgatgagcggccagtactggcccgagggcgacgaggtctaccacgccgagctcaccgtgcccgtcctgcttgtccacggcatgcacgataagtttgtgccggtggaggaagaccagcgcatggccgagatcctgctcctggcattcctgaagctcatcgacgagggcagccacatggtgatgctggaatgccctgagacggtcaacacgctgctccacgaattcctgctctgggagcccgagccctcgcccaaggctctaccggagccactgccggcgcctccagaagacaagaagtagccgctgggccggcggggcatcgcttggtgagcacagccgcagcaggaggaggcccgagcctgcgccaggtctgcagcgcagaccacctgggcgggccgttcgctccggtgggcggggccaggtcagggagacgcccccaggctgcctgggcggggcgtggcatccgagggagcccagcggacattccgctctccgcttccgtcccgcggggcccatcggcgttttggggccgcagccgggaccctcacggaagatgaccttgtacagaagctctccctcaccttccccccaacgccacggccaaggcaggccccccaccccgctgtcttccgtgtcagccgtgcttgatcctgggacccacgagccccacagggaccctcgaggccccatcccgttatccgagacccttcctaccccccattcctcggcgctgggagctatttttgcccaagggggggggatgggggggctggcgccaccgaacctgcacatctcaacttgtaactcaataaacagaagtgacaatcgga

SEQ ID NO: 290108 - DNA, 2628 bp, Homo sapiens
aaagggccggctgtttcggcggccgcgggatgcccctgcgctgaccgccaggggcaggtgcccgcccgcgtagacgcacccggcctgaccccgcgccaccatgtaaacggcgccagcaggcggacgctggcttctccgcctgggacccctccgccccgacccgggccccgcggccctcgatgaggacacaccatgctgaccggggtgaccgacggtatcttctgttgcctgctgggcacgccccccaacgccgtggggccactggagagcgtcgagtccagcgatggctacacctttgtagaggtcaagcccggccgcgtgctgcgggtgaagcatgcaggacccgccccagccgctgccccacctccaccatcatccgcatcctcggatgcagcccagggggacctctccggcttggtccgctgtcagcgccggatcaccgtgtaccgcaatgggcggttgctggtggaaaacctgggccgagcccctcgagccgacctcctacacgggcagaatggctctggggagccgccggccgccctggaggtggagctggcagatccggcgggcagcgatggccgcttggcccccggcagcgcaggcagcggcagcggcagtggcagtggtgggcggcggcggcgagccaggcgccccaagaggaccatccatattgactgtgagaagcgcatcactagctgcaaaggcgcccaggccgacgtggtgctctttttcatccatggtgtcggcggttccctggccatctggaaggagcagctggacttctttgtgcgcctaggctatgaggtggtggctcctgacctggccggccacggggccagctctgcgccccaggtggccgcagcctacaccttctatgcgctggctgaggacatgcgagcaatcttcaagcgctatgccaagaagcgaaatgtgctcattggccattcctacggtgtctctttctgcacattcctggcacatgagtacccagacctagtgcacaaggtgatcatgatcaatggcgggggccctacggcgctggagcccagcttctgctcaatcttcaacatgcccacctgcgtcctgcactgcttgtcgccctgcctggcctggagcttcctcaaggccggcttcgcccgccaaggagccaaggagaagcagctgttaaaggagggcaacgctttcaacgtgtcatccttcgtactccgggccatgatgagcggccagtactggcccgagggcgacgaggtctaccacgccgagctcaccgtgcccgtcctgcttgtccacggcatgcacgataagtttgtgccggtggaggaagaccagcgcatggccgagatcctgctcctggcattcctgaagctcatcgacgagggcagccacatggtgatgctggaatgccctgagacggtcaacacgctgctccacgaattcctgctctgggagcccgagccctcgcccaaggctctaccggagccactgccggcgcctccagaagacaagaagtagccgctgggccggcggggcatcgcttggtgagcacagccgcagcaggaggaggcccgagcctgcgccaggtctgcagcgcagaccacctgggcgggccgttcgctccggtgggcggggccaggtcagggagacgcccccaggctgcctgggcggggcgtggcatccgagggagcccagcggacattccgctctccgcttccgtcccgcggggcccatcggcgttttggggccgcagccgggaccctcacggaagatgaccttgtacagaagctctccctcaccttccccccaacgccacggccaaggcaggccccccaccccgctgtcttccgtgtcagccgtgcttgatcctgggacccacgagccccacagggaccctcgaggccccatcccgttatccgagacccttcctaccccccattcctcggcgctgggagctatttttgcccaagggggggggatgggggggctggcgccaccgaacctgcacatctcaacttgtaactcaataaacagaagtgacaatcggaaaaaaaaaaaaaaaaaaaaaaaaaaaaaaaaaaaaaaaagggggccccttggaatttaaaaaaaccacccatgaaaacccaaaaattttttgcccagggttctctcaaacacccacagggacaccttcagtataaatctcacggggccagaatttcctaccactcccgtggggagagacccccggtaaaccaaacccctgctttggcaaagtgcttctacaagggagatggcattaaagaacccgacccccttaaggggaggcccttgtaaacccctctttagaggcagacaccctcggacgctcgtcggccaactaaacatttcgcgccttgtaagagacccccctctccccatataaggatgtgtttcgtgacccctttttgtctattacacccgctttgctttaaacaacacagaggggggcgtataaaatttacccaggcgccaagcttgcctacccatttgttgcacggggccataggggtgaaatagaggcaggcgttaacaccgtgggacacgtctggttggagaccctcggcgtattcgaccctcaatagcggcaatcgaggtcaccttcgcattgta

SEQ ID NO: 290109 - DNA, 2030 bp, Homo sapiens
aaagggccggctgtttcggcggccgcgggatgcccctgcgctgaccgccaggggcaggtgcccgcccgcgtagacgcacccggcctgaccccgcgccaccatgtaaacggcgccagcaggcggacgctggcttctccgcctgggacccctccgccccgacccgggccccgcggccctcgatgaggacacaccatgctgaccggggtgaccgacggtatcttctgttgcctgctgggcacgccccccaacgccgtggggccactggagagcgtcgagtccagcgatggctacacctttgtagaggtcaagcccggccgcgtgctgcgggtgaagcatgcaggacccgccccagccgctgccccacctccaccatcatccgcatcctcggatgcagcccagggggacctctccggcttggtccgctgtcagcgccggatcaccgtgtaccgcaatgggcggttgctggtggaaaacctgggccgagcccctcgagccgacctcctacacgggcagaatggctctggggagccgccggccgccctggaggtggagctggcagatccggcgggcagcgatggccgcttggcccccggcagcgcaggcagcggcagcggcagtggcagtggtgggcggcggcggcgagccaggcgccccaagaggaccatccatattgactgtgagaagcgcatcactagctgcaaaggcgcccaggccgacgtggtgctctttttcatccatggtgtcggcggttccctggccatctggaaggagcagctggacttctttgtgcgcctaggctatgaggtggtggctcctgacctggccggccacggggccagctctgcgccccaggtggccgcagcctacaccttctatgcgctggctgaggacatgcgagcaatcttcaagcgctatgccaagaagcgaaatgtgctcattggccattcctacggtgtctctttctgcacattcctggcacatgagtacccagacctagtgcacaaggtgatcatgatcaatggcgggggccctacggcgctggagcccagcttctgctcaatcttcaacatgcccacctgcgtcctgcactgcttgtcgccctgcctggcctggagcttcctcaaggccggcttcgcccgccaaggagccaaggagaagcagctgttaaaggagggcaacgctttcaacgtgtcatccttcgtactccgggccatgatgagcggccagtactggcccgagggcgacgaggtctaccacgccgagctcaccgtgcccgtcctgcttgtccacggcatgcacgataagtttgtgccggtggaggaagaccagcgcatggccgagatcctgctcctggcattcctgaagctcatcgacgagggcagccacatggtgatgctggaatgccctgagacggtcaacacgctgctccacgaattcctgctctgggagcccgagccctcgcccaaggctctaccggagccactgccggcgcctccagaagacaagaagtagccgctgggccggcggggcatcgcttggtgagcacagccgcagcaggaggaggcccgagcctgcgccaggtctgcagcgcagaccacctgggcgggccgttcgctccggtgggcggggccaggtcagggagacgcccccaggctgcctgggcggggcgtggcatccgagggagcccagcggacattccgctctccgcttccgtcccgcggggcccatcggcgttttggggccgcagccgggaccctcacggaagatgaccttgtacagaagctctccctcaccttccccccaacgccacggccaaggcaggccccccaccccgctgtcttccgtgtcagccgtgcttgatcctgggacccacgagccccacagggaccctcgaggccccatcccgttatccgagacccttcctaccccccattcctcggcgctgggagctatttttgcccaagggggggggatgggggaattcatttatcattgttttaagaatcgtaccttttcctgtaatcttattc

SEQ ID NO: 290110 - DNA, 1896 bp, Homo sapiens
tggccgctcacgtggtattacgtggcccgtacgtgattgacacaccatgctgaccggggtgaccgacggtatcttctgttgcctgctgggcacgccccccaacgccgtggggccactggagagcgtcgagtccagcgatggctacacctttgtagaggtcaagcccggccgcgtgctgcgggtgaagcatgcaggacccgccccagccgctgccccacctccaccatcatccgcatcctcggatgcagcccagggggacctctccggcttggtccgctgtcagcgccggatcaccgtgtaccgcaatgggcggttgctggtggaaaacctgggccgagcccctcgagccgacctcctacacgggcagaatggctctggggagccgccggccgccctggaggtggagctggcagatccggcgggcagcgatggccgcttggcccccggcagcgcaggcagcggcagcggcagtggcagtggtgggcggcggcggcgagccaggcgccccaagaggaccatccatattgactgtgagaagcgcatcactagctgcaaaggcgcccaggccgacgtggtgctctttttcatccatggtgtcggcggttccctggccatctggaaggagcagctggacttctttgtgcgcctaggctatgaggtggtggctcctgacctggccggccacggggccagctctgcgccccaggtggccgcagcctacaccttctatgcgctggctgaggacatgcgagcaatcttcaagcgctatgccaagaagcgaaatgtgctcattggccattcctacggtgtctctttctgcacattcctggcacatgagtacccagacctagtgcacaaggtgatcatgatcaatggcgggggccctacggcgctggagcccagcttctgctcaatcttcaacatgcccacctgcgtcctgcactgcttgtcgccctgcctggcctggagcttcctcaaggccggcttcgcccgccaaggagccaaggagaagcagctgttaaaggagggcaacgctttcaacgtgtcatccttcgtactccgggccatgatgagcggccagtactggcccgagggcgacgaggtctaccacgccgagctcaccgtgcccgtcctgcttgtccacggcatgcacgataagtttgtgccggtggaggaagaccagcgcatggccgagatcctgctcctggcattcctgaagctcatcgacgagggcagccacatggtgatgctggaatgccctgagacggtcaacacgctgctccacgaattcctgctctgggagcccgagccctcgcccaaggctctaccggagccactgccggcgcctccagaagacaagaagtagccgctgggccggcggggcatcgcttggtgagcacagccgcagcaggaggaggcccgagcctgcgccaggtctgcagcgcagaccacctgggcgggccgttcgctccggtgggcggggccaggtcagggagacgcccccaggctgcctgggcggggcgtggcatccgagggagcccagcggacattccgctctccgcttccgtcccgcggggcccatcggcgttttggggccgcagccgggaccctcacggaagatgaccttgtacagaagctctccctcaccttccccccaacgccacggccaaggcaggccccccaccccgctgtcttccgtgtcagccgtgcttgatcctgggacccacgagccccacagggaccctcgaggccccatcccgttatccgagacccttcctaccccccattcctcggcgctgggagctatttttgcccaagggggggggatgggggggctggcgccaccgaacctgcacatctcaacttgtaactcaataaacagaagtgacaatcgga

SEQ ID NO: 290111 - DNA, 2193 bp, Homo sapiens
aaagggccggctgtttcggcggccgcgggatgcccctgcgctgaccgccaggggcaggtgcccgcccgcgtagacgcacccggcctgaccccgcgccaccatgtaaacggcgccagcaggcggacgctggcttctccgcctgggacccctccgccccgacccgggccccgcggccctcgatgaggacacaccatgctgaccggggtgaccgacggtatcttctgttgcctgctgggcacgccccccaacgccgtggggccactggagagcgtcgagtccagcgatggctacacctttgtagaggtcaagcccggggcccggcggtgcttgcggggctggaaggccattgccccacggggaaaacccccggtgcgagaccgccgccaatggcccaccgtgtgaccatttggggccacggcccgccctcccaaaagagggcaccgcctttttacccggccccaataaacaccggcccataacttttcccaattcctgcgaatccctcgggaatgccagccccaggggggggacccgttcttcgcgggggccttttgggggtcccaggcgttgttcaggcggccgggaatcacccgtgtaccgcaatgggcggttgctggtggaaaacctgggccgagcccctcgagccgacctcctacacgggcagaatggctctggggagccgccggccgccctggaggtggagctggcagatccggcgggcagcgatggccgcttggcccccggcagcgcaggcagcggcagcggcagtggcagtggtgggcggcggcggcgagccaggcgccccaagaggaccatccatattgactgtgagaagcgcatcactagctgcaaaggcgcccaggccgacgtggtgctctttttcatccatggtgtcggcggttccctggccatctggaaggagcagctggacttctttgtgcgcctaggctatgaggtggtggctcctgacctggccggccacggggccagctctgcgccccaggtggccgcagcctacaccttctatgcgctggctgaggacatgcgagcaatcttcaagcgctatgccaagaagcgaaatgtgctcattggccattcctacggtgtctctttctgcacattcctggcacatgagtacccagacctagtgcacaaggtgatcatgatcaatggcgggggccctacggcgctggagcccagcttctgctcaatcttcaacatgcccacctgcgtcctgcactgcttgtcgccctgcctggcctggagcttcctcaaggccggcttcgcccgccaaggagccaaggagaagcagctgttaaaggagggcaacgctttcaacgtgtcatccttcgtactccgggccatgatgagcggccagtactggcccgagggcgacgaggtctaccacgccgagctcaccgtgcccgtcctgcttgtccacggcatgcacgataagtttgtgccggtggaggaagaccagcgcatggccgagatcctgctcctggcattcctgaagctcatcgacgagggcagccacatggtgatgctggaatgccctgagacggtcaacacgctgctccacgaattcctgctctgggagcccgagccctcgcccaaggctctaccggagccactgccggcgcctccagaagacaagaagtagccgctgggccggcggggcatcgcttggtgagcacagccgcagcaggaggaggcccgagcctgcgccaggtctgcagcgcagaccacctgggcgggccgttcgctccggtgggcggggccaggtcagggagacgcccccaggctgcctgggcggggcgtggcatccgagggagcccagcggacattccgctctccgcttccgtcccgcggggcccatcggcgttttggggccgcagccgggaccctcacggaagatgaccttgtacagaagctctccctcaccttccccccaacgccacggccaaggcaggccccccaccccgctgtcttccgtgtcagccgtgcttgatcctgggacccacgagccccacagggaccctcgaggccccatcccgttatccgagacccttcctaccccccattcctcggcgctgggagctatttttgcccaagggggggggatgggggggctggcgccaccgaacctgcacatctcaacttgtaactcaataaacagaagtgacaatcgga

SEQ ID NO: 290112 - DNA, 244 bp, Homo sapiens
tgggtgatatagaggatccccgccgagcagcacccgctgtcttccgtgtcagccgtgcttgatcctgggacccacgagccccacagggaccctcgaggccccatcccgttatccgagacccttcctaccccccattcctcggcgctgggagctatttttgcccaagggggggggatgggggggctggcgccaccgaacctgcacatctcaacttgtaactcaataaacagaagtgacaatcgga

SEQ ID NO: 290113 - DNA, 1208 bp, Homo sapiens
aaagggccggctgtttcggcggccgcgggatgcccctgcgctgaccgccaggggcaggtgcccgcccgcgtagacgcacccggcctgaccccgcgccaccatgtaaacggcgccagcaggcggacgctggcttctccgcctgggacccctccgccccgactagtgcacaaggtgatcatgatcaatggcgggggccctacggcgctggagcccagcttctgctcaatcttcaacatgcccacctgcgtcctgcactgcttgtcgccctgcctggcctggagcttcctcaaggccggcttcgcccgccaaggagccaaggagaagcagctgttaaaggagggcaacgctttcaacgtgtcatccttcgtactccgggccatgatgagcggccagtactggcccgagggcgacgaggtctaccacgccgagctcaccgtgcccgtcctgcttgtccacggcatgcacgataagtttgtgccggtggaggaagaccagcgcatggccgagatcctgctcctggcattcctgaagctcatcgacgagggcagccacatggtgatgctggaatgccctgagacggtcaacacgctgctccacgaattcctgctctgggagcccgagccctcgcccaaggctctaccggagccactgccggcgcctccagaagacaagaagtagccgctgggccggcggggcatcgcttggtgagcacagccgcagcaggaggaggcccgagcctgcgccaggtctgcagcgcagaccacctgggcgggccgttcgctccggtgggcggggccaggtcagggagacgcccccaggctgcctgggcggggcgtggcatccgagggagcccagcggacattccgctctccgcttccgtcccgcggggcccatcggcgttttggggccgcagccgggaccctcacggaagatgaccttgtacagaagctctccctcaccttccccccaacgccacggccaaggcaggccccccaccccgctgtcttccgtgtcagccgtgcttgatcctgggacccacgagccccacagggaccctcgaggccccatcccgttatccgagacccttcctaccccccattcctcggcgctgggagctatttttgcccaagggggggggatgggggggctggcgccaccgaacctgcacatctcaacttgtaactcaataaacagaagtgacaatcgga

SEQ ID NO: 290114 - DNA, 911 bp, Homo sapiens
ggcttctgcaacagttctcggatcacgctgtcgtaggacttgcggatgttggagcggcccaccttctccgccgtagcgatgcagatgttgcgcaggcgggcttcctgctcgaaggcctcgatccctgtctccccgtaatcaccctcggaggctactgtggacacatggctacatttttctgttagttcttgagatgaataccagatgcttccttggatactgtattttggacactaggaagcaggtctcacacaggactaggagactctggacaaaatggcctatactgacttatttaggcataggaatattgcttcactcagcctgactgaaatggcaggtgtcaccaaacaggtactgtcattacttctagaatgagtgcctggcttccactggatttatgtaccactatggaaggcttggtgataggagccctgtctatgcatagcttgactttgttaagaggtttctggctagcactggagaggccatctcttcttgatacaatgattttctcatcttcaagttatattaatcaggacctgaacccctcagggagacagagaatgaaaggacctaaaaaatatctggacattattttctggcagcgaagaatcacagtgaaacaatcctaaactgctgaaatttcctctcccataggggtaggagtaatgagaaactgctcaaaaaaaaaacaaaaaagttcttgtttttcaatgataggcttcatgtctaactctccaggatgtacgagaataatttacaatgaaggcaggctttgcaagagaacgaactagccatagaataacagcaatgtgggaaagattctctgcattggaaaggggcacaatgagctgtaactttggggaaggctgtgggctagaataaaacagcaactattgccaacattt

SEQ ID NO: 290115 - DNA, 401 bp, Homo sapiens
ggtggtggcccagttagagaagaggcgtggccagcatcagggaaggcaacctcaaaggatcctggagagtggaggggaggacggcctgtgtagtaaagcccttcccccagggcttggtccttggtcctgcattctgatctagcctggctagggctaggctggccctagctcacaggacgtactgtcatgcactgtgtcctctggatcctggagagggccctcagtcttagaagtgctcagtaagtatttgtacaatgaattccaggatccaacttgaactggagaccccagctggtggcctatgacccaaatccatccctgggatgtgttatatttggcctggaaagtgtttaaaagaaaatgaaccagttgccaacatataaaatttggaatgtcaaata

SEQ ID NO: 290116 - DNA, 1359 bp, Homo sapiens
gaaacctcctcgtctgtgcacgaacaggtggccgactctggagcccaggctgttgctttccagtctggtggtgaatcctccatagtctggaacagccagctgaaaactctcctggccattggaggctggaacttcgggactgcccctttcactgccatggtttctactcctgagaaccgccagactttcatcacctcagtcatcaaattcctgcgccagtatgagtttgacgggctggactttgactgggagtaccctggctctcgtgggagccctcctcaggacaagcatctcttcactgtcctggtgcaggaaatgcgtgaagcttttgagcaggaggccaagcagatcaacaagcccaggctgatggtcactgctgcagtagctgctggcatctccaatatccagtctggctatgagatcccccaactgtcacagtacctggactacatccatgtcatgacctacgacctccatggctcctgggagggctacactggagagaacagccccctctacaaatacccgactgacaccggcagcaacgcctacctcaatgtggattatgtcatgaactactggaaggacaatggagcaccagctgagaagctcatcgttggattccctacctatggacacaacttcatcctgagcaacccctccaacactggaattggtgcccccacctctggtgctggtcctgctgggccctatgccaaggagtctgggatctgggcttactacgagatctgtaccttcctgaaaaatggagccactcagggatgggatgcccctcaggaagtgccttatgcctatcagggcaatgtgtgggttggctatgacaacgtcaagagcttcgatattaaggctcaatggcttaagcacaacaaatttggaggcgccatggtctgggccattgatctggatgacttcactggcactttctgcaaccagggcaagtttcccctaatctccaccctgaagaaggccctcggcctgcagagtgcaagttgcacggctccagctcagcccattgagccaataactgctgctcccagtggcagcgggaacgggagcgggagtagcagctctggaggcagctcgggaggcagtggattctgtgctggcagagccaacggcctctaccccgtggcaaataacagaaatgccttctggcactgcgtgaatggagtcacgtaccagcagaactgccaggccgggcttgtcttcgacaccagctgtgattgctgcaactgggcataaacctgacctggtctatattccctagagttccagtctcttttgcttaggacatgttgcccctacctaaagtcctgcaataaaatcagcagtcaaaac

SEQ ID NO: 290117 - DNA, 1193 bp, Homo sapiens
gaaacctcctcgtctgtgcacgaacaggtggccgactctggagcccaggctgttgctttccagtctggtggtgaatcctccatagtctggaacagccagctgaaaactctcctggccattggaggctggaacttcgggactgccccgaaatgcgtgaagcttttgagcaggaggccaagcagatcaacaagcccaggctgatggtcactgctgcagtagctgctggcatctccaatatccagtctggctatgagatcccccaactgtcacagtacctggactacatccatgtcatgacctacgacctccatggctcctgggagggctacactggagagaacagccccctctacaaatacccgactgacaccggcagcaacgcctacctcaatgtggattatgtcatgaactactggaaggacaatggagcaccagctgagaagctcatcgttggattccctacctatggacacaacttcatcctgagcaacccctccaacactggaattggtgcccccacctctggtgctggtcctgctgggccctatgccaaggagtctgggatctgggcttactacgagatctgtaccttcctgaaaaatggagccactcagggatgggatgcccctcaggaagtgccttatgcctatcagggcaatgtgtgggttggctatgacaacgtcaagagcttcgatattaaggctcaatggcttaagcacaacaaatttggaggcgccatggtctgggccattgatctggatgacttcactggcactttctgcaaccagggcaagtttcccctaatctccaccctgaagaaggccctcggcctgcagagtgcaagttgcacggctccagctcagcccattgagccaataactgctgctcccagtggcagcgggaacgggagcgggagtagcagctctggaggcagctcgggaggcagtggattctgtgctggcagagccaacggcctctaccccgtggcaaataacagaaatgccttctggcactgcgtgaatggagtcacgtaccagcagaactgccaggccgggcttgtcttcgacaccagctgtgattgctgcaactgggcataaacctgacctggtctatattccctagagttccagtctcttttgcttaggacatgttgcccctacctaaagtcctgcaataaaatcagcagtcaaaac

SEQ ID NO: 290118 - DNA, 1684 bp, Homo sapiens
  misc_feature (373)..(373): n is a, c, g, or t
gaaacctcctcgtctgtgcacgaacaggtggccgactctggagcccaggctgttgctttccagtctggtggtgaatcctccatagtctgaagcctttgtgataaccacagaatcagaacatataaaaagctctgcgggactggtgctgactgcaaccatgacaaagcttattctcctcacaggtcttgtccttatactgaatttgcagctcggctctgcctaccagctgacatgctacttcaccaactgggcccagtaccggccaggcctggggcgcttcatgcctgacaacatcgacccctgcctctgtacccacctgatctacgcctttgctgggaggcagaacaacgagatcaccaccatcgaatggaangatgtgactctctaccaagctttcaatggcctgaaaaataagaacagccagctgaaaactctcctggccattggaggctggaacttcgggactgcccctttcactgccatggtttctactcctgagaaccgccagactttcatcacctcagtcatcaaattcctgcgccagtatgagtttgacgggctggactttgactgggagtaccctggctctcgtgggagccctcctcaggacaagcatctcttcactgtcctggtgcaggaaatgcgtgaagcttttgagcaggaggccaagcagatcaacaagcccaggctgatggtcactgctgcagtagctgctggcatctccaatatccagtctggctatgagatcccccaactgtcacagtacctggactacatccatgtcatgacctacgacctccatggctcctgggagggctacactggagagaacagccccctctacaaatacccgactgacaccggcagcaacgcctacctcaatgtggattatgtcatgaactactggaaggacaatggagcaccagctgagaagctcatcgttggattccctacctatggacacaacttcatcctgagcaacccctccaacactggaattggtgcccccacctctggtgctggtcctgctgggccctatgccaaggagtctgggatctgggcttactacgagatctgtaccttcctgaaaaatggagccactcagggatgggatgcccctcaggaagtgccttatgcctatcagggcaatgtgtgggttggctatgacaacgtcaagagcttcgatattaaggctcaatggcttaagcacaacaaatttggaggcgccatggtctgggccattgatctggatgacttcactggcactttctgcaaccagggcaagtttcccctaatctccaccctgaagaaggccctcggcctgcagagtgcaagttgcacggctccagctcagcccattgagccaataactgctgctcccagtggcagcgggaacgggagcgggagtagcagctctggaggcagctcgggaggcagtggattctgtgctggcagagccaacggcctctaccccgtggcaaataacagaaatgccttctggcactgcgtgaatggagtcacgtaccagcagaactgccaggccgggcttgtcttcgacaccagctgtgattgctgcaactgggcataaacctgacctggtctatattccctagagttccagtctcttttgcttaggacatgttgcccctacctaaagtcctgcaataaaatcagcagtcaaaac

SEQ ID NO: 290119 - DNA, 1482 bp, Homo sapiens
gaaacctcctcgtctgtgcacgaacaggtggccgactctggagcccaggctgttgctttccagtctggtggtgaatcctccatagtctgaagcctttgtgataaccacagaatcagaacatataaaaagctctgcgggactggtgctgactgcaaccatgacaaagcttattctcctcacaggtcttgtccttatactgaatttgcagctcggaacagccagctgaaaactctcctggccattggaggctggaacttcgggactgcccctttcactgccatggtttctactcctgagaaccgccagactttcatcacctcagtcatcaaattcctgcgccagtatgagtttgacgggctggactttgactgggagtaccctggctctcgtgggagccctcctcaggacaagcatctcttcactgtcctggtgcaggaaatgcgtgaagcttttgagcaggaggccaagcagatcaacaagcccaggctgatggtcactgctgcagtagctgctggcatctccaatatccagtctggctatgagatcccccaactgtcacagtacctggactacatccatgtcatgacctacgacctccatggctcctgggagggctacactggagagaacagccccctctacaaatacccgactgacaccggcagcaacgcctacctcaatgtggattatgtcatgaactactggaaggacaatggagcaccagctgagaagctcatcgttggattccctacctatggacacaacttcatcctgagcaacccctccaacactggaattggtgcccccacctctggtgctggtcctgctgggccctatgccaaggagtctgggatctgggcttactacgagatctgtaccttcctgaaaaatggagccactcagggatgggatgcccctcaggaagtgccttatgcctatcagggcaatgtgtgggttggctatgacaacgtcaagagcttcgatattaaggctcaatggcttaagcacaacaaatttggaggcgccatggtctgggccattgatctggatgacttcactggcactttctgcaaccagggcaagtttcccctaatctccaccctgaagaaggccctcggcctgcagagtgcaagttgcacggctccagctcagcccattgagccaataactgctgctcccagtggcagcgggaacgggagcgggagtagcagctctggaggcagctcgggaggcagtggattctgtgctggcagagccaacggcctctaccccgtggcaaataacagaaatgccttctggcactgcgtgaatggagtcacgtaccagcagaactgccaggccgggcttgtcttcgacaccagctgtgattgctgcaactgggcataaacctgacctggtctatattccctagagttccagtctcttttgcttaggacatgttgcccctacctaaagtcctgcaataaaatcagcagtcaaaac

SEQ ID NO: 290120 - DNA, 3823 bp, Homo sapiens
  misc_feature (3823)..(3823): n is a, c, g, or t
gaatgtcccttgctcttttcgtgtgaaaaggtgaagttcaacattgccactgatctgggcgcagttcggcagggcaccgcctccccttggagctgtgtggccttagcggagtggccgagcctctctgtgcccagcgtttcattcctacctcctaggtgctaattcctcacaacagactatttttcggctgaggcagtcagggcccccgcccccgtgccctggcgccaagcactcgccccagaatcggtcctgggaataaaggtcaaaaaggaacccttaaacccgctcctccccggaaggcacagcgcctccccttctctccagcccgcgactgcccatccaaaccgaggcctcgcggggcgagtcccttgtcctccagctcgttgaactggggccccgggcacaggtcggctggaccagcttggcgaaccggacagctgcgagaccctcaggtgcccaccggcccagtttccgcccgcccctccgggcccgcctctcattggctcgcgtcccaccaaaccctaccccctggccgtcacttccgggcaacggagcccgtggaaggcggaagtgtgagcgccgcggcggcagctgagttgggctgaggtgtccctagctggctctgcggctcttccgggtctgggctcggagattcacaggcggcccgcgaggccgagcgagggacgcatggccctgaggcggccgcagggcttggcggggtccggaggttgacctcgcccccgcagccggccttcgaggctgcctcctccaggcagcctctggggcccgcgcccgcgcctgctcaggctcccgtgttcaggctgcccatcccctccccaccggcgtcccggacgttgggacctgtgaccgtggcctcgggctgggcttccaaagccggccgcagcccggcgacccccgaggcctctcgccccgggcccctagacctctcactatgaccgcggccgccgcctccaactgggggctgatcacgaacatcgtgaacagcatcgtaggggtcagtgtcctcaccatgcccttctgcttcaaacagtgcggcatcgtcctgggggcgctgctcttggtcttctgctcatggatgacgcaccagtcgtgcatgttcttggtgaagtcggccagcctgagcaagcggaggacctacgccggcctggcattccacgcctacgggaaggcaggcaagatgctggtggagaccagcatgatcgggctgatgctgggcacctgcatcgccttctacgtcgtgatcggcgacttggggtccaacttctttgcccggctgttcgggtttcaggtgggcggcaccttccgcatgttcctgctgttcgccgtgtcgctgtgcatcgtgctcccgctcagcctgcagcggaacatgatggcctccatccagtccttcagcgccatggccctcctcttctacaccgtgttcatgttcgtgatcgtgctctcctctctcaagcacggcctcttcagtgggcagtggctgcggcgggtcagctacgtccgctgggagggcgtcttccgctgcatccccatcttcggcatgtccttcgcctgccagtcccaggtgctgcccacctacgacagcctggatgagccgtcagtgaaaaccatgagctccatatttgcttcctcccttaatgtggtcaccaccttctacgtcatggtggggtttttcggctacgtcagcttcaccgaggccacggccggcaacgtgctcatgcactttccctccaacctggtgacggagatgctccgtgtgggcttcatgatgtcagtggctgtgggcttccccatgatgatcctgccatgcaggcaggccctgagcacgctgctgtgtgagcagcagcaaaaagatggcacctttgcagcagggggctacatgccccctctccggtttaaagcacttaccctctctgtggtgtttggaaccatggttggtggcatccttatccccaacgtggagaccatcctgggcctcacaggagcgaccatgggaagcctcatctgcttcatctgcccggcgctgatctacaagaaaatccacaagaacgcactttcctcccaggtggtgctgtgggtcggcctgggcgtcctggtggtgagcactgtcaccacactgtctgtgagcgaggaggtccccgaggacttggcagaggaagcccctggcggccggcttggagaggccgagggtttgatgaaggtggaggcagcgcggctctcagcccaggatccggttgtggccgtggctgaggatggccgggagaagccgaagctgccgaaggagagagaggagctggagcaggcccagatcaaggggcccgtggatgtgcctggacgggaagatggcaaggaggcaccggaggaggcacagctcgatcgccctgggcaagggattgctgtgcctgtgggcgaggcccaccgccacgagcctcctgttcctcacgacaaggtggtggtagatgaaggccaagaccgagaggtgccagaagagaacaaacctccatccagacacgcgggcggaaaggctccaggggtccagggccagatggcgccgcctctgcccgactcagaaagagagaaacaagagccggagcagggagaggttgggaagaggcctggacaggcccaggccttggaggaggcgggtgatcttcctgaagatccccagaaagttccagaagcagatggtcagccagctgtccagcctgcaaaggaggacctggggccaggagacaggggcctgcatcctcggccccaggcagtgctgtctgagcagcagaacggcctggcggtgggtggaggggaaaaggccaaggggggaccgccgccaggcaacgccgccggggacacagggcagcccgcagaggacagcgaccacggtgggaagcctcccctcccagcggagaagccggctccagggcctgggctgccgcccgagcctcgcgagcagagggacgtggagcgagcgggtggaaaccaggcggccagccagctggagggtaaggcctccgccctacagccgcctgcctcaggcccagggagcggcagccccctcccccagccctggggtgatgcccaggtcatcctcgggagccctgccaggccccccttctctttccagccgcctgctgagcagacccctcggagagctttctgctcccttcccatcagcagcttgctttctgggaaccttttatctgccttactcccctttaaacacctgcggcatcgtcacatggcttgtgattaccgttttatctcccttgctcccctttaaaacacctgcggcattgtcacttggcttgtgattaccatttcgtctttaaagcaggtttgttaacagttttaacactcggagtatttaaagccagccaggtgtgggcgtgcctgcacccagatgtggaggtttattttaaggctgtgccccaaggggacccagtttgggggtggctgtgcccgccctggtcctagcatagccctggcccagagcactgctcccacaccctcgggcctcggagctcggctgtgttcatctacagggatctgtcacctgtccctccaggaaagctccttacgcctttgctctcctgagaataaaacttgctctgaatcctcctccgaaaaaaaaaaaaaaaaaaaaaaaaaaaaaaattgtgggggacgcagcgggcccccgaaacacggctcaaagaaaccaaacgatatggagcacggaggcccacaagggaaagcgaaacggggcacaaaggtgatccccagggaacaccggggacagacacaagggacgaaaatctacaccaataan

SEQ ID NO: 290121 - DNA, 3637 bp, Homo sapiens
gaatgtcccttgctcttttcgtgtgaaaaggtgaagttcaacattgccactgatctgggcgcagttcggcagggcaccgcctccccttggagctgtgtggccttagcggagtggccgagcctctctgtgcccagcgtttcattcctacctcctaggtgctaattcctcacaacagactatttttcggctgaggcagtcagggcccccgcccccgtgccctggcgccaagcactcgccccagaatcggtcctgggaataaaggtcaaaaaggaacccttaaacccgctcctccccggaaggcacagcgcctccccttctctccagcccgcgactgcccatccaaaccgaggcctcgcggggcgagtcccttgtcctccagctcgttgaactggggccccgggcacaggtcggctggaccagcttggcgaaccggacagctgcgagaccctcaggtgcccaccggcccagtttccgcccgcccctccgggcccgcctctcattggctcgcgtcccaccaaaccctaccccctggccgtcacttccgggcaacggagcccgtggaaggcggaagtgtgagcgccgcggcggcagctgagttgggctgaggtgtccctagctggctctgcggctcttccgggtctgggctcggagattcacaggcggcccgcgaggccgagcgagggacgcatggccctgaggcggccgcagggcttggcggggtccggaggttgacctcgcccccgcagccggccttcgaggctgcctcctccaggcagcctctggggcccgcgcccgcgcctgctcaggctcccgtgttcaggctgcccatcccctccccaccggcgtcccggacgttgggacctgtgaccgtggcctcgggctgggcttccaaagccggccgcagcccggcgacccccgaggcctctcgccccgggcccctagacctctcactatgaccgcggccgccgcctccaactgggggctgatcacgaacatcgtgaacagcatcgtaggggtcagtgtcctcaccatgcccttctgcttcaaacagtgcggcatcgtcctgggggcgctgctcttggtcttctgctcatggatgacgcaccagtcgtgcatgttcttggtgaagtcggccagcctgagcaagcggaggacctacgccggcctggcattccacgcctacgggaaggcaggcaagatgctggtggagaccagcatgatcgggctgatgctgggcacctgcatcgccttctacgtcgtgatcggcgacttggggtccaacttctttgcccggctgttcgggtttcaggtgggcggcaccttccgcatgttcctgctgttcgccgtgtcgctgtgcatcgtgctcccgctcagcctgcagcggaacatgatggcctccatccagtccttcagcgccatggccctcctcttctacaccgtgttcatgttcgtgatcgtgctctcctctctcaagcacggcctcttcagtgggcagtggctgcggcgggtcagctacgtccgctgggagggcgtcttccgctgcatccccatcttcggcatgtccttcgcctgccagtcccaggtgctgcccacctacgacagcctggatgagccgtcagtgaaaaccatgagctccatatttgcttcctcccttaatgtggtcaccaccttctacgtcatggtggggtttttcggctacgtcagcttcaccgaggccacggccggcaacgtgctcatgcactttccctccaacctggtgacggagatgctccgtgtgggcttcatgatgtcagtggctgtgggcttccccatgatgatcctgccatgcaggcaggccctgagcacgctgctgtgtgagcagcagcaaaaagatggcacctttgcagcagggggctacatgccccctctccggtttaaagcacttaccctctctgtggtgtttggaaccatggttggtggcatccttatccccaacgtggagaccatcctgggcctcacaggagcgaccatgggaagcctcatctgcttcatctgcccggcgctgatctacaagaaaatccacaagaacgcactttcctcccaggtggtgctgtgggtcggcctgggcgtcctggtggtgagcactgtcaccacactgtctgtgagcgaggaggtccccgaggacttggcagaggaagcccctggcggccggcttggagaggccgagggtttgatgaaggtggaggcagcgcggctctcagcccaggatccggttgtggccgtggctgaggatggccgggagaagccgaagctgccgaaggagagagaggagctggagcaggcccagatcaaggggcccgtggatgtgcctggacgggaagatggcaaggaggcaccggaggaggcacagctcgatcgccctgggcaagggattgctgtgcctgtgggcgaggcccaccgccacgagcctcctgttcctcacgacaaggtggtggtagatgaaggccaagaccgagaggtgccagaagagaacaaacctccatccagacacgcgggcggaaaggctccaggggtccagggccagatggcgccgcctctgcccgactcagaaagagagaaacaagagccggagcagggagaggttgggaagaggcctggacaggcccaggccttggaggaggcgggtgatcttcctgaagatccccagaaagttccagaagcagatggtcagccagctgtccagcctgcaaaggaggacctggggccaggagacaggggcctgcatcctcggccccaggcagtgctgtctgagcagcagaacggcctggcggtgggtggaggggaaaaggccaaggggggaccgccgccaggcaacgccgccggggacacagggcagcccgcagaggacagcgaccacggtgggaagcctcccctcccagcggagaagccggctccagggcctgggctgccgcccgagcctcgcgagcagagggacgtggagcgagcgggtggaaaccaggcggccagccagctggagggtaaggcctccgccctacagccgcctgcctcaggcccagggagcggcagccccctcccccagccctggggtgatgcccaggtcatcctcgggagccctgccaggccccccttctctttccagccgcctgctgagcagacccctcggagagctttctgctcccttcccatcagcagcttgctttctgggaaccttttatctgccttactcccctttaaacacctgcggcatcgtcacatggcttgtgattaccgttttatctcccttgctcccctttaaaacacctgcggcattgtcacttggcttgtgattaccatttcgtctttaaagcaggtttgttaacagttttaacactcggagtatttaaagccagccaggtgtgggcgtgcctgcacccagatgtggaggtttattttaaggctgtgccccaaggggacccagtttgggggtggctgtgcccgccctggtcctagcatagccctggcccagagcactgctcccacaccctcgggcctcggagctcggctgtgttcatctacagggatctgtcacctgtccctccaggaaagctccttacgcctttgctctcctgagaataaaacttgctctgaatcctcctcc

SEQ ID NO: 290122 - DNA, 3517 bp, Homo sapiens
  misc_feature (3517)..(3517): n is a, c, g, or t
gaatgtcccttgctcttttcgtgtgaaaaggtgaagttcaacattgccactgatctgggcgcagttcggcagggcaccgcctccccttggagctgtgtggccttagcggagtggccgagcctctctgtgcccagcgtttcattcctacctcctaggtgctaattcctcacaacagactatttttcggctgaggcagtcagggcccccgcccccgtgccctggcgccaagcactcgccccagaatcggtcctgggaataaaggtcaaaaaggaacccttaaacccgctcctccccggaaggcacagcgcctccccttctctccagcccgcgactgcccatccaaaccgaggcctcgcggggcgagtcccttgtcctccagctcgttgaactggggccccgggcacaggtcggctggaccagcttggcgaaccggacagctgcgagaccctcaggtgcccaccggcccagtttccgcccgcccctccgggcccgcctctcattggctcgcgtcccaccaaaccctaccccctggccgtcacttccgggcaacggagcccgtggaaggcggaagtgtgagcgccgcggcggcagctgagttgggctgaggtgtccctagctggctctgcggctcttccgggtctgggctcggagattcacaggcggcccgcgaggccgagcgagggacgcatggccctgaggcggccgcagggcttggcggggtccggaggttgacctcgcccccgcagccggccttcgaggctgcctcctccaggcagcctctggggcccgcgcccgcgcctgctcaggctcccgtgttcaggctgcccatcccctccccaccggcgtcccggacgttgggacctgtgaccgtggcctcgggctgggcttccaaagccggccgcagcccggcgacccccgaggcctctcgccccgggcccctagacctctcactatgaccgcggccgccgcctccaactgggggctgatcacgaacatcgtgaacagcatcgtaggggtcagtgtcctcaccatgcccttctgcttcaaacagtgcggcatcgtcctgggggcgctgctcttggtcttctgctcatggatgacgcaccagtcgtgcatgttcttggtgaagtcggccagcctgagcaagcggaggacctacgccggcctggcattccacgcctacgggaaggcaggcaagatgctggtggagaccagcatgatcgggctgatgctgggcacctgcatcgccttctacgtcgtgatcggcgacttggggtccaacttctttgcccggctgttcgggtttcaggtgggcggcaccttccgcatgttcctgctgttcgccgtgtcgctgtgcatcgtgctcccgctcagcctgcagcggaacatgatggcctccatccagtccttcagcgccatggccctcctcttctacaccgtgttcatgttcgtgatcgtgctctcctctctcaagcacggcctcttcagtgggcagtggctgcggcgggtcagctacgtccgctgggagggcgtcttccgctgcatccccatcttcggcatgtccttcgcctgccagtcccaggtgctgcccacctacgacagcctggatgagccgtcagtgaaaaccatgagctccatatttgcttcctcccttaatgtggtcaccaccttctacgtcatggtggggtttttcggctacgtcagcttcaccgaggccacggccggcaacgtgctcatgcactttccctccaacctggtgacggagatgctccgtgtgggcttcatgatgtcagtggctgtgggcttccccatgatgatcctgccatgcaggcaggccctgagcacgctgctgtgtgagcagcagcaaaaagatggcacctttgcagcagggggctacatgccccctctccggtttaaagcacttaccctctctgtggtgtttggaaccatggttggtggcatccttatccccaacgtggagaccatcctgggcctcacaggagcgaccatgggaagcctcatctgcttcatctgcccggcgctgatctacaagaaaatccacaagaacgcactttcctcccaggtggtgctgtgggtcggcctgggcgtcctggtggtgagcactgtcaccacactgtctgtgagcgaggaggtccccgaggacttggcagaggaagcccctggcggccggcttggagaggccgagggtttgatgaaggtggaggcagcgcggctctcagcccaggatccggttgtggccgtggctgaggatggccgggagaagccgaagctgccgaaggagagagaggagctggagcaggcccagatcaaggggcccgtggatgtgcctggacgggaagatggcaaggaggcaccggaggaggcacagctcgatcgccctgggcaagggattgctgtgcctgtgggcgaggcccaccgccacgagcctcctgttcctcacgacaaggtggtggtagatgaaggccaagaccgagaggtgccagaagagaacaaacctccatccagacacgcgggcggaaaggctccaggggtccagggccagatggcgccgcctctgcccgactcagaaagagagaaacaagagccggagcagggagaggttgggaagaggcctgggctgccgcccgagcctcgcgagcagagggacgtggagcgagcgggtggaaaccaggcggccagccagctggagggtaaggcctccgccctacagccgcctgcctcaggcccagggagcggcagccccctcccccagccctggggtgatgcccaggtcatcctcgggagccctgccaggccccccttctctttccagccgcctgctgagcagacccctcggagagctttctgctcccttcccatcagcagcttgctttctgggaaccttttatctgccttactcccctttaaacacctgcggcatcgtcacatggcttgtgattaccgttttatctcccttgctcccctttaaaacacctgcggcattgtcacttggcttgtgattaccatttcgtctttaaagcaggtttgttaacagttttaacactcggagtatttaaagccagccaggtgtgggcgtgcctgcacccagatgtggaggtttattttaaggctgtgccccaaggggacccagtttgggggtggctgtgcccgccctggtcctagcatagccctggcccagagcactgctcccacaccctcgggcctcggagctcggctgtgttcatctacagggatctgtcacctgtccctccaggaaagctccttacgcctttgctctcctgagaataaaacttgctctgaatcctcctccgaaaaaaaaaaaaaaaaaaaaaaaaaaaaaaattgtgggggacgcagcgggcccccgaaacacggctcaaagaaaccaaacgatatggagcacggaggcccacaagggaaagcgaaacggggcacaaaggtgatccccagggaacaccggggacagacacaagggacgaaaatctacaccaataan

SEQ ID NO: 290123 - DNA, 3577 bp, Homo sapiens
gaatgtcccttgctcttttcgtgtgaaaaggtgaagttcaacattgccactgatctgggcgcagttcggcagggcaccgcctccccttggagctgtgtggccttagcggagtggccgagcctctctgtgcccagcgtttcattcctacctcctaggtgctaattcctcacaacagactatttttcggctgaggcagtcagggcccccgcccccgtgccctggcgccaagcactcgccccagaatcggtcctgggaataaaggtcaaaaaggaacccttaaacccgctcctccccggaaggcacagcgcctccccttctctccagcccgcgactgcccatccaaaccgaggcctcgcggggcgagtcccttgtcctccagctcgttgaactggggccccgggcacaggtcggctggaccagcttggcgaaccggacagctgcgagaccctcaggtgcccaccggcccagtttccgcccgcccctccgggcccgcctctcattggctcgcgtcccaccaaaccctaccccctggccgtcacttccgggcaacggagcccgtggaaggcggaagtgtgagcgccgcggcggcagctgagttgggctgaggtgtccctagctggctctgcggctcttccgggtctgggctcggagattcacaggcggcccgcgaggccgagcgagggacgcatggccctgaggcggccgcagggcttggcggggtccggaggttgacctcgcccccgcagccggccttcgaggctgcctcctccaggcagcctctggggcccgcgcccgcgcctgctcaggctcccgtgttcaggctgcccatcccctccccaccggcgtcccggacgttgggacctgtgaccgtggcctcgggctgggcttccaaagccggccgcagcccggcgacccccgaggcctctcgccccgggcccctagacctctcactatgaccgcggccgccgcctccaactgggggctgatcacgaacatcgtgaacagcatcgtaggggtcagtgtcctcaccatgcccttctgcttcaaacagtgcggcatcgtcctgggggcgctgctcttggtcttctgctcatggatgacgcaccagtcgtgcatgttcttggtgaagtcggccagcctgagcaagcggaggacctacgccggcctggcattccacgcctacgggaaggcaggcaagatgctggtggagaccagcatgatcgggctgatgctgggcacctgcatcgccttctacgtcgtgatcggcgacttggggtccaacttctttgcccggctgttcgggtttcaggtgggcggcaccttccgcatgttcctgctgttcgccgtgtcgctgtgcatcgtgctcccgctcagcctgcagcggaacatgatggcctccatccagtccttcagcgccatggccctcctcttctacaccgtgttcatgttcgtgatcgtgctctcctctctcaagcacggcctcttcagtgggcagtggctgcggcgggtcagctacgtccgctgggagggcgtcttccgctgcatccccatcttcggcatgtccttcgcctgccagtcccaggtgctgcccacctacgacagcctggatgagccgtcagtgaaaaccatgagctccatatttgcttcctcccttaatgtggtcaccaccttctacgtcatggtggggtttttcggctacgtcagcttcaccgaggccacggccggcaacgtgctcatgcactttccctccaacctggtgacggagatgctccgtgtgggcttcatgatgtcagtggctgtgggcttccccatgatgatcctgccatgcaggcaggccctgagcacgctgctgtgtgagcagcagcaaaaagatggcacctttgcagcagggggctacatgccccctctccggtttaaagcacttaccctctctgtggtgtttggaaccatggttggtggcatccttatccccaacgtggagaccatcctgggcctcacaggagcgaccatgggaagcctcatctgcttcatctgcccggcgctgatctacaagaaaatccacaagaacgcactttcctcccaggtggtgctgtgggtcggcctgggcgtcctggtggtgagcactgtcaccacactgtctgtgagcgaggaggtccccgaggacttggcagaggaagcccctggcggccggcttggagaggccgagggtttgatgaaggtggaggcagcgcggctctcagcccaggatccggttgtggccgtggctgaggatggccgggagaagccgaagctgccgaaggagagagaggagctggagcaggcccagatcaaggggcccgtggatgtgcctggacgggaagatggcaaggaggcaccggaggaggcacagctcgatcgccctgggcaagggattgctgtgcctgtgggcgaggcccaccgccacgagcctcctgttcctcacgacaaggtggtggtagatgaaggccaagaccgagaggtgccagaagagaacaaacctccatccagacacgcgggcggaaaggctccaggggtccagggccagatggcgccgcctctgcccgactcagaaagagagaaacaagagccggagcagggagaggttgggaagaggcctggacaggcccaggccttggaggaggcgggtgatcttcctgaagatccccagaaagttccagaagcagatggtcagccagctgtccagcctgcaaaggaggacctggggccaggagacaggggcctgcatcctcggccccaggcagtgctgtctgagcagcagaacggcctggcggtgggtggaggggaaaaggccaaggggggaccgccgccaggcaacgccgccggggacacagggcagcccgcagaggacagcgaccacggtgggaagcctcccctcccagcggagaagccggctccagggcctgggctgccgcccgagcctcgcgagcagagggacgtggagcgagcgggtggaaaccaggcggccagccagctggagggtaaggcctccgccctacagccgcctgcctcaggcccagggagcggcagccccctcccccagccctggggtgatgcccaggtcatcctcgggagccctgccaggccccccttctctttccagccgcctgctgagcagacccctcggagagctttctgctcccttcccatcagcagcttgctttctgggaaccgttttatctcccttgctcccctttaaaacacctgcggcattgtcacttggcttgtgattaccatttcgtctttaaagcaggtttgttaacagttttaacactcggagtatttaaagccagccaggtgtgggcgtgcctgcacccagatgtggaggtttattttaaggctgtgccccaaggggacccagtttgggggtggctgtgcccgccctggtcctagcatagccctggcccagagcactgctcccacaccctcgggcctcggagctcggctgtgttcatctacagggatctgtcacctgtccctccaggaaagctccttacgcctttgctctcctgagaataaaacttgctctgaatcctcctcc

SEQ ID NO: 290124 - DNA, 2576 bp, Homo sapiens
gaatgtcccttgctcttttcgtgtgaaaaggtgaagttcaacattgccactgatctgggcgcagttcggcagggcaccgcctccccttggagctgtgtggccttagcggagtggccgagcctctctgtgcccagcgtttcattcctacctcctaggtgctaattcctcacaacagactatttttcggctgaggcagtcagggcccccgcccccgtgccctggcgccaagcactcgccccagaatcggtcctgggaataaaggtcaaaaaggaacccttaaacccgctcctccccggaaggcacagcgcctccccttctctccagcccgcgactgcccatccaaaccgaggcctcgcggggcgagtcccttgtcctccagctcgttgaactggggccccgggcacaggtcggctggaccagcttggcgaaccggacagctgcgagaccctcaggtgcccaccggcccagtttccgcccgcccctccgggcccgcctctcattggctcgcgtcccaccaaaccctaccccctggccgtcacttccgggcaacggagcccgtggaaggcggaagtgtgagcgccgcggcggcagctgagttgggctgaggtgtccctagctggctctgcggctcttccgggtctgggctcggagattcacaggcggcccgcgaggccgagcgagggacgcatggccctgaggcggccgcagggcttggcggggtccggaggttgacctcgcccccgcagccggccttcgaggctgcctcctccaggcagcctctggggcccgcgcccgcgcctgctcaggctcccgtgttcaggctgcccatcccctccccaccggcgtcccggacgttgggacctgtgaccgtggcctcgggctgggcttccaaagccggccgcagcccggcgacccccgaggcctctcgccccgggcccctagacctctcactatgaccgcggccgccgcctccaactgggggctgatcacgaacatcgtgaacagcatcgtaggggtcagtgtcctcaccatgcccttctgcttcaaacagtgcggcatcgtcctgggggcgctgctcttggtcttctgctcatggatgacgcaccagtcgtgcatgttcttggtgaagtcggccagcctgagcaagcggaggacctacgccggcctggcattccacgcctacgggaaggcaggcaagatgctggtggagaccagcatgatcgggctgatgctgggcacctgcatcgccttctacgtcgtgatcggcgacttggggtccaacttctttgcccggctgttcgggtttcaggtgggcggcaccttccgcatgttcctgctgttcgccgtgtcgctgtgcatcgtgctcccgctcagcctgcagcggaacatgatggcctccatccagtccttcagcgccatggccctcctcttctacaccgtgttcatgttcgtgatcgtgctctcctctctcaagcacggcctcttcagtgggcagtggctgcggcgggtcagctacgtccgctgggagggcgtcttccgctgcatccccatcttcggcatgtccttcgcctgccagtcccaggtgctgcccacctacgacagcctggatgagccgtcagtgaaaaccatgagctccatatttgcttcctcccttaatgtggtcaccaccttctacgtcatggtggggtttttcggctacgtcagcttcaccgaggccacggccggcaacgtgctcatgcactttccctccaacctggtgacggagatgctccgtgtgggcttcatgatgtcagtggctgtgggcttccccatgatgatcctgccatgcaggcaggccctgagcacgctgctgtgtgagcagcagcaaaaagatggcacctttgcagcagggggctacatgccccctctccggtttaaagcacttaccctctctgtggtgtttggaaccatggttggtggcatccttatccccaacggtaaggcgggagggctgccctgttgccggggagtgggacccggggcttcggcatcaaccaagacctgcacagttacgagacctgcacagagaccatcttctctggtctcttaaaaaagtctagagactttgtcagtttttctctggcccacagagaaaggcaggggataaaatctggcaacttgagccaggtgcggtggctcacacctgtaatcccagcactttgggaggttgaggtgggtggatcacctgaggttgggagttcaagaccagcctgaccaatgtggagaaaccccgtctctactaaaaatacaaaaatagcagggcgtcatggtggcatgcatctgtaatcctagctacttgggaggctgaggccaaagaatcacttgaacccgggaggtggagtttgcagtgagctgagatcacgccactgcactcgagccttggtgccagagtgagactctgtctggaaaaaaaaagaaaaacctgttataatcacatgcttcaaaattggagtgacacagaagggtatgaggcgccaggtctccctgtcaccatgccctcctgcccgctcccatgcaggcccacacaagcttcctct

SEQ ID NO: 290125 - DNA, 2241 bp, Homo sapiens
  misc_feature (2241)..(2241): n is a, c, g, or t
ggaaggactcgatactcacatttcaaaaggaagttgtaaaatgtacggtctgtgcctggggtgagaagccctcgtgccttcctggcatgctgcaggttcccgtttaagttgctcagccagatctgattgtgctggtcaggctcacctgccaggtgagtgcgcggccggcctcacgtggagatgtgcctggtgtgcctggcagagccctttcaggctttgctttctaggagagtggtggaggaaatcagtcatttcaaaaccttttgtttttcttttgtacagcaaaaagatggcacctttgcagcagggggctacatgccccctctccggtttaaagcacttaccctctctgtggtgtttggaaccatggttggtggcatccttatccccaacgtggagaccatcctgggcctcacaggagcgaccatgggaagcctcatctgcttcatctgcccggcgctgatctacaagaaaatccacaagaacgcactttcctcccaggtggtgctgtgggtcggcctgggcgtcctggtggtgagcactgtcaccacactgtctgtgagcgaggaggtccccgaggacttggcagaggaagcccctggcggccggcttggagaggccgagggtttgatgaaggtggaggcagcgcggctctcagcccaggatccggttgtggccgtggctgaggatggccgggagaagccgaagctgccgaaggagagagaggagctggagcaggcccagatcaaggggcccgtggatgtgcctggacgggaagatggcaaggaggcaccggaggaggcacagctcgatcgccctgggcaagggattgctgtgcctgtgggcgaggcccaccgccacgagcctcctgttcctcacgacaaggtggtggtagatgaaggccaagaccgagaggtgccagaagagaacaaacctccatccagacacgcgggcggaaaggctccaggggtccagggccagatggcgccgcctctgcccgactcagaaagagagaaacaagagccggagcagggagaggttgggaagaggcctggacaggcccaggccttggaggaggcgggtgatcttcctgaagatccccagaaagttccagaagcagatggtcagccagctgtccagcctgcaaaggaggacctggggccaggagacaggggcctgcatcctcggccccaggcagtgctgtctgagcagcagaacggcctggcggtgggtggaggggaaaaggccaaggggggaccgccgccaggcaacgccgccggggacacagggcagcccgcagaggacagcgaccacggtgggaagcctcccctcccagcggagaagccggctccagggcctgggctgccgcccgagcctcgcgagcagagggacgtggagcgagcgggtggaaaccaggcggccagccagctggagggtaaggcctccgccctacagccgcctgcctcaggcccagggagcggcagccccctcccccagccctggggtgatgcccaggtcatcctcgggagccctgccaggccccccttctctttccagccgcctgctgagcagacccctcggagagctttctgctcccttcccatcagcagcttgctttctgggaaccttttatctgccttactcccctttaaacacctgcggcatcgtcacatggcttgtgattaccgttttatctcccttgctcccctttaaaacacctgcggcattgtcacttggcttgtgattaccatttcgtctttaaagcaggtttgttaacagttttaacactcggagtatttaaagccagccaggtgtgggcgtgcctgcacccagatgtggaggtttattttaaggctgtgccccaaggggacccagtttgggggtggctgtgcccgccctggtcctagcatagccctggcccagagcactgctcccacaccctcgggcctcggagctcggctgtgttcatctacagggatctgtcacctgtccctccaggaaagctccttacgcctttgctctcctgagaataaaacttgctctgaatcctcctccgaaaaaaaaaaaaaaaaaaaaaaaaaaaaaaattgtgggggacgcagcgggcccccgaaacacggctcaaagaaaccaaacgatatggagcacggaggcccacaagggaaagcgaaacggggcacaaaggtgatccccagggaacaccggggacagacacaagggacgaaaatctacaccaataan

SEQ ID NO: 290126 - DNA, 1382 bp, Homo sapiens
gaatgtcccttgctcttttcgtgtgaaaaggtgaagttcaacattgccactgatctgggcgcagttcggcagggcaccgcctccccttggagctgtgtggccttagcggagtggccgagcctctctgtgcccagcgtttcattcctacctcctaggtgctaattcctcacaacagactatttttcggctgaggcagtcagggcccccgcccccgtgccctggcgccaagcactcgccccagaatcggtcctgggaataaaggtcaaaaaggaacccttaaacccgctcctccccggaaggcacagcgcctccccttctctccagcccgcgactgcccatccaaaccgaggcctcgcggggcgagtcccttgtcctccagctcgttgaactggggccccgggcacaggtcggctggaccagcttggcgaaccggacagctgcgagaccctcaggtgcccaccggcccagtttccgcccgcccctccgggcccgcctctcattggctcgcgtcccaccaaaccctaccccctggccgtcacttccgggcaacggagcccgtggaaggcggaagtgtgagcgccgcggcggcagctgagttgggctgaggtgtccctagctggctctgcggctcttccgggtctgggctcggagattcacaggcggcccgcgaggccgagcgagggacgcatggccctgaggcggccgcagggcttggcggggtccggaggttgacctcgcccccgcagccggccttcgaggctgcctcctccaggcagcctctggggcccgcgcccgcgcctgctcaggctcccgtgttcaggctgcccatcccctccccaccggcgtcccggacgttgggacctgtgaccgtggcctcgggctgggcttccaaagccggccgcagcccggcgacccccgaggcctctcgccccgggcccctagacctctcactatgaccgcggccgccgcctccaactgggggctgatcacgaacatcgtgaacagcatcgtaggggtcagtgtcctcaccatgcccttctgcttcaaacagtgcggcatcgtcctgggggcgctgctcttggtcttctgctcatggatgacgcaccagtcgtgcatgttcttggtgaagtcggccagcctgagcaagcggaggacctacgccggcctgggtccacacaagcttcctcttctaaactcagaccaagacagccgtcctcaccgtgctggtgcagacctgctctctctgtgtctctcctggacaccagatgccttcctgcggagctgcctgcagagagccttgctgttctccccaactcggaattccatggaggaagctcctcaggcctgggctgttgctggagttcagtggctcctctcccagt

SEQ ID NO: 290127 - DNA, 3481 bp, Homo sapiens
gaatgtcccttgctcttttcgtgtgaaaaggtgaagttcaacattgccactgatctgggcgcagttcggcagggcaccgcctccccttggagctgtgtggccttagcggagtggccgagcctctctgtgcccagcgtttcattcctacctcctaggtgctaattcctcacaacagactatttttcggctgaggcagtcagggcccccgcccccgtgccctggcgccaagcactcgccccagaatcggtcctgggaataaaggtcaaaaaggaacccttaaacccgctcctccccggaaggcacagcgcctccccttctctccagcccgcgactgcccatccaaaccgaggcctcgcggggcgagtcccttgtcctccagctcgttgaactggggccccgggcacaggtcggctggaccagcttggcgaaccggacagctgcgagaccctcaggtgcccaccggcccagtttccgcccgcccctccgggcccgcctctcattggctcgcgtcccaccaaaccctaccccctggccgtcacttccgggcaacggagcccgtggaaggcggaagtgtgagcgccgcggcggcagctgagttgggctgaggtgtccctagctggctctgcggctcttccgggtctgggctcggagattcacaggcggcccgcgaggccgagcgagggacgcatggccctgaggcggccgcagggcttggcggggtccggaggttgacctcgcccccgcagccggccttcgaggctgcctcctccaggcagcctctggggcccgcgcccgcgcctgctcaggctcccgtgttcaggctgcccatcccctccccaccggcgtcccggacgttgggacctgtgaccgtggcctcgggctgggcttccaaagccggccgcagcccggcgacccccgaggcctctcgccccgggcccctagacctctcactatgaccgcggccgccgcctccaactgggggctgatcacgaacatcgtgaacagcatcgtaggggtcagtgtcctcaccatgcccttctgcttcaaacagtgcggcatcgtcctgggggcgctgctcttggtcttctgctcatggatgacgcaccagtcgtgcatgttcttggtgaagtcggccagcctgagcaagcggaggacctacgccggcctggcattccacgcctacgggaaggcaggcaagatgctggtggagaccagcatgatcgggctgatgctgggcacctgcatcgccttctacgtcgtgatcggcgacttggggtccaacttctttgcccggctgttcgggtttcaggtgggcggcaccttccgcatgttcctgctgttcgccgtgtcgctgtgcatcgtgctcccgctcagcctgcagcggaacatgatggcctccatccagtccttcagcgccatggccctcctcttctacaccgtgttcatgttcgtgatcgtgctctcctctctcaagcacggcctcttcagtgggcagtggctgcggcgggtcagctacgtccgctgggagggcgtcttccgctgcatccccatcttcggcatgtccttcgcctgccagtcccaggtgctgcccacctacgacagcctggatgagccgtcagtgaaaaccatgagctccatatttgcttcctcccttaatgtggtcaccaccttctacgtcatggtggggtttttcggctacgtcagcttcaccgaggccacggccggcaacgtgctcatgcactttccctccaacctggtgacggagatgctccgtgtgggcttcatgatgtcagtggctgtgggcttccccatgatgatcctgccatgcaggcaggccctgagcacgctgctgtgtgagcagcagcaaaaagatggcacctttgcagcagggggctacatgccccctctccggtttaaagcacttaccctctctgtggtgtttggaaccatggttggtggcatccttatccccaacgtggagaccatcctgggcctcacaggagcgaccatgggaagcctcatctgcttcatctgcccggcgctgatctacaagaaaatccacaagaacgcactttcctcccaggtggtgctgtgggtcggcctgggcgtcctggtggtgagcactgtcaccacactgtctgtgagcgaggaggtccccgaggacttggcagaggaagcccctggcggccggcttggagaggccgagggtttgatgaaggtggaggcagcgcggctctcagcccaggatccggttgtggccgtggctgaggatggccgggagaagccgaagctgccgaaggagagagaggagctggagcaggcccagatcaaggggcccgtggatgtgcctggacgggaagatggcaaggaggcaccggaggaggcacagctcgatcgccctgggcaagggattgctgtgcctgtgggcgaggcccaccgccacgagcctcctgttcctcacgacaaggtggtggtagatgaaggccaagaccgagaggtgccagaagagaacaaacctccatccagacacgcgggcggaaaggctccaggggtccagggccagatggcgccgcctctgcccgactcagaaagagagaaacaagagccggagcagggagaggttgggaagaggcctggacaggcccaggccttggaggaggcgggtgatcttcctgaagatccccagaaagttccagaagcagatggtcagccagctgtccagcctgcaaaggaggacctggggccaggagacaggggcctgcatcctcggccccaggcagtgctgtctgagcagcagaacggcctggcggtgggtggaggggaaaaggccaaggggggaccgccgccaggcaacgccgccggggacacagggcagcccgcagaggacagcgaccacggtgggaagcctcccctcccagcggagaagccggctccagggcctgggctgccgcccgagcctcgcgagcagagggacgtggagcgagcgggtggaaaccaggcggccagccagctggagggtaaggcctccgccctacagccgcctgcctcaggcccagggagcggcagccccctcccccagccctggggtgatgcccaggtcatcctcgggagccctgccaggccccccttctctttccagccgcctgctgagcagacccctcggagagctttctgctcccttcccatcagcagcttgctttctgggaaccttttatctgccttactcccctttaaacacctgcggcatcgtcacatggcttgtgattaccgttttatctcccttgctcccctttaaaacacctgcggcattgtcacttggcttgtgattaccatttcgtctttaaagcaggtttgttaacagttttaacactcggagtatttaaagccagccaggtgtgggcgtgcctgcacccagatgtggaggtttattttaaggctgtgccccaaggggacccagccttaaaaaaaaccggcgcggccg

SEQ ID NO: 290128 - DNA, 3880 bp, Homo sapiens
  misc_feature (3880)..(3880): n is a, c, g, or t
gaatgtcccttgctcttttcgtgtgaaaaggtgaagttcaacattgccactgatctgggcgcagttcggcagggcaccgcctccccttggagctgtgtggccttagcggagtggccgagcctctctgtgcccagcgtttcattcctacctcctaggtgctaattcctcacaacagactatttttcggctgaggcagtcagggcccccgcccccgtgccctggcgccaagcactcgccccagaatcggtcctgggaataaaggtcaaaaaggaacccttaaacccgctcctccccggaaggcacagcgcctccccttctctccagcccgcgactgcccatccaaaccgaggcctcgcggggcgagtcccttgtcctccagctcgttgaactggggccccgggcacaggtcggctggaccagcttggcgaaccggacagctgcgagaccctcaggtgcccaccggcccagtttccgcccgcccctccgggcccgcctctcattggctcgcgtcccaccaaaccctaccccctggccgtcacttccgggcaacggagcccgtggaaggcggaagtgtgagcgccgcggcggcagctgagttgggctgaggtgtccctagctggctctgcggctcttccgggtctgggctcggagattcacaggcggcccgcgaggccgagcgagggacgcatggccctgaggcggccgcagggcttggcggggtccggaggttgacctcgcccccgcagccggccttcgaggctcgctccctctcagggcggagctcggggagcctcgggtcgccgcagccgtgcttcgggtcttcgcgtgattcagggctgcaccattcccctgcgcccaccggcgctcccggaacgtgtgtggactctgtgagccgatggctcgtcgtggctgggtcttcacataaagccgtggacgacaggaccggtcgacgccccgaggacctgcttcgactcgcacggggccgctcgtgagtactcttcttcagcttatgaccgcggccgccgcctccaactgggggctgatcacgaacatcgtgaacagcatcgtaggggtcagtgtcctcaccatgcccttctgcttcaaacagtgcggcatcgtcctgggggcgctgctcttggtcttctgctcatggatgacgcaccagtcgtgcatgttcttggtgaagtcggccagcctgagcaagcggaggacctacgccggcctggcattccacgcctacgggaaggcaggcaagatgctggtggagaccagcatgatcgggctgatgctgggcacctgcatcgccttctacgtcgtgatcggcgacttggggtccaacttctttgcccggctgttcgggtttcaggtgggcggcaccttccgcatgttcctgctgttcgccgtgtcgctgtgcatcgtgctcccgctcagcctgcagcggaacatgatggcctccatccagtccttcagcgccatggccctcctcttctacaccgtgttcatgttcgtgatcgtgctctcctctctcaagcacggcctcttcagtgggcagtggctgcggcgggtcagctacgtccgctgggagggcgtcttccgctgcatccccatcttcggcatgtccttcgcctgccagtcccaggtgctgcccacctacgacagcctggatgagccgtcagtgaaaaccatgagctccatatttgcttcctcccttaatgtggtcaccaccttctacgtcatggtggggtttttcggctacgtcagcttcaccgaggccacggccggcaacgtgctcatgcactttccctccaacctggtgacggagatgctccgtgtgggcttcatgatgtcagtggctgtgggcttccccatgatgatcctgccatgcaggcaggccctgagcacgctgctgtgtgagcagcagcaaaaagatggcacctttgcagcagggggctacatgccccctctccggtttaaagcacttaccctctctgtggtgtttggaaccatggttggtggcatccttatccccaacgtggagaccatcctgggcctcacaggagcgaccatgggaagcctcatctgcttcatctgcccggcgctgatctacaagaaaatccacaagaacgcactttcctcccaggtggtgctgtgggtcggcctgggcgtcctggtggtgagcactgtcaccacactgtctgtgagcgaggaggtccccgaggacttggcagaggaagcccctggcggccggcttggagaggccgagggtttgatgaaggtggaggcagcgcggctctcagcccaggatccggttgtggccgtggctgaggatggccgggagaagccgaagctgccgaaggagagagaggagctggagcaggcccagatcaaggggcccgtggatgtgcctggacgggaagatggcaaggaggcaccggaggaggcacagctcgatcgccctgggcaagggattgctgtgcctgtgggcgaggcccaccgccacgagcctcctgttcctcacgacaaggtggtggtagatgaaggccaagaccgagaggtgccagaagagaacaaacctccatccagacacgcgggcggaaaggctccaggggtccagggccagatggcgccgcctctgcccgactcagaaagagagaaacaagagccggagcagggagaggttgggaagaggcctggacaggcccaggccttggaggaggcgggtgatcttcctgaagatccccagaaagttccagaagcagatggtcagccagctgtccagcctgcaaaggaggacctggggccaggagacaggggcctgcatcctcggccccaggcagtgctgtctgagcagcagaacggcctggcggtgggtggaggggaaaaggccaaggggggaccgccgccaggcaacgccgccggggacacagggcagcccgcagaggacagcgaccacggtgggaagcctcccctcccagcggagaagccggctccagggcctgggctgccgcccgagcctcgcgagcagagggacgtggagcgagcgggtggaaaccaggcggccagccagctggagggtaaggcctccgccctacagccgcctgcctcaggcccagggagcggcagccccctcccccagccctggggtgatgcccaggtcatcctcgggagccctgccaggccccccttctctttccagccgcctgctgagcagacccctcggagagctttctgctcccttcccatcagcagcttgctttctgggaaccttttatctgccttactcccctttaaacacctgcggcatcgtcacatggcttgtgattaccgttttatctcccttgctcccctttaaaacacctgcggcattgtcacttggcttgtgattaccatttcgtctttaaagcaggtttgttaacagttttaacactcggagtatttaaagccagccaggtgtgggcgtgcctgcacccagatgtggaggtttattttaaggctgtgccccaaggggacccagtttgggggtggctgtgcccgccctggtcctagcatagccctggcccagagcactgctcccacaccctcgggcctcggagctcggctgtgttcatctacagggatctgtcacctgtccctccaggaaagctccttacgcctttgctctcctgagaataaaacttgctctgaatcctcctccgaaaaaaaaaaaaaaaaaaaaaaaaaaaaaaattgtgggggacgcagcgggcccccgaaacacggctcaaagaaaccaaacgatatggagcacggaggcccacaagggaaagcgaaacggggcacaaaggtgatccccagggaacaccggggacagacacaagggacgaaaatctacaccaataan

SEQ ID NO: 290129 - DNA, 3711 bp, Homo sapiens
  misc_feature (3711)..(3711): n is a, c, g, or t
gaatgtcccttgctcttttcgtgtgaaaaggtgaagttcaacattgccactgatctgggcgcagttcggcagggcaccgcctccccttggagctgtgtggccttagcggagtggccgagcctctctgtgcccagcgtttcattcctacctcctaggtgctaattcctcacaacagactatttttcggctgaggcagtcagggcccccgcccccgtgccctggcgccaagcactcgccccagaatcggtcctgggaataaaggtcaaaaaggaacccttaaacccgctcctccccggaaggcacagcgcctccccttctctccagcccgcgactgcccatccaaaccgaggcctcgcggggcgagtcccttgtcctccagctcgttgaactggggccccgggcacaggtcggctggaccagcttggcgaaccggacagctgcgagaccctcaggtgcccaccggcccagtttccgcccgcccctccgggcccgcctctcattggctcgcgtcccaccaaaccctaccccctggccgtcacttccgggcaacggagcccgtggaaggcggaagtgtgagcgccgcggcggcagctgagttgggctgaggtgtccctagctggctctgcggctcttccgggtctgggctcggagattcacaggcggcccgcgaggccgagcgagggacgcatggccctgaggcggccgcagggcttggcggggtccggaggttgacctcgcccccgcagccggccttcgaggctgcctcctccaggcagcctctggggcccgcgcccgcgcctgctcaggctcccgtgttcaggctgcccatcccctccccaccggcgtcccggacgttgggacctgtgaccgtggcctcgggctgggcttccaaagccggccgcagcccggcgacccccgaggcctctcgccccgggcccctagacctctcactatgaccgcggccgccgcctccaactgggggctgatcacgaacatcgtgaacagcatcgtaggggtcagtgtcctcaccatgcccttctgcttcaaacagtgcggcatcgtcctgggggcgctgctcttggtcttctgctcatggatgacgcaccagtcgtgcatgttcttggtgaagtcggccagcctgagcaagcggaggacctacgccggcctggcattccacgcctacgggaaggcaggcaagatgctggtggagaccagcatgatcgggctgatgctgggcacctgcatcgccttctacgtcgtgatcggcgacttggggtccaacttctttgcccggctgttcgggtttcaggtgggcggcaccttccgcatgttcctgctgttcgccgtgtcgctgtgcatcgtgctcccgctcagcctgcagcggaacatgatggcctccatccagtccttcagcgccatggccctcctcttctacaccgtgttcatgttcgtgatcgtgctctcctctctcaagcacggcctcttcagtgggcagtggctgcggcgggtcagctacgtccgctgggagggcgtcttccgctgcatccccatcttcggcatgtccttcgcctgccagtcccaggtgctgcccacctacgacagcctggatgagccgtcagtgaaaaccatgagctccatatttgcttcctcccttaatgtggtcaccaccttctacgtcatggtggggtttttcggctacgtcagcttcaccgaggccacggccggcaacgtgctcatgcactttccctccaacctggtgacggagatgctccgtgtgggcttcatgatgtcagtggctgtgggcttccccatgatgatcctgccatgcaggcaggccctgagcacgctgctgtgtgagcagcagtggagaccatcctgggcctcacaggagcgaccatgggaagcctcatctgcttcatctgcccggcgctgatctacaagaaaatccacaagaacgcactttcctcccaggtggtgctgtgggtcggcctgggcgtcctggtggtgagcactgtcaccacactgtctgtgagcgaggaggtccccgaggacttggcagaggaagcccctggcggccggcttggagaggccgagggtttgatgaaggtggaggcagcgcggctctcagcccaggatccggttgtggccgtggctgaggatggccgggagaagccgaagctgccgaaggagagagaggagctggagcaggcccagatcaaggggcccgtggatgtgcctggacgggaagatggcaaggaggcaccggaggaggcacagctcgatcgccctgggcaagggattgctgtgcctgtgggcgaggcccaccgccacgagcctcctgttcctcacgacaaggtggtggtagatgaaggccaagaccgagaggtgccagaagagaacaaacctccatccagacacgcgggcggaaaggctccaggggtccagggccagatggcgccgcctctgcccgactcagaaagagagaaacaagagccggagcagggagaggttgggaagaggcctggacaggcccaggccttggaggaggcgggtgatcttcctgaagatccccagaaagttccagaagcagatggtcagccagctgtccagcctgcaaaggaggacctggggccaggagacaggggcctgcatcctcggccccaggcagtgctgtctgagcagcagaacggcctggcggtgggtggaggggaaaaggccaaggggggaccgccgccaggcaacgccgccggggacacagggcagcccgcagaggacagcgaccacggtgggaagcctcccctcccagcggagaagccggctccagggcctgggctgccgcccgagcctcgcgagcagagggacgtggagcgagcgggtggaaaccaggcggccagccagctggagggtaaggcctccgccctacagccgcctgcctcaggcccagggagcggcagccccctcccccagccctggggtgatgcccaggtcatcctcgggagccctgccaggccccccttctctttccagccgcctgctgagcagacccctcggagagctttctgctcccttcccatcagcagcttgctttctgggaaccttttatctgccttactcccctttaaacacctgcggcatcgtcacatggcttgtgattaccgttttatctcccttgctcccctttaaaacacctgcggcattgtcacttggcttgtgattaccatttcgtctttaaagcaggtttgttaacagttttaacactcggagtatttaaagccagccaggtgtgggcgtgcctgcacccagatgtggaggtttattttaaggctgtgccccaaggggacccagtttgggggtggctgtgcccgccctggtcctagcatagccctggcccagagcactgctcccacaccctcgggcctcggagctcggctgtgttcatctacagggatctgtcacctgtccctccaggaaagctccttacgcctttgctctcctgagaataaaacttgctctgaatcctcctccgaaaaaaaaaaaaaaaaaaaaaaaaaaaaaaattgtgggggacgcagcgggcccccgaaacacggctcaaagaaaccaaacgatatggagcacggaggcccacaagggaaagcgaaacggggcacaaaggtgatccccagggaacaccggggacagacacaagggacgaaaatctacaccaataan

SEQ ID NO: 290130 - DNA, 3331 bp, Homo sapiens
  misc_feature (3331)..(3331): n is a, c, g, or t
gaatgtcccttgctcttttcgtgtgaaaaggtgaagttcaacattgccactgatctgggcgcagttcggcagggcaccgcctccccttggagctgtgtggccttagcggagtggccgagcctctctgtgcccagcgtttcattcctacctcctaggtgctaattcctcacaacagactatttttcggctgaggcagtcagggcccccgcccccgtgccctggcgccaagcactcgccccagaatcggtcctgggaataaaggtcaaaaaggaacccttaaacccgctcctccccggaaggcacagcgcctccccttctctccagcccgcgactgcccatccaaaccgaggcctcgcggggcgagtcccttgtcctccagctcgttgaactggggccccgggcacaggtcggctggaccagcttggcgaaccggacagctgcgagaccctcaggtgcccaccggcccagtttccgcccgcccctccgggcccgcctctcattggctcgcgtcccaccaaaccctaccccctggccgtcacttccgggcaacggagcccgtggaaggcggaagtgtgagcgccgcggcggcagctgagttgggctgaggtgtccctagctggctctgcggctcttccgggtctgggctcggagattcacaggcggcccgcgaggccgagcgagggacgcatggccctgaggcggccgcagggcttggcggggtccggaggttgacctcgcccccgcagccggccttcgaggctgcctcctccaggcagcctctggggcccgcgcccgcgcctgctcaggctcccgtgttcaggctgcccatcccctccccaccggcgtcccggacgttgggacctgtgaccgtggcctcgggctgggcttccaaagccggccgcagcccggcgacccccgaggcctctcgccccgggcccctagacctctcactatgaccgcggccgccgcctccaactgggggctgatcacgaacatcgtgaacagcatcgtaggggtcagtgtcctcaccatgcccttctgcttcaaacagtgcggcatcgtcctgggggcgctgctcttggtcttccaggtgctgcccacctacgacagcctggatgagccgtcagtgaaaaccatgagctccatatttgcttcctcccttaatgtggtcaccaccttctacgtcatggtggggtttttcggctacgtcagcttcaccgaggccacggccggcaacgtgctcatgcactttccctccaacctggtgacggagatgctccgtgtgggcttcatgatgtcagtggctgtgggcttccccatgatgatcctgccatgcaggcaggccctgagcacgctgctgtgtgagcagcagcaaaaagatggcacctttgcagcagggggctacatgccccctctccggtttaaagcacttaccctctctgtggtgtttggaaccatggttggtggcatccttatccccaacgtggagaccatcctgggcctcacaggagcgaccatgggaagcctcatctgcttcatctgcccggcgctgatctacaagaaaatccacaagaacgcactttcctcccaggtggtgctgtgggtcggcctgggcgtcctggtggtgagcactgtcaccacactgtctgtgagcgaggaggtccccgaggacttggcagaggaagcccctggcggccggcttggagaggccgagggtttgatgaaggtggaggcagcgcggctctcagcccaggatccggttgtggccgtggctgaggatggccgggagaagccgaagctgccgaaggagagagaggagctggagcaggcccagatcaaggggcccgtggatgtgcctggacgggaagatggcaaggaggcaccggaggaggcacagctcgatcgccctgggcaagggattgctgtgcctgtgggcgaggcccaccgccacgagcctcctgttcctcacgacaaggtggtggtagatgaaggccaagaccgagaggtgccagaagagaacaaacctccatccagacacgcgggcggaaaggctccaggggtccagggccagatggcgccgcctctgcccgactcagaaagagagaaacaagagccggagcagggagaggttgggaagaggcctggacaggcccaggccttggaggaggcgggtgatcttcctgaagatccccagaaagttccagaagcagatggtcagccagctgtccagcctgcaaaggaggacctggggccaggagacaggggcctgcatcctcggccccaggcagtgctgtctgagcagcagaacggcctggcggtgggtggaggggaaaaggccaaggggggaccgccgccaggcaacgccgccggggacacagggcagcccgcagaggacagcgaccacggtgggaagcctcccctcccagcggagaagccggctccagggcctgggctgccgcccgagcctcgcgagcagagggacgtggagcgagcgggtggaaaccaggcggccagccagctggagggtaaggcctccgccctacagccgcctgcctcaggcccagggagcggcagccccctcccccagccctggggtgatgcccaggtcatcctcgggagccctgccaggccccccttctctttccagccgcctgctgagcagacccctcggagagctttctgctcccttcccatcagcagcttgctttctgggaaccttttatctgccttactcccctttaaacacctgcggcatcgtcacatggcttgtgattaccgttttatctcccttgctcccctttaaaacacctgcggcattgtcacttggcttgtgattaccatttcgtctttaaagcaggtttgttaacagttttaacactcggagtatttaaagccagccaggtgtgggcgtgcctgcacccagatgtggaggtttattttaaggctgtgccccaaggggacccagtttgggggtggctgtgcccgccctggtcctagcatagccctggcccagagcactgctcccacaccctcgggcctcggagctcggctgtgttcatctacagggatctgtcacctgtccctccaggaaagctccttacgcctttgctctcctgagaataaaacttgctctgaatcctcctccgaaaaaaaaaaaaaaaaaaaaaaaaaaaaaaattgtgggggacgcagcgggcccccgaaacacggctcaaagaaaccaaacgatatggagcacggaggcccacaagggaaagcgaaacggggcacaaaggtgatccccagggaacaccggggacagacacaagggacgaaaatctacaccaataan

SEQ ID NO: 290131 - DNA, 994 bp, Homo sapiens
ggaaggactcgatactcacatttcaaaaggaagttgtaaaatgtacggtctgtgcctggggtgagaagccctcgtgccttcctggcatgctgcaggttcccgtttaagttgctcagccagatctgattgtgctggtcaggctcacctgccaggtgagtgcgcggccggcctcacgtggagatgtgcctggtgtgcctggcagagccctttcaggctttgctttctaggagagtggtggaggaaatcagtcatttcaaaaccttttgtttttcttttgtacagcaaaaagatggcacctttgcagcagggggctacatgccccctctccggtttaaagcacttaccctctctgtggtgtttggaaccatggttggtggcatccttatccccaacggtaaggcgggagggctgccctgttgccggggagtgggacccggggcttcggcatcaaccaagacctgcacagttacgagacctgcacagagaccatcttctctggtctcttaaaaaagtctagagactttgtcagtttttctctggcccacagagaaaggcaggggataaaatctggcaacttgagccaggtgcggtggctcacacctgtaatcccagcactttgggaggttgaggtgggtggatcacctgaggttgggagttcaagaccagcctgaccaatgtggagaaaccccgtctctactaaaaatacaaaaatagcagggcgtcatggtggcatgcatctgtaatcctagctacttgggaggctgaggccaaagaatcacttgaacccgggaggtggagtttgcagtgagctgagatcacgccactgcactcgagccttggtgccagagtgagactctgtctggaaaaaaaaagaaaaacctgttataatcacatgcttcaaaattggagtgacacagaagggtatgaggcgccaggtctccctgtcaccatgccctcctgcccgctcccatgcaggcccacacaagcttcctct

SEQ ID NO: 290132 - DNA, 2115 bp, Homo sapiens
gccgaggtacgcggtgcggtctcccggtacccggagcggctctgatagagacggggtttcaccgtgttggccagaatggtctcgatctcctgacctcgtgatctgcccgcctcgggcctcccaaagtgctggaattacaggtgtgagccacggcgccgggccccctagggattttcaggtttaacttgtggccctaaagaactggaaacccaaaggaacgaatattcctgccccacagagtcccatctttggtgaggctgtttctggagtttacatgatgaccaaggtactaggcatggccccagttctgggccctaggcctccacaggagcaggtggggcctctgatggtaaaagtcgaggagaaagaagagaaaggcaagtaccttcctagcctggagatgttccgccagcgcttcaggcagtttgggtaccatgatacccctggaccccgagaggccctgagccaactccgggtgctctgctgtgagtggctgaggcccgagatccacaccaaggagcagatcctggagctactggtgctggagcagttcctgaccatcctgccccaggagctccaggcctgggtgcaggagcattgcccggagagcgctgaagaggctgtcactctcctcgaagatctggagcgggaactggatgagccaggacaccaggtctcaactcctccaaacgaacagaaaccggtgtgggagaagatatcctcctcaggaactgcaaaggaatccccgagcagcatgcagccacagcccttggagaccagtcacaaatacgagtcttgggggcccctgtacatccaagagtctggtgaggagcaggagttcgctcaagatccaagaaaggtccgagattgcagattgagtacccagcacgaggaatcagcagatgagcagaaaggttctgaagcagaggggctcaaaggggatataatttctgtgattatcgccaataaacctgaggccagcttagagaggcagtgcgtaaaccttgaaaatgaaaaaggaacaaaaccccctcttcaagaggcaggctccaagaaaggtagagaatcagttcctactaaacctaccccaggagagagacgttatatatgtgctgaatgtggcaaagcctttagtaatagctcaaatctcaccaaacacaggagaacacacactggggagaaaccttacgtgtgcaccaagtgtgggaaagctttcagccacagctcaaacctcaccctccactacagaacacacttggtggaccggccctatgactgtaagtgtggaaaagcttttgggcagagctcagaccttcttaaacatcagagaatgcacacagaagaggcgccatatcagtgcaaagattgtggcaaggctttcagcgggaaaggcagcctcattcgtcactatcggatccacactggggagaagccttatcagtgtaacgaatgtgggaagagcttcagtcagcatgcgggcctcagctcccaccagagactccacaccggagagaagccatataagtgtaaggagtgtgggaaagccttcaaccacagctccaacttcaataaacaccacagaatccacaccggggaaaagccctactggtgtcatcactgtggaaagaccttctgtagcaagtccaatctttccaaacatcagcgagtccacactggagagggagaagcaccgtaactttcaagcgctcctgttgttgtcgttgttttaaactttagaatctgaaaaccagaaagaagtcttgtcattgcagcagcatcgattccggtgatagagtttgtatcactcaacatcaggggatgcctgaggagtgcgagctccacagcaacatggcaggcaggaggtcctcagaaggtgtcaggaggttccacactcgccagttcactggagcagagtcccttcgccacacttagggtcccagtaagccatgccagcattaccttttgcgtagttaaacagacgtgtatccagtctagttaaggaagaaacattaagattgtttaatttttaacatatattcaagaattttaatttgtaaagaattgagccacattgaacacaattgaatgagattcagaataaacttataacatctt

SEQ ID NO: 290133 - DNA, 1995 bp, Homo sapiens
gccgaggtacgcggtgcggtctcccggtacccggagcggctctgatagggattttcaggtttaacttgtggccctaaagaactggaaacccaaaggaacgaatattcctgccccacagagtcccatctttggtgaggctgtttctggagtttacatgatgaccaaggtactaggcatggccccagttctgggccctaggcctccacaggagcaggtggggcctctgatggtaaaagtcgaggagaaagaagagaaaggcaagtaccttcctagcctggagatgttccgccagcgcttcaggcagtttgggtaccatgatacccctggaccccgagaggccctgagccaactccgggtgctctgctgtgagtggctgaggcccgagatccacaccaaggagcagatcctggagctactggtgctggagcagttcctgaccatcctgccccaggagctccaggcctgggtgcaggagcattgcccggagagcgctgaagaggctgtcactctcctcgaagatctggagcgggaactggatgagccaggacaccaggtctcaactcctccaaacgaacagaaaccggtgtgggagaagatatcctcctcaggaactgcaaaggaatccccgagcagcatgcagccacagcccttggagaccagtcacaaatacgagtcttgggggcccctgtacatccaagagtctggtgaggagcaggagttcgctcaagatccaagaaaggtccgagattgcagattgagtacccagcacgaggaatcagcagatgagcagaaaggttctgaagcagaggggctcaaaggggatataatttctgtgattatcgccaataaacctgaggccagcttagagaggcagtgcgtaaaccttgaaaatgaaaaaggaacaaaaccccctcttcaagaggcaggctccaagaaaggtagagaatcagttcctactaaacctaccccaggagagagacgttatatatgtgctgaatgtggcaaagcctttagtaatagctcaaatctcaccaaacacaggagaacacacactggggagaaaccttacgtgtgcaccaagtgtgggaaagctttcagccacagctcaaacctcaccctccactacagaacacacttggtggaccggccctatgactgtaagtgtggaaaagcttttgggcagagctcagaccttcttaaacatcagagaatgcacacagaagaggcgccatatcagtgcaaagattgtggcaaggctttcagcgggaaaggcagcctcattcgtcactatcggatccacactggggagaagccttatcagtgtaacgaatgtgggaagagcttcagtcagcatgcgggcctcagctcccaccagagactccacaccggagagaagccatataagtgtaaggagtgtgggaaagccttcaaccacagctccaacttcaataaacaccacagaatccacaccggggaaaagccctactggtgtcatcactgtggaaagaccttctgtagcaagtccaatctttccaaacatcagcgagtccacactggagagggagaagcaccgtaactttcaagcgctcctgttgttgtcgttgttttaaactttagaatctgaaaaccagaaagaagtcttgtcattgcagcagcatcgattccggtgatagagtttgtatcactcaacatcaggggatgcctgaggagtgcgagctccacagcaacatggcaggcaggaggtcctcagaaggtgtcaggaggttccacactcgccagttcactggagcagagtcccttcgccacacttagggtcccagtaagccatgccagcattaccttttgcgtagttaaacagacgtgtatccagtctagttaaggaagaaacattaagattgtttaatttttaacatatattcaagaattttaatttgtaaagaattgagccacattgaacacaattgaatgagattcagaataaacttataacatctt

SEQ ID NO: 290134 - DNA, 1357 bp, Homo sapiens
gactctgaggatccccaagtaagtcgggacgcgagttcgtcgggaccctgtacatccaagagtctggtgaggagcaggagttcgctcaagatccaagaaaggtccgagattgcagattgagtacccagcacgaggaatcagcagatgagcagaaaggttctgaagcagaggggctcaaaggggatataatttctgtgattatcgccaataaacctgaggccagcttagagaggcagtgcgtaaaccttgaaaatgaaaaaggaacaaaaccccctcttcaagaggcaggctccaagaaaggtagagaatcagttcctactaaacctaccccaggagagagacgttatatatgtgctgaatgtggcaaagcctttagtaatagctcaaatctcaccaaacacaggagaacacacactggggagaaaccttacgtgtgcaccaagtgtgggaaagctttcagccacagctcaaacctcaccctccactacagaacacacttggtggaccggccctatgactgtaagtgtggaaaagcttttgggcagagctcagaccttcttaaacatcagagaatgcacacagaagaggcgccatatcagtgcaaagattgtggcaaggctttcagcgggaaaggcagcctcattcgtcactatcggatccacactggggagaagccttatcagtgtaacgaatgtgggaagagcttcagtcagcatgcgggcctcagctcccaccagagactccacaccggagagaagccatataagtgtaaggagtgtgggaaagccttcaaccacagctccaacttcaataaacaccacagaatccacaccggggaaaagccctactggtgtcatcactgtggaaagaccttctgtagcaagtccaatctttccaaacatcagcgagtccacactggagagggagaagcaccgtaactttcaagcgctcctgttgttgtcgttgttttaaactttagaatctgaaaaccagaaagaagtcttgtcattgcagcagcatcgattccggtgatagagtttgtatcactcaacatcaggggatgcctgaggagtgcgagctccacagcaacatggcaggcaggaggtcctcagaaggtgtcaggaggttccacactcgccagttcactggagcagagtcccttcgccacacttagggtcccagtaagccatgccagcattaccttttgcgtagttaaacagacgtgtatccagtctagttaaggaagaaacattaagattgtttaatttttaacatatattcaagaattttaatttgtaaagaattgagccacattgaacacaattgaatgagattcagaataaacttataacatctt

SEQ ID NO: 290135 - DNA, 461 bp, Homo sapiens
gggatgggtgttttccttttctctttcctagaggttctatgtagctctactgggattttcattcttggtcttaaagtgagccatgcacaaacctagccattcctgattgtctctaggtctcaactcctccaaacgaacagaaaccggtgtgggagaagatatcctcctcaggaactgcaaaggaatccccgagcagcatgcagccacagcccttggagaccagtcacaaatacgagtcttgggggcccctgtacatccaagagtctggtgaggagcaggagttcgctcaagatccaagaaaggtccgaggtgaggaccacccattagactcctattcagtgccccaggcccctgtggttggagaagcagaataattagtaattcttggttgtgaggtgatttcatagattgacttgattagttgggctgactgggtggaaatagtcccctttcctccccca

SEQ ID NO: 290136 - DNA, 1820 bp, Homo sapiens
gccgaggtacgcggtgcggtctcccggtacccggagcggctctgatagagacggggtttcaccgtgttggccagaatggtctcgatctcctgacctcgtgatctgcccgcctcgggcctcccaaagtgctggaattacaggtgtgagccacggcgccgggccccctagggattttcaggtttaacttgtggccctaaagaactggaaacccaaaggaacgaatattcctgccccacagagtcccatctttggtgaggctgtttctggagtttacatgatgaccaaggtactaggcatggccccagttctgggccctaggcctccacaggagcaggtggggcctctgatggtaaaagtcgaggagaaagaagagaaaggcaagtaccttcctagcctggagatgttccgccagcgcttcaggcagtttgggtaccatgatacccctggaccccgagaggccctgagccaactccgggtgctctgctgtgagtggctgaggcccgagatccacaccaaggagcagatcctggagctactggtgctggagcagttcctgaccatcctgccccaggagctccaggcctgggtgcaggagcattgcccggagagcgctgaagaggctgtcactctcctcgaagatctggagcgggaactggatgagccaggacaccaggtctcaactcctccaaacgaacagaaaccggtgtgggagaagatatcctcctcaggaactgcaaaggaatccccgagcagcatgcagccacagcccttggagaccagtcacaaatacgagtcttgggggcccctgtacatccaagagtctggtgaggagcaggagttcgctcaagatccaagaaaggtccgaggagaacacacactggggagaaaccttacgtgtgcaccaagtgtgggaaagctttcagccacagctcaaacctcaccctccactacagaacacacttggtggaccggccctatgactgtaagtgtggaaaagcttttgggcagagctcagaccttcttaaacatcagagaatgcacacagaagaggcgccatatcagtgcaaagattgtggcaaggctttcagcgggaaaggcagcctcattcgtcactatcggatccacactggggagaagccttatcagtgtaacgaatgtgggaagagcttcagtcagcatgcgggcctcagctcccaccagagactccacaccggagagaagccatataagtgtaaggagtgtgggaaagccttcaaccacagctccaacttcaataaacaccacagaatccacaccggggaaaagccctactggtgtcatcactgtggaaagaccttctgtagcaagtccaatctttccaaacatcagcgagtccacactggagagggagaagcaccgtaactttcaagcgctcctgttgttgtcgttgttttaaactttagaatctgaaaaccagaaagaagtcttgtcattgcagcagcatcgattccggtgatagagtttgtatcactcaacatcaggggatgcctgaggagtgcgagctccacagcaacatggcaggcaggaggtcctcagaaggtgtcaggaggttccacactcgccagttcactggagcagagtcccttcgccacacttagggtcccagtaagccatgccagcattaccttttgcgtagttaaacagacgtgtatccagtctagttaaggaagaaacattaagattgtttaatttttaacatatattcaagaattttaatttgtaaagaattgagccacattgaacacaattgaatgagattcagaataaacttataacatctt

SEQ ID NO: 290137 - DNA, 2273 bp, Homo sapiens
gccgaggtacgcggtgcggtctcccggtacccggagcggctctgatagagacggggtttcaccgtgttggccagaatggtctcgatctcctgacctcgtgatctgcccgcctcgggcctcccaaagtgctggaattacaggtgtgagccacggcgccgggccccctagggattttcaggtttaacttgtggccctaaagaactggaaacccaaaggaacgaatattcctgccccacagagtcccatctttggtgaggctgtttctggagtttacatgatgaccaaggtactaggcatggccccagttctgggccctaggcctccacaggagcaggtggggcctctgatggtaaaagtcgaggagaaagaagagaaaggcaagtaccttcctagcctggagatgttccgccagcgcttcaggcagtttgggtaccatgatacccctggaccccgagaggccctgagccaactccgggtgctctgctgtgagtggctgaggcccgagatccacaccaaggagcagatcctggagctactggtgctggagcagttcctgaccatcctgccccaggagctccaggcctgggtgcaggagcattgcccggagagcgctgaagaggctgtcactctcctcgaagatctggagcgggaactggatgagccaggacaccaggtctcaactcctccaaacgaacagaaaccggtgtgggagaagatatcctcctcaggaactgcaaaggaatccccgagcagcatgcagccacagcccttggagaccagtcacaaatacgagtcttgggggcccctgtacatccaagagtctggtgaggagcaggagttcgctcaagatccaagaaaggtccgagattgcagattgagtacccagcacgaggaatcagcagatgagcagaaaggttctgaagcagaggggctcaaaggggatataatttctgtgattatcgccaataaacctgaggccagcttagagaggcagtgcgtaaaccttgaaaatgaaaaaggaacaaaaccccctcttcaagaggcaggctccaagaaaggtagagaatcagttcctactaaacctaccccaggagagagacgttatatatgtgctgaatgtggcaaagcctttagtaatagctcaaatctcaccaaacacaggagaacacacactggggagaaaccttacgtgtgcaccaagtgtgggaaagctttcagccacagctcaaacctcaccctccactacagaacacacttggtggaccggccctatgactgtaagtgtggaaaagcttttgggcagagctcagaccttcttaaacatcagagaatgcacacagaagaggcgccatatcagtgcaaagattgtggcaaggctttcagcgggaaaggcagcctcattcgtcactatcggatccacactggggagaagccttatcagtgtaacgaatgtgggaagagcttcagtcagcatgcgggcctcagctcccaccagagactccacaccggagagaagccatataagtgtaaggagtgtgggaaagccttcaaccacagctccaacttcaataaacaccacagaatccacaccggggaaaagccctactggtgtcatcactgtggaaagaccttctgtagcaagtccaatctttccaaacatcagcgagtccacactggagagggagaagcaccgtaactttcaagcgctcctgttgttgtcgttgttttaaactttagaatctgaaaaccagaaagaagtcttgtcattgcagcagcatcgattccggtgatagagtttgtatcactcaacatcaggggatgcctgaggagtgcgagctccacagcaacatggcaggcaggaggtcctcagaaggtgtcaggaggttccacactcgccagttcactggagcagagtcccttcgccacacttagggtcccagtaagccatgccagcattaccttttgcgtagttaaacagacgtgtatccagtctagttaaggaagaaacattaagattgtttaatttttaacatatattcaagaattttaatttgtaaagaattgagccacattgaacacaattgaatgagattcagaataaacttataacatcttgtaatgcctcaggactattattataacaaatgatgtgttggttattgaatacttacagatggagaaaactattcctactggtttagcttttttagaaaatttggatttgggggtcaggcacggtggcttacgcctgtaatcccagcaccttggaagcc

SEQ ID NO: 290138 - DNA, 2285 bp, Homo sapiens
tgctccaggccaactggactctgggcggccagcacaggcagggtcagggggtgacttctgtgcctcgtggcactgccacctgggcctgagcaagagggctccattctcctacccgcccaaaccctcatccctgtcctagccccagtgctagaaataaagagaccagaattttccttctggcctaagggccccagaggaatacccactggaactcacagctgcctcatggaaactgctgcagcagtggtgaagctagaaagactagaggcagcgctgaccagagccctccggagactacagccagggagtgtggctccagggaatggggaggaggtcatcagctttgctactgtcacagactccacttcagcctacagctccctgctcacttttcacctgtccactcctcggtcccaccacctgtaccatgcccgcctgtggctgcacgtgctccccacccttcctggcactctttgcttgaggatcttccgatggggaccaaggaggaggcgccaagggtcccgcactctcctggctgagcaccacatcaccaacctgggctggcataccttaactctgccctctagtggcttgaggggtgagaagtctggtgtcctgaaactgcaactagactgcagacccctagaaggcaacagcacagttactggacaaccgaggcggctcttggacacagcaggacaccagcagcccttcctagagcttaagatccgagccaatgagcctggagcaggccgggccaggaggaggacccccacctgtgagcctgcgacccccttatgttgcaggcgagaccattacgtagacttccaggaactgggatggcgggactggatactgcagcccgaggggtaccagctgaattactgcagtgggcagtgccctccccacctggctggcagcccaggcattgctgcctctttccattctgccgtcttcagcctcctcaaagccaacaatccttggcctgccagtacctcctgttgtgtccctactgcccgaaggcccctctctctcctctacctggatcataatggcaatgtggtcaagacggatgtgccagatatggtggtggaggcctgtggctgcagctagcaagaggacctggggctttggagtgaagagaccaagatgaagtttcccaggcacagggcatctgtgactggaggcatcagattcctgatccacaccccaacccaacaaccacctggcaatatgactcacttgacccctatgggacccaaatgggcactttcttgtctgagactctggcttattccaggttggctgatgtgttgggagatgggtaaagcgtttcttctaaaggggtctacccagaaagcatgatttcctgccctaagtcctgtgagaagatgtcagggactagggagggagggagggaaggcagagaaaaattacttagcctctcccaagatgagaaagtcctcaagtgaggggaggaggaagcagatagatggtccagcaggcttgaagcagggtaagcaggctggcccagggtaagggctgttgaggtaccttaagggaaggtcaagagggagatgggcaaggcgctgagggaggatgcttaggggacccccagaaacaggagtcaggaaaatgaggcactaagcctaagaagttccctggtttttcccaggggacaggacccactgggagacaagcatttatactttctttcttcttttttatttttttgagatcgagtctcgctctgtcaccaggctggagtgcagtgacacgatcttggctcactgcaacctccgtctcctgggttcaagtgattcttctgcctcagcctcccgagcagctgggattacaggcgcccactaatttttgtattcttagtagaaacgaggtttcaacatgttggccaggatggtctcaatctcttgacctcttgatccacccgacttggcctcccgaagtgatgagattataggcgtgagccaccgcgcctggcttatactttcttaataaaaaggagaaagaaaatcaacaaatgtgagtcataaagaagggttagggtgatggtccagagcaacagttcttcaagtgtactctgtaggcttctgggaggtcccttttcaggggtgtccacaaagtcaaagctattttcataataatactaacatgttatttgccttttgaattctcattatcttaaaattgtattgtggagttttccagaggccgtgtgacatgtgattacatcatctttctgacatcattgttaatggaatgtgtgc

SEQ ID NO: 290139 - DNA, 2459 bp, Homo sapiens
ggtcagtagccagacatgagctgtgagggtcaagcacagctatccatcagatgatctactttcagccttcctgagtcccagacaatagaagacaggtggctgtacccttggccaagggtaggtgtggcagtggtgtctgctgtcactgtgccctcattggcccccagcaatcagactcaacagacggagcaactgccatccgaggctcctgaaccagggccattcaccaggagcatgcggctccctgatgtccagctctggctggtgctgctgtgggcactggtgcgagcacaggggacagggtctgtgtgtccctcctgtgggggctccaaactggcaccccaagcagaacgagctctggtgctggagctagccaagcagcaaatcctggatgggttgcacctgaccagtcgtcccagaataactcatcctccaccccaggcagcgctgaccagagccctccggagactacagccagggagtgtggctccagggaatggggaggaggtcatcagctttgctactgtcacagactccacttcagcctacagctccctgctcacttttcacctgtccactcctcggtcccaccacctgtaccatgcccgcctgtggctgcacgtgctccccacccttcctggcactctttgcttgaggatcttccgatggggaccaaggaggaggcgccaagggtcccgcactctcctggctgagcaccacatcaccaacctgggctggcataccttaactctgccctctagtggcttgaggggtgagaagtctggtgtcctgaaactgcaactagactgcagacccctagaaggcaacagcacagttactggacaaccgaggcggctcttggacacagcaggacaccagcagcccttcctagagcttaagatccgagccaatgagcctggagcaggccgggccaggaggaggacccccacctgtgagcctgcgacccccttatgttgcaggcgagaccattacgtagacttccaggaactgggatggcgggactggatactgcagcccgaggggtaccagctgaattactgcagtgggcagtgccctccccacctggctggcagcccaggcattgctgcctctttccattctgccgtcttcagcctcctcaaagccaacaatccttggcctgccagtacctcctgttgtgtccctactgcccgaaggcccctctctctcctctacctggatcataatggcaatgtggtcaagacggatgtgccagatatggtggtggaggcctgtggctgcagctagcaagaggacctggggctttggagtgaagagaccaagatgaagtttcccaggcacagggcatctgtgactggaggcatcagattcctgatccacaccccaacccaacaaccacctggcaatatgactcacttgacccctatgggacccaaatgggcactttcttgtctgagactctggcttattccaggttggctgatgtgttgggagatgggtaaagcgtttcttctaaaggggtctacccagaaagcatgatttcctgccctaagtcctgtgagaagatgtcagggactagggagggagggagggaaggcagagaaaaattacttagcctctcccaagatgagaaagtcctcaagtgaggggaggaggaagcagatagatggtccagcaggcttgaagcagggtaagcaggctggcccagggtaagggctgttgaggtaccttaagggaaggtcaagagggagatgggcaaggcgctgagggaggatgcttaggggacccccagaaacaggagtcaggaaaatgaggcactaagcctaagaagttccctggtttttcccaggggacaggacccactgggagacaagcatttatactttctttcttcttttttatttttttgagatcgagtctcgctctgtcaccaggctggagtgcagtgacacgatcttggctcactgcaacctccgtctcctgggttcaagtgattcttctgcctcagcctcccgagcagctgggattacaggcgcccactaatttttgtattcttagtagaaacgaggtttcaacatgttggccaggatggtctcaatctcttgacctcttgatccacccgacttggcctcccgaagtgatgagattataggcgtgagccaccgcgcctggcttatactttcttaataaaaaggagaaagaaaatcaacaaatgtgagtcataaagaagggttagggtgatggtccagagcaacagttcttcaagtgtactctgtaggcttctgggaggtcccttttcaggggtgtccacaaagtcaaagctattttcataataatactaacatgttatttgccttttgaattctcattatcttaaaattgtattgtggagttttccagaggccgtgtgacatgtgattacatcatctttctgacatcattgttaatggaatgtgtgc

SEQ ID NO: 290140 - DNA, 450 bp, Homo sapiens
gcggacgcgagtagctcggcagggggactcgcttggctttcgtgccatccgtggacacagtcgcgcgggtctttgtgggaagaaacaaatcacaaaagcaattaagagagctcaaacaatggggtttatgccagttacatacaaggatcctgcatatttcagggaccctaaagtttataacatcagatatccggaataaattccatcacattaccaccagtaaacttattttataagatgggtctcactgtgttgcccaggctggtctctaactcctggcctcaatcattcctgccttgtcttccctaagtgctgggattacagctgtgagccactgtgcctggcctcacttttccaattctaaagaatgtgtgtaagcctttccctcaacaacttattgaaaggcgaaaaaaggtttggaaataaaaggatctgatgtttgaaaaagta

SEQ ID NO: 290141 - DNA, 826 bp, Homo sapiens
cccgcaggtggccgccacgctcaacaacttggctgtcctctatgggaagcgtgggcgttaccgggaggcagagcccctgtgccagcgcgctttggagatccgagagaaggtcctgggtgctgaccacccagatgtggccaagcagctcaacaacctggccctgctgtgccagaaccagggcaagtttgaggacgtggagcggcactatgcccgggccctgagcatctatgaggcactgggcgggccccatgaccccaacgtggccaagaccaagaacaacctggcctcagcctacctgaaacagaacaagtatcaacaagcggaagagctgtacaaagaaatcctccacaaggaggacctacccgcccctctcggtgcccccaacacaggcacagctggtgacgcagaacaggcccttcgccgcagcagctcactctccaagatccgtgagtctatcaggcgaggaagtgagaagctggtctcccggctccgaggcgaggcggcggcaggagcagccggaatgaagagagccatgtcactcaacacactgaacgtggatgctccaagggctcctgggactcagtttcccagctggcacctggacaaggcccctcggaccctcagcgccagcacccaggacctgagcccccactaacgtccagtgaactgcgctggccgcagcttcttgggaacagtgcaggagggatgggctggtggggtgagagggggtctatcatctcctggcccccccttgcctctgggtacctggtggatagctgccttctcctgcgattaaaggctgtggacgtgacagtgagaaatgtca

SEQ ID NO: 290142 - DNA, 532 bp, Homo sapiens
gaggtaagaatttaatgttttaataagtatttttgcaaagaacatattttaataggtaataatttgtagccaattacattttaaggaaaatatattaaatttctaaaattattcctcatagcagttacacctgtctgtaatacatttataaaaatgttctgcaaaatggacttcttaaaaaagatgtactttattttgggattaaaaaccatcaagttgcaccagaaattcatgaaaatactttgtcatttcctctactgtactaataatctatatactacttacagaaagcgtgcataagataaattgaaggttttgttagtgactcattatataacctatgtagcacttcattacatcttggtttgttcttgaaggtttttttgcgaggggagaattatgagataacctcaactaaaacaaaaaaatctttttaggattattaaagtttcagtataaattcataatacactattaagacagtaagtggaatctcacacacatattctctcattttaatggtaaagcaact

SEQ ID NO: 290143 - DNA, 497 bp, Homo sapiens
ctttcctattctttattcctctttcaacttcattaatcttcagaagaaagaggaataaagaataggaaagtaataacagaatcattattcctctttcttctgaagattaatgaagttgaaaattgaggtggataaatacaaaaaggtagtgtgatagtataagtatctaagtgcagatgaaagtgtgttatatacatccattcaaaattatgcaagttagtaattactcagggttaactaaattactttaatatgctgttgaatctactctgttccttggctagaaaaaattataaacaggactttgtagtttgggaagccaaattgataatattctatgttctaaaagttgggctatacataaattattaagaaatatggatttttattcccaggatatggtgttcattttatgatattacgcaggatgatgtattgagtaaaatcagttttgtaaatatgtaaatatgtcataaataaacaatgctttgacttat

SEQ ID NO: 290144 - DNA, 314 bp, Homo sapiens
aattactttaatatgctgttgaacctgagtaatttagttaaccctgagtaattactaaattactttaatatgctgttgaatctactctgttccttggctagaaaaaattataaacaggactttgtagtttgggaagccaaattgataatattctatgttctaaaagttgggctatacataaattattaagaaatatggatttttattcccaggatatggtgttcattttatgatattacgcaggatgatgtattgagtaaaatcagttttgtaaatatgtaaatatgtcataaataaacaatgctttgacttat

SEQ ID NO: 290145 - DNA, 4832 bp, Homo sapiens
gggcactttaaaggaagaaaagatatgtttctcattctaaaatatgcattataatttagcagtcccattgtttaaaatccaatgtgaaaagactgttatggaatgaaaagttgcacaactcctggagcagttaaagtccgctacatgcaacataggctacaaagcactcaagactagttctctctctctcgccgaggtaacttccagggtgcgccttcgttgtcttctccaagctgtagttctacgtcccgacctccctatcataccacactcttcagcgaccacgcaggcactttcccggtccccagtataccataattgaagaaaaatgatggaagagagtggaatagagacaacaccacctgggactcctccaccaaatcctgcagggctggctgctactgctatgtcttctacccctgttccattagcggcaaccagttctttttcttctccaaatgtatcctccatggagtccttcccaccactcgcatactctactcctcagccgccccttcctcctgtgaggccttcagcaccattaccttttgtgcctcctcctgcagttccttctgtcccaccacttgttacttctatgccacctcctgtttctccatcaactgctgctgccttcggtaatcctcctgtatctcacttcccaccttcaacttctgccccaaacactcttttacctgcacccccttcgggtcctcctatatcaggattttctgttggttcaacttatgacattacaaggggacatgctgggagagctccccagacacccctgatgccatcattttctgcaccttcaggaacaggtcttttgccaactcctattactcagcaagccagtttgacatctctggcacagggaactggaaccacatcagccattactttcccagaggagcaagaagaccctagaattactagaggtcaggatgaagcatctgctggtggaatctggggttttattaagggtgtggctgggaatcctatggtgaagtctgtgcttgataagacaaaacattcagtagaaagcatgattacaacgctggaccctggcatggctccctatatcaaatctggaggtgaactggatattgtagtgacctcaaataaagaagtaaaagttgctgctgtccgagatgccttccaggaggtctttggcttagctgtggttgtaggggaagctggacagtccaatattgccccacaaccagtgggctatgcagctggattaaaaggtgctcaggaacggatagatagcttgcgtcgaactggggtgatccatgaaaaacagacagctgtgtcagtagaaaacttcattgcagaattgctgcctgacaaatggtttgacattggttgtttggtggttgaagatcctgtccatggcattcatctagaaacatttacacaagccacaccagtgcctttggaatttgtacagcaggctcaaagtctaactccccaggactataatctgaggtggtcaggccttttggtgacagtgggtgaagtcctggaaaagagtttactgaatgtcagccggactgattggcacatggcatttactgggatgtcccgtcggcagatgatctacagtgcagccagagcgatagcgggcatgtataaacagcgcctgccacccaggacagtgtgagaggagacctacctgggagactgagactttcccccacttttagcttgatgttaaagaagtggttgtaccttcctaaatcgaatagtctaaatgaatccagtagtttttatcattttcctgtagcctgcaatttttctttctctagaaaggcatcatgtcattccaggagacaaaaagaaacaaatcctttttatagtcataccatttcacctatcatagtactcaaaaaagaaaatatacaaatctatttacagcacaatttaatataccagatttataaggtggaaattcatgtgcagagacatttaacttaatgccatgtacttgattattttgttctttaaagaagagattattaaagaacatgttggttgaatgtttataaaagcatgatttgctttggcttcatctcttttctgtcagtctttgactacttttgtatgtgcacacgatctcagggctggtgctgagcagcctgctcaacagtcactataagacacctacttgtcgggagatgttccacatttctgtgcatgttttcagtaatatgggccaaaataatggaattgattattttcctttttggccatcacgtacacatgtaatctggaaaatcatacctttgtcaattttaaacataacttttggcatttcccagatttatactatgaacattggggtaatacattttattttttcattgctatatgacagctaaggggcaaatgattcaagtatattttaaatcagaagtattcaagttatttttgtataatactgttcagtacttccaagaataagctctgacaacagccattgtttctgcttccactcatattctctacacattttaatacagaaatttttgagagggggttactttattgcttgtgggttagtatgtctcttacttcaattaaggttacttatttggtttgccttaagcattacttttttaactttgtgccatttggtctttactttttatggatgttttcaaggaaactattttatattcaatctagtttatttagtctactgtatttctatttcgtggaagccttttcccctcaaataatatattatatcatttttggacttatataaatgataattaaataaatttttttcttaatactgttggactttgtatatacaagttcaaataactttttcgaagatagtttcttatataaatgtaatttaatttttttactcttctatacagttctttagatgtaaaagaattagcacaatctctggcagttttataaaagctgttgaagctcttgtcctgcactgtctttaggtatcataggtatcaggtttgctttgtgttaatgccacttcaagtcattatttggtttctgctatttttttacctgaggataagaagaatgaatattaaatttgaatattaaatatatgttactttccaagcactgtataatgactgttcagtgaatatcagacttccgtgtcattaaaagtcatgagagacagcacagagaggttataggttgccttggtgtacttttgtccaggagtaacagggacagaatactttctttccttccttcaagtacaagaaggctttctctaccatttgcgtctacactttattttaaaagctatccttttctagtagtattttatcatggcaatggcatgatgacaacaacagtctttcattacagactgaagggaagcatgtccttacttaaaatagttctgctactttccctcctattataaggaaatcttacagattctaaaaataccttaatttttctttgatttttattttaccaagtcacaaatgtctttttgatgttttgagaattgttctcatagaatcacaaatactgacatttcattagatgattattttcctagaatccccaaagagcagtggcagtccatggcttggttgaagctagaaattttcctgcccctggtgacctggtaagcctcctgctcggaaccgtgtgagtgggtgaggaagatgagagatggtcagatggaagagagaaatacatgaactgctctggcctctctggttctgttcttggcccagagtttttgaaaagcagcggagcatgactgacttcacatgctcagctttctcagccttttgtttattttgttgtccttagatttccctgttgtaaaaggggcaagaaaagtaactcatcatctctaacacaccatggcagcttagccaggtagtcttagtggtggtgtttaggcataagatatgctgatcatcagtctcaggccacagtttccttcactaatcgtccagcttgagtgttctgttctcttcctgcccatttccttgaacctcctgctctagccttggcggagggagagtgctatttgcttttgttctccctctgtcttaggaaaagccatctttaatatagttcttcaccactgttggggttgttttgtgattttttttttcttccgaagaactcctggttgttatgggattttgtattttaatacaaattattgaattttataagcttgtacacaatatttaattagtgtgaaaggaaacaaagaatgcaggaaaaataatttaatatcaacctcagttgacaaggtgctcagattattcaattcgggatcctccttttgttaggtttttgagacaaccctagacctaaactgtgtcacagacttctgaatgtttaggcagtgctagtaatttcctcgtaatgattctgttattactttcctattctttattcctctttcttctgaagattaatgaagttgaaaattgaggtggataaatacaaaaaggtagtgtgatagtataagtatctaagtgcagatgaaagtgtgttatatacatccattcaaaattatgcaagttagtaattactcagggttaactaaattactttaatatgctgttgaatctactctgttccttggctagaaaaaattataaacaggactttgtagtttgggaagccaaattgataatattctatgttctaaaagttgggctatacataaattattaagaaatatggatttttattcccaggatatggtgttcattttatgatattacgcaggatgatgtattgagtaaaatcagttttgtaaatatgtaaatatgtcataaataaacaatgctttgacttat

SEQ ID NO: 290146 - DNA, 4778 bp, Homo sapiens
gggcactttaaaggaagaaaagatatgtttctcattctaaaatatgcattataatttagcagtcccattgtttaaaatccaatgtgaaaagactgttatggaatgaaaagttgcacaactcctggagcagttaaagtccgctacatgcaacataggctacaaagcactcaagactagttctctctctctcgccgaggtaacttccagggtgcgccttcgttgtcttctccaagctgtagttctacgtcccgacctccctatcataccacactcttcagcgaccacgcaggcactttcccggtccccagtataccataattgaagaaaaatgatggaagagagtggaatagagacaacaccacctgggactcctccaccaaatcctgcagggctggctgctactgctatgtcttctacccctgttccattagcggcaaccagttctttttcttctccaaatgtatcctccatggagtccttcccaccactcgcatactctactcctcagccgccccttcctcctgtgaggccttcagcaccattaccttttgtgcctcctcctgcagttccttctgtcccaccacttgttacttctatgccacctcctgtttctccatcaactgctgctgccttcggtaatcctcctgtatctcacttcccaccttcaacttctgccccaaacactcttttacctgcacccccttcgggtcctcctatatcaggattttctgttggttcaacttatgacattacaaggggacatgctgggagagctccccagacacccctgatgccatcattttctgcaccttcaggaacaggtcttttgccaactcctattactcagcaagccagtttgacatctctggcacagggaactggaaccacatcagccattactttcccagaggagcaagaagaccctagaattactagaggtcaggatgaagcatctgctggtggaatctggggttttattaagggtgtggctgggaatcctatggtgaagtctgtgcttgataagacaaaacattcagtagaaagcatgattacaacgctggaccctggcatggctccctatatcaaatctggaggtgaactggatattgtagtgacctcaaataaagaagtaaaagttgctgctgtccgagatgccttccaggaggtctttggcttagctgtggttgtaggggaagctggacagtccaatattgccccacaaccagtgggctatgcagctggattaaaaggtgctcaggaacggatagatagcttgcgtcgaactggggtgatccatgaaaaacagacagctgtgtcagtagaaaacttcattgcagaattgctgcctgacaaatggtttgacattggttgtttggtggttgaagatcctgtccatggcattcatctagaaacatttacacaagccacaccagtgcctttggaatttgtacagcaggctcaaagtctaactccccaggactataatctgaggtggtcaggccttttggtgacagtgggtgaagtcctggaaaagagtttactgaatgtcagccggactgattggcacatggcatttactgggatgtcccgtcggcagatgatctacagtgcagccagagcgatagcgggcatgtataaacagcgcctgccacccaggacagtgtgagaggagacctacctgggagactgagactttcccccacttttagcttgatgttaaagaagtggttgtaccttcctaaatcgaatagtctaaatgaatccagtagtttttatcattttcctgtagcctgcaatttttctttctctagaaaggcatcatgtcattccaggagacaaaaagaaacaaatcctttttatagtcataccatttcacctatcatagtactcaaaaaagaaaatatacaaatctatttacagcacaatttaatataccagatttataaggtggaaattcatgtgcagagacatttaacttaatgccatgtacttgattattttgttctttaaagaagagattattaaagaacatgttggttgaatgtttataaaagcatgatttgctttggcttcatctcttttctgtcagtctttgactacttttgtatgtgcacacgatctcagggctggtgctgagcagcctgctcaacagtcactataagacacctacttgtcgggagatgttccacatttctgtgcatgttttcagtaatatgggccaaaataatggaattgattattttcctttttggccatcacgtacacatgtaatctggaatatgaacattggggtaatacattttattttttcattgctatatgacagctaaggggcaaatgattcaagtatattttaaatcagaagtattcaagttatttttgtataatactgttcagtacttccaagaataagctctgacaacagccattgtttctgcttccactcatattctctacacattttaatacagaaatttttgagagggggttactttattgcttgtgggttagtatgtctcttacttcaattaaggttacttatttggtttgccttaagcattacttttttaactttgtgccatttggtctttactttttatggatgttttcaaggaaactattttatattcaatctagtttatttagtctactgtatttctatttcgtggaagccttttcccctcaaataatatattatatcatttttggacttatataaatgataattaaataaatttttttcttaatactgttggactttgtatatacaagttcaaataactttttcgaagatagtttcttatataaatgtaatttaatttttttactcttctatacagttctttagatgtaaaagaattagcacaatctctggcagttttataaaagctgttgaagctcttgtcctgcactgtctttaggtatcataggtatcaggtttgctttgtgttaatgccacttcaagtcattatttggtttctgctatttttttacctgaggataagaagaatgaatattaaatttgaatattaaatatatgttactttccaagcactgtataatgactgttcagtgaatatcagacttccgtgtcattaaaagtcatgagagacagcacagagaggttataggttgccttggtgtacttttgtccaggagtaacagggacagaatactttctttccttccttcaagtacaagaaggctttctctaccatttgcgtctacactttattttaaaagctatccttttctagtagtattttatcatggcaatggcatgatgacaacaacagtctttcattacagactgaagggaagcatgtccttacttaaaatagttctgctactttccctcctattataaggaaatcttacagattctaaaaataccttaatttttctttgatttttattttaccaagtcacaaatgtctttttgatgttttgagaattgttctcatagaatcacaaatactgacatttcattagatgattattttcctagaatccccaaagagcagtggcagtccatggcttggttgaagctagaaattttcctgcccctggtgacctggtaagcctcctgctcggaaccgtgtgagtgggtgaggaagatgagagatggtcagatggaagagagaaatacatgaactgctctggcctctctggttctgttcttggcccagagtttttgaaaagcagcggagcatgactgacttcacatgctcagctttctcagccttttgtttattttgttgtccttagatttccctgttgtaaaaggggcaagaaaagtaactcatcatctctaacacaccatggcagcttagccaggtagtcttagtggtggtgtttaggcataagatatgctgatcatcagtctcaggccacagtttccttcactaatcgtccagcttgagtgttctgttctcttcctgcccatttccttgaacctcctgctctagccttggcggagggagagtgctatttgcttttgttctccctctgtcttaggaaaagccatctttaatatagttcttcaccactgttggggttgttttgtgattttttttttcttccgaagaactcctggttgttatgggattttgtattttaatacaaattattgaattttataagcttgtacacaatatttaattagtgtgaaaggaaacaaagaatgcaggaaaaataatttaatatcaacctcagttgacaaggtgctcagattattcaattcgggatcctccttttgttaggtttttgagacaaccctagacctaaactgtgtcacagacttctgaatgtttaggcagtgctagtaatttcctcgtaatgattctgttattactttcctattctttattcctctttcttctgaagattaatgaagttgaaaattgaggtggataaatacaaaaaggtagtgtgatagtataagtatctaagtgcagatgaaagtgtgttatatacatccattcaaaattatgcaagttagtaattactcagggttaactaaattactttaatatgctgttgaatctactctgttccttggctagaaaaaattataaacaggactttgtagtttgggaagccaaattgataatattctatgttctaaaagttgggctatacataaattattaagaaatatggatttttattcccaggatatggtgttcattttatgatattacgcaggatgatgtattgagtaaaatcagttttgtaaatatgtaaatatgtcataaataaacaatgctttgacttat

SEQ ID NO: 290147 - DNA, 4713 bp, Homo sapiens
gggcactttaaaggaagaaaagatatgtttctcattctaaaatatgcattataatttagcagtcccattgtttaaaatccaatgtgaaaagactgttatggaatgaaaagttgcacaactcctggagcagttaaagtccgctacatgcaacataggctacaaagcactcaagactagttctctctctctcgccgaggtaacttccagggtgcgccttcgttgtcttctccaagctgtagttctacgtcccgacctccctatcataccacactcttcagcgaccacgcaggcactttcccggtccccagtataccataattgaagaaaaatgatggaagagagtggaatagagacaacaccacctgggactcctccaccaaatcctgcagggctggctgctactgctatgtcttctacccctgttccattagcggcaaccagttctttttcttctccaaatgtatcctccatggagtccttcccaccactcgcatactctactcctcagccgccccttcctcctgtgaggccttcagcaccattaccttttgtgcctcctcctgcagttccttctgtcccaccacttgttacttctatgccacctcctgtttctccatcaactgctgctgccttcggtaatcctcctgtatctcacttcccaccttcaacttctgccccaaacactcttttacctgcacccccttcgggtcctcctatatcaggattttctgttggttcaacttatgacattacaaggggacatgctgggagagctccccagacacccctgatgccatcattttctgcaccttcaggaacaggtcttttgccaactcctattactcagcaagccagtttgacatctctggcacagggaactggaaccacatcagccattactttcccagaggagcaagaagaccctagaattactagaggtcaggatgaagcatctgctggtggaatctggggttttattaagggtgtggctgggaatcctatggtgaagtctgtgcttgataagacaaaacattcagtagaaagcatgattacaacgctggaccctggcatggctccctatatcaaatctggaggtgaactggatattgtagtgacctcaaataaagaagtaaaagttgctgctgtccgagatgccttccaggaggtctttggcttagctgtggttgtaggggaagctggacagtccaatattgccccacaaccagtgggctatgcagctggattaaaaggtgctcaggaacggatagatagcttgcgtcgaactggggtgatccatgaaaaacagacagctgtgtcagtagaaaacttcattgcagaattgctgcctgacaaatggtttgacattggttgtttggtggttgaagatcctgtccatggcattcatctagaaacatttacacaagccacaccagtgcctttggaatttgtacagcaggctcaaagtctaactccccaggactataatctgaggtggtcaggccttttggtgacagtgggtgaagtcctggaaaagagtttactgaatgtcagccggactgattggcacatggcatttactgggatgtcccgtcggcagatgatctacagtgcagccagagcgatagcgggcatgtataaacagcgcctgccacccaggacagtgtgagaggagacctacctgggagactgagactttcccccacttttagcttgatgttaaagaagtggttgtaccttcctaaatcgaatagtctaaatgaatccagtagtttttatcattttcctgtagcctgcaatttttctttctctagaaaggcatcatgtcattccaggagacaaaaagaaacaaatcctttttatagtcataccatttcacctatcatagtactcaaaaaagaaaatatacaaatctatttacagcacaatttaatataccagatttataaggtggaaattcatgtgcagagacatttaacttaatgccatgtacttgattattttgttctttaaagaagagattattaaagaacatgttggttgaatgtttataaaagcatgatttgctttggcttcatctcttttctgtcagtctttgactacttttgtatgtgcacacgatctcagggctggtgctgagcagcctgctcaacagtcactataagacacctacttgtcgggagatgttccacatttctgtgcatgttttcagtaatatgggccaaaataatggaattgattattttcctttttggccatcacgtacacatgtaatctggaaaatcatacctttgtcaattttaaacataacttttggcatttcccagatttatactatgaacattggggtaatacattttattttttcattgctatatgacagctaaggggcaaatgattcaagtatattttaaatcagaagtattcaagttatttttgtataatactgttcagtacttccaagaataagctctgacaacagccattgtttctgcttccactcatattctctacacattttaatacagaaatttttgagagggggttactttattgcttgtgggttagtatgtctcttacttcaattaaggttacttatttggtttgccttaagcattacttttttaactttgtgccatttggtctttactttttatggatgttttcaaggaaactattttatattcaatctagtttatttagtctactgtatttctatttcgtggaagccttttcccctcaaataatatattatatcatttttggacttatataaatgataattaaataaatttttttcttaatactgttggactttgtatatacaagttcaaataactttttcgaagatagtttcttatataaatgtaatttaatttttttactcttctatacagttctttagatgtaaaagaattagcacaatctctggcagttttataaaagctgttgaagctcttgtcctgcactgtctttaggtatcataggtatcaggtttgctttgtgttaatgccacttcaagtcattatttggtttctgctatttttttacctgaggataagaagaatgaatattaaatttgaatattaaatatatgttactttccaagcactgtataatgactgttcagtgaatatcagacttccgtgtcattaaaagtcatgagagacagcacagagaggttataggttgccttggtgtacttttgtccaggagtaacagggacagaatactttctttccttccttcaagtacaagaaggctttctctaccatttgcgtctacactttattttaaaagctatccttttctagtagtattttatcatggcaatggcatgatgacaacaacagtctttcattacagactgaagggaagcatgtccttacttaaaatagttctgctactttccctcctattataaggaaatcttacagattctaaaaataccttaatttttctttgatttttattttaccaagtcacaaatgtctttttgatgttttgagaattgttctcatagaatcacaaatactgacatttcattagatgattattttcctagaatccccaaagagcagtggcagtccatggcttggttgaagctagaaattttcctgcccctggtgacctggtaagcctcctgctcggaaccgtgtgagtgggtgaggaagatgagagatggtcagatggaagagagaaatacatgaactgctctggcctctctggttctgttcttggcccagagtttttgaaaagcagcggagcatgactgacttcacatgctcagctttctcagccttttgtttattttgttgtccttagatttccctgttgtaaaaggggcaagaaaagtaactcatcatctctaacacaccatggcagcttagccaggtagtcttagtggtggtgtttaggcataagatatgctgatcatcagtctcaggccacagtttccttcactaatcgtccagcttgagtgttctgttctcttcctgcccatttccttgaacctcctgctctagccttggcggagggagagtgctatttgcttttgttctccctctgtcttaggaaaagccatctttaatatagttcttcaccactgttggggttgttttgtgattttttttttcttccgaagaactcctggttgttatgggattttgtattttaatacaaattattgaattttataagcttgtacacaatatttaattagtgtgaaaggaaacaaagaatgcaggaaaaataatttaatatcaacctcagttgacaaggtgctcagattattcaattcgggatcctccttttgttaggtttttgagacaaccctagacctaaactgtgtcacagacttctgaatgtttaggcagtgctagtaatttcctcgtaatgattctgttattactttcctattctttattcctctttcttctgaagattaatgaagttgaaaattgaggtggataaatacaaaaaggtagtgtgatagtataagtatctaagtgcagatgaaagtgtgttatatacatccattcaaaattatgcaagttagtaattactcagggttaactaaattactttaatatgctgttgaatctactctgttccttggctagaaaaaattataaacaggactttgtagtttgggaagccaaattgataatattctatgttctaaaagttgggtactacgctttggcaggtaccgag

SEQ ID NO: 290148 - DNA, 3502 bp, Homo sapiens
tgaaactcgtaattctgttgcagatggtttgacattggttgtttggtggttgaagatcctgtccatggcattcatctagaaacatttacacaagccacaccagtgcctttggaatttgtacagcaggctcaaagtctaactccccaggactataatctgaggtggtcaggccttttggtgacagtgggtgaagtcctggaaaagagtttactgaatgtcagccggactgattggcacatggcatttactgggatgtcccgtcggcagatgatctacagtgcagccagagcgatagcgggcatgtataaacagcgcctgccacccaggacagtgtgagaggagacctacctgggagactgagactttcccccacttttagcttgatgttaaagaagtggttgtaccttcctaaatcgaatagtctaaatgaatccagtagtttttatcattttcctgtagcctgcaatttttctttctctagaaaggcatcatgtcattccaggagacaaaaagaaacaaatcctttttatagtcataccatttcacctatcatagtactcaaaaaagaaaatatacaaatctatttacagcacaatttaatataccagatttataaggtggaaattcatgtgcagagacatttaacttaatgccatgtacttgattattttgttctttaaagaagagattattaaagaacatgttggttgaatgtttataaaagcatgatttgctttggcttcatctcttttctgtcagtctttgactacttttgtatgtgcacacgatctcagggctggtgctgagcagcctgctcaacagtcactataagacacctacttgtcgggagatgttccacatttctgtgcatgttttcagtaatatgggccaaaataatggaattgattattttcctttttggccatcacgtacacatgtaatctggaaaatcatacctttgtcaattttaaacataacttttggcatttcccagatttatactatgaacattggggtaatacattttattttttcattgctatatgacagctaaggggcaaatgattcaagtatattttaaatcagaagtattcaagttatttttgtataatactgttcagtacttccaagaataagctctgacaacagccattgtttctgcttccactcatattctctacacattttaatacagaaatttttgagagggggttactttattgcttgtgggttagtatgtctcttacttcaattaaggttacttatttggtttgccttaagcattacttttttaactttgtgccatttggtctttactttttatggatgttttcaaggaaactattttatattcaatctagtttatttagtctactgtatttctatttcgtggaagccttttcccctcaaataatatattatatcatttttggacttatataaatgataattaaataaatttttttcttaatactgttggactttgtatatacaagttcaaataactttttcgaagatagtttcttatataaatgtaatttaatttttttactcttctatacagttctttagatgtaaaagaattagcacaatctctggcagttttataaaagctgttgaagctcttgtcctgcactgtctttaggtatcataggtatcaggtttgctttgtgttaatgccacttcaagtcattatttggtttctgctatttttttacctgaggataagaagaatgaatattaaatttgaatattaaatatatgttactttccaagcactgtataatgactgttcagtgaatatcagacttccgtgtcattaaaagtcatgagagacagcacagagaggttataggttgccttggtgtacttttgtccaggagtaacagggacagaatactttctttccttccttcaagtacaagaaggctttctctaccatttgcgtctacactttattttaaaagctatccttttctagtagtattttatcatggcaatggcatgatgacaacaacagtctttcattacagactgaagggaagcatgtccttacttaaaatagttctgctactttccctcctattataaggaaatcttacagattctaaaaataccttaatttttctttgatttttattttaccaagtcacaaatgtctttttgatgttttgagaattgttctcatagaatcacaaatactgacatttcattagatgattattttcctagaatccccaaagagcagtggcagtccatggcttggttgaagctagaaattttcctgcccctggtgacctggtaagcctcctgctcggaaccgtgtgagtgggtgaggaagatgagagatggtcagatggaagagagaaatacatgaactgctctggcctctctggttctgttcttggcccagagtttttgaaaagcagcggagcatgactgacttcacatgctcagctttctcagccttttgtttattttgttgtccttagatttccctgttgtaaaaggggcaagaaaagtaactcatcatctctaacacaccatggcagcttagccaggtagtcttagtggtggtgtttaggcataagatatgctgatcatcagtctcaggccacagtttccttcactaatcgtccagcttgagtgttctgttctcttcctgcccatttccttgaacctcctgctctagccttggcggagggagagtgctatttgcttttgttctccctctgtcttaggaaaagccatctttaatatagttcttcaccactgttggggttgttttgtgattttttttttcttccgaagaactcctggttgttatgggattttgtattttaatacaaattattgaattttataagcttgtacacaatatttaattagtgtgaaaggaaacaaagaatgcaggaaaaataatttaatatcaacctcagttgacaaggtgctcagattattcaattcgggatcctccttttgttaggtttttgagacaaccctagacctaaactgtgtcacagacttctgaatgtttaggcagtgctagtaatttcctcgtaatgattctgttattactttcctattctttattcctctttcttctgaagattaatgaagttgaaaattgaggtggataaatacaaaaaggtagtgtgatagtataagtatctaagtgcagatgaaagtgtgttatatacatccattcaaaattatgcaagttagtaattactcagggttaactaaattactttaatatgctgttgaatctactctgttccttggctagaaaaaattataaacaggactttgtagtttgggaagccaaattgataatattctatgttctaaaagttgggctatacataaattattaagaaatatggatttttattcccaggatatggtgttcattttatgatattacgcaggatgatgtattgagtaaaatcagttttgtaaatatgtaaatatgtcataaataaacaatgctttgacttat

SEQ ID NO: 290149 - DNA, 3820 bp, Homo sapiens
ttgatacatattaacatgtgaatcacatttccagagagaatttccataattgagcaattcttttctgaatggatttaagccttaattttcagttttcctctttctggttgaaattttactactataaaagataactttagcactgattttagtaccaatcttattattaacctgaagtgacacttaatttagaactagaactcaaaccttccgactgttagcctcgttaatggggatattttttaaaaaatagatgtgtgtaatgttacattgattgtgttctagccttgtaagttgatatagttggcagcctagctgtatttctcagagtttgtcataatctatatttaaaataacatgaaacactttgaaatgtcacttatagctagttccaatgatatttttaaatgtattataagtaatatcaatttcatctttccacaggctcaaagtctaactccccaggactataatctgaggtggtcaggccttttggtgacagtgggtgaagtcctggaaaagagtttactgaatgtcagccggactgattggcacatggcatttactgggatgtcccgtcggcagatgatctacagtgcagccagagcgatagcgggcatgtataaacagcgcctgccacccaggacagtgtgagaggagacctacctgggagactgagactttcccccacttttagcttgatgttaaagaagtggttgtaccttcctaaatcgaatagtctaaatgaatccagtagtttttatcattttcctgtagcctgcaatttttctttctctagaaaggcatcatgtcattccaggagacaaaaagaaacaaatcctttttatagtcataccatttcacctatcatagtactcaaaaaagaaaatatacaaatctatttacagcacaatttaatataccagatttataaggtggaaattcatgtgcagagacatttaacttaatgccatgtacttgattattttgttctttaaagaagagattattaaagaacatgttggttgaatgtttataaaagcatgatttgctttggcttcatctcttttctgtcagtctttgactacttttgtatgtgcacacgatctcagggctggtgctgagcagcctgctcaacagtcactataagacacctacttgtcgggagatgttccacatttctgtgcatgttttcagtaatatgggccaaaataatggaattgattattttcctttttggccatcacgtacacatgtaatctggaaaatcatacctttgtcaattttaaacataacttttggcatttcccagatttatactatgaacattggggtaatacattttattttttcattgctatatgacagctaaggggcaaatgattcaagtatattttaaatcagaagtattcaagttatttttgtataatactgttcagtacttccaagaataagctctgacaacagccattgtttctgcttccactcatattctctacacattttaatacagaaatttttgagagggggttactttattgcttgtgggttagtatgtctcttacttcaattaaggttacttatttggtttgccttaagcattacttttttaactttgtgccatttggtctttactttttatggatgttttcaaggaaactattttatattcaatctagtttatttagtctactgtatttctatttcgtggaagccttttcccctcaaataatatattatatcatttttggacttatataaatgataattaaataaatttttttcttaatactgttggactttgtatatacaagttcaaataactttttcgaagatagtttcttatataaatgtaatttaatttttttactcttctatacagttctttagatgtaaaagaattagcacaatctctggcagttttataaaagctgttgaagctcttgtcctgcactgtctttaggtatcataggtatcaggtttgctttgtgttaatgccacttcaagtcattatttggtttctgctatttttttacctgaggataagaagaatgaatattaaatttgaatattaaatatatgttactttccaagcactgtataatgactgttcagtgaatatcagacttccgtgtcattaaaagtcatgagagacagcacagagaggttataggttgccttggtgtacttttgtccaggagtaacagggacagaatactttctttccttccttcaagtacaagaaggctttctctaccatttgcgtctacactttattttaaaagctatccttttctagtagtattttatcatggcaatggcatgatgacaacaacagtctttcattacagactgaagggaagcatgtccttacttaaaatagttctgctactttccctcctattataaggaaatcttacagattctaaaaataccttaatttttctttgatttttattttaccaagtcacaaatgtctttttgatgttttgagaattgttctcatagaatcacaaatactgacatttcattagatgattattttcctagaatccccaaagagcagtggcagtccatggcttggttgaagctagaaattttcctgcccctggtgacctggtaagcctcctgctcggaaccgtgtgagtgggtgaggaagatgagagatggtcagatggaagagagaaatacatgaactgctctggcctctctggttctgttcttggcccagagtttttgaaaagcagcggagcatgactgacttcacatgctcagctttctcagccttttgtttattttgttgtccttagatttccctgttgtaaaaggggcaagaaaagtaactcatcatctctaacacaccatggcagcttagccaggtagtcttagtggtggtgtttaggcataagatatgctgatcatcagtctcaggccacagtttccttcactaatcgtccagcttgagtgttctgttctcttcctgcccatttccttgaacctcctgctctagccttggcggagggagagtgctatttgcttttgttctccctctgtcttaggaaaagccatctttaatatagttcttcaccactgttggggttgttttgtgattttttttttcttccgaagaactcctggttgttatgggattttgtattttaatacaaattattgaattttataagcttgtacacaatatttaattagtgtgaaaggaaacaaagaatgcaggaaaaataatttaatatcaacctcagttgacaaggtgctcagattattcaattcgggatcctccttttgttaggtttttgagacaaccctagacctaaactgtgtcacagacttctgaatgtttaggcagtgctagtaatttcctcgtaatgattctgttattactttcctattctttattcctctttcttctgaagattaatgaagttgaaaattgaggtggataaatacaaaaaggtagtgtgatagtataagtatctaagtgcagatgaaagtgtgttatatacatccattcaaaattatgcaagttagtaattactcagggttaactaaattactttaatatgctgttgaatctactctgttccttggctagaaaaaattataaacaggactttgtagtttgggaagccaaattgataatattctatgttctaaaagttgggctatacataaattattaagaaatatggatttttattcccaggatatggtgttcattttatgatattacgcaggatgatgtattgagtaaaatcagttttgtaaatatgtaaatatgtcataaataaacaatgctttgacttat

SEQ ID NO: 290150 - DNA, 414 bp, Homo sapiens
gtatactaaatatgtaacttacacttcacaagccagatatgtgatttctggcttgtgatatgtaatgtcagttttgagtcctgacattagtgctaagtagatacgttaccttgggcaaaactttgttggcctcagttttctcaagcatataaaaaagataatgatctatatcttgcatggttttatgaaactggtaataattatgtatattagatgttagcacctggtatggtagtaattatgagaatttcattattttaatttgaaagttaaattttcctctggtctttttagaatctggaggtgaactggatattgtagtgacctcaaataaagaagtaaaagttgctgctgtccgagatgccttccaggaggtctttggcttagctgtggttgtaggggaagctggacagt

SEQ ID NO: 290151 - DNA, 4667 bp, Homo sapiens
gtggccatcttgtaggcggggacacgccgaggtaacttccagggtgcgccttcgttgtcttctccaagctgtagttctacgtcccgacctccctatcataccacactcttcagcgaccacgcaggcactttcccggtccccagtataccataattgaagaaaaatgatggaagagagtggaatagagacaacaccacctgggactcctccaccaaatcctgcagggctggctgctactgctatgtcttctacccctgttccattagcggcaaccagttctttttcttctccaaatgtatcctccatggagtccttcccaccactcgcatactctactcctcagccgccccttcctcctgtgaggccttcagcaccattaccttttgtgcctcctcctgcagttccttctgtcccaccacttgttacttctatgccacctcctgtttctccatcaactgctgctgccttcggtaatcctcctgtatctcacttcccaccttcaacttctgccccaaacactcttttacctgcacccccttcgggtcctcctatatcaggattttctgttggttcaacttatgacattacaaggggacatgctgggagagctccccagacacccctgatgccatcattttctgcaccttcaggaacaggtcttttgccaactcctattactcagcaagccagtttgacatctctggcacagggaactggaaccacatcagccattactttcccagaggagcaagaagaccctagaattactagaggtcaggatgaagcatctgctggtggaatctggggttttattaagggtgtggctgggaatcctatggtgaagtctgtgcttgataagacaaaacattcagtagaaagcatgattacaacgctggaccctggcatggctccctatatcaaatctggaggtgaactggatattgtagtgacctcaaataaagaagtaaaagttgctgctgtccgagatgccttccaggaggtctttggcttagctgtggttgtaggggaagctggacagtccaatattgccccacaaccagtgggctatgcagctggattaaaaggtgctcaggaacggatagatagcttgcgtcgaactggggtgatccatgaaaaacagacagctgtgtcagtagaaaacttcattgcagaattgctgcctgacaaatggtttgacattggttgtttggtggttgaagatcctgtccatggcattcatctagaaacatttacacaagccacaccagtgcctttggaatttgtacagcaggctcaaagtctaactccccaggactataatctgaggtggtcaggccttttggtgacagtgggtgaagtcctggaaaagagtttactgaatgtcagccggactgattggcacatggcatttactgggatgtcccgtcggcagatgatctacagtgcagccagagcgatagcgggcatgtataaacagcgcctgccacccaggacagtgtgagaggagacctacctgggagactgagactttcccccacttttagcttgatgttaaagaagtggttgtaccttcctaaatcgaatagtctaaatgaatccagtagtttttatcattttcctgtagcctgcaatttttctttctctagaaaggcatcatgtcattccaggagacaaaaagaaacaaatcctttttatagtcataccatttcacctatcatagtactcaaaaaagaaaatatacaaatctatttacagcacaatttaatataccagatttataaggtggaaattcatgtgcagagacatttaacttaatgccatgtacttgattattttgttctttaaagaagagattattaaagaacatgttggttgaatgtttataaaagcatgatttgctttggcttcatctcttttctgtcagtctttgactacttttgtatgtgcacacgatctcagggctggtgctgagcagcctgctcaacagtcactataagacacctacttgtcgggagatgttccacatttctgtgcatgttttcagtaatatgggccaaaataatggaattgattattttcctttttggccatcacgtacacatgtaatctggaaaatcatacctttgtcaattttaaacataacttttggcatttcccagatttatactatgaacattggggtaatacattttattttttcattgctatatgacagctaaggggcaaatgattcaagtatattttaaatcagaagtattcaagttatttttgtataatactgttcagtacttccaagaataagctctgacaacagccattgtttctgcttccactcatattctctacacattttaatacagaaatttttgagagggggttactttattgcttgtgggttagtatgtctcttacttcaattaaggttacttatttggtttgccttaagcattacttttttaactttgtgccatttggtctttactttttatggatgttttcaaggaaactattttatattcaatctagtttatttagtctactgtatttctatttcgtggaagccttttcccctcaaataatatattatatcatttttggacttatataaatgataattaaataaatttttttcttaatactgttggactttgtatatacaagttcaaataactttttcgaagatagtttcttatataaatgtaatttaatttttttactcttctatacagttctttagatgtaaaagaattagcacaatctctggcagttttataaaagctgttgaagctcttgtcctgcactgtctttaggtatcataggtatcaggtttgctttgtgttaatgccacttcaagtcattatttggtttctgctatttttttacctgaggataagaagaatgaatattaaatttgaatattaaatatatgttactttccaagcactgtataatgactgttcagtgaatatcagacttccgtgtcattaaaagtcatgagagacagcacagagaggttataggttgccttggtgtacttttgtccaggagtaacagggacagaatactttctttccttccttcaagtacaagaaggctttctctaccatttgcgtctacactttattttaaaagctatccttttctagtagtattttatcatggcaatggcatgatgacaacaacagtctttcattacagactgaagggaagcatgtccttacttaaaatagttctgctactttccctcctattataaggaaatcttacagattctaaaaataccttaatttttctttgatttttattttaccaagtcacaaatgtctttttgatgttttgagaattgttctcatagaatcacaaatactgacatttcattagatgattattttcctagaatccccaaagagcagtggcagtccatggcttggttgaagctagaaattttcctgcccctggtgacctggtaagcctcctgctcggaaccgtgtgagtgggtgaggaagatgagagatggtcagatggaagagagaaatacatgaactgctctggcctctctggttctgttcttggcccagagtttttgaaaagcagcggagcatgactgacttcacatgctcagctttctcagccttttgtttattttgttgtccttagatttccctgttgtaaaaggggcaagaaaagtaactcatcatctctaacacaccatggcagcttagccaggtagtcttagtggtggtgtttaggcataagatatgctgatcatcagtctcaggccacagtttccttcactaatcgtccagcttgagtgttctgttctcttcctgcccatttccttgaacctcctgctctagccttggcggagggagagtgctatttgcttttgttctccctctgtcttaggaaaagccatctttaatatagttcttcaccactgttggggttgttttgtgattttttttttcttccgaagaactcctggttgttatgggattttgtattttaatacaaattattgaattttataagcttgtacacaatatttaattagtgtgaaaggaaacaaagaatgcaggaaaaataatttaatatcaacctcagttgacaaggtgctcagattattcaattcgggatcctccttttgttaggtttttgagacaaccctagacctaaactgtgtcacagacttctgaatgtttaggcagtgctagtaatttcctcgtaatgattctgttattactttcctattctttattcctctttcttctgaagattaatgaagttgaaaattgaggtggataaatacaaaaaggtagtgtgatagtataagtatctaagtgcagatgaaagtgtgttatatacatccattcaaaattatgcaagttagtaattactcagggttaactaaattactttaatatgctgttgaatctactctgttccttggctagaaaaaattataaacaggactttgtagtttgggaagccaaattgataatattctatgttctaaaagttgggctatacataaattattaagaaatatggatttttattcccaggatatggtgttcattttatgatattacgcaggatgatgtattgagtaaaatcagttttgtaaatatgtaaatatgtcataaataaacaatgctttgacttat

SEQ ID NO: 290152 - DNA, 4908 bp, Homo sapiens
gggcactttaaaggaagaaaagatatgtttctcattctaaaatatgcattataatttagcagtcccattgtttaaaatccaatgtgaaaagactgttatggaatgaaaagttgcacaactcctggagcagttaaagtccgctacatgcaacataggctacaaagcactcaagactagttctctctctctcgccgaggtaacttccagggtgcgccttcgttgtcttctccaagctgtagttctacgtcccgacctccctatcataccacactcttcagcgaccacgcaggcactttcccggtccccagtataccataattgaagaaaaatgatggaagagagtggaatagagacaacaccacctgggactcctccaccaaatcctgcagggctggctgctactgctatgtcttctacccctgttccattagcggcaaccagttctttttcttctccaaatgtatcctccatggagtccttcccaccactcgcatactctactcctcagccgccccttcctcctgtgaggccttcagcaccattaccttttgtgcctcctcctgcagttccttctgtcccaccacttgttacttctatgccacctcctgtttctccatcaactgctgctgccttcggtaatcctcctgtatctcacttcccaccttcaacttctgccccaaacactcttttacctgcacccccttcgggtcctcctatatcaggattttctgttggttcaacttatgacattacaaggggacatgctgggagagctccccagacacccctgatgccatcattttctgcaccttcaggaacaggtcttttgccaactcctattactcagcaagccagtttgacatctctggcacagggaactggaaccacatcagccattactttcccagaggagcaagaagaccctagaattactagaggtcaggatgaagcatctgctggtggaatctggggttttattaagggtgtggctgggaatcctatggtgaagtctgtgcttgataagacaaaacattcagtagaaagcatgattacaacgctggaccctggcatggctccctatatcaaatctggaggtgaactggatattgtagtgacctcaaataaagaagtaaaagttgctgctgtccgagatgccttccaggaggtctttggcttagctgtggttgtaggggaagctggacagtccaatattgccccacaaccagtgggctatgcagctggattaaaaggtgctcaggaacggatagatagcttgcgtcgaactggggtgatccatgaaaaacagacagctgtgtcagtagaaaacttcattgcagaattgctgcctgacaaatggtttgacattggttgtttggtggttgaagatcctgtccatggcattcatctagaaacatttacacaagccacaccagtgcctttggaatttgtacagcaggctcaaagtctaactccccaggactataatctgaggtggtcaggccttttggtgacagtgggtgaagtcctggaaaagagtttactgaatgtcagccggactgattggcacatggcatttactgggatgtcccgtcggcagatgatctacagtgcagccagagcgatagcgggcatgtataaacagcgcctgccacccaggacagtgtgagaggagacctacctgggagactgagactttcccccacttttagcttgatgttaaagaagtggttgtaccttcctaaatcgaatagtctaaatgaatccagtagtttttatcattttcctgtagcctgcaatttttctttctctagaaaggcatcatgtcattccaggagacaaaaagaaacaaatcctttttatagtcataccatttcacctatcatagtactcaaaaaagaaaatatacaaatctatttacagcacaatttaatataccagatttataaggtggaaattcatgtgcagagacatttaacttaatgccatgtacttgattattttgttctttaaagaagagattattaaagaacatgttggttgaatgtttataaaagcatgatttgctttggcttcatctcttttctgtcagtctttgactacttttgtatgtgcacacgatctcagggctggtgctgagcagcctgctcaacagtcactataagacacctacttgtcgggagatgttccacatttctgtgcatgttttcagtaatatgggccaaaataatggaattgattattttcctttttggccatcacgtacacatgtaatctggaaaatcatacctttgtcaattttaaacataacttttggcatttcccagatttatactatgaacattggggtaatacattttattttttcattgctatatgacagctaaggggcaaatgattcaagtatattttaaatcagaagtattcaagttatttttgtataatactgttcagtacttccaagaataagctctgacaacagccattgtttctgcttccactcatattctctacacattttaatacagaaatttttgagagggggttactttattgcttgtgggttagtatgtctcttacttcaattaaggttacttatttggtttgccttaagcattacttttttaactttgtgccatttggtctttactttttatggatgttttcaaggaaactattttatattcaatctagtttatttagtctactgtatttctatttcgtggaagccttttcccctcaaataatatattatatcatttttggacttatataaatgataattaaataaatttttttcttaatactgttggactttgtatatacaagttcaaataactttttcgaagatagtttcttatataaatgtaatttaatttttttactcttctatacagttctttagatgtaaaagaattagcacaatctctggcagttttataaaagctgttgaagctcttgtcctgcactgtctttaggtatcataggtatcaggtttgctttgtgttaatgccacttcaagtcattatttggtttctgctatttttttacctgaggataagaagaatgaatattaaatttgaatattaaatatatgttactttccaagcactgtataatgactgttcagtgaatatcagacttccgtgtcattaaaagtcatgagagacagcacagagaggttataggttgccttggtgtacttttgtccaggagtaacagggacagaatactttctttccttccttcaagtacaagaaggctttctctaccatttgcgtctacactttattttaaaagctatccttttctagtagtattttatcatggcaatggcatgatgacaacaacagtctttcattacagactgaagggaagcatgtccttacttaaaatagttctgctactttccctcctattataaggaaatcttacagattctaaaaataccttaatttttctttgatttttattttaccaagtcacaaatgtctttttgatgttttgagaattgttctcatagaatcacaaatactgacatttcattagatgattattttcctagaatccccaaagagcagtggcagtccatggcttggttgaagctagaaattttcctgcccctggtgacctggtaagcctcctgctcggaaccgtgtgagtgggtgaggaagatgagagatggtcagatggaagagagaaatacatgaactgctctggcctctctggttctgttcttggcccagagtttttgaaaagcagcggagcatgactgacttcacatgctcagctttctcagccttttgtttattttgttgtccttagatttccctgttgtaaaaggggcaagaaaagtaactcatcatctctaacacaccatggcagcttagccaggtagtcttagtggtggtgtttaggcataagatatgctgatcatcagtctcaggccacagtttccttcactaatcgtccagcttgagtgttctgttctcttcctgcccatttccttgaacctcctgctctagccttggcggagggagagtgctatttgcttttgttctccctctgtcttaggaaaagccatctttaatatagttcttcaccactgttggggttgttttgtgattttttttttcttccgaagaactcctggttgttatgggattttgtattttaatacaaattattgaattttataagcttgtacacaatatttaattagtgtgaaaggaaacaaagaatgcaggaaaaataatttaatatcaacctcagttgacaaggtgctcagattattcaattcgggatcctccttttgttaggtttttgagacaaccctagacctaaactgtgtcacagacttctgaatgtttaggcagtgctagtaatttcctcgtaatgattctgttattactttcctattctttattcctctttcttctgaagattaatgaagttgaaaattgaggtggataaatacaaaaaggtagtgtgatagtataagtatctaagtgcagatgaaagtgtgttatatacatccattcaaaattatgcaagttagtaattactcagggttaactaaattactttaatatgctgttgaatctactctgttccttggctagaaaaaattataaacaggactttgtagtttgggaagccaaattgataatattctatgttctaaaagttgggctatacataaattattaagaaatatggatttttattcccaggatatggtgttcattttatgatattacgcaggatgatgtattgagtaaaatcagttttgtaaatatgtaaatatgtcataaataaacaatgctttgacttataaaaaaaacaccacaccaaaaacacttttgcgcccctctgccccgaaaactttttaaccattttgggcgccgccca

SEQ ID NO: 290153 - DNA, 371 bp, Homo sapiens
aagcagatgaagcttcgagtgatgaattcccaggagcagtgcctcccttcaggagccgaggacatcatgtctggtggccccactttggaggctgctgaatttgatgacttgattgggaagtgtctgccagatcgccccattgcagagtgaggatggacagttcccgcgtttggaaacacatttcctggatgaacttaagagctgtggccactagttcgttctaaaaatcattattgggcaccagcatgtgtggataaataaagcctcccacctgccccacatcaccaaggatgagaagatccagtaaactggggagagtgaattggtttgaaaacacatttgatttcaggaataaaaggtgcaaatgagta

SEQ ID NO: 290154 - DNA, 340 bp, Homo sapiens
gtggtccagtacagctgagaggccaagccagagaccctctgcctacagctggggccgaggagggaggaagaaccctaaaataccaagaagataactcataaaaagtaaaggattttttctgccttctgggggatctgagtagctccagaggacaaactcagaataaaggggcttctgtgtgtacctttcctgccttcctgtaggtggtggaggcacggagggcttcccacaagaagcacagaggagggcagacacttagcatggggaccacctttgtctttcgagtggatgcgtgctttaacttcactcttattctgcttttcagggttcagctttgggt

SEQ ID NO: 290155 - DNA, 350 bp, Homo sapiens
cccttgagttgcacaagaaggaaacattgcatagaatgaaaaatgacagcaaactgctgaggtcacttccccaggcccactgaatgagaatatcagttcctgtgctggagagaaaggcagtcagaggagaaaatgaggtccagctcgtccctggctcccaaagtgctgggattacaggtgtgagccaccgtgcccggcgcattgctgtcttcatatggtatactagctatttctggccatgagaggaaggttatagttcaggctccagggagcagtgtcagggcccgggagacgatggtctcctgtgactatggctacttccgtgtggatccagttctttaagtaatctg

SEQ ID NO: 290156 - DNA, 3245 bp, Homo sapiens
cccttgagttgcacaagaaggaaacattgcatagaatgaaaaatgacagcaaactgctgaggtcacttccccaggcccactgaatgagaatatcagttcctgtgctggagagaaaggcagtcagaggagaaaatgaggtccagctcgtccctggctctctctctctctcaggtcctgatgtcttttccaagtctggagagcagcgatgctgctgtgccctgcgcagaaaaccgtgttccggctgcagctaaccaccgcagctcaatgtctctgggtgtatctcagagataagcaggtggtggtgttccttgcttatcccacaagggcacctggccggaataatggagtcacttccctccactggcctgaccccactctttctctttcctggacacaggaggcatacacggaatacctgaggagcatccactatatctcccaggtgttactagaagaagtggaaaccactaaagaagctggggaaactgtgccccccgacacctccaagatgctgaaactagcacagcagtgtctggagagggcccagtcgacggccgccaagcttgggaaaacacgcctgaagccaaccatgcctgcagctgctcccatcccccagcctgccggccgacaccgccgtgtatactccgatgaaggaggaaagctctctccttttctgccacccgagatcttccagaagcttcagggggcagagtcacaaagctgtaagaaagagctgacgccactggaggaggcctccctgcagaatcagaagctgaaggctgcgtatgaggcccgaatggcgcggctagaccccagccaggccatgcagaagacatccctgaccctctctctacagcggcagatgatggagaacctagtgattgccaaagcccgggaggagacactccagagaaagatggaggagcgccggctgcggctccaggaggccgccaacaggaggttttgcagccaagtcgccctgaccccggaggaacgggagcagcgggccctttacgccgccatcctggagtacgaacaggaccatgactggccgaagcactggaaggccaagctcaagaggaatccgggggacctgtcactcgtgaccagcctggtctcacacctgctcagcctccccgaccacccgatcgcgcagctcctgaggcggctgcagtgctccgtgtacagcgccctgtatcccgccgtgagcagagcagccgcgccagccccaggctgctgccccccgacccccaaccccggaagccgacggctgcggccctcgcagagcctccattgcatgctgtccccgcccgagcccagcgcagccccgcggccccaggacagtccccccacgcccccactccaacccggcccgtggggtctccctcacccctgggggacaccgcatctggattgccagacaaggacagctcgttcgaggacctggagcagttcctggggacgtctgagccgcagggccggggccgtggggtacagccggagccccagctgcagcagctgaagaccgcggtggaggagatccacaatgccgtagacaggctgctctcgctgacccttctggccttcgaaggcctaaacacagctgcctccaaggaccgctgcctggcctgcattgaggaaccctttttctccccgctgtggcctctgctgctggccctgtacaggagcgtgcaccgagcccgggaggctgccctgagcaggagcatggagctctacaggaatgcaccccccaccgccattggcatccccaccaagctcctcccccagaaccctgaggccaagggggccactggctacccctactgcgcggcggcccaggagctcggactgctggtcctggagagctgcccccagaagaagctggagtgcatagtgcggaccctgcggatcatctgtgtctgtgcggaagactactgccccaccccagaggccacaccccaggccggcccccgcccatcgctgcagctgccattggtgccgatgacctgctgcccatcctgtccttcgtggtgctgaggagcggcctccctcagctggtgtcggagtgcgcggccctggaggagttcatccacgaggggtacctgatcggagaggagggctactgcctcacatcactgcagagtgccctgagctacgtggagctgctgccccggggaggcctggccaagtagtacagctagagcccagggtccctgcagggcctggcctcgcctcccagggctgtctctcctacacctggagccatgggatctactgaggaccatcctggagcctcacgctgctctgcacatggtgggggcttgtccactgtggtgtgctctccagctcttcaccttcctcacctcacatctgaccctggagcttggggttggcacctctgccccgacagaatggggctgaatcagctccaggaggaaccaggccctgctctcctgtgtaggcctcagagaggccaagaagggaagctttgggcttcggtgggtgcaggctcagcgatgaacatctggctggggcagctcctggggagcatcagggaagagggggccatgagccggccagcagtggagacggcagtccagtttctctcccctctgacccctagaaggggagttgtagccccatgaactagtttcttgtctgggtcaggaacaagggccggctggggcctggggtgcagctggtgtcagggtatgctgtttgctgatgggcagggacacccctgcagggtctcgggctctgagcccaggacattccctgccccttgctcaccttggctgtgggctgtgaacattccgggaccctgggcatcttatctaggtccgtgcagcccaagggtcagccctcttgactgtcacatgctgcccccacccagcctaaaataaagagctcactgctgtgaaaaaaaaaaaaaaaaaaaaaaaaaaagaaaaaaaaaaaaaaaaaaaaaaaaaaaaaaaaaaaaaaaaaaaaaaggggggggggggcccaaaaatcccccctggggggggggcccactgttgtgcggccccgcccgagttttttgtaaagagggggtccccatgatgtggcggctgctttattaatagacacgcggtcctgcggcggtgttttaaacacgctgtgtccgctggacgcacacgggtccggctgcgtggcgtccctgtgtgagggagaccccctcttgcgtggggggcgcccacattgcgtgggacgcctctccgcag

SEQ ID NO: 290157 - DNA, 3072 bp, Homo sapiens
gcggccgcgtcccttcctgcggtccgctgctcgggcggctccagcaccagcgccggctgcgttccgggcctccggtcgcccgtccagcccctcggctaccgccgccgcctcccccgctcggcgccatggccgctgcggccggggacggcacggtgaagccgctgcagagcgccatgaagcttgccaacggggccatcgagctggacaccggcaaccggccccgggaggcatacacggaatacctgaggagcatccactatatctcccaggtgttactagaagaagtggaaaccactaaagaagctggggaaactgtgccccccgacacctccaagatgctgaaactagcacagcagtgtctggagagggcccagtcgacggccgccaagcttgggaaaacacgcctgaagccaaccatgcctgcagctgctcccatcccccagcctgccggccgacaccgccgtgtatactccgatgaaggaggaaagctctctccttttctgccacccgagatcttccagaagcttcagggggcagagtcacaaagctgtaagaaagagctgacgccactggaggaggcctccctgcagaatcagaagctgaaggctgcgtatgaggcccgaatggcgcggctagaccccagccaggccatgcagaagacatccctgaccctctctctacagcggcagatgatggagaacctagtgattgccaaagcccgggaggagacactccagagaaagatggaggagcgccggctgcggctccaggaggccgccaacaggaggttttgcagccaagtcgccctgaccccggaggaacgggagcagcgggccctttacgccgccatcctggagtacgaacaggaccatgactggccgaagcactggaaggccaagctcaagaggaatccgggggacctgtcactcgtgaccagcctggtctcacacctgctcagcctccccgaccacccgatcgcgcagctcctgaggcggctgcagtgctccgtgtacagcgccctgtatcccgccgtgagcagagcagccgcgccagccccaggctgctgccccccgacccccaaccccggaagccgacggctgcggccctcgcagagcctccattgcatgctgtccccgcccgagcccagcgcagccccgcggccccaggacagtccccccacgcccccactccaacccggcccgtggggtctccctcacccctgggggacaccgcatctggattgccagacaaggacagctcgttcgaggacctggagcagttcctggggacgtctgagccgcagggccggggccgtggggtacagccggagccccagctgcagcagctgaagaccgcggtggaggagatccacaatgccgtagacaggctgctctcgctgacccttctggccttcgaaggcctaaacacagctgcctccaaggaccgctgcctggcctgcattgaggaaccctttttctccccgctgtggcctctgctgctggccctgtacaggagcgtgcaccgagcccgggaggctgccctgagcaggagcatggagctctacaggaatgcaccccccaccgccattggcatccccaccaagctcctcccccagaaccctgaggccaagggggccactggctacccctactgcgcggcggcccaggagctcggactgctggtcctggagagctgcccccagaagaagctggagtgcatagtgcggaccctgcggatcatctgtgtctgtgcggaagactactgccccaccccagaggccacaccccaggccggcccccgcccatcgctgcagctgccattggtgccgatgacctgctgcccatcctgtccttcgtggtgctgaggagcggcctccctcagctggtgtcggagtgcgcggccctggaggagttcatccacgaggggtacctgatcggagaggagggctactgcctcacatcactgcagagtgccctgagctacgtggagctgctgccccggggaggcctggccaagtagtacagctagagcccagggtccctgcagggcctggcctcgcctcccagggctgtctctcctacacctggagccatgggatctactgaggaccatcctggagcctcacgctgctctgcacatggtgggggcttgtccactgtggtgtgctctccagctcttcaccttcctcacctcacatctgaccctggagcttggggttggcacctctgccccgacagaatggggctgaatcagctccaggaggaaccaggccctgctctcctgtgtaggcctcagagaggccaagaagggaagctttgggcttcggtgggtgcaggctcagcgatgaacatctggctggggcagctcctggggagcatcagggaagagggggccatgagccggccagcagtggagacggcagtccagtttctctcccctctgacccctagaaggggagttgtagccccatgaactagtttcttgtctgggtcaggaacaagggccggctggggcctggggtgcagctggtgtcagggtatgctgtttgctgatgggcagggacacccctgcagggtctcgggctctgagcccaggacattccctgccccttgctcaccttggctgtgggctgtgaacattccgggaccctgggcatcttatctaggtccgtgcagcccaagggtcagccctcttgactgtcacatgctgcccccacccagcctaaaataaagagctcactgctgtgaaaaaaaaaaaaaaaaaaaaaaaaaaagaaaaaaaaaaaaaaaaaaaaaaaaaaaaaaaaaaaaaaaaaaaaaaggggggggggggcccaaaaatcccccctggggggggggcccactgttgtgcggccccgcccgagttttttgtaaagagggggtccccatgatgtggcggctgctttattaatagacacgcggtcctgcggcggtgttttaaacacgctgtgtccgctggacgcacacgggtccggctgcgtggcgtccctgtgtgagggagaccccctcttgcgtggggggcgcccacattgcgtgggacgcctctccgcag

SEQ ID NO: 290158 - DNA, 3544 bp, Homo sapiens
gtggtgtggtgtggttgcgctgtggcttgtcgcgtggctggcgacttcgttgttgtttgtgctctgtgggcgtggtggtgcagctgctgcgcgtgggtcgtgcgtcttgttgctcgtggtgctgtgcttcggtggcgtcgtctgtctgtctgacggtgtctccgtcggtcgcggcgcgtggctgcggttcgttgggtcgctctccggccccttctgccgtctctcgcgccctggtgctgtctccgggagtggtccgcagtggtgtcggtgtgggtggctttgggggtggtgtcctgtgcctcccgcctgctgtggatgatgtggtcgtcagcgtggggctgtccccccggggcgctgctcgtgccgcccctcgccgccgccccgctttcccgcctccggtcagcgcgctgccgcgggggcagtgggcttgcctgccttttccgttgcctcattttatctcagcagtaagtaacagtggtagagccgactgtgaccagccttcttgtccctcccccagaagctggggaaactgtgccccccgacacctccaagatgctgaaactagcacagcagtgtctggagagggcccagtcgacggccgccaagcttggtgggtctcctgcagtaggcggctctcctggggcatcccccaagcccgcatctcctctgtgggatgtggcccaccgcttgacccctggttacccatggctggaaaacacgcctgaagccaaccatgcctgcagctgctcccatcccccagcctgccggccgacaccgccgtgtatactccgatgaaggaggaaagctctctccttttctgccacccgagatcttccagaagcttcagggggcagagtcacaaagctgtaagaactcctggcctcagagcaatccgggaggatgagagagactcctctggtgtccagacaccactgggcttcctggggtctagacagcagcttgtcacatttccagagagctgacgccactggaggaggcctccctggggacagcccctcaccgagaggaggtccctgggacgtcccggcctctccgggtgtgggacggggttgggaaccgagggcccgctcagatcccacgctcggccccttgactctgcacccagctccagagaaagatggaggagcgccggctgcggctccaggaggccgccaacaggtgggactcctgcccgcccctggggccgctgcggggagggcctggccccggcacccaccgcgtgcctttctccccaggaggttttgcagccaagtcgccctgaccccggaggaacgggagcagcgggccctttacgccgccatcctggagtacgaacaggaccatgactggccgaagcactggaaggccaagctcaagaggaatccgggggacctgtcactcgtgaccagcctggtctcacacctgctcagcctccccgaccacccgatcgcgcagctcctgaggcggctgcagtgctccgtgtacagcgccctgtatcccgccgtgagcagagcagccgcgccagccccaggctgctgccccccgacccccaaccccggaagccgacggctgcggccctcgcagagcctccattgcatgctgtccccgcccgagcccagcgcagccccgcggccccaggacagtccccccacgcccccactccaacccggcccgtggggtctccctcacccctgggggacaccgcatctggattgccagacaaggacagctcgttcgaggacctggagcagttcctggggacgtctgagccgcagggccggggccgtggggtacagccggagccccagctgcagcagctgaagaccgcggtggaggagatccacaatgccgtagacaggctgctctcgctgacccttctggccttcgaaggcctaaacacagctgcctccaaggaccgctgcctggcctgcattgaggaaccctttttctccccgctgtggcctctgctgctggccctgtacaggagcgtgcaccgagcccgggaggctgccctgagcaggagcatggagctctacaggaatgcaccccccaccgccattggcatccccaccaagctcctcccccagaaccctgaggccaagggggccactggctacccctactgcgcggcggcccaggagctcggactgctggtcctggagagctgcccccagaagaagctggagtgcatagtgcggaccctgcggatcatctgtgtctgtgcggaagactactgccccaccccagaggccacaccccaggccggcccccgcccatcgctgcagctgccattggtgccgatgacctgctgcccatcctgtccttcgtggtgctgaggagcggcctccctcagctggtgtcggagtgcgcggccctggaggagttcatccacgaggggtacctgatcggagaggagggctactgcctcacatcactgcagagtgccctgagctacgtggagctgctgccccggggaggcctggccaagtagtacagctagagcccagggtccctgcagggcctggcctcgcctcccagggctgtctctcctacacctggagccatgggatctactgaggaccatcctggagcctcacgctgctctgcacatggtgggggcttgtccactgtggtgtgctctccagctcttcaccttcctcacctcacatctgaccctggagcttggggttggcacctctgccccgacagaatggggctgaatcagctccaggaggaaccaggccctgctctcctgtgtaggcctcagagaggccaagaagggaagctttgggcttcggtgggtgcaggctcagcgatgaacatctggctggggcagctcctggggagcatcagggaagagggggccatgagccggccagcagtggagacggcagtccagtttctctcccctctgacccctagaaggggagttgtagccccatgaactagtttcttgtctgggtcaggaacaagggccggctggggcctggggtgcagctggtgtcagggtatgctgtttgctgatgggcagggacacccctgcagggtctcgggctctgagcccaggacattccctgccccttgctcaccttggctgtgggctgtgaacattccgggaccctgggcatcttatctaggtccgtgcagcccaagggtcagccctcttgactgtcacatgctgcccccacccagcctaaaataaagagctcactgctgtgaaaaaaaaaaaaaaaaaaaaaaaaaaagaaaaaaaaaaaaaaaaaaaaaaaaaaaaaaaaaaaaaaaaaaaaaaggggggggggggcccaaaaatcccccctggggggggggcccactgttgtgcggccccgcccgagttttttgtaaagagggggtccccatgatgtggcggctgctttattaatagacacgcggtcctgcggcggtgttttaaacacgctgtgtccgctggacgcacacgggtccggctgcgtggcgtccctgtgtgagggagaccccctcttgcgtggggggcgcccacattgcgtgggacgcctctccgcag

SEQ ID NO: 290159 - DNA, 2982 bp, Homo sapiens
tttccggggggagtcgggggctaaatcggggcgggatgagaaaatgggagtctatgagaagttttctgtgaagggcagcagggaggtgggtcaggcgctggggcggtgggtccaggggcgagtcacagagaggcagctcccacggcgcgcagaagggctgtgtgagcaggtccatggtcgcgcagaggtgctccatgccaagctacgggaaggcaggactttggggacacagccggtgggagatgggtgaggcgatcccctcagcacgtccttgtctctgtaaaacggccacttcccagaggcggaaaacacgcctgaagccaaccatgcctgcagctgctcccatcccccagcctgccggccgacaccgccgtgtatactccgatgaaggaggaaagctctctccttttctgccacccgagatcttccagaagcttcagggggcagagtcacaaagctgtaagaaagagctgacgccactggaggaggcctccctgcagaatcagaagctgaaggctgcgtatgaggcccgaatggcgcggctagaccccagccaggccatgcagaagacatccctgaccctctctctacagcggcagatgatggagaacctagtgattgccaaagcccgggaggagacactccagagaaagatggaggagcgccggctgcggctccaggaggccgccaacaggaggttttgcagccaagtcgccctgaccccggaggaacgggagcagcgggccctttacgccgccatcctggagtacgaacaggaccatgactggccgaagcactggaaggccaagctcaagaggaatccgggggacctgtcactcgtgaccagcctggtctcacacctgctcagcctccccgaccacccgatcgcgcagctcctgaggcggctgcagtgctccgtgtacagcgccctgtatcccgccgtgagcagagcagccgcgccagccccaggctgctgccccccgacccccaaccccggaagccgacggctgcggccctcgcagagcctccattgcatgctgtccccgcccgagcccagcgcagccccgcggccccaggacagtccccccacgcccccactccaacccggcccgtggggtctccctcacccctgggggacaccgcatctggattgccagacaaggacagctcgttcgaggacctggagcagttcctggggacgtctgagccgcagggccggggccgtggggtacagccggagccccagctgcagcagctgaagaccgcggtggaggagatccacaatgccgtagacaggctgctctcgctgacccttctggccttcgaaggcctaaacacagctgcctccaaggaccgctgcctggcctgcattgaggaaccctttttctccccgctgtggcctctgctgctggccctgtacaggagcgtgcaccgagcccgggaggctgccctgagcaggagcatggagctctacaggaatgcaccccccaccgccattggcatccccaccaagctcctcccccagaaccctgaggccaagggggccactggctacccctactgcgcggcggcccaggagctcggactgctggtcctggagagctgcccccagaagaagctggagtgcatagtgcggaccctgcggatcatctgtgtctgtgcggaagactactgccccaccccagaggccacaccccaggccggcccccgcccatcgctgcagctgccattggtgccgatgacctgctgcccatcctgtccttcgtggtgctgaggagcggcctccctcagctggtgtcggagtgcgcggccctggaggagttcatccacgaggggtacctgatcggagaggagggctactgcctcacatcactgcagagtgccctgagctacgtggagctgctgccccggggaggcctggccaagtagtacagctagagcccagggtccctgcagggcctggcctcgcctcccagggctgtctctcctacacctggagccatgggatctactgaggaccatcctggagcctcacgctgctctgcacatggtgggggcttgtccactgtggtgtgctctccagctcttcaccttcctcacctcacatctgaccctggagcttggggttggcacctctgccccgacagaatggggctgaatcagctccaggaggaaccaggccctgctctcctgtgtaggcctcagagaggccaagaagggaagctttgggcttcggtgggtgcaggctcagcgatgaacatctggctggggcagctcctggggagcatcagggaagagggggccatgagccggccagcagtggagacggcagtccagtttctctcccctctgacccctagaaggggagttgtagccccatgaactagtttcttgtctgggtcaggaacaagggccggctggggcctggggtgcagctggtgtcagggtatgctgtttgctgatgggcagggacacccctgcagggtctcgggctctgagcccaggacattccctgccccttgctcaccttggctgtgggctgtgaacattccgggaccctgggcatcttatctaggtccgtgcagcccaagggtcagccctcttgactgtcacatgctgcccccacccagcctaaaataaagagctcactgctgtgaaaaaaaaaaaaaaaaaaaaaaaaaaagaaaaaaaaaaaaaaaaaaaaaaaaaaaaaaaaaaaaaaaaaaaaaaggggggggggggcccaaaaatcccccctggggggggggcccactgttgtgcggccccgcccgagttttttgtaaagagggggtccccatgatgtggcggctgctttattaatagacacgcggtcctgcggcggtgttttaaacacgctgtgtccgctggacgcacacgggtccggctgcgtggcgtccctgtgtgagggagaccccctcttgcgtggggggcgcccacattgcgtgggacgcctctccgcag

SEQ ID NO: 290160 - DNA, 336 bp, Homo sapiens
gcggccgcgtcccttcctgcggtccgctgctcgggcggctccagcaccagcgccggctgcgttccgggcctccggtcgcccgtccagcccctcggctaccgccgccgcctcccccgctcggcgccatggccgctgcggccggggacggcacggtgaagccgctgcagagcgccatgaagcttgccaacggggccatcgagctggacaccggcaaccggccccgggtgaggcggggcgggggcggggcttggccgctgagggtggcccctggagggacccccgcccggggagggcgaggacggggccggctcgggctggagacttgggagcgggcgc

SEQ ID NO: 290161 - DNA, 2840 bp, Homo sapiens
gctaatttttgtatttttagtagagacagagtttcaccatgttggccaggctggtctcgaactcctgacctcaggtgatccgcccggccttagcctcctaaagtgctggcattagaggcgggagccactgcacctggccaaaacctgtgttttggaagggcaggcaagaaggggcagatgttgcagcccaccccagatggctcccctcctctttctcctcacctcctggcctcagagcaatccgggaggatgagagagactcctctggtgtccagacaccactgggcttcctggggtctagacagcagcttgtcacatttccagagagctgacgccactggaggaggcctccctgcagaatcagaagctgaaggctgcgtatgaggcccgaatggcgcggctagaccccagccaggccatgcagaagacatccctgaccctctctctacagcggcagatgatggagaacctagtgattgccaaagcccgggaggagacactccagagaaagatggaggagcgccggctgcggctccaggaggccgccaacaggaggttttgcagccaagtcgccctgaccccggaggaacgggagcagcgggccctttacgccgccatcctggagtacgaacaggaccatgactggccgaagcactggaaggccaagctcaagaggaatccgggggacctgtcactcgtgaccagcctggtctcacacctgctcagcctccccgaccacccgatcgcgcagctcctgaggcggctgcagtgctccgtgtacagcgccctgtatcccgccgtgagcagagcagccgcgccagccccaggctgctgccccccgacccccaaccccggaagccgacggctgcggccctcgcagagcctccattgcatgctgtccccgcccgagcccagcgcagccccgcggccccaggacagtccccccacgcccccactccaacccggcccgtggggtctccctcacccctgggggacaccgcatctggattgccagacaaggacagctcgttcgaggacctggagcagttcctggggacgtctgagccgcagggccggggccgtggggtacagccggagccccagctgcagcagctgaagaccgcggtggaggagatccacaatgccgtagacaggctgctctcgctgacccttctggccttcgaaggcctaaacacagctgcctccaaggaccgctgcctggcctgcattgaggaaccctttttctccccgctgtggcctctgctgctggccctgtacaggagcgtgcaccgagcccgggaggctgccctgagcaggagcatggagctctacaggaatgcaccccccaccgccattggcatccccaccaagctcctcccccagaaccctgaggccaagggggccactggctacccctactgcgcggcggcccaggagctcggactgctggtcctggagagctgcccccagaagaagctggagtgcatagtgcggaccctgcggatcatctgtgtctgtgcggaagactactgccccaccccagaggccacaccccaggccggcccccgcccatcgctgcagctgccattggtgccgatgacctgctgcccatcctgtccttcgtggtgctgaggagcggcctccctcagctggtgtcggagtgcgcggccctggaggagttcatccacgaggggtacctgatcggagaggagggctactgcctcacatcactgcagagtgccctgagctacgtggagctgctgccccggggaggcctggccaagtagtacagctagagcccagggtccctgcagggcctggcctcgcctcccagggctgtctctcctacacctggagccatgggatctactgaggaccatcctggagcctcacgctgctctgcacatggtgggggcttgtccactgtggtgtgctctccagctcttcaccttcctcacctcacatctgaccctggagcttggggttggcacctctgccccgacagaatggggctgaatcagctccaggaggaaccaggccctgctctcctgtgtaggcctcagagaggccaagaagggaagctttgggcttcggtgggtgcaggctcagcgatgaacatctggctggggcagctcctggggagcatcagggaagagggggccatgagccggccagcagtggagacggcagtccagtttctctcccctctgacccctagaaggggagttgtagccccatgaactagtttcttgtctgggtcaggaacaagggccggctggggcctggggtgcagctggtgtcagggtatgctgtttgctgatgggcagggacacccctgcagggtctcgggctctgagcccaggacattccctgccccttgctcaccttggctgtgggctgtgaacattccgggaccctgggcatcttatctaggtccgtgcagcccaagggtcagccctcttgactgtcacatgctgcccccacccagcctaaaataaagagctcactgctgtgaaaaaaaaaaaaaaaaaaaaaaaaaaagaaaaaaaaaaaaaaaaaaaaaaaaaaaaaaaaaaaaaaaaaaaaaaggggggggggggcccaaaaatcccccctggggggggggcccactgttgtgcggccccgcccgagttttttgtaaagagggggtccccatgatgtggcggctgctttattaatagacacgcggtcctgcggcggtgttttaaacacgctgtgtccgctggacgcacacgggtccggctgcgtggcgtccctgtgtgagggagaccccctcttgcgtggggggcgcccacattgcgtgggacgcctctccgcag

SEQ ID NO: 290162 - DNA, 2740 bp, Homo sapiens
gcggccgcgtcccttcctgcggtccgctgctcgggcggctccagcaccagcgccggctgcgttccgggcctccggtcgcccgtccagcccctcggctaccgccgccgcctcccccgctcggcgccatggccgctgcggccggggacggcacggtgaagccgctgcagagcgccatgaagcttgccaacggggccatcgagctggacaccggcaaccggccccggagagctgacgccactggaggaggcctccctgcagaatcagaagctgaaggctgcgtatgaggcccgaatggcgcggctagaccccagccaggccatgcagaagacatccctgaccctctctctacagcggcagatgatggagaacctagtgattgccaaagcccgggaggagacactccagagaaagatggaggagcgccggctgcggctccaggaggccgccaacaggaggttttgcagccaagtcgccctgaccccggaggaacgggagcagcgggccctttacgccgccatcctggagtacgaacaggaccatgactggccgaagcactggaaggccaagctcaagaggaatccgggggacctgtcactcgtgaccagcctggtctcacacctgctcagcctccccgaccacccgatcgcgcagctcctgaggcggctgcagtgctccgtgtacagcgccctgtatcccgccgtgagcagagcagccgcgccagccccaggctgctgccccccgacccccaaccccggaagccgacggctgcggccctcgcagagcctccattgcatgctgtccccgcccgagcccagcgcagccccgcggccccaggacagtccccccacgcccccactccaacccggcccgtggggtctccctcacccctgggggacaccgcatctggattgccagacaaggacagctcgttcgaggacctggagcagttcctggggacgtctgagccgcagggccggggccgtggggtacagccggagccccagctgcagcagctgaagaccgcggtggaggagatccacaatgccgtagacaggctgctctcgctgacccttctggccttcgaaggcctaaacacagctgcctccaaggaccgctgcctggcctgcattgaggaaccctttttctccccgctgtggcctctgctgctggccctgtacaggagcgtgcaccgagcccgggaggctgccctgagcaggagcatggagctctacaggaatgcaccccccaccgccattggcatccccaccaagctcctcccccagaaccctgaggccaagggggccactggctacccctactgcgcggcggcccaggagctcggactgctggtcctggagagctgcccccagaagaagctggagtgcatagtgcggaccctgcggatcatctgtgtctgtgcggaagactactgccccaccccagaggccacaccccaggccggcccccgcccatcgctgcagctgccattggtgccgatgacctgctgcccatcctgtccttcgtggtgctgaggagcggcctccctcagctggtgtcggagtgcgcggccctggaggagttcatccacgaggggtacctgatcggagaggagggctactgcctcacatcactgcagagtgccctgagctacgtggagctgctgccccggggaggcctggccaagtagtacagctagagcccagggtccctgcagggcctggcctcgcctcccagggctgtctctcctacacctggagccatgggatctactgaggaccatcctggagcctcacgctgctctgcacatggtgggggcttgtccactgtggtgtgctctccagctcttcaccttcctcacctcacatctgaccctggagcttggggttggcacctctgccccgacagaatggggctgaatcagctccaggaggaaccaggccctgctctcctgtgtaggcctcagagaggccaagaagggaagctttgggcttcggtgggtgcaggctcagcgatgaacatctggctggggcagctcctggggagcatcagggaagagggggccatgagccggccagcagtggagacggcagtccagtttctctcccctctgacccctagaaggggagttgtagccccatgaactagtttcttgtctgggtcaggaacaagggccggctggggcctggggtgcagctggtgtcagggtatgctgtttgctgatgggcagggacacccctgcagggtctcgggctctgagcccaggacattccctgccccttgctcaccttggctgtgggctgtgaacattccgggaccctgggcatcttatctaggtccgtgcagcccaagggtcagccctcttgactgtcacatgctgcccccacccagcctaaaataaagagctcactgctgtgaaaaaaaaaaaaaaaaaaaaaaaaaaagaaaaaaaaaaaaaaaaaaaaaaaaaaaaaaaaaaaaaaaaaaaaaaggggggggggggcccaaaaatcccccctggggggggggcccactgttgtgcggccccgcccgagttttttgtaaagagggggtccccatgatgtggcggctgctttattaatagacacgcggtcctgcggcggtgttttaaacacgctgtgtccgctggacgcacacgggtccggctgcgtggcgtccctgtgtgagggagaccccctcttgcgtggggggcgcccacattgcgtgggacgcctctccgcag

SEQ ID NO: 290163 - DNA, 818 bp, Homo sapiens
ctgtgggatccaagaacagaagaaataatgtcccaccaatcccagggcaacaagctgaggttagataaactccaggaccagggaccaaagaaacttcattaattgtcatttccaaagatctaaaatcggtcatagactggagcagaactggtacggtgaggccaaatcagtataacacccaaaaaacccacttcctgtgctatcgtgccaccctcttttcattttgttccccagaggcctagcaaaaaacagttaccaaaatgcctcttgaaagagtaggtaataacgtcctagaagtccaggtggtagctaacttcttgatttgtatatcccagaaggataccagggaaagtgaaaggagggaggcggcgggggcgaaacggggaaagccagagagtgcaaacaaaacagaacaggcaccaaggacaagcgggcaaccaggagagaacgaatgatgagagaacctcactaagcagctactcctgtactgagctcaggaggctggcttcaaggtgaggactcagactccagactgggactccaattgcctgggtttgacagaaccagggaattggtctcaggagccctcaaaaaaaaaaaaaaagagccaagttagaactgggggacagacaaatggggtggcaggacatgtgtgtacctatggtggctgggctcctttaaaagcctttgctctccactgggtccaccctggggcagggcttagtactcagatacacacccaagcggctctacctcaaagcattccagaaaaatgggaattttactgaaaggcttcctggaaaggagaacttatgcca

SEQ ID NO: 290164 - DNA, 1078 bp, Homo sapiens
attgggttgattaggacatgaagcatttattgtgtacaggtatccagataaatggaacttcatcctttaaattttactactgtgttcagttacattattttaaccttggatgaaaaaggtttctcaaacaaatcattctgcttcctacattcttaactgatatcttcgaatcttttattactgagtctagctcgttcttaaaaataccaatgcttggtgatgtctgtgacaagatgatatcccaggaccaactgtgaggtatagcagatcatacccagaacacatcatcccagactactaccttttgggagttcaagttctgatccctcctctccatcagcctttcatgtagctggtagttaccagctggcctctacttgaaattctcctagttaatactcttcacatactgagacatgggatataaagattaccaattttgttgatattgtgtctcagagtaagagggaaaaggatctaagtaaggtgtgcagatactgtctctttacacacagaagtacaatgcttgcatcttggtacacagactttgtgataggtttttttccttgtcatgagcctttttgccatgaaggagccagtatgggaaagtggttaagaacatgagatcttaagtcaaattcctggggtctgaatcccgactctccatcattagttgtgtgacacatgcaaaggacttatcactgagaatggcacatgagtaggccagcaggcactcagggaggataagccacacacacatatacatacgtgctttttttcttctatctggctgcattctcaagagctggagttttgcagttttaaaacctctaaatacttttaggattcaaactgccattttctgcatagtttcttgtataacctttcctgttcccaaatctcagttctctatgatcctccacctaccaaatgcctccatggtagccacacagaaattctggagatgaaatgatactttcttgcccttttaaaacccactgccatggtctgaaagtttatggtcccctcaaaattcatatgttaaaatcctaattcccagggagatggtattagaagg

SEQ ID NO: 290165 - DNA, 616 bp, Homo sapiens
tacattatgaaaaactgaacacatttattcaatttccaacaatcaccaattagaaatgggcttaaatgacaatacaaagaaagctataagcaaacattttgacagggggatgtgaagaattagaacaaactgcttaggaaactacagtgtgtgcctgtgtttgtgtcgtgtgtgtgtgtgtgtgtgtgtgtgtgtgtgtctgtgatgttatcgttcttttcccctccttctaaaattaggtaaaacatttcctaaagatacagagcaaggtaagatttcttcttcagggtaatttccagcagtgggttctcgggggttgatgaggaaaatcttagggaggaaaatgcacttcattttatttttaattttaggtattgtagatgtacctccataattaagaagttttttcatctaaatacttttttttcctgtataaaaggtcctttatgtaatgcataccttttataatacgatacatttagagttcctttcatccatatataagaaaccaatttgtaaatattaagtctcagggttactatgcattggagtaagttatcaggggaagttttagaatatttttccctggagagctttaaaacaaggtacatttttc

SEQ ID NO: 290166 - DNA, 783 bp, Homo sapiens
tacattatgaaaaactgaacacatttattcaatttccaacaatcaccaattagaaatgggcttaaatgacaatacaaagaaagctataagcaaacattttgacagggggatgtgaagaattagaacaaactgcttaggaaactacagtgtgtgcctgtgtttgtgtcgtgtgtgtgtgtgtgtgtgtgtgtgtgtgcagatactgtctctttacacacagaagtacaatgcttgcatcttggtacacagactttgtgataggtttttttccttgtcatgagcctttttgccatgaaggagccagtatgggaaagtggttaagaacatgagatcttaagtcaaattcctggggtctgaatcccgactctccatcattagttgtgtgacacatgcaaaggacttatcactgagaatggcacatgagtaggccagcaggcactcagggaggataagccacacacacatatacatacgtgctttttttcttctatctggctgcattctcaagagctggagttttgcagttttaaaacctctaaatacttttaggattcaaactgccattttctgcatagtttcttgtataacctttcctgttcccaaatctcagttctctatgatcctccacctaccaaatgcctccatggtagccacacagaaattctggagatgaaatgatactttcttgcccttttaaaacccactgccatggtctgaaagtttatggtcccctcaaaattcatatgttaaaatcctaattcccagggagatggtattagaagg

SEQ ID NO: 290167 - DNA, 832 bp, Homo sapiens
gcaggaaatgacgaaggcagagggcgtccaggtccgctcggtaaccgtttcccgcgcgcccggccccgactccggggtaaagagccccggagcggagcagcgctggccgcgtgccgcctccggagccggcagcccccatggctgggggttatggagtgatgggtgacgatggttctattgattatactgttcacgaagcctggaatgaagccaccaatgtttacttgatagttatccttgttagcttcggtctcttcatgtatgccaaaaggaacaaaaggagaattatgaggatattcagtgtgccacctacagaggaaactttgtcagagcccaacttttatgacacgataagcaagattcgtttaagacaacaactggaaatgtattccatttcaagaaagtacgactatcagcagccacaaaaccaagctgacagtgtgcaactctcattggaatgaaacctcagaaaaagagcaacagaagtaattgtttcaagctcctgattctttctactaaatcatgaacagctttaaaaacatttctgtctgcataaaattattttacttgtaacttttccccaattgttctgtgcattgttttgcctttttaaattacatctccaagtggctcaaaaggccttgacacagggaacctgcacatatccaggatatgtgtaaccagcgatggtgacttgaccttgccaagacctgtgattccttcaggatacaatcagtgagaaataaaaacacatcttgggaagtgggaatcctggagtttatgccatttgcaatattaaaaaataaaaatgcaagttattatttcaataata

SEQ ID NO: 290168 - DNA, 1482 bp, Homo sapiens
gcaggaaatgacgaaggcagagggcgtccaggtccgctcggtaaccgtttcccgcgcgcccggccccgactccggggtaaagagccccggagcggagcagcgctggccgcgtgccgcctccggagccggcagcccccatggctgggggttatggagtgatgggtgacgatggttctattgattatactgttcacgaagcctggaatgaagccaccaatgtttacttgatagttatccttgttagcttcggtctcttcatgtatgccaaaaggaacaaaaggagaattatgaggatattcagtgtgccacctacagaggaaactttgtcagagcccaacttttatgacacgataagcaagattcgtttaagacaacaactggaaatgtattccatttcaagaaagtacgactatcagcagccacaaaaccaagctgacagtgtgcaactctcattggaatgaaacctcagaaaaagagcaacagaagtaattgtttcaagctcctgattctttctactaaatcatgaacagctttaaaaacatttctgtctgcataaaattattttacttgtaacttttccccaattgttctgtgcattgttttgcctttttaaattacatctccaagtggctcaaaaggccttgacacagggaacctgcacatatccaggatatgtgtaaccagcgatggtgacttgaccttgccaagacctgtgattccttcaggatacaatcagtgagaaataaaaacacatcttgggaagtgggaatcctggagtttatgccatttgcaatattaaaaaataaaaatgcaagttattatttcaataataacttcctgtttcattgtattctgtgagtgataagtgtcagatcaataacagattaatttgttgttaacagctcttttttttttttttttttttggagacagagtcttgttgcccagactgggagtgcagtgggcccaattctctggctcactggaaactttccaccttcccggggtttaaacgattcctcctgccacagcctcctgaatattctgttaacagctctttaattaatgatctttgcttcttcagaacttgtatggtagaccgtcttttctacagcatgatgcatactcctgtgctaattttagaagctttctgtaactagatttttcctcattatgctcccaggagcgagtttgtttttatccccgtttcatttctaccaggtagctctactttaggccatactggggacctgctgttgaataaatggatgcctgtgtattggtgttggcaactctgcggtagtagtgctaccactggcgagcagtattactgccactggtgaatgttgctgtctggttactgctgcatttttggcatgctaagctttcctaaagagcctcatatcttttcccatgctgtactgtacaatgaaatgtttttacctaatttttcatgtttatttaaataaaagctgactgggt

SEQ ID NO: 290169 - DNA, 1400 bp, Homo sapiens
agtcccaccccaagcgcgcacagcggagcaggaggcgcccggcactcgcagccccatggctgggggttatggagtgatgggtgacgatggttctattgattatactgttcacgaagcctggaatgaagccaccaatgtttacttgatagttatccttgttagcttcggtctcttcatgtatgccaaaaggaacaaaaggagaattatgaggatattcagtgtgccacctacagaggaaactttgtcagagcccaacttttatgacacgataagcaagattcgtttaagacaacaactggaaatgtattccatttcaagaaagtacgactatcagcagccacaaaaccaagctgacagtgtgcaactctcattggaatgaaacctcagaaaaagagcaacagaagtaattgtttcaagctcctgattctttctactaaatcatgaacagctttaaaaacatttctgtctgcataaaattattttacttgtaacttttccccaattgttctgtgcattgttttgcctttttaaattacatctccaagtggctcaaaaggccttgacacagggaacctgcacatatccaggatatgtgtaaccagcgatggtgacttgaccttgccaagacctgtgattccttcaggatacaatcagtgagaaataaaaacacatcttgggaagtgggaatcctggagtttatgccatttgcaatattaaaaaataaaaatgcaagttattatttcaataataacttcctgtttcattgtattctgtgagtgataagtgtcagatcaataacagattaatttgttgttaacagctcttttttttttttttttttttggagacagagtcttgttgcccagactgggagtgcagtgggcccaattctctggctcactggaaactttccaccttcccggggtttaaacgattcctcctgccacagcctcctgaatattctgttaacagctctttaattaatgatctttgcttcttcagaacttgtatggtagaccgtcttttctacagcatgatgcatactcctgtgctaattttagaagctttctgtaactagatttttcctcattatgctcccaggagcgagtttgtttttatccccgtttcatttctaccaggtagctctactttaggccatactggggacctgctgttgaataaatggatgcctgtgtattggtgttggcaactctgcggtagtagtgctaccactggcgagcagtattactgccactggtgaatgttgctgtctggttactgctgcatttttggcatgctaagctttcctaaagagcctcatatcttttcccatgctgtactgtacaatgaaatgtttttacctaatttttcatgtttatttaaataaaagctgactgggt

SEQ ID NO: 290170 - DNA, 1282 bp, Homo sapiens
gcaggaaatgacgaaggcagagggcgtccaggtccgctcggtaaccgtttcccgcgcgcccggccccgactccggggtaaagagccccggagcggagcagcgctggccgcgtgccgcctccggagccggcagcgtgagtggccccgcgtccccgcttctcccggtccccggcggggccgcgtcacccggccccgccccgcgccgcccgccccgccccggacgcgggggtaaggggggtggccgcccgcctgccctcggtcccgtgcggtccccgaaactccgagcacctgcccggtcccggcgcggagcccctcggcgtcgcgtggagctgcgagtcgcccgcttccggaagcgcacacgggccagttgcggcggcccatctgccggggcggcgggggctcggcgggagggttgaggctgaatcacgcgcagcctgcgggcggcggaaacgtccctagagcctcgccgccctgggacccgggctgcttcctgggagaggattacattttctccctgctccacttgactttcttccggaaggagcaggtctcgcaggatcggggccaagactggaagagttcagccccatggctgggggttatggagtgatgggtgacgatggttctattgattatactgttcacgaagcctggaatgaagccaccaatgtttacttgatagttatccttgttagcttcggtctcttcatgtatgccaaaaggaacaaaaggagaattatgaggatattcagtgtgccacctacagaggaaactttgtcagagcccaacttttatgacacgataagcaagattcgtttaagacaacaactggaaatgtattccatttcaagaaagtacgactatcagcagccacaaaaccaagctgacagtgtgcaactctcattggaatgaaacctcagaaaaagagcaacagaagtaattgtttcaagctcctgattctttctactaaatcatgaacagctttaaaaacatttctgtctgcataaaattattttacttgtaacttttccccaattgttctgtgcattgttttgcctttttaaattacatctccaagtggctcaaaaggccttgacacagggaacctgcacatatccaggatatgtgtaaccagcgatggtgacttgaccttgccaagacctgtgattccttcaggatacaatcagtgagaaataaaaacacatcttgggaagtgggaatcctggagtttatgccatttgcaatattaaaaaataaaaatgcaagttattatttcaataata

SEQ ID NO: 290171 - DNA, 686 bp, Homo sapiens
ttgagctcgtaccctcgcgaacgtgtatcccatggatatactgttcacgaagcctggaatgaagccaccaatgtttacttgatagttatccttgttagcttcggtctcttcatgtatgccaaaaggaacaaaaggagaattatgaggatattcagtgtgccacctacagaggaaactttgtcagagcccaacttttatgacacgataagcaagattcgtttaagacaacaactggaaatgtattccatttcaagaaagtacgactatcagcagccacaaaaccaagctgacagtgtgcaactctcattggaatgaaacctcagaaaaagagcaacagaagtaattgtttcaagctcctgattctttctactaaatcatgaacagctttaaaaacatttctgtctgcataaaattattttacttgtaacttttccccaattgttctgtgcattgttttgcctttttaaattacatctccaagtggctcaaaaggccttgacacagggaacctgcacatatccaggatatgtgtaaccagcgatggtgacttgaccttgccaagacctgtgattccttcaggatacaatcagtgagaaataaaaacacatcttgggaagtgggaatcctggagtttatgccatttgcaatattaaaaaataaaaatgcaagttattatttcaataata

SEQ ID NO: 290172 - DNA, 733 bp, Homo sapiens
tgcctctatttaaccacccatttatgcccctcctccccatggctgggggttatggagtgatgggtgacgatggttctattgattatactgttcacgaagcctggaatgaagccaccaatgtttacttgatagttatccttgttagcttcggtctcttcatgtatgccaaaaggaacaaaaggagaattatgaggatattcagtgtgccacctacagaggaaactttgtcagagcccaacttttatgacacgataagcaagattcgtttaagacaacaactggaaatgtattccatttcaagaaagtacgactatcagcagccacaaaaccaagctgacagtgtgcaactctcattggaatgaaacctcagaaaaagagcaacagaagtaattgtttcaagctcctgattctttctactaaatcatgaacagctttaaaaacatttctgtctgcataaaattattttacttgtaacttttccccaattgttctgtgcattgttttgcctttttaaattacatctccaagtggctcaaaaggccttgacacagggaacctgcacatatccaggatatgtgtaaccagcgatggtgacttgaccttgccaagacctgtgattccttcaggatacaatcagtgagaaataaaaacacatcttgggaagtgggaatcctggagtttatgccatttgcaatattaaaaaataaaaatgcaagttattatttcaataata
